United States Patent Application Publication US 2026/0103690 A1 - sequence listing, part 38

SEQ ID NO: 177902 - protein, 450 aa, unidentified
MPFHGGLDWGGASHAICVINQTGQVVVRIEVRHDADGLADMLARLKRIAPPAELPIAIERPSGLIVEVLIAAGYPVIPIHPNVVKACRPRYRAAGGKSDPGDAFMLADILRTDGHRFRPLMPASDKIKALRALVRGRDDLVAQRVALANQLRSLLEGFWPGAAAIFAAIDSPIALAFIGRYPTPNSASRLGEKRLASFLAQHAYPGCRSGAELLARLRAAPVGLASDAEAEAKGDIARVLAVMLERLVAEIAKLSLRIERAVAQLPDGRIVMSFPRAGRINAAQILAELGDVRERFPTEDQLAAEAGVCPVTHASGKSRGVVFRWACNKNLRAAVTCFADNSRHASAWADAIYTKARGRGCKHAHAVRILARAWVRVLWRAWQDGEPSRLTQQTFLGSAQHPFLRPGHKPHLRGGASGVKDRRRRPATSPAQSVLEAGRDDTQHSKNRGR

SEQ ID NO: 177903 - protein, 389 aa, unidentified
MLLDHPSNGPTAIRTQFGAIFVSLELSRSNWLITSLSPGKGEKMSKHSVTAGDVAGLMRLCEELKRKAEVRTGQSYPIITIQEAGLDGFWLHRVLQQEGIESHVVGPASIATPRRRRRAKTDRLDGETLLRALLAYKRGEPRVCAMVVAPSPEEEDRRRLCRERRTLIEERITHVNRIKGLLFAQGISGYAPMRRDRRARLEALRTGDGRELPSHLRAQIDRELDRIELLLGQIKAVEAAQDALLAAARKPASEEAAPDPVTMLLALKGMGANFAAVLWSEAFYRQFANRRQVAAYAGLAATPWQSGGIRHEQGVSKAGNPRLRTTMIQLAWLWIRHQPQSALTRWFKERSQQGRKRAIVALARKLLVALWKYVTQGVVIEGAVMKPAA

SEQ ID NO: 177904 - protein, 349 aa, unidentified
MRIAFDSHKRYTFCSVADDRGKVITEDRIEHERGALRRYLGQFPAGTGVAVEAMGSWYWIVDEIEAAGMEPRLVPARKAKLMLGCVNKTDRLDARGLNVLARAGTLPTVWIPPGELRDQRDLARTRMTLRATQTRLKNRIHAALGRYALGVTGVSDLFSQGCRRPLQGQIQQLPEQTRYTTLAQLTYVDQLEGDIVRLDERIQTVFARTEALSLVQTLPGIGPVLGVVVTLEVGDVTRFPSAAQYASYAGTTPRVHASGGRVRYGPLRSDINHYLKWAYCEAANVICRFRENWSQRHVVQLYERLCQRKGHAKAVGAVARHLAEATWWILTKEEAYREPAVRLRTSTGV

SEQ ID NO: 177905 - protein, 429 aa, unidentified
MNCTQNKKIEQVKETTMIVGIDVGSEKHYFRAFNWRGIELTRKPVLFSNSMEGFNSFYNTIVELMQENKLEEAMVGIEPTGHYWFDLGQFMGGKNIKFVMVNPHHVHKTKELDDNSPSKNDRKDPRIIAGLVKDGRYFYSYMPTGVYAELRNASNRRFVLVEEQTRTKNRLQKWIAVYFPEYKGIYTHIDAKGGLMVLKQAPTPEEITKLGEEGIIKIWKDAKLRGNGHKKAMKILNAAMRSIGLKAGLTEARMEMQDLIEDYELQTKRLERVNDLIKELCRQVRYADKLLEIKGIGITTVAGFIAEVGDITRFDSTKELQKLAGLELVADSSGKHNGRTKISKRGRKRLRYLLFEAAISVVGKNEEFKEIHRYYTTREKNPLKKMQSLIAVACKLIRVFHVILTKGVSYDASKMLEDIRHPKEQLKAA

SEQ ID NO: 177906 - protein, 317 aa, unidentified
MPASVFVGIDVSKRQLDVAIRPGGRCSVSNDETGIIQLLEQVKAVHPTLVVLEATGGYEIPVTGALAAAGLPVVVVNPRHVRDFAKATGTLAKTDALDAQTLAHFAEVIHPAQRPLPDEQTQALAALVARRRQLVDMLTAEKNRLRQASTQIRPSLNAHITWLEQAIQEADRDLAKSIRQSLLWREKDELLRSVPGVGPVFSTTMLATVPELGTLTHKQISALVGVAPFSRDSGTLRGKRMIWGGRAQARAVLYMGTIVATRFNPVIRAFYQRLCAAGKAKKVALVACMRKLLTIVNAMLKHRRPWSHAVNTAGAGA

SEQ ID NO: 177907 - protein, 343 aa, unidentified
MDHFAGLDVSVKETSVCIVDDAGKIVREVKVASEPGVLLAVLTHAAYRFKRIGLEAGPLSQWLFSGLAEAELPVICVETRHMRAVLQAQINKTDRNDARGIAQMMRVGLYRPVHVKTLRSQKLRMLLTHRKLLQSKAIAVENDLRGTLRNFGLKVGMVGATKFEGRIKELIENLPDLAVLVEPLLVVRRVLREQIGVLHRRLLAVVRNDEVCRRLMTTPGVGPVVALTYRATVDVPARFRKSKSVGAVFGLTCSKYQSGEIDRSGRISRCGDEMMRVMLYEAAQSMLRSKKWSWLKAWAMQIARRRGMKKAIVALARRLAVILHRIWVDGTEFRWTREVVTAV

SEQ ID NO: 177908 - protein, 321 aa, unidentified
MNKFIQTSADQTFVGIDVAKSALAVFVDSTNDHLECSNQTKDLRKLARRLKKLDPTLIVLEATGGYETPATEIFSEFGLPFAVVFPKRVRQFALGLGIIAKTDDIDAQTIAYYGRIADIQAKPLPSDELRRLNALTTRRTQLIEMRIAEQNRLDVSHPEMQKNIKKHLRWLESQIIAIEGEIDASIKEDQALREKDDLLQSVPGVGTVLSSTLLTQLPELGILSNKQISALVGVAPFPRESGKWKGKRFCQGGRNSIRKVLYMATISASRFNPIIKQFYEHLLERGKLKKVALIACSRKLITILNAMVRNNSSWNPKFESI

SEQ ID NO: 177909 - protein, 347 aa, unidentified
MDKPRYFVGIDVASATFTSAVGKMSEKWQIVVRPAQFANDYDSFPKYLSWLQAHEVKPDNSVICMEATGVYNETLAHFLVANQYTVAIEPPLKVKRAFHPEGHKSDPVDSCQISEYAYRFWDQLSAWAPRHELLEQIKTLLTTREQFVVEKAGHQNSLTALKRKAIHTPLAEQIHEKAISELKGHIHQLEEEIRRLIEQDPDYRDTVALLISIPGVGLLLAAHMLVAIQSAPLPLSPKFLAAFIGICPYDDSSGTSLRHTPTSRHYGPPGLRKLLFLAALSICVHHPQFRTYFLRKVQEGKPKRLVINNIANKLLKVMVAVVRTKTVFIENYRSVNPGLLKMALTKS

SEQ ID NO: 177910 - protein, 311 aa, unidentified
MHVSKVYCGADVSKSWIDLRLESLVWRVANTAAGHAELLARLAPWAGRVHVICEATGGLERLLCAALHQAQVPVSVLNPRWVRDFARSQGLLEKTDRIDAGVLALYGERLQPRPTAPTPQAQQKLAAFCAQREHLVSCRAVEKTRLQQVSERWLRAQIERTIGHFSREIEKLEAQLETLIAADAALQERVERVDQAAGFTRLGAARLLAVLPELGTLSRRQIAKLAGLAPLNHDSGALRGQRHIAGGRAPVRRALYMAALTALTHNPILHAFHQRLLAQHKPGKVALTAVMRKLLTLLNAALKNPKIILAH

SEQ ID NO: 177911 - protein, 319 aa, unidentified
MHSLTQGTQFVGIDVSARRLDVYLHPNDDSFTVTHDRAGMWELVSRLSAFESSLIVLEPTGGFERDVADLLAGTGFDVAIVNARQIRDYAKATGRLAKTDRLDSEVIARFAEAIRPRKTHRTDRKRSSLSSLVTRRRQLVEMIKAEGYRLRRVKEAKIRRRLRSHLTWLKREQALLETDLQAAIDKHPIWSKLAQLLTSVPGVGKVVASTLIADLPELGQLDRRSLASLVGVAPFNRDSGAMRGKRTVWGGRADVRSTLYMATLVAIQHNPVFTAFNDRLRKAGKPPKVAITACMRKLIVTLNAMVRDNRPWQELQQCN

SEQ ID NO: 177912 - protein, 476 aa, unidentified
MKIKNIYRNNNQILKETLSMYKPKDILYVPIEIGKFNHKAGIVNFFGDVIINPFEFPYNKHGLDFFLKKLQSAMKISSAKKIFIGCESTGHYHLNLVYHLKQLNLPVESINPRDTSRENPNKNAKSDIIDLNAIARCLISNKGGRQVIPEGIYYNLQRATRTRRKFVQRETSSKNTITSLVDRIFPGLWDKDNSIFSDKWGKASLLLLQHYPHPHQIIRLGEKRLTQFLRKHNTKLGEETSHKIISAAKNCLTKPQEELKMDIFALNAHIKVLLIYQEIIPQLQQEIASLLIQTPGIYLLSVDGISLIYASEFTGEVGDITRFAYAQQIISFAGSSSRKFSSAEYQAENLPITRFGSAFLRTTLNQIALSLNAWCDPFHHYYTKKALEKKDKPGIARIATGNKFVKLAFALMKKEQLYRPKGLLLDEKSYYLDVWKKILTKLDGFDFSQVPPETNYLLKIKKQLQQQYGLRLDFNL

SEQ ID NO: 177913 - protein, 343 aa, unidentified
MQGVTTIGLDIAKSVFQVHGVDALGTVVIRRQLKRRYVLAFFEKLSPCLVGIEACASSHHWSRELKALGHSVRLMPPAYVKPYVKRQKNDAADAEAICEAVSRANMRFVATKTPEQQSCLMLHRTRHLFIRQQTAVINAIRAHLAEFGVVAPVGRRGVEALLEVVADSDDERVPEVARACVGALGAQLRMLKAQILAFDRQIMAWHRSNETSKRLDEIPGVGPALATALVASVADPKAFRSGRNFSAWVGLVPKQHSSGGKDRLGSISKQGDRYLRSLFTAGALAVIRYAKIHGTKHRPWLTALLARRPTKVAAIALANKIARMAWAMMAKGERYKEPAALAA

SEQ ID NO: 177914 - protein, 409 aa, unidentified
MEVLHPRCAGLDVHKKQVTANLRVAEGRKVRKELREYGTDTASLLQLRDWLESEGVTHVAMEATGAYWKPVWHVLEDSFELVLANARDVKNVPGRKSDVKDADWISDLLAHGLIRSSFVPPEPIMELRDLTRTRKQLVRERGRHVQRIQKVLEDANIKLSSVVSDVTGLSGRKILVALIEGESDPDRLAELGSALLKASKDDLRAALHGFVREHHRFMLRLHLDQVNALDGAIQDVEARTEKCLDPFRSVVEHLDSIPGVSEVTAAVIVAEIGIDMNRFPTEDDLVSWAGLCPGENESAGKHRSRKLKKGGQWLKTTLVQAAWAAVKNKDSYFHAKFVRIKRRQGPKRAIVAVAASMLTAAYYMIQRDEDFRDIGAGYFDRFDRHKLAQRLIRRLHELGLDVDVQPRAA

SEQ ID NO: 177915 - protein, 343 aa, unidentified
MTEVSTIGLDLAKNVFQVHGVDVSGETVIRRQLRRRRVLPFFRKQPACLVGIEACATSHYWAREIGALGHEVRIMPANYVKPYVKRNKNDAADAEAICEAVTRPSMRFVAVKTAEQQSVLMDHRTRELLVRQRTMLVNAIRAHMAEFGVIARVGLPQVKELLAVIAEPGDERIPPLARTCLEGLARQLLSLEREITTTEQRIHAWHRANEVSQRLATIPGIGPITASALAASIADPSVFRSGRELAAWIGLVPRQTSTGGKQRLGRISKAGDHYLRWLLVAGAMTVIRHGRRTNFEKNPWLGDLVARKPTKLAAVALANKNARTAWALLANGGTCRQPAVTTA

SEQ ID NO: 177916 - protein, 420 aa, unidentified
MIAVDPHKASNTAAVLDPVSKTLVESARFANTADGYAQLTAFAARWAQRRWAVEGCHGAGRSLAQRLVADGEMVLDVPAKLAARVRVYSRGHGRKTGKHDAVSVGLAALDGAGVLPVTSDGALVSLRLLCDRREELTAQRTQAVCRLHRLLAELTPGGMRRELSANKAQALLARIRPADDVGRVRMHIARDHLADIRALDARIKYIGTQIAALVTASGTGLTGLSGIGPVIAGRLLAEVGDVARFATKDAFASYNGTAPIDVSSGDQIRHRLSRAGNRRTSHALHMMAVTQIRYPGTPGRRYYERKRCEGKTPKEALRCLKRRLSDLVYYQLLADRRGTIGACGSPTTPPPTRSTSTSPAARSHQAAARPRPAPRPAPKGSSRWTGKTAASSASRSSTPAPGSTTTSSKRPKSTAKTAAS

SEQ ID NO: 177917 - protein, 404 aa, unidentified
MLGASNIKEAVFLSRVWVGVDAGKGFHWAVAIDEEGEVLISRKAHNDEADLSALVEEALTFGPDLVWATDQPGGSAALLLALLWEREQRVVYAPGVAVNRARDAHRGESKTDARDARLIAELARMRRDLATLEPGAQLLAELRLLVAHRRDLVLDQSRSIVRLREALVALFPGLERTLDLRTRGPLVLLTRYQSPGALRRAGQKRVEAYLRSKGVRNAARLAENALRAAKAQRVVLPAEGIAAGIVRELAQRALGLKERIAGLDQELEDRFFAHPLSEVLESLPGMGPVLGAEFLVAVGDPTEAFENADRLAAYAGLVPAAYDSGKRVGNRRRMRGGNKLLKSIFYRSAFSSLRHHQASRAFYDRKRAEGKKHRQALIALARRRVNVLWAMMRDGERFDPVRAA

SEQ ID NO: 177918 - protein, 419 aa, unidentified
MVNVGIDLHKTQFTVCVRSRDKKGEVINTFSKYPTTDEGYAAFLHEAAQYQRSGEEVRVGVESTGNTRYFKSRMEAAGVGVKVINPAKLKVINESVKKTDKHDAATIAEFLEHDMLPEAKLCSHESEQIRRVLKVRSTMVKTIVVMKNQIHALLTAEGMEDVKPGTLQSKKGRQRVLDTLNQCNNGLVVQPLFAMIEGIEANVNSVEKQLRTLTKGDRMVKLLLTIPGCGEICAWTIRAYIDDINRFSNPKKLAAYAGLVPWVQNSNETIHHGKITKRGPKELRTALVQVVMGLRRMKEKTLAWRLMQRYEAMKAAKGSGKSIIAAARKMATFIWHMLSKDVEFDLSLMVDKKLEKKSEAMSRTAKLAEAVVIEKTDTPVVKNAEAVVPEKLDNPVLKIVESETKGKAGVARKKIKKVG

SEQ ID NO: 177919 - protein, 422 aa, unidentified
MKKVTEFTKKVKGQVNNPVLTKASWVVGIDIGKKKISCVLMKKDQTVLCRFNTEASINGYKKMLDRIKEKTKGRGKVVYAMEPTGHYWMVLGQFFEDHNRQYVLMHPLAVARSREVVRLNRGKTDPMDARLIGELACRGIATRTQIPEDYWATLRFLAREYMDREKDIVREKLRINSYVETTLPDFLGIFPNPLCLAGRACLRTLANFKEAIKGDSPSFEKQVRKHYIGKRLLVSRVRQVYDTLRQGETIGLRAGRHAMLCRIINSLERLEVAEKQQEDTRQSLLSYYNQSEYKKYLNSVQGTTSTTNALVLGFMGNPISYDNPKALIKLAGCDPVLNESGKYRGKTSISHRGRSLLRKAADRTAFSIEKRNVVFRNFFHHLVTRQKNKLTKRQARIACINKYFRIIWVLCNHRVTFNPSLA

SEQ ID NO: 177920 - protein, 355 aa, unidentified
MLYLGIDQHARRLTISLRNDEGDVVLARQVSTQPEKINEFFERLTRERLGGDESFVATWEVCGFNDWLIKMLRDYRCHKVILIQPEERKKLKTDRRDAAALSELLWVNRDRLLAGKPVRGLRQVDISSTSDQENRRLTTLRKDAGRARTRIINMIKHMLRRHNLQWELPTKTFPTQAAIAWLKKLVLPEIDQLEMNHLLIDLEHAQQRMRELEEKLAQRCGLSEAATLLVSMPGIGYYSGTALACRVGRVERFPRSRSLANYWGLTPGCRNSGEKSQRLGSITKAGSGMARWLLAQVAHQALKKDKKLREWYKRIKRRRGSSIARVAVMRKLATLIWHMLTKKKTYAECRAFATD

SEQ ID NO: 177921 - protein, 447 aa, unidentified
MNTPTPPPPYDLIIGLDRSDKKADLCLITTATGQRQNRVIDTAPEALWEWLAQLRQQHPDARVGLCLEQPAVHLISFLEAYEWITLHPINPLTLQKYREAFITSRAKDDTKDADYLADLLLHHHAKLPAWAPEDAPTRALQQLVFHRRAVVDERTALTNRLIALLKQYFPQALNLCGEDLWRPLATHFLLKWPSLQAVQKAKPAALKTFYHLQGSRSQTLIEQRLALIAQAVPVTDERGIIGSFVLRVQLICRQLQLTQKTVTNFDQQIAQAYGEHPDREIFASLPGAGPVLGARLLTSLGSQRERFAGSAAQLQRYTGVAPVTKKSGGSCYIHRRYLCPKFHRQSFHEYAKESILWSRWSAAYYLQQRTKGSSHHTAVRALAFKWQRIIWRCWQDRRPYDETIYEASLKQHGSPIVTLFDRVELGKSPWKNPAKKFANPVDGLPQR

SEQ ID NO: 177922 - protein, 450 aa, unidentified
MSPLALDVVTKTGKTPVLGRMLSKYVGRKTSSIENDITKARNHLRQRGKIMRVVFGIDVSKASSEVAILVNGEKIHGYTIPNDAIGFNRLLEDLGTVYQPEIVFEATGVYSRRLQAFFEDNSYAYIRLNPLESKKQLDSLRVRKTDKIDAEKLATSQFILNRKPSYVQEALYQELRDLSRFYQNLTEDIVCSKNRLHKVLQVTFPELENILSSPTGKQYWNLVMAFPCNSFVLELDDAALRAIIRQSTSKHISENRVTYLVDKLTKLANQSYCAVKKTSPMMEEVKYYAGELLRLSEYRQSVLEKMITLAQPLPEYEILLSIPGIAETTATSIIGELGDIRRFHSANQINAFIGIDLRHYESGDFLAKEHITKRGNPYARKILFKCIHNIASASHTNPCHIADFYEKRKRQSQVTSTKPHTIASIHRLIRTMYYLITHNKLYDYTSTQNR

SEQ ID NO: 177923 - protein, 414 aa, unidentified
MSEFEYGALVGLDWGDTSHEVAVWNEQRQTRTSERVAHTPAALRGWVEALHARLGGARIAVAIEQSRGAVFDTLSGYPFVTLYPINPRSAARYREAFHPSLSKDDPTDAASLLDLLRKHRNELRPFVPDDASTRLLRLLTEDRRELVDQRTQHVQRVTDRLKTYYPQALRWAGALTTAQACDLLQRWPTLQAIQTARPSTVRAFYERHRHAAAWIDQRLAEIRAEVAFHQDQVITDTAVLLVGSEVAQIRALNASIATYDEKISSAFAAHQDAPIFASFPGAGEQLAPRLAAAFGTDRNRFENAVNVATRCGIAPVLRRSGKTATVHMRWACPKFLRQTFHEYARVSIGCSVWARAFYEQHRARGHGHHEAIRTLAYRWIRVLFACWKNRTPYDESRYLQQLALRGSSLANAAA

SEQ ID NO: 177924 - protein, 484 aa, unidentified
MKTKRQGGAQEAKKASSRAMDKWHDMNRKQRREMMRKIQSEALSLEVIHPDAAGIDIGNESHYVAVPPSRDSQPVRRFGCTTAELKAMAAWLKQCNIRTVTMQSTSVYWIAVYDILEQAGLEVYLVNARDTKNLPGRKSDVQESQWLMKLHTYGLLRNSFRPSQEVRTMRTYWRQRNDLVRAAARHIHRIQKALTQMNIQLANVLSDVSGLTGQAIIKTILAGERDPRKLAAFRHPRVKASEEQIARSLEGNWQQDLLFVLKQEQDGYEFCQRQMAECDQQLSHYLKQREDRSQATPLPEEKRKTRLKKKKSNKPQFDLREGLFRMTGTGLTQIDCVDVMTATTIISEAGWDMSKWETEHHFVSWLRLCPDNRISGDKIIGKGRLPTNNRVTTALKIAASNLRVSDTYLGAQFRRLKTKLGAPIAIKAMAAKLARLVYRILRYGMKYVDRGAAFYQAQHRQIQITHLKWKAAKLGFKVIEAPGA

SEQ ID NO: 177925 - protein, 453 aa, unidentified
MARKAEKERTKDGLKLKIVNPNAAGIDIAYGEMQVCVPEDRDGENNRCFGSFTCDYEEIASWLKACGITTVAMESTGSYWVGLYFFLEEKGFDVLLANAKDVKNVSGKKTDEADAEWIMLMHSYGLLKPSFHPDAAARNIRELARHRDNMLRSAGKEVEHMQKSLVLMNIKVDTVISDILGKTGKAIIEAILEGNHAPKSLALLADRRCKAGRETIEKSLEGTWDAVHLFELKQSYDLYKYIHTQIADCEAEMDRMLSDYTDGCGTDMTGYKATEKRVAKKNAISFDAEKHAFSMWGVNIMEMPGMSLGGLSVLMGELGSGFVEKFPSAKSFCRWCNLVPNNKISGGKLLSSKVPKQKNRVGQVFRLCANSVKGVKTGLGVYFHRQKSKGGHLQAIVATANKMARIFYTMVVSKKPFDETKVGLDEKTLLQRKISIAQRSLEKLNLRLSVAQG

SEQ ID NO: 177926 - protein, 411 aa, unidentified
MEQIRERVAALDVHRDTVAACARVPGPRGGVRLDKARFATTTAGVAELAAWLAERGVTTVGMEATGVYWKCVYYALEGLFEEVWLYNAHHVKNVPGRKTDMSDAEWLADVVAHGMVRPSFVPPPPIRELRELTRYRKTQVDVRAAEIHRLEKLLQDAGIKLTSVASRVLTQSGRAMVEALIAGERDPGRLAGLAKGKLRAKLPQLAEAMAGRFGPHHAVVARAILDHIDFLDTTIDTLTAQVVARTRVFAEQVELLAEVPGLDQTAIQVILAETGGDMARFPSPAHLASWTGVCPGNHESAGKRRNVATPPGNRWLRRVLIEAARAAARTRGSYFAAQYRQIARRRGPNKAAMAVAHSLVVVIWTVLATGEPFHDLGEDYFQRRRDPERESHRLVRQLEQLGYAVTLQPAA

SEQ ID NO: 177927 - protein, 355 aa, unidentified
MHQKISSERRLSSMLHAGIDLHKRTSVVTVVDDAGKDVVVGQRLDNDEAEIREFFSSFDEELNAVLEAGPSWHWMCDLLDDMDIDNVLCHPLKVRAIASARIKTDRIDSGILAQLLRMDFLPESYKPDLKTRQLKDLLRYRSSLVKTRTSLKNRIHALLSQLNVRHGFSDLFGKAGTAFLGELELIPVHRQAMDGYLSVLETIRGLLKEVEAELLVFYQSSEGAQLLSTIPGVGPILSLTIISEIGDIERFGSARQLASFAGLVSTTSQSGDHCWHGHITRHGSPWLRWALVEAVVHTVNYPGPLKTSYLKLKRRKGSKIARVASARKLSTYIYYMLKENKEFSEVMAYRSGDLG

SEQ ID NO: 177928 - protein, 321 aa, unidentified
MAIPVQALLIGVDVSKATLAICLGPDQPVQTLDNDRNSIARWLAALPAEPVCIAAEATNTFHLDLVDLAHHAGHTVYLVDGYRLSRYRDSIGTRAKTDASDAQLLQRYLAHERDSLRPWSPPPEGYRTLQQLLQRRATLVQARVALQQSLADLPGLKQAAATLFRQLKRIDLLIQKGLVDTLTKLDWNADFKRCQAIEGVGPLTAAALTMSFHRGAFHSSDAFVAFLGLDVRVRDSGQLRGRRRLTKKGNPELRRLLFLAAMQAARSRSWKDFYQRHLDRGFARIQALVILARKLARVAFALLKNQSEYQPRYLKETCMET

SEQ ID NO: 177929 - protein, 424 aa, unidentified
MRRCIGLDVHREFAQVAVWEGGQVRHVGQISTTPEALRVFADSLASTDEVAIEATCNTHAIARLLESRVARVVVSNPQKTRAIAEAKVKTDKVDAEVLAQLLAADYLPAVWLPDDETHALRRQVARRAHIVRQRTRLKNQVQSILHRNLVPRCPAADLFGRKGRTWLGEQELPSDERRAVEALLRQLDFHGEELRLIDAELGRVALRSDEVKRLMTIPGVDATVALSIVAAVGDFSRFRSPQKLVSYLGLNPRVRQSGGQPASHGRITKQGRAHARGMLVEAAWVAAKIPGPLRAFFERVRARRGMQIAVVATARKLSVLCWHLITRGEDYAFQRPSLTEKKLRALELRAGLPSRRGQKGKAAAYSLKEVRRRERELAEQAEQAYRQLVADWQAKASKRQMGVAAANGARLSRPSTGQAARQGS

SEQ ID NO: 177930 - protein, 408 aa, unidentified
MNTLYVGIDVSSKSNVAYLMLPNGDKHSCFSVANSHGGSAQLVKRIHSALTSHSLDTVFIGLEATNVYGDNLVYFLREDATLAPFNRKIHVLNPKQVKKFHDTYNDLPKNDYADSFVIADCLRFGRINKEVYMGGYRYKALQNLTRARYFAVQNLTKEKQRFINVLFKKYSAMTQEKVFSDAFSTTALAVYDEFESAEALANMDLHDLTDFIIEKEKNRFPDPGAVAKAIQKAARSSYRLPKTVNDSVNQVLSISITSMKALESQIKEFDKAVKAQMELLPNVLISIPGIGPVYSAGIMAEIGDINRFDNQAALAKYAGLAWKQYQSSGFEAEVTRLIPSGNRFLKHYLCEAAFSLVRCDKEYSDFYHLKYKEVNRCQHKRALALTARKFVRLVFRLLKDNRLYRAAE

SEQ ID NO: 177931 - protein, 343 aa, unidentified
MNHTLIGLDLAKSVFHAVELDGHGKPTWRKKFSRAQLKRHFANRQATRIAMEACASAHYWARLFEGLGHTVLLLPPQHVKGYLRGQKNDYNDAQAIAEAADHGALRPVPVKSIAQQDEQAFHRLRSQSVGERTRVVNQIRGLLAEYGLVIPQGTTAVRKALPGILADAGNGLTPRFRELLDRQYRRLVALDEELDWFQDQLRQQSEQDEVCQRLQAIPGFGPVVSSAVKCWMGDGQQFRRGRDASAALGLVPRQFSSGDKGRLLGITKRGDGYTRAQIINGARSVVIRAGGKSDALSRWIVRLVESRGFNKAVVALANKLIRIAWVVIARGECYQPREALAQG

SEQ ID NO: 177932 - protein, 414 aa, unidentified
MDISLINVERLSEKVKGKRIAVGTDVAKEDYYACLMDEQREVVITMRWKHPLHSRTFVNLINDLPVSSIQVAMEPSGSYGDPVRQLLMESGIEVFRVSPKRSHDAAEVYDGVASLHDAKSGAIIAKLHLDGASEPWPIRGEQERELSAVISTMDMLHKQFHQNVNRLEALTARYWPEVSICMDLNSATFLELVGRLNGPGQVAAQPKKARRLMQEVGGQFLRQEKIDKVIESAQDTIGLKMIETEAEELGYLARRTRELQRELNKAKKKVEQLSQGKETTREMGKVVGKATAAVVVSGGGDPLEYDSASQWVKSLGLNLKEKSSGKHKGRLMITKRGSGQARRWLYFAVLRLIHTDEIVRAWYARKVVRDGGVRMKAIIAIMRKLVTALWHVARGKTFDTRKLFNVERLGLCNG

SEQ ID NO: 177933 - protein, 414 aa, unidentified
MLLLDSSEVESTAADGVFIGLDWGNSHHQLCILDAAGRMVHQGKFAHDIAGARGLTERLHRHGPVQGIAIERSEGLLVETLQQQGHRLFCVSPKMSARARERYRLAPSKSDAFDAFVLADSLRHEHRHWRPLAAPSSLLAELRALTRDRERLIWNQRDVENQLRAVVLAFHPGVLHLFSSLDRDITLAFLRDYPTPAHAGRVGVARMAAFCARHGYSGRTRPELLVERLRANLLSASAGTTAGKAFTAALFVEQLELLNTQVRAITKRIRERLAEHPDAAIFLSFPGMGEVTAAIMLAEMGEDRARFPTAGVLLAETGTAPVTRSSGRSRTVKFRYAANKRMRHAIDWWAFVAVRENDWAHEAYWQARARGQLHNRAVRGVGARWTRILWRCWTDHTIYDSALHLKGPPASITA

SEQ ID NO: 177934 - protein, 316 aa, unidentified
MMIEPITKCVAGLDVHKKMVTCTILEEKPEGELKSTTREYLTFQEDLKKLSNWLYESKVELVIMESTGVYWQSAYEIIEEKGILCYVVNAYHMKNVPGRKTDMSDSQWMAELGRCGLLKPSFIPPREFRELRMLTRYRKKLRNMQSSEKNRLHKILELGGIKLGSVVSDIDGVSARDMIAAILDNRPIEDIAILARGRLREKIPSLIKSLRGELTDRHKYLLGTISRHIKWLETEITSIDDQVAGVIKPYRKECELLETIPGVDKISAAMLLGEIGVKMEVFGNKSRLSSWAGMCPGNNISANKKKVEASAMGINL

SEQ ID NO: 177935 - protein, 351 aa, unidentified
MPRRSTVRAVSTIGIDMGKNTLHMVGLDSLGAIVLRERVSRGRIKSRLANLPPCLIGIEAGMATHYVARELAALGHDVKQVPPAYAKPFRQGHKNDFRDALAVAEAVQRPTTRFVPPKSNEQLDLQALHRVRSRLVSQRTAVINQIRGFLLERGIIVRQGLRFLRQLLPDILAKRTDVLSPRMVRIVSDLAGDWRQLDDRIETVTDEIETLAKADDNCRRVMTVPGIGPIISSAMVAAIGKGSAFAKGRDYSAWLGLVPKQMSTGDRTILGRLSKRGNSYLPMLFIQAARVILVRPANWPKHGFGVWLVRAIQRLHPNVLAAALANKLARIAWTVLAQQRSYEARVTKAEA

SEQ ID NO: 177936 - protein, 360 aa, unidentified
MAKARSLVGLDVHATRVVAAVLDVETGELGFFGMEMDVERIAGFCAALPGPVSATYEAGPTGYGLARELARHRVQCTVAAPSKIPRGSGDRVKTDRRDAELLVRLLLAGKLHPVRVPGAEEEALRDLVRAREAVRVDLMRGRHRLSKLLLRHGIRFQDGDAWTERHRQWLDTVTLQQPAAQATLVDHQGAVDALCHRRDQLEREIIALIPSSPWQVQIGRLRCLRGIDTLTAVGLCAEIGDFERFAKAGQLMSYVGLVPSETTTGKQRRLGSITKTGSAHARRLLVESAWHYRKAPKLGKTLAERQHSQPPAAVAVAWTAQRRLHRVWTRMEARHKRRALIAAAAARELAGFCWAITLIE

SEQ ID NO: 177937 - protein, 384 aa, unidentified
MPSLTASPAIIYLGLDVHKDSVPIAVLPADASAPTRLDKYPNDFAKLRRVFERCAKEGELRACYEASGAGYVLQRAMKEWGYHCDVIAPSLIPIKPGVQRKHDKYDAGQLARLYRAGELTVIRIPREAEERVRDVVRCRETLQREVVKSRHSILKFLARRGFIYRGGVNWRPAHYTWLRQLTGTTSPLASEDQLVFSEYFALLAYKLSRRDVLDAHIETLALQPAYAPAVAALQCFRGLQVHGAMVLATELVDGRRFASPRQLMAYLGFVPREHSSGARERRGSITKAGNAHCRHVLVQAAWSYRLHPKIGPALAIRQRGQPASVTLHAWKAQQRLYTMYHRLSMRRGPQIAVVAVARELIGYLWAVMREITPEATPSATLAAA

SEQ ID NO: 177938 - protein, 441 aa, unidentified
MACRYAGIDWAGEKHDVLVADEAGSEVLAATFAHDENGLTALCAALVRFEVGLVAIERPDGLLVERLLDAGLRVLPLHPNKVAAARDRFRVGGGKSDRFDAFVLCELARTDNHRFRVLEPDSDRTKAIRALTRAREDLVGTRTAVVNQLRAELERFWPGPLGLFSHMDAEILLAFLERYPSPSDAHGLGVARMQAFLKREHYSGGQKPAALLTKLRSAPLGRVGEMELAARRQLVLSFVAMVRSLNAQIKQLEGQIRTQVRAHPDGPIFLSLFKSPASVITAAELLAEIGDCRERYPSRDALAADAGHAAVAKESGKRKTANFRWGCNKRLRVAFCRLADSTRHWHPWAQTLYAKARQRGHEHPRAIRTVGRAWCRVVWQCWRNHTPYDPTRHRALQSHITVTIPTPSGPRTDLAATQRMAGPGLWRPDLSKPASLQPAGG

SEQ ID NO: 177939 - protein, 345 aa, unidentified
MSNSTVKSEIKVLGVDLAKNSFQLHGVDAQGNVVLGKRVSRKRLCSTVARLPACLIGVEACGGAHYWAQVFRAHGHEVRMMAPQFVKPYVKSNKNDRIDAEAICEAVQRPSMRFVPIKVPSQQDIQSLHRARSLALSHRTAQVNQIRGLLAEYGIVIARGRRRVRGCLPGILEDAENGLSVAFRELLQGLYEELVHLDERIDRFDQRLKQLSRENAQCRRLMTIAGIGPLVATALVAAVGDEVGVFKNGRQLAAWLGLVPRQCSTGGKTQLLGISKRGDRYLRTLLIHGARAVVRCVGTKADRHSRWIRALVQRRGRNIAVVAVANKIARTAWALLHSGQAYQTA

SEQ ID NO: 177940 - protein, 365 aa, unidentified
MQKAELSCEADSENYLGGSSETMYYIGLDVHKRTISYCVKDAAGKIHQEGKIGSTRRELDAWIKTLPQPRTIAMEATIFTGWIYDHLLPHAEKVKVAHPLMLRAIAAAKRKNDKIDASKIADCLRCDFLPECHMASTEIRDRRRTLRYRGLLVKQMVQMKNRISGLLLEKGVTHTKRRLHKVGYFAELMAGNEEIDQSIRPLLKLSREHIVRAQKLDYALVSSLERDPLLVERLKRLRTVPGVGPITALSWALEIGDVARFRSIKQAISYCGLCGAEKSSADKMLRTPISKQRNKHIQHVLVEAAKLAPRQCHELALIYEKEMQRGNRNRATLAVARKIVAYLLAVERRQQDFVPTEERGGTAAA

SEQ ID NO: 177941 - protein, 356 aa, unidentified
MKQSNYLDFSNQHIYVGLDVHHKSWTVSIVINGTLAGRFVQDPDPGVLVRYLRKNYPNGIYHSSYEAGFCGFWIHEELRTHGVDSIVVHPADVPTTGKERDRKTDKVDSRKLARSLENNQLTPIYVHDLKHYEERSLLRRREGLVQNQTRCKNRIKGLMKFFGYKLDESKVGQHWSAKYIEELEQLHSQHHHAEETLKSLLEELRYYRKLLCDVSKKIKSLSETEKYRQRVELLVTVPGISTLSAMILLTELGEISRFQRLDDLCSYVGLVPSEHSSGETKENGHLTKRGKSIMKRIVVEASWTAIRKDPGLLMNFNGFCKRMKKSRAIIKIARKFLSRIQHVLKYKEEYKFLASC

SEQ ID NO: 177942 - protein, 358 aa, unidentified
MRIIGCDLHARQQTIAMLDSDTGELEEKTLEHQGETVREFYSALPGPILVGIEATGSMQWFLELMEELGIECRVGHPQKIRKAETRKQKHDRRDARLLLTLLTENRFPTIWMPSTEQRDLRTLLRHRHQWVRLRSRVQHTLQSIALNHGLRRGRSLWSQAGQHALRALPLAPHASERRKALMTLYPRLQESIEELDRQVSEQTQQRPDARRLMTHPGVGPITALATEVFLGDPLRFIDGKAVASYIGMIPSEHSSGGRQRLGAMSKQGNTLLRYLWCEAAMHAVERDPELKRFYRRKLVQKGLGKARVAAARKLGIRLWIMMRDQIDYQEFCRRGKARQESGSVHAGMPDRNSGPAEA

SEQ ID NO: 177943 - protein, 387 aa, unidentified
MSQPNDLSRSLAALDQDSTVIAVIEMSQSSWLVAGIVPGIERHPLKKLEPDEEALLRLLQRWRDEAARTGRTVARIALAFEAGRDGMWLARWLRARGVEAHVIHPTSVAVSREHRRAKTDRLDTELLKRAFLGWLRGERNHCRMAAVPTLEAEDARRPNRERESLVGERTRIVNRMKATLARLGIRGFKPTSRKAPELVEALSTPEGVPLPPNTRAELRRDMARLRFVLDQIQEIETTRLQRLGHAPQERSHAMIRLLARVIGVGIETADMLVHEVLSRNLRDRRAVARYAGLTGAPDESGSRRREKGLAKAGNARVRRGMIQLAWRFLLFQKDSALARWYRTRTADARGGTRKTMIVAMARKLLIALWRLVTTGDVPEGVALRPAG

SEQ ID NO: 177944 - protein, 396 aa, unidentified
MQTQLHVAIDVGSQQHRVAIGWDEGDPIEEFDCAHTPAGLSDFFKRIHKHEGLHQSEVCVAMEGFGGYARPLDSQILAQGWRLYAINNLKFARFKEIFPAPAKTDAIDAKRMLQLMQLREHIPMASAVLQEVAPVDQLHQQLKALTRRRKQLVAERMRTSQRMQVELQGAAPGLLAITGQADNLWFLNFLTCRTDLRKLKIVRQATLLKLEGIGVGYAAKIAVWQESAIFAPSIDWVGQMIHADAMRILSLREAISQLDIQIDELTTQSGIAQRLLTMPGMGSVCASELAGEIGNIARFKSEASLAVYLGVAPVDRSSGKRVGAKLPRQINPRARAALIIAMAHHMQTVPASRTFYDRKRVEGKTHMQALRALARHMVRVLFSMLVNNRDYRLPNI

SEQ ID NO: 177945 - protein, 340 aa, unidentified
MDNHTQYSGFAGVDLAKKVMQIHFVAGDGEITDKQVKRAEFLDFFRNRSKCLIGMEACGASQDWARKLEAMGHEVHLMSPKAVKPFVSGQKNDYNDAIGIYKAMFNGVRRVPVKSTEIRDLQTLRRIRSQVTKDRVKEINHVRGLLAEYGFVMGKSITAFNKGISSALEILKERGDVSPLVAEELQTTVESIKTKIERQKKLDREIEQLARGCKNYENFLKTPGVGPFTAAMLCVLLCDPDIFANGRKFAAYIGLAPRSRGSGGKYFVTSIPLKFNCDSESRAVFVECAQAIARYKNKSPWVEDILRRKPKKVALIAIANKLARQVWAMANKGENFKEAL

SEQ ID NO: 177946 - protein, 315 aa, unidentified
MGYFVGIDLHGDNNYIGILDEEDRRVFKRKNRNDIKEITRVLEPYQEEIKGIVVESTFNWYWIVDGLHEAGYRVHLANTAAMQQYEGLKYVDDTRDSFWLAHMLRLEILPEGYIYPKETRSVRDLLRKRMMLVQQRTAHILSMQTMVSRNKGVSISSDTIKTMSDEEVEGLFGDEHLVMSAQCDHEVVGVLSGQIDKIEKAVLKEVKLKKPYKKLLTVPGIGEILAMTIMLETGDIERFREVGKYSSYCRCVSAKKVSNGKNKGKGNRKNGNKYLAWAYVEAAHFHVRYCEEAQKWHQRKASKSNAILATKAFCN

SEQ ID NO: 177947 - protein, 368 aa, unidentified
MDKFSKYVGLDVHQETIAVAVAQAGGEVRYVGDIMNTPEAIKKLVTQLKRDGARLSFCYEAGPGGYVLYRQLHDLKQDCRVVAPSLIPKKPGERVKTDRRDSLSLARLHRAGELTAVWIPGEAQEALRDLTRAREDMKHLQRQAKQRLLSFLSRHGHRYSGKCRWTQAHWRWLEGVKFAQPVQQIVLQEYMDTVKACSQRVASLEQEIERAVRDCPVWTVIEALMALRGVSLIAAVTVVAELGDLRRFSDAPQLMAYLGLVPSEHSSGKRERRGGITKTGNSHVRRVLVEAAWTYRHPARKTAILQRRAERTTEQVQEIAWSAQKRLCQRFRHLTARGKLPVQVCTAIARELTGFIWAIGQQTEIGVA

SEQ ID NO: 177948 - protein, 362 aa, unidentified
MTSMTDQTLEVTGGVDTHGETHHAAVVDRIGRHLADREFPATGTGYRQLLSWLSSFGTVRAVGVEGTGAYGAELARTLRRTGLKVVEVDRPDRRTRRMKGKSDPIDAYAAAEAVASGRATGTPKSRDGIVEAVRTLRVVRRSAVKSRTQAINQARQLLVTAPETPRAQLRGLTADALAKACARLRPGTDLADPAQAAKAALRRLGRRILALTEETDELEAELKPLTTRAAPELLALKGVGADVAGQLLATAGDNPDRLTSEAAFAHLCGAAPIPASSGRRDRHRLNRAANRALHTIVLSRMRWDERTRAYVERRTGEGLTKKDIMRCLKRHGAREVYRILIKSLHTPHTGRDATQSDLAEAA

SEQ ID NO: 177949 - protein, 315 aa, unidentified
MDEPRRVTNCVGIDVSKDRLDVHLRPSGEAFAVARDGKGLEKLVERLVALDPWLIVVEATGGFETTVAAALAGAGLPLAVVNPRQIRDFARALGKLAKTDAIDAEVIALFAEKVRPEPRPLASQEARALGELVARRRQIVEMIGAEANRQRQVVDKRLAKKIGRHLAFLEKELADVDDSIDASVRASPAWREKEDLLTSVPGVGPITARTLIAELPELGRLDRRKLAALVGVAPFNRDSGRWRGHRMIGGGRSSVRTALYMAALVASRYNPVISDLYRRLVARGRPKKVALVACLRRLLAILNAILRDKQPWQTA

SEQ ID NO: 177950 - protein, 462 aa, unidentified
MTIDKQRHRKERKELAKRLRSEDPGLEVVHPHAAGVDVGNSAHYVAVRPDRDSQPVRRFECFTADLHRLADWLQSCGVKTVAMQSTGVYWIPLYDILEERGFEVYLVNARHTKNLPGRKSDVQESQWLLKLHPCGLLNNSFQPTSEIRVLRTYWRQRAEHARGIGTCILRMQKALTQMNLQLANVISDLSGVTGQRIVRAIVDGERNPRKLAELSDPRIHASKEEIAKSLEGNWRQDLLFVLHQEVKMYDIYQQRIAECDQQLEKHLAHFADTVSPQATEETKKKRGKQYKNTPQFHLADELQRITGVDLTRIDGIDVMVAQTLVSEVGLDMSRWKTEAHFASWLGLCPDNRISGDKVLSRGTRHVVNRAATSLRMAATTLLRSQTYLGAQYRRLRTKLGAPKAITAMAHRLARLVYRMLKYGQQYVDKGAEYYERRNRQQQIEFLRKKAATLGLHITLAQA

SEQ ID NO: 177951 - protein, 346 aa, unidentified
MAYYVGLDVSVKETSICIMDDKGVVAARTDISTDPDLIAGFIFRHAPKVERVVHESGILAIWLTRELEKRGVPIICIDARLAHKALSGRINKSDQGDAEGLAQLARTGWFTQVHIRSEASERVRVLIGARERLIRMRKDLEGHVRGVLKVFGICMKSVGTGKLRRDFRDQLAAAADADPAIEMMSETFIPLHKTLCIARDALDDEVRMMARESDLARRLMTVPGVGPIVALAYIATLDDEKRFRKSVDVGAFLGLTPKRHQSGEVDWSGKISKCGDCDMRRLLYSAASTLISCTRKPSRLKDWATKLAERKGHKKAAVAAFRKIAVILHCLWRNETVFEPGMEGAS

SEQ ID NO: 177952 - protein, 426 aa, unidentified
MPFVGLDLHKKIVEAVILDDTGNILWRGSFPATRAALEDFARSRLSPNHHLALEATTNTWAVVALLKPYVARVVVSNPLRTRAIAEAKIKTDRVDALVLAQLLRSGFLPEVWCPDDDTRRRRALSTERANLVADRTRLKNRIHAVLHQRLIEAPAGDLFQPRSRAWLASLELDPEGRQTLDRHLRQLARLEQELAALTDDLAREAHADPRVRLLMTLPGVDFPVAQTLLAALGDVNRFRDGNRAASYLGLVPSTHQSAAHCYHGPITKQGNSHARWMMVQAAQALARHPGPLGVFFRRIARKKNRNVAVVATARKLVSIAWHMLHSNQPYRYAQPATLEAKFSRLRIRATGRRKKTGSGKGAPRPAGYGSGKRTRAVPSLDQVCAEAELPAPDATATGEQRMLLQTGTAAFADSIQQPKRVARRSA

SEQ ID NO: 177953 - protein, 320 aa, unidentified
MPTTFVGIDASQAHLDVRVLPADHSLRVDNTPAGHRQLVAFLVPFAATPGDLRIVLESTGGLEFPAALALEAAGFEVAIIKPERARYFAKASGQLAKTDALDARLLAAFAQAVTLTIRPLPTEDLRQFRDLLDRRAQLIDMRTMEKNRLASTTLAKARHSVEKHIAWIDREVRTLQAELNRRIADHPKWKDLDALLQSVPGVGPQTARTLIGQLPELGQVDRKAIGHLVGLAPLADDSGGHQGSRRIVGGRRQVRNALYMATVAALRHNPVVKAFYHRLRAQGKKAKVAVIAAAHKLLTILNAMVRDHAPWRHSTVTQST

SEQ ID NO: 177954 - protein, 387 aa, unidentified
MYYVGIDISKYKHTFVIASHLGEIIQKPMDFDNSHLGFAQFLDKLKPFDSNQLKIGFESTGHYSANLKQFLHDQGYSFYQLNAHLVKKFSLSLSSRKAKTDKIDCLAIAKFLMTVDSKSHTSLSYHISFLKSLSRHYYRLNKYIGKTKVELVNYLDKAFPEFTRYFSSIYTKTPLAILLKAKSLNSIANISMSRFDYLNKLSRGNFNYSKYIKLKQAAKFSVGVKDKFYWSLLHLTIKRIQTLENEKEKVEDHINLIMKEIKSPITSIPGMGTTSAAIILSEIGDIFKFSNSRALIAYAGLDNSVHQSGIESSYGKVSKRGSKYLRTALYNVSFPIVNNSKLFYDYYFDKKSRGKSHTLSLIWVSRKLLRIIYFLLKNNQEFSDQVI

SEQ ID NO: 177955 - protein, 393 aa, unidentified
MFYLGIDIAKNTHVASLMDEKGKTIFKGFSFSNTTEGAKSLLEIIKKYSEFTNVTVGMEATGHYWLSIYSFLYDYNFYAIHVINPIQTDGWRKGAEIRKRKNDTIDSVLIADLIRYGDFVENTLSNEDLYSLRNICRMRNYLIQSAGDLKRKVICVLDQVFPEYQTIFSNTFGTTSKQLLLDFSSPSDFEELSVETLTETLEKLSRKKVGQSTAEKLINSAKNSFGITFSKESFTFQLKLLIEQIKFIDNQVKECETKIKELMEKINSPITTIPGIGPVLGAVIISEFGDISRFDKPSKLVAFAGIDATVSQSGEFEGTHNVMSKRGSPYLRKALFQAALVASNSDPVLKDYYQKKRAEGKHHKTCIGAVSRKMCNIIFAVLKNDKPYEVPKQ

SEQ ID NO: 177956 - protein, 418 aa, unidentified
MNEELYARLSRRYLALDIHKHYSVVAGVNFEGQVVGEPVRIEHADLECWLAKHIQPTDYIVIESTTNAWHIYDLLEPLVEKVLVANPIKVKQIAQARVKTDIRDTLILARLLAANMIPEVWVPPVHVRNLRYLLSQRRHLVGMHTATVNRMHSVAHRHHLSHERGKRFNKKNTKWQGDDELSDSEKFQLELDMSTKEHLAEQRDKITKKLARMSHQKPWAESMMYLMQLPGFGVITGMTVLAAIGDITRFESPRHLASYSGLVPGLEQSGVKLRGKKITKEGRKDLRWAMVEVAQRAVKSDPLWKCRFNELCRRMHKNQAIVVIAHRLLVLVWYVLSRRQPYRHFSDERIAYKYLTWSWQLSEKDRDGLTRQQFTRYYLMRLGIGRDLKQIALNPRYKRRLASEAEVLALRPELKRVE

SEQ ID NO: 177957 - protein, 425 aa, unidentified
MKVTKVAQVIKNEQVMDVSVDVHKEDLYALARVPGKEYAETFKNSTPRIRKIVKDYQKIAQEHGCAQVRIICEPTGVYDRKLLQTARLLGALTSYVNAEAVSKFRVVENNDNNKTDTADPGVILRMAEHGHTIKHRILDDDYVVLRKLGSILDDEEVMLVRIRGVISQIREELFCEWDFDKDFLYGNSGRALLDKYAVNPYKIVRSGFGRFSSVMKRAVPRIRRTTLERLWVQAQRAVLNEQPESYIAVLEKRLKDLYEDYWVHKHRKTGIEEEMVTILRRLRAKDPTIPTATPGVISEKNLARLLGETGPLSDFDSVKQIMRYAGLNLCMRQSGQYQGKYKISKKGRSLLRKILSQIALQLVRKGALYGDYYHEKKERQALPGTKALTIVMRHFLRKFYGWYRSQQDFDKKRFFTCQAEYKKVA

SEQ ID NO: 177958 - protein, 425 aa, unidentified
MFVESGDDEQIIERVAALDIGKAEIVCCVRLPAGDGERRVQEVTTHSTMVPSLCELANRLVELGVQRVVMEATSDYWRPPFYLFEAHGLDPWLVNAKDVKHLPGRPKTDRLDAVWLCKVAERQMLRPSFVPPADIRRLRDLTRYRVDLVGVRTAEKNRVEKLLEDACLKLSVVASDIFGVSGRAMMTALIAGERNPKKLAELARSRMRTKIPRLEEAFAGLPLGTFDDHHRFLLAQMLSRVDAVDADIAAVDTQIGDHLAPFADAVAQLDEIPGIGPTAAAIIIAEIGLDMTRFPTPAHLASWAKFAPGINASAGKTKGNGSTGHGNRYLARVLGEAAVGVGRTDTFLGARYRRIARRRGKKKAIVAVGRSLLVIIWQLLADPDTRFHDLGADHYDRHINTTAKKRNHIHQLEALGYHVTLEPAA

SEQ ID NO: 177959 - protein, 301 aa, unidentified
MTDLIFIGIDVSKDTLEVASTAQARSWQAINDTSGIEALGLQLQALRPALVVLEATGGYEFEAACALQALGLDVVNPRQARDFARAMGALAKTDRLDACMLAVFARVLHQHPDRTRFVKPLADAQLQRLQALVLRRRQLVTMLTSERQRLRIAHASARTSIEHCIEFLKAQITDMDGEAAAHVSAHHSTLAAALSSIKGVGTTTVTTLLAQLPELGQLCRRRIAALVGVAPLNRDSGKMSGQRCIWGGRSEVRCALYMATLVAVRHNPVFKAFYKRRKLLTALNAIAKSGKPWDASLHIST

SEQ ID NO: 177960 - protein, 392 aa, unidentified
MIYLGIDVSKDKHDCCFLSQDGELLSKPFSVPNSRQGFEKLFSLVSSFENNPENVKAGLEATGHYSFAILGYLLEKGVTCFVFNPLHTNLYRKAVSLRKTKTDKVDSKTIALMLLSSVGLKPYSKALYHNEQLKSLSRYRFSKVRERAVLKQQLARLVNILFPELEKLVPSLHLSSVYALLEQFPGASYVANAHLTKLTNLLSSSSSGHYKKEKAIQIRNAAVSSVGCIMPAKSLELRHTVALIRVLSEEIEEIETEIKKLMDELHSPITSIPGISYRMAAMILSEIGDFSNFDSPDKILAFAGLSPSTYQSGKLDNAYSHMEKRGSKYLRYALFTAATYVCIWDKTFSDYLHKKLAEGKHYYVALSHAIKKLVRVIYALQTTGQTYFSAVA

SEQ ID NO: 177961 - protein, 407 aa, unidentified
MIFVGVDWAEAHHDVHVEDGDGKRLGRARLPEGVEGIARFHDLIAPFADDPTEVVIGIETDRGLFVAALVAAGYDVYAVNPMSTSRYRDRHSASGAKSDAGDAKVLADMVRTDRHNHRLIAGDTEGVEALKVLARAHQRMVWSRGRQTNLLRSTLREFYPAALVAFDDLSSPDALEVLRMAPTPTLGANLSQSKIAAALRRGGRQRRIDESAVKIQTALRSEQLQAPAVVATAMGASVAATVAVIAEMCNQIAQLAAELEANFEQHPDAEVVRSLPGLGTVLGARVLGEFGDEPNRYATAKSRKNYAGTSPITRASGTKRTVLARHVRNQRLADALYLWAFASITASPGARIYYDQRRAAGDSHHQALRALGNRLVGILHGCLAHHVAYDEQIAWGHRPESNLQEAA

SEQ ID NO: 177962 - protein, 462 aa, unidentified
MSDQISVGIDVGSCTHAIAIMSPDGKFCDEFTISHDHASFYEAGQRIMNIAYQFKLPVVAAMEGHNGYAVPFDRYLVDRGIKVLAVNNLRFSRYREMFGQPYKNDPYDARLLADFTFRSPALDERSGAHQVVFPAMEVTALKKLARYQRDLIREATRCKLRLIKLVTGYFPELKQVYTKWFSPNCLALLATGITPQQLGQMEVSALAQIGAPGAKRTLGKNKAARLKTLAQNVCPNPAAAIDARVTANYAQRLQELDRQIRTLDTELTDILKKLPQGRQMLNISGCGPKLSSRILGETGDIRRFANRDKYSAYCGVVCLDDSSGKRKQSRPAKQINYILKNSFMQLALSGIKNDPKSAAYYHRKRSEGLKHWPAVKRLAHQLCKIIYKLLTADNNSKFLNENVCVDTSSGCGNVDNSFQCCSERSYPSVVEKSINTPNLDKTSQTFPQHGISTASNLLPKRQ

SEQ ID NO: 177963 - protein, 433 aa, unidentified
MQEVEDEPLFAERVAGIDIAKAEVMVTIRVPADTGNGRRQQETREFRAVRKELLALADWLRSWQVTKVGMEATGDYWKPVYFLLEREGFDCVLYHAAQVKALPGRPKTDKLDSAWLAKITERGSLASSFVPPEEIRRLRTHTRYRRHLTQARTAEKARCEKLLDDAHLKLSSVITDIHGVSGRDMLTAVIAGERSPKVLAQMARTRMRGKIRQLEDALDCSFFTEQHAFILEMMLANIDHLTAQISELTVQIEVLREPYAHQIAQLDAIPGFGIITAQDIIAETGVDMTVFPTAGHLASWARQAPQVSESAGKRKGKNATGRGNPYIAGALGEAAVNAGRTQTFLGTKYRRLIKRMPKKKAQGAISRTQLIICHALLSDPDAVYTDLGTGYYEQRMNIRRQARSHARALERLGYKVTIEVIDPGTGELQPIAS

SEQ ID NO: 177964 - protein, 423 aa, unidentified
MAYRIAGIDVHKKKLAVVVVDVEVDDEYQFERRWFGGNPEQLQRLAEWLSEQRVEEVVMESTAQYWKPLWSALERYWKPSCQNREGAGKMSGTLHLAQALSNRGRRGRKKDFRDAERLVKRLVSQELTLSFVPDTEQRLWRTLTRTRYQRTRDKVRLQNQLEALLEEAHIKLSSLVSDLLGVSARRMLHALADGETDPAAVAALAHQRLRATSAELRDALGACTELNPVYRRLVRLALDDLQLIEQQIGQLDQEIASLLREHQDAVQRLAEVPGLGVDSAQQIIAEVGAKAATFASAKNLVSWVGACPGEEESAGVNRSKRSPKGNRQMRRILNQAANAAAKHKGSIFEIVYRRLVLRLGHNKTIGAIAHRLCQLIWIILHNGVRYEERGPSVCEKAKRVRTSRMIRTLRTLGYRVEPVVIPA

SEQ ID NO: 177965 - protein, 358 aa, unidentified
MQRNKKTFKGQNIYIGIDVHKKSWQVAVITESGYTERLSTAADAKALFKFLKSHYPDGNYRAVYESGFSGFATHYALSDLGVSCVVAHAADIPSSQYELTMKSDRIDAEKLARALRAGLVRGIYVRPKDNLDDRGVLRIRKTIQIQVGGYKTRIKHLLHSNGVELPERFSRSGTHWSRAFIAWLREDVRLLSDTRRSLDLLLLQVETLRANLLEATRRVRALSMTDRYREGCALLMGIPGIGLTVAMTILTEVCDIGRFGNERQFASYLGLVPTSHSSGERVSHGEMTFRGNKHIGPLLVEASWVLIVRDRELGRMYTEYRWRMAGQKAIIKIARKLSNIIFAVLKTRKAYEPYRRDA

SEQ ID NO: 177966 - protein, 358 aa, unidentified
MDHIGLDLHKRDSQVCILTEMGEVIERRIRTDATRLAALLGPRPRARILLEASTESEWVAQCLEALDHEVIVADPSYAPMYAARSRHIKTDRRDARTLAEACRLGAYRPAHRLSAAARHLRAELVVREALVRTRTRYATLVRTLLRRDGLRLPSGQAEHLGTRLTTLEVPERLRAELAPVLALLAPLQREIDAADRRLAALATADPVVPRLQSVPGVGPVTAVAFVAVLDEVGRFASAHQLTAYLGLVPREHSSGERQHRGAITKAGNRRMRWLLVEAAWNILRSRQGSTARAAAVDGGRGGPARLTHRGRGAGAPAGGDSLRDVARRHTLWGAPRGVGEGGAGRVRRVGPGTSVGRR

SEQ ID NO: 177967 - protein, 352 aa, unidentified
MSQKFESAIAVIGIDIGKNSFHVVGHDERGAIVLRQKWSRGQVEARFANMPPCLVGMEACVGAHHLSRKLNSLGHDARLMPAKYVRPYSKGQKNDFRDAEAIAEAVQRPTMKFVATKTADQLDLQALHRVRERLVSQRTGIINQIRAFLLERGVAVRQGLRFLRAELPRILATPPDVLSPRMVRVIEDLACDWRRLDERVERLSNEIEAIARQDAGCERLMSVPGIGPIISSAMVAAIGTGDVFTKGRDFAAWLGLVPKQISTGDRTILGKISRRGNRYLRVLFVQAAWVVLIKPKSWERHGLKSWIEAARKRLHRNVLAIALANKLARIAWSVLARGRDFEARSIANAQPV

SEQ ID NO: 177968 - protein, 341 aa, unidentified
MPIVTIGIDLAKNVFAVHGVDETGKAMLIKPRVPRDQLATLIAQLPAYLIGMEACSGAHHWARLFQQHGHTVKLMAPNLVAPYRMSGKRGKNDAADAAAICEAVTRPSMRFVPLKDEHQQATLCLHRTRQGFVEERTATYNRLRGLLSEFGVVLPQSPEKLRRYITEHLDTLPGWAKRSISDLLEHAGHIEDRPLDYDRAITEIARKDARSKRLMLLRGIGLTTASALLASIGAGHDFRNGRQVAAWIGLTPGQYSSGGKARLGSITKAGDAYLRGLLVNGARAVIASLGEKQDRFSRWVRTLVERRGYWRAAIAIAAKNARLAWASLKYGENFKLELTAE

SEQ ID NO: 177969 - protein, 370 aa, unidentified
MKKLNRYVGLDVHKDTIAVAVAESGRDGEVRLYGTISSDLHAVEKVLHKLGGEGVTLRVVYEAGPTGFVLYRRLRQLEIDCIVVAPSKIPQPTGPRQKTDKRDAQQLARLHRAGDLTAIYVPDAVDESVRDLTRARADAVHDLTRAKLRLKSFLLRQGYHYKGKANWSEAHQRYLRELALPLPAMKAVLEEYLLAIDQGVQRVSRLDQLIETQVPRWRLFPAVQALMGLRGFQLTAAAVLVAELGDLRRFHHPRHLMAYLGLVPREHTSGDSRQLGGITKAGNAHARWILIEAIQHAFLPPKVSAPLALRQRDLPPAYRELSWKVQVRLHKRGWHLIHRGVMKPKVCVALARELCGFVWDLLRRVPAPVA

SEQ ID NO: 177970 - protein, 350 aa, unidentified
MSTTTTPYAASPFQRRCWMGIDVAKKTFDAAVWTPLEPGEERSSRTLPTHSFPRTPDGVAACLAWARPYAANSPLSAVMEATGKYSIDIAQWLVAAEPTVEPAIINPRLAKAFAESLSVNNRNDKTDARTLARYGAERQPARFELPTPEMQRLRDLTRYRQSLVESLTEEKNRDAEGAVSVIVRRIRTRRISQHERDVASIEKEIRNSLKKLPELQSDVDKLDGIFGVGWVTAVTVITELGDLRRFRRARQLTAFAGLAPTSHDSGTSVHKKSHTSKNGSARVRRVLYLAAIAAIRGNNDFAELYQRMTAAGKKPMVAIVAVMRKLLLVMRAILISGKTYNPHQRTSACG

SEQ ID NO: 177971 - protein, 470 aa, unidentified
MLNSIFKSDNSYLRDMLNNCMPSQLLYAPIDVAKHNHSAMIVNFLGDIIIPKFDFPYNNHGIDFLKNKLQSACSETNAKKIFLALESTGHYHENLVASLIASGYDISIIRPIDSKNERDNVHAKTDAIDLAAIAKVIISNKGTRSSMPDNIYYNLQRASRTHRQLTWQETRLKNIITMLVDKTFTGLWDQGIFSDKWGKASLFFVSHYPTPQQAIKMGAKRLSEFFKKNDTKLGIDTADKIIALAKNTPARPLETMESDILALKANINVLETLALEIVSQKKQMTKYLVQTPGIYLLSIPGISIVYAGDFTAEVGDIHRFAYAGQILSLAGTAPRKYQSGELDKANLPTSHKGRNLLRMTVNQIALSLNTHCPEFHKYYSDKLFHYQDAPPKARMATANRFIKLAYAMMKNETLYCPKTGNPLVSQKEYYQSVWDKVKEKLTGYLNSDIPQDNYLVKIANQLEEKYGINQ

SEQ ID NO: 177972 - protein, 451 aa, unidentified
MAEAVCAGIDWAKDTHDVFVADGEGERLWAETVCHDEAGITKLCRTLVTLRVQRVAVERPDGLLVERLLDAGLTVIAMHPNQVAAARPRFRPAGGKSDRFDAFVLCELARTDSHRFRALAPDSDETKALRALTRGREVLVEQRVALCNQLRAELERFWPGATAVFADLDSPISLAFLARYPSPVDARGLGAKRLAQFLARHHYCGRRNASELLKRLRDAPAGRAGDAEAEARRAIVLALVSALQPIVEQIQLLTSEIAHAVRAHPDGEIFLSLFRDPKSVITAATLLAEIGDCRARYPTAEHLAADAGMSPVAVESGRRKVACFRRGCDHRLRDATSTLADATRHWHPWAQDKYAAARARGHDHPRAIRTVGRAWCRVLWRCWQDHVTYDPARHRALQQHCTVTISSPSGPRPDLAATQRMLGAAVTGTAARRAEREALDGKPTSARPLGG

SEQ ID NO: 177973 - protein, 317 aa, unidentified
MSKHSMVCAGIDTGKRQLDVALAGAAERLQVDNTEEGHAALSAWLRQRRTKRVGIEASGGYEQAVVARLRRDGFVVIVFQPAQVRAYARFRLQRAKNDRIDAALIADCTAAATKIHAPPDPRLAPLAQHLTMIEQLTDDIVCLKTRRESCRDQRIRQIWRAEIARLKARLKNELEGLAAAVRQHRDLAWRLDLIASVDGVGLRTALAILLRMPEIGRVSREQATALAGLAPYDDDSADRIGQRHIDGGRERLRKALYSAALAAAFHWNPQLIAVYKRLIAAGKPHKLALIACARKLLIFVNTVVARDTPWTPIATKS

SEQ ID NO: 177974 - protein, 385 aa, unidentified
MGLVVQTAIHPEQDDHDMPYEWFVGIDWGSQQHQVCVLDRDRRRVGERAVDHDGASLARLATWLWSMSAGQPQRVAVAIEVPRGAIVEGLLERGCHIFAINPKQLDRFRDRHSVAGAKDDRRDAFVLANSLRTDRPSFRRLQLDAPQLLVLREHSRAEETLREAFRRSANQLRDQLHRFYPQMLQLCSAADETWLWDLIDLAPTPAHVALLNEEHVQRVLKAHRIRRVQAQEVLTCLQAPALPVAPGATEAAQAHCGFLLPCLRVLAEQLQACSQQVSALLHTLAQEPSEGVGPSDVAIVQSLPGVGRKITAWLLTEAAQPLAQRDFQVLRTHGGVAPVTRQSGKRRQVVMRRGCNPRLRQALYHMARVAMQRDAHFSQVYEAVV

SEQ ID NO: 177975 - protein, 347 aa, unidentified
MNFYTQQHTYYCGIDLHAKAMYVCILDQSGTKLVHKNLPTTPEAFLRVIAPYRDDLVVGVECIFTWYWLADLCQQEGIAFVLGHALYMKAIHGGKAKNDKIDAQKIAVLLRGGMFPQAYVYPAAMRATRDLLRRRCHLVQKRAELLAHIQNTNSQYNLPEIGKRLAYKANREDVAEHFPDPSVRKTIEVDVSLIDHYDKLLGEVELYITRTAKMHDVQTFARLQSVPGIGQILALVILYEIQDITRFPRVQDFVSYCRLVKCAKESNGKRLGTSGKKIGNVHLRWAFAEAAVLFLRQSLPGKAYFAKLEHKHGKAKALTVLAHKLGRAVYYMLTREQAFDLQRFVTA

SEQ ID NO: 177976 - protein, 313 aa, unidentified
MANNVFKFHIGIDVSKTNLDVSISSKSTFFQVSNNEAGLKELIKNIPNKKRSLIVFEASGGYEKYAANYLRRKKCNVAVVNAKRVRDFAKAGGNLAKTDKIDARVIMEFGKSFNPTPQSLASAEEEKRLNAFNRRNQLVKMITLEKQHLEKASDEFQKFILKHIKFLEKELELTEKYLLERFDKDPILRDKLERLDGIKGVGKVTAMNILVYMPEIGQLTAKEVSALAGVAPFNKDSGQMRGRRIIRGGRAPIRTALYMAALSAKKSNSAIKRFYDRLIKQGKLAKVALVACMRKLIIVMNSIIRDNTVWEPR

SEQ ID NO: 177977 - protein, 347 aa, unidentified
MRFYTQQHKHYCGIDLHAKAMYVCILDQNGTKLVHKNLPTTPEAFLRVIALYRDDVVVGVECIFTWYWLADLCNKEGIAFVLGHALYMKAIHGGKAKNDKIDAHKIAVLLRGGMFPQAYVYPAAMRATRDLLRRRCHLVQKRAELLAHIQNTNSQYNLPEIGKKLAYKANREGVEEHFPDPSVRKTIEVDVSLIDHYDKLLGEVELYITRSAKAHDVQTFSRLQSVPGIGQILALVLLYEIQDIARFPRVQDFVSYCRLVKCAKESGGKRLGTSGKKIGNVHLRWAFAEAAVLFLRHNQPGKEYFAKLEHKHGKAKALTVLAHKLGRAVYYMLTREQAFDLQRFVSA

SEQ ID NO: 177978 - protein, 357 aa, unidentified
MTRISVGVDVSKNRSTVCIMDQDGKVIMRPFLVWHSTEELDFLADTLKRLNGEVRVIMESTSIYQYPIALHLKEKGIFISIVNAYKVKKFANTDFRGGKTDKKDSRTIASYGISYWDKLVEWQIPKDTYFNLDLLNRTYMNAKKHRQIILQELQHYIDCAMPGMDKELHSLNLSTKKDFMLDFVEKFWHRDEIVNMTEAEFTEVFTAWAKKKGYRPVEGKAAKIYAIAKSCIPYYPANPTVKTILQCIVDKLSGVNRTLVTIVTQMIEEAKKLPEYQIVREMPGVGDPLAARFFGSAGDIRRFKNSKALVAYAGIDSPPDESGDFSSTHRHITKKGSKVFRDTGYEIMMALRSQKRT

SEQ ID NO: 177979 - protein, 460 aa, unidentified
MEQALAQRNPSISLKPGKSRAALTITHPNAAGIDIGSASHFVAVPPDRDDEPVREFPSFTVDLNALADWLKACGVDTVAMESTGVYWIPLFELLESRGFTVLLINARHVKNVSGRKSDVLDCQWIQQLMTYGLLRGAFRPADQVCVLRSLWRQRGMLLRSQSRHVQHMQKALTQMNVQLANVISDVAGETGQKILRAIVAGERDGHVMAKMKNARIRASIDEIAKSLQGNWRAEHLFALKQALNGFDFIGTQLAECDREIEQQLQRLQTHEGEPAKGKQRGRARNAPKFDLRTQLFKMCGVDLTRIDGIDVTTALAVVSETGVDMSRFPSAGHFASWLGLCPGTRITGGKVMSGKTKRCANHAAQALRLAAAALRASQSALGAYFRRMCSRMDKPKAVTATAHKLARLIYTMLTKGEEYTDQGQDYYEERYRERVLRQLAQRATKMGMKLVAAEEPEAVL

SEQ ID NO: 177980 - protein, 400 aa, unidentified
MRVVFGIDVSKASSEVAILFNGEKVHGYTMSNDAIGFARLLGDLRTVHKPEIIFEATGVYSRRLQTFLEDNGYAYTRLNPLEAKKQLDSLRVRKTDQIDAEKPAQSQFVLNRKPTYVQEEVYQNLRALSRFYQNLTEDIVRAKNRLHKVLQVTFPELETILSTPSGQQYWNLVIDFPCKDFVLELSKDELSESIRQSTSKRISDKRVAYLVEKLTALANQSYCAVKKTSPIMEEVRYYAKELLRLSEQRQTVLDQMVELAQPLPEYDILLSIPGIAETTATSIIGELGDIRRFQSANQINAFIGIDLRHYESGNFLAKEHITKRGNPYARKILFKCIHNIASASHTNPCHIADFYEKRKRQSQTTSTKPHTIASIHRLIRTMYYLITHNKLYDYRSTRNQ

SEQ ID NO: 177981 - protein, 340 aa, unidentified
MHKPSAEDFLCCGIDVSAAQLVVALEDQGSRGLQRSFPNRASGHQALIVWLQKSGPRIRVCLEATGLYSLDLALALHAAAGIEVAVLNPKRVNRFAATLCRSKTDPADAQVLAEYARRMPFQPWHPPQAAALELRAITRHIAALTRQHTQHSNRQHAASATTTGSRCVQQDLQRSLLDLQRRIAKMRRAALAIIERDAELRPRFALLLSMPGIGEVSALNLLGELAVLAPGLSVRQWVAHSGLDPTHHDSGSSVHKPARISRAGNRYLRRALYMPALVAVRHDPHLCAFYQALLARRKAKLQALMAVARKILHAIFGMFRWRADYDGARLFPQLELAQAA

SEQ ID NO: 177982 - protein, 355 aa, unidentified
MKFYTKQHKHYCGVDLHARSLYVCIIDEAGLIVKHKNIDATPEAFLNIIAKYREDIVVAVECMFTWYWLADLCRDEKISFVLGHALYMKAIHGGKAKNDRIDAHKIAALLRGGMIPMAYVYPSEMRATRDLLRRRNHLMRKRADLLAHIQNTNHQYNMPRFHKVISYKRNRQGIAELFSDECVQKSIEVNISLIDHYDRILKKLEYYIDKKAKVHDPEALFRLRSVPGIGHTLALIILYEVHDILRFPRVQDFVSYSRLVKPAKESAGKRYGHSGAKIGNAHLKWAFSEAAVLMLREIPEVKKYKAKLQRKHGKGKALTILAHKIGRAVYYMLKRNEVFNTDRFLNKQMIQAGRA

SEQ ID NO: 177983 - protein, 347 aa, unidentified
MSKHSVQAGDIAGLLRRFAQLKEKARARTGRDFPIIVIQEAGLDGFWIHRVLQSEGIESHVVDAASILTSRRRRRAKTDRVDGETLVRTLMAFKRGEPRVCSMARAPTPQEEDRRRVCRERRTLVGERVTHVNRIKGLLFAQGVFGYEPLRKGRRERLENLQTGDGRPLPVHLKAQIIRELDRLEILLEQVKAVEAERDGLLKPASDEAASPAAMLARLKGIGPETAAVLWSEGLFRQFDNRRQVAAYAGLAPTPWQSGSIDHEQGVSKAGNPRLRTTMVELAWLWLKNQPTSALSLWFHERVRLGGRMRKTIIVALARKLLIALWRYTTAGVVIEGAVMKAVPATI

SEQ ID NO: 177984 - protein, 310 aa, unidentified
MFSYSAGIDVSKDSLEARIHLLEAGVSCSNTEKDLPALIGWLLLYQVGRVLVEATGGYERKVVKAAQAAGLQVICVNPRRAKAFSRAMGQKAKTDPIDAKSLAQFAAVIDSPSARITSPEHEKLRALVQQREHFVQQRDDDRRRLKTASCDAVKPALQSHIEYLSTAVEAINQLIRQSANELDREKVARLCSVKGIGLITASSLMAYLPELGEIGGRPIAALAGLAPYNNDSGKHKGARHISGGRFAARRSLYMACWVIIRDQPEFQARYRVLRDKGKCAKVALIACMRVLLVRLNAMLRDGTEWRERTA

SEQ ID NO: 177985 - protein, 416 aa, unidentified
MSRKFMRTNTCGKLSQLLNIFERWFSHMYSYFVGIDIAKNTHWASCLSSDGEIILEPFSFSNDNSGFQKFISKLESLDKTKILIGLESTAHYGENIISYLFNLDYNIGLINPIQTANLRRSNIRKTKNDKVDTKIIIKALTLGNYSLITSRDINNLKLKGLCRSRRNLVTMRSKAKIQLVSYLDQIFPELAQFFKGNLHLNVSYQLLKEYSSPKQISSLHLTKLSNILHDNSHGRYNKQDAIRLRELAKNSVGIDNPSLSLQIKHAILQIELYNEQIAEVEALYKQILDEMNTPILSIPGMSYNQAAVIIGCIGDINRFEHSCQLLAYAGLDPSVIQSGNFQARSTRMSKRGSGMLRYSLVYSAHNVVKNNKTFRDYYELKRSQGKSHYCALGHVAHKLVRIIFKMLKDNITFNLD

SEQ ID NO: 177986 - protein, 394 aa, unidentified
MEVVAESVAGIDVHQKQITVTILIGSESVKKPKKVSKRFGTTTNMLKNCGKWLKEHCVEQVLMESTGQYWRPVWQILESFDFQLILCNPRIVKNIPGKKTDQKDSEWLSELARYGLVSASYVPPRKIQELRESTRSRKKMKESLTRTKNEIHNILQRSNIKLTSFISDLFKGSGLKLLNMIINGEVLTINSVTKCMHGKLKASPEQILESMDGVLSQNDRNLLVIQMNLLNSYLKCIADLNDLIDEQIGEFSDLCHRLQDIPGISSATAQVIITEIGVDVSPFPDVHHLASWAGLCPGNYESAGVKHGSRILHGNVYLKKALVTAAMGAKITKETGLKDYFWRLKSRMCAQKALIAVAHKILRIIYSLIESGKTYREYKKDQRKAITSVQISRI

SEQ ID NO: 177987 - protein, 352 aa, unidentified
MAATAQSAIAVIGIDIGKNSFHVVGLDGRGAIVLRQKWSRGQVEARFANMSPCLIGMEACVGAHHLSRKLKALGHDARLMPARYVRPYSKGQKNDFRDAEAIAEAVQRPTMKFVVTKTADQLDLQALHRVRERLVSQRTGIINQIRAFLLERGIAVRQGQRFLRVELPRILATPPDVLSPRMVRVIEGLASDWHRLDERIEGLSTEIEELAKRDAGCERLMSIPGIGPIISSAMVAAIGTGDSFSKGRDFAAWLGLVPRQISTGDRTILGKISKRGNRYLRVLFVQAAWVVLVKVKPTRWQGHGLRPWIEAAKKRLHHNVLAIALANKLARIAWSVLAHGRAFETNKLPAAA

SEQ ID NO: 177988 - protein, 363 aa, unidentified
MKQEMNVLGIDIAKRVFHAIGMDNTGKIVFRKRFSRHDLMPFMAKLPPVLIGMEACGGAHYWARRFREHGHEVKLMAPQCVKPYVKSNKNDSRDAEAIAEAVTRPTMRFVPTKDVAQQDIQALHRVRERLIGERTALVHAVHGLLHEYGMVMPKGVAKFRQAVVGKLEAEKDKLTPLSQEMFWQLGDECAALEEQLAYDQEKLDTLAQTHPECQRLMTIPGIGPFTATALVAAVSDASACKNGRQCAAWLGLVPRQHTTGGKERLLGISKRGDTYLRKLLVHGARATIRWVGRKTDRRSQWMRQLLERRGHNRTAVAVANKNARIVWALLTHHQDYQPATSSGEQTCVGVTSNRSLTRIGAAL

SEQ ID NO: 177989 - protein, 369 aa, unidentified
MLYSGIDLHRHSIQICTVDTNGTVIEQRNMKAQKKTVQEYFNQWQLPHRAVVECTGNWYWICDLLKSMDVDIILAHAKYLKAISYAKVKTDAVDAHTLAQLLRLDYVPQSHQLDPKFRAMRDLLRQRMNMERKRVRISNCMGSILAQFNITIDDVKFKSDDFTNRIKRLSIPDEYRLTLELYHLQHQKIVEHKELLEKHIARKLQPDPDMHLLFPIPGIGLITGAIIAMETGDISRFPNEKHFYSYSLLVPGAKNSGSKRAHKSGSKDGNHYLKFAFIEVAIKAIRFYPPIRKFAQKIERRSNKRVAQIVVAKEIAKIVFHVLTKREPFKTFKGIPIEKKYDRLRACTPKCGVSARRRALKPARLTGSA

SEQ ID NO: 177990 - protein, 351 aa, unidentified
MNTQQTVVPKLFIGIDIHKSSWKIHCATDISSGKTFSMNPNPMKLKSYVEQHFMGHEVFTAYEAGCCGYYAHRAFESYGWQSLVANPADIHRKGKERFTKTDHIDAQVIARELKDGRLQGIHIPDLKREQLRSLFRRRNNLVKNYRKIKSLIKGQLLNQGIGVPSEFDNSHWSHNFRDWLDNLDFTYHTARMTLDSHMRYFRFVDQELRDVSTKLRSYCKEYYKKDYMLLRSVPGIGGIVACGIICELGDLRRFNSIKHLSGYVGLAPGIHQSGDNLRNTGITRRAHRLMRSYFIEASWQAIRTDPVMQAYYRKHLGKNVKTVIVKIARKLLSRTLAVIKTEIPYEIGVVS

SEQ ID NO: 177991 - protein, 358 aa, unidentified
MELGVSVTVGVDTHADAHVGVALDHLGRRLGEVVVPNEVTGYRSMLEWALNLGELSCVGVEGTGSFGAGLSRFLRSWGVRVVEVNRTSRQHRRRHGKYDAADAEAAARAVLSGDATGEPKAGDGQVEMLRALKVARRSAVKARTQAANQLHALVMTAPEQLRADLRGLPAKKLVQKASRFRCGPELADPTAATKFALRSVARRYRQLSEEVSGLEEQIERLVKEASPELVALEGVGPDTAATLMIVAGDNPKRLRSEAAFANLCGAAPIEASSGKTVRHRLNPHGNREANRALYMVALNRMRRDLQTQTYVARRTTEGKSKREIIRCLKRYIAREVYRALIVTRPEIIPGEEDLASYA

SEQ ID NO: 177992 - protein, 423 aa, unidentified
MKNKRMQPQKKFAATIGLDWADDHHDLWLQPADGGKPEHIILEQQPEALHSWIAQIRARFKSQPVAIALETSRGPVLSALLAYDFITVFPINPKALSSYRDSFRVSGAKDDRSDALLLEQYLRHYMDPLKALCPDTVPTRQLAGLVEKRRAQVDLRTQLVNQLHAQLKMYYPLAEILLDDLTVPLAAAFLKKWPTLEALQKAGPNKVRAFFYGHNCRSAKKLQARLDALASAVALTTDPALIVPASLTVQTLAGLLQVLHGSIATLEQEIQTAMDAHPDAPIFRSFAGAGPVLAPRLLVAFGTQRDRFQSAQEVQQLYGIAPVTKASGQSQVVSMRYRCPKFGKQSFHENAGQAFKKEPWARAYYDHQRKRKKHHAAVRALAFKLMRIYFICWRDRKTYDRNTYVSSLEQHGSPLVRAATKTR

SEQ ID NO: 177993 - protein, 388 aa, unidentified
MVIAPLRGGDAGGALEVVVGLATVAILNPAGVAVAHAYGSGGSRPKAIRRVDPNLTLTENAVANKLFIGIDVSKDWIDIASAAPAVAGAQRPRRNEQHWRIENSAAAIAAWLAAFGPERIALAAFEPTGGYERPLRACLLDAHVRFARVHPAEVVSFRARRGCKAKTDRIDAELLAAFAADELRHRGLAAVSDHDETLRELIARRRQLCDVLHAERCRAALATEAHVADSLAAVIMAVERALEAIEQALEAHVAADATLAASARNLRSLKGIGPITVYTLLGELPELGRLNGKEIAALGGLAPRTRESGKRSWRASTGHGRVGVRRVLFNAARAAIRHNGVMRAFYHRLVTQNQRAGKVSLVAVMRKLLVTLNAIARDGKPWHHAQAG

SEQ ID NO: 177994 - protein, 347 aa, unidentified
MNYVGIDWAYGRAAWCAMNEGGTIAGEGMIPADESGLARLVLELGTEVEGVVEMMSGAVWVRDKLAAAGWEMKVAHARKVRDVAPLACKTDKVDARVLAELCRRDLVPEVWVPSLEDRAIRERLRRRMHLVKTRTSARNRIFGLLTQFGLRISHSRLREPDAMELLANRGVPEVWRDSIAELLELAAEMDARIDPIDRELAPLARSDQRAALLATMPGIGPLIGLTFAAEIGEVSRFARPGKLVGYAGLAPRVSQSGDRSATGRLSKAGSRTLRWAAVEAANQAWRPTNPWHAHYLRISAAHGKNPAKSAVARKILIASWHMLSRREPFKAPPPRGASPLRQAPAAF

SEQ ID NO: 177995 - protein, 360 aa, unidentified
MNATTVAVDLAKSVFQLAVADKHWRVIDTQRLTRTQFERWFANHDVGLVVMESCGSAHHWARWLNGLGIDVKLLPAQYIRAYVKRNKTDAVEAAALLEAARSSDIRPVRIKSVEQQALQGLHRIRSLWMGTCTSRINALRGFCREFGIAIPVGARTGIEAISRVLADPRSAVPDMIRGTARLLIEEIRLLEARIAQLERELAEIARHSPACTTLLSIPGIGLLTATAMVAATSGDVSHFKDARHFASWFGLTPREYSSGSSRYLGRISKKGDRYLRMLLTHGARSVLRAAAVAVNAGRQVCGIRQWALAVQQRTHHNKAACALANKLARICYATLRDHAPFAESERISKKLNRESFAMPA

SEQ ID NO: 177996 - protein, 343 aa, unidentified
MDHFAGLDVSVKETSVCIVDDTGKIVREVKVASEPEALLAVLTNPVYHFKRIGLEAGPLSQWLYSAFAEAGLPVVCVETRHMQAVLKAQINKTDRNDARGIAQMMRVGLYRPVHVKSLRSQKLRMLLTHRKLLQSKAIAIENDLRGTLRNFGLKVGMVGTVKFEGRIKELVENLPDLAILVEPLLIVRRALREQIVILHRRLLAIVRDDAVCRRLMTTPGVGPVVALTYRATVDVPARFRKSKSVGAVFGLTCSKYQSGEIDRSGRISRCGDEMMRVMLYEAAQSMLRSKKWSWLKAWAMQIARRRGMKKAIVALARRLAVIMHRIWVDGTEFRWTREATAAA

SEQ ID NO: 177997 - protein, 351 aa, unidentified
MPHKSTVHAVTAIGIDMGKNTLHMIGLDLRGAIVLREKVLRGRIASRLANLPPCLIGIEVGMATHYVARELAALGHDVKQVPPTYAKPFRQGHKNDFRDAHAVAEAVQRPTTRFVPAKTNEQLDLQALHRVRSRLVSERTAVINQIRGFLLERGIIVWQGLRFLRQQLPDILAKRTDVLSPRMVRIVTDLAGDWRQLDERIETVTDEIETLAKSDDNCRRVMTVPGIGPIISSAMVAAIGSGAAFARGRDYSAWLGLVPKQMSTGDRTILGRISKRGNGYLRTLFMQAARVILLRPANWPKHGFGAWLIRAAQRLHPNVLAAALANKLARIAWTVLAQERSYEARVTKAAA

SEQ ID NO: 177998 - protein, 406 aa, unidentified
MEGPIITVDVSKGSCHYQPFIENGHPMRKPKQLSATIDGFQKLGQTIKDLEAKTEREDIPVIFEATGVYHRPLQKYLEDHKIRYYIISPLLSATYRKTDLHSNKTDALDCAHIAKVYYCEKELRQYQAQPQEYKRLYQLSRIYESELVHLRKRKVSLRSMLDIIYPRIDKTFKGNQNLYDPIPMEILKRYPHPSLLLSHREDTIVKTVGHRTGHLRGYTERIVHKIYEKAKECYSGCDIDDIEVINLPRLIENVQEQKKKCDSLLKEMIEIARTCPYFAPIVSIVGIGENLAARIIAELRDVNRFDNRAAIVAYAGLNPKIQQSGDIDGLHLKISKKGNKHLRCLLYLGAQCNYRLRKEDPLYEFTKKKRQQTQCPLSSKAAYTASAHKLLVIIYSLCKNGTLYHS

SEQ ID NO: 177999 - protein, 309 aa, unidentified
MLSSVGIDTAKATLEICIKPQKIRFEVANNSAGFEALLERLKDFKISRVLIEATGGYEKDVLIALASAGLETICINPARARKFADAMGKKAKTDKIDAEVLADFAAHLSAPQGQPVSPEREELRELVKQRAQFVQSRDDDKRRRQQCRSATVMAHFDEHIEQLKVLIKRLDEEIDQAMVQLDDTRARQLLAVTGIGRVTAANLLASLPELGQLDRRQIAALVGVAPYNNDSGSHRGHRQIWGGRAHVRRVLYMSSWIIIRHNTEFKARYEALRERGKCAKVALVACMRVLIVRLNAMLRDNTPWRVQTA

SEQ ID NO: 178000 - protein, 318 aa, unidentified
MSDSVFVGIDVSSQTLEVASSNQAKTWQLPNDTGGLESLVSRLLELKPALVVLEATGGYEFETACALQAAGLAVAVVNPRTARDFARAMGALAKTDALDARMLAAFARVLHQHPERERFVKPLADAELQRLQALVLRRRQLVQMITSERQRMRVSHVAARPSIERVIDFLKTELGDSDAEVAAHVQRHHAELAAALTSVPGIGAASVAVLLAELPELGKLYRRRVAALVGVAPLNRDSGQMRGQRSIWGGRADVRRTLYMATLTAVRHNPIVKTHYERLLAAGKRKKVALVACMRKLLTMLNAIAKQGSTWDPTLHHA

SEQ ID NO: 178001 - protein, 368 aa, unidentified
MKQYKLKAAPTAVSKEENSQKEPKANRIVIGVDVHLKSYEAARKIDNGAVGVAQSFRSKEAFLLYVEKQREQAEEVAVVYEAGPLGYTLYRELKASDIECLVCAPRSGEQKRKRRKNNSIDARTLSSDLFNYLNGNEQALQAVRVPSEAQEQARVESRQHDALVQERKRIGAMGNSLLLSQGYGSWSNWWRPKAFERLSKGVAPWIVKHLGRWVGILRELDQQIQQAKAELTQHYQGPRPKGMGAPSLAQLNAEVLDWTLYSSRRKIGCLAGMVPSEWSTGEGQRLGAITKVGVPAIRRIITEMVWRMILFQPEYKPVQKWREVLEGPNRGLKKKAVVAIGRQLIVDIWRLQTGRISAQELNLIMVEG

SEQ ID NO: 178002 - protein, 443 aa, unidentified
MARKNQKRFEIVHHHCAGIDVGSREHWVAVNPDQCENPVRQFTTFTDDLIALGDWLQSLSINVVAMEATGVYWIPLFEVLDARGFEVYLVNSRATRQTSGRKSDVLDCQWIWQLMTHGLLSGAFRPSDEICSMRSLVRQRANKVCDQAKSINRMQKALSQMNIQLAQVISDITGVTGLKILRAIVGGERNPEQLATMKDGRIKADQATIARSLHGNWRAEHLHALSQELACHDFLETQIAECDRAIAQALERLPVLEPEPVAPGKPLRSPHRSSDQQQTLHRALNKVMGVDLTAIPTIGVDTALVLASELGPDLSRFPTSQHFCSWLGVAPPTRVSGGKPLPGKAPKIINRAAQALKQAASNGRQDQSFIGASHRARLTRMDTSCAIKATAHQLARLIYAMLTKGQPYVEKGIEEFEEKSRSRQLRALERKARKLGMQLVKAA

SEQ ID NO: 178003 - protein, 358 aa, unidentified
MNNVSQKQEKIYFGLDISQKTIEIFALKGEKGVPFGKILNNQKSLNDFFDKVPFPSKTITVVLETGTHSAWISYCLEQRGYEVIVAHARDLAFIYKGDKKSDRIDAEKLARVARADKKLLHPVRLMSKTRQEALLAIKARDLLMKERTCIVNAIRGFVRSLGIDDAEYSIETISKMYSVLPKEIRQNLRGLFSVLTAINNNISSYDKRLKKIAEEYPETKILQQVKGVGPIIALSFALIISDPNRFSSKECASYLGLVPKRDQSGETDKQLGITKSGNKLLRRLLVQGAQYIMGPFGEDCDLRDFGNRIAQRGGRIAKKKATIAVARKLAITMLALWRNPDVKYDPHFKAANKQNRCA

SEQ ID NO: 178004 - protein, 393 aa, unidentified
MRKPNKQKKPLNDLSRSLTPFEPNQTLTAVVELSKKTWLVAGIIPGVERQPLKKLAPDENELLKLLERWRAEAEKAGHKITRITVAFETGRDGFWLARWLRARGIEAHVIHAASVAVSREHRRAKTDRLDTQQLMRAFLGWLRGERNHCKMAAIPTSAEEDARRPHRERETLVGEHTTIINRIKATLARLGIRNFNPKLKKAPDRLDHLRTPEGEPIPPNTLTELQRDLARKQLIAEQIGQIEKARLEQLKQAPKAGPNLMVFLLARVIGIGIETADMLVNEILSRNLRDRRAVARYGGLTGSPDESGSQRREKGLARSGNARVRKGMIQLAWRFLEFQKESALAKWFEARTKNNRGLRKKMIVALARKLLIALWRYVRDGVVPEGVGLRPAH

SEQ ID NO: 178005 - protein, 406 aa, unidentified
MEGPIITVDVSKGSCHYQPFIENGHPMRKPKQLSATIDGFQKLGQTIKDLEAKTEREDIPVIFEATGVYHRPLQKYLEDHKIRYYIISPLLSATYRKTDLHSNKTDALDCAHIAKAYYCEKELRQYQAQPQEYKRLYQLSRIYESELVHLRKRKVSLRSMLDIIYPRIDKTFKGNQNLYDPIPMEILKRYPHPSLLLSHREDTIVKTVGHRTGHLKGYTERIVHKIYEKAKECYSGCEINDIEVLKLPSLIENVQEQKKKCDSLLKEMIEIARTCPYFASVVSIVGIGENLAARIIAELGDVNRFDNRAAIVAYAGLNPKIQQSGDIDGLHLKISKKGNKHLRCLLYLGAQCNYRLRKEDPLYEFTKKKRQQTQCPLSSKAAYTASAHKLLVIIYSLCKNGTRYHS

SEQ ID NO: 178006 - protein, 364 aa, unidentified
MEGKKKTVTRYVGIDLGKRTYELAIVEKGKVKKSNGKTCVSGRQSLYRKLRPDDKVALEAGNLAFIMAKEIEAAVGCRVYVLNPSHLPLIYGSMKKTDKEDALKLAHILEDFQEERLPAVPVPGDREMGRRKILSSYRRAQQDRIRGINRLHAAFLSQGITTVTRKDLSTGEQRAESVKALTGFELEEAENLVAHLKLTDLRIEALVRRIKKESAGDEVIENLQSVPGVGPIVAFAFAAHVGAGRFENAGQVSNYLGLVPKVYISGETVRYGRITKRGNGYLRALLTRAAWALTRTKAGGKLKERFEYMTIEQSKSKKKAIVAVARRLAELMYVLMRDGTKHEPRPFVREKKAAEELAKLALSA

SEQ ID NO: 178007 - protein, 368 aa, unidentified
MNRIQWPRPRIHEAKACLSLARIVPDTLRKAQEMYLHYVGIDIAAATFAVAWVRERGWHHATFDQRRPDYGRLVHQLRQIAPPDQTLVVMEVTGTYWLALACCLHEAGFVVSVIHPTQAQLFARLEMQHAKTDRIDAQLLAEFARQRQPARWTPPPAIYEQLHQRLSQRDDLLGIKTQETNRLHALRQNPRAEPAVVDRLERHIAFLHAEIKALDREIKALLTGAHPWAVAAQRLLTIPGVGWIAAAWLLTATQCFAYCDTPEQAAAFAGLVPYRRDSGSSRRGFRPVGRGGHAPLRKTLYMASLSAARSNPSVKSLYDRLLARGKPNKVARVASARKLIHIAWAVVVKERDFDPSFAPQPDLVALRA

SEQ ID NO: 178008 - protein, 402 aa, unidentified
MNSVGIDVSKGKSMIAVMRPFGEVAVSPFEVRHTDSELCELAKLLRSLPGETRVVMEATGNYHLPVAWLLNDSGFYVSVVNAMLVHGYGNNSLRRAKTDKKDAIKLANYGLDHWLALPRYVPEEDTRLMLKNCYRQYQQYSKVQTMLKNNLISLLDTAFPDANRLFSSPPRADGSEKWVDFVATFWHCECVCGSSEKVFVAKYQKWCKKLGYNFSEDKALDIYASACGHFGVMSKTDTTKLLVEQAVSLLRVTSTALASLKQEMQSLAASLPEYPVVMKIFGVGPALGPQLMAEIGDVRRFHSKKALVAFAGIDAPPYQSGQMDVYSRSISKRGSSSLRRTLFLVMGIYLQNAPPDEPIYQFMDRKRSEGKPYKVYMMASANKFLRIYYATVKAYLDALDEA

SEQ ID NO: 178009 - protein, 351 aa, unidentified
MMIIGVDYHPSFQTIAFFIEETGECGEQQLNHSDGGAERFYRDLQQRGIRVRVGMEATGYSRWFERLLAELGIEIWMGDPAEIKAKRVKKRKTDRNDALLLLRLIREDNFPRIWVPSPENRDLRQLLWHRHRLVQMRTRIMNQLQALAMNEGYRWKKKLFSEQGRAQLEKLSLAPWASRRRQELLELLDRMNPTIEELTVAVEREARKRPEVLRLMTHPGVGPLTALAYVLIIGTPTRFPRGKQIGTYVGMIPSEDSSAGKQRLGHISKQGSSLLRFLLVEAAQAAARIHPDWRRRYIHLAMRRHKSIAKVAMGRRLAVRLYWMWRNGSNYSPRLEFGSYVGQLGMRHGVK

SEQ ID NO: 178010 - protein, 420 aa, unidentified
MEEITEDAEIVARVAALDVGKAELVACVRVPHEDKPGRRLQEVRTFATTTPALLELRDWLVCEGVTLCVMEATSTYWKPPFYLLEDAVECWVASARDVKNVPGRPKTDKLDAIWLAKLAERGMLRPSFVPPPWQRQLRDLCRYRRTLIQERTREKQRTEKLLEDTQIKLSAVISDIFGKSGRDMLEALIGGQRNPAVLAELARGSMRGKKSVLQEALTGQFRDHHGWLLRMMLDRVDALTAQIETLTGRIDEVLAPFARQVAQLDEIPGVGKTGAAELIAEMGTDMTRFPTSGHLVSWAKFAPRARQSAGKDKPGTTGKGSPWIAGALGEAVLGAARTKTFLGARYHRLARKRGKQRAIVATGRSILVIAYQLLSDPDARFADLGPDWHDRIAPLRRKRQLIAELERLSGKKVTLQEAAA

SEQ ID NO: 178011 - protein, 333 aa, unidentified
MSKLVNYVGIDVSKKTFDTAFDVNGKIKHEAFANNEKGFKLILSKLPAASHCVMEVTGIYYLKLATYLYDHQIPVSVINPLVIKRFSQMQLNRTKTDKAGAKIIYNYAKMQQPDAWKPEAGHVLELKQNQAALENLISVKTSFLNQLEAFSNSTVKNPMLIKSINSIIKKTEKEIKNIETQMQKIVKEHYSEMFKQLKSIPGIGNKTAIMLIAITNGFENFSSSKKLSCYIGMCPRIFESGTSVKGKAKISKMGAGRIRALLFMCAMASLKSNKACKQLYNRITEKGKNGRLALIAVANKLIKQAFARRFIATLPMTVVRQCVFLNNTPVKNN

SEQ ID NO: 178012 - protein, 350 aa, unidentified
MKILAGMDLGSESVKYCVMDESGTLLKRGTMGWSEKRWKAWVEQWGVENLEVAFETGPEAHRAERRFRAWGVRTYPFHAGSYAVVCRSKRKTDKIDAGKIVRGLRGGYLPARVVLPDDETLCLRNLVSERQLHQKQLLQAYNRVHSLARQWGVGLPKYQGELAERWWHEVVECFEGGLGRMVQRIQCSALSSLQALEQLEEETAAQVEAAGLAEVQQRLQSVPGVGPVVSQALVAYLQEGARFSNGRQFASYVGLVPSVDQTGKQPAHLGHITREGPAVLRRLLVQAAHAALRGQQLNRTRWKQWYTRLEKRRGRKRAIVALARKLGVLCYALVRDGTRWEPDRLRRVSA

SEQ ID NO: 178013 - protein, 347 aa, unidentified
MDIVGGFDVHRKQITFDYMEMDTGEIHRGKIRPAHRESLRAWLESFTEQFPEQEAAIALEATTGWRYVVEELKRAGVEPHLAEPAETKSLQGPKKRAKTDRLDAAHLRDLLVMDRLPKSWIPPEHVQEIRTLVRMRHSMIEERTAHQQRIHAQLFHNGYPQERNLLAAERRERLEKLELPEAARKVVDLSVAMIDHINEELEPIDAELRAYARSQAGCRALMEHYGVGELISVAMLAELGDTRRFSSSKKAVRYAGIDVTVHSSDGKRAAGKLSRQGPPVLRWAAFEAAQSASRRGSPDHDYYVETKHRLGGNRAALSVARKMIRRAHHTIRELGEEAMSEPMPSNA

SEQ ID NO: 178014 - protein, 425 aa, unidentified
MYCKQNQKINQVKECTLVVGIDIGSTTHYARAFDWRGIELGNVFKFSNSLEGFQSLSGWMQRIMKKTKKSEVMVGIEPTGHYWFDLGAYLENGGILLVMVNPYAVKQTKELDDNSQSKNDRKDPKVIAKLVTEGRYSLPYTPQGVYADLRVIVTNRQRLIREITQIKNRFARWFAIYFPEYKEVFGDYESQSSMLVLRRACTPEKIIELGIAGINQIWRDAKLRAVGIKRATTLYETAQHSIGLKNGRNAAEYEMKLLLQDYDYKQAQYESVMEELEHLCRQIPESEQMLAIKGIGLITVAGFLAEVGDLRRFESPRQIQKLAGLSLKENSSGKHKGQTTISKRGRSRLRAILFNAVIPLIATNAEFRELHRYYTTRTVNPLKKKQSVIAISCKLIRVFYAILTKGAIYDGEKMLSDIHRNPQIA

SEQ ID NO: 178015 - protein, 360 aa, unidentified
MEEVEDEPLFAERVAGIDIGKKEVMVTIRVPGGTRRGRRQQETRAFRAVRKDLLALAGWLRAWGVTKVGMEATGDYWKPVYFLLEREGFDCVLYHAAQVKALPGRPKTDKLDSVWLAKITGRGSLPGSFVPPEEIRRVRTCTRYRRHLVQARTAEKARCEKLLEDAHLKLSSVITDIHGVSGREMLAAIIAGQRNPKVLAQMARTRMRGKITQLEEALDCSFFTEQHAFILAMMLANIDHLTAQVKELTGKIEVLCQPYLHQIAQLDAIPGFGVITAQDIIAETGVDMAVFPTAGHLCSWARQAPQVSESGGKRKGKNATGRGNPYLGGALGESAVNAGRTQTFLGTKYRRLVRHMPKKI

SEQ ID NO: 178016 - protein, 367 aa, unidentified
MDSVALSGGPIHLGLDVSKNKIAVGILRWDEQVPDTEMLFNDEPSVRRLINRFGDPGRLRVCYEAGPTGFGLYRLLGSMAVACEVIAPALIPRAPGDRVKTDRRDCRRLARLHRAGELVAIRVPTEAEEAVRDLCRARAAVVGDRTRIRHRLSKFLLRHDRVWRQTAWTLAHERWLLGQRFDDAALRSTYAHYRAMLSAREAELAAVEADLAYWYTHGPFADAVARLAAYRGVAQVGALTIASEVGDWRRFPAARTFMGFTGLVPSEYSSGDAVRRGHITKAGNTHLRTQLIESAWAYQHHPNLGVTLRRRQEHVDPATAARSWHAQQRLCARFRRLSARKTSRSVAAVAVARELAGFLWAEMTAAS

SEQ ID NO: 178017 - protein, 335 aa, unidentified
MNNGEERWVGIDVSKSKLDVAVLDSRGKYKNHVFPNDAKGHATLVAWVMERLGVSRPCVCMEATGPYSEALAIALSDAGWHVSVVNPARIKGFAQGEMTRNKTDAVDAGLLARFGQLMRPEPWVAPPPEVRELRALVDRLQSLKDMAQQEGNRLEAAMNQPTMRASIESHLQWLQASIKQLEQQIDDHIDRHPGLRQDARIIASIPGIGDITAAKVLAYLGDVRRFQSAKALAAFIGVTPRLKESGSSVRGRSMISRSGHANLRHALFMPAMVARRHNQAVKTFGDRLKQGGMAPKAVIGACMHKLVHLIYGVVKSGVPFDPRRAVMRLDTQDGI

SEQ ID NO: 178018 - protein, 319 aa, unidentified
MNTTSKIQQKHQQRHVGIDVGKSTLDIYIFEKDEYFQAENNPSGIAQLIKKLKRYKLTRVLVEATGGYERAVAEACAEQELPIIIVTPIRIRQFARAQGIVAKTDKIDARLIAQFGVVIQPEVRELPTKKVRKVRDLNARKRQLMESRTQELNRQHKAQSYMLSTHRRMIKMLEKEIEWVNQQLEKEVAKVDEWKRTQDILLSAPGIGCGVAYTLLGELPELGQLSHRKIAALCGLAPFNHESGSMAKKRRIRGGRAPIRTVLYMAMMSAIQHNPIMKDFFNKLVEQGKHKKVALTACMRKIITILNAMVRNNQEWNVT

SEQ ID NO: 178019 - protein, 425 aa, unidentified
MIFGLINSNPKIIDSRPFRQSYTTKIYGFLKWVCSTDNGMQRLSTKERYAVISTHVKSSNLSRQLLIHQKFIVMSKKVTTSSPKLFIGIDIHKKSWKVHFCTDISEGSTSTFAPTASKLRKYVSKYYSKHEVTVAYEAGCCGFEHARQFIGFSWTTLVVNAADIPRPAKQSIVKTDKIDAKNIAKQLRAGLLKSITIPDTERECLRSLTRQRTCLLKDLKRTKTRIKSLLLYYNVHVPEEFDNASWTHAFKQWLKDLQWNYVNIDSTLKSLLKQLDFLDEMVRDTANQMRAYCKKYLKHDYLLLRSVPGIAGLTASYILAEVGDLRRFHSFKKFAGYIGILPGIYSSGENESVRGVTPRANYVVRSLIVEASWVAIRKDPVMQEYYRKHAGKNSKAAIFKVSRKLLSRVHAVIKTDTPYQLGLVS

SEQ ID NO: 178020 - protein, 306 aa, unidentified
MTLWIGIDVSKATLAVHVLPTRQFLSVPNTGEGHASLCAMLKGQAVGNLLLEATGGYERAVMRALAAAEVPVTRINPRRARAFATALGKTAKTDPIDAALLARMAELVCAPGVAPEPEREVLRELVQRREQLVQQRDDERRRLPQACAPLVRDDLAAHIGQLRLRIRHLDKAIVHAQQHLDDQLSRKLQAIAGIGQVTAASLMAYLPELGRLDRRQIAALAGLAPYNVDSGQHAGKRRIRGGRAAIRRVLYMACWSVIRKQADFKARYQRLRQQGKAAKVAITACMRVLLIRLNAMVREQTEWRTS

SEQ ID NO: 178021 - protein, 407 aa, unidentified
MDIIIERACGLDVHKDSITACIITPEGKEIRTFSTKTVYLIELVDWVKDHKCSHVAMESTSVYWKPIVNLLEAEDIEFLVVNAQHIKAVPGRKTDVKDAEWIAKLLRHGLLRASYIPDREQRELRELVRYRRSIIEERARQLNRIQKVLEGANIKLGSVVSEITGVSSLEMLRSIADGNDDLEVLANMARGKMKQKKEELKLALQGYIQDHQRFMIKTILGHIDFLADNIDKLDKEIALRMQDYQEDIDRLDSIPGIARRMAEQMLAELGRDIKKQYPGAAHMCSWAGLVPGNNQSAGKRKSSKTRNGNKYLKSALIEAAHSVRGSKNYLGALYRRTAARKGKKRAAVVVAHAILRISYYLLTRKEMYIDLGEDYFDKQRQESIVRHSRRRLESLGYVVEIKKPKAS

SEQ ID NO: 178022 - protein, 380 aa, unidentified
MNRFTSQRSRAMEWTPPPRKGYCRSSITNQETQMKQIAVIGIDLAKNVFQVHGTDPAGNAVLSKKLSRAQMIEFFSKITPCLIGVEACSSAHYWGRRLTEMGHTVKLMPPQYVKPYVKTNKNDARDAEAICEAVTRPNMRFVPIKTVEQQAVLALHRVRDGIVKQRTALSNQIRGLLAEFGIVAAKGSKQLNACMTHLLSDPNSTLPVNLQKTFSSLFQELINLTARVKEFDKQIESHVKATDECLRILQIEGVGVLTATAVVASVGDIRNFKSASQFAAWLGLVPRQNSSGGKTQLLGISKRGDTYLRWLLVHGARAALSYAKRTEKLTAWQQAMLQRKSLNKVVVAMAHRTARRIWAVLAKDCAYDPLHHQRHAMVVA

SEQ ID NO: 178023 - protein, 419 aa, unidentified
MSFKIFKFNCCGLDVHKTWIYACIGITDSNNRTEYKQARFSSFTKGLNELCDWLAKYNCKDVCMESTGKYWIPVFNILEQHSFWVTLSHPKYTKPMKGNKTDRKDAKWICDLYMCGMVKPSFIPPADIRELRDLVRYRFKLTCMITGEKNRAQNCLTVSNLKLDDVFSDVFGKSSRSITEHILQHPGEKFDIAPFVDSRCKTPITEIQAAVDGAISKEQVVKLRQCLDHIDELNKHISEVEQEILRLSDKYEAALNLIRTVPGFNKNPLTAIQVLSEIGGDMSVFPTAKHLVSWAGCCPRNDQSNQKIKSTRISRAGSYFKPVLVQIANALIKSKKHPEFTTRYRRIKARRGHKKAIIAICRMILTAIWHILTDLKPYTPEGFLDSRPVNKEKVLTTSQALNLLKQRGYFIKDDPLSVS

SEQ ID NO: 178024 - protein, 413 aa, unidentified
MDVLHSHCAGLDVHKEKVVACVRTCRNGQTHQQVRTFRTETNALLEMADWLTDCQVTHVAMESTGVYWKPLWNLFEGLFELLLVNAEHIKKVPGRKTDVKDAQWIAELLQHGLLRPSFVPERPVRQLRDLTRQRVQVVRQKVQVANRIQKTLEDANIKLGSVASDVLGVSGRDMIRAIVRGETDPTVLAELARQRLREKIPQLQEALFGEVQDHHRFLLGLLMEQVEFLEKQIGKLSERIRGVLPAPFEEAVGRLETIPGIERRAAENIVAEVGPKLEAFASAAPLASWVGLCPGNHESAGKRQGGRTTRGNAWLRVILVQCAWAASRSKGTHLKALYHRLAARRGKKRALVAVAHRLVAVVYNVLAKGQSYRELGEDYLDKQPNKERLKQRLLQRLEKLGVRVTVEEPVAVG

SEQ ID NO: 178025 - protein, 350 aa, unidentified
MRIIGCDYHPGFQQIAFVDTETGELQERRLQHPEEAEKFYRELATQGMRARVGMEASGHARWFERLLAELQFELWIGDAAEIRTKRVRKQKTDRQDAQLILKLMLQDDFPQIWVASWENRDLRQLLWHRHRMVQARTRIMNQLQAVALNEGLRCKKRLWREAGREQLEAFPLAPWASRRRQDLLELLDRLNPTIADLTQTIEQEVEKCPEAQRLRTHPGVGPLTALAFVLIIGRADRFQCGKQIASYLGLVPLEESSGNRRRLGHITKQGNSLLRFLLVEAAQVTVRSIPEWRSKYFHLAMRRGRKIAKVAMARRLAVRLYWMWRQGWNYEQLKKFGPRAGKPENRDGVQ

SEQ ID NO: 178026 - protein, 338 aa, unidentified
MSLYCGIDLHSNNQVVVVLDEEDHSVLERRLPNRLEAVLGALEPYRDELAGIAVESTYNWYWLVDGLMEAGHSLSLVNTSAVKQYEGLKHTDDRHDARWLAHLMRLGILPTGYIYPKQDRPVRDLLRHRIRLVEQRTANLLSVQNVLARETGQMIKGNDLKAFTGEAVRERLSSPELCLALESRLRLIALLDAEIDRLEEAALERAKLRPEFRVLLSVKGIGKTLGLVIMYETGEITRFPGVGNYASYCRCVRSDRVSNRKKKGEGNRKNGNPYLSWAFGQAAYYARRYQPLAQKFHQRKLAQRGAVVATRALAHKLSRAVYFMLRDQVRYDPALLFR

SEQ ID NO: 178027 - protein, 364 aa, unidentified
MFVERTSVGLDVHARSIAAAAIDTTTGEFFKDALVPQPEVVIDWIRRLPGPVAVTYEAGPTGFGLARALRDAGLRCEVAAPSRLVRPAGDRVKTDAKDALLLARLLRMDEIVSVTVPTLDQEAARDLVRAREDTRGDLMRLRHRVSKLLLRHGHVYYGGPAWTRPHTAWLHSIRFDRLGTQAAYQADLEAVEFTLARRERLDDAIAKMAADSEFTPTLRKLCCMRGISTLTGFALAVELGDWGRFTGASIGAFLGLVPSEHSSGDSRSQGGITKAGNTHVRRLLVESAWHHKPRYVVGKTLQARWDQAPAAARVRGHAGNQRLHHRWEVYSQRKKKHTVATTAIARELAGWCWSLATLPDDTAI

SEQ ID NO: 178028 - protein, 317 aa, unidentified
MSKHSMICAGIDTGKRKLDVAIKGQADELQVDNSPDGHRALSGWLRQRRVKRVGIEASGGYEQAVVAHLRRDKFEVVVFQPAQVRAYAQFHLQRAKNDKIDAALIADCTAAVQQIHAPPDPRLAPFAKHLTLIEQITEDVARLKNRHESCRDQHIGRFWREEIARLKGILRNERKQLVAAIRQYPDLAERLALIASIDGVGLSTAVTILVRMPEIGRITREQAAALAGFAPYDDDSGDHVGARCIAGGRERLRKSIYNATLAACFRWNAQLIAIYERLIAAGKPHKVARIACARKLLIYVNTVVERGTPWVQNPTAA

SEQ ID NO: 178029 - protein, 442 aa, unidentified
MTTEKIKNKVSPDEIVAWVGLDWADSEHRISMYDVATGQIEDSVLKQSGEALQQWLAELGKRYGGGRVAVILEQSRGGVVYGLMGYDFIVLYPVNPQSLAGYRKALYPSGAKDDPVDATLLREMVQKNPERFRQWVADDPETRSLRLLVEGRRKLVDEMTRLTNRLTSQLKSYYPQALEWAGELNSRQACDFLEEWPTLDAVKAARPARLRKFYSKHGRPRPETLDRRIESIREATGLTRDPAAVIGGSMMVQAIVKQIRSLIIAVEDYDDEIKRLFHKHPDRLIFESLPGAGPVLAPRLLAAFGADRDRWSLAAEMEMLSGIAPVREKSGKQCWVHWRMACSKFLRQTFHEFAASSVRWCNWAKAYYDCLRERGKSHHAAVRALAFKWIRVIFACWKNRTPYDNQVFLDALAKRGSHLALRAASAVPPCRAHRTVMTVENL

SEQ ID NO: 178030 - protein, 315 aa, unidentified
MSQNNSITINYIGVDVAKLSLAADLPGQCLTVGNDIKGHDHLLRLFGALPNAHVVLEATGGYEQSFVRALHCAGIAVSVIEPSKARAFARAKGLRAKTDPIDAALLRGFGVAMAPHPTAPPTAQQQRLAELVMRRRQLVDSVTCESNRSDHYLDPLANRQAAAHLRLLRKQTDQCDKAIAALIAADEVLAQRSARLQEVPGVGAVTASTLIAEMPELGTLSDEGAAALAGVAPYNCDSGPFAGSRRIAGGRISVRCCLYMAAMSARVHDPILKTFYNRLVARGKKRIVALTAVMRKLIILLNRMLKNPNFELKAA

SEQ ID NO: 178031 - protein, 339 aa, unidentified
MGLYAGIDLHGKNHVLIIINQMDEWVHKTRLSNNINLTLDVLQRFKNKLKAIAVESTYNWYWLVDGLRKNGYNVKLAHPAAFERYDGIKYTNDYSDAFYLAQLLRKGDLPEGNIMNIKRRQIRDLLRKRVMLVQERTKHKLSLQSLIARNSGRMIPMKKVEKMTRSDIDDLFKNEFLRMNATTNINMINNINKELGPIEKKLFSTLKITKDFELIQTVNGIGKILAATIILETGDINRFNQVGNYSSYCRLVKSERRSNGRKKGSNNHKNGNKYLCWAYIEAATSMIQFNEKAKKFYHRKESKTNKIVAKKALANKIARACFYILRDKVEFDDKKLFGA

SEQ ID NO: 178032 - protein, 383 aa, unidentified
MSDHSEAFVAFDTSKLRNAVAIADGGRGDEVRFLGEFDNTPAATAKLVRKLAAKYERLTFCYEAGPTGYGLYRQIKSLGHECIVGAPSLIPKKAGDRVKTNRRDAISLAKLLRSGDLSAVWVPDRQHEAMRELTRARETAMNDLRAKRQQISAFLLRRGVHYPPDKKTWGKMHINWLMSQKFEFTEERIVFEELMEAMRQAQGRLDRLEAAIRAAMPDWSLCKLVIALMAMRGLDIVSAATIVAEVGDLSRFRTPRELMAYVGIVPSEDSTGDKVKRGPITKTGNRRVRRMLVECAWSYQFPPRLSKDKQVKVEAVPQAVREIAWKAQSRLNQRYRALLRRGKLKNIAITAVAREFVGFIWAVAQAVGAAPAAANTKAPAVAS

SEQ ID NO: 178033 - protein, 319 aa, unidentified
MLIGIDVAKAELVVAARPSGERWTVANDERGVRALVERLGVEAPELIVLEATGGYELLSVAALVAAGLPVVVVNPRQVRDFAKATGQLAKTDHIDADILALFAERVRPVVREIPDADAQELEALLARRRQLLEMLGAERNRLGQVFGRGKQKVKKSLKGHIAFLERELRIADTDLGDMVRRSSAWRERDDLLQSVPGVGRVVSFTLLADLPELGRLSRREIAKLVGVAPLSRDSGTFRGRRFVQGGRASVRAVLYMGALVATKRNAVIRAFYQRLLTAGKPKKLALVACMRKLLTILNTMIRTGQHWSIDQSAPVLISA

SEQ ID NO: 178034 - protein, 371 aa, unidentified
MADIDGVAGIDAHKHVFTVAVLDARGGRCAIESFPTSPEGLAEVLALLDSFGFAIGRIGVEGSAGLGRHVAAFLVAAGYDVREVQANRTAERRRRRRRHKTDREDAEAIARETLADPDLPPAGKQRRPDPCWDELVAVRNRRKSLIGQRVRLLNEAEAVLTGLPLAIRAALPQTSRVRPRLRALDRGAASSVQVTAADRVNFAWLVEVAGDIARLDARVTELDKQIPALLGRLGCTLAEEYGIAAVGAMDLLVEVGDPTRFTTEAQFARWCGAAPVAVSSGEGDQAPLHHRLDLAGNRQVNSTLHLMHVTQVRSYPPARDYIAKKRAEHKTKREARRAHKRHLANIVIRRMWADHAQRFKTPANLTTPAAA

SEQ ID NO: 178035 - protein, 419 aa, unidentified
MTKTEPISSAPVLAAIDISKHRHEVLIEVPGRKRRRRVTVLNKLDEFNRLIELLSVYNCPVRVAFEATGNYHRALAWHLSVAGFETKLISSVALARTREALHNSWDKNDPKDAQVILHMMSIGAEQFYHDPLVHGTNDIQELSKTHDIVSKSKTELWHRILTHYLPLYFPEADRFHRSSRSDWFFAFLEQFPSPHFISAMNKEEFIAAAWNVVGRRVLKERLLTDIYTTASSSVGLPVAPDSNAIAMFRMVLAEGRGLIAQRNAIEARAVEMLKDSPDYQLLCTIPGIGPINALTILAEAGDLRRFRHHRQFLKFCGMDLATMQSGMFRGQTKLSKYGNARLRRTFWMAGQVAVMQRANSFRDKFERYITKDRHNAHLRRKASTAIAAKMARTAHAVIKNGEPYRPFFEGTIHDTRTFL

SEQ ID NO: 178036 - protein, 318 aa, unidentified
MVVGIDVAKAELVIATHPAGERWTVTNDEAGLHALVARLAAQGPELVVLEATGGYELLGVAALAAAGLPVVVVNPRQVRDFAKATGQLAKTDRLDADVLALFAERVRPPVRPLPDAAGHALDALLTRRRQLLEMLQAERNRLGQVFSRGTQVTKSLTAHIAYLERELKKTDTELGDQVRRSPVWREKDDLLQSVPGIGRVVSYTLLAELPELGRLSRREIAKLVGVAPLSRDSGTLRGRRFVHGGRASVRAALYMGALVATQRNALIRRFYQRLVKAGKPKKLALVACMRKLLTILNIMLRTRQPWCPEGLTSALESA

SEQ ID NO: 178037 - protein, 401 aa, unidentified
MKVSGLDVHKDTIFCAIYDGKKYGEVKEFVTFSESIRTMAQMLQQEGVRKIAMESTGIYWMPVWNILEEEGFDLMLVNPFLIKQMPGRKSDVKDAQWIAKLLHKGLLRGSMIPCKTIRQLRTYSRRFVKMQGMITRVTQEMERTLEMCNIRITSLMSNNHGVSIQKVIEKIIAGEDSVEELACCIHGRTLNSKGELVKLSLDGQIEEHHRFTLTLAYEQYKLYLKQADSLEMKMEELCVEHYTREMELLMSIPGVGKQAAMQIISETGGDMQAFADSGKLTGWTGLRPRNDESAGKFKSKAITKGNKYLRRIMVQCAWAASRTKGSHYKSKFEQLCIRKSRKKALIAIARKLLTVVWHVLKENEPFNHQMLPVYDPKKIESKMKYHRKELEKLEALGFSNT

SEQ ID NO: 178038 - protein, 337 aa, unidentified
MDKYIGIDVAKATLQIYIPKGNSDLEIKNSPDGLKKFYSKLKKQYKKELKDIVFVYESTGAYSAVLEQFCQDKEILCFKVGAYQSASFSKVIKNRSKTDKIDARMLSQMHILAKEKDIKVPKRDAKAHQIRSYIKYYQSLVKEHRRLSNYLEAAEFNLEDKFILKQVKKKIASIEKEKAMIIEKVLEIIDSNTLYQKAYKNITSIKGIAEKSGIILLYLFLKYPNASRQQITALCGLDPVQRSSGTSVQHKERISKQGLSLVRAILYMPTLNTILYNTEMKLIYDRLVERGKPKMLAQMAVMRKVILLAHSLYKNNQEYDSKRYLKFTEVKEANMAE

SEQ ID NO: 178039 - protein, 423 aa, unidentified
METESIDYAAWIGLDWGSQKHAICVKPADSETVEHYTLEQKPEALHGWFMNIIARFGGRKVAIAIEQTRGAVIHFLLCLECVHIFTIHPKSLKNYRDAIHPSGAKDDPTDAELLLQFLTLHQHRFKPWIPDKPEVRLLVRLVEFRRKMVGKRVRLTNELTQVLKEYFPAALDCAGDLDKVMACDFLAKWPTLEKLQETQPETIRNFYQEHGSRRCNVIEDRLKQIRSAVPLTTDAPVIEPSVFLVQSIAPQLRSVIDAIARFDRRINEVFEKHPDAQIFSSFPGAGAALAPRLLAAMGSDRSRFSSSVEVAEYSGIAPVTERSGKSKWVHRRFACAHFVKQSFHEFAAHSILFCDWARCYYDQKKREGKKHHAAVRALAYRWIRIIYRCWKNRIPYDEDKYLKSLRQRKPAWLESLPSVNLKP

SEQ ID NO: 178040 - protein, 353 aa, unidentified
MIGNCGFIKNNIMKKQCVGIDISKDHLDCCIGCIDSDQNHKLQNNKRFSNNETGFKALLHWVSDLQVTENLMYVMEATGVYYENLIYYLTENDCKASVLLPNMVKHYVKSLNINTKTDKVDAEVLCRLGLERRLGFWQKPSGIMRELKFLSREYREIKYKINQVKNQLHARFYSCQCPESTEQRLKRQIALLETQALEIEAEIRTLVMTDRSFYDKIQRVCTIPGVSFITVVCVVAETNAFALISNSKQLTSYAGLDIQQNQSGSREGKTRISKKGNSFIRYALYMPALCASRFNPSMKSFYKNLTERKPAKKIAVTAVARKLLCLIYVLWKKEEEFNMNYEENKNTDRVSPV

SEQ ID NO: 178041 - protein, 437 aa, unidentified
MEEVTDEPLYRDRVCGIDIGKAGMAATIRVPSDKDPARRAAETRSFGTTRREVLALADWLRSWQVPAVVMEASGDYWKGPFYRLEAEGFECVLADAKQVKNLPGRPKHDPGDSRWLAACLERGAVTSCFVATPEFRIIRLHTRYRRDLTEERTREKQRAEKLLESAAIKLSSVVTDLHGVTGRDIMDHLIAGERSPKVLAQLARARARRKITELEQALEGAEFFTPEHAALLAAMLARIDRVNAEIARLSEVIETLLEPYEEQLQQAESMPGWGRRAAQDAVAETGTDMTRFRTGAHLASWAGRTPLDNSSGKRKGKAKSKKGNRYLGGLLGETAIAAGKTQTREGARYRRLARRRGKAKALVALGNTQLNVYHKLLSSPGMRYQDLGPDYYERRAEVSRQVRHHVGKLGALGFDVTLCRIPEPGPEPGGTGNSHAA

SEQ ID NO: 178042 - protein, 402 aa, unidentified
MQVDDIDVFIGIDVGKSEHWATALTTAGECLHDRPLPNDEARLREVYEHLGEHGRLLVVVDQPATIGALAVAVAQDMGITVGYLPGLSMRRIADLSPGSAKTDQRDAAVIASAARTMPHTLRSITSSDEDAAALSMLTGFDLNLARQVNQVSNRIRGLYTQIHPALEGVLGPWLEHDSVLEVIATWPTPAALRKAGRARIDAKLKANGCRRHAAWAQAIVEALSKQTVTVAGTDAAGVVLPHLARQLIALHTQRADIAAQVEALVEAHPLYPVLTSMPGVGVRTAAVFLAGTLGKTFTTGAHLASYAGLAPVTRRSGSSIRGEHVSHGGNKRLKRAMFLSAFASLRTDPVSRAYYERKRAQGKRHNQAILALAHRRILTLHAMIRNGTLYDPQPAQPLTTAA

SEQ ID NO: 178043 - protein, 467 aa, unidentified
MSAGGLEMNHKRSKPKVDRTMPMVHQNAAAIDIGATMHMAAVRADRASEPVRSFGTFTADLHRLVDWLTECGVETVVMESTSVYWIPIFELLDARGFTVFLVNARDAKHVPGRKTDVSDAQWLQRLHSFGLLRASFRPKGKIAELRAYVRQRERLLEYAASHIQHMQKALTEMNLQLHHVVADITGATGLRIIRAILAGERDPEALACLRHYSCHSSAETIAKALTGSYRTEHLFALEQALALYDAYHEKASACDARIEAVLKELSIHRGRGHEAIPPALRRRNRTDQANALAFDARAALFTLLGKDLTTIDGLGPYLSLKLIAECGDDLTSWPSAKHFTSWLGLAPSNKVSGGKMLSSRTRRSGGRAAALLRLAAVTVGRTDTALGAFYRRLSSRIGKAKAVTATARKIAVLFYNAVRHGMEYVDPGASSYETRYRTRVINNLHRRAKAFGFVLQPLEPKAGAAVS

SEQ ID NO: 178044 - protein, 366 aa, unidentified
MHTAAPDVTVTVGVDTHKDLHVAVALDALGRRLAELEVPATAAGYQQLHRWAHDQGQVDAFGVEGTGSYGAGLARHLRRAGIRVIEVNRPDRATRHRKGKSDPLDAEAAARAVLAGTATATPKDGDDQVEAIRLLKLTRDSAVKAQTQAVNQLKAVLVTAPAELRESLAGLGLITLLERCAAARPGNPTTPQSASKHALRLLARRALALRAEAKQLREVLDGLTAAAAPTLVELTGVGPDTAAALLLAAGDNPHRLHSEAAFAALCGTNPIPASSGKITRYRLNRGGNRQANAALHRAVITRMHWHEPTKTYVARRTAEGKTKPEIMRCLKRYLARRSTAASFRACLWTPVVQRPRDRRDDHAGAA

SEQ ID NO: 178045 - protein, 462 aa, unidentified
MINYKEAYMKNEDKIKNNSKRGLSMINSDAAGIDIGSREHYVCVPADRDEKNIIAFKTFTSDLKKMAAWLKKCGIKTIAMESTGVYWVPVFQVLETSGFEVILVNARHVKNVPGRKTDVKDAQWIQQLHSYGLLSASFRPEDQICELRALTRQRDRLTKSASTHVNRMQKTLNEMNIQLHHVISDIAGVTGMNIIKAIINGERDPIKLAQFRNVNVKSDENTIIKALGGDWRKEHLIVLKQELEIYEFYQKQISECDVAIESCYKEFDKHSNGDLTTGKKQRKNKNSPQFDLQQSLYDAAGVDFTTIPGLSELTVQTIVSEVGLDMDKWKTEQHFASWLGFSPTNKTTGGKVFDTRTRKVKNKASTAFRMAALNLGRGKTAIAAFYRRMKGRLGTPKAITATARKLACMFYRLLKYGHEYVERGIEAYEKKYKETMVANLQKQAIRLGLSVVKTESSVKALC

SEQ ID NO: 178046 - protein, 408 aa, unidentified
MRIIGLDIHRAFAEAVAWKDGKLSRLGRVIMRREQLEEFAKQLSNSDIVVIEATGNAASVAAVIGPHVSRVVIANPKQVRLIAHAKIKTDKIDAGVLAQLYASGFLPEVWIADEATQALRRQVTRRNQIVRQRSRLKNIIQSILHAHLIPSCPHQDLCGPTGRAWLSEQILPGDERLAVERHLREFDRLTDDLKVIERDLAQSALADDRATRLMTVPGINMVVALALIAAIGDITRFAKPEQLVGYLGLNPSVRQSGPGPAYHGRITKQGRGHARGMLVEAGWVAARCPGPLRSFFLRVQSRRGQHVAAVATARKLTILIWHLLTKNENYLWSRPALHARKLRDLELKAGHKSARGQKGTAHAYNLKSQRDQERRWVEQGETAYARFVTGWNARGPKARTGAAKEERP

SEQ ID NO: 178047 - protein, 358 aa, unidentified
MKKNQTNTHAVIEPRRATKFSQIKLGVDVHADTYRVVRQIDSATPQPAQKMSPEEFLKFAARQRLLAEQVYCCYEAGPFGYSLHRKLLAMGITNVVVRPQNWDELGRKVKTDKTDALALVQRLDRYVQGNQKALAVIRVPTVEEEQQRIESRHREQLQKDRQTHEAQGRSLLLYQGYRITGRWWKEAAWRGLKKQLPSWLAEVLENLRVLILGTDRLLEELSQKIEKEARPQPKGFGLLTSEVLRREVLDWQRFKNRRQVASLTGMCPGVRASGLKSISGSITKHGNPRLRRALIELAWRVVRYQPRYGPVLRWKAVLEHRQNRGGRKKAIVAIGRRLAIDLWRVETRRSTAKDLHLS

SEQ ID NO: 178048 - protein, 392 aa, unidentified
MLFVGIDIGKNNHVASMMDEYGKVVFKAFSFSNTTDGGNALFSKLSSYSSNPSDFEIGMEATGHYWLSVYSFLFEKGFLLHVINPIQTDGWRKGTEIRKRKNDTIDSVLIADLIRYGQFVQTRLADEDLFSLRTLTRFRTYLVESISDLKRKVVCVLDQIFPEYQSIFSDIFGKTSKELLLQFSSPIDFETISSESLAELLAQLSRQKIGAAKAEQLKAAASSSFGITFAKNSFTFQLKALIEQISFIENQVKETESEISNIMRKLDSPITTITGIGNVTGAAIISEIGDISKFDNPRKLVAFAGLDATVTQSGEFEASHNVMSKRGSPYLRKAIFQAALIASFHDPVLSVYYQKKKAEGKHHLTCVGAVARKMCNIIYAVLKNNQPYVPKA

SEQ ID NO: 178049 - protein, 334 aa, unidentified
MWHIGIDLHRRTLVIAAVKDDGEVIDSRRIDCQDTAEILKAVEQLKPFRAVIEATGTYRWLYDLLSPHGSVLLAHPLRLRAMIQRRAKTDKLDAQLLANLLRIDQIPLSYVPPKNYQQLRDLTRCRARLARGQAKAKINLRALLARQNLTAPYKVPFGPRGLAWFRKQDFGPIENLVRDQLLAQLEHYAEHMAVFDEQLDEARKDVPQAEALLEIYGIGVFSALLIIAELGEVKRFRTAKQVGAYAGLTARVHQSGSHCYYGSITHEGSSWLRWVLVQAAMHVIRSDVALRNFHTRIRKRSSAKIARVATARKLAEICWKRLRRWDRQHEGKQQ

SEQ ID NO: 178050 - protein, 354 aa, unidentified
MNDAKYIGLDVHQATISVAVRDSAGKLVVEAVLETKAETILQFLRGVRGSLHVTLEEGTWAAWLHDLLLPHVTRVMVCDPRRNALLRAGNHNDRVDARKLAELLYLNELNPVYHGEHGLRTLKEVARSYLTITRDLTRVMARLKAIYRSWAIPCAGEQVYAPRYRAEWLAKISEDGVRRRAEHYYQQFDALAVLRQGVRRELLAESRKHQATRLLRQIPSIGPIRAALLIAIMQTPNRFRTKRQLWGYCGLALRTYTSGEYRFVKGQLQRSKKILSIRGLNLNHNHDLKNIFKGAATRAAAVGPFKNFYEACVARGMKPHLARLTLARKIATITLLVWKKGVRFDAKYLKQQAA

SEQ ID NO: 178051 - protein, 311 aa, unidentified
MEIYVGIDIAKLTFDLCSGPQKQNQQFENNTKGIRQAARMLAGLRPKLVVMEATGGYETPLAAELYAVGLPVAIVNPRRIRDFARARGQLAKTDKIDAEVIATFAAKMQPPTQEHIDHTSRLMKALVARRHQLIRTRTAENNRMEHALDKVITASLGRIIKAIDREIENVERLIREQLDRMPELKAKAQILDSTPGIGETTAAMLVTEVPELGRLNRRQIAMLIGVAPINRDSGTFRGKRMTGAGRRDVRSRLYMPTLVAIRHNNVIRRFYQHLLSKGKPKMTAIIACMRKLITILNTIVAKNETWNPNLA

SEQ ID NO: 178052 - protein, 338 aa, unidentified
MKTYAGIDLHSSNNYIGIIDEQDHRVYQKRLPNQIEYIKPALEPFKESLQGVVVESTYNWYWMVDGLKEDGYKLHLANPSAIKQYEGLKHTDDKWDSFWLAHMLRLNILPEGYIYPKEQRPVRDILRRRLLYVRHRTSHILSLQSAITRNLGYKISGNDIKKLHESDADKLFNEPFLVLAARNSISTIHFLGKKMQEIERPVKSHVKLKPEFEYLLTMPGIGDILGLTIMLEVGDINRFTKVGNYSSYCRCVKSERLSNNRKKGEGNRKNGNKYLSWAYVEAANFAIRHYPKIQSFYQRKKAATNGIVAIKALSNKLARASYYVMRDQVAYDMNKLFR

SEQ ID NO: 178053 - protein, 436 aa, unidentified
MRGCRCSMIMGFTKPIEHFNLQRKKVITMNTLYVGIDVSSKSNVVYLMLPNGDKHSNFSVANSHEGSTLLVKKIYSALTSHSLDTVLIGLEATSVYGDNLVYFLREDATLAPFNRKIHVLNPKQVKKFHDTYNDLPKNDYVDSFVIADCLRFGRINKEVYMGDYRYKALQNLTRARFFAVQNLVKEKQRFMNVLFKKYSTMTQEKVFSDAFSTTALAVYDEFESAEALANMDLHELTDFIIEKGKNRFPDPDAVAKAIQKAARSSYRLPKTVNDSVNQVLSISITSMKALESQIKEFDKAIKALMELLPNVLISIPGIGPVYSAGIMAEIGDINRFDNQASLAKYAGLAWKQHQSGGFEAEVTRLIPLGNRFLKYYLCEAAFSLVRCDKEYSDFYHLKYKEVNRYQHKRALALTARKFVRLVFRLLKDNRLYCPAK

SEQ ID NO: 178054 - protein, 345 aa, unidentified
MTITTMGVDLAKNVFQIHGIDKAGAVVVRRTLRRRQMMPFFSKLAPCLIGIEACGTSHYWARELSGLGHQVKLMPPMYVKAYVKRGKTDAADAEAICEAVTRPTMRFVAIKSPEQQSILALHRTRDLLVRQRTQLVNMMRAQLAEFGIVLAKGIQHALRLARQLVEGVAPDIPPLAVKVVVTLAEQMGTLQVQIEDLEKDLKTWSQNNEAVTRLKSIPGIGTITASALAASVTDPHQYSSGRQFAASLGLTPRANSSGGKERLGRISKMGDRYLRRLLVNGMTSQLQAVRRHPDAHPWVTGLLRKKPAKLVAVAMANKAARIAWVVMTRGENYRTAQPQIEAAAG

SEQ ID NO: 178055 - protein, 382 aa, unidentified
MPAYADPAPKPISADTIFLAFELSGTSWLVALHAPDADKVERHRLPAGVAAEVLGLIARTKARVARRLGMTPPIACCYEAGRDGFWLHRVLEAEGIASHVMDPTSLQVDRRARRAKTDRLDAQALLRALMAWSRGERQVCSMVRPPSPEHEDERRLSRERGTLLKERLRLSNRIKGLCAAQGIYDYEPLGADRRERLARLVTGDGRALPGRLAAEIGRQLDCLELVLRHLAEVEAVRDTRVAQAREQGGSKLATLLRLKGIGPEVATVLELEVFHRHFANRRDVAAYAGLAPSPYASGGMSREQGISKAGNRRARKVLIELAWLWLRHQPESALARWYRDRVGTATGRVKRIAIVALARKLLVAIWRYVETGLVPAEAAVRT

SEQ ID NO: 178056 - protein, 406 aa, unidentified
MRRTKKRGPGPSHLLITGDHAGNVVGIDPHKRTLTATIIDPRGGVLASEHFRVSGEGHRALEAWARQYGQVARWGVENAAGWGRHTAVFLTDHGHDVRDVCANRTPRSDRARQRGKSDTLDSERIARETLAHSMLPKAFKRAGQDQGPDEQHQLLCLWHNRRRSILTSRQHLVNEAEHLLCELPLDLRDQLPDTKAVRPRLAALQRRNRRRRYNPPTRLRLQLLDGYHAQITALDREEKQVVTQLDELVKASGSTLGELCGLSTRSVAELLVETGDPRRFTEGGFGRFNGTAPLAASSAEGPGEPVRHRYNPGGNRRINAVLHRMAVTQLRCEPRAQAIYANARANGHTKKEARRVLKRHLSDVVYRRMIRDLAASHPAQPLSAAQPRAAAAQSRVARQGRAKRAA

SEQ ID NO: 178057 - protein, 381 aa, unidentified
MEKSSILYVGLDVHKDSIDIAVAEAARDAEVRHLGSVAGGLDAVSKSMRKLVGAGHRLHIVYEAGPCGFVLQRHFSALGWHCDVVAPSSIPRPSGERIKTDRRDALKLARLARSNDLAVVRVPGPADEAVRDLVRARDDAVREQRNGRHRLKALLLRNGLPYAGKSSWTAAHLHWLARLKMEHSAQQIGLQEYLHSISESAARIVRLEQAMRDTLPGWSLAPLVQALQAMRGVQLIAAITLVAELQDFLRFETPRQLMAYVGLVPGEHSSGSKRRQGSITKAGNSTARRMLVEIAWHYQHGPRVSATIATRQDHLPKAVTDIAWAAQLRLNAKFKRLLARRVMKNKAVVAVARELTGFVWAIAREVQTSGWQGSQPESAAA

SEQ ID NO: 178058 - protein, 413 aa, unidentified
MRVMIERCCGLDVHQETVVACLLIGAPGVRPTKEVRTFRTMTRELEALRDWLKAAGVTHVGMESTGVYWRPVYAVLEGYFELIVGNARHIRNVPGRKTDVKDAEWIADLVRHGLIAKSFVPARPLRELRELLRYRRKLVESQSAERNRLLKLLETANIKLASVASDVFGVSGRAMLKTLSEGNATAEEIAGLAKGQLRRKHDDLVLALEGRVEEHHRFLLAIQLHRLEAAEHDIEALDSRIAERLEPYRTQHALLMQIPGVDWVVAAVLIAEIGIDMSVFLSAYHLASWAGVCPGNHESAGRQTSGRARKGNVHLRTILVGAATSASRTKGSYLKDKYHRLKARRGALRAALAIAHKILVAAYHMLAKGLAYRDLGEAYLDQLHQTRTAANLKRRLERLGYTVALQLKEATTA

SEQ ID NO: 178059 - protein, 348 aa, unidentified
MTMIGGLDVHRQQITFDYVDDEGLVHWGQIRPATRKTLRDWLAKHCPDGDGEFAMEGCTGWRYVSEELAAAGVGVHLGDPAEVAALRGPKKRAKTDRWDARLLRTLLLEGRFPESWIPPAHVMEVRTLGRLYCALMDERRSWQQRIHAQLFHQGCPPITALLSQAGREALAAAELSAAGRQYLDTAQRRIDELNADIAPLRAQLVAFARHQPGCQALQARPYGVGWLSAAIIWAEIGDARRFRSSDQVVRFAGLDITGYSSDAKRAPGHLARQGSPERRWAAFEAAKCAARPGSPDYVDYHQVAARKEGKRPTLAVERKILRRCYHILRELGATALAAPTAKPNKTAA

SEQ ID NO: 178060 - protein, 391 aa, unidentified
MTRISVGVDVSKNRSTVCIMDQDGKVIMRPFLVWHSTEELDFLADTLKRLNGEVRVIMESTSIYQYPIALHLKEKGIFISIVNAYEMKQFANIDFRGGKTDKKDSRTIASYGISYWDKLVEWQIPKDTYFNLDLLNRTYMNAKKHRQIILQELQHYIDCAMPGMDKELHSLNLSTKKDFMLDFVEKFWHRDEIVNKTETEFTEVFTAWAKKKGYRPVEGKAAKIYAIAKSCIPYYPANPTVKTILQCIVDKLSGVNRTHVTIVTQMIEEAKKLPEYQIVREMPGVGDPLAARFFGSAGDIRRFKNSKALVAYAGIDSPPDESGDFSSTHRHITKKGSKVFRDTGYEIMMALRAQKRTWEKVRKNPEVYDYMLKKEAEGKPPPKLNELARFN

SEQ ID NO: 178061 - protein, 369 aa, unidentified
MAVAKRIKKERSSKTMAEGVAAAGLDLSDRRARFHAIDDEGETVETGTVAMEAPHLQRWASNIAPTVIAIEAGTHSPWVSRLLTACGHEVIVANPVKVALITRNIRKSDAVDAEYLARLARFDRKLLHPIQHRGEQAQLDLQVIRTREIMVQSRTKLIGHVRGAVKSFGARLPKCATEAFVNKTRKVIPEQLRSALDPVYVQIEHLSTTIAGYDRQIETTARELYPEVERVAQIKGVGTLTGLTFVLVLEDASRFRRSRSVGAFLGLTSKREQSGEEDPQRRITKAGDRLMRRLLVQSAHYILGAFGEDCDLRRHGMRIAERGGKRAKKRAAVAVARKLSVLMHRLWISGETYDPLRNGGKRAELPSAA

SEQ ID NO: 178062 - protein, 318 aa, unidentified
MHLDDSVECSVGIDVSKARLDVHRLPDGLSMRAPNSPEGHRDLLARLPEPGTCRVVLEATGDLQRRLVAALAEAGHYVSVVNPRQVRDYAKALGILAKTDAVDAEVIARFGRDVKPRCVAEVPARQAELDQLVARRRQLVQARVAESNRLDDDAPTLVRQSVRRQMSSIAKDLDRLERAILDLVRSEDDWRQRFDLLKGVPGVGDATAAALVAELPELGRLDRQAIAALVGVAPFADDSGRRRGRRSTRGGRRPLRSTLYMAALAAMRVNPAIRAFSERLKGQGKPGKVVVVACMRKLLIILNTMVKHNSPWRGMTPA

SEQ ID NO: 178063 - protein, 312 aa, unidentified
MTRIICGVDVSKARLDAWTVPADAFESFGNDAEGIAALAAFCRRHAVELVVMEASGGYERTAYLLLWAAGQLCALTNPRSVRRYAEAMGVLEKTDRLDAAIIARFAIARDLQPCPPPSPGQQRLRALVARLGQVTGDLTVQKQRRCMAHDAETVASLDEVIVLLKRQSRRLEGEIAGLIDDDPLWAAIAAALRQIKGVAGRTVARLIADMPELGLCSNKAVAKLAGLAPLADDSGKRQGRRRIRGGRAPVRAILYLVADIARRFDDSLADFARRLRDAGKTKMVVRIALARKLLVRLNAKARDARIAYAHAA

SEQ ID NO: 178064 - protein, 344 aa, unidentified
MKNTTIAVDVAKLVFEVAVSDTPGQVHERHRLSRARFQRLLAERPPATVLMEACGSAHHWARTAQAHGHRVVLVPPHVVRPYAPRNKTDRIDTKGLLEAFRNEDVRPVPVKSVSQQALVALHRLRTTWLATRTARLNTVRGLLREFGVLIPTGAHHVVPHVQMLLGDADSALPGLLRPALADAAQEIREIETRIRAVDRQLEQLAREHLVATQLQTIPGIGVLTATALVATVGDVARFASGRHFASYLGLTPREHSSALRRRLGAISKRGDPYLRMLLIHGARSVLSHAKLKTAPPLDRLRTGALQLERRRGPNRAAVALANKLARMVWAVWRHDTAYVGTSVV

SEQ ID NO: 178065 - protein, 314 aa, unidentified
MNAQGMVVGIDVSKDWLDVALGSDSLRIANEVAGISELIDRLRNIGAQLVVMEATGGYETQAASAIAGAGLRLAVVNPRQVRDFAKAMGCLVKNDRIDAHVIAVFGEAVDPQITRLPDEDALELQGLLARRSQLVAMRVQESNRLALMKGAMRKQIKSHIAWLDKAIDEVSTDLTARLRTSAAWREKDELLRSLKGVGPVTSGTLMASLPELGVLDRRSIAALVGLAPFNRDSGTFRGRRAIWGGRAQVRHILYMAATSAVRSNPVIKTFYERMIARGKPHKVAMVACMRKMLTILNAMTRNNTHWAPAYQAPN

SEQ ID NO: 178066 - protein, 300 aa, unidentified
MTSHVCGIDIGKTVFHLIGLSKEGKIVAKRRFTRKQLIVHTVNMPACLIGMEACPGAHYLARVLRAQGHEVKLMPAEYVRPFVKSNKNDYIDAEAIAEAVQRPTMRFVPIKSEAQLDLQALHRVRDRWMGRRTAVINQIRAFLLEHGITIAVGPAHLKRQIPSILEDADNLLSPRMRALLVELRDEWEKLEMQIEEIDREFSQAVKKEENCRRLLTIPGIGPLTATALTAAIGNATAFHKSRDLAAWLGLVPRQHSTGGKSRLLDISKRGNPYLRRLFIHRGQSRGRTRETRKSHIRKLA

SEQ ID NO: 178067 - protein, 339 aa, unidentified
MGIVGGLDLHRRQITYDWLDTTNGETKRGVIRPATRQSLREWLAELARTDGAFALEATTGWRFVVEELQRAGLEAHVAEPADTRALRGKKRRAKTDRADARHLRDLLLAGSLPESWIPTEFIADLRTQVRLRKSLIDQRSGWIRRVRAQCFHHGLADPPNVQTAAGLAWLARAELPAVARQVVAVALTMIEAIDVHIHALEAELCAIARHQKGCLALQSQWGVGPLSAVALVAELGDVTRLSSSRKAVRFAGLDITVSESDIKRSRGYLSRQGPPVLRRTLYEAATSAWRKASPDHEYYLQTKGRLGTKRARLSVARRMLRRSYHLLANLGEAAIEPAR

SEQ ID NO: 178068 - protein, 288 aa, unidentified
MNKDIKYFGIDISHLVFDVTDSNGNYYQFKNKVSGFKKFKKLLNCNSHCVMEATGYYHYQLAYYLFENDKKVSVENPLAVKRFIQMRLSKIKTDKSDSKLICAYAEQVELKLWKGSSKEVQESLQIARALSVYTKQRTMLKNKLHGESVLGEPSKAVVRSLKRSLRQLDKEVGTLEERLMLLVKKSHQDLFTRIKTIPGIGRKTAIMLIVLTGGFERFSSTGELCSYAGLTPVIRQSGSSVKGRPRISKMGNQKLRNLLFMCSFTACKYSKACRALYERIVAKGKSKN

SEQ ID NO: 178069 - protein, 378 aa, unidentified
MISVGIDVSKEKSTICILKPYGEIVSKPFEVCHTEKELSELTSMLLRLNDDVRVVMEATGIYHLPVLCYLQEKGLFVAVVNPFEMKEYRCQGLRRVKTDKQDAVTISNYGIDHWDRLKEYEPEESIYAELKLLGRQYRHYMRMRVESVLELTHLLDYTMPGIKTLLKGWNETNGKDKLGDFVEEYWHYDNITKKSEEQFIESYLKWAKEKGYHQSQDKAAKIYMLAKEGIPTVSSDTSSTKMLVQEAVRVLREIDNTLMTILTQMQALAKSRPEYPVVRAMGGVGNVLAPKLIAEIGDVRRFHSGKALIAHAGIDAPPYQSGQFTGTERKISKRGSSSLRKIGYEVMRCLKTHKEPEDAAVYRFILKKEKESQNVPQK

SEQ ID NO: 178070 - protein, 360 aa, unidentified
MIILAIDLGKFNSMCCFYDTKTQEYRFQTVAMSRMYLTTVFEKHEIDLVVMEACGPSGWISDLCEELGLKTFVCSTNDAAWEWKNVKRKTDKDDALKLARLAMMRQLTRVHMPQHQVREHRSLIKYRKKLVGRITAIKNAIRGLFLCHGIEIAKGLPAWYSGRDLINSYRKPLAECSAEELWRGQLDFELTLLDSLRKQITDVETRLDMLAANHKGIQRLRTIPGLGPRTAEVIVTALDDVHRFKNGRQVSSYIGLVPRQYQSGETDRNGRITKRGSRILRTILLECAWVSLQYNDWSRATYDRIQGGQKTRKKKAAIALARKIAVVSWAMLKNETDWDPEKAKLNIKPTVEECLAGSTA

SEQ ID NO: 178071 - protein, 333 aa, unidentified
MDVHKETTTYAVFEDGDFKGTDTIPSKPSVMQSLARSKRGAIFIMEACGIHEWIHDILDDEDADVRVFVAPRREAKQRKSDVNDAVLLARRFLSSELRQVFVAPKNIRDLRQIVEDRAFLVKVRTMHINRLKSLLNMTGVHARHGSHNLRKRKEELAQIVPSSRMMQDMIKILDGQIKTFDKTIMAEGAKIPVVTRLRSIRGFGKLVALAFYVKVWDVRRFPNADALVSYLGSDPVWESSGDKHRDTHKTSRTCSNLLRSYLNQASWVHVNAPSTSNISQDYQAKSRSLGKGRAIGRVQRKLIKAAYHVWKDDRDFTMTRPASLVSCRAQAAT

SEQ ID NO: 178072 - protein, 414 aa, unidentified
MLKIVYRICCGMDIHKSFVVACIASTNEQGVTTYKSKRFSTFTGDLRRCADWLSENNCKDVCMESTGKYWIPVYNILEPTCNIVLAHPKYVKAIRGKKTDKRDAKWIADIFKHDLVAGSFIPPADIRQLRDLFRYRWKLTSFTTGEKNRAQNCLTVSNFKLDDVFSDVFGKAASAITSRILENPTEKITDVSGFRTKGMKATNEQVLAAVDGEMCKEQAEKLRIIRSHMDSLELCKLNLESLILATAEKYLPQLNLVVTAPGIQSFAAIGIISEIGVDMSVFPTSKHLCSWAGLTPQNNESAGKKKTTRISRAGAYIKPLLVQCALNAIRAKKFPEVRNRYLALKKRRGHKKAIIAIARMLLTAIYNMLKKNEPYNPELYRKGDRPPAHREVSVEEAIFILQRQGYLVTAPPPT

SEQ ID NO: 178073 - protein, 359 aa, unidentified
MVNLTTKILNMAEQKRFIGVDLSKRSFEVAMVNDNTSQITRKKYKATTEGRQEFVASLREDDVVAMETGNSSFVLAKLIQKYVHCKVYVLNAGKLHIIFRSLKKRDKEDALRIAKFIQRMPEEELPTVAMPSDEEMAMRSTVAEQMRLDRSRTRSLNALYNLLWNNGVSGIGRTELKKEKNREKAISKLPEVYKDQGRRLVQLIDMYEQYLNEIEENQKEVLQEREEETTISLSMPGIGPKIAFVLQSYLGNMERFNSRRQIGYFAGFTPRVDSSGDRERYGSITKKGPKRVRQVMVQAAWAAMQSNQGTVLKEVYKRIRSTKGKKKAIVAVARKMLEILYVMHTRKELYSAPGLADHS

SEQ ID NO: 178074 - protein, 408 aa, unidentified
MRGTKEFNRKERMLLMQSCLAIDVAKGKSMVTLISSSGEVLINPYEITHSINDFTNLLNRINKLKLENISVIMESTGVYHRPIERFFLENGFKVFVINPIYGKMHKRNLRKTKTDKEDCFNLANLFLSNTFKEYIKPDQLYLDLNALSRQYFALEELSVNIKNRYRNLLYLCFPEYEDIFKGNTIYSNIALKFISRYPHADIISNTRIDALQNFLKKHEFRHWKSKALLIKDLASKSYPSVNINDELVSNLSQLAELVNEYQKSIDIVKYKIIFLAKKTKYFETIYSIYGIGELMTSIIIAELGDINRFNNIKELTAYCGLDPSIKQSGKSVNVHGPISKSGNKYMRKILFIAITNIIRLTAISKIENDIEIYYRKKRNEGKHHYAAITACTTKLLRKIFALCKQLDK

SEQ ID NO: 178075 - protein, 389 aa, unidentified
MSPQNDQSKKCFTAFEQASTMVAVVELSKKLWLVAGIVPGIGRHPLKKFEADENRLLALLHHWQQQAVKAGREIKRIVVAFEAGRDGFWLARWLRVRGIEAYVIHPTSVAVSREHRRAKTDRLDTEHLKRVVLGWLRGEPDHCRMVAIPTVEEEDAKRPNRERETLVGECTRIVNRVKACLARFGIRGFNPTLRKAADRLETLVTPEGARLPPLTLAEMLRDIARLRFLREQIKSIEKARVQRLRDAPATRTNAMVNLIARVFGIGIETADLLVHEILSRNLRDRRAVARYAGLTGSPDESGDRRREKGLARAGNARVRRGMVQLAWRFLGFHPDSALTQWYNKRAADGRGSTRKTMIVALARKLLIVLWRMVTTGEVPADLKLRRTTA

SEQ ID NO: 178076 - protein, 403 aa, unidentified
MNAVGIDVSKGKSMVAIMRPFGEIVYTPFEIKHTSSDINSLIEIINSVEGESRIVMEHTGRYYEALAHELSAANLFVSAINPKLIKDFDNDSLRKVKSDKADSVKIARYALDKWQNLKQYSDMDELRIQLKTMNRQFGFYTKHKTAMKNNLIGILDQTYPGVNSYFDSPARSDGSQKWVDFASTYWHVDCVRKMSLNAFIDHYQKWCKRKKYNFSQSKAEEIYGKAKELVPVLPKDELTKLIIKQAVDQLNSTSTTVEALRTLMNETASKLPEYSIVMNMKGVGPSLGPQLMAEIGDVSRFTHKGAITAFAGVDPGVNESGTYEQRSVPTSKRGSADLRKTLFQVMDVLIKTMPQDDPVYQFLDKKRAQGKPYYVYMTAGANKFLRIYYGRVKEYLATLPESD

SEQ ID NO: 178077 - protein, 401 aa, unidentified
MKVSGLDVHKDTVFCAIYDGKKYGKVNEFATFTENLREMAEMLTGEGVKKIAMESTGIYWIPVWNILEEAGFELMLVNPYLIKQMPGRKSDVKDAQWIAKLLHKGMLRGSLIPDKTIRELRTYSRRFVKTQEMVSRVTHEMEHILEMCNIRITSIVSKSNGMSVLKVIEQIIAGNDTVEELACCIHGRIVNSKGEKVRLSLEGHITEHHRFSLSLAFDQYKLYKGQLNSLERKMEGLCDQHYSREMELLMSIPGVSSQSAIQIIAETGANMKSFADSGKLTGWTGLRPRNDESAGKLKSKAITHGNKYLRRIMVQCAWAASRTKGSHYKSKFEQLCIRKSRKKALIAIARKLLTVVWHVLNEKEAFNPILLPVYDPKRIEMKIRYHRKELEKLEALGLLNT

SEQ ID NO: 178078 - protein, 383 aa, unidentified
MPDVSSTAPAQVRLWVALDVHKHSIVAATLPPTGGAPEVQRIESSERAIRRLIDRLGGPSGLAVAYEAGPCGYDLFRLFGRLGVACDVIAPSLVPVRAGDRVKTDRRDAKKLVRLYRAGELSFVAAPTPEQEGLRDLVRCFDDLRCARTAARHRVAKQLLRHGRIFREGKKSWTKQHVAWVRRQRLEQPNAQRALEHMLAHLNGLDAQLGALEHELAALATSDPWRDPVAWLCRFRGIGLRTALGLLAEIGDFRRFGSARELMSFLGLTVSEYSSGDRQHRGHLTKTGNRHARRLLIEAAWHYQHPPRRPLRTGALAEPVPSAVDARAWQAQIRLHHRYRHLTDHRKRSTVAVAAVARELAGFIWAAMTHQPVRTDQQLTATA

SEQ ID NO: 178079 - protein, 385 aa, unidentified
MIIIGVDPHKRMHMASAIDPATNRQVTALQIEASLAGYRRLLKWAERFGERSWAVENAHGLGRHLAQWLLVRGEAVEDVPSTATARVRELSRGRRKNDAIDAAAAASVAALHGDANPVLAEDITTVLALLDERRTNVTTQRTRLVNQLHAVFRDLVPGGAPKDLSAAAASRLLAGIRPVGPVEAARKQLARDLVAEIRDADQRVKALTAQIAETVAATGSHVTEVDGVGPVVSGRLLARTRQMSRFPTAAAFASYAGVAPVEVSSADRIRHRLPRGGDRQLSHALHIVAVNQIRMPGSAGRAYYDTKIAAGKTEKEARRCLKRRLANHIWRLMIRDEQPAAAGPGGQPGATLQSSAAGSTPTTSSSDKSHPEPANPDSTTDHTAA

SEQ ID NO: 178080 - protein, 349 aa, unidentified
MQIAVLGIDLGKNSCSVVGLDTTGRIVLRRRTNRDGVIKLASRLPTCVMAMEACCGAHHLGRALQSIGHQVRLMSPEYVQPYVKAQKNDERDAEAIAEAATRPTMRFVELKSETQLDVQSLHRARSRLVGERTALINQLRAVLLERGLTVAQGRRRLEQYLALALDADDAPPLLLSARMRLLIDDMRAQWRELDRRIAAFDAEFVAVARKDATARRLTTIPGIGVLNATALVAAVGDARNFSRARDLAAWLGLVPRQATTGGRPRLLGITKRGNKYLRTLLIHGARAALPSLVTTDGALGNWLRGLSARAHRNTVVVALASKLARIAWAVLRAKATYHATIGDRPAAAA

SEQ ID NO: 178081 - protein, 340 aa, unidentified
MNATTYGLDVAKRVLQMYWVEAQTGEIVNRRFGRDQLIRFLAQRPAGRVALEACGSGHWWARKIKALGHEVVLLHAKFIRPFVQTNKTDAADAQAIWTAVQQPGMRTVAAKTEDQQAMLSLHRMRALLVKFRTMQVNQLRGLLYEFGATFRAGRVAGLAEIRARMAELEDALPGTMIDSLQDQLQRIDGLEQDIDRLEQWIGTWQKQEATCRAIAEVPGIGKLTATALVATMGDAKTFKSGREFASFLGLVPRQSGTGGRIRLGSISKRGDPYLRTLLIHGARSVLCHAKVPTPWQTEIRARRPANVAAVALANKMARTAWAILAHGQPYRKDYVSVKPA

SEQ ID NO: 178082 - protein, 412 aa, unidentified
MQVLYTTCAGIDVHKREIAVCLITRAASGKRTQEVRTYGTMTRDLVDLRDWLCEHGCPAVAMESTGVYWQPVYNVLEEALKVLLVNPSHLKHVPGRKTDVKDCQWLAELLEHGLLQGSFIPPQAIRDLRELTRYRRKLIQTRASEVNRLQKVLEGANLKLASVASDVLGVSGRAMLDALLAGERDAQVLAELSKGRLRHKQKELAAALEGRFRPHHAHLLSRLLAHIDFLDERIAEGDLKIEELCRPYAPQVELLDTLPGFAVRAAQDLIGEISVDMSAFPSQKHLCSWARICPGNHESAGKRQSGRTGAGNPWLRALLVECAHAAGRTKGTYLAAQYARFARRKGKKHAAVVVAHSLLGAAYFMLRDKVSYQDLGPHHFDELNKAQVMRYHVRRLEDLGLQVQVQEPSETD

SEQ ID NO: 178083 - protein, 340 aa, unidentified
MKLYGAIDLHSTNSVVVVIDEQDRVVYQKRLPNDLALILKELSVYQSELEGIVVESTYNWYWLVDGLMEEGYKLHLANTAAIQQYEGLKYTDDHSDARWLAHLLRLDVLPEGYIYPRAQRPVRDLLRKRSQLVRQRTTNLLSIQNLLTRNTGSSLSARRVKGLDVQQVDELLPNPDLALAVKANLSVLCSADEQVQILEQTVTQRVKLRSQFSFLKTVPGIGEILALTIMLETGDIRRFASVGNFASYCRCVGSQKISNGKTKGKGNTKNGNKYLAWAFVEAAHFAIRFNSKIKSFDQRKKAKTKGVVAIKAVAHKLCRACYYIMRDRVPFNITKAFDQN

SEQ ID NO: 178084 - protein, 457 aa, unidentified
MRTIGIDLAVSAAHRAVVMAADGQFVTPVLSFHARWEEIEQLVQRAREGADPDLPLQAVMEPTGMAWFPVAVALQRLGVALYLVNGQRVYDLRRFYKRHSSSDRLSAQVLAKMPLVDQESLHPLEIPSASRLACQRGCKELDRLQGQMTAIKNRLRDIDRFAWPGLEQIFRDIYSPRARFFRRTWYDPAQVVGAGLGRFRASFGTFAGQDQEVDWVERLFQLAIETLQLYGSTALDYILLQQQVCRELDHLAYLEQWADAVWRDTVRPLYRQLHPSRHLETLYGVGEQGAAVYASFIGRAERFSDQRHFRGWHGLIPDSRQSGDVEGKGLHISQAGPDLIKKFGYLNAQIARQYDPQIAAIYYDQMVHKGNHHNQAVCACATHLLDRVYVVLKQDRPYELRDVDHRSLTPEQARATIAQHYTVPSEVRQRSQRRARKARAERRIERQHKPKGSCPRP

SEQ ID NO: 178085 - protein, 355 aa, unidentified
MAIVVGCDLHSRFQQVAVMDLETGEVLCEQRVEHEGDQVRSLYQRWSGPVTMAIEATGYTTWFAQQLAELGHQLVAGDAARLRAMEPRRQKTDRRDALHLASVFASGRFPAIGMADPARRDLRHLLLHRHRLVRTRTLVKNHLHALAMNHGLCRKRALFSVAGRQRLEALAMAPFEGWRRAELLEWLDGLNGKVQSADQQLQQQLPAWPEAGRLMTHPGVGPVTALAWVAFVGDAGRFPGSARLCSYLGLIPREAAAAGGSIWARSASRATRSFASCWWRRRRRRCAATWSWGAGIVGWRPPRGGRGPRWRWRASWRCDCIGCRSGVWATPFWRWVATRRLARAGPWPNHGRALE

SEQ ID NO: 178086 - protein, 354 aa, unidentified
MNNESPEGVVHMQVSTIGVDLAKNVFQVHGVDNAGKVVITRQLRRKQVIDFFSKIPACLVGMEACGTAHYWAREISKLGHHVRLMPPSYVKGYVKRSKNDAADAAAICEAVTRPSMRFVPIKSADQQALLMLHRTRDLLIRQRTQLINAFRAHLAEFGLVAETGREGLAQLAAIITDENNREALPLAMKQALQAIVDQLAALGLQIGALDRAIHTHHRANDMSRRLETVPGIGVIGATAIASTVTDPSAFKSGRDFAAWIGLVPRQHSTGGKERLGGISKQGDRYLRRLLVIGATAVVQQARLYPQKHPWIMRLLAKKPAKLVAVAVANKMARIAWAIMAKGGHYRPPELAAAA

SEQ ID NO: 178087 - protein, 289 aa, unidentified
MTDQRLSYVGQHVYVGVDVHKDTYTVTCIHHKRIVKTATVQADPASLAASLPRWFQGATLSSVYEAGFSAFVLHRSLTKAGIPNIVVNPASVAVAANDKVKTDRRDSKKLAFDLADGRLRGIYVPTEEEELAPLLPRTRAQIVEHRATIARQIKAKLHQFGLIAPSCRRLISNRYLREIAAWSLPPELQASLTLLAEQGRFATRQLIEMRRLLREQAQAQEAIDKVYRSVPGIGEVVARTLATELGDMTRFANERALFSYTGLTPSAHSSGTSVRRGHMSRQGSSRVRP

SEQ ID NO: 178088 - protein, 366 aa, unidentified
MWTLRANGIKVPGGKVFCLHRLPEGSEMKGIVFGVDIAKRVFQLHWVEPQTGEVVTLQLKRERFLEHFANRSSCLIGMEACGGSQHWARSLRKLGHEVKLLSGRMVKPFVVGNKNDAADARAIWTAVQQPEIKAVAIKSEEQQAVLALHRMREQLVKFRTAQSNGLRGLLTEYGEVMPQGRAGIKRDIPGALGRLSDRLPAIVIDTLREQYARLGEIDGQISQIERRLRQWQREDSATQRIAAIPGVGLLSATAAVATMGDAKAFKSGREFAAWLGLVPRQTGTGGRVRLLGISKRGDTYLRTLVIHGARAVLTHSKSPPEWLSELVKRRPKNVAIVAMANKMARTIWALMAHERAYQFGYVSRPA

SEQ ID NO: 178089 - protein, 344 aa, unidentified
MNATTVAVDLAKSVFELVAADEHWKVIERARLTRGQFERWFHNRAIRLVVMEACATAHYWARTLRARGIEVRLLPAKYVRAYVKRNKTDAADALALLEAARGSDITPVAVKSVEQQALQALHRLRSGWMSTRTRRINSLRGFCREFGMDVSVGAARGLAQIARLLADEHSAIPAMLRTPMRLALEEIRLMEARIDTLERELAQIARQSEACKALASVPGIGLLTSTAMVATVGDPRSFDSGRRYASFFGLTPREHSSGDTRHLGRISKRGNRYVRTLLTHGARSVLRAATVARRAGREVDRLRSWALEVQARTNHNKATCALANKLARIAWAVWVKHERYQAAG

SEQ ID NO: 178090 - protein, 385 aa, unidentified
MSGRGPDAAAPLYLAIAGGEAVGEPIGGWEPAAPQVSKPEQKQGAPSTGSVENPNSRLGHKPSPHSQGRVMERHPASPSFVGIDVSKDRLDVHVRPSGQTFAVARDGKALEQLVSDLRALAPTLIVLEATGGFEITVAAALASASLPLAVVNPRQIRDFARATGRLAKTDTLDAQIIALFAERIRPEARPLADADSQNLAELVARRRQVVELLGMETNRLHQARNPRVQRMLKATLKTLKAQLAELDCDIDDTIKRSPIWRAADDLLTSVPGVGDVTAHTLIADLPDLGQLDRRRVAALVGVAPVNRDSGQMRGKRTIAGGRADVRSALYMAALSAIRWNPIISQHYKSLVERGRPKKVALIACMRRLLGILNAIMRTKTPWQCA

SEQ ID NO: 178091 - protein, 452 aa, unidentified
MCPEDRPVLESNAAGIDIGAREIFVAVPPDRDQNPVRVFSTFTEDLQKMARWLVSCGITTAAMESTGVYWIPPYEVLEQHGVKPCLVDAHGMKNVPGRRTDWHECQWLQFLHSVGLLRAAFRPEGDVCAVRSLMRHRSDLVLMANQHIQHMQKALTQMNVQIHHVIDDITGLTGLAIVDAIVAGQRDARELTKLRDPRIRADEETIRKSLEGNWRPEHLFTLRQSRRMFQHYQEQIAACDEEIEKLLVTFQPRVDPADRPLPPDRKRKQRGRKKRNVNPRTGFEVRTESYKLFGVDLTQIPGLQATILTLFTEVGRDMSRWPTSSHFASWLALCPDNDISGGRVLWRGRRKVNNRAGQLFRMAAFALHHDQTPMGHYLRRMKSKLGPAGATTATAHKIAIIFYTMVKNQVEYDANLWAEQDAQREHRIEARLKRQAHRLGYTLVPNEDKSAA

SEQ ID NO: 178092 - protein, 394 aa, unidentified
MKLVGIDVGKNSHHFCVMDKETGDFNVTPTSFSNNKEGFDFLINSLKPYSKKSILLGMEDTGHYHVALLKFLLSNGYTVALINPKTTDLTRKMEGGITKNDKLDTITICDVLDTPERKKQYRITKVDRFDLYEQRQLTRHHHNLKEELNIYCNRLQKSIDLVFPEFNTLFGSKYGVVYMNLLKTFGSAEAIASTDIRTIRKCFEIKGRGGRISLTPEKLKECAKNSIGISSEVETIQIKHLVSQITLIKEQIAEIDKKIEEFSITNNSPILSIPGISHFSGTSILAELGDIGNYSKPSQIIKFAGVAPYHYESSQYNAQHTAITKKGSKYLRKTLYQIILPVINNNPVFKKYYRLKISQGKGHRCAQGHCIRKLLRIIYHLLETGQSFDPALLR

SEQ ID NO: 178093 - protein, 468 aa, unidentified
MSRLSKPNVSLEEARPFAGMSRVHPNAAGVDIGAHENMVCVDGGDNTQIVRAFGSYTIDLQAIGQWLQEHQVENVAMESTGVYWIPLFEELERRGFHCHLISSRSLRRVPGRKSDVLDCQWIQTLHAYGLLESSFRPEADLIALRTLLRHRSQLIEHRAPHVLHTPALAPGASVQKALIQMNIQLSQALSDVVGVTGQAIIRAIVAGERNPRQLANLRNYRCKKDEDEIIKALTGTWREEHLFILGQSLGLYDFYTQQIEACDREIERAYSLIRPEWGLGDFDEKNLLPEGKRNTHSKNAPKEVHVRKHLKRICGVDITAVHGISASLAQMIVIEVGTDMSKFPNEKHFCSWLGLAPKNEISGGKVLRNQVQKTRNRAGQAFRMAAGSVMRADCAFGAYYRRQKSRLGPAQAAVATAHLIARVVYRMLKYRVEYEPLSVQEYEMHYREQQIKYLLKKAAKFGLQLAPT

SEQ ID NO: 178094 - protein, 337 aa, unidentified
MGVDTHKESLAACAVNEVGRPLAERAFANDSRGHQMFREWLKALPQPRRVGLEGAANFGAVLARVLLDADEDVREVPSILTRRERRRTGRLGKSDPIDALAIARVVARDEHLPPALPTQASEDLKALVDYRDQLISERTRVQNRLHADLQILVPGYRAKVRRLATSPQRARAAALLSAAAGIRAELAGRRLERLEELDADVAILTKRIKTAVRASGTRLVSIVGVGAITAAKLLGETGDPRRFRSMGGFAMACGAAPIPASSGQTNRHRLNRGGNRQLNRALHTIALVQARVDSRARTFVDRKQAEGKTWLESIRCLKRHLADVVYRRMVDDLVAGT

SEQ ID NO: 178095 - protein, 386 aa, unidentified
MPDVSSCAPVEVRVWVALDAHKLSIVVATLPPSGGRPEVSRIENTPKAIRRLIDRLGGRAGLAVAYEAGPTGWAIKRLLDRLGVACDVIAPSLVPVRPGDRVKTDRRDAKKLVRLLRAGELTFVMPPSPEQEGLRDLIRCREDLRDARTRARHRVIKALLRYGHVYTDGKHWTIKHRTWLAQQQLVDPVAQLALETMRAHLEMIETQMRTVDAQLERLAHQDRWKPGVRVLTSFRGIATLTALSLLAEIGDFARFGSARELMSYLGLTPSEYSSGESQHRGHITKAGPVHTRRLLIEAAWHYRHPPRLTERQREAETAAHAAGDELAPLVAARAWQAQVRLNHRHRVLSRDRGKRATVTNVAVARELVGFLWAAMTDQPLREELAA

SEQ ID NO: 178096 - protein, 397 aa, unidentified
MYIVGIDIAKRKHEAAVIDGEGAVIIKPFSFTNNCSGYNRLLAMLTKAKLPLDEVSFAMEATGHYWLALFTRLQKEGFRVQVINPVQTNSIRSFYIRQAKTDPRDALLIAEVIRFGHFSESTLHPENIYELRELCRGRHAIVSMQADVKRKVVALLDQVFPEYETAFTNMFSDTSMAILQTCPTPKELSEMPLEELCHLIEVSSHKRFRMAKAQELQALARNSFGFAMAGDVFSTMIRLYAKHLDFLKQQVREMDRKIAEIMETLDTPITTITGIGPTLGAYILSEIGDISRFSSAAKLAAYAGIDPTMRQSGEYNGVRNRMSKRGSPYLRHAIWLAASSAVLHDPALKLYFQKKRDEGKPYMASVGHACRKMVSIIYAVMRDNKAYTPCIPNEISA

SEQ ID NO: 178097 - protein, 322 aa, unidentified
MDKSTKIIGIDISKDTFDIWSEELGHKKFDNSLKGFRLFNKLLDDKTLCVMEYTASYYQKLALFLYDKQIQVSVVNPLTIKRFIQMKLQRNKTDKSDSKMISYYASEQDVKLWKPAADYIEQCSVIHTTISVYFKQSTALKNKLHSFTSMGVKGKVVTSLKRQLRNINNEIKELENILEQLIKENEPELLTNLVSIKGIGKKTAILLIVTTSGFTKFENARQLSSFFGLAPAEKSSGSSVRGKTRITKKGNGMVRNHLFMCSFTASQTNLQCSNLYNRIVAKGKSKKLALIAVCNKLLKQVFAVAKSGIPYDPYYKSCIPSL

SEQ ID NO: 178098 - protein, 438 aa, unidentified
MTDLPVLDPHAAFVDVGSEHMHASIAGGSPRVFGTVTSQLEALRDWLLAEGVQAVAMEATGVYWLPLYGVLEAAGLTVRMVNGRQIRNLPGRKTDMQDCQWGATLHAHGLLQAGFVPPAQIRCLQDYLRLRADHITLAASHVQHLQKALERMNVKLHDVISSLTGVSGLAVVRAILAGDRDPERLLALCDNQIQRRKGDRVKEALRGTWAPEHLFALKQALRSWEHYQEQIAECDREIETRLREMTGGNDPPVAPPTRRQSPGVNAPAIPQLRELLVQLCAGQDLTSLPAHSAYSVLQLIGEVGTDLTKWATPKHFTAWLGLAPGSHQSGKRHRTVRRKRNRAGRLLCVMARSLARSKDIALGGFYRRLAARRGGLVANIALARKLATLFWQVMVKGMDYVEHGLAAYEAKVLETKQRTLRRLAAQLGQQLMPLPQTS

SEQ ID NO: 178099 - protein, 347 aa, unidentified
MNQIIRIGMDTSKHFFQLHGVDTAEQPVLRRKLRRKEMVGFFAKLPPTEIGMEACGAAHYWGRVLRELGHTVKLIAPQHVKPYIKRNKNDGRDAEGLCEAMSRPTMQFVAVKTEEQQAALMLVGMRERLVARRTQLSNAIRGYAAEFGLTAAKGLDKIEPLLAEIAADEALPVLARDLFAMHGREYVQLQAELKKIEARLMAWHRANTDSRRLAQIPGIGPVVATTLVMKAPDPGLFPSGRHFAAWIGLTPKDHSTAGKTRLGTITRAGDEMLRSVLVAGATAVIQQAKQGRGHPSPWLLALLARKSSPKLAAIALANKIARIAWKLLVTGESYHAGGKPIASAHAA

SEQ ID NO: 178100 - protein, 399 aa, unidentified
MVNPVSLQLRVGVDVGSRCHSVAIGLSDGSLLEEFEIPHRAEGFREFFARVEASARRHAAPVAVAMEGYNGHVRPLDSLVRARGWQLFNVNNLKLARFKEIFPAAAKSDRIDSRKTLELFQLRDHLPMAGEVLQEVMATPEENNVLKRLSRRRRRLVNERGRVANALQADLQAVCPGLLEITRDVGNLWFLNFLTCRKGLLKLERVRRAGLLKVPGIGTHFADAIQAWQNRAYFAADASLVGDMIQQDAARILELKQQIKALEEQMAQVAESSSIAGQLASIPGYGSVCSAELAGEIGTVERFRNEASLALYLGMATLDNSSGKSRGAKPPRHVNTRAKAAMMFAVDHHRKLVPQSQRYYERKRAEGKKHNQAIRALGRHLCRVIFKMLTQDRPYRIDP

SEQ ID NO: 178101 - protein, 372 aa, unidentified
MFTLTELGPKEAEVKIIGCDLHARQQTLAMLDTTTGEVVKTTLKHEGDHVREFYSSLPRPVRVGIEATGSMQWFVNLMEELGIECLVGHPATIRAAEPRKQKHDRRDADLILTLLAENRFPAIWLPTKKLLDLRALLRHRHQWVCLRTRIQNALQAMALANGLRRGSSLWTQAGQHAIASLPLSPHAAYRRSELQAMYVKFETDIEKLNQRVEQQACARPGARLLMTHPGVGPITALATEVFLGDPSRFADSKELASYVGMIPGEHSSGKRQRLGGLTKQGNPLLRFLWSEAAIHAVRRDPELKHFYRRKLIQKGLGKARAAVARKLGIRMWIMLRDQIEYNEFCRRGQMQQKSGDACAGMPGLRYGAKVTG

SEQ ID NO: 178102 - protein, 356 aa, unidentified
MSKLTQLDFAGQPIYVGIDVHLRSWEVSIHTATLEHKTFRQPPEAQVLGRYLQRHFPGARYQAVYEAGLCGFTVSRQLRALGIACIVVHPADVPTTDKERRRKTDRVDARKLAKDLRAGQLTPLYMPPRWAEADRALVRLRATLITDQTRLKNRLKSLLRVWGLPVPGGRGRSLWSQAGLEAVGALALDSPVAQQVLQQLVEQLQTLRARIQTVTRQIRALAQTPRYQKRVTLLTSIPGLGVLSAMTWLTELVCLDRFPSFDHLCSYVGLVPGEHSTGTDPTPTGLDRRGNPRLRTLLIQNSWVAVRKDPALLQAWHRWTPRMPKQQAIIRVARKLLRRLRHVLQAQEPYSTGVVE

SEQ ID NO: 178103 - protein, 355 aa, unidentified
MNDEKYIGLDVHQATIVVAVMDSTGKLVMESILATEAATILQFFAGLRGTLSVTFEEGTWSAWLYDLLNPHVDKLVVCNPRKNALLKDGNKSDRIDARKLAELLRGNQLKPVYHGETGVRMLRELSRSYLTIVKDLSRVMNRLKAVYRSWAIPCAGRDVYYRRHRAQWLAKIREAGVRRRAERLYEQLDMLQHLRQQARRELLAESRKHAITAKLRQIPYLGPIRSALAVALIQTPHRFRSKRQLWAYSGLALETRISAEYRLIEGQVRRSKKLLSIRGLNKDHNHDLKGLFKGAATMASVRPGPFQDFYQAALAKGIKPTMARLTLARKIAAITLTLWKKGENFDAEKLKSQAA

SEQ ID NO: 178104 - protein, 368 aa, unidentified
MQTVADRPEAPTAVRTDLGAIFVSLELSRSTWLITSLSPGGGEKMSKQVVRGGDVAGLLERFARLREKTRARTGKVFPFVVIQEAGLDGFWIDRVLQNEGIESHVVDPASIATSRRHRRAKTDRIDGEVLVRALLAYKRGEPRVCAMVKAPTPEEEDRRRLCRERKVLIVERVRHVNRVKGLLFSQGISGYEPLRHDRRERLDTLQTGDGRLLPDHLKAQVRRELDRLELLLEQIKAVEAERDVLLAAQRVAAPAAMLLDIKGIGPEFAAILWSEGLFRHFDNRRQVASYAGLAPTPWQSGSVDREQGVSKAGNPRLRTTLIQLAWLWLRNQPQSALALWFKERVNRNGGRLKKTTIVALARKLLVAL

SEQ ID NO: 178105 - protein, 361 aa, unidentified
MSSLTTFVGLDYHQDSVQVCVLDAQGKQLVNRSVANDANVIQRVATQHGAPTRVAIEACCGAADLAEELATRRGLPVELAHPGYVARLKRSPDKTDLGDAQLLADLARVNYLPRVWLAPEGTRQLRRLVRHRTQLVRRRTDVKLRVRALLRENRLRCSEARAWTKAWLAWLTEQAKLATSDRWLLEDHLAELRSLTERIAAVERQIAAATTDDPVVAQLLDLSGVGLVTAATLRAEIGRFERFDTGKQLARFCGVTPRNASSGARQADAGLIQAGNPELRKVLVELAHRLMRMLDPKWGQLAAGMLQRGKPKNVVVAAVANRWVRWLHHELRKETTSVSESTSARARQKGSAPSIFTVAST

SEQ ID NO: 178106 - protein, 351 aa, unidentified
MEEYIAFDSHKRYTWVEHQEANTGKTRAYRLEHGAGAIGQALAGCAPGTAVAIEATANWYWIIDEIEQAGCVARLVHPRKAKLMMGLINKTDKLDAHGFNTLQRNGTLPTVWIPPGGLRELRELTRTRLVLVAQRTRWKNRITATLAKWGLPPSAYSDPYGKRARVELEQQLERLPEQTRWATRQMLAQLDSLSEQAQQFEKRLEELVEVTPMMQWLMTLPGVGVILGATIALEIGEIERFANAERLASYSGTTPRVHSSGDRTRHGRTRPDVNRYLKWAFAEAANSVAVNHRRNPERHVSRLYTRLRASKGHARAVGAVARHLAEAAFHVLQRKEVYRDPSLNPRPERGV

SEQ ID NO: 178107 - protein, 382 aa, unidentified
MEFYHKTHRYYCGIDLHEKTMYVCIVDQQGKIRYHRNIKTSREEFLAAVAPYRDDICVGVESTYAWYWLADLCEDEGIHFLLGHALYLKAVHGGKTKNDKIDSKTLAFILRGGNFPVAYVYPRKMRSTRDLLRRRMYLMRHRSAILSHIQNTNSQYNLGPFAKTLKYKANREGVANRFEDRSVRKTIEVDLHLLDFYDEVLRDLELYILKTARLDDPISLHLLQTAPGIGMILSLVMMYEIQDIGRFKRVQDFLSYTRLVKCPRESGGKKYSSKNSKIGNAYLKWAFSEAAVLFLRGNEQIEKKHNRRVSKHGKAKALSILARDLGTAVYFMLRRKEPFDMNKFLGAGDASRKSNWTEKGETLKKAAKIKCIEECQPVAVGQ

SEQ ID NO: 178108 - protein, 482 aa, unidentified
MAKRKLSTFERLQPGRLNRQQRRELGRRLEAPDPGLAVVHPDAAGIDVGNASHFVAIPPDRDPVPLREFGAWTAALQEMARWLTAHGIRTVALQSTGVYWIALQDVLEQAGLEVYLVNARGTKNLPGRKSDVQECEWLRKLHTYGLLRNSFHPPEAIRAVRTLWRQRDRWVQEAARAIQHMQKALTTMNVQLANTISDLSGVTGQAILRAIVAGTRDPAALATLRDPRIAASEAELAASLQGTWREDVLFTLRQALEAYDFYQGQLAACDQELAKAMAAVPSRELPPPPALPPGAAPLPAGKSARRTKARRKHQPGFDLAAELHRTMGVDLTRIDSIDVSTAQVVFAEIGPDFSAFPSENHFASWLTLAPRHDISGGKVLRHVPAAGRNRVANALRMAAQSLSRSDSYLGARYRRLRARLDGPVAVKAMARYLACLIYRLVTKGQAYVDRGAAHYEQKRQERERRALERRASTLGLKLVPAA

SEQ ID NO: 178109 - protein, 347 aa, unidentified
MKRIAVDLAKSVYQVAESIHVGRVDRRRRLDPEAFRRYVQEQPEPVEWVMEACGTAHYWGRVAQALGHRVVLLHPRYVRPYRRRNKTDRNDCDAILEAARCADMHPVPVKSHEQQQVQQLHNLREAWKKTRVQHINLLRGILRELGVAAPSSTQAFLRQACELIERAEVCALRGALQMVLAEISLCEQAMRDSEEQLARWHADDDIVHKLDEVSGIGLLTASALKTAVGKPERFASGRHLSAWLGMTPNEYSSGERRRLGCISCKGNTYVRTLLIHGARAALLAAKRCQTRTPERLTQLQRWSLQTAERIGHNKAAVALANKLVRICWAVWCHERRFSGDWQSARPA

SEQ ID NO: 178110 - protein, 337 aa, unidentified
MKLYGAIDLHSNNNVLVVIDENDNMLFRKRLANDLPGVLTALVPFKPDLHGVAVESTFNWYWLVDGLIEHDYKAMLVNTVAVQQYSGLKHTDDQSDAFWLAHLIRLGILPTGYIYPKKERAVRDLLRKRLQLVRHRVTHMLSAQNQLWRTTGLNVPNNIIKKADHSVLNLIDDRIIQMAIKSNLTLIDTLNQQIELLENTVKKHMVLKPEFQSLLTIDGIGDILGLTIMLETGAISRFKHVGNFASYCRCVESKRLSNGKKKGTNNQKNGNKYLAWAFVETAHSIIRHSKVVHRFYQRKRAQKNGALATKALAHKLARAAYYVMRDRAPFRRELLFQ

SEQ ID NO: 178111 - protein, 489 aa, unidentified
MKRTKKTSDTNTSSSSRKRSKAWRIVHPNAAGIDVGASSHYVAVRPDAVPDGKSAVRSFGTFTVDLDALVEWLKACGVETVAMEATGVYWTALFHKIEAAGIQVLLVNARHVKHVPGRKTDVKDCQWLQQLHSYGLLEGSFVPPDEICRLRTLVRHRANLVSDAAQAVLHMQKALTEMNIQLHHVINDLCGETGLRILRAILRGERDPEELVKLRDPQISRSTPEQMKQALKGTWRQESLFVLEQNLKAFDFHHQQMDGCDRQIEEVLKALPAVPALPKTSPGQANDSLAAQNPKPKGAQSRKRNEPERDLGPELARICGTDLTKAHGLRVLSVLVIVSEIGTDMRRWRNAKAFSSWLGLCPNNKISGGRVLSSRTRQVVNRAATALRMAASGVAQTETWLGSFYRRMRARVGPAAANTATAHKIATVVYHLLKYQQPFVDRDLALYEKRVYRTKLARLRKQAATLGYKLIEIAADQDVKCAEQRALSE

SEQ ID NO: 178112 - protein, 358 aa, unidentified
MTKTKPKAIQYVGIDVHQATLVVAVLSADGKLVFESTVATKREAIEQVLRGLTGRVWVAFEEGTQAQWLHDVITPLVEHVVVCNPRETRQGENKSDKIDARKLADKLRLNALKPVFHNTANVRTLKELVRLYESLVSDSTRSKLRVKAVFRGRAILTPGVSIYDAKKAAELMERIPDKGTAFRASKLLVQIAAIDALRQEALIEMIREAKHHSAYKLLTALPFIGPVRAAQLMAVMVTPFRFRTKRQLWTMSGLSVITHSTSDRRIVEGKLVRSKRPPMTRGLNRNHNHTLKNVFKSAATDASVRKGPLKDFFEAMVKRGISPEMARLTLARKIAAYTLRLWKKGGTFDPKKLTMSTT

SEQ ID NO: 178113 - protein, 372 aa, unidentified
MSLDRWLQPSSQPDTRKGGEHVRYIGVDVGKNRCQACIMDEEGVVVEEFPFTNTWEGIQALLEKTGDTKSKAVVESTGNLWLRIYEALEGHGVEVKLANPYKTKAIASARIKTDKLSARILAHLLRADLIAECYVAPREVRQVRALLRQRASLVKMRTMVKNRVHSHLDRYGLSSPWSDAFGAGGLEWLHGLELEPVDRCILDTHLRHLECLNREIGFLDSEIASQALESVDALLLMTLTGVDYNSATLLACEIGDISRFPSPKHLVSWIGLCPSLYQSGNSLVMGRMKKDSNGRLRWVLVQAARTASRTDPRMRELYQRVSSRKGTGKAAVRVANKMAVIIWHMLTEGKPYMQVKEGLYRSKLKKMKRIAS

SEQ ID NO: 178114 - protein, 326 aa, unidentified
MDVVGIDLAKLTFDATLLLSAGTQHYQSFPNTPAGFTQLGTWLKGHGVSQAHLCMEATNIYWEALAAWGHAQGHTVSVVNPARIKGHALATMQRNKTDKLDSAVIADFCAKHQPEAWEPLSDEQRHLRALMRHRDDLLQMELQQKNRLRDTTDTLVRTSLDAVLEVIATQMKDVERRITAHLKAQAELAADLALLTSVVGIGALTAAKVLAEMPDLAHYGSAKAAAADTGVTPSHFQSGTSVRRRPRMSKLGKAGLRAALYWPAITAMTRCPGFKAFADALAKRGKPKKVIIGAVMRKLMHVMYGVLKHRTPYDRAKAFGRTTPAT

SEQ ID NO: 178115 - protein, 409 aa, unidentified
MAKFSKEPVTTIGIDLAKNSVHVFGVDAQGEVVFSRKLARRALSAFIAQQPPCRIAMEACGSAHHWARTFQELGHEVVLIAPQHVKPFVKTHKTDAADAEAICEAAQRPRMHFVPVKSVEQQDIQATHRMREQVVSQRTALVNQVRGLLAEYGIVMPQGRKAAMSRLPEILEDASNGLSERFRAELHGLLEELRHLDERVAHYDSQVKAVADTSESVQRLMTIPGIGPLVATALLATLGEDWSLFANGRALAAWLGLVPRQHSTGGKPRLLGISKRGDAYLRQLLIHGARAMMRWVERKEDATSRWAQALKQRRHPNVANVAMANKLTRIAWAVMTTGKTFDPARGALAKGAVDGGANRRIFGEQCGRSPARVVKSCRGFVGAVSARRIGYEGLVRRALLYRGVVAGAS

SEQ ID NO: 178116 - protein, 343 aa, unidentified
MKYMGIDYHKQYFIATTMDERGRVLSKEKVSTDRDSIRSYFTKAGAEGELKAVMEACYGWEYFYDEVEDLVDDLIMAHPLKTRLIAEARIKTDSIDSETLAHLLRTDLIPQAYAPSAQTRDQKNLLRYRSSLTAIKVRIKNVIHSVLARNHIEDKSFKELSDKFGKKGLAYMRSMILRGNDTEILNQYLNLLGETDSKIKAAESRIRAVCKQDEICRLLSSIPGIGDILAVTIRYEIDDISRFVSPGKLCSYAGLVPSTYSSGNRTFQGRITKQGNKWLRWALIEAAQRAPLFDMWLREFYNRVSKKGSKIARVAVARRLLEIIYRIWNEQKPYYKNSVTVAL

SEQ ID NO: 178117 - protein, 320 aa, unidentified
MAKQKLQSFIGIDVSKQQLEVAAHEREYQFRCANKASSFGELRAELIALRPALIVLEATGGLEMPVAHSLQAAGLPVVVVNPRQVRDFAKALGQLAKTDRLDARVLAHFAAAIKPPLRPLKSKDEQELDALNRRRGQLIEMLTDEKNRRGSADSDNVRDKIKEHIDWLEEGIAELDEQLKALLQRSVAWQAKAEILQSVPGIGPVTSCSMIADLPELGTLNRQQISKLVGVAPLNRDSGQQRGTRHIYGGRAQLRRVLYMAALTAVRHNPTIKNFYQRLRANHKPYKVAITACMRKLLSIINVMVRDNACWKNNEALVSA

SEQ ID NO: 178118 - protein, 347 aa, unidentified
MSEISIIGLDLAKQVFQVHGADPAGRCVLRKQLKRREVLQFFAKLRPCTVAMEACGTAHYWAREIGKLGHCTRLIPPAYVKPYVKRGKNDAIDAEAICEAAGRPTMRFVPVKPMENQAIVMLHRSRDLVIKNRTMLVNALRAHLAEFGFVAGKGIWKLPDLVKIVSQAPAEALPELVRTTLSGLLDIIAAIGSQLDAIEKRLREWHKKDARSKRLDTVPGIGLIAATACRALVPDPKLFRNGRHFAAWIGIAPKLDGTGGKTRLGRISKAGDRYLRRLFVLGATSLLRSLENKSTRLALWVQALLARRTKRAVTVALANKLARIAWAVMTRDEAYKPLAAAQPAGCA

SEQ ID NO: 178119 - protein, 472 aa, unidentified
MTIRRLVGIDLGIASAHTVRVLDESGHTIAKRKAWPTVESLVEVETAALAGAPRGTRLEVVMEPTGPAWLPIVVFFSDRGHVVHRVSSAKASDLRKFLSRHTKTNGIDADTLARLLLVDPAGLRPLQLPGAERAALDRRVRVCDRLTQEASRHKVRIKDLVRQLLPMTPLTGDLGVADMAVLERWADPNLLVKAGVKRVTSLIVKASNNHQGAERAAVWIASAEASLELYGASPAVAFADLAAEVATEVRLVRAVQGELASHAAEREDAYRWVDPAGLARSLPGLAEVGGATVVAIMGDPARFAKGKQFRSFTGLVARTSETGDTNRKGQPMSKAGSSLLRTTFVRAADHARKQDPQLARIYYVQMVERGKDHLGALCVVAANLAERTWAVMSRGMPYVICDTDGRPATPEEAKAIIAEHFTVPAEVRARRRSKKTTGKAPQAARTGRQERGDLPHPTSFTATLDQVNRRTA

SEQ ID NO: 178120 - protein, 345 aa, unidentified
MKIVGCDLHTRYQQIAMLDEETGELIERRLEHEGGEARAVYAGLEGPVRVGIEATGHTRWFERMLAEQGHELWIGDAAQIRASMVRKQKTDARDAAHLLELLLSGRFPRLWRPTMAERDLRQLVWHRQKLVWMRNAVGNQLHALAMGEGVCRKKTLFTKKGRVELEGLSLDPWASRRRQELLRLLDQLDTSIEEFHQAVSEQAEQNAAAVLLMTHPGVGPVTSLAFVLTLGPVERFGRSKQVVSYLGLNPREHSSGGKQRLGSISKQGNPMMRSLLVEAGHTAARLDSELRQDYQRLKLRRGGGVAKIAIARKLAVRMYWMLRRQASYAQLVRMQGSPRGTLVEQ

SEQ ID NO: 178121 - protein, 413 aa, unidentified
MEVIHPRCAGIDCSKKDAKVCIRIQGQGPRVKTSTVSTWGATTGQILTLREHLVAANVTCVVIESTSDYWKPFYYLLDDDLDVILVNAASVRNLPGRKTDVSDAAWLADLGAHGLVKASFVPPAPVRALRDLTRTRTVITRERTREVQRLEKLLEDAGIKLSAVATDITGVSGRAMLEALISGQRDPAVLAELAQRRLRSKIPALTEALRGRFNDHHAFMTRLFLDRIDAHTADIGRLDERIEEAMQPFRPTRDLLMSIPGFSRIVAEVFIAETGGDMSVFPTAGHLASWAGVSPGSNESAGRVKSTKTRPGNRYLKGVLGIAALSAARTKSTYFAAKYKRIATRRGPMRAIVAIEHAMIIAAHNMLTNGDFYRDPGANYYTAHQPARTKSRAINQLESLGYRVTLEPLTESA

SEQ ID NO: 178122 - protein, 419 aa, unidentified
MKPPKSASKGQRNPSKIEERDLESLPPLHLNAAGIDVGSAEHYVAVPAARDPQPVQKFGSFTGDLHRLAGWLKACRVDTVVMQATGVYWIGLYQVLEDYGFDVQVVNARHTKTLPGRKTDVQECQWLQQLHTFGLLNNSFRPAEQIRILRSYLRQRENLVAAGSTCIQHLQKALTEMNVQLANVISDLSGTTGMAILHAIVKGERDAYKLADLKHSLIRASREEIAQSLQGNWREELLFVLQQNLELYEVYQKKVRECDQQIEAHLKTMPAMVNVSEHPIPPPRRVSWSRKRQPRFDLRGELYRLTGVDLTQVDGLDVQTIQTVLSEVGLDMSAWKTEKHFGSWLGLSPDNRISGGKVLKRGTRKVVNRAATALRLAAWNLIPARALWEPNSAACALASGLPKLSPPWPIIWPGWSTAC

SEQ ID NO: 178123 - protein, 371 aa, unidentified
MGRNSTTKFIGLDVHSKTISVAIADEGRKGEVRHYGIIDNTTEAIEKVIKSLTATGAELKFIYEAGPCGFALYRYLSGNGFKCIVTSPAMIPKRGNVRIKNDRRDALTLARLYRAGELTGIYVPDPEDEAIRDLTRARNDARQAERKAKQRLNSFLLRNNLIYPRKTKWNRAYFYWLGFVVMKHPAQKIALQEYIEAVHEGTERVKRLSEQISLAVEEWRMAPTVKALQSLRGVSLITATITVAELGDISRFSHPKELMAYLGLVPSEHSSGESIKRGHITKTGNSHARRVLVESAWTYKHHARVTLPLIKRQQGLPKNICQISWKAQLRLCARYRRMMARKKPMQVVVIAIAREIAAFMWAIAKEVEATA

SEQ ID NO: 178124 - protein, 332 aa, unidentified
MRHVGVDLSRNSFTACFLDQDDSYHIASFPLSEEGLSAFRRQLSSADRLAVEAGPSAYFFNDQVVAAVTEIVLVSPGQFAVIARSKKKTDRQDAVTLARFLKLDCLPTVVVPSRRIRELRQLFTTREGLVKMGRQLKNTGHAALARNGLPGRRSDFASHSGRERLGRLQGLAACDRLILDMVLRQIDTIEKELDELDKAIVHMGKPLPGLPQLLQVRGFGLVAAIGVLSEIGDITRFAKAKQLVSYAGLATTVRQSGAVERRGHITKQGRKVLRGFLVEAVLSMLCNPSPRNPLADFYQRKKQEKGAGKAICATVTCPHSLVHSRLESGRFE

SEQ ID NO: 178125 - protein, 356 aa, unidentified
MEPIKTDCIGCDAHRRYSVFVVMDERGHTGKETRVEHSRELYRHFLSTLPPGSPIALESIGNWYWMIEEMERAGHRPILAHAKKAKLMMGLTNKTDKLDARGLALLLRNGTLPSVWIPPGELRDQRELPRMRMVFARIRTMLKNRIQSTLAKYGIQIDGVSDLFGVTGRGLLQNRLNELPQETQRSIQEHLKLLDGVLEQIEGTEKRIKEIIKETPQMQLLMSLPGVGPILAIVIILEIGDIGRFPGAPQLASYAGTVPQVKSSGGKTYYGKVRQDVNRYLKWAFIEAANSIVVNQKRMPNRHVVELYHRIMKRKGHPKAIVAVARHLAEATYWMLTKNEAYREPTRSQWISPTQK

SEQ ID NO: 178126 - protein, 412 aa, unidentified
MGMHDTVTHMGMDCHKNFSRVTARDAHGKVVWRQRLEHRDRAGMRRQLQQWPKVPVVLEGTFGWGWVSDELTQAGQEPHLSSGRKVAAWRDARGIAKSNKLDADLLSELWPQQQRWWEVWLAPPEVRDQREWLRYRMTLVRMQTGIKNRIHATFHRHGIFFDESDLFGKAGVKLLEALIDPDDPTLRDSTRKTLEGYLTLLKTLRQQIAEVTRQLRRQVRQSIEGELWRSLPGISWVLAYTIAAEVGQIKRFKSNQNLASYSLLAAIASDSGEEDRGTPIGRHVGHIGRVTLKWAFIAAARNAVRKDLQFKAVFDRRTDCGKKDKGRGYIAVARHLCRIGFSCVSKQRPYSSQRPARPGTAAAVGTATRSREKDKDPLKEKTNALIEDASTSDPTSRPGMGQSDRSLVAADL

SEQ ID NO: 178127 - protein, 344 aa, unidentified
MHIASIGIDLGKTTFHLVALGEHSKVLVRRKFSRAQLLAYTANLPCSLIGLEACAGAHFMGAALRAPGHEVRLIPGQFVKPYRKSNKNDFIDGEAIAEAVTKQNLRFVPIKTQEQLDVQALHRVRDRLVQRRTALINEIRGFLLERGITFPAQPIHLRKNLATVREDAEQNLSPRLRWLLDRLWQEWKQTEIDIQTITDEIERISIEDERCQRLRQIPGFGPLVSTATVAAIGNGAGFHRGRDFAAWVGVVPRQYSTGGKQRLLGISKRGNIYLRRMLIHGARAVLFRIQYDTAGLGQWVHRLSQRAPRHKVIVAIANKLARIAWAVLSSGRDYHHQPLPSAAA

SEQ ID NO: 178128 - protein, 430 aa, unidentified
MEEVDEQELQVERIAALDLGKAALEACVRVPHEFKPGRRLQEVRGYATTTAALLGLADWLHSWGVTRVVMESTSDYWKGVYWLLEAEGFQCWLVNARDVKNVPGRPKTDKADAVWLAKVAERGMCRPSLVHPRPIRQLRDLTRYRRALIQDRTREMQRVEKLLEDAQIKLSSVASDIFGVSGRAMLEALIAGQRDPKVLAQLAKRRLRGKIAALEEALRGFFTDHHGVILRMMLDNIDRLSEQIAALDTTIEQAIAPFAAQVAQLDEVTGVGVTAAQELIAEVGVDMGRFASDAHLVSWAKFCPQLHESAGKHKPKGRGKGNPWLAGTLGNIVATAARTDSFLGARYRRIAKRRGKQKAIVAVGNSVLVIVYHLLSDPEARFSDLGAEHYDTRIDKQRRARSLASQLQAVTGQRIVIRDGKAVIVQPEAA

SEQ ID NO: 178129 - protein, 318 aa, unidentified
MNCKNNQNEINVGVDTGKTQLDIYIRPLDIYFTVSNDEKGINKAIKGIKKHNPIRIVIEATGRLEQAFIIACANEKLPFVVANPVRIKKFAGSVGQLAKTDKLDAKLIAYYSEAIKPKLSTLKPETLRTMSDLLSRRCQLMEIRTMEKNRLQILPKSLESTINPMLTVINNQLTKIDNKMVKLIEQCEEYQIKNDIIQSVPGVGNVVAFSLLSNMPELGYITNKEAAALVGVAPINRESGIYKGKRMIRGGRHQIRTAMFMSMMSAMQCNPVFKATYQRLVAAGKPKKIAIIACVRKMIVILNSMVRDGVYWDPKMNQ

SEQ ID NO: 178130 - protein, 399 aa, unidentified
MARVFIGVDPHKLSATIEVVDDSETVLATGRFTTDKAGYAAMRRHVACFPDRVWAVEGSNGAGRPLAQRLLADGEHVLDVPAKLSARARELDTGHNRKTDAHDAHAVAVVAVRTTGLRVLAYDAQLEALRMLADRRDELSKTRVQAANRLHRLLSELVPGQGKKDITTGQAKTILASVRPRDVAGKVRRRLAAEQVADLVAVEKKIKALTKELKEMVSASGSTLMELPGVGPVVAARTLADTGDVARFTDRNRYASWTGTAPIEASSGEIVRHRLSRAGNRRMNHMIHIAAATQIRLNTPGRAYYRRKLAAGKSKAEAMRCLKRRISDALYRRLRADAAVAVEAGPGGHRGAALQSSAAGFHPHTGTSDQPLPGPAQPTLPAPTTARKSKTARALEPAP

SEQ ID NO: 178131 - protein, 315 aa, unidentified
MRSTVAQSVGVDISKDTLDVAIHPGGESFRITNNPEGHRALIKRLKGFDIARIVFEATGAYHRLFQQAMVEVGLPWVKVNPCQARRFAQATGKLAKTDRCDALMLARMGAVLELETRAPASKTVEALRELVNARDALIKDRVAALNRQAIAVSPLIKRQLAQRLRQIDGQIEAIDRRLKTLRNSDSDLCQRFDILTSIPGIGEVTANVLVVETPELGRLEHAQAASLVGLAPVPRDSGQTHGKRSIRGGRPRARQALYMPALNAIRLNPEFKAKYEAMVKAGKPAKVAIVAIMRKLLILANALIRDRRKWAPANP

SEQ ID NO: 178132 - protein, 411 aa, unidentified
MLEVKVENCAGIDVGKKFLAVCVLTGPVDRKPAEEVRRFGTSVKELERLRAWLIEKKCTEAVMESTGSYWKPVFNILEGSLKIILANPEQVKALRGKKTDPKDSRWLASLLRHGLVQGSFIPPRDIRELRDLTRRRRTLVGDGAAEKNRVQKILEDANVKLGNVLTDVFGTSGQTMLEALLENKHSAAEIAELGHWSLAAKIPQIVEALEGHRMTDHHRLLIRQCLRHMRTIEEMIEELDKEIAVRLKPYQEQVKLACTVPGIKPTAAASILAETGMDMSPEGPFPNCHHLASWATICPGNNESAGKRRSGRTRQGNRWLRGTLTQTGWAGAADKKSLFQLRYQRVKLRRGGQRAVLAIAHAQLIAIYWALRNGTPYPEQVQRMEQDRREAQIRYHLQRLTKLGYEPDVHG

SEQ ID NO: 178133 - protein, 421 aa, unidentified
MKSASTTPNTQLPETPPNDVTGGLDWARDDHAVSVVDARGRELVRHSVEHSAAGLRELIAVLRDAGCGEVAIERPDGPVVAALLSADLTVVVISPNQVKNLRGRYGSAGNKDDRFDAFVLADTLRTDRARLRPLIPDTAQTATLRRTCRARQDLIRHRVAAANQLRAHLHIAFPGAVGLFADIDSPISLTFLTRFTTQDQADWLTPTRLGKWLASAAYSGRVDPAVLHTRMTDAPRGLSGADGAANAAITKALIIVLVSLNDQLKTLSTQIETQLAAHTDAHIVTSLPRAGRVRAARLLAEIGDCRARFPTPASLTCLAGVAPSTRQSGKTRAVGFRWACDKQLRDAVCDFAGDTRRASPWADHLYRQARDRGHDHPHAVRILARAWLNVIWHCWQNGVAYDPAKHNALQHIINPPQPEAA

SEQ ID NO: 178134 - protein, 449 aa, unidentified
MSKKGKSLGLPIINARAAGIDIGSRIQVAAVPPELCDDPVQTFQSFTADIDRMADWLISVGVTTVAMESTGVYWIPVYEILEDRGLTVVLANARDCKTVPGRKSDVNDAQWLQRLHACGLVRASFRPARDIAALRAYMRIRDRHLEYAAAHMQHMQKALTLMNIQLHHVISDISGVTGLKIVRAIVAGERDPDTLAAMRDARCRESESTIREAMRGNYQPEHVFALAQALALFDFYQQRVADCDGEIERTLRMLNLDKVKPEAPLPAPRSRTKQTNALKFDVRPLLYQLTGIDLTRIHGIGPSIALALIAECGTDLSRWPTEKHFTSWLSLSPGCKISGGKVLSSHTRKSNNRVAARLRLVATAVGRTETALGAFYRRLAARIGKAKALTATARKIAILFYRAMRFGMRYEDPGADQYEQRYRERVVKQLERRAAHFGFSLQPAAESVS

SEQ ID NO: 178135 - protein, 371 aa, unidentified
MDESSKTLFVGLDVHKEAIAVAYAPEERGAEVVSLGSVGTRQCDIDTLIRKLQSKGATLVFVYEAGPCGYWLYRYLTRKGLSCHVVAPSLIPRKPGDRVKTDRRDAMTLARLMRSGDLRSIHVPGIEDEALRDLSRGREAAMEDLRRSKRRLKSFLLRQDIRYEGRASWNAAHLRWLSEVVCPTPPQQIVFQEYVRAVTEQAERLQRLERELHEAVKGWRLYPVVEAIQALRGVELTGAVILMAELGDLTRFDSPRQLMSYLGLTPSEYSSGARRRQGGLTKAGNSHARRALVEGAWAYRYPAKISRHIQLRLETLPPEVQAIGWKAQVRLCKRYRQLTARGKHVNQVVVAIAREMAAFAWAIARLVPQAA

SEQ ID NO: 178136 - protein, 375 aa, unidentified
MKEKVRFLGLDVHAETITVAIAEPDGEVRSLGTIANRAESIRKMIKKLGPAEQLKACYEAGPTGYVLYWQLAELGVACEVIAPTLVPMKAGDRVKTDRRDAERLARSYRSGDLTAVWVPDECSEALRDLVRAREAAKQDQLRARHRLAKFLLRVGRRPAAGMKAWTAPYMAWVRQVRFAQVAREATMLDYLHEVDHMAARVKRLEQAITEAVKLAAPAVQEVVRSLQALRGIAEISAVTIAAELGSVTRFDTARQLMGYSGAVPSENSRGKRTQRGNITKTGNAHLRRIAVEAAWSYRLRPGIGPALRKRQEGVPEEIKEIAWKAQVRLTKRYARLAAAGKDQRKIVTAVGRELLGFIWAIGVKAEAASELRTAA

SEQ ID NO: 178137 - protein, 350 aa, unidentified
MIVLGADMHKRSHTLAAVAASTGELLGDTTIAVGDRGFAAALDWATGLGADRIWALEDCRHVSGAFERFLLLHGERVVRVATRLMAGERRAGRDRGKSDRIDALAVARAALREGVERLPVAELAGVELEIRLLVDHRERLVRMRTALYNDLLWHLHDLWPEQTFPKCALLSKKWTSAIGRRLARAEQTARVGIARDELRHVRELSQTVDALEAQIAELVAQAAPQLLAEPGFGPLTAGKLIGEIAGARRFATDAKLARAGGIAPIPVSSGNTNRHRLDRGGNRQINTAIHRVAITRLRCHPETKAYIARKRAEGKTSTEAIRCLKRHLTRRIWHLLQPPPPTEISLYLLT

SEQ ID NO: 178138 - protein, 407 aa, unidentified
MRLFVGDDWAEDHHDVEVMDGSGRRLAKARLPEGVAGMARLHAIVGELAGDEADEVEVLVGIETDRGPWVAALVAAGYRVLAVNPLQASRFRDRLGVSGAKSDAGDAHVLADMVRTHAHELRAVAGDSAQAEAVKVVARTHKTLIWERTRHTQRLRHALRDYFPAALEAFEDLDAVDALELLAKAPTPVQAARLTIGQISAALKRARRKNVAGKAAAIQAALRAEHLGQPEVVAAAYAASVQALIAVLEVLNTQVKTLQGQVEAHFGEHPAAKIVLSQPGLGPVLGARVLAEFGDDPQRYATAKARKNYAGTSPITRASGKKKIALARFVHNDRLIDALLTQAFSALRLSPGARAYYDRQRARGAGHNAALRQLANRFVGILHGCLKTGTLYDEATAWSHHAESVAA

SEQ ID NO: 178139 - protein, 459 aa, unidentified
MGMTLGIDLACRAAHVASLAGPDGALVWRGRSFFTRPADLEKLWRDVDCVPAELTVVMEPTRNAWIPVAAWFRRRGAKVVLVPTTQSADLRAYYSKHTKNDRLDSAILARLPLLHPEGLREHVGDGPADPLRRVVKQRSSIAKRRSAIFHRLDAQLELLGPAWYDALGTDYGKATLQFLAHYADPATVIRLGQARLARFLQRYSHGHWREGKAAELIAAAKESLQLWDTDGMDFAELAADIAVEAEQAMMLTAQLADLDERIANLYAEADPAGIIRSAPGVGPVIAGIIAGRLGDPHRFTSLAAVRSYSGLVPKVNQSGKAEHVGGLTKAGDPLLREAMWMAAEQARKLDPQLAAKYKRLMDAERHHGTAVCHIATTLLTRIATSWRNNEPYQIRDLNGTPLTQDEGKRIVQEQYQVKKNPKKQYKRATNHKAGREPQESPSAPTSRPVTTKPTSPRAA

SEQ ID NO: 178140 - protein, 347 aa, unidentified
MRFYTQQHQYYCGIDLHARKMYVCIFNNLGKIVLHKNIKTDPEIFFEIIFPFLPEIVVGVECMFSWYWIADLCHEHRIPFILGHALYMKAIHGGKTKNDKIDSRKIAALIRGGNFPLAYAYPQKMRSTRDLLRRRMHLMRKRAELLAHIHNTNTQYNLPVIGKKIAYKTNRNGIAERFEDPSVNKSIQIDLAMIDTYDKLLQDVELYILKHAKAHDANTLYLLQTVPGVGKILALVMLYEIHDIGRFPLVQDFSSYSRLIRPEKESNGKKAGKGNKKIGNPHLKWAFSEATILLLRESEQAKKLHQKLVKKNGEGKALGILSNKLGRAVYYMLKNKKAFDMNKFFSH

SEQ ID NO: 178141 - protein, 448 aa, unidentified
MGKGNGLTRGDVRRNARKAALRAVVPDTNAVLGVDLGEKKQALVLADRDGRALWRRSPQVRVHELGPFLDEAAARSVQAGFAGVTVACEPTGSRWMVVQELAAQRGMPVACVQPLVSHVAREQQDLTGDKTDERDCELIARLARELHCYVPERLDPAWAELRSAGRDRAVQITRATAARQLIRDQLGLAAPALLEAHGDPFESATWLACVETVVSGPGGDLAAAGAAGYEQFAAAAAARLAGWGGRRLGPSAAKVFAALAGPQPVPRMLRAVARRVRGALEDLKYARNRRERAETEMIAMLGELGIDCQRVCEIPGLAPAGLAAIVAEAGDLHRYESSSSLVKHAGMSPARNESAAFHGKTTISHRGRPALRLAAWRAAWAVLRHCDVLAAKFAALTSRLHSRLQNAQARVACAASLLRWIYSLIVHGTSWDPAIAAGELGHHHAMAA

SEQ ID NO: 178142 - protein, 385 aa, unidentified
MLSEGREKTQDRQGRGRSYGLEASEPEGERDRRVSAKSAENPNSRRGRKREPELRKVGSGPHRKWVKVMSQYAELYVGIDVAKRSLEVALSNGESWTVSNDAAGIRKLVAELGRRKPALVVMEASGGYEREVWLALLTAEIASARVNPRDTHHFAQANRQLAKTDRLDARGLTLFAAQIRPRPEVAPSAADERLQELVGRRQQLVAMLTAEHNREQQAITPANRRGIRGVIRFLERQCKAIERAIAEHLSKHAQYREVDEILQSAKGVGSVVSATVIARMPELGRVSGSQFAALVGVAPYDRKSGDWDGRSHIFGGRADVRCALYMATLSAVRSDPALRAFYRRLRDRGKDKKVALTACMRKLAVMLNAMVKNRTPWRPLCPTAL

SEQ ID NO: 178143 - protein, 360 aa, unidentified
MAKVKLTQVSAILEKQISVVFHIGIDVHKRSYHVAFLGDNGQEQTFVCSADSDELVNQLNRCGGKIAQVVYESGPTGFELARVLEEAGFTVLVVAPSRVPRPVTAGAKTDRLDCVRLARYSASGMLTGIAVPSRSQEAKRSLIRRRHDLVDSIRRVKQRIRSHLLYHSVKEPAGLDHWNNDSVKALLKLTLQPWARDTLKSLVRELTFLKKENQCIERQIKHVCCQVEQGKVFKCLQTVPGVGPITAATFQLELFDPGRFKTSGQVASYVGLAPMVRQSGESKGRTALRPVGQKRLRSLLIEAAWCWCRKDEQAGAKYRRIAGKTNVPQKAIAAVARKLAIILWRLSLEQRAYEVRTLAA

SEQ ID NO: 178144 - protein, 412 aa, unidentified
MADMVVSLAAVSFVGIDWASEQHAVHVVDPTGRKLRAFSIAHSRDGFDGLVKKLAGLGPAGEIPVAIERPDGRLVDALLEAGHPVVPVHPNAIKAWREAEVCSGAKSDPGDAEVIAEYLRLRQRRLRVLSPFSDATRALRAVVRARGDLVDQRVAANNQLEACLDAFWPGANAIFTDVCSDIALAFLERYPTPASARCLGEQRLGAFLVKHGYSGRRSPAALLERLHSVPDGISDGPEAEARRDAIVGYVRVIRALNTSIKQLARSIAAHLGEHPDNEIFTTLPRSGSINAAQMLAEWGDCRQAYDDPEAVCALAGLTPVTKHSGKHRAVHFRWACNTRFRNAMTTFADNSRHASPWAADIYQRAIARGHDHPHAIRILARAWVRVIWRCWTNHTPYDPARHGGATRLQEAA

SEQ ID NO: 178145 - protein, 349 aa, unidentified
MQSQQYWIGIDLHTHVMQACVLDEAGERCLEKRYRGSSLEEGRDVVRDLAEQFPGAHIAVEAVGTNRWFVRACRECGLQVTVVHAGHLGLKQSGRKTDRRDAYELARRHRLGDIERNARSYHPTELEYGWRQLLRQRHNLVQERTSLITRVRAMLRAHRTDQPKGDIYGPRNLKKVKAIRLENTDEQVVFEVLLSALEMIHGSIVALDHRIAEFVHKHPRVAPLLAIPYVGPITAGTLVSELGDVHRFRNAKAVASYAGLVPRVQQSADQAHNGRLVRHGNRELRYVLGEWAVQLLSRHPIAKAWAAPRLSRMPKNKVRVALARKLLVGVWHTLRTGEVFSLERCLATA

SEQ ID NO: 178146 - protein, 340 aa, unidentified
MKTITIGIDLAKSVFQVHGVDAAGLITVRKKLRRAEVLTFFASLGPCLVGMEACATAHFWARELSRLGHEVRLMPPSYVKAYLRRQKNDAADAEAICEAVMRPSMRFVPVKSAERQGVLVLHRTRELLVRQRTMLINAIRGHCAEFGMIAPQGARRSAELIAQVQAADAAVLPDLARSALLRLADQLDALAIEIHALERQLMAWHRQDEASQRLATIPGVGIITATALAASVTDPSLFRSGREFAAFLGLVPRQNSSGGKDRLGRISKMGDGYLRKLLVVGATSVIRRAADNASATGAWVRSLMERKPSRVVTVAMANKTARIAWAVLSRREDYRAPAMI

SEQ ID NO: 178147 - protein, 412 aa, unidentified
MSDLSARAVTSLSRARPGERDLIRSLFAQTRRSAVRPPGRRVPSTTRICRAGGTAITTIAHTQPARLTVGVDTHKEVHVACAKDQLGRRLATTLVATTTAGYAELLGWADALGQVEAFGIEGTGCYGAELARFLRGHGQRVVEVNRPDRAARRRHGKSDPVDAEAAARAVQAGEATGLPKAGDGVVEMLRVLRVARQTAVRARTQTINALKALVVTAPDSLRQQLRDLPTRQLVATAAAFQPDTPATPTMATMVALGALARRYQVLDGEITMLSKQLHRLVRLAAPALLAVFGVGPETASALLVAAGDNPQRLHSDAAFAALCGASPIEVSSGKTVRHRLNRGGDRQANNALWRIVLVRLRAGHPPTVAYLQRRTAQGKSKREAIRCLKRYVAREIFAVLTTMADQAVTTAA

SEQ ID NO: 178148 - protein, 337 aa, unidentified
MEYFAGLDVSMEETRVCVVTRSGTVIHEAKVPSTPASIAATLARVPSCQWVLFETGRMAPMLYHGLSQLGLPVVCVESRQAYQALRSLATHKTDRNDARGLAQLARTGFFKPVYVKSLPAHVIRSLIIARKKLVGQRVTLENQIRGLTIVFGVRLPRALSPTFISQALQASEGIPGLSAAMRGLVAARAAVLAAVVAIDGDKRKMARASGACRRLMSIPGVGQLTALAFTAAVDDPERFRRSRDIGAYLGLVPRRYQSGEVDYTGGISKCGDRRLRTLLYEAANVMLTRYKGSLKLKAWALAIAKRSTMRKARIALARRLAIIMHAMLRRGTEFKPA

SEQ ID NO: 178149 - protein, 361 aa, unidentified
MDLISKLMKKQLKLLNFDGQNLFIGIDCHLKSWKITIYSEEFELKTFSQEPNSAKLAQHLHKNYPGAAFSCVYEAGFSGYWIQRELSEYGIDCIIAHPADIPTMDREKKLKSDVIDSRKLCRSLRNKEIEGIYVPSIELQEARSLVRARVKLVNDMTRVKNRIKFFLMFYGTTISTQGNSWGKNYLAKLQQIQLKTEAGQRSFEFFLQELHFLIEKEKWLRKQIELLSLTEPYQEDVRLLRTIPSVGLITAMTIITEIGDIMRFKSLAKLCCYFGLIPTSYSSGEKERIGRNTSRGNKYLKHLLIESAWIIIRKDPGLLLYYKKQIAVMESNKAIIKVARKLLNRIRLILTMKVEYQCGRP

SEQ ID NO: 178150 - protein, 346 aa, unidentified
MMIIGCDFHPSWQQVSWLETETGETGEQKLEQALGDAERFYRQLPAPALIGMEATGNCHWLVDLLAELGHELWVGDAAQIRASCVRQQKTDRRDAEHIRMLLQEGRFPRIWMPSSEVRDLRQLLLHRYKLVTIRARVKNELQHLCLNQGVQRKHKLWSQAGQKVLRELPLKPWAARRREDLLGLMAMLDQQIEPLDRAVKAEAQRDKMALLLQTQPGVGAVTALAYVLTMGDVSRFARGKQVASYLGLIPREHSSGGRQKLGAITKQGNRMLRMLLVEAAQIAVRFDPGLRKQYLHRCHQKPKAVAKVATARKLAVRLYWMLRTQKPYPEVVRIESSPRVPLVGAS

SEQ ID NO: 178151 - protein, 387 aa, unidentified
MGPQANANPTATNSECATLLVSFELSQKSWVLTILQPNGSKMSRLVVAAREKETVLGILTRHRQQAARRLGREVRIVSIYEAGLDGFWLHRWLSAQGVESHVVDPASILGPQRRRNAKSDRIDGAKLTRSLGCWLSGDRLVCSMVVPPSAEHEDSRRLSRERGELVSERNRLSNRIGGLLANQGIAGFKPMQKDALALLATLRTGDGQALMVNLKATIERMLQRLALLKDQIKAVEAERDRLLNTPEAEATEEIAMAQRLFRLRAIGPEFATVLPAECLHKHFDNRRQIGAFAGLAPTPWSSGSIEREQGISKAGNRRLRKTMVELAWSWTLHQPGSALTRWFNQKVAGQGKRVRRIAIVALARKLLVALWRYVHEGVVPEGAVLKG

SEQ ID NO: 178152 - protein, 307 aa, unidentified
MSEKIYFGVDVCKESLAFCGANVAGQVPNNAPGVRRLLARLPQGAHLIIEASGGYQRELVKVAQQSAVLLSVVNPRQVRDFARGVGRLAKTDPIDAEMLARFGAEVNPPPDAVPATAELALQELVSARQQLVEQRTVLLQQQSQHLNNVVRRLDRARLKLLQRQIGQLELAISSILEEQSALKQKVERLQQVKGVGFITAVTCVALCPELGSLSKRQTAALVGVAPYDEDSGARKGWRHISGGRPKLRRALYMASISAVRSNPILRRFYQQLRQRNKPPKVALVAVIRKLAILLNRLLRNASFLPAS

SEQ ID NO: 178153 - protein, 342 aa, unidentified
MKVSVIGIDLGKNSCSLAGMDETGRLVFRKRASRSGLVETVGKHPGCMVAMEACCGAHHLGRVFAELGHEVRLMSPEYVQPYVKAQKNDDRDAEAIAEAATRPTMRFVPVKTQAQSDLQSLHRARERLVGDRTALINHLRALLLERGVIVAKGRAKLARELSDVLSNPAPELSSRILLLIEDLVDDWNRLDARIAAFDKEIVAVARADEAMRRLTSIPGIGPINATALVAAIGDASAFTKGRDLSAWLGLVPKQATTGGKPRLLGITKRGNRYLRKNLVHGARAVLPRLAAQDTRIGDWLRGMLARNHKNVVVVALANKLARICWAVLTGQQAFTHEAKPAH

SEQ ID NO: 178154 - protein, 356 aa, unidentified
MDKYIGFDIDSKKTVACVVEKGKKERYATIGSDVQSMRNYLKGQKSDGSRIHLTFEISGQAGFIYDSLIDCADTITVNNPSKMTWIYRTAKKNDRIDSRKQAILLSIGEIPKVHMPGVEIRQWRNVILHRRNLVNKTTEVKNRIRAVLRSQGFSKPEQKGSWWKRSNRLWMRGLSEQQVSSIELWRMNLCHLMEQLDLLDGQVKRVTEYLDLYLGRGAGGKLLMSIPGVGPRTAEAILAYTDDISRFGRTKQYCSYFGLTPRLDESGTSRRLGHISKLGPSVVRWLLCESSWKVIRKSSAMRAFYERVKAGQGGRKKIAIVAVCRKLLSIMRAMLETGELFNEELVCRECEVNRAC

SEQ ID NO: 178155 - protein, 343 aa, unidentified
MEHFAGLDISVKDTSVCIVDEIGKIIREVKVASEPDALLQVLRNAGYHFKRIGLEAGPLSQWLFSALGEANLPVICVETRHMRAVLKAQINKTDRNDARGIAQMMRVGLYRPVHVKTLRSQKLRMLLTHRKLLQSKAIAIENDLRSTLRNFGLKVGMVGTAKFETRIKELIENLPDLILLVEPLLVVRRVLREQLDLLHRRLLAVVRDDAICRRLMTVPGVGPVVALTYRATVDVPARFRKSKSVGAVFGLTCSRDQSGERDRPGAISRCGDEMMRAMLYEAAQAMLLRSAKWSSLKAWAMQIARRRGMKRAIVALARRLAVILHRIWVDGTEFRWTREAAAA

SEQ ID NO: 178156 - protein, 344 aa, unidentified
MSEVSIIGLDIAKYVFHAHGADGRGRAIFSKRISRGKLLDFFAAQPSCTVALEACGGAHHWARQLAQLGHEIRLIPPAYVKPFVKRQKNDAIDAEAICEAAQRPSMRFVAVKSEQQQAAGLVFRTRDLLVRQRTQLINAIRGHLTEYGWIAPKGPSHVAMLTDLIEEEEMASSLPKAAHAMFRLMLDLLAELNGKVADLDQEIARRAREDEVSRRLMTVPGIGPISATAIAALAPPAETFAKGRDFAAWLGLTPLQRSTGGKQKLGATSKMGERTLRRLLIIGSSAVVQQASKRGAPRGSWLEQMLARKPRMLVTVALANKMARIVWALLVKQENYRAPVTAKA

SEQ ID NO: 178157 - protein, 361 aa, unidentified
MQSTTIIAFDQHAATTVAAVLLPKHRTPVLHSLSSDIPTIQRFVARVKRHGAVTCCYEAGPCGFELQRALTARQIPCDVIAPALIPRRPGDRIKTDRRDAGHLAVLYRADALTAIHIPTEQEEAARDLLRCREDIRADLLRARHRLSKFLLRHGRRFTATKKAWSKRHATWLRAQTWPLAALDQTHRAYLRAVDEVLARLHDVEQDLRALLDLEPLRARVHRLRCFRGVDDLTALTIAAELGDPRRFATAPSLMAYVGLVPSEHSSGAARRQGGITKTGNAHLRRVLVESAWHYRHHPFVSAVVRARQRGAPATAIAGAWAAQQRLHRRYARLAARGKRKQHIVTVVARELTGFLWAALTR

SEQ ID NO: 178158 - protein, 330 aa, unidentified
MIHPDTASLQSPSAWIGIDVSKAWLDLCLIGEGIGASAFYRRFANTPKGRQQIIALAGKRPVRAIVLEATAGYEQALVCALLEQGLPVAVVNPLVARRFAQGLGLLAKTDKIDAFMLALHGQKANPRLKSLTTQKNTVLAGLNDRRRQLAQMIVMETNRMQQMSDAKLKRRCQVHITWLRREQDDVMAAIRSEIARDEAAAARFDLLQSMKGIGAKVAASLIGELPELGQLNRGQIAALVGVAPMAHDSGAMRGVRRIKGGRSWLRSQLYMAALVAIRFNPAMKAHHDKLKQKGKPAKVILIAVIRKMLVILNQMCRTGQPWHDTTVQMS

SEQ ID NO: 178159 - protein, 349 aa, unidentified
MSTHQCTAVTYGIDLGKSSFHVVGLDAGGSPIKRAKLTRATITRFFVNLPAALIGMEACPGSQWLARKLQALGHQVRIVPAQFVKPYVKSNKNDTIDAAAIAEAITRPTMRFVQIKHCDQVDLQALHRSRDLLMTTRTRLINQMRAFCLEYGVAMRNGVGAFKAALPAVLGDEGNDLTPAMRELLTDLAQELTALEERIAQFTRKINAQADASDCARRLATIPGVGQLTATALVAAVGDARQFKTARDLSAWLGLTPAEYSTGGKTHLIGISKRGNSYVRKLLIHGARSCSMHLDRTKDRLGVWIGQIEGRLHHNKMVVALANKLARIAWVILTKPGALYERRAPHLAS

SEQ ID NO: 178160 - protein, 411 aa, unidentified
MDVYCGIDWAEDHHDIALVDEGGQVLARQRVSDDAAGLARLLELLAQHGDTPDDPVPVAIETPRGLLVACLRATGRRVYPVNPMAVARYRDRHSVAGRKSDKGDAAVLANVLRTDMHAHRPLPADSELAQAVAVLARAQQDAVWDRTQAHNRLRSHLREYYPGFLGAFAAARGGIMRPEARAVLAAAPTPAAAARLTLAQLRALLKKAGRVRGIDAEAQRLRDALRAEQMRQLPLVEEAMGRQTLALLRQLEAACASADDLGQAAAESFSQHPDAGIITSFPGIGALTGARVLAEIGDDRSRFQDARGLKAYAGSAPITRASGKSRSVTHRRVKNNRLAAAGYTWAFAALTASPGARAHYDRRRDAGDRHSAAQRNLFNRLLGCLHHCLATGQHYDEATAFPAQATTKTAA

SEQ ID NO: 178161 - protein, 365 aa, unidentified
MRKKNTSTSSISAGHTMGIDLGDRFSHVHVVDAVGGGVFDGRVPMSPASVESFLKSLPRLRVAMEAGTHSSWVARIAAATGHEVIVANPRKVRLIGQNTRKSDRADAERLARLARMDPALLGPITHRDVQAQRDLAVVRSRDALVQSRTMLVNRVRGTLKSFGLHPAKCSTANFAKKLAADVPDELKPAILPLLEILFELNLRIACFDREVERLSEEQYPVVQGLREIAGVGPITALAYVLTVDNPRRFAKSRDVAAYLGLVPRQRQSGERDPQMHITKTGSTLMRRLLVSAAHYIIGPFGKDCDLRRFGQRVVGASANKNARKRARVAVARKLAVLMHHLWRTGEVYDPLYLAKSRGELAGMAP

SEQ ID NO: 178162 - protein, 388 aa, unidentified
MVSPIKYSVGAEVSKSDIYVAMLLQSSDLRTVVKGTRKFANTPEGFKHFENWIHSHKKFAIPVHITMEATGNYHEHLAFYFDNHGFTVNVVLPNKAKKYLQSLGNKSKNDKIDARGLAQMGAEQQLMHWKPFSESIYGLRSLTRYCEQLSEHRTMYKNQYSALSYGMYQVEDVKKQLLELIKTVEKQIAETKKRIEKMVKQDEKIWERMEKILKIKGLGIYSLATIIAETNGFEMFNNERQLCSYAGYDIVENQSGKRNGKTRISKKGNSHIRRILHLPSLSVVRYGEKKFVQIYERIMSRHNKKMVAYVAIQRKLLALIYALWKKNEEYNADYQWTFGNVESKVLFQVGSERAVKNSPINIGATQDELSYNVSSEVLFQVIQRLLFI

SEQ ID NO: 178163 - protein, 342 aa, unidentified
MQAVTTVGLDIAKSVFQVHGVDARGNVVVRRQLRRRRVLPFFKKLPSCLVGVEACATSHHWSRQLRALGHTVRLMPPAYVKPYLKRQKNDAADAEAICEGVTRPNMRFVETKTPEQQSCLMLHRTRHLFIRQTAVINAIRAHLAEFGIVAPVGRNGVEELLDVVADPNDDRVPEVARECLAGLGAQLRMLKAQILEFDRCIVAWHRSNETSKRLDEIPGVGPALATALVASVADPRVFRSGRDFSAWAGLVPKQNSSGGKEKLGSITKRGDRYLRSLFTAGALAVIRYAKIHGTKHRPWLTALLARRPTKVAAIALANKIARMAWAMMAKGERYKEPAALAA

SEQ ID NO: 178164 - protein, 476 aa, unidentified
MSKGSSGMTRGDRRRNARRERLRGLVPRDGAVIGIDLADEKQAIAVIDHDVRVLARKTVRVKAFRLGEALDWAAGQARAKRFTSVTVACEPTGPRWLQVQRLCAERGLPVVCVQPLVSHLARRQQDYTSHKTDEADCVMIARLAAELHCCIPEALDEVWADLRHLGRRRITLITSGTASVLRVRDFLSVAWPVAAEACAQPFGSVTWLAAMQVVTSRCGGQPEELADLGVEAFTALVRSAVPGWGGKRVCGPVCRAVFAALSSTEGVVRAHRRGLLRRIAAELGDLQRARAQQRETEAAMGGCLAGLGLARLGEIPGLTAAGAAAILAETGDPNRYDTSSSLVKHAGLSPSENASGAFDGEARISRRGRPGLRLTVWRAVWPMLIHNPVMAAKYAALTQAAGQAAAEAPAGGGRAGHATSAAEAARRRRAKARVACAAALLRWIYSLVVHGTCWDPAVAAGRKDAQAAASYQPEAA

SEQ ID NO: 178165 - protein, 367 aa, unidentified
MKKVSTTAAKQIRNFSEQKLTVGLDLGDRSSWYCVLDEAGNVQLEQRLSTTPKAMREVFGTMPRSRIALETGMHSPWVSRLLSELGHEVIVAHARNVRLIGESRKKDDRLDAQTLARLARIDPQLLCPVKHRSAKAQADLTVIRARAGLVRARTALVNTARGLAKSYGERLRGCNVRNMNPEKAEGLSPELQTALEPLLAGIESLSERICEYNERMEHLAQERYPQVALLKQVKGVGTLIALTFLLTLEDAHRFRKSRDVGCYLGLQPGRRNSGQSEPQMHISKQGDPYLRTLLVQSAQHILGPFGADSDLRRWGLKLAERGGRNGKKRAIIATARKLAVLLHHLWVSGEVYEPLHNSQQRPLAIAA

SEQ ID NO: 178166 - protein, 376 aa, unidentified
MTAQHSSPVLYMAMELSNSKWRLRFGNGAAVHDKTVEAGDQKGLVGAIARARTRLKVAKEAPVRSCYEAGRDGFWLHRFLQKHGVENLVVDPASIEVNRRQRRAKTDRLDAKKLLLMLLRYHLYGEKTVWKICRVPEAANEDERRPGRELDRLTRERTGHLNRIRSLLVTQGVSGVKPGQVDLETVKEWDGKPLPPALAAELAREQQRLRLVGEQIRQIEAGKKQRLAEPQTASDHKAGKLLQLRGVGPVSSWMLAKELFGWRQFQNRREVGAVAGLTATPYDSGDSKRNQGISKSGSPWVRSVCVELAWSWLRFQPHSELSKWFAQRFGGGGKRLRRIGIVALARKLLVALWKYVEQDQLPAGAVLSDDIVPKTC

SEQ ID NO: 178167 - protein, 323 aa, unidentified
MTYIGIDISKDSFVAAFPKVSGYQTQTYPNTVKGIRKFIGSLSVTEHHCVMEATGNYGSLLLYLLDRQGIAASMVNPKQIKHFSRMMMTVTKTDPKDACMIAMYGEKMNPPVYKMPSETVMLLKQKKTIIRQLKKQLTASKNLKSSLVVLPLQDKNGMKALDKTISFLASQIESLESELADLASSEFDKQVKLLTSIKGIGITLATALIVATGGFSYFNNAKQVSRFIGICPTYQQSGTSVHIKGGINRNGDASLRSLLYVASWSALRGNTTCKECYTRLKANGKPSKVALIAVANKLVRQAFAVIKSDSPYVDGFVSTRQTK

SEQ ID NO: 178168 - protein, 369 aa, unidentified
MTEYSGAFVAFDVAKTKHAVAVAEAGRAGEIRYLGEVENTPARIERTIRKLAGRYGRLQVCYEAGPTGYGLYRQIQELGHDCLVVAPALIPKRSGERVKTNRRDAVTLARLHRAGELTGVWVPDAVHEAIRDLVRAREAAMDDLRRKRQQLLSFLLRHGRIYAGGGHWTLAHRRWLARQAFEHPAQQIVFQEGVDAIDDAAQRLRRLQEQLAGIVPSWSLAPAVQAYQAMRGASFLVAVIFAAEIGDLRRFDTPRQLMAFLGLVPGERSTGATVRRKGLTLAGNRRARRALIEAAWTYRYPARVSETLRARLEGLPKPVRDIAWKGQVRLCARYRRLSAAGKKLPVVVAAVAREMAAFLWAIGREVTPV

SEQ ID NO: 178169 - protein, 361 aa, unidentified
MRIIGGLDVHRSQITYDWIDTDTGQHQRGQLAPAHREHLRVWLEQFRDRPAAFALEGCTGWRYVVEELKRAGIAAHLAEPADTSTLRGPKRHAKTDRTDARHLRGLLAAGRLPESWIPPARVLEARTQVRCYKALLDEHTAWLQRVHATLFHHGVPAQRNLLAADRRARLDRGSGLSPAARQLVAVALRTLDHLDAELDRLRAELTWFARRQPGCQALDGLYGIGPVTAVAIWAELGDPARFTSSRHAVRHTGLDITVYSSDGKRTPGHLARQGPPVLRWALFEAAKCAARPSSPDHAYYLQVKGRLGGNRATLAVARKLARRCYHTLGTLGDLAYAPPSDTLILGGWPDRCGSCAPCPPR

SEQ ID NO: 178170 - protein, 425 aa, unidentified
MKKIDYLSTLFVGIDIASRMNVVSAIDFNQDYFIKMKPAPNSQEGAEFLETMIVNVLGNNHQFKYVIIGMESTGFYGVHIANYLSASDTLAPFSVHVYCLNPKEVKNYKKSFNDLGKNDGIDSFVIADYARVGRIASKPWRGSQYLALQRLTRHRMHITECIAREKTYMLNNIFLKFSEYALLNKDEHPFSNKYSATAQAILTEYTTNEDLVNSSVAELVDFVNSKSRGRIADPEETAKILQAAARNSYRLDTCLYEPLTISIASSFNCISSFEKELKVIDKAILQTVQGLNPVEYTVLNSIPGIGKVFSAGILAELGSIKTFQNADALAKYCGIVWNDNQSGDFEAEDKKMSKAGNRYLRYYIIEATDSVIRNCPAYKRFYTKKYVETRNHQHKRALALTSRKFIRMLFGLLDKSQLYSPEKSR

SEQ ID NO: 178171 - protein, 333 aa, unidentified
MKHYVGLDVSLAKTAVCVVDENGVIVREAEVASHPEDLALWLEELSLVLERVGLEAGATASWLYTGLRERGFPAICIDPRRLRSATKMMPVKNDRNDARAIASCMRVGWYSVVHIKSEASQELRMLLSNRRTLQGKQIDIENEIRGTLRVFGLQLSGRVTSGPFERLIRELVKGVPRLAAMVEPMLIARAALRQQCAVLHKMMLDRVRKDETCRRLMTIPGVGAIAAITFVTTIDDPDRFQRSRDVGAHLGLTPKKYASGEVDRNLGISKCGDAAMRSVLYQASLSLLTRSTKHSSIRNWGLAVAKRRGLRRAVIAVSRKLAVIMHRVPRGPG

SEQ ID NO: 178172 - protein, 353 aa, unidentified
MQKIYIGVDFHARQQTICYLTTDSGELLLQQLKHQDKAAVRAFYAQFSGPVIVGLEASGYSPWFERLLEELGCEVWLGHATEIRRRARWRHKNDRRDAELILDLMLHDEFPRLYLPPLQSREVLRMLRYRQKLIKMRTIGKNSLQALALQSGLAKGPHLFTKAGLQQLRQASMSPAMQWQREQWLQLLEPLNARLLETMRWLKQQSLADQRISRLRTHPGVGLLTALCLVHSLEPVSRFANSRKVTAYAGLDPLERSSAERQRFLGISKGGSRVLRFLLVEAAHTALRKDAELRRFYQRLAERHGRPKAKVAVSRKLLIRTYIMLRDELDYAEFQRRAVAARLARQSSRPPCL

SEQ ID NO: 178173 - protein, 380 aa, unidentified
MGEMEDDMRSVALDLGSRIAFCEVSNGTVVARATVPQFESLQRWLGPKTPKARVAIESCREAWWAEKKLREWGHEPLVIDTTRSRKLGIGQHGRKTDRIDAEVLARAVEARLIPRAHVLSEHRQQLRFQMGVRRALVETRAQFTTTVRGLARAHGVRLPSASPYGFAAAVRDVELDEALRELVSPLLDVIAQLDVLIAKADATLEALAEKEPVTAVLKTAPGVATVVAAAFISVIDEAKRFRRAHEVESYLGLVPSEDTSGKRRLGAITKRGNSYTRTLLIQAAWAILRSKGDDPLARWGRAIALKRTKRVAAVAVARRLVGVLWAMWRDGTVYEAPKLGRAMAQGAEQQAQSALLRATALRRAARKPFYSSSARLRAGR

SEQ ID NO: 178174 - protein, 349 aa, unidentified
MLADELDYVVGVDTHRDQHVLAVVVAPTGALIAQRSVPANAQGYAEAIGFAERHAPGARVWAVEGAGHYGAGLTRCLSARGEVVHESGRSSRAERRLRGKDDPLDATRAARSALASNQPASPRSGQRQEALRVLLLTRRSAVDVRRVALVQLRSVVVTAPDDLRNELRRLPLGELLRRCSRFRRSSSRTPDQLATILALRSLAQRIQTATHEADVLEREILAHVRALAPDLLAEPGIGPIVAAQLIVTWSHHGRVSTEAAFARLAGVAPLPASSGLTTRHRLSRGGDRQLNRALHTVILHRRQHDQATKNYIARRVAEGKTTRDAVRLLKRYLARHLYRVMQNTTPLTT

SEQ ID NO: 178175 - protein, 416 aa, unidentified
MECAPNSLPPEPVNGLTCGIDWAREDHAVSVVDTRGKQLHRWTMVHSAEGLRGLIRRLSKIGVTEVAIERPDGPVVDALLIAALTVVMISPNQLKNLRSRYGSAGNKDDRFDAYVLADTLRTDRHRLRPLTPDSPDTVTLRQLCRSRKDLVGHRVALANQLRAHLQICFPGAVGLFRDLDSPISLKFLTRFDCQDKADWLSPKRFAAWLTSVGYCGRVHPTVLHARLTAAPHGTTGPDGAAQAHVTRALLVTLTTVVEQIKALSEQIAEQLALHADAHIFTSLPRSGTVRAARLLAEIGDCRARFPTPESLACLAGVAPSTRQSGKIRSVGFRWAADKQLRDAVCDFAGDTRRDNPWAANLYRRAIARGHDHPHAVRILARAWLYVIWHCWQGGVAYDPAKHRALQALQQDLGAAA

SEQ ID NO: 178176 - protein, 369 aa, unidentified
MLFQSFSTQKGALTVNSSKYLAMDVHTATISVAVRDAAGKLIMESVIETKSSTILQFIQGLRGDLYVTFEEGTWAAWLYDLLRPHVTNIVVCDPRRNALLNEGSKSDRIDARKLSELLRANLLRSVYHGENGLRTVKELSRAYLTIGKDLTRVMNRVKAIYRGWGIPCAGKSVYHPRHREEWLRKITQASVRRRAELYYEQLDVLVVLRKQARQELLAESKKHKAWKLLRSIPALGPIRVAVLMAIVQTPHRFRAKRPLWKYSGFGVVTHTSADHRYVNGQLERSKRPVSVRGLDPGHNHQLKYLFKSAAIQASTAKGPFQEFYEALVAKGMRPEMARLTLARKIAVITLTVWKKGAAFDAKYLKSQTA

SEQ ID NO: 178177 - protein, 455 aa, unidentified
MSKSNRTDTPLRAARAQISNPEITVHAMYRSAIGIDVHLNLLVCCHQKQVAGHREQSESRDFNTDRASIDAFAAWCRECNPDIILMESTGSLWQSPYEALERAGFTSEQLALINARDAKAAAGRKTDRKDASRLASLARTGNFKKSFVPEKAFRLQRVISRDLQKNRNDISRTSNRFGKSLNLTGCRPTTVFSDIRGGKAASLILMAKLRDDPHLFDVIKQNSRRLRASPEQIMQALDFEIEPMMKEQILALRKKIDQLEEYDRSTFERLRQLQAPYEKDIQLLITITGIQERSARMIYAELCPDLKEHFPTSEQFASWLGICPGDNTSAGKQKSGKCPKGNKHLRRTLIEAARGLVVGGTAALKEKFQVLKMRRGYRRAMVAFAHLLARIIYSVLTHQKGFEPYQSTAFRDTLMERAKNGVKQLLKLKGTKYVIADGLVVETKTGAILGAVVSS

SEQ ID NO: 178178 - protein, 329 aa, unidentified
MSVNLQGREAVAASRPCAGIDVSKLHLDAAWGDRLERVSNDAAGWEALVAQFKAAAVDVVVLEATGGYENAAACALQAAGLALVVINPRQARDFAKAMGELAKTDRVDARVLAQFAAVIARHPKRQSYVRELPAAQRTHLAALVVRRRQLLDMRIAESNRLQLGHRATHKSVQAILKAIDKQLVVVDHDIDQHMQQHFKEVATWLDSVTGIGAVTTATLVGLLGELGQLPRRSLAKLVGVAPLARDSGPHQGARAIWGGRADVRSVLYMATQSAIRHNAVIRDFHQRLIAKGKPNKVAIVACMRKLLTILNAMVRDQAAWDASKHLKTA

SEQ ID NO: 178179 - protein, 342 aa, unidentified
MDEYEGRQFVGIDLHRRRSVIVRQSESGEQLSAVRIVNDPVALGLQLEQAGSDPEVVLEATYGWYWAVDVLQACGAHVHLAHPLGVKGFRYRRVKNDVRDAADLADLLRMGRLPEAWIAPPQTRELRELVRYRAKLVAIRSGLKAQIHAVLAKAGVLIAASDLFGVTGRQRLAKVPLGAAYAQRIGSLLQLIDIFDSHEARFAAMIAEQLDTHTGYHAIQQVPGIGPVLAAVFVAEIGDVDRFTDPAHLCSWAGLTPTHRESDTVVHRGHITKQGSKAVRWAAIEAVQRHPTTAKIAADKHRIEARRGKNIAKVAAARKLLTLVYYGLRDGHIRALDRTRAA

SEQ ID NO: 178180 - protein, 347 aa, unidentified
MTIVENHTLITGGVDTHLDFHVAAAVDANGGVLGVETFSTRGAGYAQLVAWLQRFGPIDRVGVEGTGSYGTGLTRHLRSEGIMVVEVDRPNRQARRRHGKSDTVDAIAAARAALSRAATGQAKHRDGNVEAIRVLMVARRSAVDERIKVLNQIRHLVLCAPEPIRARFHGLTPTSLLNQTSTLRPRDHGDIVDYTTLITLRELGRRAKNLHDENVRLNKLLRPLIRQTAPGLLDVYGVGYDTAAKLLVAAGDNPERLHSEAAWAHMCGVAPIEASSGKTKRHRLNRGGNRQANSAIYHIMLTRLSYDQRTRDYFARRSAEGKTNGEICRILRRYIAREVYKQLPHPD

SEQ ID NO: 178181 - protein, 357 aa, unidentified
MNRIYYIGADVHSNSIELAIQNRRKIVGRYSVPATISATAEVLDSLHGKKCMAIEEGPMSGWLYRNLHQKVDRFVVADPRRNKLISSDGDHDDKVDSAKLAMLLAGGYLREVYHTDDHRRAELKHWVSLYHDRVRDAVRNINKIRARCRMHGLTIPRRVLRRPEHRDPWLSKLKQPALAKQLLMLWIGYDATAKQARMAKEQLINLGKKYPIIRIWKKLAGIGTIRSVTIFAYLDTPWRFKKKNKLWKYCGVGLQRTASGTDKKGKPKPARLQLPWAANRILKNAILGAALTAINQKQNTLKDHYERMVQNGITAGNARHTVARKLLTVMWGMWKRSCQCDPDNATLSEPTERCVCV

SEQ ID NO: 178182 - protein, 350 aa, unidentified
MKMRNKPRDAAVYGIDLGKNVFHVVGVDSSGAPMQKASFRRETLLQFFSTAAPALVGMEACPGSQWLARKIQALGHKVRIIPAQFVKPYVKSNKNDLIDAAAIAEAVTRPTMRFVEVKSVEQVDLQALHRIRDQMMAARTRLICQMRAFCLECGVAIHQGVGKFKADFPRVLADDGNDLSATMRHLLADLFEDLKRLEQRIAQISKEVEASAAQDDRARRLMTVPGIGALGATAIVAAVGDGKQFKKARDMAAWLGLTPREHSTGGKTTLLGISKRGNQYVRKLLVHGPRSCLLQLDRSRDRLGAWLDQLQSRMHNNKAIVALAAKVARIAWVVLTRPGALYERRQPIPD

SEQ ID NO: 178183 - protein, 405 aa, unidentified
MGIYVGIDWAEAYHDICVLDETGTVLIKRRIADGLEGVGQLHALVADHASEPNQVVVGIETDRGLLVGALLAAGYQVYAINPLAASRYRERHVTSGAKSDPGDAKVLADLVRTDRHNHRPVAGDSELAASLQVLARAHQNLIWSRQRLVNQLRNNLREYYPAALAAFGTELAHPVALSVLDAAPTPARGRTLSRAKLAAIVRRAGRERGVDEKAAAIQAELRAPQLAAPALIGVAYGKSVASTVRILRGMNAELASLESELAPSFEKHPDAEIYRSLPGLGIVLGARVLSEFGDDRTRFAHPKARKNYAGSSPITKTSGKSRVVLARVARNRRLADACHQWAFCALTPSAGARDYYHRLRQRGRTHHQALRALANRLVGILHGCLDHRQTYREDIAWPSSLTVAA

SEQ ID NO: 178184 - protein, 345 aa, unidentified
MNELYEGQQFVGMDLHRRRSVLVRMTETGEHLETVRIVNTRDRLAEVMTRAGESPEVVLEATYGWYWAVDALAELGASVHLAHPLGVKAFSYRRVKNDQRDAADLADLLRMGRLPHAWIAPPETRELRELVRHRAKLVAMRSRCKAEVHAVLAKGGVWVPMTDLFGVEGNLLLDTVTMPAPYLARIASLRRFVEAFDAEIDLFTGLAQRRLTHDAGYTAIQQIPGIGPVLAAVFVAEIGDVHRFDGPAKLTCWAGLTPRHHESDTTVHRGHITKQGSRLVRWAAIESVKILPAASRIGAIRDKVAHRRGNRNIGAVAAARRQLELVFYGLRDHHVRALHRSPRAA

SEQ ID NO: 178185 - protein, 402 aa, unidentified
MEIYCGIDWSERHHDVAVVDRAGVLLGRRRITDDLAGFTDLTALLAEHTGDEFTAVDVAIETDRGLLVAALRAAGHRVYAINPKAVDRYRDRHAVSGAKSDPGDALVLAHLLRTDRDHHRPLAADTELGQAVSVLARAHQDMVWARQQDTNRLRSLLREFFPAALTAFADLTTKTALTVLAAAPTPAAAAALTRANLIALLHAAGRGTRPADAARLVEVFAQPQLHQPPAVEDAMGEAVRAIVRTVAATSESIKDLEKALNASFEQHPDAEILDSLPGLGLVLGARVLSEFGDDPNRFTHAASRRAYAGTAPITRASGRHRAVLARHIRNRRLADACYLWAFAALTKSAGARAFYDRRRAAGDHHNAALRRLGSKLIGQLHHCLHQRQPYNELLAWTQPEPA

SEQ ID NO: 178186 - protein, 343 aa, unidentified
MDHFAGLDVSVKETSVCIVDDTGKIVREVKVASEPEALLAVLKNPAYRFKRIGLEAGPLSQWLFSALAEAELPVICVETRHMQAVLKAQINKTDRNDARGIAQMIRVGLYRPVHVKTLRSQKLRMLLTHRKLLQSKAIAIENDLRATLRNFGLKVGMVGTVKFEARIKELVENQPDLASLVEPLLIVRRTLREQIGVLQRRLLAIVRDDDVCRRLMTVPGVGPVVALTYRVTVDVPARFRKSKAVGAVFGLTPSKHQSGESSRTGGISRCGDEMMRVMLYEAAQVMLVRSVKWSWLKAWAMQLARRRGMKKAIVALARRLAVILHRIWVDGTEFRWTQETAAA

SEQ ID NO: 178187 - protein, 414 aa, unidentified
MLKIVYRVCCGMDVHKSFVVACIASTNEYGVTTYKSKRFTTFTKDLRRCADWLSENNCKDVCMESTGKYWIPIYNILEPTCNVVLAHPKYVKAIRGKKTDKRDAKWIADIFKHDLVAGSFIPPADIRQLRDLVRYRWKLTNFTTGEKNRAQNCLTVSNFKLDDVFSDVFGKAASAITTRILQDPTEKITDVSGFRTKGMKATNEQVLAAVDGEMCEEQAEKLRIIRSHMDSLELCKLNLESLILSTAEQYLPQLNLVMTVPGIQSFAAIGIISEIGVDMSVFPTSKHLCSWAGLTPQNNESAGKKKTTRISRAGAYIKPLLVQCALCAIRAKQFPELRNRYLALKKRRGHKKAIIAIARMLLTAIYNMLKKNETYNPEIYRKGDRPPAHREVSVEEAIFILQRQGYLVTAPPTS

SEQ ID NO: 178188 - protein, 373 aa, unidentified
MMEVGKMSKAETGRLCVGVDLHKTQFTICALNEDGEYLLEKQYPTKEEGYSEFAREMHRFEEQGCSIELAVETTGNARFFKNRMESEFFAVKVVNTNRFKVITMSTKKTDANDAATLAYYLMKDMLPEAHLCSQTSEEIRRLLKTRSVLVQSMVKIKNQIHGMMLGYGIETKAAQLQSKRKRQELINDLEDHNFSAYTAPSLKVMLKILDDLSAEIKGIEKLLEEMVASNEDVALLMTVPGIGINTATVIAAYTAELERFEGNYKKFASYVGIIPSVHNSNETTHYGRITKHGPQELRTAFVQAALGMIRLTNVSSEWRIIKEYQRRKGDKGSGRAIIALARKITRIVFVMLSKREGFNPALMRCEEAIQQTA

SEQ ID NO: 178189 - protein, 340 aa, unidentified
MDNNQMEACGIEVSAKELVVALSGKKGEAVLRGFANTAVGHRQLLQALTRGGRRVRVCMEATGVYGLDVALRLSAHAGIELMVANPRAVRHFAQAAMRRSKNDRLDAVMLREFALRMKFIAWTRPEENTLALWSIARRLEALTKQCAAEKNRQHAAAVSQAIPACVRASVARTLRGLQREIQKLRKMARQYIAGDARLQRHYQLLRTMPGIGEVSAIQILAELSQLPSDRDVRQWVAYAGLDPREYSSGSSVNKRTRISKVGNRHLRCALFMPALVASRCEPHLRGFYEHLVAKGKKKKQALTAVARKMLHAIFGMFRSDRPYDGNRVYPLPLSESPVQA

SEQ ID NO: 178190 - protein, 335 aa, unidentified
MSSLVCGLDVHKNSVYATVMNYGGEIIDKRKLTNDEVVSFLGQYPIDKVAMESSTSIVPVYRALRGRGYEILVSHPKKTRLIAESRIKTDRVDSWAVTELARLDALPLSYMPPDDIAALREKVRRRAFLVRMRSKLKVKIKAQLTVNGFTPPSEYGLFTMKGLEWLRSLQLDAVDSYLPVIQTLDIQVGKLSRELRGMAPQDEDVKLLMTIPSIGYYSALLIKSEIGSIDRFPDGEKLCSYAGLTPSVSISGKYRRHGSITKEGSRWLRWIMVECVHTHLKYDTSITRAYHAIAERKGAGIAKVAAARRLLMCCHSVLQNRKPYYDPAGGYQTSS

SEQ ID NO: 178191 - protein, 348 aa, unidentified
MRFYTQPHQYYCGIDLHTRTLSLCLLDAAGAIRLEATLPPDRDRLATTLAPYRNGLVIGCECLFAWYWLADWCAEQGIPFVLGHALYLRAVHGGKTKTDAVDAAKLARLLRGGTFAEAYVYPNAMRATRDLLRRRTYLVRQRATLIAHLQTTFLQYNLPAPQKKLAYAANRADLDLSVFPDPSTRSMLEADLAVAAALDAQVKRLEAELVRTAKVHDPQTFARLRSVPGIGPVLALIMLYEVQSIHRFEHEGQFLSYARLVGGVRESAGKSKGTGGRKIGNAHLKWAFGEAACLMLRESGKAKTWVARKERKVGKPRALGALACRIGRTVYHLWRKQASFDAAKFLAS

SEQ ID NO: 178192 - protein, 477 aa, unidentified
MQEKKHIGLDLGVKSKSKVYIVDQAGEKVRPGFYIQTNPQELDYMMKQALKGTSNEASLDLIMEPTNVAWFKVAVYIRREYPQVKIYRVKSEKVQDLRKFYRKHTKTDSLDARTLAKMPVVDFDSLEEVYIRPKDILALNTRCKQRAKLVKEATAKRNSISDQIELGFPHLVDCFSSKFTTPFIRFCEKYVNPFKVRRLGKEKLLKILIKLGFRQDVSTLAENIYQRTEEACILLGSEDSIIDYDDFQDRIRSEFRIFKALQKEIDKVTKKLEDLYEKCFPEKRLNSIPGIADVLGAVITSTIGNADRFSSARSLVGYMGYYPKEDSSGLSSKKGLRMTKAGPNIAKGSLYLASNVGRLIDPQLGKIYYEQMVVRGNPHTKAVCRVVTALIPRILRVMKEDRDYVICDLEGNPISKKEGRKIVKEQFFVPEEVRQRLSNRKRMPLNKKGRTKPQYVRGSKAPQIRVDSSPGIAFSLN

SEQ ID NO: 178193 - protein, 385 aa, unidentified
MSTFDQTDAPAASEYATVHMAFELSKANWKIGVLLPGSPKLSRFTVKGGDVTTLSGRLASLRAKAERCGKPVRILSCYEAGLDGHWLHRWLTDQGVTSYIVDPSSIEVSRRGRRAKTDRIDLEKLMRAFLAYLRGEPRVCSMLHVPSPEDEDRKRSSRERDRLLKEQTAHTNRIKALLFGQGIRDVMPLKPGFIASIEAMRTGDGRTLPARLSEEIVREHDRLCVAHKQIAALEVQSKAELCAAAAGSAAAKIMQLVDLKSIGVTSGQKLVNEVFYRSFDNRRQVGSYFGLTGTPYDSGESRREQGISKAGNSRARNLAIELGWLWVRHQPGSELTRWFRERVGDLKGRIRRIAIVALARKLMVALWRYLTTGLVPTGAVLHPSF

SEQ ID NO: 178194 - protein, 351 aa, unidentified
MIVLGADTHKRSHTIAGVGATTGELLGERTVQVGRAGFGALLAWARALGGERVWALEDCRHVSGSLERFLIERGERVLRIPTNLMAETRKSARQRGKSDAIDAVNVARAALREGLATFPAAHLDGPELDLRLLVDHRERLVIHRVELNNTLQWHLHDLWPELELPGGALFSKKWSTRIARRLSRAEQTMRVRIARDELRRLRELTETVKALAREITQLIEQIAPRLLAEPGFGPLIAAKLVGEIAGAQRFATDAKLARAAGAAPIPASSGNTRRQRLDRGGNRQINAALHRVIVTRARCHQPTRDYIERRRREGKTTRDAIRCLKRYLARQVWNLLRASPPNMTLTTPSIS

SEQ ID NO: 178195 - protein, 341 aa, unidentified
MDYFAGLDVSLEEVSICVVEGAGSVVREARVSSEPEAIARWFAALGLPIARVGLEAGPLSPWLHSELVRRGLPAVCIETRRMRSATALMAVKTDRVDARAIAHAMRVGWYTPVHVKSAASQELRLLRNRKTVQEQRVALDNEIRGSLKAFGIKLGRVSEARFSEAVARAIGAVRPELLKMVEPLLKLRLELRRAYAVLHRQMLSAARQSPICRHLMTAPGVAGVVSLTYMTGVDDPVRFRRSSDVAPHFGLTPRKYASGTIDRNGPISKAGDEMVRQALYQAAHTLLTRVQRWSALKAWGMQVAKRRGLRRATVAVARKLAIILHRMWTRGETFRWAAKEA

SEQ ID NO: 178196 - protein, 337 aa, unidentified
MKYSGIDLHSNNCVVTVTDDEDRVVAEKRVPNDLPKILALLVPWKEELAGVVVESTYNWYWLVDGLQAAGFTVHLANTAAIRKYDGLKHSGDEADARYLAHLLRLGILPTGTILPPEARAIRDLARKRMQLVRSRTMHILAVENITARQRGARISSNQVKRLTPEAIDQMSVPDDVAFAIKANSAVVTTLSAQIELIEKRLQERMAERADYILLTSVPGIGRVLATMILLETGPIDRFPSVGNFASYARCVGSERTSNGKKKGEGNTKNGNKYLSWAFIEAAAHALQNCAQAKRFYERKNTKTNGVVAMKSLAHKLARACFHILKEHKPFDVTRCFA

SEQ ID NO: 178197 - protein, 372 aa, unidentified
MKKIRFIGLDVHAETIAIAVAEPEGEVRSLGIIPNREESVRKLVKKLGPAEQLQACYEAGPTGYVLYWQLTALGVKCEVVAPSLVPVKAGDRVKTDRRDATKLARSYRAGDLTAVWVPNEEHEALRDLVRAREAAKQDQLRARHRLSKFLLRHGRRAPAGIKVWTQKHQQWIKEQVHFEPPAQEYTLLDYLHEVEHMADRIRRLEQAIEEAVKLAPPRMQEVIQALQALRGVAQISAVTIVAELGEISRFDGARQLMGYSGAVPSEHSSGKRIQRGPITKTGNTHLRRIAIEAAWAYRHRPTVGPALRKRQEGLSEEVKGIAWKAQHRLHKRYRNLVAAGKEKQKVVTAVGRELLGFIWAIGVQVERNSRVA

SEQ ID NO: 178198 - protein, 392 aa, unidentified
MLFVGIDIAKRNHEASVIAQDGHVVRKAMRFANSQAGYNKFMDMVRSLSEPVVFGMEATEHYWLTLYTHLRNDGFTVHVINPTQSDALRGMYIRKTKTDSVDSVIIADIIRFGRYCETSVDPGDLQAMRELCRQRFYIIDMASDLKRKVIALLDQVFPEYEKLFSDSFGLSSMELLSQYTTPEEMLSVSSQQLAEVLKKASRGRLGAEKAVEIQDAAKNSFGIVMASSSFSLIIRQYIEQIRSLESSVDIFDTEIARLLSGFDTQLTTITGIGSTLAAVILSEIGGDIRRFSSPAKLAAYAGVDPTVKQSGDFSGTRIKMSKRGSPYLRRAIWLASTVAAFKDPVIHALYERKRAEGKDHMTVIGHVCRKMISIIFAVLRDNTPYVPAGISD

SEQ ID NO: 178199 - protein, 344 aa, unidentified
MPIITVGIDLAKAVFAVHGVDEAGKASLVKPKVARDQLVPLIAQLPPCLIGMEACSGAHHWARVFAEHGHTVKLMAPKLVSPYRMSGKRGKNDAADAAAICEAVTRPSMRFVPVKDEHQQATLCLHRTRQGFIEERTSMYNRLRGLLSEFGVVMPQSPERLRKEIGPCLDSLPGWARRCMSELLEHTSHIEDRLVELDRAINQIAREDDRSRRLLQLRGVGSTTASALVATIGDGHDFRNGRQVAAWLGLTPSQYSSGGKQRLGSITKAGDAYLRSLLVLGARSVMANLGNKQDPLSRWIRNLMERRGYWRAAVAIAAKNARMAWAVLHYGDTFKPEQAEPTGA

SEQ ID NO: 178200 - protein, 410 aa, unidentified
METIVERPAALDVHKAQVTACVRTPGAARAREQHFAEFPTTVAGLLTLRDWLAAHGVEQVTMEATGVYWKPVWAILEDEFELLLVNARHVKQVPGRKTDMSDAAWLCQLAEAGLLRASFVPPKPIRTLRNLTRYRKAQIQERAREANRLHKALEDTGIKLDCVATDILGVSGRAMLDALVAGTTDPEVLAELAKGKLRKKIPALREALEGRFDRMHALWIGAILAHIDFLDEQIEQLTGAIAEQIAPFEQAVELLCTITGVQRRTAEVIIAEIGVDMSIFPTAKELASWAGQCPGNDQSAGKRRSGKTRKGSKWLDWALEEAALAATRSKDTYLAAQYARLRPRRGHKKALGAVKHSIIVACWHMLSTGEIYNDLGGDYYARRDPAKTTKRLVAQLERLGHTVTLEKAAA

SEQ ID NO: 178201 - protein, 300 aa, unidentified
MALTIVEDTRAVTGGVDTHADMHVAAALDPVGGLLGVGEFPATAAGYARLLGWLGGFGTVCLVGIEGTGSYGAGLARHVTAAGIRVVEVDRSDRQDRRRQGKSDPLDAVSAARAAQSGRARGEPKGRDGAVEAIRALMVAKRSARSERTQTINQARALIVTGPDDLRARFARHTAAGLVSELAALRPRPGATVGYATRIALRELGRRAEFLDGQLGRLDELIVPLVTARAPALLALHGVGPDTAALLLIAAGDHPHRLRSEAAWAHLCAVAPIPASSGKRTATASTPAATARPATPCGGS

SEQ ID NO: 178202 - protein, 416 aa, unidentified
MSGVSYYCGIDWAEKHLDFAVINNKGDTLVEGRIGHDPAGVDELFRAFRTVARRRRAVLVGIETDRGAVVAALRAADQQVVVLCPSKVVRYRGRRTVHGGKSDRADALLLAQVLRWGGDELRPLPASSPAALAIREVGRAQIEAARRQWTTASQVRGLLREFHAPASGAWAGRQGGPSGLFRPEARAVLAVAPTPAHACRLSRRQLREVLEASGRKRLLDDEVDRLYDRFRQPALRHPTAVEDAMGERLLTLLRVLNQQIECTDDLTVRLTDRFHAHPHAPIYASLPGLGPVLGGRLLGEFGDDLGRFATARDRATWAGASPITIASGATHVVRRRRHANRILMGAAFSWPFATLTRSPGARAHYDRRRAAGDRHATALRNLFRRLVSQLHYCLKSGEVYDEARAYPAQSDREGDR

SEQ ID NO: 178203 - protein, 367 aa, unidentified
MKKVSTVAVKESRNISQPKLTIGLDLGDRNSWYCMVDEAGQIRLEQRVRTNAKALQEVFGAMPRRRIALETGTHSPWISRLLHGLGHEVIVANARRVRLIGESRKKDDRLDAQTLARLARIDPKLLSPVKHRSAQAQADLTVIRARAGLVRSRTALVNTVRGLAKSYGERLRGCNVRNMNPEKAEGLSPELQAALQPLLVALESLSEQIAEYNEGIEKLAQESYPQVALLKQIKGVGTLIALTFLLTLEDPHRFRKSRDVGCYLGLQPGRRNSGQSEPQMHVSKEGDSYLRTLLVQGAQHILGPFGIDCDLRRWGLKLAERGGRSGKKRAIVATARKLAVLLHHLWVSGEVYGPLHNSQRRPLTIAA

SEQ ID NO: 178204 - protein, 389 aa, unidentified
MLLDHPFDGPTAIRTHIAAIFVSLELSRSNWLVTSLSPGKGEKMSKHSVAAGDTAELLALFAELRRKAEVRTGQSYPIVTIQEAGLDGFWLHRVLQQNGIESHVVDPASIATPRRRRRAKTDRLDGETLLRALLAYKRGEPRVCAMVVAPSPEEEDRRRLCRERRTLIEERITQVNRIKGLLFAQGISDYAPLRRDRRARLEALRTGDGRELPSHLKAQLGRALDRIELLVDQIKAVEAGQEALLAAARKPASEEAVPDPVTMLLALKGMGANFAAVLWSEAFYRQFANRRQVAAYAGLAATPWQSGGIRHEQGVSKAGNPRLRTTMIQLAWLWIRHQPQSALTRWFKERSQQGRKRAIVALARKLLVALWKYVTQGVVIEGAVMKPAA

SEQ ID NO: 178205 - protein, 339 aa, unidentified
MKLYAGLDLHSRNTYIGIMDDTFNRVFKKRVPNDLDQILQILKPFKKRLRGFVVESTYNWYWLVDGLMDAGYGSAHLANPSAIKQYEGLKYSDDQHDAFFLAKLLILGILPEGYIYPKQHRPVRDLARKRMFLVRHKTANILSLQSLIQRCCAVKITTSDIRKMNVEALERWLKEEYLIITAQTSLDTINFLKQKIKSIEKAILKRVKLSKGYRQLLTIPGIGNILAMTIMLEVGDIRRFPKVGNFASYCRCVPSKRLSDGKSKGCGNRKNGNRYLSWALTEAAQIGRRHNQQFRGYYNRKVAQANTSLATKALGNKLARICYYIIRDQVPFREELVAQ

SEQ ID NO: 178206 - protein, 339 aa, unidentified
MFCIALDLHKENTYGVVLDDKSGQVVWEGNFASTFRAAKETLEPYFVHGTKIAIESTSCFYPMYDGLKSIKGINISVVNTARLEKPAIKTDRRDAHRIAHLLRRNELPTAFIPNKKLRLQRELCSLRMRLVHSCTQCKNRISSILHKEGKRPLGVKDAFSDKGLAQLEKLRILRKEEMNEELDLLRILKKKLSRIEKQISEVIEQDARLRKQVGLIDSITGFAQTLAFVCATELGPIGRFNSEEAVVSYAGMHPCIDSSGGRTKHGKIMRVGRKLFRWALIEAAHVCGRTDTILGNYYRKKAKQKKSNHAAAVATANKLARLIYQILITQKDYDPGLGQ

SEQ ID NO: 178207 - protein, 327 aa, unidentified
MFYAGFDIHQKFIYATIIDDQSKIIQQGKFLTTEKDFDNFLGFLPPAQVKIVMESCGIWEDFYDLLESKGYDVCLANPQGVKAIASAKIKNDKVDSEVLAKLLKADLIPKSYIPPKEIRDLRALVRHRKILIKHRTKVKNNIHQILRIKNIKHGFRDVFTLKGIKYLKAMQHEQINCFLKIMETLDVEIKSMDEILKNNKTSSKEVHLLQTMPGIGNYAAQVIQSEIGDIERFPSPKKLCNYAGIVPSQNQSADKDYKGRITKVGSRNLRWILVQGAQVAVCYPNKLQKFYYKLARKKSRSKAIIAVARKMLTIQWHMLKNKEPYIE

SEQ ID NO: 178208 - protein, 348 aa, unidentified
MRGAVQMQITTVGLDIAKNVFQVHGIDAAEKVVVRKQLRRSQMLAFFKALPPCLIGMEACATAHYWARELTKLGHTVRLMPAKDVKAYVKRNKNDAADAEAICEAVRRPTMRFVQVKSAEQQGRLMQHRTRDLLMRQRTQVINALRAHLAELGITAAQGTAGLKELLKIIANDEDERLPADAHASLVVLAAELQAMQTLIASIEKRIVAQHRSDEASKRLRSIPGIGFIGATAIAATVTDPKAFRSGRDFAAWIGLVPRQDSTGGKQKLGPISKQGDRYLRRILVVGAHAVLKLAKQKPEKYPWLTQLLARRPFKVVAVALANKMARVAWALLAHGGTYRAPRLAAAA

SEQ ID NO: 178209 - protein, 315 aa, unidentified
MATSNGKFVGIDVAKEKLDIALLGESKAKQEKNNEEGIARIVEQMKTLSPELIVIEATGGYQREIVMAIYEAGLPVAVVNPSRVRQYARAKGLIAKTDKLDAFVLAEFGGQMKPRQFEAKSESGRYLSAVLVRRRQVEEMLKAERNRLRTVHPDMRVSIERMINTLKEEMQELERELENFMSKHEDWNEQEQILCSAKGVGRVTAATLLAELPELGKLDRKKIAALVGLAPMNSDSGKKRGYRKTKGGRMEVRNVLYMSTLVATRYNPLIKKQYQELLQRGKIKKVALTACMRKFLTILNAMMRDKTPFRYTLIA

SEQ ID NO: 178210 - protein, 386 aa, unidentified
MSSGDGLNHSLVPFEEDRTLVAVIDMSLSSWVIFGLVPGFRRRPEKKLGADEAGLLSLLYRWRDEAERHGRSIERICVGFEAGRDGFWLARWLDRHGIEAHVIHASSIPVKQEQRRAKTDQLDCRLLMRAFIDWLRGEAEHCRKVAVPSIEAEDAKTPHRERVARSRECTRVINRMKATLARLGIRDFKPDLKKAANRLDELRLPTGEALPPNALAELRRDMTLLRVLKGQIEEIREARETHLEEAPDEAASAMVRVLSKIRGLGVETADMLVSEVFSRDLRDRRAVARYGGLTGSPDESGARRREKGLVRAGNARVRHGMIQLAWRFLLHQPDCALVTWYRARAGADRNTRKRLIVALARKLLIALWRFVKEGLVPEGVVLHQAR

SEQ ID NO: 178211 - protein, 366 aa, unidentified
MEKISTVGAFGNEIFNEQKLTIGVDLGDRWSFYCVLDEAGKIILEQKVPTTPEAMQQTFSRMPRSRIALETGTHSPWVSRLLRELEHEVIVAHAQKVQLISKSTRKDDRHDARTLARLARIDPELLGPVRHRSVQAQIHLTVIRARAELVSARTALVNAARGLVKSYGERLPKCGTAQVSRELAAKLSTELRDVLEPLLKEIESLNERIEEYDERMEKIAKEVYPEVSLLKQVKGVGTQIALTYVLTIEDPYRFLKSREVGCFLGLKPGRRDSGESKPQKGISKAGDRYLRTMMVQGAHYILGPFGEDSDLRRWGRKLAERGGKNAKKRAVVAVARKLAVLLHRLWVSGEVYEPLRNSQKAMQAVA

SEQ ID NO: 178212 - protein, 348 aa, unidentified
MAYFVGLDVSVKETSVCVVDEAGKVILEQKVLTEPDTIIALLTSLGATYGRIGIEAGPLSQWLVNALTAAELPVICVETRHMKALLTAQQINKTDRNDARGIAQMMRVGLFKPVHVKTLVAQEQRMLLTSRKLLQRKLLDVESDLRGTLRNFGLKVGVVGGSRYEARVRELVEGFPRLAVIVEPLLIVRRVMRQQFAVLHKMLLDTVRDDPVCRRLMTAPGVGAVVALTYRATVDQPQRFVHSRAVGAHVGLTPKRYQSGEIDYDGGVSKCGDALLRTMLYEAAHSLLTRNRKWSWLKAWGVRVAQRRGMRRAIVAVARRLAVVLHRMWVDGSEFRWSKDSTAVPGVA

SEQ ID NO: 178213 - protein, 343 aa, unidentified
MYYIGLDVHKKTISYCVKDAAGCVLQEGKIGSTRCELDVWIRTLPQPRMIAMEATIFTGWIYDHLLPHAEKVKVAHPLMLRAIAAAKKKNDRIDAAKIADCLRCDFLPECHMASTAIRDRRRTLRYRNLVLRQAVQMKNRVSGLLMETGVSYNKLRLHRMGYFADLMSSSDEITDSIRPLLKLCREHIDRSVRLDTALLRSLERDPLLADRLQRLRTVPGVGPITALTWALEVGDTSRFHSIKQAISYCGLCSAEKSSADKMMRTPISKQRNKHIQQVLVEAARLAPRYSEELALLYERERQRGNSNRATLAVARKMVAHMLAVERRNTDFVPAGEFKRTAAA

SEQ ID NO: 178214 - protein, 392 aa, unidentified
MICVGIDVAKDKHDCFIMSSEGEVLADVFTVSNSKEGFEHLLQTINTCTGIGDSKIKVGLEATGHYSYNLLGFLLDNSLPTYVINPLHTNLYRKSQSLRKTKTDRVDARTIASMLMSDVSLKPYTNIAYHNSELKSLTRYRFDKVKERATLKSSVARLVNILFPELEKLLPTLHTASSYALLSELPSAKHIAEVHLIHLTNLLYTASKGRYDRDKAIQIREAARNSIGTYMPAKALELKHTIKLIKEFNNEIAEIESEIQSIMDKIDSPITTIPGISLRMGAMIIAEVGDFNNFDSPDKILAFAGLSPSTYQSGQLNNCYAHMEKRGSRYLRYALFNATKFVCYWNPLFADYLAKKRSEGKHYNVAISHAAKKLVRLIFALQKSGQPYMANS

SEQ ID NO: 178215 - protein, 330 aa, unidentified
MKKWNVILGVDVSKLTLDIGCSERRLHIKIDNNSKGFGEFKKWCKTNGIDLQETLVVMEYTGGYEYRFIQYCDSKAIPYCRVPGLEIKQSMGMVRGKNDKVDSFRIGRYGEEKSDKLVPSKPLDKNILSLKQLLSFRKRLVREKAGLQSTLKERGHMYEVNKTDTIIHIAQAKIKADEKHINEVEQEIRELIKSKEELFQNYRIITSIKGIGEINAWMTIAYTENFTSFKDARSYGVYVGVIPFGHDSGTSIKGRKRVSHLAQKELKSELNQAAKAAITYDPELHAYAERKLKNKDYPIVLNNVKFKLILRMFSLVKRGEKHVENYKKAA

SEQ ID NO: 178216 - protein, 373 aa, unidentified
MGKHRLAFVAFDSAKEKHAVAIADDGRRGEVRYLGEIENSPDAVRKLVAKLTRQYERLHFCYEAGPTGYGLYRQLTDLGHVCDVVAPTMIPKRSGDRVKTNRRDSVTLVKLLRAGELRAIWVPDTVHEAVRDLTRAREVAMIDLKKKRQQLLSFLLRHGRIFIGGKNWTKMHERWLAKQTFNHPAQQIVFQDHVEVINAAQVRLAALEQQLREIAPAWTMAPVVAAYQALRGVSFLVAVTFVAEVGDVRRFATPQQLMAFLGLVPSERTTGDTVRRGSITKTGNHRARRVLIEGAWTYRFPARVGETLRSRLKDLPLSVRSIAWKAQVRLCARYRGLIAKGKKPPVATTAIARELAAFLWAIGQQVAPQKPAT

SEQ ID NO: 178217 - protein, 312 aa, unidentified
MTDLCAAGVDVGRDFFDVSVAPSGQVFRIANGPKGVAAVVARLKRAGVARVVLESIGGYGARLVRGLADAGFEVGVIDPKRIRALRIAEGGRAKTDRLDARLIARFALMMQDAARPVPSAKAFEIRALSTRRRQLVEMAAMEKVRLKQTLDEAVAASCRQIIALLAEERARVEAMLQAELMAADQGPQRAGLLQTIPGVGPAVSITLLADLPELGALDRKAVASLAGLAPHPNQSGTRTGQAHIGGGRPCVRAALYMAAVSATRSDKGFRREYLAMRQAGKPAKVALVAIARKIVVAANSMLKTNQPWSNPA

SEQ ID NO: 178218 - protein, 446 aa, unidentified
MLPSSTSVRILFHPALPETLCCTISYGTGSVCVMDVVHPRCAGIDCSKKDAKVCVRIQGQGRRAKSATVTTWGATTNQILALREHLVAAKVSCVVIESTSDYWKPFYYLLDDELDVILVNAASVRSVPGRKSDVSDAAWLADLGAHGLVRASFVPPPPVRALRDLTRIRTVITRERTREVQRLEKLLEDAGIKLSSVASDITGVSGRSMLEALIAGQRDPAVVADLAQRRMRSKIGALTEALTGRFTEHHGFMVRLFLDRIDAHSADIARLDERIEEAMTPFHVARDLLASIPGFSRIVAEVFIAETGADMTVFPTAGHLASWAGVAPGSNESAGRVKSTKTRPGNCYLKGALGIAALSAARSKNTYFSAKYKRIASRRGAMRAIVAVAHAMTIAAWNLLTNGDLYRDPGAAYYTTRQPSKTKARAINQLETLGFRVTLKPLTEAG

SEQ ID NO: 178219 - protein, 351 aa, unidentified
MKKTQETPRNKVNTKQAVLHMAFELSDTKWKLAFSDCSKRRVVTINARNLEQLQEEIEKAKLRFKLSDDVRVVSCYEAGRDGFWLHRYLLSCGIENKVVDSSSIEVNRRKRRAKTDRIDAGKLLRMLMRYHAGERKLWSVVRVPSVEAEDGRSLNRELEVLKKERTMHRNRIRGLLIREALEVGNPSGKKFLEELNSLRTWDGRKLPSDFKDSIVREYGRLRMVEEQIGILKKERERRVQSADSPSLRKVAQLRTLYGIGPTSSWDFVMELFSWRNFKNRRELGAFLGLTPTPYNSGSSQHDQGISKAGRGRIRALSIQIAWGWLRFQPHSKLTQWYMERFAEGARLRPMA

SEQ ID NO: 178220 - protein, 424 aa, unidentified
MKSASNTTSSERPLALPEVAHNDVTAGIDWARDDHAACIVDGRGRKVATTTIEHTTGGLSDLVAFLGRHGVGEVAIERPDGPVVDTLLTAGLTVVVISPNQVKNLRGRYGSAGNKDDRFDAYVLADTLRTDRARLRPLVPDTEPTIALRRACRARKDLVKHRVAAANQLRAHLRNVFPGAVGLFADIDSPITLAFLTRFDTQDRADWLTPKRLGDWLSKQGYSGKVDPAVLYQRLLNAPRGATGEHATSQAHITASYVALLRTLLEQIKTLAAQIDRQLDAHADAHIFTSLPRAGRVRAARLLAEIGDCRAKFPTPESLTCLAGVAPSTRQSGKLRAVGFRWACDKQLRDAVIDFAADTRLANPWAADLYNRARARGHDHAHTVRILARAWLHIIWHCWQDGVAYDPANHRALQRFLAQHNEAA

SEQ ID NO: 178221 - protein, 408 aa, unidentified
MKTLHRRCAGLDVHSDSVVACARLTVRSKTSYEVRRFSTATRDLLQLADWLEARGITHVAMEATGVYWKPIWHILEGRFQLVLANAAHIRNVPGRKSDVNDAVWISDLLAHGLIRASFVPPAQIQDVRDLTRTRTQLAREIARHVQRIQKTLEDANIKLTSVISDIVGMSGRRILRAMIAGETNPAKLAKLGSTRLKCPRAELTAALDGRVTAHHRFLIAHHLSLIEDLERHVAAFDARIEELLAPLRDAVAQLMTIPGVSRVSTQVILAEIGADMTPFPTSGHLLSWAGLVPRLDESAGKRRSTRVRKGAPWLKPVLVQCAWGAARTKGTYYQAQFFRLKARRGPKKAAIAVAASLLTAVYHMLKNGTFHQDLGANFFVKRDKVRIATKLANRIKDLGYDVSFTPAA

SEQ ID NO: 178222 - protein, 465 aa, unidentified
MSNIDRTTEAQDVKKQTMKSASGLDVVHPCAAGLDLHKEVIFACAPMVAGETRHPVKKFGTYTSHLLELAAWLKQHGVTTVAMEATGVFWLPVVCILRAQAFDVLLVNAREVRSVKGRPKTDKLDCEWLRRLHACGLLRGSFIPDKETEILKSLWRHRLNMEEEDARAIQRMQKSFQIMNIRLDIAVTNIVGETGLRIIEAILAGERDPHILAELRDPRVAKSKREIADALTGNFQAEQLFIIQENLAHHRFLQKRILETDTQMAAQMETMKKKSAASELPAATKPDRSRHGETLTRERLYELLGVDLTQIDGVGVLTVSSFLVNAGRDMSPWMTENHFASWLGLSPNVKQSAGKTRSGPTRKTASALAYAFRMAAMTISRMDSWLGAYCRRLKSRIGAPKAITATARKLAIIFYRAVKEGGIVKRLTADAYEQANRDRILKSLRQRAAHFGFELTMRTGVPVKA

SEQ ID NO: 178223 - protein, 402 aa, unidentified
MNCVGIDVSKGKSMIAVMRPFGEVVVSPFEVRHTANELSELAGLLKSLDGETRVVMESTGNYHAPVAWLLHDAGLYVSVVNAMLVHDYGNNSLRRAKTDKKDAVKLANYGLDHWLTLPRYVPEEDTRLMLKTCYRQYQQYSKVQTMLKNNLISLLDTAFPDANRLFTSPPRADGSEKWVDFVATFWHCECVCGRSEKAFTTQYQKWCRKHGYNFSEDKALDIYASACRHFGVIPKTDTAKLLVEQAISQLQTTSSALAALKQEMQSLAASLPEYPVVMGMFGVGPTLGPQLLAEIGDVRRFHSKKALVAFAGIDAPPYQSGQIDVRSRSISKRGSASLRRTLFLVMSVILQCAPIDEPVYQFMDKKRSEGKPYRVYMMASANKFLRIYYASVKAYLESLEHD

SEQ ID NO: 178224 - protein, 406 aa, unidentified
MDIVPIYKRVIGLDVHQAQITGCAIIEQSDGSVTYERREFGGFKRDRKALAEWAHSIGPDVVVMESTGIYWKSPYAALEGVGIMVNARHVKAVPGRKTDVADAQWLASLARAGLLRASFIAKADLRSLRHIARQRQKLGGTLASEKNRLHKLLTDAGIRLGVVVSDLHGQSARAMVKALIAGKTVPEVLNLASKRLRASREDIFEALQAEEITPAHRFVLTEIMAHIEELESRIARFDAELLRSLHAAGYGVPLQLLQTLPGIDLMGAAMLLVEIGSDMSVFGSAQRLASWVGMCPGNNESAGKRKSGRIRKGNAWVRRLLCEFAQAAGRSRCALKDKFQALNVRKGHKRSIVALGHKMLRTIYAMLSKKTHYVDKTVDYEALMVARNAPRWLQMLVKHGYVPAHA

SEQ ID NO: 178225 - protein, 332 aa, unidentified
MSAIVCGLDVHKESTYATVLDRDGQVMVQRRMLNEDVPAFLDMTKPERLAMEASTYVIPLYRKLTEKGYDVTVSHPKKTRYIAEARIKSDRVDSRALAELLRLDSLPTSYIPPKEIAETRERVRRRAFMVRQVTKLKVKIRDALAYEGVKPPTGHGLFTASGVEWLHGLGLEPVDCYLRLIDPLKEEVRLLSSRLRREAGEDPDVRLLMTIPGVGYYLALLIKAEIGDVRRFRSGDHLASYSGIVPSTRSSGGAERHGGITRQGSRWLRWALVEAARVHTRYDTPVTRFYHGVAGRRGRKAALVAAGRKLATVCYSVLVSGRPYFNPLDAQA

SEQ ID NO: 178226 - protein, 402 aa, unidentified
MQVDDIDVFIGIDVGKNEHWATALTTAGECLHDRPLPNDEARLREVYEHLGEHGRLLVVVDQPATIGALAVAVAQDMGITVGYLPGLSMRRIADLSPGSAKTDQRDAAVIASAARTMPHTLRSITSSDEDAAALSMLTGFDLDLARQVNQVSNRIRGLYTQIHPALEGVLGPWLEHDSVLEVIATWPTPAALRKAGRARIDAKLKANGCRRHAAWAQAIVEALSKQTVTVAGTDAAGVVLPHLARQLIALHTQRADIAAQVEALVEAHPLYPVLTSMPGVGVRTAAVFLAGTLGKTFTTGAHLASYAGLAPVTRRSGSSIRGEHVSHGGNKRLKRAMFLSAFASLRTDPVSRTYYERKRAQGKRHNQAILALAHRRILTLHAMIRNNTLYNPQPAQPLTTTA

SEQ ID NO: 178227 - protein, 402 aa, unidentified
MYNAVGIDVSKGKSTVAVLQPAGVIIRKPFNVNHTSSELDELAKYIGSLEGETRVVLECTGRYHEPVVKTLSEAGLFVSAVNPHLIKNFGNNSIRKVKSDPADAKKIARYTLDNWIELRQYSSMDNTRTQLKTLNSQFSFFMKQKVAAKANLIALLDNTYPGVNKLFNSPVRDDGSEKWVDYAYSFWHVDCVRKIGLKTFTERYQAFCKKHHYNFQPAKPAELFLASKDLIAVFPKEASYKLLIKQSIQQLNLASSHVEELRSKMNELASTLPEYATVMGMYGVGKTFGPQLIAEIGDISNFSHREALTAFAGVDPGVDQSGTHNSKSNKASKCGSNHLRKTLFQIMSTLLQTAPEDDKVYQFLVKKRAEGKPYYVYMTAGANKFLRIYYGKVKECIRNLEQ

SEQ ID NO: 178228 - protein, 461 aa, unidentified
MVRSRKGHAAQRSVAPGPLPQLTANAAGIDVGGTSHFVAVPPDRDGTPVREFRTFTGDLYRLAEWLTACGIETVAMESTGVYWIPLFQVLEARGFTVKLVDAHQLKCVPGRKRDVLDCQWLQQLHSFGLLAGAFRPDDQLCVLRSYLRQRAMLATYAGQHGQHMQKALVQMNLQLQVVLEDITGATGRKIIRAVLAGERDPHTRAALRDGRCKHSAATIAAALQGDWRAEHLFALEQAVELVEQYQAKIAACDARIQAHLQQFPDRGTGEPPAPGPQPRADRHDLRFDATAELYRVSGVDLTAVPGLQAHTVLKVLSEIGLDMTRWPSAKPVGSWLGLAPNNRISGGKILSRRTKPTANRAAAARRVAAQSLHRSKSALGAFLRRKAAHLGMPKAITATAYTLARSIYSLLSSGHAYVEPGQDAYELAHKHRAVRSLSKRARDLGFDLVKRDPVQPLAAPA

SEQ ID NO: 178229 - protein, 361 aa, unidentified
MSTKKCNEISFKGKHFFVGFDVHKTRWVVSIRHHGLLLKTFSMDPSPEGLKKYLEKNYPGGIFHLVYEAGFCGFWVHRKFKELGIECIVINPSDVPTAHKEKDRKCDPVDSKKLAREHEKGSLVGIYIPTENEQHLRSLCRLYTITVKSTTRVKNRIKGLLHYNGIDYPFRSSHWSASFISYLHALPLDNGPAKKALSLLMEELHLHRIHTVLILKELRTYVQNTHNGTIIRLLRTVPGVGFISAIILFTEIMDMKRFSNIDKLRTYVGLVPSTHDSGQKESPSGLTPRKNNFLKRVIIESSWVAIRKDPALLTYYNKLICRMKSQRAIIRIAVKLLSRIRYVWLNEHAYVTGIVEGTKAA

SEQ ID NO: 178230 - protein, 358 aa, unidentified
MARNSLTGSALFVAGFEKHLFYVGVDVHKRSYHLAVRRADGRSICLVTPASPEYVVEFLSSLPIRLGSVAYESGPTGFTLARTLQEAGIPVIVAAPSKIPRAVTPGAKCDRLDCLKLADYAAKGMLKPIAIPTVEEESRRTLLRRRHMLVDSARRCKQRIKGHLLFLGIDEPKELTNWHSDVEEVLKRLPMDPASLMTMESYLRELTFHQGELRKVELQLKSLVKSKELVTRMTCLQSVPGVGPTVATTFAMELFRPERFTRPEEVASYLGLAPVVRQSGNKSPSGRLVPVGQTRLRSLLIEAAWIWRSKDRYADNLYHRLLGKTGIAQKAIAAVARRLAIILWRLCIEQRMYRTSMS

SEQ ID NO: 178231 - protein, 314 aa, unidentified
MNQPNTTYIGVDVSKNTLEVFHPAWDKPRPFPNDPHGHRLLVRELATNGLLLHFVLEPTAGYEAALVAHLSGAGLPLSLVNPVQARAFAKASKTLAKTDSIDARSLAEFGATLKPPPTAHRSALQCKLRALSRRRSSLVAQRTAERSNLDRETDTFVRADIKALVRVIENRIAKFDREISSLIASDQETKKRHARLRQLKGVGPVLANTLVAEMPELGTLADKQIAALAGLAPYNRDSGKWSGQRFIQGGRSRVRRALHMPALTAVKHNRVLSEFYKRLTDAGKPHKVALTATMRKMLCVLNRMLADESFQPST

SEQ ID NO: 178232 - protein, 332 aa, unidentified
MHLGIDVHKRYAQVAVMDETGEIVEEVRVENANLDDLAQRYAGAEAAIEATSNYYYIHDTLSEHLDVTVAHPKELNQIADTDKKTDRVDAKELARMVRLNSVPESYVPTDEVREARALVRGRQTLVENRTKYANKIHGLLSDHGITEDVKPLTVEGREFLRELSLPTPWDTLLRSYIELIETLNEEIRNLEETIEERAGSLKETQLLMTIPGVSYYTALSIYAELGEISRFDDDKSVVSYVGLNPVIRESGDSRIEGSISKRGSGRVRWLLVQAANTAVHTCSDEYLSRFYERLASRKNSQKAIVACARKMLVSIYHMLDRGEVYDPPDVSA

SEQ ID NO: 178233 - protein, 416 aa, unidentified
MDVVVARVAGLDVHKDTVMAAVRVPGANGKRTELLKEFSTFTGDLLRLREWLTECAVTEVTMEATGVYWRPVWYVLEDEGAFELRLVNARHVKNLPGRKTDVSDACWIAQLAECGLLRGSFVPPRVIAELRDLTRYRKKLVEEHTREVQRLQKVLEDACVKLDSVVTDVTGKAARNMIEALIAGERDPVLLAEMALTRMRPKIPELRRALVGRFNEHHAFLARMHLDRMDSLDEAVAKLDAEVDRVIAPFSDAVVRLQTIPGVGLRTAEVVVAECGIDMSRFPTAAHLASWAGLCPGNDESAGKRRSGRARKGNAALRSALCEAAWVGVRTRDTYINAQFRRFRRRFGAKSEGKALFAVAHTLVVIIWNVLATDQATYVDLGPDWFQQRDDTQAHVRRLVRQLERLGLSVDVKPAA

SEQ ID NO: 178234 - protein, 343 aa, unidentified
MLYIGLDVHKEFCQACVMNKSGKVISNGRFLSTQEALDGFLDRFEDAKFVLESTGIWEFIYEGIEKRGFEVVLAHPLKVRAIAEAKVKTDKVDAEMLAHLLRADLIPRSHVPPRDIRNLRQLVRHRAYLVRQCTSIKNRIHAELLRRGIRRPDDLKKTFTFKHVEWMRSLGILTITSSLNCLEGIQEQIKEVESFLLAEYNSRKDAQLIATIPGIGFYGALLILAEIDDIHRFSHPEKLCAYAGLVPTVHQSASRSYNGSITKNGSPHLRWILIEAVHVHTNYCPGSKLSKFHARVAQRRGKQRATVATARKLLHTIYWMLLTKEKFHCQGFNLVEKAATLIA

SEQ ID NO: 178235 - protein, 337 aa, unidentified
MKRYLGVDLHRTQFVVCTRWENGEQEIRQWRIGELAKFVAQLQGEDQIAVEAMGTTARFYDAVAGRVARVVVVNPHQFKVISESVKKTDRKDAQALALYLEKDLLPEVRMKPKQNRELMHLAETRDLLVKQRSALKGKINNLLAMQGIELKREALSSKIALERVLALPVSGMVQLELRILVEQIRSLSESIAELDERLEEEGQQLPGYENLTSIKGIGSLSATVLLTVIGKISDFADENKLASYLGLVPKIDNSNESERSGRITKQGNKLARTALVQCGLVAKRYSPYLQAFYERIKQRRGGGKAKIALARKLVKIVYDTLKNKWVFDDFPSFTLAA

SEQ ID NO: 178236 - protein, 343 aa, unidentified
MDYFAGLDVSVKETSICIVDDAGKIVREVGVASEPEALLQVLTNNNYRFKRIGLEAGPLSQWLFSALAEAGLPVICVETRHMRAVLKAQINKTDRNDARGIAQMMRVGLYRPVHVKTLRSQKLRMLLIHRKLLQSKAIAIENDLRASLRNFGLKVGLVGTVKFEARIKELVEDLPDLATLVEPLLVVRRVLREQLRILHRRVLAVVRDDEVCRRLMTIPGVGPVVALTYRVTVDVPARFRNSKSVGAVFGLTPAKDQSGERDRSGAISRCGDEMMRVMLYEAAQIMLVRSAKWSWLKAWAMKLARHRGMKKAIVALARRLAVIMHRMWVDGTNFRWTREVAAA

SEQ ID NO: 178237 - protein, 431 aa, unidentified
MKNRTDLRLEEITEGTLVVGVDIAKHEQWARFVDYRGVEIGKALKFKNNLQGFESIVAKICEICKLKTLKYPIEQVVIGMEPTGHYWKPLANYLIKAGYRVVGVNPYHTKKAKELDDNSPTKSDKKDAITIARLVKEGRYFDPYLPEGIYSELRGLANTRTSAKKRLSAIKNTITAILDEYFPEIYVVFKKTLTGKASRQVLKSCPFPTFILELGEVGILAEIRKAVKKTVGMKKVRHLIDAARESIGVRYGLEASRMRLKMLLEELELIERHLCDIEQAMESALYKTGYAEQLIGIKGIGVVTAAVFLGEVGDPLRFQNARQIANYAGYNLTEDSSGQSKSGTCISKRGRKQLRSILYQMAFTMVGKNAEMKELYQYLTKRKNNPLKKKQALVVVSKKIITVIYSMLKKRESYKPELVLGAVRKELMKAA

SEQ ID NO: 178238 - protein, 295 aa, unidentified
MRVTTIGLDIAKQVFQVQGGGEQGKVVLRRRLPPEQVALFFANLPPCLVGLEACGGAHYWARRLSGFGHTVRLMAPQFVKPYVKSNKNDRNDAEAICEAVSRPQMRFVPAKSVEQQDIQALHRVRSRLVSLRTQLANQVRGLLTEYGIVLPLHVGQVRRGLPEILEDGSNELTAFSRRLFASLYAELVELDGKIETIEEQVKAVYQASEPCQRVAAVEGIGPVTAIALVAAMSDGKTFRNGRQFAAWLGLEPRQHSSGSKLRLFGISKRGLPWNSPYDWYRKRGQVRATPICALC

SEQ ID NO: 178239 - protein, 386 aa, unidentified
MPQPKDDLSRSLVALEQNRTVIAVVELSLSTWLVGGIVPGLQRDPLKKLPPDQEGLLAVLHRWRDEAVKAGHRIKRVVVAVEAGRDGFWLARWLRNRGIEAYVIHPTSIPVSREQRRAKTDRLDIGLLKRSFLGWLRGEKKHCTMAAIPSLEEEDAKRPTREREHLVGERTGIVNRLKSALVRLGIRGFNPKSRRVQEKLATLCTPEGCPIPPNTLAELERDIARLRFINEQIKQIEDGRLERLKQAPNQGSNATVQQLQRIVGLGVETADMLTHEVLSRDLRDDRAVARYAGLTGSPDESGQRRREKGLAKAGNARVRRGMIQLAWRFLIHQKNSALVEWYRASIAAGKKPKTMVVALARKLLIALWRFAKTGNVPAGMVLRPAS

SEQ ID NO: 178240 - protein, 416 aa, unidentified
MTFKIVRFICGGMDVHKNLIVATIGTTDKQTLTTEYIQQSFSTFYSDLIRLKEWFISHDCYDVCMESTGKYWIPIYNVLETELNICLTHPKYVKAIKGKKTDKRDSKWICDLYKCDLVKHSFIPEKEIREMREIARYRCKLVYMRSSERNRYQNCLTISNIGLASAVSDPFGKTATNIMKELMQSEVIEDDKILKLIHKNCKDKDKILDSLQGYHIESDQRFKMDTVMNHIEYLDKQIQACEAELIKRAYPLRDYFQHITHIKGISALSAILIVSEIGTDMNQFESDKQLINWAGLSPANNESANKKKSVRISKAGLYLKPLLVQCALSSIKDKNSYFGIKYCRIKKRRGHKKAIIAIARMMLVCIYHMILTGEEFNPCDYESLTNPKPKKEPTMTVESALQFLKDSNFDFSSIQL

SEQ ID NO: 178241 - protein, 339 aa, unidentified
MELLKQNVGVDISKDTFVATFAVMTREQIIKNKRTCSFNNTENGIRGFIGWAEKLKGQDLDLHVTMEATGVYYENLAYALHEQDNIIVHVLLPNIAKKYFESLNVKIKTDKVDSKILGQMGLERMLKPWVLSSKVYRKPRTLSREKEQLVKENTMVKNQLHAEVHTAEPMKRTITRYKNRIKYLDKQIKSVEKDIEKTVDSDGFVSAKVKKIKTIPGVSTATIVGVIAETGGFVNINSIKQLTSYSGYDVSIKESGKWKGKSSISKKGNSHIRGLMYMPTLSSIQHSKTYKTTYNRIKENKEFKMVAVVAVQRKLLGLIYTLWKNDTIYIENFQKAKEA

SEQ ID NO: 178242 - protein, 422 aa, unidentified
MKTPGDIPYTAFIGIDWADAKHDICIQAAGDERREFSRLSHKVEAIDEWAQSLYRRFGGPIAVALELSKGPVVYALQKYDFFVIFPVNPSSLAKYREMFTPSGAKDDPTDAEFVLDLILRHAEHFAPLKPQSVEMRTLLSLVEQRRCLVNDRVRTTNRLRNTLKQYYPQPLEWFDRIDTPLFCAFIERWPTLVQVKRARRTTLQRFFHQHNMRSARVLQARLTSIKAASPLTLDAAVITPHRLQALVLVDLLRVTLAAIKRFDEAIAELAPQHPDYELFSRLPGAGPSLAPRLLVAFGEQRDRFKNAAELQKYAGIAPVTERSGKKHWVHWRWQCPTFLRQTFVEWAAQTINKSYWAGLYYRQQRDKGCNHQAAVRALAFKWIRILYRCWQTKTPYNETLYLKALKRRGSPLLNQIENTIST

SEQ ID NO: 178243 - protein, 341 aa, unidentified
MKKLFIGIDFSKEKVDVAIIFAEGLVETSVRVFNEFKNSVSGYKQLVKWVEKNANGIDSSLWLFCGENTGDYSKPLCNHLYGRGFDMWLENSKCIKDASGIRRLKSDRADAAMIAEYAMRNHDKAIVYEPLSESLTQLREYYLYRQMVIRHRCSFEVRRGEKRLMMEKSAAKTVIAQSGKHIVSELNKEIAKIDRKIASLIESSDELSEVYRIVTSVPGIGTQNAVCLMVYTDNFRKFNYDARSIACYYGIAPFGQDSGTSVHVDPHVHYMANRHIKAMLTQAALAAVRFNPIIAQYYQRLIARGKKMPVAMNNVKNKLLHVVTSMVKNKQVYNPKYRLSA

SEQ ID NO: 178244 - protein, 359 aa, unidentified
MNAIHYIGLDVHKKTISYCIKTADGQIVQEGTLQAERTVLRRWAKGLRQPWHGAMEATLFSAWIYDTLKPYAQQLYMGHPAKMKAITAGKKKSDRIDARTIADLVRCDLLPKCYVLPPELRDLRRLLRYRNMVVQQSVRMQNKMAGLLMESGTAFNKEKLHGKKYFTDLIKSLREVPESVKDLLRMSRGAMEMFESTQKQLIQRLLSEPALEQRVERLMSIRAVGPITALTWALEIADPHRFSSIADAASYCGLTTAFRSSAGKQQRGPISKQRNAWLQTMLIEAAKLAPRWNPQLAALYAQQLKRGHPNRATLQVARKLVAYLLAVDKSGQPFQLPTPPMLPITAKTKKKKVALARAA

SEQ ID NO: 178245 - protein, 417 aa, unidentified
MKSASTAPSSKLSAHPANGVTGGLDWASEDHAISVVDQDGREVARKTIDHSASGLRAMVKFLAQHGVTEVAIERGDGPVVDALIDAGLTVVVISPNRLKNLRSRYGSAGNKDDRFDAFVLADTLRTDRTRLRPLTHDSEATKTLRATVRARRDLVKHRVALANQLRAHLQAALPGAVGLFRDLDSPISLAFLARFDCQERADWLSPKRLRAWLSSVGYSGRKDPAELYARLQAAPRGPVGADGAARAHVTRALLTVLHELVDQIKSLEAQIAEQLALHADAHIFCSLPRGGTVRAARLLAEIGDVRGRFPDASSLACLAGVAPSTRQSGKHRAVTYRWAVNKELRDAVCDFAGDSRRANPWAAKIYNDAIARGKDHPHATRILARAWLGVIWRCWQDHSVYDPAQHGALQALLTEAA

SEQ ID NO: 178246 - protein, 368 aa, unidentified
MGKFITYVGLDVHKKTIAVAFADEGGVEVRSYGTINSDLSSLDKVARKLVSGGSEPRFVYEAGPCGYKIYRHLRQQNFECIVAAPSLIPKKSGDRIKNDRRDAMMLARLYRSGDLTPVHVPNSEDEAMRDLSRAREDAKEAERKARQQLGALLLRHGLIYSGKSHWSLAHWRWISDIKMEHTAQQFTLQEYVDAVRSSSERVERITEQIRLLVGQWRLGPVVEALQALRGVSLVVAVTVIAELGDLSRFDNPRKLMAYLGLIPSLYSTGETIKRGPITKTGNGHARRMLTEAAWSYRMPARVSRRLRDRQQNLPEKVWQIAWKAQVRLCARYRRLVARGKVSQVAITAIARELAAFMWAIARTVEVGA

SEQ ID NO: 178247 - protein, 322 aa, unidentified
MSTPILGIDIAKQRLEVVLLIDGKVKNKSFKNTMEGFEALSLWLKKLGILKVQACLEATGNYGEELAIYLHEVGHLVSIVNPARIKGFAQSELIRTKTDKIDAGIIARFCLAMKPEPWIPPSPEIRVLRALVRRADSLIDMLTQEKNRLGTAHESVIPLIQEHMDYLKKEIKKVRNQIADLIDQNPNLRQKKELLASIPGIGEATIAVILAELDNLEKFNHVRELVAFIGLAPKETLSGSSIKGKPRLCKVGHARFRKALYMPALVSIQCNPVMIAFYHRLKEKGKNGKVIVCAIMRKLVHIIFGILKSGKKFDPNYKPFFA

SEQ ID NO: 178248 - protein, 341 aa, unidentified
MSLVMGLDQHRAQISAEWIDTITGEISRARVAPADRAGVREFLARFEGGDLEVALEATTGWRFVVEELQRVGADVHLVEPAEASALKGKKKRPKTDWADARHLRELLLIGRLPESWIPPAHLLDLRARVRCRHTLSQQRTECQQRIQAVLYHHGIPQRRDLLTLEKREWLAALKLPAAAREQITISLAIIDALDLQLVPFDLDLRAYARKQSGCRALIDQIYGVGGLVAVTILAELGDTRRFANSRDVVRYSGLDITVRQSDEHRAPGHLSRQGPPALRWALYEAAQRARFPTSPDRAYYVQAAERIGGNRACLALARKLLKRSFHILRELGDPALEPVAG

SEQ ID NO: 178249 - protein, 373 aa, unidentified
MSTNLRYLGLDVHADTIAVAVAEPGGEVRSLGSLPNDPTAVAKLIRKLGAREHLRACYEAGPCGYVLYWQLTQLGVSCAVVAPTLVPTKPGDRIKTDRRDAEKLARCHRAGDLTAVWVPDAAHEALRDLVRAREAAKADQLRARHRVSKFLLRHGIRPPAGAKPWTQRHRRWLDTLTFAPLAQQATLADYVHEVDHAGARLERLETALDAAVAAAPTAMRAVMTALQTLRGIRQITAATIVSEVGPLSRFPHPRQLMGYSGTVPSEHSSGSSVHRGAITKTGNAHLRRVLLEAAWAYRFPPKCTKALRTRQRGQPAAITAIAWKAQHRLHARYRRLLGRGKPTPHVITAVARELVGFIWAIGIAAEREVPAAA

SEQ ID NO: 178250 - protein, 312 aa, unidentified
MTKIICGVDVSSEKLDARIGHDGPSMSVECSEEGVSALGAFCKNHGVELVVMEATGGYEKLPFALLWGQGLPCAIVNPRSVRNFAKGMGFLEKTDRIDAGIIAWFGEAKRLVAQEPASDAQKRLRALVTRLRQLTELRTGQTNQRRLLSEAEVQASIDELVAFINRQIRSCEKAIVALLDSDPLWRVLDKTFRSVKGVAGRTVARLMAELPEIGTIPNKAITKLAGLAPIANDSGKRKGKRPVRGGRTHVRSILFTVAEVVRRYVPEFAALHRRLNDAGKLKKVIRVALARKLLVWLNAKARDARKEFACAT

SEQ ID NO: 178251 - protein, 341 aa, unidentified
MKKFIRIGVDLAKNYFQVHALASEDSPAIKRKLKRSKMHEFFSKIEPSLIGMEACGSAHYWARELKTMGHEALLMPPAYTKPYVKRGKNDAVDAEAICEAVSRPGMRFVPIKSAEQQATLILHKTRELLIKQQTMSINALRGHLSEFGIVVAKGIGRVGELLELAKADGTLPEAAAAAVKVLAQHLEMLDKAIDDLEKQIGRAHAQNEMSRLLDKVPGIGKIIASVITASVPDPSVFKSGRDFAAWLGLTPRENSSGGKQALGAITKKGNRYIRKQLVLGATSLLNVVGKRQGALRDWIVALLAKKPARLVTVALANKLARILWAMMKTGEGFRTEMFAKV

SEQ ID NO: 178252 - protein, 356 aa, unidentified
MLNDKKYIGMDVHKESISIAVRNDAGKIVMECVIETKASMILQVIDGLRGDLQVTFEEGTWAAWLYDLLKPHVTRLVVCDPRKNASMREGNQSDKIDARRLAELLRLNHLNPVYHGEHGQRSLKELVRSYLTITKDLGRVMSRVKAIYRSWGIPCTGKQVYAPRHRAEWLGKIAEPGVRRRAEFYYQQLDALRTVRQQVRRDLLAEGKKHKAWKRLCQIPSIGPIRAAVLLGILQTPHRFRTKRQLWTYSGLGIETQSSADHRRVDGQLERVKKPSSIRGLNRNCNHDLKNLFKGAAIVASSKPGPFQEFYTALLTKGIRPEMARLTLARKIATIVLIVWKRGVNFDAQHLKPQTA

SEQ ID NO: 178253 - protein, 346 aa, unidentified
MLHAGLDLSRKRLDICLLSDEGELVEQTQSPPDLDGLRSLAKRLDRHSEPIRGAIESMTGARFVHDTLEDLGWDVLIADAEKVKPFGSVACKTDKVDSQVLARLSQLALIPEIWLPGPTVREERELTRYRMHLVKHRSTLKHRIHATLMTFGRPCPVTDLFGKEGRALLDRLEVPEPWRTNVTASLELMDELDRKIDECNRRLEAGHADHPYVALLRSVPGIGKVLAFTIASEIGDISRFPSAKHLTGYSGLCPRVNQSGDSDRRGPLTKNGPRYLRWALIEATMHASRHPAYSERYQRNKRRLGKQRGAKVAQIDIARKLTVAIWHMLTRNETFAPRGATFRLAT

SEQ ID NO: 178254 - protein, 338 aa, unidentified
MAWYSGIDLHSNNSVVLVSDEADRVVYQRRLPNELGKVLEALEPYRGELEGVVVEATYNWYWLVDGLQAAGYCVRLANPAANKKYEGLKRSGDYTDAAHLAQLLRLGILRTGYIYPVAERGLRDLARRRMQLVRHRTMHVLAVENVMARETGGRPSAYQVKTLQCAQLEGFGFRADVARGVQASLAVLRTLNREIAALEKYLHERVELRSDYAVLTSTPGIGRTLSTVIMLETGTVERFASVGNFSSYARCVDSVHESNGKKKGQGNVRNGNKYLAWAFIEAANFARRWCPEARRFYERKKARTNGIVATKALAHKLARACYHMLRNGQPFDPKRCFG

SEQ ID NO: 178255 - protein, 381 aa, unidentified
MKTTKQTTPTSQKQTEAKAEVIKLGIDIHKNEYVVVQQTDGQAPKSPQRFKPEAFLQWVANLLEQTKRIFSCYEAGCFGYVLHRKLEAIGVENLVVRPRNWDEYGSKVKTDARDARELCSCLDRYLAGNVNALSVVRVPTEEQERSRSLSRQRETLAKEQKRMQNVGVSNARYYGIELPMSWWKSCNFCKLQAELPEWLLAILCPIQSVLAAINVQLREVTAREERKANRKLPVGLGALTASILDEEFRDYSRFNNRGEVASFTGLCPGEHSSGTSRRQTSINKHGNPRIRHNLIEAAWRLLQFQKDYKPILYWKQRMCKEPFGASKKKKMIVAIARRFAIDWWRINTGQIQPEDVGLKVDYPSAYATKALRAGRTSKIYA

SEQ ID NO: 178256 - protein, 314 aa, unidentified
MKKRVEIFVGIDVSKAWLDVAVHEHKEITRFRNDEAGIASLVKVLKKLKPKLIVLEPTGGFEMLVVAELSQAGLPVALVNGKRVRDFAKATGQIAKTDKLDARVLAHFAAAIRPEVRALRTEEEEQLTALLTRRRQVLDMLTVEKNRLVTVRAKMRPDLETHIHWLSNNLKELDQEIEDFIKGSPLWKEKNNLLQSVPGVGPVTSATMLGMLPELGLLNRQEIAALVGVAPMNKDTGSKQGKRSIYGGRADVRSVLYMAALSAKKHNPFIRKFYQRLIQHGKEKKVALTACMRKLLVILNAMVRTNQPWRSQTA

SEQ ID NO: 178257 - protein, 451 aa, unidentified
MNEKVIHAGFDVHAKTNVAHFLHPDGSLAHQPFEFEQDKKGFYRLEKALQKMAQEHPDVVFLCGIEATGPYWFPLGAFLTALPLRVKVTAINPSVVTNFKKVHLKKVKTDPIDARETAEYMRIFKPEPTDFFTSEHIALRQLARGRKFFLKQHSAAMNQLRSQLAVAFPEISGKDTNLSETILAVLDRFPSASSLKKATDKQLKKIRFPNSGKRVKCNMASALRETAKDSIGITQEPMCELYIRQLVHNIRFLHQQVQKAEKELETYYMEHFAHTRIHTIKGIGTLSAALIMGEILDAKRFESITHWIGYIGIYPEWKWSADKKDYAFKMTKKGNRYLKHIIYCCTFPAIRFNPIIRRHYHNQLSRGKKKMVAIGSCMRKLASLIFGVMKTQRDFDPLYNSGMKEKTISTKKTRQIKLKKEEAPQSNIVAGEVVNATKSFSGPKIEVASSL

SEQ ID NO: 178258 - protein, 356 aa, unidentified
MRIIGCDLHTRQQTIAMLDEQTGELVEKQLNHEGEGVRQFYSALPRPVLVGIEATGSMFWFLRLLEELAIDFRVGHPAKIRAAEPRKQKNDRRDARLLLRLLVENRFPAIWMPSPILRDLQVLLRHRHRLVRIRTRVQHGLQALALSHGLRRGSSLWTPGGQHQLRTLPLAQHAAAQRETLLTLYPQLQHSIDCLDRQIETQVNERPQASRLMTHPGVGPITALATEVFLGDPRRFANGKAVASYIGMIPEEKSSGGRQRFGKLSKQGNTLLRFLWGQAAMQAVRRDPELLRFYRRKLVQKGLGKAMVAAARKLGIRLWIMLRDEIDYTEFCRRGNLLRQCGTAYAGMPEGDSGPR

SEQ ID NO: 178259 - protein, 387 aa, unidentified
MPQPNDLSRSLVALDQDSTIIAVIEMSQSSWLVGGVLPGIERQPRKKLEPSPERLLAVLHRWRDEAVRAGGNITRIAVAFEAGRDGFWLARWLEARGVEAHVIHPSSVAVSREHRRAKTDRLDTELLKRGFLGWLRGERGHCSMVRIPTIAEEDAKRPNRERECLVAERTRIVNRMKSTLARLGIRSFKPTLRKAADRLATLHTPEGMPLPPNLLAELRRNMARLGFVVSQIREIEEARQKRLGQEPETGPHAMVRQLARVVGVGIETADMLVHEVLSRPMRDRKAVARYAGLTGSPDESGAKRREQGLARAGNARVRRGMIQLAWRFLLFQKESALALWYRARTADSRLGTRKTMIVALARKLMIALWRFVTTGETLEGVILRPAG

SEQ ID NO: 178260 - protein, 387 aa, unidentified
MTAQSKVSAFVARDYDIFAGLDVDKRSIAMTFSDHQSLLRSLRLPYSSEQLLNYVQKHFPGQRVAFVYEAGPTGFGLYDDLMANSQTCLVVAPSMVPTAPGQRVKTNRLDGKKLSLGLRGGELRSIHVPSRSYRELRHLVQLRDTQTAQLTATKLRIKALLLFEGIPFPEAPPGGQWSARVVAELRVLPCTEEVRFKLDHLIGTLHFHFNSAALVQKRIRHYCQNDPEIRNTIKLLTSLPGVGWITAAHSVARLGDWREITNVRQIAGFLGLVSSEHSTGDHENRGSITRSGDSRLRNKLIQCAWIAIRKDPELRDFYRRIYQRQPKKVAARKAIVAVARKLTTRMYAVLKQQRPFIIRPDSSIAPLTAEETVGPRERLDIPQHDQP

SEQ ID NO: 178261 - protein, 403 aa, unidentified
MNMNAVGIDVSKGKSMVAILRPYGEIVSSPFEIKHTSSNIRSLIAQIRSIQGESRIVMEHTGRYYEPLARELSLAGLFVTAVNPKLIKDFGDNSLRKVKSDKADAVKIARYTLDSWTELKQYSLMDEIRNQLKTMNRQFSFYMKHKTAMKNNLIGILDQTYPGVNTYFDSPAREDGSQKWVDFATTYWHVDCVRNMSFNAFVDHYQKWCKRRKYNFSKDKAEEIYGAAKELVPVLPKDDLTKLIVNQAIEQLNTASKTVEELRTLMNETAAKLPEYPVVMGMKGVGPSLGPQLMAEIGDVTRFTHKGAITAFAGVDPGVNESGTYEQKSVPTSKRGSSSLRKTLFQVMDCLIKTKPQDDPVYAFIDKKRAQGKPYYVYMTAGANKFLRIYYGRVKEYLMSLPE

SEQ ID NO: 178262 - protein, 375 aa, unidentified
MKAKVRFLGMDVHAETIAVAVAEPDGELRSLGTIANRAESIRKLMKKLGPVEHLRACYEAGPTGYVLYWQLTELGVECEVIAPTLVPVKAGDRVKTDRRDALKLARSYRSGDLTAVWVPDAGSEALRDLVRAREAAKQDQLRARHRLSKFLLRTGQRPAPGMKAWTQAYMVWVGQMRYAQMAQEATKLDHLHEVEHMGERVARLEQAIVEAIQLAPPPIQEVVKGLQALRGIAQISAVTIAAELGNISRFEGARQLMGYSGAVPREDSSGKRKQRGSITKTGNAHLRRIAVEAAWSYRHRPGIGPALRKRQEGVPEEIKEIAWKAQHRLHKRYSRLSETGKDRRKVITAVGRELLGFIWAIGVKAETAATQRMAA

SEQ ID NO: 178263 - protein, 406 aa, unidentified
MLNAVGIDVSKERSTVAVLQPGGVIVHKPFDVPHKSRNLHDLAQYIGSLEGDTRVVMESTGRYHEPIRNVLFKAGLFVCTVNPHLIKNYGNNTIRKVKTDSTDAKKIARYTLDNWAELREYTSMDITRTQLKTLNSQFSFFMKQKTAAKTNLIALLDATYPGVNKLFDSPVRADGSEKWVDFAYSFWHVDCVRKAGITAFTDRYKRFCKHHGYEFQEAKANAIYKDSKELIATLPKEAVYKELIQESIRQLNLLSENVEHIRKTMNELASTLPEYNTVMSMYGVGPTFGPQLMAEIGDISKFQHREALTAYAGVDPGKNDSGQEVHNSSHASKCGPSRLRHTLFQIMTTILQTGVKEDDAVSSFLFKKKAENKPYLVYMTAGANKFLRVYYGKVKECLRNQEQAEE

SEQ ID NO: 178264 - protein, 402 aa, unidentified
MYFVGIDWSDLHHDVAVLDEKGQELKYFTIPHNRKGMELLKERLLSIDPEPENFACLIETKNGLLVQFLLEDGFPVYPLNPKVVDYRRKPSGAKSDPIDARLLANIGRSDLAQLKRLKPDAELIAELKMLTRDQDSLIQESTRLTNKLIACLKEYYPVALEFFSKPTLPVALEFYKRYPTPELVKEATVPEMAAFLKKHKHPRPNQTAISIWQKAQEPQLRASAPTVRAKGRLMLALVRQLEVVREQIAAYDEEINRLFQQHSDSRIFASLPGAAGRLAPRLLAEWGDDRERYENAAVVQALAGTSPVLFQSGKYRFARQRKSCVKPFRRAMHLFAFQSIRQVSWAREYYDTKRSQGKTHHEALRALVNIWVRIIFAMWKNHTCYDEATFIAARARHLNRVA

SEQ ID NO: 178265 - protein, 469 aa, unidentified
MDKNTCTVYEVRGNQKKSRVKKITQFEILRPNVAGVDVSDSHGMMVAYPVNDTDMVVEEFDCYTCDLRRLSATLKLHNIVSVAMESTGVYWIPLFLLLQEDGFEVYLVNSKHVKNVTGRKDDEGDAEWLQKLHRCGLLSASFQPDNDTRSLRSIVRHRLSLVETRSTYLNRMQKALELMNLKIHTELSDIDGKSGLLIIEAILAGERNAEVLADLCDRRVKAPREKLIKALEGFWSEEHLFELSQCYEFYKFHNKMVQKCDLEIEKILVQTVQSKNGGVIPEMAKTLKPKPANNIDISVSVIKYLYILTKVDIASVEGISGISALTALSIYAETGPDLRSFKNEKHFVSWLGLAPNTKISGGKVISSRVPKKKHYAGQVFRMAAMSMRNNKGPLGDFYRRIRSMAGNAKAIVAVARKIAVIYYRMMTDKTAYNPQAMIEYQEKYNERKIKNMEKRLMKLKAEVAATIAA

SEQ ID NO: 178266 - protein, 378 aa, unidentified
MKTVRFIGLDVHAQTIAVAVAEPDGEVRSIGIIPNHPAAVSKLMKKLGKPAQLRVCYEAGPTGYVLYWQLTKLDIKCEVVAPTLMPMKAGDRVKTDRRDAERLARSYRSGDLTAVWVPDAAHEALRDLVRAREAAKRDQLRARHRLGKFLLRQGRRAPLGLTAWSCRYLQWVKQQHFEQPAQQATLIDYLHEVEHMACRIEQLEQAIDSAIDTVPTKMRAVVDALQALRGIAKISAVSVVAELGEISRFAHPRRLMGYSGAVPREHSSGARVQRGSISKTGNAHLRRIVIEAAWAYRHRPGMGMALAARQRLTNEAVRQIAWKAQHRLHQRYRRLMGKGKPKQKVITAVGRELLGFIWAIGVQVERSCEEATSMQCAA

SEQ ID NO: 178267 - protein, 407 aa, unidentified
MIFVGVDWAEAHHDVFVQDVDGKRVAGGRLPEGVGGIARFHEMVGAHAEEPDEVVIGIETDRGLFVGALVAAGYQVFAVNPMSTSRYRDRHSTSGAKSDPGDAKVLADMVRTDRHNHRPVAGDSELAEAIKVLARAHQTMIWSRTRQTNFLRSTLREFYPAALVAFDDLTSGDALELLQIAPTPTLGAGLSRSKIAAALRRGGRQRRVDQRAEEIQQALRAPQLQGSVLVATAMGSSVSAMVAVIATMNAQVAELAQEPNAHFEQHPDAEVVRSLPGLGTILSARVLGEFGDEPNRYATAKSRKNYAGTSPITRASGTKRIVLARYVRNLRLADAIYLWAFASLSGSPGARAFYDYRRAVGDTHHAALRHLGNRLVGILHGCLIHQTSYDERTAWGHRTELELSGAA

SEQ ID NO: 178268 - protein, 286 aa, unidentified
MAKLNIIGVDLAKNVIQAAVLTPTGKTLTNKELPRKKFAEFLAKQPLSTVAFEACASAHYWARQAERYGHKAMIIPAKAIIPYRQGHKTDRNDAVAVAEAASRPTIKEAPIKTIDQQGLQAIQRSRDLLMRDRTAHSNHIRGLLMEFGIYIPKGISHLRSTIPEVLEDAENELPDMYRPVLACMYRHFQRIEADIKSIDLEIKALLKENDACSRIMALEGVGPIGAILLFATLGTGEAFKSGREFSAYIGLTPKQHSSGGKTNFVGISKFIANHQLRAILVQGARA

SEQ ID NO: 178269 - protein, 415 aa, unidentified
MALKIVYKICCGIDVHKTFVVACIASTNDKGVTSYESHRFSTYTSGLKTLLQWLLDWNCKDVCMESTGKYWIPVYNILEKDCSIVLAHPKYVKAIRGKKTDKKDAKWIADLFKHDLVAGSFMPPSDIRQLRDLMRYRFKLTCFKSSEKNRLQNCLTVSNVQLGNVVSDTFGKSAQAILDKILENPADTSFDLEPLVFKSLKKKLPELRDAIDGYITPEQAGKLKVIKTHYEDLESRKAELEELILALAAPYQQELAILQTAPGISSDFTAIGIISEIGTNMEAFPSAKHLCSWAGLTPTNNESAGKKKSVRVSKAGCYIKPLLVQCANAVVTSKKHPEIRNRYLRLKKRRGHKKAIIAIARMLLTALYHMLKNGENYNAELYRKSDLPPVDREITVEQALMMARNQGYKIKSVTA

SEQ ID NO: 178270 - protein, 362 aa, unidentified
MNDIHYIGFDVHKKSVSYCVKTASGEMVQEGQLVARREVLRAWAAAQAQPWRGAMEATLFSAWIYDTLQPYAQQLDMGHPARMKAITAGKKKSDRLDARTIADLLRCNLLPTCYVLSPEMRDLRRLLRYRQLVVGQSVRMQNKMAGLLMETGAPFVKAKLHGKKYFTQLLETLQEVPESVKDLLRMSRGAMEMFEASQKRLVKRLLAEPALQARVERLASIPGVGPITALTWALEIADPQRFPSIGDAVSYCGLTTAFRASAGQEQRGPISKQRNAWLQTALIEAAKLAPRWNPQLAAVHQHELQHGHRNRATLQVARKLVAYLMAVDKSGQPFRLRRSPEVAAAPPTRKKEKARRPALQLT

SEQ ID NO: 178271 - protein, 410 aa, unidentified
MDVFLERCAGLDVHQASVVCCVLIGAPGRKAQKLLRSFGTTTRELEALRAWLAEHGVTHVGMESTGVYWKPVYAVLEGHVDLTVGNAHHIKNVPGRKTDVKDAEWIAQLVRHGLVAKSFVPPPAIRDLREMVRHRRTLIETRTAVRNRMLKLLEGANIKLSGVASDVFGVSGMAMLEALAAGTNNASEMAALARGRMRRKHAALEAALDGRVREHQCFLLGMQLRSLEAIDQDLEALDARIGTQLEPYQAQHRLLMQIPGVDWVTAASIIAEIGTDMDVFASARRLAAWAGVAPGNYESAGKPKGAGARRGNVFLKSALFAAASAAVRTKGSYYRDKYNRLRARRGPVRAIMAVAHKLLLAAFQMLSTGEAFRDLGEGYLDQVARKRSTTKLVQRLSNLGYDVMLVPKAA

SEQ ID NO: 178272 - protein, 395 aa, unidentified
MRSCMLTSVMVKGSIVDEFCSKASVASRAAKLRRREIGRVQTPEVVAERDPRRHCGTSPNSRRNRRRPTRPASSYLQDWERTMNEQIFVGIDVAKDTFFVCSSPAVINLSLPNSVSGIRQLIKTLKPHDVKLVVLEATGGYERPIVAGLLESDFRVVVASPRQVRHFAQGIGELAKTDPIDARVLARFAQIVQPKPKLPFSPETDELADLVRRRRQLTDLRVQELNRSQTVRHPKVSKSVRKMIKTLDYQIAELDELIQQHIKSDDDFRKKDEILRSTPGIGPHTSATLLSQLPELGQLNRQQIAALVGVAPYDFRSGRFAGKSRIWGGRKEIRCVLYMAALTAMRCNPAIHRFANRLLEQGKVFKVVITACMRKLLIILNTMLRNQSLWRPEKN

SEQ ID NO: 178273 - protein, 399 aa, unidentified
MLEQAWAGVDVGKEHHHCVVIDAEGRRLLSRRVANDEAVLLALISDVTGLAGQVRWAVDISTGEAALLLALLAAHDQPVSYLSGHQVNRAAGGYRGSGKTDAKDAAIIADQARMRRDLAPIRVSEEVIVELRMLVARRRDLQSDRVRAVNRLHETLLTISPALEKALDLTNQGPLILLTGYQTPAAIGQLGVTELTEWLRARKVRRAGELATRAVAAANAQQIALPGEALAAHLAGQLAEGVIALDEQIKHTDKLIEGRFHRHHAAPVILSMPGIGTLLGAEFLAATGGDTAAFATPDRLAGYAGLAPAPRDSGRISGNLYRPKRYNRQLQRVFYTSALISIRCCPESRTFYDRKRAEGKRHNQAVLALARRRVNVLWALLRDHRPYQASPPVSTAAAA

SEQ ID NO: 178274 - protein, 411 aa, unidentified
MQIRMGGRYMNSVGIDISKGRSTIAVMRPFGEVAISPFEVRHTDSELSELARRLKSLNGETRVVMEATGNYHAPVAKQLHDAGLYVSVVNAKLVHGYGNNDLRRVKTDRKDAIKLANYGLDRWLTLPRYIPEENTRLLLKNCYRQYRQYSKVQTVLKNNLISLLDMTFPNANRLFNSPARADGSEKWVDFVAEFWHCECVSERPLKSFVNKYWRWCRKHGYNFSEEKAHAIYDEASGHIGVMPKSETTKLLVEQAVSQLSATSAALAVLKQEMQSLSSQLPEYPVVMDMFGVGPTLGPQLIAEIGDVRRFYSKKALVAYAGIDAPPNDSGDVIGRHKSMSKVGASSLRRTLFLVMSVYLQNSPPNEPIYQFMNRKRAEGKPYRVYMMASANKFLRIYYATVKAYLEILEQI

SEQ ID NO: 178275 - protein, 347 aa, unidentified
MRFYTQQHQYYCGIDLHARTMYVCILDQDGSILIHKNMKTDPNRLLKIIAPYRDDIVISVECMFAWYWVADLCANENIPFILGHALYMKAIHGGKAKNDRIDSKKIAALLRGGMIPMAYVYPQKMRSTRDVMRRRNHFMRKRAELLAHIQNTNTQYNLPEFGKILARKRNRGGAAEHFDDPSVRESMQANLALIDFYDQLLNDLERFITKNAKEHDVNAYYRLRSVPGIGKILSLIILYEIHNINRFARVQEFASYSRLVKSANESGGKRYGSSGSKIGNAHLKWAFSEAAVLFLAKSEEGKKYFAKLERKHGKGKALTVLAHKLGRAVYFMLKRKTAFDIKLFLSS

SEQ ID NO: 178276 - protein, 357 aa, unidentified
MLSSNVKYIGLDVHKEAIAVAVRNSAGKLVMESIVETKASTLLDFLHGLRAELHVTLEEGTWAAWLYDVLKPHVREIVVCNPRRNALLKEGSKNDRVDARKLSELLHGGLLRAVYHGEHGLRTLRELARSYEVISKDLKRVMNRIKALYRSWGIPCTGTQVYSRRHREQWLQKITEAGVHRRAELFYQQLDGLQALRRTVRGELLAESRKHQAVKVLRQIPFIGPLRAAQLVALMQTPHRFRSKRQLWTYSGLAVETHDSAQYRYVDGQLQRSKKPQQVRGLNQNHNHAMKEIFKSAALSAALRAGPFQDFYEGLLTKGIKPELARLTLARKIAAITLTLWKKGEHFDAKYVKSQAA

SEQ ID NO: 178277 - protein, 408 aa, unidentified
MEILYPRCAGLDVHKDSVVARVRCVSAPQADETRSFATTTGALIELQEWLSGYAVTHVAMEATGVYWKPVWHLLEEHFELVLANAQHIKNVPGRKTDVNDAAWIADLLAHGLIRSSFVPPLPIQELRDLTRTRKQLVREISQHTLRIQKTLEDANLKLSSVLSSVIGASGRAILQALIAGQSDPERLADLAQGTARHKRAALIAALHGRITPHHRRLLRLHLDLIAALEAALAELDRDVGKLLAPIRTSARLLTTMPGVSELTAQVVLAEIGADMARFPTPAHLLSWATMCPRNDESAGKRRSTRTRKGSPWLKTALVTSAWAAVRVKNSYLQAQFLRLRARRGAKKAILAVAASMLTAIWHMLKNNVEYQDLGADHFSRRDRTKAIRRLVRRLNDLGCDVQLTPQAA

SEQ ID NO: 178278 - protein, 338 aa, unidentified
MQEQQYVGIDLHRRRSVIVRMNDAGEVLGTVRIANDPLKLAMAIAEAGPDPEVALEACYGWYWAADLLAAEGARVHLVHPLGLHWDSRRVKNDVKDATELANRLRRSDLPEAWISPPEVRELRELVRYRARLVALRTSAKAQVHAVMAKLGILPTQVDMFSPTGQVLLDQMPFEGVYGLRVESLRDLLEIFDREIAMVEREIHHLLQDDRGYQAIQVLNGVGPITAAILVAEIGDVTRFPTARHLCSWAGMTPKLHESDTKSYKGRITKQGSTIVRWAAVEAVVRYHGGDVIAPAYRRIAERRGNKIARVAAARRLLTLVFYGLRDGEIRCVARKEAA

SEQ ID NO: 178279 - protein, 350 aa, unidentified
MMIIGCDLHTRYQQVAMVDTETGEMLECRLEHANGEARAFYAALQGPVRVGVEATGYTHWFEALLAELGHELWMGDAAKIRAAVVRKQKTDARDAAHLLDLMREGRFPKIWRPSPAERDLRQLVWHRQKLVWMRGAVKNQLHALAMGEGVCRKKQLFTVKGRKELEGLALGPWSSYRRQELLRMYDEMAAATAKLDLGVVRAAKRLPLAGRLMTHPGVGPVTSLAFVLILGPVARFERSKQVVSYLGLNPQEHSSGGRQRMGSISKQGNPMMRSLLVEAGHTAARLDPELKRVYQRLKFRRGASVAKVAVARKLAVRMYWMLRSTADYAQLVRMQGSPPATLVESSPSLG

SEQ ID NO: 178280 - protein, 406 aa, unidentified
MEGPIITVDVSKGSCHYQPFIENGHPMRKPKQLSATIDGFQKLGQTIKDLEAKTEREDIPVIFEATGVYHRPLQKYLEDHKIRYYIISPLLSATYRKTDLHSNKTDALDCAHIAKAYYCEKELRQYQAQPQEYKRLYQLSRIYESELVHLRKRKVSLRSMLNIIYPRIDKTFKGNQNLYDPIPMEILKRYPHPSLLLSHREDTIVKNVGHRTGHLKGYTERIVHKIYEKAKECYSGCEINDIEVLKLPSLIENVQEQKKKCDLLLKEMIEIARTCPYFASVVSIVGIGENLAARIIAELGDVSRFDNRAAIVAYAGLNPKIQQSGDIDGLHLKISKKGNKHLRCLLYLGAQCNYRLRKEDPLYEFTKKKRQQTQCPLSSKAAYTASAHKLLVIIYSLCKNGTRYHS

SEQ ID NO: 178281 - protein, 367 aa, unidentified
MKKGSTVAAKPSIKLSDRKLTVGLDLGDRSSWYCVLDEAGQIQLEQRVRTTAKALREVFSEMPRSRIALEIGTHSPWISRLLSELGHEVIVANARKVRLIGESRKKDDPLDAQTLARLARIDPQLLYPVKHRSVQAQADLTLIRARAGLVRARTGLVNTARGLAKSYGERLRGCNVRNMNPEKAESLSPELQAALEPLLNAIESLSERIVEYNERIENLAQQSYPQVALLKQIKGVGTLIALTFLLTLEDPHRFRKSRDVGGYLGLQPGRRKSGQSEPQLHISKEGDPYLRTLLVQGAQHILGPFGVDCDLRRWGLKLAERGGRNGKKRAIVATARKLAVLLHHLWVSGEVYEPLHNRSRATVAAAA

SEQ ID NO: 178282 - protein, 409 aa, unidentified
MPLQRWYIGIDWADQEHMVWVGDEAGQCVKQEVVKQEAGELSTLGRWLLERQSEGTVLWAGIEKPHGRIVDFLLDHNVVVYPINPKSLDRARDRFRTSSSKSDLFDARVLAEFVRTDHSHLRPLQPSSEEAQELKVLTRDHHRLVEGHTRLVNQLVAALKEFCPLALEAFSEVSTTSAMDFLEAYPSPTTARHLSQTEWSRFAREHRLRGDCEQKVWEALHQLRPRVPGYVERAKSRLVRSLVAQLRVSQREVEGYAEEIERFFASMPVGELARSLPGGKSGTMVATLWAELGDAADRWEFFRHLQAEAGATPVTRQSGKHTAVGFRFACNKRLRHAATQFAFVSLRLSEWARAYYRRQRALGHRHWEALRALAAKWLKIIFIMWRDRVLYQEDRHLATMARQTLTQAA

SEQ ID NO: 178283 - protein, 383 aa, unidentified
MRWTPPALVRHLKCQTLELEVPKEESVKKHTTIAVDIAKSVFEIAVSDRPGHVSERQRLTRARMLAFFRERPPAVVVLEACGSAHPLGRELGEMGHEVRLLPPKHVRPYVLRDKTDRTDARALLEANRNEEIMPVPVKTVGQQALSAVHRLRSGWLRTRTARLNTLRGILRELGVTIPVGARHVESRVLEVLGAGRVSQPLAMLLTSSLGEIRQLEQSIAEADRQLKNLAREMDSVVRLQTIPGIGLLTATALVASVGEPSRFRSGRRLASFLGLVPREHSSGQTRFLGRITKRGDPYLRTLLTHGARSALLAAARRRNKGGALDRLGQWGLELSQRRGHNRATIAMANKLARLAWAIWSRHDVYRPVLQPPVPMITDMASTH

SEQ ID NO: 178284 - protein, 353 aa, unidentified
MHTHQSSSNPVATIGVDIGKNTFHLVGLDKRGAIVLRIKVSRSQLERRLVNVPCCLVGLEAGCGAHHIARQVRALGHDVRLIPAQYVKPFLKGHKNDYRDAEAIAEAVQRPTMNFVAIKTPEQSDLLSLHRVRSRLVGQRTAVINQIRGFLIERGVTVRQGPAPLRKALPAILSSPIDVLSPRMVRLIADLSQDWRHLDARIQAVSTEIETLAENDGSCQRLMTVPGVGPIISSAVVAAIGNGSGFRQGRDFGAWLGLVPKQESTGDRTKLGKISKRGNKYLRTLFVQAAHVVLVRRPAAAMRGLWPWIERAAKRLAHRNLLAIALANKLARIAWAVLARGRDYEPRITTHAA

SEQ ID NO: 178285 - protein, 340 aa, unidentified
MRIIGCDLHTAKQTIAMLDRDTGEVVEQTLSHDGETVRKFYAAIPKPAVVGIEATGSMGWFVRLMEELGLTCRVGHPAAIRTAEPRRQKHDRRDAQLLLRLLLEDRFPAIWMPTAEQRDLRALLLHRHQWVRMRTRVQHALQAMALGQGVRRGATLWSAQGQAVLAALPLLPHATDRRDSLQALYRQLDAHLERLDAHVRATAQQRSGATLLMTHPGVGPVTALATDVFLGDASRFPNGKALASYVGLIPSEYSSGARQRLGHLSKQGNPFLRFLWGEAVMGAVRRDPELQRFFRRKLPQKGLGKARVAAARKLGIRLWIMLRDQITYDEFCRRNPRRPS

SEQ ID NO: 178286 - protein, 370 aa, unidentified
MLDTTTFVGLDVHARSIKAVSLDVMTGEVRAATFGYDAGAVAEWVRSVDPGARCVYESGVTGFDLQKRLSGLGVDCVVGAVSKMIKPSADRRRKNDRNDAEFLARMLSVGNVVEVWVPDDECEAARDLTRALEDARDDLSRSKQRLSKFLLRHGLVFDERTPTGRRKGNWTRAHWSWIESIRFAEGADNEVLAYYVDAVRRAAEEKARLEGLVEAEARKPRWRKRVDSLRCLKGVDTASAADLVFEAGEFSRFRNARSFAAWVGLTPSEHSSGESDRRGAITKAGNKHLRKTLVEAAWHYLTCSGRPKDLAKGQAPDRGARRHAAKGVRRLVERREALLARGVHGNKANVATARELACWVWAVGLMAEEA

SEQ ID NO: 178287 - protein, 338 aa, unidentified
MEQQREYVGIDLHRRRSVIVRITESGEVLETVRVDNDPLSFVRAVMHEDPNPEVALEATYGWYWAADLLEAEGATVHLVHPLGLHWDSRRVKNDERDATELAKRLSRGDLPEAWIAPPELRELRELVRYRAKLTALRTSAKAQVHAVMAKEGVLPAYGRMFGPAGQRLLDEMPVEGVYRDRVESLRHLLDIYERELVLVESHLSRRLKGHEGYSAIQAIHGVGPIMAAIFVAEIGDASRFPSARHLCSWAGITPSHRESDVKVHRGHITRQGNNLVRWAAIEAVARYHGGPPIEPTFARVAKRRGTMIARVAAARKLLSLVYYGLRDGEIRCLSREAS

SEQ ID NO: 178288 - protein, 398 aa, unidentified
MTESSDYESVQVFIGVDVGKDTHHAVAINRSGKRLFDKALPNDENKLRSLISDLKQHGQILLVVDQPATIGALPVAVARSEGVLVGYLPGLAMRRIADLHAGEAKTDARDAAIIAEAARTLPHALRTLKLADEQIAELSMLCGFDDDLAAQTTPASNRIRGLLTQIHPALERVLGPRLDHPAVLDLLQRYPSPEKLASLGEKKLAAQLCKLAPRLGKRLAADIAQALAEQTVVVPGTNAAAVVLPRLALQLITLRKQRDEVALAVEQRVLAHPLYPVLTSMPGVGVRTAARLLTEVACRAFASAAHLAAYAGLAPVTRRSGSSIRGEHPSRRGNKALKRALFLSAFAALRDPISRAYYTRKMSQGKRHNQALIALARRRCDVLFAMMRDGTFYTPQAS

SEQ ID NO: 178289 - protein, 355 aa, unidentified
MTGPKHQKEKRSMDYFAGLDVSVKDTSVSVVDETGKITRELKVASEPEALLAVLRNPTYRFKRIGLEAGPLSQWLFSALAEADLPVICVETRHMRAVLKAQINKTDRNDARGIAQMMRVGLYRPVHVKTLRSQKLRMLLTHRKLLQSKAIAVENDLRATLRNFGLKVGMVGTAKFEARIKELVENLPDLTVLVEPLLVVRRALREQIDVMHRRLLAIVRNDEVCRRLMTVPGVGPVVALTYRATVDVPARFRKSKSVGAVFGLTCSRDQSGDRDRPGAISRCGDEMMRAMLYEAAQAMMLRSAKWSWLKAWAMQIARRRGMKRAIVALARRLAVIMHRIWADGTEFRWTKEAAVA

SEQ ID NO: 178290 - protein, 332 aa, unidentified
MEYYAGLDVSLRSVSICVIDGEGKIIFERLVACEVDVIANTLAQTSLPITRLGFEAGTMSQPLFYGLKEQHGFDVVCMEARQVHAALSAMRNKTDKNDARGIAQVLRSGWYSPVHMKSRRSHAMRTLLSSRKACLRKCIDLTNEVRGLLKVYGLRLPERIKHTRFDATVRPFIEVHPDLSLALVPQLDARLALLQTYQELDKRVKHAASTNSVCLLLMEIPGVGPITALSFVAAVDDPARFRNSRTVAAHFGLTPRRFQSGETDNPGRISKAGDMEVRSALYTAANAMLTRCTGGSSIKSLGDAPDADQRAPPCCCGRGQKARGCHASHVGQ

SEQ ID NO: 178291 - protein, 341 aa, unidentified
MRFYTERRAFYCGVDLHARWMYLCILSHEGEVVFHRNLAAGPEPFLQAVAPYRDGLVVGAECIFTWYWLADLCEREGIEFVLGHALYMKAIHGAKVKNDKVDSQKIAALLRGGTFPMAYVYPREMRATRDLLRRRTYLVRHRANLLAHIQNTNSQYNLPEFGQKIARKMHRTGIAEAFADPAVQRSIAVDIELIDHLDLVLERLKKEIERTARHHDPQALFLLRTVHGIGATLGLVILYEIQSIDRFERVQDFCSYARLVKCQHESSGKRSGKSWSKIGNVHLKWAFSEAAVLFLRANPAGMTYKKRLERKHGKGKSLSILAHRLGRAVFHMLKRRKAFDM

SEQ ID NO: 178292 - protein, 341 aa, unidentified
MAKFIRAAIDLGKNYFQVHALESEGGRSISRKVKRSKMHEVCSQIEPCRIGMEACGSAHYWARELVAMGHEVVLIPPAYIKPYVKRGKNDVVDAAAICEAMSRPDMRFVPIKSADQQAVLMLHKTRELLVKQRTMAVNALRGHLAEFGIVAAKGIGRVDELLALAKADAALPPIAMAAVACMAQHLEGLDLSITTVEKEIARSHRQNPISRVLDEIPGVGTLIASVIAASVPDPGVFKSGRDFAAWLGLTPRQNSSGGKEKLGAITKQGNRYIRKMLVTGATSVLRVVGKRKGTFADWINALRARKPERLVAVALANKLARICWAIMTTGEGFRTDTYVKV

SEQ ID NO: 178293 - protein, 354 aa, unidentified
MKQEYFIGLDAHGSFCELAVVNGTGELVERGRCRTSIAALRALIEKVASPRHVVFEEGPLANWLSRNLTDQAESVSVAQPRRNRLICCDGDKDDPVDAEKLAQLLRGRYIKTVHQIASLEDTVFKQLVAQYVRRVRRRVVVGQQLSGLFKQHGVIAQAKHFAKEEDRVVLLGQLPEQALLRELLQESLTEYDAALECEQAWRQRVVERAKQDEVVVRFTALPGISWIRAATLRVYLDTPWRFRSPKALWKYLGIGLERRHSGTGPEILSVPRQVNRLLKSTILGAARSAVAQGDNPFADQYRRWLEHGLSAKLARRNVARSMAATLWGLWKSGTVYHPEWVGVNLAATKGIEKS

SEQ ID NO: 178294 - protein, 360 aa, unidentified
MNTLKVNLGIDAAKDNCECNLSRLTAELDVKVIASKIFLNTENGLKELLKWLIKNGPVEHTKLHVVIEASGVYHERFALGLQQAGYRVSVVLPNKAKKYMESLGLKSKNDRIDAKALARMGCEQKLEEWSPLSPFYQKLRTYTRLHENIQQKKTETINQLHALKHSAVQMTDAIEVLDRLEEVFNKELAKTKKLIEDHIAGNAEVKERVDKICKIKGVGTLTVATVVAEANGFDLIKNIPQLISYAGYDVVEDQSGKRIGKTKISKKGNTHIRRILHMPALNMMTYQVGTMPALFERTLNKHGIKMKSYVALQRKLLILIYTLWKKNEAFDINYHKDKSARVEEVETSSRLSLEEAGIAA

SEQ ID NO: 178295 - protein, 417 aa, unidentified
MPQLWAGIDAGKTEHHCVVIDGNGTKLLSQRFKNRESAILTLMGDVASLPGGTDVAWATDLNHGGTGLLQSLLSSHAQPLFYISGRVIHHASGAYRGEAKTDAKDAVIIADQARTRRDVTLMRQADEVTAELRLLSARREDLVHDRTRAVNRLRAILVHYIPSLESAFNFATTRGPLVLLTRYATPAAIRRMGESRLASWLRGQGCWKSAVVAKTAIEAAREQTSVVVGEAAAARLISRSAHDLLRIRDELAELEAEIEAALEGSTSAELLVSIPGFGRRLAADFLAATGADLAAFESPDRLASFAGLAPVPRDSGKISGIHHRPRRYDRRLLNACFQAAFIASRTCPVSRSFYERKRREGKSHKQALIALARRRINVIWAIFRDQTRYSITSIDPAGFASGAVVDVSAVHTFDAGA

SEQ ID NO: 178296 - protein, 402 aa, unidentified
MGEDPKRFIGLDIHKEYFVAIGVNPQREVIFGPQKVSNYRLDDWISRYLNPKDAVVLEMTTNTYLFYDSLLPHVHSVMVVHPPNVALVTNAQVKTDKKAALALAQLHAAGMHTSVWIPPHHVRDLRSLIARREKMVRLSTIAKNRLHALLHRKHLILPEKPFAPEQRTWWESLPLSATEMFLVHSDLDTLEFAQNQLEKVEACLKQESVQDERIPFLIQLPGVAMLTAITILAAIGDITRFPNAKKLVGYAGLGTRVHDSGMTHANGRITKTGRRDLRRAMVNAANHAVEHHPHWKKEFERLEPHLGRSKAIVAIARKLLVAVWHVLNEQGADRFADPGKVACSFFRYAYKVGVKNLPEGQSALAFTRTQLDRLGIGMDLQEVPWGSHHPKLPTSRLHSQIE

SEQ ID NO: 178297 - protein, 429 aa, unidentified
MQNVLQKRLTRITPASIIVGIDAAKDLHWARITDYRGLDLMKPVKVHNNMDGFESLLAKVEKLRVKHGCDQVTFGMEPSGHYWRALGWYLYLHESKPVLLGVNPYHTKQAKELNDNSQTKSDPKDAQVIAHLIREGRYFDTYLPEDEYAELRLLNTERQRLMKQISRANNIIIALLDEYFPEYATVWGSVTCPTSLELLKTYTFPSDILSASKEQLLDDIREASRGTEGIKLMGKMIQSASRSVGVKEGQRITRIRMLSLIDEMTYFEGKKAEIEAELEAVMNTLQLGTVLQSMLGVGTIISAAFLGEVGDITRFSNWKQVRSLAGLNLVENSSGKHKGKTKVSKRGRPYLRHMLYLAGECGCRCNPEMRAFYRYLRDRKNNPLNGHQAFVATGLKIMRILFHLAKTGENYNPGKALGTVRLQQIASIS

SEQ ID NO: 178298 - protein, 332 aa, unidentified
MSIIGCDLHTRYQVIAMLDRETGEVTTRRLEHEGGETKAFYAGLGKAARIGIEATGYTQWFERLVADLGHELWVGDAAEIRARAVRRQKTDTRDAEHLLDLLINQRFPRLWIPTPEERDYRQLLKHRDKLVKMQTSVRNQLHFLAMSQGVCRKRGLWSARGRRELEALPLGPWASVRRQELLTFLDGLGPRIEEMDRAVKAEALRRAEAVRLMEQQGVGPVTALAFVLTVGPVERFPSSRKLVSYLGLNPSENSSGGHQRLGHISKQGNEMLRWLLVEAGHTAARLDPELGRVYQRLKFRRGGSVAKVAMARRLAVRLYWKLRNGTAGSHVQ

SEQ ID NO: 178299 - protein, 349 aa, unidentified
MTTQTEKHYVGLDVSQELTAICIVNDEGKIVWRGACATEAGTLAETVRKRAPHAVRIGLETGQLSNWLTLSLRRRGLPVVCVDARHAKAALQMQINKTDANDAHGLAQVVRTGWYREVTVKSMDASALRMLLVARAQLVTQRQAIANTLRGLMKAFGVVVLRGAKGRFPMRVREAAEGNAALSAIVEPLLRAWQALREEVEIIERQLVTRAKDDAVTRRLMTVPGVGVIVALAYQSVIDTPDRFRRSESVGAYIGLTPKKYQSGEVDVSGRISRCGDGLLRAYLFEAANVLMQANRKASALRSWGLKRADRLGRKRAKVALARKLAVVMHRIWANKTEYCGDAITANSL

SEQ ID NO: 178300 - protein, 421 aa, unidentified
MKAWNEVTHFAGFDWAKDHHDVLVLDGAGRIVTEFRFEHSAEGWACCREKLAVFPQLAVAIESGHNAGIEQLLIQGYRVYPVHPRSSKSYRTRKQPSGTKTDRIDCWALADALRLEGESWHALTAPEPLVQQLRLLCRDEVTLIEQRTALVNQLQQALYEYYPVALQAFDDWCAPSAWAFVEIFPTPQALVQAGRRRWEKFLHTHKLFHPQMNQKRLAIFARADQFCGQEPVTAAKSALAVALAKMLYTLERQLAHYRSLIEECFLQHPEHTIFASLPGAGPKMAPRLLGELLALRPLAQQPQALQCLTGMAPVSYQSGKVSVVYLRRQCNRSLRATVHLWVDLSRHYCDWAQIYYLNHRQKGQSHACALRCLGMRWLKIVAAMIRNNAPYDAAFHARNQLQHGSWVLQLQPNQPAVGHAP

SEQ ID NO: 178301 - protein, 344 aa, unidentified
MDHFAGLDVSVKATSVCIVDDAGKVVREVKVTSEPEALLAVLKNPAYHFKRVGLEAGPLSQWLFSGIAEAELPVVCVETRHMQAVLKAQINKTDRNDARGIAQMMRVGLYRPVHVKTLRSQKLRMLLTHRKLLQSKAIAIENDLRGTLRNFGLKVGMVGKVKFEARIKELVENFPDLAELVEPLLIVRRVLREQIVILHRRLLAIVRDDEVCRRLMTTPGVGPVVALTYRATVDVPARFRKSKSVGAVFGLTCAKYQSGEVDWDGRISRCGDEMMRTMLYEAAQSMLRSKKWSWLKAWAMQIARRRGMKKAIVALARRLAVIMHRIWVDGTEFRWTREQAAAAA

SEQ ID NO: 178302 - protein, 361 aa, unidentified
MVVMLGVDVHKDTHTVVGADEVGLELAARTVRATDAGHRQLVAWARAQFPQQRTWAVEDCRHVSGRLERALLAAGERVVRVAPKLMAGARRSARTRGKSDPIDALAVARAALREPNLPVAEHDEASRELKLLVDHRENLLAERTRMINRLRWHLHELDPELDPPARRLGQLARLDELAGWLDQHAAALERPRERQASMVTRLARELVADIRALTVRVNALEREITTLVAQAAPRLTELLGCGALTAAKIVGETANPARFRSEACFAMHAGVAPIPASSGRTNRHRLARGGNRQLNAALHRIALTQLGQSGSLGQVYYHRRRAAGDTSMEALRALKRRLARVVYNMLTPTTTSTTGDQPVAA

SEQ ID NO: 178303 - protein, 330 aa, unidentified
MNYIGMDVHKRFTYAVVKDEQGNKIKEDKFDNSKENFKNFLQIFAPEETKIVMESTGVWEYIYNILEELGYSAKLANPVRTKAIAWAKVKTDAVDADTLADLLRANLVAESYVPTKTMRKLREVVRERKTFVKQITQIKNKIHAILTKRGFRLPTTTLCMKSEIILREEYYDNDVIVHYLNLLTIYRKEISEIEESIKNIVNMDHESKLLMTIPGIGCIRAIEIISEIGDVNRFSSSEKLCAYSGLVPSISQSGSSLKFGSLVKQSNRILKNAFIEASWTIVQKKETNFLQEFYKKLAKKKGKQKAICATARKLCSVTYAVLKNKEEFRY

SEQ ID NO: 178304 - protein, 393 aa, unidentified
MIRECIFRDRAGEGAGAGGMGPCIMIARVGVGLTRVNVDGSPHGSRSSKTVSELGAPSMRSTENPNSRLGVASPHSQGRDMERSLFVGIDVAKDHLDVHAVPTDAAFRVTHDAAGLATLCERLVAWAPTLIVLEATGGHEVTVVAALASAGLPVAVINPRQIRDYARATGQLAKTDALDARILAKFAAAVRPEVRPLPEPQTRALDEAVTRRRQLIEMLGAEENRQRLVRDRRVQGQIEAHITWLKRAIKELDRELQATIRASPLWRDAEAVLRSTPGVGPVMTTTLLAELPELGQLSRHKIAALVGVAPLNRDSGQFRGRRMISGGRASVRRVLYMATLSAIRRNPVIKTFYDRLCANGHPKKVACIAAMRKLLTILNAMLRDGRRWHAQIA

SEQ ID NO: 178305 - protein, 319 aa, unidentified
MAKRVEEVTLGFDVSKRQLEVLGSDEAGNRLIDNDPVAITRFLDRFSGPVAIAAEATNVYHEQLVDLALAHGFTVYLIDGYKLDKYREAVGVRAKTDANDAELIHRYLVSERPHLRPVNPQSQAERRLWRLLKRRAKLVKLKTQMDLSLRDLEVNLPEVGAVLKQLDRLIRRLGQLANALARSCGWQGMLSRLRSIPGVGPLNALALVSMYHRGEFRTVDQFVAFLGLDVRVRDSGAFKGRRKLTKKGDPEVRRLLFNGARAAANRNNEWAAMKQQLMARGMSEIQTSVILARKIARIGYALLNTGGSYESARITCTST

SEQ ID NO: 178306 - protein, 322 aa, unidentified
MKTIANNPGIGIDVGKSELVTCIRHSNGAAEPPVAFANSSMGFRKFVVHLTNQKVQRDTPILLESTGPYHWNIARYLADEGYLSKVVNPLHTKQIARYSIRKRKTDKIDAGQLAFLASQNYGYAFVETKEIARKKALVRHYWKLKSVIGNLSKHERYLKQHRGITRATVTPYLIAKCESLKEKIIQDWENGNNLKYLDSIPGITPFLGATILAELAPLERFQRTEQIIAFAGLDPSVKQTGGKSGTHGKLSKRGSRVLRTTLYLAAFGAFNRSLRPLYDTYRKRGLRHSETLCIIARKILRIAVALLKKRRMFDPKYLEVIP

SEQ ID NO: 178307 - protein, 347 aa, unidentified
MTIVEAPPGITGGVDTHLDVHVAAALDPLGRLIGSESFTTDTKGYRELLEWLRSFGDVTKVGVEGTGSYGAGLARYLRRERVHVVEVNRPNRQARRNSGKTDTLDAIEAARAALSGKAKGHAKTRDGAAEAIRVLVVAKRSARQSRVKALVQMRHLVVSAPEELHQRCKGLTVHELVNAAVGLRPERSPDAVTAATKSSLSSLARRIKSLEGELAALEEQIEALVAAAAPDLLARFGVGPDTAASLLVAAGDNPERLHSEAAWARLCGVAPKSADSGKVTGHYRLDDGGDRQANSALWRIVMVRIAHDPETAAYFERRVKEGRTKRDVIRILKRYVAREVYRYLPRG

SEQ ID NO: 178308 - protein, 454 aa, unidentified
MAKRREKRECRAVVLEPDAAGIDIGAEEIYVAVPPDRDEESVRRFSSFTCDLHALADWLEQCGVRTVAMESTGVYWIPLFQILEARGLEVYLVNAHYLKSVPGRKSDVSDCQWIQYLHSVGLLRASFRPSIDICAVRSLWRHRGSLLQMASEHILHMQKSLSQMNLQIHHVLSDITGASGQAILDAILGGERDPVQLAQLCNCRVKSPREKVAKALEGDYRPEHVFTLKQSLDGYRYYQKLIAELDREIQRLMQTLPSAVETGQQIPQRTKHSAFQRQGNDPGFDLRGQLYRIAGVDLTDIPGVSAITAQVILTEIGPDLRRFRNASAFASWLGLCPENRVSGGKVLSCKTRKVKSRAALALRLGANSLCRAKGYFGEFFRRMRAKLGTAQAITATAHKIARVLFHVLRTKEAYAETVFHQSDEHARRRAEMRLRKHAALLGFQIVPAAAPSTT

SEQ ID NO: 178309 - protein, 426 aa, unidentified
MLYVGDDWAEDHHDVEIQDEAGHRLGKARLPEGIAGVARLHELIAEQLAPGIDVGTGAGSATVAGPEQVLVGIETDRGPWVQALVAAGYRVYPINPRQVARFRERHSNAGGKSDARDAHTLADMVRTDGHQLRAIAGDSPAAAGVKILARAHQTLVWERIRHHLRLRSGLREYFPAALVAFDDLAARDALELLGKAPDPTTAARLTRAQIAAALRRARRRDVEAKTTAIAVALRTPALTQPAPVVAAFAAVTRALTAVISAVTVEIDRLAREMAAAFDQHPDAQIYRSQPGIAAVVGPRVLGEFGDDPGRYADARARKNFAGTSPITRQSGKKKTVHARYVHNARLIDALCRQAQGALSGSAGARAYYDQQRARGLGHQPALRQLANRLVGILHGCLRTRTLYDEATAWAHTARPTGDAADSVAAA

SEQ ID NO: 178310 - protein, 414 aa, unidentified
MRIIYDNVAGMDVHKRTVVATTSVKQANGSWQEDRRTFGTMTGELLGLSDWLLGKGVTHVAMESTGEYWKPIFNILEENFEVVLVNAQHLSRVPGRKTDQSDADWICELMQYGLLKASFIPPPGQRELRDLVRYRTSFVRERATLVNRVQKLLEGANIKLASVVTDIMGASGRAMLEALVGGIASNEEMAELAKGSLRGKREELAKALEGRVKDHHRFVLTELLCQIDSLDETIARFDLEIEAYCRPFEEAVVLLDTIPGVARQTAEIIISEIGIDMSRFPTADHLASWAGVAPGNNESGGKRRSGKTRKGNQHLRTALSQAANAAARTKGTYLQAQYHRLAGRRGRKRAIMAVAHSILIIAYHLIVRKEPYRELGGDYFDNIHPERTAKRLIKRLEQLGFQVSVQEFAAPTVA

SEQ ID NO: 178311 - protein, 375 aa, unidentified
MKEKVRFLGLDVHAETIAVAVAEPDGEVRSLGTIPNRAESIRKIIKKLGPAEKLRACYEAGPTGYVVYWQLAELGVQCEVVAPTLVPVKAGDRVKTDRRDAEKLARCYRSGDLTAVWVPDEGSEALRDLVRAREAAKQDQMRARHRLSKFLLRSGQRPPSGVRPWTRPYLIWVTQLRFTQIAQEATRQDYLHEVEHMRERVARLEQAIMEAVKLASPALQQVINDLQALRGIADISAVTIAAELGQVSRFDSARQLMGYCGAVPSEDSSGKRTRRGSITKTGNAHLRRIVVEAAWSYRRPPCIWYGLRRRQESISEETKEIAWKAQHRLHKRYRKLGAAGKDQRKIATAVARELLGFIWAIGTRAETIAKQPAVA

SEQ ID NO: 178312 - protein, 413 aa, unidentified
MSYEWFVGIDWGSQQHQVCVLDRDRRRVGARAVDHDGASLAQLAAWLWTLSAGQPQRVSVAIEVPRGAIVEGLLERGFHVFAINPKQLDRFRDRHSVAGAKDDRRDAFVLADSVRTDRPSFRRLQLDEPHLILLRELSRAEEMLLEAFRRSANRLREQLHRFYPQMLQLCSAADEPWLWDLLKLAPTPAHAMLLSEEQVQRVLKAHRIRRVKAPEGLACLQAPALPVAPGTADAAQAHCGFLLPCLRVLAEQLQACSQQADTLLRTMADEPGEGQSPSDVTIVQSLPGVGRKITAWLFAEAAQPLAARDYQVLRTHGGVAPVTKQSGKRRQVVMRRGCNPRLRHARYHMARVAMQREAHFSSVYAALRAKGQRHGQALRNIGDRLLRILMAMLRHRTCYDASRMRREPVVQMG

SEQ ID NO: 178313 - protein, 474 aa, unidentified
MNLLSKAASESNETNSWVSQCENPRVAAGCSRKPLGQIPDQLNERRRKRTHMVKNRMPVCHVAVCSTGRLLNLTTTMKTESKTKDKQEKRIIGVDMHPDVFSAAALQGANAAQATAQWTHDRQPVAKLETWAGKHLDADTDTVVLEASGNRFEIAARLHRIGITAVVLESAQAAKVRENYCNDDRHSAVKLARVHMSGLAKIVWQPDAQTREQREVLFTHRNAVKDCTRHRNRIRSTLNEYCVRLPKGTRLTKESGLKKALSMRKWTPVQEALLRAKFDELWAAEKRREEFGQVMLHELLARPEWKKLWRLMGIGVCTACALMALVGNINRFPTAKKLSGYIGVAPGKKQSGNDKKGQDLGIGYHGRSDLRALIMQAAQNVMMNRAWPLHRWGWRLALRKERNVAVAAVARKLCVSVWRLLKGHWSELNESAEQLKAKLYVIATQLGKKQLKEMKYENREAFVTDQLQTIFIPT

SEQ ID NO: 178314 - protein, 330 aa, unidentified
MENWNFILGVDVSKLTLDIHCAELNEHIKIANGTEGFKVFKKWVKEFRVDLQRSIIVMEYTGGYEYKLIQFCESLSIPYTRIPGLAIKNSLGITRGKNDKVDSKRISIYADEKIKSISPDKPLNKRILQLKEILSFRKRLVRTNAGLKASLKERLFMYDITAKDIIKKITEHSIKKNMADIKKLDIAMEDLVKDDPAMLKNFTIIKSIKGIGPVNALMTIAYTENFTSFSNPRTYAVYVGVIPFDHSSGTSIYGRKRVSHIANKELKQELNQAAKTAIQWDKELSAYAYRKLQSKPYPIVLNNVKFKLILRMFSLVKRGALYVENYEKAA

SEQ ID NO: 178315 - protein, 419 aa, unidentified
MSFKIFKFNFCGLDVHKTWIYACIGITDSNNRTEYKQARFSSFSKGLHQLCVWLAKYNCNDVCMESTGKYWIPVFNILEQHKIRVTLSHPKYTKPMKGNKTDRKDAKWICDLYMCGMVKPSFIPPADIRELRDLVRYRFKLTCMITGEKNRAQNCLTVSNLKLDDVFSDVFGKSSRSITEQILQHPGEKFDVSPFVDSRCKTPIEEIQAAVDGNISKEQDVKLRQCLDHIDELQKHISEVEQEILRLSDKYEAALNLIRTVPGFDKNPMTAIQVLSEIGGDMSVFLTAKHLVSWAGCCPRNDKSDRKIKSTRISCAGSYFKPVLVQIANALIKSKKHFEFTTRYKRIKTRRGHKKAIIARCRMILTAIWHILTDLKPYTSDGFLESRPVKKEKVLTTSQALNLLRQRGYLIKDEPSPVS

SEQ ID NO: 178316 - protein, 423 aa, unidentified
MAYRIAGIDVHKKMLAVVVADVEVHSEYEFERRRYGSNPEHLRSLAEWLMEQQVEEVVMESTAQYGAPVWGALERYWKPTCQEREGAGPMSGTLHLAQAQSNRGRRGRKKDFPDAEGLIKRLVANELILSFVPDAEQRLWRTITRRKYQLTRDKVRLQNQLEALLEEIHIKLSSLVSDLLGVSARRMLKALSEGETSPEALAAMADKQLRATQAQLCDALGACAELKPIYRRLLKMCLEQLQMIEQQISQLDQEMANLLSPHQDAVKRLAEVPGLGVDSAQQIIAEVGAQAATFPSAKQLASWVGACPGDEESAGVSKGHRSPKGNRQMRRILNQAANAAARSKGTIFEIVYRRLVSRLGHNQTIGAIAHRLCQLIWIILHRNVRYEERAPSVNARSRQRRTNKMIRELRNLGYRIEPVPIPA

SEQ ID NO: 178317 - protein, 409 aa, unidentified
MTAYRFYVGIDWATEAHRVVVLDADRRSLHDRTVRHEGVALETFAHWLAQDVAAGVASDVAVALEVPRGAVVDTLLARGFHVFALNPKQLDRFRDRYTVAGAKDDRRDAQVLASALATDQPAFRRLEPEDPLIVELRELSRLEDDLRQELGRLTNRLREQLHRYFPQLLQLVPAANEPWLWALLERAPTPSAAQHLPRATLRTLLTRHRIRRVDAETVRTLLRTPALAVAPGTVQAALRHLAVLLPRLRLVHQQQAECATLIDGLLERLAESQEHRDVPILRSVVGVGRVVAATMLAEASRLLAARDYHGLRAQAGVAPVTRQSGRRTLVAMRHAGNPRLRHAAYHWGQSAARHDPVSRAHYAQLRARGHSHARALRGIVDRLLRVLIAMLTAGTLYDPTRRRVVADAA

SEQ ID NO: 178318 - protein, 362 aa, unidentified
MYIGVDTHKKAHVLVAIDDQGQTDGTHTMANTPSGWAMALRWARDLDATCIWGIENSGSLGKGFAQFLLVHGEAAVHEIVPHRTAQYRKRGRSQDKTDAADALAMARLLRAETEFLPTVPRDDVSTELRLMSDHRDNLVAERTRLINQLHAQMLQIDPCYEEKSGALTSLAGVRSCRDLEVPHAEAVVRTRLLIVRQLVGQILQLAEAIETVETALKRRIQASETPLVQLCGVGTIIAARLIGELGCSPRVHSAAALAALAGIAPVAVSSGGKHGHRLNRGGNRRLNKAFHMIALSQLRCEPLARAYYAKKRAEGKTGRAALRCLKRRLVDIVYRVWCRRDARQVDAVSAQSPNPAMCRSAA

SEQ ID NO: 178319 - protein, 412 aa, unidentified
MAVFCGIDWAEEHHDVALVDGEGTLVAKRRISDDAAGFTALVQLLADAGDTEDQRIPVAIETNRGLLVACLRATGRQVFTINPMAVSRYRDRYSVSRKKSDAGDALVLANILRTDLAAHRPLPSDSPLAQAIAVLARAQQDAVWDRTTAHNELRSVLREYYPAILDAFADKRGGLLRSEARTLLAAAPTPHAAAELSTAKLRALLTRAGLQRNIDPEAHRLREILQREYLHHPQLVEEAFGRQALALLHQLDAACASAEDLAAAAAEQFDRHPDAEIITSQPGLGSLTGARILAEIGDDRTRFTDARSLKAYAGSAPVTRASGKAITVLHRRVKNQRLAATGYIWAFAALTASPGARAHYDRRKATGDRHIAAQRNLFNRLIGILHHCLQTRQRYDETTAFAATAIPTAAVA

SEQ ID NO: 178320 - protein, 302 aa, unidentified
MEHYAGIDVSLESASVCVVDATGRIVREAKVASEPDVLIAWFRGLEFRVTRIGLEAGPLSQWLYAGMRDAGLAVELLETRHVRDAFKAMPVKTDRKDARGIAQLMRLGWFRPVHCKSLPAQEVRALLTARKLLQTKNHDVEMSLRGVLRGFGLKVGPTTPRTFAARIRELVAGHPTLSTVAEALLAARSTLFEQWQQLEKRLRSLAREDHRVRLLITAPGVGAIVGLTYVSAIDDPSRFRSSKAVGAHFGLTPKKYQSGETDVTGRISKIGDGGVRTALYEAANVILTRPVKGSTLKSWGCV

SEQ ID NO: 178321 - protein, 385 aa, unidentified
MPQTPDIFSVLEYDRTLVLAIELSSKCWVVAAQVPGLPHAKAKRTVKPTVEALMAAIDGYRSRAAAAGRIVERVIATYEAGWSGFWLARWLARRGIETYVIQPSSVPVDRRARRAKSDGIDAELLLRTLLAWLRGEPRVCSMVPIPSEADEDARRSIRERTELVAERVSLVNRIGAVLATLGVQGYDPLRRDRRQRLDASCTALGNPLPTNARAKIARMLDRLELLLQQIAELDRQRDAVLEDDAPDKAGEMIQQLATLRGIGVQSATVLVREAFVRDFANGKALGSYAGLSATPYSSGSVNREQGIGKAGNRRLRTVMVELAWLWQRYQPDSANVRWYRERAGTTGARMRKVMVVALARKLLISLWRFVTQGLVPDGAVMKPAS

SEQ ID NO: 178322 - protein, 385 aa, unidentified
MRRAKRRGPGPSHLLITPDHAGNVVGIDPHKRTVTATVVDPRGGILASEHFRVSGDGHRALEAWALAFGPVARWGVEGASSWGRHTAMFLCGRGYDVRDVCANRTPRHDRARQRGKSDVLDSERIARETLAHSLLPKAFKRAGEDQGPDEQHQLLALWHNRRRSILTSRQHLLNEAEHLLCELPLKLRDELPDSKAVRPRLSALAARNRRRRYDPPTRLRLELLDRYAAQIAALDREEKTVVSELRALVRTSGSTLSELCGLETRSVAELLVEVGDPRRFTEGGFARFNGSAPLPASTAEGPGEPVRHRYNPGGNRRINAILYRMAITQLRCEPRAQAIFATARAKGHTKKEARRILKRHLSDVIYRRMIRDLVASHPAQPLLAA

SEQ ID NO: 178323 - protein, 319 aa, unidentified
MDKEFKRIFGKRVSNDLPLILKTLDPFQDQLQGLAVESTYNWYWLVDGLMDAGYQCIHLANPSAIKQYEGLKHSDDQHDSFFLAQMLILGILPQGYIYPREDRPVRDLARKRSFLVRHKTSHVLSLQSLITRCSGQRVSANEIKKFSAEDLQQLLQEEHIVLSAQANLDSIRFFTQQIRQLEKAIKNKIKLKKEFQYLMTVPGIGTILAMTIMLEVGDINRFAKVGNFASYSRCVSSQRLSDGKSKGSGNRKNGNRYLSWAFIEAAHLSRRYNERFKSYYNRKIAQANTSLATKALSNKLARICYYIMKNQVPFKEQMF

SEQ ID NO: 178324 - protein, 359 aa, unidentified
MKIVGCDFHPSWQQVAVFDPETGEIAELKLVNGDGEAERFYGALEAPALVGIEACGNSQWFIELLERLGHEVWVGDAAQIRASYVRKQKTDRRDAGHILKLLMENRFPRLWTPTAEQRDLRQLLIHRHKLVEIRTRVKNGLQHLAMNKGYQKRFHQCGVRGRAFSEKLPLEGWTSRRREDLLKLLTELDRHVGQLDEAVTGAAQQHPQARLLMTQPGVGPITSLAFVLTIGDVSRFEHSNRVASYLGLIPREHSSGGKQRLGAITKQGNRFLRQLLVEAAQSVTRLDEGFRKEYQARCHHKPKGVAKVAAARKLAVRLYWMMRQNVGYPEIVHIESSPRVPRRGDCHPVTLNERSRIQQ

SEQ ID NO: 178325 - protein, 355 aa, unidentified
MTQLTYHPKDYNAFIGLDVDKSNYSFTICNDTPQKISKRIPSNPEHLYNYIKKEFDCKKVICAYEAGPTGFHLYDYLRRKGISCFITSASSIPKAPNERVKNNRIDSGKIADHLMSGKLKPIRVPEGIYRELRHLAMIREEYSAKRKVAKQQIKALLLYENLYPLIKDAGSDWSNRYLHVLKIIPCSFAVRQRLDRLLDDLDYAHQKLLGINKTLTIFCQEHEELKTYIHYLQSIPGIGFVIAVSLLGKIGDPAYLRDQRELAAFMGLVPVEHSTGDSVQKGSITRLGDKTIRFMMIEAAWVTIRLDKQLGQFYYRIKAKHHRQYASKVAITAVARKLTQIIYRVLKDKREYIKY

SEQ ID NO: 178326 - protein, 482 aa, unidentified
MKKRNIYQNQSQELLHLFEEAGSSTKVMCIPMDYAKKDHLVMFCNGHGDILRKPFSVKNSPEGIDYLLDQVTRSIRRHGIKKKHVFFGGEDANSFAENFVSTLSSNGWLVAGVNAHDAKKQRINLQASTDRIDLMGIATMLLNCRANCSPAQSGIYRNLRTLVRHRRRLVVMLTEVKNRVHGIVDRLFPGFLNEKKSGIVPFTQSSLYLMKDRFSPKQIHRRRRVKLIEILKRFGTSKAEATADKLQQYAAQVLHTPVEYVDTLQLSLTQHVNHIRCLQECIAQLEKEIAVYLAQTQGAFLTSVQGIGIVLAAGVTAEIGDPNEQKPLNNLISYSGIIPRVKQTGGLEGKTYTGSVAKRCNRILKDYVVKSGYHIGFHGPEDLKIDYKRRDASGQHADFGMGRRYLRMAMSLMRTSQVYLPPRLRGNDYTLEERAGYYLSIWPQIRKKWKKFSAIEVAFAKDQPLGIWRQIAQELYDIKLKL

SEQ ID NO: 178327 - protein, 345 aa, unidentified
MNISTAGLDIAKQVIQIHAVDIHGKPVIRKQLKRHQVLPFFANLPPCLIGIEACGGAHDWARRLSALGHTVKLMAPQFVKPYVKANKHDVADAEAICEAVSRPSMRFVPVKNPEQQALLALHRARQGFVVARTAQGNQIRGLLAEFGLVVPKGLTALKRRIPEILEDAENGLPGAFRELLDTLANHLSELNHQVEDITQRIESIHRANPLSRRLAQIPGIGPLIATALLAAIGDIKSFANGRQLAAWLGLVPKQSSTGGKTRLLGISKRGDTYLRTLLIHGARSALKAAQHKPDAGETWLTSLAERRNPNVAAVALANKNARIAFALLAHDRDYQPGHVPVWATA

SEQ ID NO: 178328 - protein, 384 aa, unidentified
MNKHSMIFIGLDTHKEFHEVAYCEEQRGASAVHYGRIPSSKVSVKKLIRQFESKFPGATIHVVYEAGPCGYWIYRLITSLGHCCYVVAPSLIPKKPGERIKTDRCDALKLVKLLKSEDLTPIYVPEPEDEAVRDLSRAREATMKDLKEAKYQLKALLLRNNIRYEGTANWSKKHLRWLTELILPHPAQQIVLQEQLQTIEERIRRLERLDNELTHHVHQWRYYPVVKSIQAMRGVRLLVAVGVVAELGDLNRFDHPRKLMAYLGLVPSEQSSGGKRHLGAITKAGNGRARRLLIEGAHSYRYPANVSTELQLRQEGLPKDIVDIAWKAQLRLCKHYQRMSKKGKHYNLIITAIAREMAAYIWAIAKEVVLTPVNPKLRLSRVPA

SEQ ID NO: 178329 - protein, 402 aa, unidentified
MHTVGIDVSKGKSMIAVMRPGGEEVFKPFEVHHTGHDLTLLCDKLKSLGGETHVVMEATGSYHLPIARLLDHAGFYVSVVNPILIHGYGNNSVRRGKTDKKDALKIAGYGLQYWNDLPRYVPQEPARQLLKTCYRQYQEYSKTSSMFKNNLISLMDQYFPGVNDLFSSPVRSDGSLKWVDFVAVFRHCDCVRRLSERVFITRYQRWCVKHGYQFSPDKAKKIHAFALNCVPVSPDSEPVKVLIDTAVSQLRTNLVSLATVRAQMQSLASSLPEYPVVMSMFGAGPALGPQLMAEIGDVRRFHSKKALVAFAGIDAPPCQSGQVNISSRSISKRGSPALRRTLFLVMNVINMCSPAEEPVYQYMAKKRSEGKKYQVYMMASANKFLRRYYASVRAYLDALDNN

SEQ ID NO: 178330 - protein, 344 aa, unidentified
MKLFIGLDVSLAKTAVCVINEHGKIAKEAQVASDPQAIVDFTSNLEGAVAIIGLEAGPLSQWLHRGLADTGLDVVLMETRQVKGALKAMPIKTDRRDAEGIARLLHMGWFRPVHCKSVSAQEVRALLASRKAIQQGMIALELSLRGLLRNFGLKVGAISRGQFDARISELVDGNAMLQAASGPMLRARAGLRHELAGLERQVRLLAKNDAVCRLLMTMPGIGAVVALTFRSAVDDPARFSSSKKVGPWVGLTPSRNQSGERDVTGGITRAGDANLRRALCQAATVMIHRGRSTWLRSWAALVAKRRGAKRAMVALARRIGIILHRMWRDGTEFSAAVPLIARAG

SEQ ID NO: 178331 - protein, 349 aa, unidentified
MTKVSMIGFDLAKNVFQAHGVDASGNVVVRRQLRRPQVEKFMAALPPGVVIGMEACSGAHHWARVAQKLGHEARIMPAAYVKPYVKRNKNDGRDAEGVCEAMGRPTMRFVPVKSLESQAVLVLHRTRRLLVRQRTMSGNAFRSALSEFGIVAAQGLKGLRSLMELLEDPASAVPEAARLPLRVLARQWETLNADICKLETEIVRAAKTDEVARRLMAIPGLGPIGATAILAAVQDIRVFKTARDFAAWLGLTPRQFGTGGKNRSGGISKQGDRTLRTLLTVGATAHLRYERARNSKDPWLQALLARRPFKVAAVAYAAKMARIIWAMLVTGEHYCAPNRRHSGSVQAAA

SEQ ID NO: 178332 - protein, 421 aa, unidentified
MVAKRKSRRSRKVTQAALGKPRGIIQDGVRKVGPERFGIVAVDCAKARSKWMLCDFYGRLLVPPTEVEHARAQMQLAIVQFREACKKQGLKDAIVAVEITGTYRRPIQRAFRDAGCETRLVHPFASKHYRLPADGDNKTDDNDLEGIFRAAVNGFGLLEPSWDELYRHLQLLCRHRRDLVQKRAKLQCQIREYLHRCLPGYAALFPKDSLWKRPAPVLAEIWKNLDADRREKSRRITELEQEIAAQLVKTPYLLLLSHPGINVVGAADLAAEMGPIEYSAHDRAGTGRAGLFPSRYQSDKVDRADRPLSRFCNARLRAVRLRVADNLTKSNAHYRGKYLLWKAAGVDPRDIRCRIANRAARPIFQMVYGRQLFKHPSRIDRDYVLDKPGLYIRTVGQASSLSLEKTGKMPVLHQPRMNNPG

SEQ ID NO: 178333 - protein, 357 aa, unidentified
MEVFAGVDTHKETHSIVLIDRLGEVVDRFTIPANASGYAEAITRSAPHRGLVWGLEGTGSYGRSFADTLVREGQTVYEVPGTITKRHRRRLRRRGKSDPQDAHAIAEAVLREHQTLPRHLEADAEEATRLLYERRDRNVRERTAKVNRIRALALRLELELPDDLTTIKAFDALEITVDNRQTYGYADFEVVDEMRDLLRDLRLIASRIAELEERMRPFVDRLAPDLLKLRGCSLISASGLIGHTGSTQNYRSSDAFAAHAGAAPVQCSSGKYESVRLCTGGNRTLNRCLHNIANVQMRTQGHPGKIYYDRKRTEGKTHREAMRCLKRRLAPVVFRILRDAQIAREAPSCTIETLAIA

SEQ ID NO: 178334 - protein, 350 aa, unidentified
MLIIGCDYHPAFQQIAFVDSETGELQERRLQHREEAEKFYRDLAAQGRKVRVGMEASGHARWFERLLAELNFELWIGDAAEIRTKRVRKQKTDRQDAQLILKLMLQDDFPQIWVASWENRDLRQLLWHRHRMVQARTRIMNQLQAVALNEGLRCKKRLWREAGREQLEAFQLAPWASRRRQDLLELLDRLNPTITDLTQTIEQEVEKCPEAQRLRTHPGVGSLTALAFVLIIGRADRFQCGKQIASYLGLVPLEESSGNRRRLGHITKQGNSLLRFLLVEAAQVTVRSIPEWRSKYFHLAMRRGRKIAKVAMARRLAVRLYWMWRQGWNYEQLKKFGPHAGKPEHRDGVQ

SEQ ID NO: 178335 - protein, 323 aa, unidentified
MTQPIIAGVDVSKDRLDVTFYDGEKQKSHDIAYTTQAFNSLIKPYQDKQIHVVCEATGNYHLRLGKIAHDTGLKFSSVNPFIIKRYGDIWMKRAKTDRVDSRLIAQYGYEYTPENTEQVSPSRMTMQQILKTIDDLHNTESEYRNRLEAHSVNPYGIGDVEAVYTQILETVKIERKKLEDQLIGIVQTKHKEPYELLLSIPGIGTIGASVIIAFFGKFEGFDTSKQVISYIGTSPVVKQSGQYKGKTMISHMGNPYLRKKLYMCAISARRYNPHCAPLYQRLIEKGMAKKPATIAVLNKLVRQAFGVLKSNKVFEPNIGKINT

SEQ ID NO: 178336 - protein, 407 aa, unidentified
MIFVGDDWAEAHHDVCVMDEAGARLAFRRFPEGIEGVAGFHDLVGEHVSDPSQVVVGIETDRGLWVHALVAAGYQVYAVNPKSVSRYRDRHRVSGSKSDRGDAKLLADLVRTDRHNHRPVAGDSPQGEGIKVLARAHQGLIWERKRHTNRLRSALREYYPAALETFESLADRDTLAVLNKAPSPREGAHLTIPQIKATLKRGGRQRNLDRRAADIQMGLRAVHLEAPGPVTEAFAATTRSAVAVISEINLQIAQLEKTLEDSFEQHPDAAIYLSMPGLGDVLGARVLGEFGDDPERFTDVKSRRNYAATSPLTIASGKTKTVTARYVRNNHLYDAAIRWAFCSLTTSPGCRAFYDQRRANQDTHYQALRALSNRLVGILHGCLKHGTHYNENTAWAHRQPTTTNIAA

SEQ ID NO: 178337 - protein, 415 aa, unidentified
MTQSTSNTDRLLVAIDVAKRVHEVLVLWPSGKTTSFRVPNNRSEFERLTSFLLEQGLPVRAALEPTADFHRLIAHWLLRYGVEVHLVSSLACARVQEALFNSWDKHDRKDARVIMYLLSHGLTEPLHDPLSHGHMHLQELANAHHQVSLARTRCYHSLLNHYSPLFFPEFERYLHASRSDWLCRFLLAFPTPGSVATLSLDEFIKQAWDVMGRKKSKRCLLEDIYHTAQCGIALPIPQDDLAVETFQIQVRRYHELTQHIQHLQNRAEQALENDPDYHRLKTIPGIGPIISLIILAESGDLRRFPHHRQYLAFCGFNLSATQSGQFQGRSKMSKRGNARLRYAYWLAAVVAIRQRENSSRYKYDRYIAKDPANADLKRKAYSAIAAKMARVAHSLIKRGDDYRGYHETGIPGGGT

SEQ ID NO: 178338 - protein, 344 aa, unidentified
MDNHTQYLGFAGVDLAKKVMQIHFVTEDGEITDKSAKRAEFLDFFRNRGKCLIGMEACGFSQDWARKLEAMGHEVHLMSPKAVKPFVSGQKNDHNDAIGIYKAMFNGVRRVPVKSTEIRDLQTLRRIRSQVTKDKVKEINHVRGLLAEYGIVMGKSLNAFNKDISSALGILTERGDVSPLVAEELRTTVEAIKAKIERQKKLDQEIEQLARGCKNYENFLKTPGVGPFTAAMLCVLLCDPSIFANGRQFAAYIGLAPRSRGSGGKNYVTGIPSKFNCDSESRAVLVECAQAIARCKNKSLWVEEILRRKPKKVALIAIANKLARQVWAMANKGESFKQMAVLTA

SEQ ID NO: 178339 - protein, 357 aa, unidentified
MRKSIRNLSAVTTIGLDIAKNVFQVHGVDAAGAVVVVKSVRRAQLLAFFASLPSCLVGIEACGSAHHWARALIAMGHRVKLMPPAYVKPYVRRDKNDPVDAEAICEAVGRPNMRFVAVRTVENQAALMHHRTRELLAGNRTRMLNALRGHLAEIGVVAPQGAQHAYGLKRLLTAGHDDSGEIVVPDSVRTALAPLAQQIEAIDEQIEAIDDQIKAQVKGDDLARRLATIPSIGPITASAIVATVCDPSAFASGREFSASLGLTPRQNSSGGKERLGSITKMGDRYLRKLLVVGACAALVHRKGHNDALRVWADQLMARKPAAYKFKLTAVAFANKVARIVFALMTRGGEYVERPVAP

SEQ ID NO: 178340 - protein, 349 aa, unidentified
MNPITLVGIDLGKNTFHVHAQDRHGKMVLRKKLGRAALLHWLMSLPPCTVAMEACGGAHYLARQLRSHGHTPRLIAAQFVRPFVKSNKNDFIDAEAICEAASRDSMRFVTPHTETQQVLNALHRVRETLVADRVRAVNQIHAFLLEYGISLPRGDKALTTLAATVESHSQLALGMDEIVMGQLARLRGFEAELAALDRKLALLLAGDELGQRLQSIPGIGPITASLLCARMGDGSQYTSARAFAASLGLVPAQHSTGGRSTLLGISKRGDPHLRSLLVQCARSWLQRLARYQGPLADWVRALMQRRHGNTVACALANKLARIAWAVAVKRTPFRVDMASTVKTASMATA

SEQ ID NO: 178341 - protein, 354 aa, unidentified
MFVAGLDAHTRYVVVSVVNRAGERLLKPTRVRVEQPERLLALLAPYRPLEAVMETSSSWPWLAEVLSQADIGVVLAHARRLRAIAEATYKSDDIDAELLARMRLAGCIPAVYVTPAAQREWATLIRHRTALVRQRTMLVNRLHAQLHTRGLHLERGRLLTRAGRQWLRHEAGAQLSEEQRAVVRSHLRLLARLRPLIHACDRHIATVAATIPEAQRLMTIPGIGAQRALVICAEALPIARFRTPNHLASYAGLVPRSKQSGQGPVRHGGIPAGANRWLRGALVRAVVSHVQYAPDSWLTQYYLAHKARVGWPVARVAAARKLARAIHAMLRRQSSWSNDPPRGELVISHVAATG

SEQ ID NO: 178342 - protein, 366 aa, unidentified
MREQQNNRQERTIIGLDLGDRWHRVCVLGESGQVVEEGSVANNRVALSELSSRYPGALVVMEAGCHSPWVSRHLKQAGCEVIVSNPRKTRAIYQHERKSDRRDALMLARIARMEPALLYPVRHGSEEAQQDLLRIKLRDSLVRARVGLINSLRFTLKSLGYTIANPSTERFHKVIQSALPESVVQMIAPSMQAIEELSLRIKLLDWEIRTLAHTKYPETSWLEQIPGVGPITALYFVLKIGDPARFERVRDVGAFIGLCPRRDQSGENDPQLRISKRGDAYLRRLLVSSAQYILGPFAPPSALRQYGLALAAGATARAKKRAVVAVARKLAVLLLTVWKNKSPYQAFPQQREKMRIHDLERLRCIA

SEQ ID NO: 178343 - protein, 388 aa, unidentified
MRQTDDLSKSLTPFVQGNTLVAIIELSLSSWLVAGVVPGIARQPLKKLEPDEAELLRLLQRWRDEAVKSGCAIERVVVAYEAGRDGFWLARWLRAHEIEVHVIHSTSVPVSREHRRAKTDRLDTAMLLRVFMGWLRGERGHCGMVAVPTIEEEDAKRPHRERENLVGEKTRIVNRMKAALIRLGIRGFKPELRRAPLKLDGLRTPEGLPIPPNTLDEIRRDLARLAMVREQIDLIEQARLERITQGPKTGPNAMVRLVASIVGVGVETADMLVREVLSRDLRDRRAVARYAGLTGSPDESGSKRREKGLARAGNARVRRGLIQLAWRFLGFQKDSALTQWYRARTDGVKGASKTKMIVALARKLLIALWRMVTTGEVPEGVRLRPVEA

SEQ ID NO: 178344 - protein, 341 aa, unidentified
MKKFIRIGVDLAKNYFQVHALESEDGRAVTRKLKRSKMHEFFSRIEPCVIGMEACGSAHYWGRELKAMGHEVLLMPPAYTKPYVKRGKNDAVDADAICEAMSRPGMRFVPIKSPEQQATLMLHKTRELLVKQRTMSVNALRGHLSEFGIVAAKGIGRVDELLDLADSDATLPVAAKAGVNVLAQALEGLDTAINALENEIANADAQNEMVRLLDKVPGVGKLIASVIAASVPDPSVFKSGRDFAAWLGLTPRQNSSGGKQTLGSITKQGNRYIRKMLVLGATSLLNVVGKRKGALHDWIVGLLAKKPARLVTVALANKLARILWAMMKTGECFRTEMFAKA

SEQ ID NO: 178345 - protein, 423 aa, unidentified
MEVLHECVAGLDVHKDNVVACVRTVSGDKTTREHRTFDATTDGLLALLEWLTSCRCELVAMEATGVYWMPVWRILSDGAFKLIVVNAAHIKAVPGRKTDMKDSTWLADLAAFGLLKASFVPDEEQHELRALMRTRKQLVREQTRHVQRIQKTLTEANIKLDSVISDIMGRNGRRMIEAMITGVRDPRKLAALADQRLKATSKQLYDALHGRLTDHHRFLLQLHLGQWDTLDATIKGVDREVATRVFRMDTEVTADKANFSDLIDQLVTIPGVSRLSALTILSEIGTDMSRFATAGHLVAWAGMCPGQNESAGKRKRTRLRKGAPWLKTMLVQCAWAAKRKKDSYYKAQFFRLQSRRGPQKAICAVAASLLTAIYHMLKDGTIHQDLGSGYFDQRPPEIKVKRLVNQIAKLGFEVTLQPIAKAA

SEQ ID NO: 178346 - protein, 415 aa, unidentified
MMSNPLIVGVDVHRKTNTFCLMDASGQEVRPRFTLDNNRPGTQAFVQRVAELMEADGFSELQVAAEATGWYWFHFFQSLQQEALLASWPVDLHALNPRLTANFKKSYVDVDKSDLIDAFVIADRLRWGRDIGTPFEYDETYLGLRFLTRYRYHLVHNLAREKAYCTALLYLKASEYSREGKQPFADLFGAASRAVIQEFTSIEEIAAMPFAELVEFIDVKGKRRFPDPSQNARLLQQVAQDSYLLPQALQPPINLVLSLSLKQISALEHQAEQLNTAITERLAAIPNTLQTIPGFGPIFTAGILAELGNPQRFNFDQAKVAKFAGFKWRKTASADFTADETRMTRTGNPYLRYYFCEAAFSVQRCDREYGAYFQRKLIEVRKHAHKRATVLTARKLVRLVMRLLATNQPYQSRRL

SEQ ID NO: 178347 - protein, 359 aa, unidentified
MKIVGCDLHTRYQQIAMLDKESGELVERRLEHASGEARAFYAGLEGEVRVGIEATGHTRWFERMLAELGHELWIGDAAEIRASMVRKQKTDARDAAHLLDLLWSGRFPRIWRPTLAERDLRQLVWHRQKLVWMRNAVGNQLHALAMGEGVCRKKKLFSQKGRAELESLALGPWASHRRQELLAMLDRLDDSLQQLDQAVAQPAEQNAEAVRLMTHPGVGPVTSLAFVLTIGPVGRFPRSKQVVSYLGLNPREHSSGGRQRLGAISKQGNPMMRSLLVEAGHTAARLDAELRQDYQRLKLRRGSGVAKVAMARKLAVRMYWMLRNQAGYAQSGSHARQPEGHPGGPVRHRWPDWAPCLPE

SEQ ID NO: 178348 - protein, 411 aa, unidentified
MPPPEVWIGLDWGDAQHAFALQDRAGHTQEGTLTQSAESLHGWLRELQKRYGARPVVLAIEASRGPVIHALVQYPWLTVYPINPVTSARYRKAFTPSGAADDLPDARLLLELVRDHAAKLRPLQPQDPQTLKLTGLVETRRDLVDRKKQVLNQLCGLIKSYYPQALKLVGNLNTPMAWAFLDRWPDLPSLKAAKPGVIKAFYYTHNLRRPELLKKRLEFIGQAEALTTEEARVSVAVLHLRALLDQARALHKHIALLEKEIKTGFAAHPEAGLFRNLPGAGQHLAPRLCVAFGTQRDLYPEPASLQKLAGVAPVREKSGHSLWTHWRWLAPKFQRQTFVEWAGQTVMYSAWAKHYYERMRAKGKDHHKILRALAFKWIRVLWKCWQTRVPYAEERYLKQLRHRKSPNALAA

SEQ ID NO: 178349 - protein, 344 aa, unidentified
MYFIGVDHHKQASVMTVLDEDGRELKNGRVLNLREKVERFLEGYHPFTAVLEAGRSSYVMADLLRELGGEVKMANALQVKAIAHARIKTDKRDSRTLAQLLRADLIPEIYQRGAGNRRAQRVIRMRAYWVTKQTELKNKIRALLAQQKEEIRLEVGKREDGLFLGKGVEFLTKLPLVDPDKMVLDDLVQGYREAQAHIKRSDGLVRILYGEIEEAAQIDTVPGFAATLSVLVAVEIADVKRFPTVADLHSYAGVIPSTYASGERTYHGRITKQGSAWLRWAALEAVYPAIKKDLGLRALYNRLTRRKGPNVAKIAVARRLLTIIFRLLKEKREYIPDMMRQSAA

SEQ ID NO: 178350 - protein, 318 aa, unidentified
MRIKERDLQARQQTLAMLDTGTGEVVNRTLPHEGESVREFYSTLPGPVRVGIEATGSMKWFLQLMQELGIDCQVGHPATIRAAEPRRQKHDQRDAELLLALLVENRFPSIWQPSQELLDLRGLLLHRHQWVRLRTRIQNALQAIALANGLRRGSSLWSESGQRAIASLPLATHTAQRRSELQAMYAGFEAEIEQLKQQVLQQAGPRPTAGLLMTHPGVGPITALATDVFLGDPKRFSNGKALASYIGIIPREHSSGGRQRLGGLSKQGNPLLRLLWCEAAAHAVRRDPELRRFYRRKLVQKGLGKARVAAARKLGPGN

SEQ ID NO: 178351 - protein, 433 aa, unidentified
MLKINYMSTLFVGIDVSSKTNSVYAMDFEENKYLSTSFGNNQPGADELVNRIVACMQKHKHLDTLLIVLESTSVYSVHISNFLASSEVLMPYKPYVFCVNPKATANYRKSYIGMEKTDPTDAYLIADFGRVGRTKKLEPWRGGLFIALKRLTRHRMHLSECITREKTYMVSNLYLKFSELQLLEGDDKPFGNLYGATSSAILTEFLSPQEIINMPEEDLLAFLAQKSRNRISDLSKTSELLRKAARDSYRLDKCMYEPLSISLASSFNCIQAYQKEIRLIEQAIDKCIKGMNTNALLILQSIPGIGPVWASGILSEIGDITAFHSSDALAKYAGLYWPKGDSGDFISEDNQMSKAGNPYLRYYLGEAANSVRKHIPEYADFYARKYAEVCKHQHKRALALTSRKLVRLVFGLLAKNQLYTGEKLDTEYNTWSN

SEQ ID NO: 178352 - protein, 338 aa, unidentified
MEYGAIDLHARKTLIRIVDGDGAVILDRTITTTREGFAQVFHGRGRMRVLLETGTESEWVAQAIEGEGHEVVVADPNYALMYGVTVRAVKTDRRDVAALAEACRLGIYRAAHRVSAAQRQRRRQLRVREQLIRMRTQAINLLRAQLRQEGYRLPSGSSATTAARCRGLALAAGLQADVTPVLALLDALAPLIRSCDAAAETQALADPVVRRLMTAPGVGPIVGLTYRAVIDDVTRFPDASASTAFLGLVPREDSSGTRRRKGAITKRGPTALRVLLIQAAWTIWRQRHGRAALHAWVERLAARRGRRIAVVALARRLARILYAMWRDGCAYRPVPQPA

SEQ ID NO: 178353 - protein, 345 aa, unidentified
MDQVIRIGMDTSKHVFQLHGVNAAEAPVLRKKLRRKEMVAFFEKLAPTVIAIEACGASHHLARLLQSFGHTVKLIAPQLVKPYVKRGKNDAADAEALCEAMSRPTMRFVPVKTAEQQAALMLVGVRDRLIRVRTQLSNAIRGYAAEFGLTAAKGVAHLVPLLERIQADESLPALARDLFAIQAKEYAQLQEQIAEVDAKLTVWHRADECSRRLAKIPSVGPIGAVMLTMKTPDPTLFRSGRQFAAWIGLTPKDHSTAGKTRLGVITRAGDEGLRSVLIVGATSVIQQAQRSGKMSPWLAALLKRKSAKLTAVALANKTARVAWKMMVTGETYDAKFVAVDKAVTG

SEQ ID NO: 178354 - protein, 395 aa, unidentified
MFIVGIDIAKRSHEAIIIAEDGQVVRKAFSFRNNCTGYNLLLEQVRKLTLVKSQIVFAMESTAHYWLALYARLLKDGYTVMVLNPIQSHSLRELYIRKTKTDARDSLIIADLVRFGRCKASNVPQDKILALRELCRSRAYLVDMAADLKRKLIALLDRIFPEYESLFDSVFSKASIAVLSKYSTPQKVKNANLRKLTDLLMESSNRHFGEWKAHQLKEAACSSFGIDDSGGVYSTLLGMFLEQILSLTAQADSLEKQISVFFQEFNNPLTSIPGVGTVLAATILSEIGDITRFSSADKLLAYAGLDPSVKQSGEFKSNQNRMSKRGSPYLRRAIWLASTVAVHRDPMFQTYYEKKISEGLHYMNVIGHVSRKMTAVIFAVLRDGQPYQPILQSAG

SEQ ID NO: 178355 - protein, 360 aa, unidentified
MRTITIGVDLAKQVFSVCLVDAAGRVRERRDLRREAFIRWLPSVPAGTTVAMEACSGAHHWARRCQDYGLIPRLMAAQFVAPFRKSRATKNDRNDAEAIATAARQGNMRFVPVKSVDQQARLSWHRVREGYKTEALTTSNRLRGLLAEFGVVVAQSDAALRRTLADLDALALPCSLVTLLRDADSQWKQLQARIIEADRQIQTHAKADEACTRLRAIIGVGPITADAVVATIGSAQSFANGRQFAAWLGLVPMQHSSGGHTRLGRISCRGDGYLRTLLIQGARSTLQRAKAVSWEKATAEQRWIQDLERRLPFGKVLVAIANKHARQLWAMLARGEHYDAEAWLKHPMVQRPASRREATP

SEQ ID NO: 178356 - protein, 402 aa, unidentified
MNAVGIDVSKGKSMVTILRPFGEIVSSPFEIKHTSSDIHSLIKLIHSIEGESRVVMEHTGRYYEALAHQLSAADLFVSAVNPKLVKDFNNDSLRKIKSDKADSVKIARYALDKWQSLEPYSITDELRAQLKVMNRQFHFYVKQKTAMKNNLIGLIDQTYPNANTYFNSPTRSDGSQKWVDFVSTYWHVDCIRKMSLNAFVEHYQNWCKRKKYAFNKSKAEEIYTKTKELVPVFPKNEITKHIIRQAIDQLNSTSVTVETIRTLMNETASKLPEYSIVMQFKGIGPSLGPQLMAEIGDVTRFTHKGALTAFAGVDPGVNESGSYAQKSVPTSKRGSSHLRKTLFQVMDVLIKTMPQDDPVYQFTDRKRTQGKPYYVYMTAGANKFLRIYYGRVKEYLSSLPES

SEQ ID NO: 178357 - protein, 430 aa, unidentified
MQCPAVPRAGKEAVYGEVRMARNNAGEPPAAGPVIAGVDTHKDAHVLCLLDSLGRRLSSASFPADADGYDALARAIGDPGDCMVVGVEGTASYGAGLARRLAELGYNVVEVLRPKRDRLMVGADKNDPEDAERAARKAASGDGCSVPKAQDGWVEALRQDYVARRQLVKTTTACVDCAKSLLTTAPEPVRERFRHESDAAGLMEALACAEPAGTAVEAAALGSLRSLALAWREARRQAEGCESRMRSLIEANAPALLGVECVGTISAAALAVTAGDNPDRMGGEASFAAVCGVSPVEASSGKVKRHRLNRGGNRQANWALWQIVKARMASDERTKAYVERRTREGKSKREIMRCLKRYVAREVYKVLLDPNPDGAPPHGDGLRRMRRARRVTQREVAEALGVSVTTIANLEHGRARSTRLESGYYAFLTS

SEQ ID NO: 178358 - protein, 423 aa, unidentified
MEIIYKRVAGLDVHKEMIVACVRLTGKGKVKRECRTFGTTTAALVELLAWLRESGCTHVAMEATGVYWKPVWNILSEGDFELIVANAAHIKNVPGRKTDVNDATWIADLLACGLIKASFVPDEGFQELRSLTRTRKQLTSEQTRHVQRIQKTLEEANIKLDSVISDILGVSGRRMIEAMIEGVRNPARLAALADRRLKASPKALYDALHGRLTDHHRFILQLHLDQYDALAATLGRIDQKIEEALDRIDEEVAPGRPTFRALSGLLHTIPGVADRSGTTILAEIGMDMSRFFTDGHLLAWAGLCPGQNESAGKRKSSRMRKGAPWLKTTLVQCAWSAVRKKDSYYRAQFHRLRAKHGSKKAICAVAASILKAIYHMIKNGVEHHDLGPNHFDRRPSDIKAKRLVAQLGNLGFQVQLQPLAQAA

SEQ ID NO: 178359 - protein, 422 aa, unidentified
MEPIIDEDKNEVYYERCAGIDVHKKLLVVCLRIGRRQEVREFGTLTQDIREIAEWLKDNGCQMAAMESTGPYWKPLYNIFEQEDLPVMVCNAYHIKNVPGRKTDVNDAKWIASCLSKGLLHPSYVPDRQQRELRDMTRFRKSQIEERARNINRLQKFLEGANIKLGSWLSDVEGKSATELLELVIGRPDFTVEDVAERMHRNLKSSAEELFKSLEGYITPTQREFFTHIMDVIRVQTTQIEKTDAMIQKSLSDNYKAAVEALDVIPGIGKVSAEQIVAEVGIDMSRFRGPDQLSKWAGVCPGNNSSAGKRKSGRTPPGNKTLKSTLAQSAKSARKKKDSFFFAQYNRLVTHRGKNRASMAVAHSMLIAIYFVLSGNDFKDLGADYYNQFNREKKINSHLKQLEKLGFTVPDDVKATIMQKSA

SEQ ID NO: 178360 - protein, 378 aa, unidentified
MEWTPPLLEIVALSATGRATSVSCQSGDLTATSGTEVEMNATTYGLDVAKRVFQMYWVDGDTGQISNRRFGRDDLVQYLSRRPPGRVALEACGSAHWWARKIRALGHDVVLLHAKFIRPFVQTNKTDAADARAIWTAVHQPGMRSVAAKTEDQQAMLGLHRIRSLLVKFRTMQVNQLRGLLYEFGASFRAGRVAGLAEIRSRMTELEEMLPGALMCCLQDQLKRIDALQTEIDQLEGRIAAWQREDAACRAVADVPGIGRLTATALVATMGDAGAFKSGREFAAFLGLVPRQSGTGGKVRLGPISKRGDSYLRTLLIHGARSVLYHTKAPTAWVSAIQARRPANVAAVAVASKMARTAWAILARGQAYQRGHMSVRPA

SEQ ID NO: 178361 - protein, 341 aa, unidentified
MEDTIYDHYIAIDWSIVNMAIARMTAKSNKITVIDVPASVTELQAYLKSLSGKKIMAIEETTTSQWLYTELKDHVDKLIICDPHRNRLLSEGPATDKIDASKLVRLLRAGLMKEVYHSGERFLELRKLVSGYDDLVKAGVRLKNQRYSLLRACGLTGEEKSGKVQLTIASDKLVLESLERQIAVYEKEKQGYENEFKTLAKKHPEIRHQKSLPGIGNIGAVKLVARIVCPHRFVDAGHYLSFSGLVKLVMISGNVVYGRKSSRYCRDVKSVYKTGVMAAIGGNNEINDYYEYLIREKGHADYNARHKACRRLAILSYGVFKSGKKYQPARRKHVNDKSQGN

SEQ ID NO: 178362 - protein, 337 aa, unidentified
MNVTLIGIDLAKSVFQVCAVNQAGKPVFNRQVKRQRLLALLLEYPKAIVAMEACSGSNYWGRTLQRHGMDVRLIPPQHVKPFVKGNKNDRNDAFAITEAAQRPHLRCVLPRTLTQTDLIQAHRVRERQVNQRTALTNQIRGLLNEYGIVLPQGRRRLQSALPGLLENADNELTPEARVLLEELLIEWQQRDAAINRLDRRIDRQAKGSDAAQRLMTVKGIAEKTATALVAHAGDGRAYRNGRELAANLGLVPREHSSGGKQNLGGLTRRGNTYLRRMLIQGAWSVLRNAHRNHDRLSCWARQVAERRGKHKAVGAIANKMARISWALMYYQQSYRSA

SEQ ID NO: 178363 - protein, 412 aa, unidentified
MKDLLEISCGLDVHKEKIVACILTGPLGKPTRSEIREFSTLIPDMIALRNWIVSKNCHHVAMESTGIYWMPIYEILEDAFYGDITLLVVNARHMKNVPGKKTDMRDSEWISTLLRAGLLNGSFIPEKRIREFRDLNRYRKSVIRDITSQKNRIEKFLQSSGFRLSSFISDIFGTSGRNIILHLIEHGQIDKTALDSCLKTKTRNRIDEILMSVNGTLSEHQKAFLRILMTHYDSLKKHLAEIETSLEEDMAPFALQVEQLNSIYGISTTASCAIIAEIGIDMKPFKTAEHICSWAGLCPGNNESAGKRKSTSVTKGNPYIKSMLCEIAWVIAGKRNTYLSAWYWRIKQKKGAKKAIVALARKLLVIIYTMLKQGTLFDESCFETRRKHCEQKQLSRYIRELEKHGYHVEAQS

SEQ ID NO: 178364 - protein, 413 aa, unidentified
MRLFAGDDWAEDHHDIELMDVTGRRLAKARLPEGVAGIARLHAMIGEQLGEDADEDDAGQVAVGIETERGPWVQALIAAGYTVYAINPLQASRYRERHGVSGAKSDAGDAHVLADMVRTDSHQLRAVAGDTALAAAVKVVTRTHKTLIWERTRHTQRLRHALRDYFPAALEAFEDLDAADTLELLARAADPSSAARLTTAQISAALKRARRRDIAGKAERIQAVLRAGHLGQPAVVAAAYAASARALIAVLVTLNEQVKVLQGQVEAYFGQHPDAEIITSQPGLGPILGARVLAESGDDPGRYASAKARKNYAGTSPITRASGKKKVVLARYVHNDRLIDALMGQAFAALNASPGARAYYDCQRARGSGHNPALRQLASRLVGILHGCLKTRTLYDESTAWPQQAAAAEQTAA

SEQ ID NO: 178365 - protein, 370 aa, unidentified
MLDTTTFVGLDVHARSIKAVSLDVMTGEVRCATFGYDAGAVAEWVRSVDPKARCVYESGVTGFDLQKRLSGLGVDCVVGAVSKMIKPSADRRRKNDRNDAEFLARMLSVGNVVEVWVPDDECEAARDLTRALEDARDDLSRSKQRLSKFLLRHGLVFDERTPTGRRKGNWTRAHWSWIESIRFAEGADNDVLAYYVDAVRRAAEEKARLEGLVEAEARKPRWRKRVDSLRCLKGVDTATAADLVFEAGEFSRFRNARSFAAWVGLTPSEHSSGESDRRGAITKAGNKHLRKTLVEAAWHYLTCSARPKDLARGQAPDRVARRHAAKGVRRLVERREALLARGVHGNKANVATARELACWVWAVGLMAEEA

SEQ ID NO: 178366 - protein, 333 aa, unidentified
MIKINLGADISKETIDFFCDANSELFQLKNNAKGLDKLLMWADQHQYPLNQIAIAFEHTGHYGNVLVDFCVQHEITFYHVPALEIKKSLGITRGKNDQIDAKRICAYLKEKGYKLTPTKPVNDAIERLKHLQAQRALFVRNSASIKNVLKDQLEVLVISKEDFLVRTNMQMIQQFEKSIKEIDDEIQKMVEADKEIKKNYNNIISITGIGKVIAIDTIIATHNFTKFNNWRQYASYCGCAPFEYSSGKFIGKPRISKLANKELKAHLNSGALSAIKFDNECKMYFERKLKEGKTKKCITNVIRCKLIARMYAVVKQNRPFEKNYAHSLEGKVS

SEQ ID NO: 178367 - protein, 352 aa, unidentified
MAATAQSAIAVIGIDIGKNSFHVVGLDGRGAVVLRQKWSRGQVEARFANMSPCLIGMEACVGAHHLSRKLKALGHDARLMPARYVRPYSKGQKNDFRDAEAIAEAVQRPTMKFVATKTADQLDLQALHRVRERLVSQRTAIINQIRAFLLERGIAVRQGQRFLRVELPRILATPPDVLSPRMVGVIEGLASDWHRLDERIEGSSSEIEELAKRDTGCERLMSVPGIGPIISSAMVAAIGTGDSFSKGRDFAAWLGLVPRQISTGDRTILGKISKRGNRYLRVLFVQAAWVVLVKVKPNRWEGHGLKPWIEAAKRRLHHNVLAIALANKLARIAWSVLAHGRAFEANKLQAAA

SEQ ID NO: 178368 - protein, 458 aa, unidentified
MKSKKATEKITVELSAGVNPHAAGIDIGATEIYVAVREDAEGKPIRSFTSFTDDLHRIGDWLLACGVTTVAMESTGVYWIPLYQVLESKGLEVYLVNAREVKNVPGRKTDVKDCQWLLTLHTHGLLRGSFHPEESIKALRAIHRHRDQLVQSGACFIQHIEKALSQMNIQIHHVLSDITGVSGQAILDAIVSGQRDPKILATLRDPRVRADQKTVERSLTGDWKSEHLFALKQALEAYRFFQGKIIACDEELRRLMNQLESRTEPTQPLAPTTGKKKWGPKSGGALTELNWETQLHRIFGVNLLEVPGISINTALVFLSEVGADLSSFASEHHFGSWLRLAPHNKISGGKILSSQTCRNKSKLGLALRMAAQSLYHSKSELGDVFRRLKARLGAPKAITAMAYRLARILFVMISKKQNYDANHSTKNEMKRLLKKQNWLQKQLAEVSISLTQYQQVAN

SEQ ID NO: 178369 - protein, 317 aa, unidentified
MNTIGIDISKEWVDCLCSARRLAGQFSNTPTGWKQLIEWIEGDPLVVLEASGPYYLGLASYLYEQGIQVSVVNPLVIRRYGQMKLTRTKTDAKDAALLAQYGIDQQPARWRPPSKARQGLKKLMSMREGLLRQKAILIGQAEAFSQNKDVEPMVNELNRKMQIELEDNITRIDKRMEALAAEHYEEVMEALLTIPGIGWKTAIELVTVTDGFARFDSARTLASYVGICPRIWESGTSVRGRGSISKLGCPQLRKLLYMCSWSAKHSNPACKKMYDRLKKRGKPEKVIKVAIAHKLLRQAFAVGSRCEPFEEKKALAA

SEQ ID NO: 178370 - protein, 316 aa, unidentified
MQTFPNIGVDVAKDAVVVACAAQSFSTHSVTNQRTPLLAWLKSLPTGSRIGLESTGGYHELLADLAHAQGHVVFLLNPLDTKHYARAMGNRAKTDRVDAELIARLIAQEHTRLRPYTPPTADQRKLDRMIRRRANIVRIKSSLTLTMSNLSGFTAELKAVSNKLDALIAKIDSTMTAIAAHSPQHKEAQQRLQTIAGVGPVVGMALTNTLERVPFRNADAFVAFTGFDPRANDSGNKIGRRRLSKRGPAELRRLLFNAAMAAAKSKAWKPIYEHYRAHGWSTTAALVIIARKIARAAWSIHHYHSTFDPERITKNA

SEQ ID NO: 178371 - protein, 334 aa, unidentified
MNFKNFVGIDVSKGTFDIALLRESAANSIVSAQYTNDFHGLVKLEEFVKKQGLNMDETLFCMEHTGIYCRLLSHYLVENKYHVWLEMPVQIIRSLGIQRGKNDRIDAVRIAQYACLKKDKAVLWQPPREIVNQINDMLTLRDRLIESRKSLKQPIKEFVDAGFKDTAKLIENMCCNTLKALDKEIEQIEKELDKIIKKDSNLKKLFKLATSVPGIGKITALTLLYFTNEFKLYTNANQLACYCGIAPFERTSGTSVKGKSRVSSFANKRLKKLLHMVAMSTISCDKQLSVYYQRKVNEGKNKMLVINAIRNKVLHRLCSVIKRGTPYQVEYQIA

SEQ ID NO: 178372 - protein, 332 aa, unidentified
MYLGIDVHKRYAQVAVMDEAGTIVEEVRVENANLDELAQRYAGAQAVLEATSNYYHIHDTLSEHLDVTVAHPKKINQIADTDKKTDRVDAKELARMLRLNSMPESYVPTEEVREARARVRGRQTLVENRTKYANKVHGLLSDHGITEDVKPLTVEGRESLREFSIPTPFDTLLESYLDLIESLTEEIQKLDETIEERAGSLKETQLLMTIPGVSYYTALTIYAELGGIDRFDEDKEVVSYVGLNPVIRESGDSRIEGSISKRGSGRVRWLLVQAANTAVHTSNDEYLSRFYDRLASRKNSQKAIVAAARKMLVSIYHMLDRGEAYDPPGVTA

SEQ ID NO: 178373 - protein, 373 aa, unidentified
MSTRVLGWDIHRKFSQVSVRELADDGEDRVIERRRLEHGDRDEMRRYLARQPAKTPVALEGAFGWPWIADLLEECGLEPHLGHPPAIKVLNRHQPKSDRRDSDRLGELYLMGIFPESYLAPVEVRQFRERVRYRIALSRLRQGVKNRIQAVLHRFGILHPFSDLFGEGGQRFLDELQLPEASRAVLVGYRQVLDELDRQIAEVENWMREHLPADEITRLLTSLPGIGLILAHVLQAEIGQLERFPTVRHLASYAGLAPVSDDSADRHGARHCSRACNHTLRWALIEAANVISSGRARAPRLCQLYQRLSHGGRCDKNKAKVAVAHELAKLVHVVWKKRTAYQENPPGRPGSTPSTRSKKTRANQRPLRVGQPG

SEQ ID NO: 178374 - protein, 323 aa, unidentified
MSKHSMVCAGIDTGKHKLDVALNGCAKQLQIDNTADGHEALSVWLKRHKVKRLGIEASGGYEQEVVARLRHDGFVVVVFQPAQVRAYAKFLLQRAKNDKIDAALIAACTAATKKIHAPPDPRLAPLAERMTLIDQLTELIAGYKNYREGSRDPRVRQFWKEQIAHSNKLLRTELKELVAAIRQHQDLAERLDLIESVDGIGLKTAVAILVRMPEIGRLTREQAASLAGLAPFDDESGTHVGIRHIAGGRERLRGSIYKASLSAAFHWNPQLIALYQRLIAAGKLHKVALVACARKLLIFVNTVVERGTPWVSNRSLSAVRTAA

SEQ ID NO: 178375 - protein, 342 aa, unidentified
MKDTMIGVDLAKSVFQLHGASMTGQLRFRKKLTRALLLRFMAEQLPAVVVMEACGSASYWARELIKLGHEVRLIAPQYVRPFLKRQKNDAADAEAIVVAAQRPEMRFVEPKTEDQQARAALFRGRERLVHQRTELVNALRGLLYEFGHVVPQGIGHLKRIGGILEEPACDLPAIVRDECRDLMAQIAEKTSRIEARTKAAKRFAEASDAARRLQTMPGVGPLTALAVEAFAPDMATFRRGRDFSAWLGLVPRQHSSGGKERLGRVSKAGQADIRRLLIVGAMSRLNWLGRRSIPEGSWLARMLARKPRMLVAIALANRMARAIWAMSTKKESYRDPAWTAAV

SEQ ID NO: 178376 - protein, 334 aa, unidentified
MEKVTTVGIDLAKAVFSLHGVDGAGRVVFRRTVRRDQLPEVVAGLSPCLIGMEACSGAHEWGRRFQEFGHTVRLMAPKFVVPYRKSGKNDGNDAEAICEAVTRPSMRFVPVKSAEQQALLAMHRVRQGFVVERTATINRLRGLLTEFGMVLPLRSVTVRRQAAQAAEGLPELARRAIGDLLEQLRVLDERIGGYDREIETQAKLCEPAQRLMKIRGIGPTTALAIVATVGNAREFKNGRQFAAWIGLVPGQYSTGGKTRLGHISKRGDAYLRNLLVQGARSVLHTAAAHRDHVSRWALELQPRRGYYRTLVAIANKNARIAWALLAKNETLRAA

SEQ ID NO: 178377 - protein, 390 aa, unidentified
MIYIGIDVAKDKHDCFIMGSCGEVLLDVFEISNNVDGFNDLLEKIQTVDESFNNAKVGLEATGHYSYNLLGFLVNKGLTTFVINPLHTNLFRKSLSLRKTKTDKVDARTIAALLASGVDLKSYTDIAYHNEELKSLARYRFDKVKERAKLRQSVSRLVSILFPELEKLVPTLHITSVYALLSEFPGAQNIADAHLTRLKNLLYSASKGRYGDDTAALFREEARRSIGSKMPAKSLELQHTIRLIGELDLAIDEIESKIKTIMDEMNSPILTIPGIGYRMAAMILAEIGDISRFDSPDKILAYAGLSPSTYQSGQLTSSYSRMEKRGSRYLRYALFNATKFVCHWEPSFAAYLAKKRAEGKHYNVAISHAAKKLVRLIFALENSRQPFASA

SEQ ID NO: 178378 - protein, 382 aa, unidentified
MEILYHCCAGLDVHKKTVVACIRRLGPDKQAEDLIRTFGTMTADLLELADWLAAHAVVHVAMESTGVYWKPVFHLLEDRFQILLVNAQHIKQVPGRKTDVKDCQWIAQLLQLGLLRASFVPPRPIRELRDLTRQRSQLVGERASVSNRIQKVLEDANIKLASVASDVLGVSGRAMIAALIGGETEPDRLADLARRRLRGKIPQLRQALKGRVTEHHRFMLRTLMDHVRHLDDLIERLDQRIEEAMSPFAKAVERLVTIPGVNRRAAEVIVAEIGTDMTKFPSAGHLSSWAGMCSGNHQSAGKRQSGRTTPGDRWLRQVLVQTAWAASHTKKTLLSATYHRWAKRMGKKRALVALGHKILVLIYELLKDQTTYQERLVPDQAA

SEQ ID NO: 178379 - protein, 347 aa, unidentified
MNILKQTVGIDVSMDSFEARFGTIDTNQEQSISKSQKFINDLMGFKKFLKWALNNKLSDKLPLTFVMEVTGVYHENLACFLHEKGYQVVIVLPNKIKNYGKSLETKSKTDPIDAMTITRFALERKLTAWNPPEPFIRAIKTLSREYLSLKVMMTDIKNKIHAEESAHYPDKDTIKRKRRLLKELQRQIDEILGQIKILFQSKPELNKKINKVATIKGIGEITVIIILAETNCFEHVTNSNQLTSYAGLDVVLNESGKKKGKTTISKRGNKFIRRALFMPAMSACKYNNKMKETFARLVSKGKNKKAALIAIARKLLVLIYTLWKNDAVFIQDYKQTKPFRLKPALGS

SEQ ID NO: 178380 - protein, 332 aa, unidentified
MQMLAIDLAKQSFHVHGVDADGQVISRRVGRTKLPALVASLAPKVIAMEACATAHHWARAFLAAGHEVRLINPRFVKPFVRGSKNDAVDAEAIFDAASRPTMRFVPVKSTEQQDLQSLHRVRDRLVSQRTNLINHTRGLLAEYGLVYPKGAARFPARVRAELSEAELSPMARATFAALLDELDALETRLERLDDQLRAICREDVVCRRLMTVPGVGPVVATALKASVDDARQFRSGRELAAWIGLVPRQYSTGGKPQLGGVGRRANHYLRRQLVHGARAVALRLATKTDPRSRWFQAVIDRRGFNKGIVVMANKTARIAWAILRREEDYARA

SEQ ID NO: 178381 - protein, 358 aa, unidentified
MKKIVVGIDISKEKIDASAIDVTGSHPGVVRLDYRVFDNRPMGFRRMLVWVRHLKEGACLDEVLFCCETTGGYDRSLCDYLYAKGLSIWREGALQIKRSMGVRKCKDDKADSLMIAEYAMRHMDKAVIYETPSQSVRELKSLLLYRHKLVQEKTEKTVRMKELEATSFRSKSVSFILRDARKSIKSIEKSIKECERQILDLYKADGDLKKSYDHLTSVSGIGIVNATAFIAYSNNFTGITTANKLASYWGCASFRERSGTSLDRKAYVRCYSNSLLKAYLTQAAECTVKEHGIYHGYFLRLKSAGKPYRVIINNVRNKLIHLGFSLVTNDMDYESDHESLRAKRKGEKGKSFMLDNIN

SEQ ID NO: 178382 - protein, 428 aa, unidentified
MKHVIAFDVSMGKSHMVIYNAQKQCVFESEIKHTKPDFKKLQEKIHKLTDENGESPEIVFESTGIYSRQLERFMQDNQYTYCLLNPLEAKLQCDSLRIHKTDRSDAHRLALTHFTVTRRVSNGTNHLFHQLQSLSRLYSELDSELSIIRGRMHKVIQLTFPELERMFTNKSDLFLNFVPLFPHPDCILGLSKTIIKNRIRANTNKKISNITAEKKAIQILEIAKTSYPAVSQNDVLCDQLKLYARRYQELLHQKECCSNKMVYIAKQRVEYDIILSVPGIGPNTAVRLMAEIGDITRFNNNKQLHAFAGIDIRRFQSGKTFFKDKINKRGNKHLRKLLFLLIQNMIKQRRYGQNHIVEYYDKLKTQPYNKCHKVASIACVNQFLKLLFHLITHDIHYDYRLTAYYHSFIHPISPLVKKRVYMRGLWYA

SEQ ID NO: 178383 - protein, 413 aa, unidentified
MSSDLLLKEISSDRLIVAIDPGKVSNRVWLTSGERGLIGEPVSLPVLRDGVDELARLIAGSGVAGARVIGLEATGALHRAWAAEVQRRWPGSLRLFAPSETQAARSQLGSRRFKTDDRDCAALVWLLRQGAGRPGSPSAVEALLGAVRHRRQLVDARRVLQQRLHDQLNALCPGLSAPAGHGRVLELENASGRAVLGCAVAFAGRAPSVRSLLARSPGRLTEANARFWVERWKRLLAPPADAELRADRLRRDLERWLGLREDITALEHQLAELLAGSDGQILTTLDGVAVVRAAAFAAHTLPIERWPTPEHLYSATGLAPASYQSASLTRRGRISRQGLAEHRDALMGIAWGLSQHSPAFRQRDRELRARGFRPIQARVALARHACRLAWRLMISQQPYDDRRYDRARHRRGR

SEQ ID NO: 178384 - protein, 342 aa, unidentified
MKSATTIGIDLAKNSFSVYGVDDKGKTVLSRTLTRAGVVRFFANLPSCLVGMEACASSDYWARTIESLGHEVRRIHPQYVKAYLLGAKNDTNDAAAICEAVQRPNMRFVPHKSPEQIDIQCIHRTRQGYIKSRTALVNQARGLLAEYGIIIRQGISAIRNQLPLIIADEENALSGLMRRNIASLYESICFFDSQILEQDKLLKTVAKENEACQQLMQVPGIGIMTATILLTVAGVASNFKNGREFAAFLGLVPRQNSTGGKTRLLSISKRGDCYIRTLFIHGARSAITRILAGQTPKYRPNPWVIELIARRGRNKACVAMANKTARIAWSMLAQGTEYRHAA

SEQ ID NO: 178385 - protein, 329 aa, unidentified
MAIAPKVVGVDVSKATLDVCYAVEQRLTHAQVRNASAGFEQLVRICGVDCCYVLEATGSYYLALAYYLVEQGAQVAVLNPLVVRRFIQMHLGKGKSDRKDAQWLLRYGQQQALPLWQPDNAVLVECRQLEQVSEQLIRQKTMVLNSLEALQQHPVASTLARQHLHQMLHQLETQIKALETEMLTLLEQQYAREMPLLCSIPGIGRKTAGALLLFAKGFTQVDNYRQLIAKAGLCPREYSSGTSVRGRTRITRMGGGLIRRLLFMCSFSAKKANTSCKALYDRLLAKGKNSKLALIAVCNKLLKQACAIVKSGVPYQADFAGKSVSLLVS

SEQ ID NO: 178386 - protein, 344 aa, unidentified
MTYYTGLDVSLRSVSICIVDGQGQVVYEMKVPAEVSAIAKAIRSFSSDVSTVGFEAGTLTQYLTYGLQQAGFDVVCLEARQVNAALSAMRNKTDRNDARGIARILRTGWYSRVHVKSIESHHIRALLSSRKAVLKKCVDLENELRGLLKVFGIRLAIKVPHGAYDSVVRPLIEADALLVRALLPLLEARQVLYRTFLKLDNEVKAIVRTDPVCQRLMTVPGVGVITALTFKAAVDDPSRFKSSRTVAAHFGLTPRRYQSGEMDNPGRISKAGDPDVRCALYTAAHALVSRSASWCTLKAWGKRLEKSRGHRRAVVAVARKLAVILHRMWIDGSDFRWGSMEATA

SEQ ID NO: 178387 - protein, 370 aa, unidentified
MKSIIYVGMDVHKASFTLSCFSVTTQETFATVKISPDAKAIKKYLDGVSLSRSEECEFVCGYEAGCLGYTLYHQLTAMNIRCVIMAPTTILRNAKRVKTDRIDAENLARCLAYGGYKSVYIPTAQDEAVRDYLRMRDDHKLMLKKIKQQINAFCLKHNKIYPGNKSKWTQAHVKWLNALEFDGYLQDAFNEYMITYRELADKVERLESQIEQLAELEEYRDKVKKLICIKGIKTHTALSLIVETGDFSRFQSAERYASYIGLVPGEHSSSEDQNRLGITKAGNRHMRMLLIEAAQCYSRGVLAKKSKDLKSRQKGSSPEVIAYADKASIRLRRKYIRMELVNKKKANVAKTAVARELACFIWGMMTNNIA

SEQ ID NO: 178388 - protein, 342 aa, unidentified
MATPTYLVGLDIASEQFVAAIGACPWQLLVSGTEFSNDPDGFQQCQQWLQQHHCTPQQTVVCMEATGVYGEALAVWLVIQGYRVAVEPPLKVKRAFAPAGPKTDAVDSQQIAEYACRFLDELVFWQPASDLLEQLQVLLSNRAQLVQQSVAQQNALQALQRKRVRTPFAEQVHQRVLLELKSHLRALERELHRLLEHEPPFAQLVAVLMSVPGVGLLFATHLLLLTQTSPEPVSLTHLAAHLGICPYERRSGKRVYARPTSRHYGPSQPRKLLHLAARSVVTHNARFRAYYQRKLAEGKPKRLVLNNVANKLLRICLAVLASGQPYDPKYVSTRPRCSNGCA

SEQ ID NO: 178389 - protein, 412 aa, unidentified
MEEKVEFEQVVEKGCGLDVHKENVVATIRGKGIVTQTRSFSTYTSSLISLRDWLLKHGITHVAMESTGVYWKPVYNILGDHFKIILVNARHVKNVPGKKTDQNDSQWLAKLLIAGLLKGSFIPNRNIRELRDLVRYKTKLTNQISSEKNRIIKILEDANIKLSSVLSDVFGVTGQKILKDIIAGDYQPEKLLYHVHGKVQKSREEIKEAITGNVTEHHRFMLQTLLESIEKIEDTIVKLDFQIGKQTAEYGIELELLDSIPGVDKDGAICIIAEIGADMSVFPDQKHLAKWAGMCPGNNESGGKKKSGRITYGNAFLRAFLVEMAWAATRTKHTYLSNKYKSLVGRRGKKKALIAVGHKILIAAYFIIKNKVAFNELGEDYLSNYRKDKLIEYYKKQLSLLEPNIDFEKEVA

SEQ ID NO: 178390 - protein, 355 aa, unidentified
MNPEKYIGMDVHDATISVAVKNAEGKLLMESVLETKARTILEFIQGLRGTLALTFEEGTSASWLHDLLKPHVSRLVVCDPRKNALLKEGNKNDRIDARKLAELLRTNQVHAVYHKKHGTRALKELGRSYMTLTKDMTRVMNRIKSVYRSWAIPRAGTSVYSRRHRAEWLAKLVEPGVRIRAEHLYQQLDSLEPVRQAARRQLLRESRKHAAVKLLGQIPSIGPIRAALLVALLQTPHRFRTKRQLWAYSGFAVEVHDSGEYRWVRGKRQRNRERITVRGLNDNHNQDVKNLFKAAAISATTRPGPLHDFYLARVASGMRPTMARLTLARKIAAITLTMWKKGVSFDPKQFERQAA

SEQ ID NO: 178391 - protein, 397 aa, unidentified
MRKPKQRQTKPRQSKQRKPNDLSRSLAALDLDRTLIAVIEMGASSWLVAGLVPGVERQPLKKLETDEHALLALLERWRGEAVRSGYAITRIVVAYEAGRDGFWLARWLKAQGIEAHVIHAASVAVSREHRRAKTDRLDTELLKRAFLGWLRGERDHCKMVAIPTVAEEDARRPGRERESLVGDATRIINRIKSALARLGIRTFNPTLKKAPVLLNDLRTPEGDPIPPNTLDEIKRDMERRQLICEQIRRIEQERVKRLQQAPDTGPNAMVHLLARVTGIGIETTDTLVREVLTRNLRDRRAVARYGGLTGAPNQSGSFNREKGLARSGNSRVRRCMIGLAWRFVRLQKDSPLVKWFKLRTAKSPRASTRPCSSSSPRCATVCWMTRRPIPTLRTRHQ

SEQ ID NO: 178392 - protein, 400 aa, unidentified
MPYHGGLDWGGAAHAVCVVNATGRIVARIEARHDAAGLADMLARLKRVAPPAELPVAIERPSGLIVNALVEAGHPVIPIHPNVVKACRPRYRAAGGKSDPGDAYMLADILRTDGHRFRPLMPLSDDIRALRALVRARDDLVSQRVTLANQLRSLLEGFWPGAAAVFAAIDSPIALAFVSRYPTPDSASRLGEKRMASFMAQHAYSGRRTPAELLARLRAAPTGLASNAEAKAKGEVVRALASLLERLVGEIAKLSSRVEHAVAELPDGKIVMSFPRTGRINAAQILAELGDVRERFPTENQFAAEAGVAPVTHASGKSRGVVFRWACNKNLRQAITCFADNSRHASSWAADIYARARQRGCKHAHAVRILARAWVLVLWRAWQDGTDYDPAKHRAATRIA

SEQ ID NO: 178393 - protein, 409 aa, unidentified
MEQVFERVCGLDVHKATIAACVRVPDAKGKRVQYVQTFGTTTADLLALAEWLEAHGVTHVAMESTGVYWKPVYYVLEERFTCLLVNAAHVKRVPGRKTDVQDCGWLAQLLEHGLLRGSFVPPAPIRELRDLTRYRKSLIQERAREANRVHKLLEDAGIKLATVATDVLGTSGRAMLEALVHGTRDPGVLAELARGRMRTKLPALREALVGHFRAHHAFLATQILAHLDHLEVTIATLSDRIAAALRPFPNAIQCLDTIPGINERTAEVLVAEIGVDMTRFPSDRHLASWVRICPGNHESAGKRKTGKIRKGNVWLRAALIEAALGATRTKNSAVAARYRRIMRRRGHKKAIVAVAHSLLVTAYHVLARQTTYQELGADYYDRRHTERVTRRAIQALEEQGYHVTLERVA

SEQ ID NO: 178394 - protein, 407 aa, unidentified
MAEPTLLFVGLDVHKDSIAVAHAQAERTDPPHFVGSVGTRQSDIDKMIRGLHSKAPNLVFAYEAGPCGYVLHRYLTGKGLECRVIAPSLIPKKPGDKVKNDRRDAVEIARLLRSGDLTPVYVPRVEDEAIRDLSRARDAARLTLKNAKLRLKSFLLRLGLNYTGRADWNDAHRRYLAKVVCPTATQQIVFQESIHAVDEQVARLRRIEQELLDVAPKWRLFPVVEALQALRGVQWVVAITIVAELGDLTRFDNPRQLAAFVGLIPSEHSSGNSRRQGGITKTGNGRARRALVEAAWAYRHNPKVSEAIQKRLESLPKVFKRSAGKHNSDSASVTEGSPHVASTRTSPSPPSPASSSRSCGRSPRRCRSNPDTGTRRNSPGFEWRRGPGLAQPSTTLRGGFGRSSCLE

SEQ ID NO: 178395 - protein, 390 aa, unidentified
MQALCPRPHEHTAIRTDLKAIFVSLELSRSTWVITSLSPGGGEKMSKHAVPSGDIPALLARLSQLQEKARARTGQVFPIIVIQEAGLDGFWIHRVLQQEGIESHVVDPASIATSRRRRRAKTDKIDGEALVRALLAYKRGEPRVCAMVQAPTPHEEDRRRISREREVLTAERVQHVNRIKGLLFAQGIGDYEPLHRNRRERLEALITGDGRPLPEGLKAQIRRELDRLELLIEQVKAVEAERDAVLAQAQASPGVPAPAAQLLTLRGIGPEAAATLWSEGLFRTFNNRKQVAAYAGLAPTPWQSGAVHRDQGVSKAGNPRLRTIMIQIAWLWLRHQPQSALALWYRARIKRTGGRLGKTMIVALARRLLVALWKYATAGVLIEGAVLKPA

SEQ ID NO: 178396 - protein, 346 aa, unidentified
MNKLNVIGVDLAKNVIQVSVITPAGKELRNKAFTRRKFAEFLAKQQPGLVAFEACATAHYWSRVARGHGHAAKIIPAKAVSPFRQGHKTDPNDALAVAEAACRPSIKEAPMKTVEQQGIQAIQRSRELLVQDRTALSNHIRGLLMEFGIVIPQGFAALHRRIPEVLEDAENSLPDLYRPTLNLLYGRFITIKDDIDVLTEQITTIVKQNVACDRLTRLEGVGPIGSVLLYATLGTGEAFANGRQFSAYLGLTPKQYSSGGKTVLVGISRYVANKRLRSVLIQGARAYVHRLKDPKTPKERWFWALIQRAGYGRAAVALANKNARTAWALLTQGAEYQKAYRVPRAA

SEQ ID NO: 178397 - protein, 475 aa, unidentified
MASGRMNRKQRKELARQLQSADSGLEVVHPRAAGIDVGNSVHYVAVRPDRDAEPVRRFECFTADLNRMADWLEACGVATVAMQSTGVYWIPLFEVLEQRGFEIYLVNARHTKSLPGRKSDVQESQWLLKLHTYGLLNNSFQPTAEIRGARTYWRQRGEHVHGAATCIQRMQKVLTQMNVQLANVISDLSGLTGQAIVRAILAGERDPKKLAELTNYRIRASREEIAKSLEGNWRPELLFVLKQEVSMYDTYQQRIVECDRELAEHLNKFADRVPPRPTKEAPQSEEQAPLKRSRSAKRAQGNSPCFDLRSELSRISGVDLTRIDSIDVLVAQTVISEVGLDMSRWKTEAHFASWLGLCPDNRISGDKVLRRGTRHVVNRAATALRVAAMTLLRSRSYLGAQYRRLRTKLGAPKAITAMAHRLARLVYRMLKYGQDYIDKGMQYYEDRHRFQQIQLLMKRAAKLGLQVMEIPAVGA

SEQ ID NO: 178398 - protein, 354 aa, unidentified
MQSQIIARPKLFIGMDIHKKSWSVHLRTDLFDHKGFSMPPEPEKLVDYVVHHFAEHDVALTYEAGCCGFSAARYFLSMGWTVKVVNPNDVPRIDKQLYQKTDKLDCRNLCKQLQRDQLHGIYIPTEPEEQLKSLLRQRNQVVKQLRKARSHIKGLLLFHGIAVPDQFDNPNWSLGFVDWLKNIQWAHSTGTACMNSKLRILEALKNEYLQTSNELRAYCRKHYKKDYYLLKSIPGIGGLLAAAILAELGDIRRFNNERQFSSCIGIIPGIHQSSESEMKMSVTPRCKALLRSYLIESSWVAIRHDPEIQAYYRKHVGKNPKNVIVKVAHKMCRRILSVIKTETPYQVNYQGIKK

SEQ ID NO: 178399 - protein, 358 aa, unidentified
MGQVSTIGLDIAKRVFQVHGVDAAGAVVFRRQLRRTEVLRFFAKQPPCLVGIEACGSAHYWGREIAALGHQVRLMPPTRVKPYVKWGRKNDKVDAAACCEAVSRPSMRFVPLKTVEQQAALMLHRARQLLVEQRTRLGNAIRAHLAEIGIVAAKGQAGLGALLAMLGNPEDEHVPAVIRPILMPLVEQWRSAAAQIAVLERQILAWHRNNPDSQRLATIPQFGPILSSAMVATLGEAARFDSGRRCSAWIGLVPKENSSGGRERLGGISKTGDRYLRQLLVVAASGLIGRARAHPEVAPWFAALLARMPAKQAAVALANKMARIAWAVLTKKTVYRAAAGTFTPPGPRDAAPTQAQAA

SEQ ID NO: 178400 - protein, 321 aa, unidentified
MNKDKEIHGVDISKDVFDVFDHEGVHHQYPNTLKGFRDYFRCLNLNSLVVMEATGYYHYLLAQFLYDQGMAVSVVNPLSVKRFVQMKLSKVKTDKSDAKAIAEYAKVNAVPLYDGKGEDQAESLQLLALMDIYLKQRTQVKNKLHGEKVLGIPSRAVHSSLVRSLKSLDRELEALQSRLLALVKKTQQRQLTNLKSIPGLGDKTVALLIILTDGFTKFENAGQLCNYAGITPTTRRSGSSVRGKSRISKVGNRKLRNLLFLCAFSACKHNKACREIYERITAKGKSKKLALIAVSNKLLKQAFAIAKSGLPYDENYVSKLN

SEQ ID NO: 178401 - protein, 358 aa, unidentified
MPHRSTLTIGVDVSDKNCHLAVLDDNGAVILRDRCATKRAALSSWLRQFPPTAVNCIALEVGPHSPWMSRHLVSLGYEAIVGNPRKIALISGHHTKSDVMDAETLARLARVDPKLLSPVEHRSEATQAARAILRSRDVVVRSRTQLINTVKGQAKAVGTPMTGGSSSAFHHRTDELPEVLADALSPLMTVIGQLTKQIHHYDKVIDDMCESVHTATQLLTPIYGVGNKTALAFVLTIEVPERFRNSRAVGSYLGLRPRRDQSGDSDRQLRITKAGDPLVRRLLVQCAHRLLSENAADSDLKRWGLRLADRGGKSAKKRAVVAVARKLAVLMHRLWVAGEVYDPLYQARKHDPELQPAA

SEQ ID NO: 178402 - protein, 428 aa, unidentified
MTPISESSTGVIFVAIDVAKQVHEVLIEPPAGGRQRWRMVNCQRDFDVLRQRLEGWQAPVLIGFEATGTYHRPLAYFLHQCGFELRLISSLAVARTRDALYNSWDKNDPKDTQVLLHLLKTGVTQRYHDPLVHAVNDLQEFTQTHYQISLRKVRVQHSIMTHYLPLYFPEADRYYTNSRAQWFTRLLHRFPCPAAITRYSPEAFAQEAWTVVGRKVNKHGFLQDLYDTASQSVGLPVSEDSEAIQMFRVILTEHQQLCATRAAIEQQADQSLHGHPDYQRLRTLPGIGPILALTILAEAGDLRRFAHHRQFLKFCGFDLSTQQSGQFRGTSRLSKRGNARLRYAFWMAAQGAVRIRENTFRQKYARYIKSDPQNPDRKRKALCAVAAKVARVAHGLIKTGTDYRPYFEATPPSGALRSLGPSRQSLTS

SEQ ID NO: 178403 - protein, 374 aa, unidentified
MKNTITHVAMDTHKKEHKVALHYPGEEQIVRFAIKNTVRDIKKMVSKIKKKSSADIEFCYEAGVCGFILKRRIESLGCKCIVIAPSLTPIRPGDRVKTDRRDALKLLAMFKAGALTEVHAPDPKQEAARDLTRCRQTAQENLKRIRHQIMKFLTRHGYVYTDGNHWTQKHLHWMSGLEFELPSLRDVFDSYFTEMQHCLQRLTCLDKDVKKLAASKPYEKIVGLMRCFHGIDTLTAITVITEIFEFGRFSTPGELMSYLGLTCSEDSSGQNQRRGSITKAGNKRVRRLLIETSWHYRHPYITRSRVLRERRKDQPQWAINIADKTGERLRKRYWYLVNHGKSPCVAAVAIARELAGFIWSLFREYEARSSKKAA

SEQ ID NO: 178404 - protein, 416 aa, unidentified
MKLFVGIDVSSEKLDTCYLTDEMVVLLNHTYGNDTQGAWELKEQILSFHETYSFDQIVIGMESTSMYSYHPAVNFHQDEQLQAIHAITTIENPHRIKQYMKMFDADKTDPIDAFMIADYLRIQRYTNSPIKGEKYMALQRLTRTRYQIVRQLVEVKQHFIENLSYKCNTLKKELREAEGSTTVFSAAIMDLFTQDLSLDDLANLPLKDLAEWLQSKGRGRFKDPEGLAKTIQRAVRSSYRLDQVMSESIDIILGILVREIRSLEKAVKDCDQGIEDLVQTVPEYQCLTSIPGVGPVYAAGLLAEIGQIERFPDQTSLAKYAGLTWPKHQSGRHEAENTPLTKKGNRYFRYYLIEAANSVSRHLPEYQAFYRKKYQETPKHQHKRALVLTARKFVRLVDTLLRNHQLYTPPRSVIEK

SEQ ID NO: 178405 - protein, 364 aa, unidentified
MQEPTHIGLDVHKETIAVAVLRPGTVECDERVIPNTPEALRRLLSRYPDGAALRTCYEAGPTGYDTQRLITSLGISCDVIAPSLIPRRSGVRVKTDRADARNLARLHRAGELVAVRVPTPAEEALRDLVRAREDLKNDRRIARQRIRSFLLRYGKRYPAPGRRWSFRFEVWLRPLRFSEPASQAAFEHLLGAYFMRDSQLGAVDKQIAELALAEPLAGAVARLRAFRGIDTLTAVTLLTETCDFRRFGSAGSFMAFTGLVPSEHSSGQSRHQGSITKTGNAHLRRVLVEAAWAYRYAPAVRGKLRGRQIGQPPEVVAYSWAAQCRLHGTYRRLAAKKGPNKAVVAVARELSGFVWGAMSDRMAV

SEQ ID NO: 178406 - protein, 374 aa, unidentified
MALKIVYKICCGIDVHKTFVVACIASTNDKGVTSYESHRFSTYTSGLKTLLQWLIDRNCKDVCMESTGKYWIPVYNILEKGCSIVLAHPKYVKAIRGKKTDKKDAKWIADLFKHNLVAGSFMPPSDIRQLRDLMRYRFKLTCFKSSEKNRLQNCLTVSNIQLGNVVSDTFGKSAQAILDKILENPADTSFDLEPLVFKSLKKKLPELRDAIDGYITPEQAGKLKVIKTHYEDLESRKAELEELILALAAPYQQELAILQTSPGISSDFTAIGIISEIGTNMEAFPSAKHLCSWAGLTPTNNESAGKKKSVRVSKAGCYIKPLLVQCANAVIKSTKHPEMRNRYLRLKKRRGHKKAIIAIARMHISNIQFLKRPP

SEQ ID NO: 178407 - protein, 346 aa, unidentified
MEIETIGIDLGKTGFHLVGLSAAGEMVVRKKCSRKQLLQFTATLQVRLIGMEACCGSHFLGRALREQGHEVRLMAARYVKPYVKTNKNDYIDAEAIAEAVGRPRMRFVPIKTDDQLDMPSLHRVRESWVGRRTAVINQIRGLLLERGITIRKGRHHAEVALPQILEDADTNLSGRLRILLAHLQQELRQLQSQIDEIDVGIVQTAGEHEACQRLMAIPGIGPVTATAIVSAIGNGAEFKRGRGFSAWLGLVPGQYSTGGKQTLVGISKRGNCYLRRLLVNGARAVLQCKEKQSPGLHAWLSKFASRAHSNVVAVALANKLARMAWALLTKGELYRPPLLAAEAVPV

SEQ ID NO: 178408 - protein, 359 aa, unidentified
MADDALSSSRVLKTAPELSAPSAFGRSPEQLTGPPYAAAIPQDKDGHMTLAPSVLGIDISSSQLDSFAHPLGQGRGYPNSGVGIDRLVARAAELKAFVVLEATAPYDQALIRALERAGLPFHRANPKKARDFARAAGFLAKTDRVDARMLAAYGAALPLKLTRPVPAEELELQGLTARRDQLVEMRKQERTRLAAAPAPLLADSIRAVIAALDAQIRQMDRAIAALIQKSPALAEEAAILRSAPGVGPVTAAILIAGLPELGALSRRAVAALAGLAPLSCDSGALKGKRRIFGGRKRVRDALYMAAISAIRTGPYQASYARLRTAGKSFKQAIIAIARKLLVALNAAIRDHTPFNAQPT

SEQ ID NO: 178409 - protein, 355 aa, unidentified
MNSEKYIGLDVHQATIVVAVMDSAGKLVMESILETEAATILQFFAGLRGTLSVTFEEGTWSAWLYDLLNPHVDKLVVCNPRKNALLKDGNKSDRIDACKLAELLRGNQLKPVYHGETGVRMLRELSRSYLTIVKDLSRVMNRLKAVYRSWAIPCAGRDVYYRRHRAQWLAKIREAGVRRRAERLYEQLDMLQHLRQQARRELLAESRKHAITAKLRQIPYLGPIRSALAVALIQTPHRFRTKRQLWAYSGLALETRISAEYRMVEGQVRRSKKLLSIRGLNKDHNHDLKGLFKGAATMASVRPGPFLEFYQAALAKGIKPTMARLTLARKIAAITLTLWKKGENFDAAKLKSQAA

SEQ ID NO: 178410 - protein, 351 aa, unidentified
MWIIGVDYHPSVQQIAFVKTDTGECGERRLNHSDREAEKFYRELKAAGCSVRVGMEATGHARWFERLLAELGFELWIGDPAKIKAKRVRKQKTDRLDAALLLELLLEDRFPRVWVPSPENRDLRQLLWHRHRLVQMRTRIMNQLQAAAMNEGVRRKKALWSKSGRAQLESLPLAPWAARRRHDLLELLDRLSPTIEELSAAVEQQVKHRPEVLRLMTHPGVGPITALAFVLIIDSAERFACGKQIASYVGLIPCEDSSSDQRRLGHITKQGNTLLRYLLVEAAQAVVRCDPDWRRRYIHLAMRRDKRIAKVAMARKLAVRLYWMMRKEWNYEQLKKFGSYAGESDLVHGVQ

SEQ ID NO: 178411 - protein, 339 aa, unidentified
MELYAAFDLHANNSLLGIIDGKGKRVFNKRLHNERELILEVLRPHKEHIVGIAVESTYNWYWMVDALMEEGYRVHLANPSEIQKYEGLKHADDNHDAFWLAQMVRLGILPEGYIYPKQERPVRDLLRKRGHLVKIRTSLILSLQNIITRNCGLRLNVNDVKRLRENRVSPLLEENDDLALAGMVSKETIDFLTHKIRKIERAVEGKIQLKKEYRYLLTLPGVGTVLALTIMLETGPISRFVKVGNYVSYCRKVSTQWTTNGKRKGKGNKKNGNRYLAWAFSEAAELARRYNSQARAYYNRKMQKTNFMVAHSALSHKLARAAYFIIRDQVVFEPEKLFR

SEQ ID NO: 178412 - protein, 320 aa, unidentified
MSKKKSTSFIGIDVSKRLLEVAAHQSDYQFRCANKASAFGELTVELIALRPARIVLEATGGLEIPVVAALHAAGLPVVVVNPRQVRDFAKALGQLAKTDRLDARVLAHFAAAIKPPLRSIKSADEVELDALVGRRGQLVEMLTAEKNRRGSAATDTVRDQIKEHIDWLEDRIAELDQQLKAQLKNSTLWQGRDDILQSVPGIGPVVSFSLIADLPELGTLNRQKISKLVGVAPLNNDSGQQRGTRHIYGGRARVRSMLYLAALTATRFNPVIKEFYERLLANKKLFKVAITACMRKLLAIINVMVRDSTLWKTKNEPVSA

SEQ ID NO: 178413 - protein, 347 aa, unidentified
MDQIIRIGMDTSKHVFQLHGVNAAEEPVLRKKLRRQDLITFFGKLPPTVVALEACGGSHHWARLLQSLGHEVKLIAPQLAKPYVKRGKNDAADAEAICEAMSRPTMRFVPVKTPEQQAALMLVGVRDRLIRQRTQLVNVIRGYAAEFGLIAPKGLCRIEPLLERIKTDETLPALARELFEVHASEYAQLQARLEKIEDRLMAWHRAHEGSRRLARIPGVGPIGAAMLVMKTPAPEAFRSARHFAAWLGLTPKDHSTAGKVRHGVITRAGDEILRSVLVVGATAVIRQLRRGQCAPASPWLVELLKRKPPKLVAVALANKIARIAWKLMVTGESYKAPTSVSVAAHAV

SEQ ID NO: 178414 - protein, 340 aa, unidentified
MNVTTIGIDLAKSVFQLHGVDAAGEVVFRKKLRRAAVLEFLRNLRPCLIGMEACATAHFWGREIGALGHEVRLIPPAYVKPYVKRQKNDAADAEAICEAVTRPNMRFVPVKSAERQGVLMLHRTRDLLMRQRTMTLNAVRSHLAEFGIITAQGPHKILTLIRAIRAGEVPGLPPIACAALESMATQLDNLASEIRRLERQLMAWHRADETSQRLETIPGVGIITATALAASVPDPSVFKTGRQFAAFLGLVPRQNSSGGKDRLGRISKMGDGYLRRLLVVGATSVIRRADSNPSATGTWVRGLLERKPARLVTVAVANKTARIAWVILARGETYRAPMTT

SEQ ID NO: 178415 - protein, 367 aa, unidentified
MSSIAHRGFVHLGMDVSKDSIAVAVLAPDRDTAEFDKIFHDTDSVRRLVKRLGKPKEIWACYEAGPTGYDLQRLLTSMGVRCDVVAPSLIPKGSGDRVKTDRRDARRLAGLHRAGELTPVAIPTPAQEGVRDLCRTRGDMVQDLTRARNRLSGFLLRHSVVWRGGSKWTERHRRWLATLSFDDPAIATTFSHYLATVKLRDTALEAVEADLVPWCTKDPFGDQVPRLAAYRGVTRIGGLCLAAEVFDWRRFPKARPFMSFTGLVPGENSTGLTQRRGSITRAGNAHLRGQLCEAAWAYQHSPNVGAGIRERQVGVPPETVARSWEAQTRLSRRFRQLAAHKNVRLVVAAAIARELAGFLWAEMVAEV

SEQ ID NO: 178416 - protein, 315 aa, unidentified
MYHNFVGIDISKNDFVVAVHGNKKAFKYLNNSEGFDELLEKHPILKDNSFVVLETTGGYEKALLGYLLSHKIAVHRANTRVVKYFIRSTGQLGKSDNIDAIGLARYGHERHKCLNLYKPNDDNLQELVKYTLRKQDLKKQLVAEKNRSQAPGQECTKESHIRVIEFLEQEIALVEGLIDDIVKDCEYLTKARDLLVKEVAGLGKATATSLLALMPELGNLNRKQVASLAGVAPYPYESGKKIGYRKTYGGRADLKPVLFMSAMTASRSSGKLGTFYSKLVESGKKKMVAIIAVMRKIIVIANAKIRDLRLKMQIS

SEQ ID NO: 178417 - protein, 433 aa, unidentified
MTHSVSVSVPPSNVAAWVGLDWADQQHLVCLYDVGTGQTELSRLEQKPEALQNWLGQLRQRFGGQPVAVVLEQARGAVIYALLSVDFLVLYPVNPQSLASYRKAYATRGAKSDSADAVLLMEMVRNSPQRFRPWTPDDADTRSLQLLTQNRRQLVNQRTAFTNQLTGLLKSYYPQALELAGELDSLQACDFLEKWPTLEALQQARPAQIRKLYLDYGKPRPESLEQRLEQIRQARPLTTDPAAVLSGTMMVRALIELIRPLLATLDRFDQQIAALFRKHPDRLLFESFPGAGAVLAPRLLAAFGTDRDRFESAQQIQQLSGIAPVTEQSGKQRWVHWRWACSKFLRQSYHECVDYSRKWCGWAKALHQRLRQSGKGHHAAVRVLAFKWIRILFHCWKTRTCYDEQIYLKSLKKRNPTLWAEAQALPTRKKKAA

SEQ ID NO: 178418 - protein, 366 aa, unidentified
MNEGTTVLGLDVHKDTITVATLLPGRDTVPDTQTFPNTPEAIRQLVKRLQPRRPLAAVYEAGGCGYDVYRQLTKLEVACAVVAPALTPVRPGDRVKTDGRDAIKLARLYRAGELAIIAVPTPSHEAARDLVRTREDMLGDRVRARHRVTTFLLRHGFPWRRKAWGTIHRNWLATLHFELLAQQETYLAYLRGVEEVDARLESVNVALQRVATEAPWSELVAALRCLKGVDTLGALTLAVEAQSFQRFPTARAFMAYTGLVPSEHSSGAHGYRGGITKTGNAHLRRILVECAWCNRYPSGANAAVLARRKGCSPAVVQVARKAQVRLRRTYARLIQRGKPHPVATVAVARELAGFVWAIGRLVVIPA

SEQ ID NO: 178419 - protein, 403 aa, unidentified
MKHVIAFDVSMGKSYMVIYNAQKQCVFESEIKHSKPDFEKLQEKIHKLTDETGESPEIMFEATGIYSRQLERFMQDNQYTYCLLNPLEAKLQCDSLRIHKTDRSDAHRLALTHFTVTRRVSTGTDNLFYQLKSLSRLYSELDGELSMICSRMHKVIQLTFPELERMFTSKSDLFLNFVQLFPHPDCVLGLSKTIIKNRIRANTNKKISNITAEKKAIQILEIAKTSYPAVSQNDVLCDQLKLYARRYQELLHQKECCINKMVYVAGQRAEYDIILSLPGIGPNTAVRLIAEIGDITRFNNNKQLNAFAGIDIRRFQSGKTFFKDKINKRGNKHLRKLLFLIIQNMIKQRRYGQNHIVEYYDKLKTQPYNKCHKVASIACVNKLLKLLFYLITHNMYYDYRLTA

SEQ ID NO: 178420 - protein, 343 aa, unidentified
MKLIRVGVDLAKNVFQVHGGDRKEKAVWRRRLTRENWVNALLETVEPGCEIGMESCGGAHHWARKLQEKGFTVKLIAPQFVKPYVKSNKNDANDAEAICEAMSRPGMRFVAVKSVEQQDIQAVHRIRSGLIEQRTAKANQIRGLVAEYGLIAPKQLSHLRVALPLWLEDAQNGLTDRFRRLLNALWGDLLALDTRVKELDREIVLIAQSNPLAKRLEQLRGIGPISATALAAAVGDGTQFANGRQMAAALGLTPRQHSSGGKERLLGISKRGDAYLRTLLIHGARSVVRTAKGKTDRLSVWITRLAQRRHPNVAAVALANKTARMAWAMLKNGTDYEPNRLAA

SEQ ID NO: 178421 - protein, 469 aa, unidentified
MTPRRDKNLRQPRSRERLQVTHPYAAGIDIHTGQHWVAVPADDAPPPGPDHPPNLPAHVRCFGTCTADLIRLADWLAQCGVKTIAMESTGIYWIPLFELLEARGFEVFLVNPRQSRHVPGRPKSDVHDCQWLQRLHSYGLLTASFRPAAQVVVLRSYLRQRQMLIRYAGQHAQHMQKALEEMNVKLPEVVSDVTGATGMAIIRAILQGQRDPLELAKLRNERCKRTQAEIARALYGSWRAEHLFALKQAVALYEFCRQQLRECDVQLQAHLGTFADQRHGRPRPRRQRRCRERRPNDPAFDVGSALYRMAGVDLMLLEGIDANTALVLLSEIGPDVSRFPTVKQFTSWLGLCPQHQGSAGKIRSRRIRHGMNRAGRALRLAVQGCYHAQHVLGAFYRRIRARAGAPKAIVATARKLAERVYGLLKYGADYTCQKIDAYEAAYRARVLKGLARKAAELGYRLEAASPAGG

SEQ ID NO: 178422 - protein, 416 aa, unidentified
MSDTPKSSPYQRYLAIAAHKHYVVVGGLNASLEIVLPARRMDIEHYPQWAKENLSASDCLVIEASTNTWDLYDVTAEVAGRVVVAHPLAVKLIANARVKTDKQDVYKLARLLAGNLIPEVWVPPLEVRELRTLIADRRRKIKLRTMTRNRLHSLVHRHNLTLPEGGAFADKNQSWWKALSLSAVEQLRLKQDLALLEFLDPQIEAIDAELARLSNCDPWKDATPYLMQLPGFGVILSMTVLAAIGEIQRFPTSKHLVGYAGLGASIHESGQTHYTGRITKQGRKELRYALVEAAWVAVGSHPFWREEYHKLSRRMLKGKAIVAIARRLLVAIWHVLTERAADRKADPDMVAFKLMVWSWKLNEVQRGGLTTAQFVRYGLMRLKIGQEIARIKRLRNRPIASVEEVLGRLPELNLKI

SEQ ID NO: 178423 - protein, 420 aa, unidentified
MRNAGIHADSLLEVRRMYNAVGIDVSKGKSTIAVLQPGGTVIRKPFDVSHTSQSLIELARYLGSLEGSTKIVMECTGRYHEPMLKALYEAGLFVSVVNPHLIKNFGNNSLRRVKSDPADARRIARYTLDNWAELRQYSGMDNTRTQLKTLNSQFSFFMKQKVAAKANLIALLDNTYPGVNKLFDSPPREDGSEKWVDYAYSFWHVDCVRRIGLKTFTERYRAFCRKHHYIFQPDKPEKLFHASKELVAVFPKEKTYKLLIQQSIQQLNLASGHVERLRQEMNALASTLPEYSTVMGIYGVGKTYGPQLIAEIGDVSRFTHREALTAFAGVDPGVDESGQHKSKSNRASKVGSARLRKTLFQVMTTLLQNAPEDDPVYRFLDKKRAQGKPYYVYMTAGANKFLRIYYGKVKECLRNLEQAE

SEQ ID NO: 178424 - protein, 365 aa, unidentified
MSSLSHRDLTHLGMDVHKDSISVGILRPDEESPDVERIFNDEPSVRRLLARFEDSRRLSVCYEAGPTGYELHRLLTSMGIRCEVIAPSLIPRSAGDRVKTDKRDCRKLARLHRAGELVAIRVPTREEEAVRDLCRARADMVEDLDRARKRLGAFLLRHGEVWRGGSAWTLRHEAWLRGRHFEDLAMAATFSHYRAVVEERSANLDAVEADLAVHYGRPLFADGVARLSAYRGVARMGALTLAAEVCDWRRFGRASAFMGFTGLVPSEYSSGGRTQRGRITKSGNLHLRTQLIESAWAYQHGPSVGVELRRRQEGLAPETVARAWAAQARLCGKFRRLAQKKNSKNVVATAVARELCGFLWAEMTA

SEQ ID NO: 178425 - protein, 371 aa, unidentified
MQFIGVDLHTNRFTCCYRDGNGGPEGKKEKKETVTFELSDYGIAQFSQTLTSETYVLVEATITTFSFVRIIQPLVKQVTVANTYELKQISLARKNTDKIDADILCRVLKMQVLSGEQTISPVTVPPEEIQELRGLFTTYRLYKKQTVQIKNRIHSLVKEKLYGFTQEQIFGKKSRKMIRGLENNTAMSFQINELFDTLEFLEDRIDSLEDKIKEQAEPCLREIEILTSMKGIGVFTAIAIIADIITVDRFRNSKAFTSYLRSAPKVSNSNTSVSIKGTNKKGRKLAATLVTQSLNHVLDSSLKLRRWYDCLCEYKKPGLVRTGLRRRVFAEMYQMLKKGEYHYGREARIHEAKVSQFKRFLEKRKNLLKTA

SEQ ID NO: 178426 - protein, 262 aa, unidentified
MHISTLGIDLAKQVFQLHGVDARGHAVLSRRVKRSQLVAAVASLPPCVIGMEACGSAHHWGRVFEQLGHTVKLMSPQYVKPYVKTNKNDARDAEAICEAVSRPTMRCVSIKTVEQADLQALHRTRSLLVKHRTAVINQIRGLLAEYGLVMAQSPEKVRPAVVRFLDDAESGLTTCARETFSELSEQLQDLDSRIERVTHRVDGVYRAHPVCRKLAAVPGIGPLTATALLATVGRPQAFHNGRHLAAWLGLVPRQYSSGGKER

SEQ ID NO: 178427 - protein, 371 aa, unidentified
MSEFTRFVGLDVSKEKIAVAVAHLGREAPTQLGVIAHDLTPLRRRLAALGPPAGTLVAYEAGPTGYGLARALQAAGWSCQVVAPSKTPQRPGDRVKTDRRDALTLAHFLRAGELVAVRIPDERVEALRDLVRARADARQAETVAHHQLTSLMLRHGRVFPGRSHWTVAHHTWLGQQRFELHALQAVLEDALHAVLEAGARVERLTQDLERLAPASPVADLVTALQALRGFQLVTGATVASELGDLRRFAHPRQLMAFLGMVPSEESSGEQVRRGRITRTGNGHVRTALVEAAWAYCRPPRLSRAIEIRQQRVSPAVRRIAWEAQRRLHGRWRRLTARGKLKQRVVVAMARELAAFVWAIGQERELLASPKT

SEQ ID NO: 178428 - protein, 363 aa, unidentified
MSIYCGVDFHTRQQLIKWCDTRDGEINEQRLFHDSLDSVRKFYSQFTGEVRIGIEACGYSEWFERMLHDLGHEVWVGDATKIRRRARSRQKTDRRDAELLIDLLLKDEFPRINRLSFESLEVLRRLRYRHRLVQMRTRMRNSLQAIALGSGIVLKSKLRTKRGRAKLNELPLSPVLSQQRAGWVEMIEEVEKRIALVEEELEKTAVEDERVRLLRTHPGVGLLTGLALVHTLSPVSRFANSRKVTAYVGLEPREYSSGERKRMGRISKAGSRVLRFLLVEAGIKATREDAELKKLYYRVMHRREQARAKVAVARHLLVHAFIMLRDEIDYAEFKVRGAEMRSAARTVHRLNMPDHLIERPASA

SEQ ID NO: 178429 - protein, 351 aa, unidentified
MKVTTIGIDLAKSVFQIHGIDERGNVVLRRQLRRAQMVLFFSKLETCLIGLEACGSSHYWARKLAALGHTVRLMAPQFVKPYRKNDKNDGNDAAAVCEAVGRPSMRFVPVKSPEQQAELSVHRVRQRLMRQRTALINQLRGLLAEYGLVLAQGATHVRSQLPALLENSSDSLPPLALELFQDLYEELCQLEQRLADYDRRVERLYRGNPLCQKLGELDGIGALTATAFVATVAHAAQFHNGRQCAAWLGLTPKQDSSGGKTRLLGISKRGDVYLRTLLVHGARSIMRRTPKRDDPKSRWVEQLRKRRGENIAAVALAAKHARILWALMVRSEPSAQLIAAHSIEPPAQPNL

SEQ ID NO: 178430 - protein, 482 aa, unidentified
MKKRNIYQNQSQELLSLFESAGSSAKVMCVPMDYAKKDHLVMFCNGHGDILRKPFSVKNTPEGIEYLIDQVIRSCRRRGIKKEHVFLGGEDANSFAENFVSTLRVKGWLVAGVNARDAKKQRMNLQASTDRIDLMGIATMLLNCRANCCPAASGIYRNLRTLVRHRRKLVVMLTEVKNRVHGIVDRLFPGFLNENKSGIVAFTQSSLYLMEDRFSPKQIRRRRRQKLIEILKQYGTSKAEETAFKLQQYAAQVLHTPVEYVDTLQLSLAQHVKHIKCLQESIAQLEKEIAVNLAQTQGSFLTSLRGIGIVLAAGVSAEIGDPYEQKTLSHVVSYSGIIPRVKQTGGVDGKTYTGSVAKRCNRILKDYVVKSGFHLGLHGPEDLMIDYKRRDASGQHADFGIGRRYLRMAMSLMRTSQVYLPSRLRKADSTLEERAGYYLTTWPFLKDKWKKTGSIEVAFAKDRPLGIWRQIVQELYDIKLKL

SEQ ID NO: 178431 - protein, 402 aa, unidentified
MNAVGIDVSKGKSMVAIMRPFGEIVSAPFEIKHTASGINSLVELINSVEGESRIVMEHTGRYYEVLAHQLSKANLFVSAINPKLIKDFDNDSLRKVKSDKADAVKIARYALDKWQNLKQYNVMDELRNQLKTMNRQFGFYMKHKTAMKNNLIGILDQTYPGVNTYFDSPARSDGSQKWVDFASTYWHVDCVRKMSLNAFIDHYQNWCKRKKYNFSQSKAEEIYGKAKELVPVLPKDAITKLIIKQAVYQLNSASTTVESLRTLMNETASKLPEYPVVMAMKGVGTSLGPQLIAEIGDVSRFTHKSAITAFAGVDPGVNESGSYEQKSVPTSKRGSSDLRKTLFQVMDVLIKTHPQDDPVYQFLDKKRAQGKPYYVYMTAGANKFLRIYYGRVKEYLSSLPES

SEQ ID NO: 178432 - protein, 359 aa, unidentified
MSTQSKPFSFKGQKIFVGLDVHLRSWSVTVLSEQSVLKKFTQDPSPAALNKFLTNTYPGAEYYSVYEAGFCGFWIHWELQNLGINNIVVNPADVPTMAGERLRKTDAVDSGKLARSLRSGELKGIYVPDSVATEIRSLIRLRDSLTKDQTRHKNRIKAHLRYLGIDIPEEFCRPGRTWTNRFVLWLKGLKLETKYGKKTLDLLIAQYEDLRGQQLKMMKELRVLSRTERFDKPLQFLMSIPGIGQLAGLTILSEVDDISRFKDAAHFASFIGMVPMCYSSGEHDGTGNITVRRHAKLRWLIVEAAWIASRKDPVLSAAYVEYCRTMKPSKAIIKIARRLVNRIYFVMKHQQPYVNCYVS

SEQ ID NO: 178433 - protein, 391 aa, unidentified
MTAVMIGVDPAKRSHAMAVLDSNEKELAALQVGNDNDGYRDMLRLAKRWKQRSWAVEGAGGVGVQLAQRLVADGETVLDVPPKLSTRARIFDTGHGRKNDPGDARTIAVVALRTKGLRQVVLDDERIALRLMADRRRELVRSRTQTVNHLHQLLMELLPAGAEQKLTATKAKALLATVRPRAAAGKARRQLAVDLIDDLVTLDRKIKDINKRLKHAVEATSTSITDIKGVGITTAAVVLGEVGDIRRFPSRHHFASYTGTAPIEVSSGEVERHRLSRAGNRKLNSALHHAAMSHKRTDEAGIAYYGRKLADGKGKKGALRCMKRRLSDAVYRALVQDQIKAEAAGWEGHSGATLQSSASDPTPMVSPSDKSLTQPAAAEATPPRTRVKRAS

SEQ ID NO: 178434 - protein, 373 aa, unidentified
MIVIGADTHKRSHTVAAVNEATGRVIADRTMPATHHAFEDALVWARGLDDRGRVWAIEDCRHVSGALERFLLARGEPVVRVPPKLMAGARDSARERGKSDVIDAVAIARAAIREGLDSLPVAQLAGPELDVRLLVDHRERLVAQRTALINDLRWQLHDLWPEDEVPSRALITGRWQDRVARRLTRCEQTARVRIARDELRRIRDLTRTITELEQELATLVGQLAPQLLAEQGCGVLSAAKLIGEIAGVSRFATDAKLARTAAAAPIPASSGRSDRHRLDRGGNRQINCALHRIAVTKARVDPETAAYLTRKQSEGKSRREALRCLKRHLARRVFKLLQPTALTPPTPADNSPAITTTGVMIHCNTPPWTPALT

SEQ ID NO: 178435 - protein, 430 aa, unidentified
MKSNTQNAKIEAITEKTLVLGIDVGSETHYARAFDYRGIEYSKKPFKFSNTEAGFVTFKEWILDLKERHEKDKVVPGMEPTGHYWFNLGKFLQDNEMKPVLVNPHHVKKSKELDDNHPTKNDRKDPKVIAGLVREGRYMIPYLPDGVYADLRTASNIRFQLQAELTRIQNRISRWFNIYFPEYKTVYGKPDAKSGMLILKAAPLPEDILTLGIDGVNQIWRDAKLRAVGKARAKTLIEAAGHSVGSKEGAVSARMEIRMLLEDYESRNTRLQEVMVLIEELVRKIPMAEKLLEIKGVGIRTVSGFLAEVGDISRFNNPKELQKLAGLALVENSSGKHKGGTTISRRGRKRLRYLLFEVAMSLVAKNPEFRELHNYYTTRRLNPLKKMQSLMAIAAKLLRVFYAILTKGVGYDPKKMVNDIRRPAAYAQAA

SEQ ID NO: 178436 - protein, 457 aa, unidentified
MPARGKQPRSGAGSPAHTIDPNAAGVDIGATEIYIAVPTDRDPHPVRKFSTFTEDLLAAADWLKQCGIKTVAMESTGVYWIPLFQILEAGGMKVCLVNARHVKNVPGRKSDVCDCQWLQHLHSAGLLRASFRPEQPICAVRSLVRYRDSLVQLSAMHLQHMQKALDQMNLQLHHVISDLGGKTGMAIVEAIVAGERDPHQLATLRDPRTRASKETIAKSLVGDYRREHLFTLRQSLTGFRQNGQLIADCDVEIESLLKEFSSGDGPGAEAVPEPQAELKRKPRRNEMNFDLRTQRHRIFAVDLTEIPGIDTLTAHTLFTEVGRDLSKFANVAAFTSWMGLCPDNRVSGGKILHAQTRRVNNRVAKALRMAAQALSRSHGWMGQYYRRMRAKLGGPKAITATAHKLARIIYHLLTTGQAYDETVFAQQEAQNNQRNEKRLRHQARKLGFELTLIPTEV

SEQ ID NO: 178437 - protein, 460 aa, unidentified
MRKPTEKQLSGMKRTGKSGFPLLNPDAAGIDVGAREHYVAVPADRDAQAVRCFGAFTEDLHRLAQWLLQCGIKTVAMEATGVYWIPLYQILESYGLAVKLVNARHVKHVPGRKSDVQDCQWLQQLESFGLLAGSFRPAAKICVLRSYMRQREMLIRQASRHVQQMQKALTQMNIKLHQVISDLSGDTGLRIVRAILAGERDRLKLAALKDRRIKSEVALIAKALEGDYRAEHLFALKQALELYDYYQRKIAECDAEIYKEMKTLETRGSAAPLAKHKPRSSHNPLGFASQAELYRIMGVDLTRIDGVNENTAQLILSELGLDICQKWPTEAQFTSWLGLCPNHEISGGKLLKRGTRKVVNRVANALRMCAQSLLNSKSALGAYARRMRARKDTSVAITATAHKLARLIYRTLKYGQDYVDVGSDSYEAKYKAAVVKSLQKRAQSLGYQLVSCQTPGAVVP

SEQ ID NO: 178438 - protein, 411 aa, unidentified
MELLHRVCCGLDVHKKNVVACLRRSKPGEEAEQEVRTFATTTRGLLELQEWLIVAKCTHVAMESTGVYWRPVYNILEGSLEVLVVNARHIKAVPGRKTDVKDCEWIADLLAHGLLQASFVPPKPIRELRELTRHRRVLIEERARKANRVQKVLETANIKLGDVATDVLGVSGRKMLQALAAGERDPEKLADLAVGSLREKREELREALLGKFTEHHGFMLESLLREIEFLEKEIEIFDKRIEEKMRPFSQELERLDQIPGVGRRSAEQIIAELGPDMNRFRTAGHAASWAGICPGNNESAGKRRSGKTRKGNAWLHATLVECARAGIRKRDSYISAQYNHLVRRRGDKKAIVAVAHTILVDVWHMLRYNLEYKDLGANYFDCINRDRLVRYHLKRLESLGYQVTLQEAAMQ

SEQ ID NO: 178439 - protein, 388 aa, unidentified
MHPTGPCPEQDPPRDRHHQATLYASLELSRSTWLVTSLAPGDRKMSKHSVAAGDGAALLALLARLRGRVERSAGGPVGVVVVQEAGRDGFWLHRLLEAEGVESHVVDPASIAVPRRQRRAKTDAIDGETLLRTLLAWRRGEPRVCAMVVPPTPGEEDRRRLTRERGTLLEERTRHTNRIKGLLAGQGIYDFEPLRPDRLERLGALVTGDGRPLPDRLRAELRRELERLELLQRQIAEVEAERDAAAAAESEAGPSPVALLAGLKAIGPQTAAVLYHEGLYRSFANRREVAAYAGLAPTPWRSGKVAREQGISKAGNPRLRHAMVELAWLWVRHQPESAPSRWFRARVGHERGRVRRVAIVALARRLLVALWRYLAHGEVPEGAVLKAA

SEQ ID NO: 178440 - protein, 377 aa, unidentified
MKKVRFVGLDVHAETIAVAVAEPGGEVRSLGQIPNRPESIRKLIKKIGPADSVRACYEAGPTGYVIYWQLTTLGVRCEVVAPTLVPVKAGDRVKTDRRDAEKLARSYRAGDLTPVWVPDAAHEALRDLVRAREAAKKDQLRARHRLGKFLLRQGQRPPTGMTSWTQRYLAWIKTAVHFAQPAQEATLLDYLHEVEHVAGRIEGLERAIDEAVRTVPARMRAVIDALQALRGIALVSAVTIVAEVGELSRFTRAPQVMGYTGLGTREDSSGPRTRRGGITKTGNAHLRRIVIEAAWAYRHRPAVGGALRKRQATLSEEVKAIAWKAQHRLHGRYRKLLGRGKCQPQVVTAVARELLGFIWAIGVVVETGQRDSQGIAA

SEQ ID NO: 178441 - protein, 373 aa, unidentified
MKESITFVGMDAHKKAINVAMLLPGTRSPIEWEVPNEPAAVRRLVRKLRREAPGEIRCCYEAGPVGYTLQRQVMSDKSAGVICEVIAPSLIPVKPGVRVKTDRRDARKLADLFRAGLLTEVHPPTEAEESVRDLCRCREDAKEDQMSARHRLSKMLLRRGLVYGLGKKAWTQGHRQWLRGLAFDHEADQAVFEDYLLAVEHLDERILTLDAKLLAMSQKDPYREPVAWLRCFRGIDTVTAMTLICELHDFRRFQSPRELMSYLGLTPSEHTSSDKRRLGAITKTGNSHARRVLVEASHHYRHKPGVGKALRQRRQGQPARVIALADKAQQRLSRRYRRLTERGKPVNKATVAVARELVGFVWATLHGYEKVTT

SEQ ID NO: 178442 - protein, 344 aa, unidentified
MEYFVGLDVSLRSCAFCIVDAKGNVVLERELTCEIDDIGKCLSGFEFPIERIGLEAGTMNQNLYFGLQAAGFDVVCMESRQVNAALSAMRNKTDQNDARGIAHVLRTGWFSPVHMKSREAHGLRALLSTRKALLKKTMDLANETRGLLKIFGIRLPKTVTHGSFDGVVRPVIEMDDVLAHALVPLLDARVALYRQFLELDRRVKRAASHDEVCLRLMTVPGVGPIAALTFKAAVDDPTRFQKSRTVGAHFGLTPRRYQSGEHDNPGRIPKAGDSDVRATLYAAGNALLMRSMAQSQIKSWGMRLMRTKGRRRAVVAVSRKLAVLLHRMWVDGTEFRQDQVGGTA

SEQ ID NO: 178443 - protein, 364 aa, unidentified
MDEFTHIGLDVHKDSIAVAVLRPGASECDERVIPNTPAALRKLLLRFPEPSLLRTCYEAGPTGYDTHRLIGSLGIACEVIAPSLIPRRAGVRVKTDRIDARNLARLQRAGELTAVRVPSPAEEALRDLVRAREDLQSNRRIARQRVRSFLLRRGMRYPSPGARWSFRFEVWMRALTFEEPADQAAFDHLVSAYSVRDAQLAAIDKQIEEAALFEPLAEPAGRLRAFRGIDTLSAVTILTETCDFRRFASAASYMAFTGLVPSEHSSGASRRQGSITKTGNAHVRRVLAEAAWAYRHRPAARGAHAKRLEGQSPEVAAYSWAAQCRLNSTYRKLAAKKGPNKAVVAVARELSGFVWGAMTERMAV

SEQ ID NO: 178444 - protein, 341 aa, unidentified
MEAAVTIGLDLGKSVFQVHGVDSRGTVVVQRRIVRARLLAFFAKQPACLVGMEACAAAHHWARELQKLGHRVKLMPPRYVKPYVKRQKNDAADAEAICEAVTRPNMRFVEIKSSEQQGVLVLHRVRLMLMRQRIALSNAIRGHMAEYGLVAPVGRNGLQRLMAIIADQGDDRLPAMARASLIVLGSQLQLVNEQVLENDRRVKATARSTELGRRLMEVPGVGPLLASAMVASVPDPTAFRSGRDLAAWIGLVPRQNSSGGKEKLGGITKQGDRYLRQLLVVGALSVIRYAQQHGTKRPWLVSLLARRSPKIAAVALANKMARMIWAMMMTGERYREPVPAA

SEQ ID NO: 178445 - protein, 331 aa, unidentified
MKTNEIIGIDVSKLLIDVCIYSKQIVQQFENSKSGFKLMLKWSFKNSSFSKEETMFVFEHTGMYSHLLSVSLTEQKLSFFIASGLEIKRSIGIARGKDDQIDAKRIALYWYRLKEELKPSKLPKRSILQLKSLLSLRTKLNKQRAGFKVTLKEQKRIYKAKEYKIIFDVQQKMIAELTKQIHKINTQMQAIIDQNIMLKETYKLVTSVKGIGMQTAIMMIVFTDNFSKFENWRKFASYCGVAPFPYQSGTSIKGRTKVSHLANKKLKAIINMCAISAIQHNPEMKLYYHKRIKQGKSKMSTVNIIRNKLIARVFAVVKRQTPYVDTFKFAA

SEQ ID NO: 178446 - protein, 494 aa, unidentified
MFSDQSLWPLAGPRKKGENWALGRPGDVETTLVRESPLISRTRELRERRTVATSTRIRIHNYEAPPGRPACSTSKSGAGKEAMDTVVERCAGLDVHKDTVVACVRTPGKGGKREQTTRTFKTMTIDLLALRDWLIAMGVTRVGMESTGVYWKPVFYVLEDAMECWLLNARHLRNVPGRKTDVQDAEWICQLVEHGLVRPSFVPPKPIRELRDLTRYRKAQIDERGREAQRLDKVLQDAGIKLSSVATDILGKSGRDMLAALVSGTHDPEVLAELARGKLRNKIPLLRQALEGRFVSRHRLIVEKILAKLDFLDETIEDLSAEIDRLIAPFAAEVDLLDTITGVDRRAAECIIAEIGVEMPRFGSSGRLASWAGRCPGHHESAGKHKSGRSRPGSKWLAAILAQCAEAAGRSKGTYLGAQFQRLRGRRGHAKARKAVEHSILVAAFHVLDRHVAYQDLGADWFVRRRPEVHARRLAHQIEALGFRVTIEPGEQAA

SEQ ID NO: 178447 - protein, 369 aa, unidentified
MLADQLDYVVGVDPHRDSHALAVVHVLRGAVVFEANVAASSEGYADALRLVEQHAVGRRAVAIEGAGSFGAGLTRFLMSRGERVLEVGRLRRERRSGGKTDALDAARAARSVLAQERPATPRAGGERQALQALVAAREGAVNAKRAGLCQLRDLLITTPEPLRGELRPLTRARLLQRLAATRPAGRRDPELRGSMLALRSIARRVLQLTAEERELAREIETITRKLAPQLLDQPGVGPHAAAQLVLSWSHHGRIESEAAFARLAGTAPIPASSGQTIRYRLDRSGDRKLNRALHMILVTRKRSHPATIAYIERRLQEGKTRRETNRCLKRYLARASTGSSNTERHWQLDRHRSITGAPRRRLAWKAVSP

SEQ ID NO: 178448 - protein, 347 aa, unidentified
MLYVGVDVGKRKCRTAMMNQEGKITREFDFENDSEGISRLSSMLTMDDRVVMESTGAYWLDLYNHLDELHIPVVLANPLQTKAIAHGRIKSDKVDARILAHLLRADLIPECYVPPKEMRDIRSLVRHRLSIVKLRTMTKNKIHALVDRNGLKHEFSDLFGKSGVQWLKSLELSGLDRLMLDNHLTHLESLNTQVERVDAEITARATLDQDVRLLLSLTGVSVYTALLIKSEVGSIDRFPSYKKLVSWAGLAPSLHQSGSVEYHGNITRQGSRMLRWIMVESARVASVHDARLRVFYERVKLRRGDQKAVVALACKMLKIIWFMLTKKEKYQSANEKGYVKKLNSLDA

SEQ ID NO: 178449 - protein, 319 aa, unidentified
MTTEVVTFEQIVQRGCGLDVHKQTVVATIDGEGLKQETREFGTTTRSLTELKEWLVSQCITHVAMESTGVYWKPVYHVLEPSGITVWIVNARHIKYVPGHKTDKRDSKWICKLLLAGLLKPSYIPPREQRELRDLTRYRRKLIGQIASEKNRIIRILEDCNIKLSSVLSDTQGVVGTKLIDKLCTTGKVSQEDIEEIYHGKLQASKEEILEACEGVVTEHHVFMLQTIKKDILSSEVLISEVTSRIKTMLSPYDNVLELLKEVPGLSTKSIEDLIAEIGLDMSVFPTEKHLASWSGVSPGNNESAGKKKVDAQLMATSR

SEQ ID NO: 178450 - protein, 341 aa, unidentified
MNGLYYIGLDVHKKHVSYVINTASGSEVASGQVAATRTALSGWARSIEQPWSGALEATLFSSWIYDQLRPHAEQLKLAHPAMLEAITCSKKKNDRLDADKICDLLRCDLLPECYLAPPELRELRRVLRYRNLLVREAVRMKNKISGLLMEVGEPYDARRLHGKKYFSQYMDSLEDTPESVVELLRISRSSLEMFEQLQQRLLVGLRRHELLQQRVEKLQSIRGVGQVLALTWALEIAEVERFGSLGQAVSYCGLCAAQHESAGKSRRGPLSKQRNKHLQRVLIEAAKLAPRWNARLREVRDRELERGHRNRATVAVARKLVAYLLAVDRSGQAFVEQPQAA

SEQ ID NO: 178451 - protein, 356 aa, unidentified
MNIATLGIDLAKNVFALHGVDIAGKAALVRPRVSRGEFLEVIASLPPCLIGMEACSGAHHWARRCIAYGLQPRIMAAQFVTPFRKANKTKNDRADAEAIATAARQGNMRFVPIKSVDQQLRLCWHRAREGYKVEHRALGNRIRGLLAEFGNVVPNTDAALRAALADLDHAKLPASLNALLADMTAHWHAIGKRRDACEAQIQAHALADERCQRLRSIIGVGALSADALVASVGSAQEFKNGRQMAAWLGLVPSQHSTGGVTRLGPISCRGDAYVRTLLIQGARSSLQRAKAVSVEKSTPEQMWIRSLACRLPFGKVLVAIANKHARQLWALLAHDVDYDPTAFTRHPMQRRSNPAT

SEQ ID NO: 178452 - protein, 386 aa, unidentified
MQKLNDLSRCLTPLEPDSTLIAVIEMSLSSWLVAGIVPGVERQPLKKLAVDESVLLKLLHRWREEAEKAGHMIKRITVAFEAGRDGFWLARWLRARDVEVHVIHASSVAVSREHRRAKTDRLDTELLKRAFLGWLRGERDHCKMVAIPTIIDEDGKRPNRERESLVGEQSRIINRIKATLVRLGIRGFNPKLKKAAERLEGLRTPEGEPIPPNTLSELYRDMERRRLVRGQIRQIESARLDRLEHAPGEGAHAMVRLLARVMGIGIETADMLVQEVLSRNLRDRRAVARYAGLTGSPDESGKKRREKGLARSGNPRVRHGMIQLAWRFLLFQKDSALAQWFRARTENARGTRKTMIVALARKLLIALWRLVREGVVPDGVILRPAQ

SEQ ID NO: 178453 - protein, 475 aa, unidentified
MTSKRRTSKAKQTRLKRRRPKHTHQRGAPQQSIPVQEANAAGIDVGAREMYVAIPADRDAEPVRVFPTYTCDLEALADWLVERGITTAAMESTGVYWIPLYQILEDRGIRVCLVNARHMKNVPGRRTDWHECQWLQYLHAVGLLRAAFRPEPEVVAIRTVVRHRSRLVEAAGVHIRHVHKALTQMNLQIHHVISDITGVTGTAIIESILAGQRDAGELAKLRQPEIRADAETIRKSLEGDWRREHLFALRQSWELYGTYVRSIAACDQEICEMLGEHEPKVDPAKKPLPSDTKRRTKRKHQRTGDFRFDVRTEAYKQFGVDVTGIPGLEGIALMLYSEMGNDMNRWSSASQFASWTALCPDNDKSGGRILWTGVRQVKNRVGQLFRQAANSLHHSQTPMGGYLRRMKAKLGAEAGITAAAHKIARIFYAVVKNQVEYDQTTWHRQDLERQRRLEAKIRRQARGLGFQLVPIQPVP

SEQ ID NO: 178454 - protein, 372 aa, unidentified
MKYTTVYVGMDVHKESFSLACYTNEKEETEYAQRTEAHYSKVISYLEAMRFHYGNDVTFVCGYEAGCLGYTLYHQLTSHHVKCVILAPTSMPTQKGKKKVKTDKRDAQKIARCLAHHDYSAVHVPTAKDEETKEYIRMRDDHKLALKKVKQQILAFCLRHNCSFPGNNHWTQAHLMWLRKIKLGGVYQEILEEYLLTYNNLVDKIERLDKRIEELAAGEEYAENVHKLSCFLGIKTQSALSVLTETGDFKRFGTAQQYASYLGLTPGEDSSGEGQDRLGITKAGNRHLRMLLVEAAQSYGRGKPGYKSRELKKRQEGNPPEVIAYADKANERLRRKYYRLVLSYNKRSNVAKVAVARELACFIWGMMTGNVA

SEQ ID NO: 178455 - protein, 410 aa, unidentified
MQVLYPRCCALDVHKATVVACLRLVIDGKVVKEVRTFETTTASLMALSDWLADNKCTHIAMEATGVYWKPVWHILAAGEFELVLANAAHVKNVPGRKTDVSAAEWLADLLAHGLIRASFVPDTPTQELRALLRTRKQLVREQSSHVLRVQKTLEDANIKLDSVISDVMGKSGRAMLKALIAGVTDPAKLALLADGRLKASPAQLREALRGRVTKNHRFLLRLHLRQIDALDDAIAAIDRQVEADIEPFRAAVKRLITAPGVKALGAQVILSEIGLDMSRFPSAAHLISWACICPRSDESAGKRRSTRIRKGSPWLKTTLVQAAWAAVNKKDSYLRAQFHRIKARRGAKKAIIAVAASILTAIYHMLKNGTTYQDLGPQHFDRRSKAQQADRLLKRLADLGYAVPLQPRTA

SEQ ID NO: 178456 - protein, 340 aa, unidentified
MEITTIGLDLAKSVFQLHAVDADGAVVWRKKVRRGALLETLAQVPACLVGMEACATAHHWAREISALGHQVRLMPPAYVKAYLRRQKNDAADAEAICEAVRRPTMRFVPAKGAERQAVLVLHRSRELLVRQRTMLINAIRGHCAEFGLVAAQGVSGSRDLATRIRQTDSAVLPDMAKDAMVLLVEQLHALVRQIQALNRRLLVWHRQDKASQRLATIPGVGVISATALAASVTEPSQFRSGREFSASLGLVPRQNSSGGKDRLGRISKMGDRYLRKLLVVGATSVVRRERTADTTAANWVRSLLERKPARLVTVAMANKTARIVWAVLARGETYRSPAAI

SEQ ID NO: 178457 - protein, 358 aa, unidentified
MNRRIVQEFIVRGKEIFIGLEDSKKSWKIAVRSEGMLVHQSAMEAKYPVLKKYLEHKFPECTINLMYEAGFKGFNLYDCLTEDGIECVVIPPHMVTEAKVSKVKTDRRDARRLAYVLEKHDFRDACYVPDKERREDRQISRTLIAIQKDIVRTRNRIRKFLDFHGIKTPYTEEGKWGRDEFRYLKGLPLNEPLRVSLDILLTQLEELWIHQKTLRVALRRLIRKERYCKAFEIASSLPGIGWYTAIRLVLELGEDLRRFTSGKKIAAFVGLTPGEYSTGETTWKGKITGMGPGFIRATLIENSWAAIRKDPVLLAKFNRVWKATGSKKKAIVAAARMLIVRLRTCIISGTPYVPGYAR

SEQ ID NO: 178458 - protein, 345 aa, unidentified
MIIGCDFHPSWQQIAWLDTESGETGQQKLVHATGDAEQFYRRLGAPVLIGMEATGNSQWFTELVEDLGHVIWMGDAAQIRASYVRKQKTDKRDAAHILRLVVESRFPRLWTPDREQRDLRQLVLHRHKLVEIRSRVKNELQHLSMNKGMQKKRRLWSQAGMQLLRELPLKAWASCRREDLLGLLATLNQQIGTLDTAVQKAAEENPQAKLLMTQPGVGPNTALAFVLTIGDVSRFGRGKQVASYLGLIPREESSGGRQKLGAITKQGNRILRSLLVEAAQTAVRLDPQFRKQYLHRCHQKPKGVAKVAAARKLAVRLYWMLRSQVGYPEIVRIESSPRVALVGAS

SEQ ID NO: 178459 - protein, 367 aa, unidentified
MENNSIVWVGMDTDAKKNQISLYRGWDKDPGAEWEADMDSKGIKKLIERLGREPGEVRCVYEAGPCGYELYRKLRKAGIHCDVIAPSLTPRKPGDRVKTNRRDARNLGRLYRAGELTIIEVPDEKQEALRDLTRGREDVREDLTRRQHRLNRFLARQGCHYRDGDKWTQKHWAWIRKVHFEDGNAQTVLEESIRAVEQSQEQMKTFDSKIEENAQKPEYAKKVERYQTLRGVKTTTAMTIVAEVWDMRRYGKAPQFMGSTGLVSSEHSTGEHERRGKITKAGNAHLRRVLVEAGWHYRHRPIAGPSIKKRRKGQPEAVVSIAERADQRLNRKFRRLVDRYNKKPAIAAVAVARELAGFIWAIGQIQD

SEQ ID NO: 178460 - protein, 373 aa, unidentified
MHRAGLALASMSQNNNFTTTIYAGIDVAKATLELSLSGVCHSVDNDAKGHARILKLLSAAETAHLGTKVHLILEATAGYEAALVRALHGAGCALSVIQPSRGRHFAHAKNKRAKTDPIDAGVLAAFGEAIRPQPTAPPSAAQSRLAELVGRRAQLVETRTAELNRAAHYSDKLLCKQSAQLLALLDRQVAACNRAIAAQIEADEMMKARSERLQQVPGVGPVVAAVLQAEMPELGTLSEREAAALAGLAPYSCDSGPHKGTRRVWGGRAPVRCILYMAAMSAVRHDPILRVFHAKLLGAGKKPMLALTAVMRKLVVLLNRMLKNPQFKLTGAEDISSAQIAPGERLRLNKLADSWTAEPPFVEARAADSAKSK

SEQ ID NO: 178461 - protein, 312 aa, unidentified
MTSGTVVGIDVCKRSLQVRVYGENKDEVFGNDADGIMRLAEKMKVLKPELIVFEATGGYERRAVRALNEANFAVTIVNPTRVRRFAEGLGILAKTDKIDAYVIAYFASVVRPSVNSRQTPLEEKLAALVERRRQLIVELTAEKNRLSTCPDCVRDSIEEHVDWMEERIERLETEIQVCIGSKPEWQQRAEIIDSVPGVGIVTATTMVAELPELGQLNRQEIASLVGLAPFNKDSGPKKGKRRIFGGRSGIRRTLYMAALSAIRYNPVIRKFYENLLKRGKEKKVALTASMRKLLVIINALVRKGEAWCYSPV

SEQ ID NO: 178462 - protein, 394 aa, unidentified
MFLVGIDVGKLSHMFCIMDSSNGEILVSPVSFKNNKQGFDFLMGNIKLYPKDKLLIGMEDTGHYHFNLLKFLLDSGYTVALINPITTDLTRKMQLNPTKDDNLDTMTICDVLASSPRKKGYRISKINNFEFYEQKRLTREHHDLKEQLNVYANKLQKCIDIVFPEYNSLFKSKYGTVYMKVLKAFGCANAIAHADIRNIRKCFETNRNGRTISLTPEKLKEAAKHSIGFPSKAEVIEIRHLIDLIELIKEQINDVDIKIEEFSTQLNSPILTIPGISHFSGTSILAELGDLRNYSKASQIIKFAGVSPYKHQSSQYEAQHTAITKKGSRYLRKTLYQVILPVIRYNPVFNEYYHLKLSQGKGHRCAQGHCVRKLLRIIYHLVITNQPFDSTLLK

SEQ ID NO: 178463 - protein, 423 aa, unidentified
MNPNWNQQPYFAALDWAKDHHDVIVVDRVGTIVADFQFAHTAPGWEEFNCHMQPFGKCPVTIETSVGMAVDQLLQRDYTLYPINPLAAKEYRRRKAPSGSKTDRHDAWCLADALRIDGQAWRPLRPQDEATATLRLLCRDEIGLIETRTALVNQLQATLGDYYPLALDSFDDWANPGAWAFVRSFPTPADLTKAGKRKWQTFLHLHKLWRPETAPQRLELWAQGQQLNASAAIVNAKSLLALSLVKVLEALQRQIQEYRSRITQAFEQHPDHDIFGSLPGAKQTLGPRLLSLIGARRDIFPDADSLMCQAGVSPVAYQSGRLCKARLRFACDHFLRHTVHLWVDQSRKKCNWAQTYYQAKRDNGHDHASALRCLGKRWLKLLWRMWQDHTPYDEAKHLGALQQHGSFVWQALQNAATPQPACE

SEQ ID NO: 178464 - protein, 338 aa, unidentified
MTIFAGLDVGFKRTAVCVVDGSGRTVWRGVVDTHPEAIAAALKRWRNGLEKVGLETGSMSPWLAHGLGVLGFPVVCMDARRAADAVKSRRVKSDKADAFALAEMLRAGWYSAVHVKSEESHRLKALLGARDQLVRARRALGNQVRGLLRPFGIRLPSRQGTKKFADAAHQTVALDAMFSASVTALMEALAAIEGQLARLDDRLKELARRSPVCWRLMSVPGVGPIVALAFMAMIEDVGRFGWMRDIGVYLGLTPKRYQSGETDVALGISHQGDMMARHYLYEAANVLLTTVRRPSALKSWGLKLVKRRGPKRARVAVARKLAAVLGRIWKDGTHFAAV

SEQ ID NO: 178465 - protein, 369 aa, unidentified
MDQHSIVVGLDVHKGSITAAVLPPNVARPQETCTIENDARAVERLVKRIMKNGNAVFVYEAGPCGYTLHRQLYRLGCQAAVIAPGLTPVRPGDRVKTDRRDAENLAQLYRAGQLTEIRVPTGEEEAARDLVRAREDAVADRLRARHRLSKFLLRQGRLYDGKQAWSQKHYAWLRQQRFELTLAQQTFDAYLRGVEEADARLASLTTQVLELAQRPSYAALVQGLRCLKGVDTLTAITLIVETQDFRRFGHARAYMDFTGLVCSENSSGDRTRRGSITKVGNAHLRRVLVEAAWSYSHHNSSGATITKRRHGCPAAVVQIARRAQDRLHRRYWRLTQRNKPRPVAIVAVARELAGFVWAIARSISSTTAA

SEQ ID NO: 178466 - protein, 445 aa, unidentified
MAMRKRPDLMYPTAAGIDVGASTHWVCVPSYLAEQAQCDAVRQYGPMTDDLNALADWLLALGVEYVALESTGVYWIPVFEVLEQRGLKVWLVDARQLKHAPGRPKSDVLDCQWIQRLMSLGLLRAAMRPAADICVVRAVVRQRDLLTRAQGQWVQRMQKALVQMNIQLSEVLSDVMGQTGQAIIRAIVAGERDPQVLATHRNRRVKASAVQVRSALTGTWREEHLFVLAQALAIHDDLGCRLAECEAKLQQLLGPRAAHQVDIGKIPRPGTKARQEFDVRQMLANWAGVDLTRINGLGAGVVMTLLSEIGPDLHRFTSVKQFCSWLGLCPGTKISGGKVLAAATKRSVNRARQALKLAAQTLSRSDSALGAFYRRLCARMDKPRANTALAHKLARMVYFMLTRGEAYVDEGQQRYEEQQRQRSIAALKRRAAALGLQVQEITATA

SEQ ID NO: 178467 - protein, 348 aa, unidentified
MKATTIGFDLAKNEFQVHGVDAAGKTVIRKKLSRAQVLPFFARLSPCTIGLEACGSAHHWARKLAALGHTAKLMAPHFVKPYVKANKTDAADAEAICEAAARPNMRFVPVKSVEQQAILAVHRVRSGLVTERTAQLNRLRALLAEFGLIAPRGRRALMERLPVLFANETLPGVARTLFERQSMRIRQLDAEIAAEEAVILDWHRNNELSKRLDAVAGVGPITATALVASFGEGREFANGRQMAACVGLVPRQHSSGGKTKLLGISKRGDTYLRMLLIHGARAVIRTLERRAKGARNPTDQWLTKLLARRNPNVAAVALANKTVRVIWALLAHGRTYDRNWQGQSAAAA

SEQ ID NO: 178468 - protein, 430 aa, unidentified
MKYNTQNAKIASITEKTLVLGIDVGSETHYARAFDWRNYEYSKTPLAFSNDEVGFLTFKAWVEDLKEKHGKTAVIPGMEPTGHYWFNLGKFLQDSGMRPVHVNPHHVKKSKEMDDNNPNKNDRKDPKTIAALVNEGRFSYPYIPTGIYAEIRSLSTLRFQTQEEITRIRNRIARWISIYFPEYKDVYGKMDAVSGLMVLKEAPLPAKIRELGAEGINQIWRNAKLRGAGMKRAKTLLSAAEHSIGSQEAPEAAALEIESLLEDYEKYKGRMAELMGRMEEKIKEVPYVEKLLAIHGIGLKTVCGFLAEVGELSRFDNPKQVQKLAGYAIVKNDSGKHAGESHISYRGRKRLRYVLYEAAISVIGKNAEFREIHQYYQTRDRNPLKKMQSVIAVACKVLRVFYTILKKGVDYNGEKMLQDIRRPGRNIKAA

SEQ ID NO: 178469 - protein, 348 aa, unidentified
MNFYNQQKSFYCGIDLHARNMYICIMNKDREILVHRSIRNNSTDLFLKILQPYKHNLVIGAESTFAWYWLADFCADNNIEFVLGHALYMKAIHGGKAKNDRIDSKKIALLMQGGMFPLAYVYPKEKRAMRDLLRRRLHFVRLRGELFAHVQTINYQNNNSLLPRLANNKSIRNEVPELFANETTRKTVESDLGLIKYYDEFIPKLEWYIFSKTSQLYQKELSILSSARGMGRIIALTILFEVDSIDRFPSVHDFASYSRVVKCTHESAGKKYGTGGAKIGNPYLKYAFSEAACLVAKYNPSIKTYLQKMERKHGKGKAKIILAHKIARAVYYMLKRNTVFDINKFLNN

SEQ ID NO: 178470 - protein, 416 aa, unidentified
MTDEVRWFVGFDWAMEHHRACLLDAEGNRVAERDVTHDGAGLQGLCSWLLERTGARAEEIAVAIEAPRGPVVEMLLERGFQVFAINPKQLDRFRDRFSMSGAKDDSRDAEVLGHSLRTDRRAFRRLAIDDPQVIELREWSRIYEELKQEQSRLANRVRDQLWRYYPQASELGDPAANWFLDLWEKVPTPAKAARVSEQTVARILKNHRIRRFDAAEVLRILRQQPLTVAPGTVEAATAHIRTVAARLRLVNQQIKEAERRLDELCAAIEAASETAPGQICEQRDMAILRSMPGLGRITIATLLAEACEPLRLRDYHVLRVLSGQAPVTRRSGKSCIVLRRYACNRRLQNALHHWGRIAIQHDPISKQRYAELRRRGHGHARTLRTIGDRLLYVLCTLLERQTLFDPNHKTMQSAAA

SEQ ID NO: 178471 - protein, 356 aa, unidentified
MSRDIKYIGMDVHKEATVIAVLNGSGKLVMESIVETKASSILQFIHGLRGELHVTWEEGTWAAWLYDLLQPQVTRVLVCDPRRNALLKEGNKSDKIDARKLADLLRTGMVRPVYHGEHGLRTLRELGRSYQTISQDLNRVMNRIKALYRGWSIPCAGTQVYAPRYREEWLQKIEHVGVRRRAELLYQQLDGLQALRRTLRPELLAESRKHKASKLLRQIPCIGPIRAARLIALMQTPHRFRSKRQLWTYSGLGIETRDSAQYCYVHGQLQRTKKPQQIRGLNRNHNHEMKEIFKGAATRASCGVGPLRDFYVALVAKGMKPEMARLTLARKIAAIALTLWKKEERFDTEQLKPQAA

SEQ ID NO: 178472 - protein, 430 aa, unidentified
MSSTESSNQNPVAAFIGIDWADQKHAIVLRAAASTASLEHRSIGAEPDALAEWVLEVRERFAGQGRILVCLEQSRGALIHFLMGYECFELYPINPKQLASYREAFRPSGAKDDPIDAELLYQFVSLHHRQLRPWHPDDGLTRKLALLCQKRRQAVDARTTLSNQLKSELKQYYPLALAVLDNDLTTALAADFLLQWPNFESLKKTAPHKLRKFFYGHQCRSEQKLQARLERIAAAQPLTRDAAIIEAGTLTVQMLAQQLKALVPYIARYEKEIAQLFEIHPDSALFNNLPGAGPTLGPRLLVAFGTDRERFHSPLEAVTFFGVAPVTEQSGKSRWIHFRWACPKFLRQSFHEFAGQSIRFCDWAALYYQQQRARGKGHHAAVRALAYKWIRILFRCWKTHQPYDPQLYLTALLQRGSPYTSPVKNSSPKT

SEQ ID NO: 178473 - protein, 357 aa, unidentified
MESQEVKYVGVDCGKKSIEVVRINSENSLERRQFSTTESGINNLLQWLTLNDIVGLEAGSQSFRIAKSILNKGVQVIVLNPGNLATIYQSLKKTDKEDSLKIARLIQRHSIEELPTVPIPNDEEEDNRRLCSEHENWTKQLTQGKNRLHSLFTQAGLTQITKKHLRTKVSREASVTLLSDRYKKEAERILKVLDLVEQNLKLIEKEIQEALKKNKAYVQTIMSMPGIGMITSLAIMSYMGDCKRFSSAKQAAYYAGLVPRVDISGDTVRYGRIINRGCHSIRRVIVQAAWSLVRCQHGGKVKEFYQRLYLKKGAKKSIIATSRKMIEVLYVMIRTGKLFDSMPENILNRKLTQYGLM

SEQ ID NO: 178474 - protein, 435 aa, unidentified
MEEVEDEPLFCDRVAGIDIGKAEVMVTIRVPSETRKGGRQQETRKFGTTRTELLALADWLRTWQVERAGMESTSDYWKPVLFLLEREGFDCLLYQASQVKALPGRPKTDKLDSAWLVKITEQGSLAGSFVPPEEIRRLRTHTRYRRKLVQMRTAQKERCEKLLEDAHLKLSSVISDIHGVSGRDMLRAIIAGERSPRALAEMARGVMRRKTARLEEALDCSFFTEEHAFILEMMLDSIDQLTAQIEILDGKIAEMCKPYEQQVKQLDGIPGFGITTAQDLIAEIGTDMSVFPTAGHLASWARQAPRVKESAGKRKGKNATGRGNPYIGGTLGEASVSVGRTQTFLGAKYRRMCTHMPRKKAQGAIMRTQLVIAHALLSDPEARYEDLGPDYYERKADTRRRARSHVRGLERLGYKVSIEAIDPGTGELLPVTTDR

SEQ ID NO: 178475 - protein, 324 aa, unidentified
MLPTLGVDISKDNFHIELSVNNKLRHRRFVNREQGFVELQAWLAKHKAPCVHACLEATGSYSEALALYLHQHGHTVSVVNPAQIKAFGQSELLRNKDDRPDAGLIRRFCEKQQPAAWVPPAPHLRELQALTRHLENLQETRQQQLNRIESTQTKSVIRSLRKIVASVDAEIARTERQIEDHIDSHPDLQQQCELLESIPGIGRRTATKLLAEIADITQYKSARQVAAYAGLTPRNNRSGTIRGKTKLSKTGNARVRKALFLPAMAAKRHNPIVRSFCQRLAVHGKTKMQIIGAAMRKLIHLAFGVLKSGKHFDANHEYPKLLVA

SEQ ID NO: 178476 - protein, 411 aa, unidentified
MATLFCGIDWGESRHDVAIIDQAGTVVSRTKITADAAGFTELLNLLAAAGDTADCPIPVALETDRGLLVAALRGTGREVYPLNPLAASRYRARHQVSGAKSDAADAVLLANILRTDMDAHRPLPADTELAQAIRVLARAQQDAVWSRQKLGNQIRSLLKDFYPAAVEAFASMPNGGLARPEPRTILAAAPTPAKAAKLTRAKLRALLIKAGRQRRIDAEVDRLLTVFRSDELRQPAIVEEAMGMQLTTLLAQFEAACQASDDLEAAAREHFESHPDAAVIGSFPGMGTLVGARVLAEIGDDRQRFADARGLKAFAGSAPITRASGKRTVITYRRIKNNRLASAGSIWALAALKASPGARRHFQTRRERGDWSQQAQRRLFNKFLGQLHHCLQTGTSYDETHAFPPPLDLAA

SEQ ID NO: 178477 - protein, 289 aa, unidentified
MLKLPSAIGRPTSSTAHAARLRLWAEHWPERTWSIEGANGLGHLLAQQLVTAGEVVVDVPAMLAARARQLDRGHGRKTDGIDAQTVAAVAQRRPDLRRVAPEDHAGVLRLLSDRRDELAAERRRVVNRLHRLLRDLRSGGAPIGLSAPMAARLLGTIRPQGAADLERKAMARQLVADLRRLDRALGENRRRCAAAVAASGTSLTSVFGISEVLAAKILGHTGDIARVGTADRFASYTGTAPVAVSSEELTRHRMARGGNRSLNNALHLAARVQLMHPGPGRDHYTRKLG

SEQ ID NO: 178478 - protein, 354 aa, unidentified
MPVYLGVDFHARTQTVCWCDTQDGVIHQRTLDHQREDVRAFYAQLTAPAIVGLESSGYAQWFHQLVQEQGHRLLVGDAHAIRQFARRRQKNDRRDAELLLDLLLHGDFPAVHVPSPASREVLGRLRYRHRLVRIRTMLRNGLQAVALNHQLQLGPRLWSQRGQQQFGALPLAGAAAAQRQHSLLLLTSLHEQITAIEQELDRRAEIDSRVVRLRTHPGVGLLTALAVVHTLEPVTRFDRARRVAAYCGLDPKEHSSGDTVRFGHISKQGNRLLRFLLVEAAHRAVQSGQDDDLRRFYFHLLVKKCVAVAIVAVARKLVLRLYRMLREQIDYDEFRRRGRDARRARETRRPAMPA

SEQ ID NO: 178479 - protein, 366 aa, unidentified
MNKISTDAMNRIENLKGDQLTIGLDLGDRFSHYCILNASGEVIAEHHLATTAKGIDEVFGRIPRNRIALETGTHSPWVSRQLTRLGHEVIVAHARNVRLIGDSSRKDDQFDARTLARLARIDPGLLGPVQHRSAQAQIHLTVIRARAGLVGARTALVNTVRGLTKSYGERLPKCGTQRMNREVAQGLSQELRDAFDPVFREIESLNEWIAEYDRRIERIAKEVYPQVALLKQVKGVGTLIALAYVLTVDDPYRFRRSRDAGCFVGLRPGRRNSGMSQPQLHISKEGDVYLRTMLVQGAHYILGPFGEDSDLRRWGLKLAERGGKNAKKRAVVAVARKLAVLLHKLWVSGEVYEPLRNNHKVVTAVA

SEQ ID NO: 178480 - protein, 351 aa, unidentified
MEFKHYVGIDVSKNTLDVAVIMNANDVPLHIQISNDNNGFKQLTSWFKKIDKFDFCSTLFCMEHTGIYNNPVLGFLLKLSCTVWVENAVHIQKTIGLQRGKNDKVDAHRIAVYATKNKEELNPYKPRRQSIEQLKVLSSLRDQLIGMKKEIKSRINEYQKFGDKTASSLMLKTSKQTQQGIEKDLKNLEKEILKIITSDEQLNQMYELMKSVVGVGHVTALQLIVHTNEMTLVNNPRSLACHCGVAPFERSSGLFKGKARVSHMANKRLKTALHMAALSAMKLDKELKIFYERKVAEGKSKMSVINAIRNKLIHRIFAVIKRQTPYQNDYQPIFNIKTLNEKNIQNSLVLS

SEQ ID NO: 178481 - protein, 366 aa, unidentified
MKKTTPTSSKKETSFLGEVIKLGVDVHIENYVVVMKIDGSAPMRPKRIKSEEFPGWVEELKGKCGKLYSCYEAGPFGYVLHRQLEAMDVTNYVIRPINWDTHGKRVKTDGRDATQMVLCLDGYLRGNDRSFSVVRVPSEAEEQLRSVTRQRQSLCRERGRLAAKARAHVMYYGGRLKGEWWKPRRWKNLQEQLAEHLLALLAPLQTLIVAVDEQIVAVQKRMEQMIAPAMPHGMGTVIFQQMEREVCDWNRFENRKQVGGYTGLCPSEDTSAQRRFQGSITKHGNPRLRHMLIECVWLLMQWNRDYRGILKWRNKLLEAKLTKASKKKIVVAIARQFAVDWWMVRTGRITPEEIGLTMKPLRAISA

SEQ ID NO: 178482 - protein, 332 aa, unidentified
MNLVSTLGIDLAKNTFSVHGVNSHGAVVLRRSLSRAKLSELVVQLPPCLIGMEACSGAHEWARRFSAFGHTVKLMAAKFVTPYRKSGKNDSNDAEAICEAVARPNMRFVPVKSLEQQSDLTLHRVRQGFVEERTATLNRLRGLLAEFGHVLPLRAVEVRRQVPQLLGTLPSRVAACARDLLQHAAQLEAKALEYEHEIRTHVRSNALARRAQTRMGIGPITASALVATVGNGRDFKNGRQFAAWLGLVPSQYSTGGKTRLGHITRRGDAYLRTLLVMGARAVLQRAGSLTDPLSRWAIAVRERRGYHRACIAIAAKNARVAWALLAKEPEAA

SEQ ID NO: 178483 - protein, 345 aa, unidentified
MKHYVGLDVSQKETSVCVVDEAGKIVFEGRATSDPGALSKVIAKRAPAAERIGFESGMMSSWLWHELRHIGLPAVCVEARHAHAVLSMRMNKSDENDARGLAELIRVGWFKEVRIKSKESQAVRTLLAARSRLVMVRKDLQNHIRSMLAEIGLRFPRAVGRAFTSRVRDLTENMPALQEVTGHLLAVYEKVIAEEAKLDRKLRDMARSDDTVKRFMTVPGIGSITALAYRHAIDDPARFKSAQTVGAYLGMTPRRHPSGNIDLQGKVSKWGDRALRSYLYEAATVLLYRTKRRSQIKDWGEQLARRVGSKKAHVAVARKLAVILHCIWTDGTEFEWGKENEMAAA

SEQ ID NO: 178484 - protein, 348 aa, unidentified
MSQLLSTVTVIGIDIGKNSFHVVGLDGHGAPVLRQKWSRGQVEARLANMPPCLIGMEACVGAHHLSRKLKTLGHDARLMPAKYVRPYSKGQKNDFRDAEAIAEAVQRPTMKFVATKTAEQLDLQALHRVRERLVSQRTGVINQIRAFLLERGVAVRQGFRFLRAELPRILTAPPEVLSPRMVRLIGGLAEDWRRLDERIGCLSGEITALARQDAGCERLVSVPGIGPIISSAMVAAIGTGEAFSKGRDFAAWLGMVPKQFSTGDRTILGKISKRGNRYLRVLFVQAAWVVLIKPQSWERHGLKRWIEAAKKRLHRNVLAIALANKLARIAWSVLARSRIFEASKLQVV

SEQ ID NO: 178485 - protein, 349 aa, unidentified
MTLFVGLDVSVKETAVCVVDDTGKVVCEQKVPTEPDDIVRLLASIGEDYGRVGIEAGPLSQWLVNGLMAAGLPVVCVETRHMMALLKAQQINKSDRNDARGIAQMMRVGLFKPVHVKTQLAQEQRMLLTSRKLLQRKLLDVESDLRGTLRNFGLKVGVVSAGKFEARIRELVVGSPRLALVVEPILAVRRVMRQQFAVLHKMLLDTVRHDPVCRRLMTAPGVGVVVALTYRATVDQPQRFVHSRAVGAHVGLTPRRHQSGEIDYDGGVSKSGDTMLRTMLYEAAQSLLTHPGKWSWLKAWGMRVAQRRGMRRAIVAVARRLAVILHRMWVDGTEFRWSNSPAAVVPRAA

SEQ ID NO: 178486 - protein, 343 aa, unidentified
MRIVEVVGGVDTHADFHVAVAVDANGGLLGVESFPAEQAGFERLLGWLGGFGSVVRVGVEGTGSYGVGLARFLTEAGTEVVEVDRQNRQVRRKKGKSDPTDAVTAARAALSGAASVVPKRRDGPVEQMRVLLVARRSARHQKTQDLNQLRHLVYCAPEPIRVRFKDRPQTSLVKKAAAMRPNPGSDPVSHTTNLVIRNLARRVLSLNTEIKEIDGLLTGLINQTAPALLDLYGVGADGAATLLVTAGDNPERIHSERSWAHLCGVTPIPASSGKTIRHRLNRGGDRHANSALHRIVLTRMSNHTQTREYVARRRAEGLNSLEIMRCLKRYVARQVFKHLPAPT

SEQ ID NO: 178487 - protein, 313 aa, unidentified
MKKTICGVDVSKAKLDVCIEPGHRLTSFNNDTAGIAELAAFCREHAVRLVVMEASGGYERRAFVELWEKGISCALTNPRNVRRYAEAMGILEKTDRIDSSVIARFADAKNLGPTPLPSRAQQRLKALVTRLRQITDDLTVQKQRRASMFDSTEMRSSVDEVIALLKRQSRSLEGEIASMIDDDPLWAKLAETWREVKGVAGRTVARLHAELPEIGTLSNKAIAKLAGLAPIANDSGKRKGKRPTRGGRAGVRSILFLVAATAARYDKSLADFRARLVAAGKEKMVIRIALARKLLVRLNAKARDARAQYANAT

SEQ ID NO: 178488 - protein, 343 aa, unidentified
MGEVSTIGLDIAKSVFQIHGVDAGGAVVIRKRISRAKLLEFFATLPTCLVGIEACPSAHYWSRRLQGLGHTVRLMPPSYVKAYVKRGKNDANDAAAICEAVTRPSMRFVATKSEQQQSGLMLHRSRQLLVCQRTMLSNAIRGHMAELGIISAKGRNGTAELLKIIADEQDDRIPAAARFSLNVLARQYAAIRAETVAIERRIHAWHRSSEESRRLEEIPGVGPIVATALMAEVGDWKTFSSGRSLAAWIGLVPRQHSSGGKERLGRISKQGNRHLRWLLVAGAMAVIRYARQHGTKRPWLARLMDRRPLKVAAVALANKIARMAWAMMVRGERFKEPKLLPAA

SEQ ID NO: 178489 - protein, 388 aa, unidentified
MEVRLVDTASTAHDDASARCLIAIELSKTSWVVGVQTPLSNKTSQHRLAGGDWEGLLKLIERIRRQVGRELSRPVEMISCYEAGYDGFWLHRLLTAAGVHNHVLDPASLLVNRRARRAKTDRIDVERMLRALSRHLRGEPDACSVVRVPSVEQEDARRLHRERHRLIQERVQHVNRIKGLCATQGIYDYEPLRSDRKAQLESLRTGDGRALPARLEAEITRELQRLELVVEMIAGIEAERDAIVKKAAPQPLNADKIKALVRFKSIGMEFATTLVGEVLYRSFDNRRQLGSYVGLTPSPYSSGSTDRDQGISKAGNPKARSTMIELAWMWLRHQPDSTLSIWFRKRVGDLKGRPRRIAIVAFARKLLVALWRYLETGLVPAGAVFKTR

SEQ ID NO: 178490 - protein, 405 aa, unidentified
MRYVGIDIAKKDHQIAAVDEFGNVILKSFSAGNNESGFAKIAEKLEAARIESDECLVGMEATGHYWISLWEFLDANGYEVVVINPIQTDAFRKVDSLRKTKTDAIDSVLIAEYLRFANPESSKMANPDVEQLRELARFRSFLVEQATQLKNKAIRVLDQAFPEYGKLFSNTFGEASKALLKQCPTPEEVLATRHPHAHAHPQGKQWGHCVGPKPRQSRTPPGARSAPSSAPVPCLEIKLLVKRLSFTQVQIEELEDEISELLHRSDGHWLTTIPGIGDSLAASIAGEIGDPDRFETPKKLIAYAGMDASKYQSGANQDTNGHMSKRGSSELRRALMLAADKVRIYDPYFGEYYDSMKARGKHHYVALSGVARKLAGVCLSLMREQRPYESEPPEHHLPGHLQRQA

SEQ ID NO: 178491 - protein, 372 aa, unidentified
MSANGITWVGMDAHKNSIKVAVLSPGPAEAVEWTEDTTSEAIRRLARRLQRLAPGGVRACYEAGPTGYALQRQLRTHGVDCIVIAPSLTPVKPGARIKTDKRDARKLAELFRAGLLTEVQPPSENDEALRDLCRCRDDVRVDLLRARHRLTKFLLRRHCIYRQTKHHWGTRHMAWLEELRFDDAVSQVTFDSYFLSVQQLEERQRQLDQRLAEYGGVEPYRDRVAALRCFKGIDTVTAVCLVAELHGFERFRSPRQLMAYVGLVPSESSSGEREQRGPITKSGNRHVRRLLVEAAWHHRHRPALSAPLRARREGQPARVLAIADRAQERLCARYRRMTEHGKVHPKTIVAMARELTGYLWAVLHPAATATRN

SEQ ID NO: 178492 - protein, 457 aa, unidentified
MRRHGGARAAAAGGLKRLHPNVAGIDLGAREHWVWGPAGTDGTANIRTFRTTTPELERLVVWLQEQGVVSVAMESTSVYWIPLYELLEANGIEVVLVNARHLRGVPGRKTDMLDCQWLQTLHSCGLLKGSFRPDESICQLRALQRERANLVAERTRIVQRMQKALDQMNVQVHHAVSDLTGKTGLSIVRAIVDGERTPAELAKLRDKRCKKSPAQIAEHLTGTWRDDHLFNLKMGLRRYDDITRLISEYDAQLSRWIAELQAPERREQTAPTHPNAAKEKAIRARGDGAKRDVLWRFAGVDLTRIDGISASAAEIVLTEVGLDLTKFADESHFVSWLRLSPKLSISAGKPVPKRNKGTGATRVAGVLRMAALALTHSNTALGAYSRRIARRKGGAVATFATARKLAALIFRMLRYGQDYVDEGVAAYEARFQQRRLHQLVETARQLGYQLVPALEAA

SEQ ID NO: 178493 - protein, 416 aa, unidentified
MKSLSQFVASIGIDWADQKHDLCIRSASGDLEFSTLIHSAESIDEWANSLRKRFDGKPVAICIESRKVPLVHALLKYDFFVLFPVNPQTLARYRNALRPSRAKDDPSDAQLLLDLVSRHPEKFNPWSPERPEIRALTHLVEMRRTLVADKVRCTNRLTAALKSYFPQALDWFEDKDTLVFCSFIEKWPSLQAAQRAREPTLRKFFTDHNVRYPEVIERRIKAIKKATPLTHDLGVITPNQMLVFALVHQLALLLGHIDNFDEAIAKRFKALEDAPLFNALPGAGKHLAPRLLVAFGEDRARYDSADSLCRYAGIAPVTERSGNKSWVHWRYSCPKFLRQTFVEWTKETIRYSFWAKAFYQLQREKGKTHNMANRALAFKWIRIIWRCWQDKKPYDEAKYLMALKAKGSPLVAELAK

SEQ ID NO: 178494 - protein, 351 aa, unidentified
MPRTATVHAVTTIGIDMGKNTLHMIGLDSRGAIVLREKVSRGRITSRLANLPPCLIGIEAGMATHYVTRELAALGHDVKQVPPTYAKPFRQGHKNDFRDAHAVAEAVQRPTTRFVPAKTNEQLDLQALHRVRSRLVSERTAVINQIRGFLLERGIIVRQGLRFLRQALPDILAKRTDVLSPRMVRIVADLASDWRQLDERIEPVTDEIETLAKSDDNCRRVMTVPGIGPIISSAMVAAIGSGAAFARGRDFSAWIGLVPKQMSTGDRTILGRITKRGNGYLRTLFVQAARVILLRPASWSKHGFGVWLARAAQRLHRNVLAAALANKLARIAWTVLAQERSYEARITKPAA

SEQ ID NO: 178495 - protein, 338 aa, unidentified
MIAVGVDTHKEQHLAVAVDGLGQVLAEIIITANLAGYHKLIGWLARLEGQVLVGIEGAGSYGAGLCEYLQAEGIEVFEVERPRRRERRSGKSDKVDALLAAKKVLAGDGLSTPRGSGTRVALQMLLVAYRSVIGERSRLYNQLQGIHVSAPGALRERIGPARNGAKLAERLTGMRTRPTASLQENTTLQVLRDIANRTRTLDAQAQSYTREIEELVRSLAPTLLDEPGVGPICAGKLIAFNPARFTSEAAFARANGTAPQPASSGKTVRHRLSRGGDRQINAAIYTIALSRSVHHAASRAYMQRRIDEGKTKREAMRSLKRYLSRNLYNQLTKTPLTT

SEQ ID NO: 178496 - protein, 459 aa, unidentified
MSRRHQKQKRASQGGAVPSLSCIEPNAAGIDVGATEIFVAVPQDRDPSPVRSFETFTEDLHQLKNWLQQCGITTVAMESTGVYWIPLFQILERAGMEVCLVNAHHVKHVPGRKSDVIDCQWLQYLHSVGLLRASFRPEERICAIRSLLRHRDSLVQMAAAHVQHMQKALTQMNLQLHHVLSDITGQSGLAILDAILAGERNPAVLAQLRHARVQASEEVITKSLVGDYQREHLFTLRQSLQAYRYYQSLLTACAQEIEEQLQNLDSRTPPDASPLPPERYPHRPRKNEFRFNMRSELYRIYGTDLTAIPSINALTGYTVLAEVGTDWSKFRNGDAFASWICLCPQNKKSGGKILSAHTRRSANRVNRALRLAAQTLERSTSYLGAYYRKMRARHGAPVAITAAAHKLARIIFHLVTTGEAYDESLFAAEEQRQRKRMENKLKRSAQQLGYRLIPLEQIA

SEQ ID NO: 178497 - protein, 341 aa, unidentified
MEFKYVLGVDMSKDWFHICLMDRRFQIVLEREVVNRSDEIMDFISELLTLQGVTDIKSIFLCVEHTGLYINNLVRNWMLKGGQLAVIPASKISSALAGDLGWVEKTDLIDARRIAEYGIRFSDKLQCYTLRNKTLDLIQGLQRQRKRILDAINQLEVPVAESKIFASANIVEQLEKNQKNIIKSLRTALDKIEKMMVRVINEDPNLKRVYQLITSVPGVGPTTAFEIIIATEGFLKFTPDQAKKFARYAGVIPMKQRSGKSVRKRPKTTKRANSRIKPLLTMGARSLIKGQNAIGQYYRRKTEEGKPHFSVINAIRNKLILRIFAVVRNDTMYAADYIFVR

SEQ ID NO: 178498 - protein, 355 aa, unidentified
MDSTKYIGMDVHQASISVAIRNAAGKLAVESIIETKARTILEFIQGLQGSLWVTFEEGTSAAWLYDLLKPHVAKVIVCDPRKNALVNAGNKNDRVDAWKLSHLLHAGLLTPVYHGESGVRTLRELSRSYLTVNKDLTRVMNRLKALYRSWAIPCAGEKVYSPRHRSAWLEQLTEPGVRRRAEQLYQQLDGLVQLRRQVRRELLTESQKHPAQELLRQIPRLGPIRVALLIALVQTTHRFRTKRQLWAYCGLALQTHSSGEYRFSEGQLQHSKRPPALRGLNVNHNHDLKNLFKSAATHVSTSTGPLGDFYQSLLAKGMKPAMARLTLARKMAAIVLTIWKKGARFDPGQLKQQAA

SEQ ID NO: 178499 - protein, 426 aa, unidentified
MKSTTQNAKIAAITEKTLIIGIDVGSETHFARAFNWRGYEFSWKPLEFSNTEEGFETFRIWIDELKEKHGMEKVMPGMEPTGHYWFNLGKFLQDNGMTPVHVNPHHVKKSKELDDNNPDKNDRKDPKVIAGLVKDGRYFRPYIPEGVYAEIRALSGLQVLAQSEITRLKNRIARWFSIYFPNYKDVYGNVGAVSGLMVLKSAPLPEDIVKLGVDGVNRIWRDAKIRGVGLKRAKTLVAAAEHSIGSREAQEAARVELKILLADYEMQTEREAELMALIEEKVAEVPYVDKLLEIRGVGLKTVIGFVAEVGDITRFDDPRQLQKLAGYAIVKNESGKHKGESHISYRGRKRLRYVLYEAAVSVVSHSPEFKSIHQYYTTREKNPLKKMQSMIAVACKLIRVFYLILQTGATYDAAKLMGDIRRPVAA

SEQ ID NO: 178500 - protein, 411 aa, unidentified
MSAQYSVGIDVALRAHRVAVLGPDGEAVGKSFTIAATAAGFAELVRSLRARGADPAHAVIGLEATGHLWENLEGHLTRVGYRVVVLNPLQTRRYRDVLRKKAKTDDVDAYVIAGLLRSGEAEASYVPDEPIQSLRELARLRARLLRERQDYLRQLMAQLTVVFPEYPAALGDLLTARARGILRAWPTARHLAQATPRAIHHAAHSAGARGFTLEEATRVRDLARQSTYSGKAATARGNVVRTLVTQIERLTAALEELDAAMVAELPPPAAGAGPSDAALLQTLPGIGPQTAATLLGELGTMSRFASAKALVAYVGFYPQLAESGERKEAPHLAHLGSRVARHALYLAAVNAVRRSAEWRTLYLRKKAQGKQAKQALIVVAVKLLHTIYAMLRDRRPYQPSRLLVAPATIGA

SEQ ID NO: 178501 - protein, 370 aa, unidentified
MRKLATLFIGLDVHKESISVAQVPDDRRADVTYVGRIGTRPADIDRLVHRLQAKADRLVVAYEAGPCGYVLYRNLTRRGITCLVVAPSLIPKKPGDRVKTDRRDAVQLARLLRSGDLESVYVPSVEDEALRDLCRAREAAVVTLKAAKFRLKSFLLRLDLHYTGRADWNDAHLRYLAKVVCPTPAQQIVFQESLRAVDEQVQRLKRLEAELIDLVPAWRLAPVVRALQALRGVQDTVAVTMLAEIGDLTRFDNPRQLAAFLGLVPSEDSTGESRRQGPITKAGNGHARRVLVEGAWAYQYPAKVSPAIRKRLEGLPQPVQDIAWKAQVRLCKRFHRLVARGKHPNVVVTAIARELAAFMWAIAKEVPITA

SEQ ID NO: 178502 - protein, 418 aa, unidentified
MKMVRNKVCGADIHKKFLVATILSRDGTQISERFGMKLDDILKFKEWVLENNCEQVAVESTGVYWVPIYTVLEDKIEVIVANPYQIKHTPGRKTDQRDSEWIAELCLKGMIEPSRIFPKEARELRTLTRARATLVNNRTQMKNRIHQALESSCIKISSVLSDIFGKSGRYILDGLLEGKIVDEILVGIKSKKIRKKDQELREAIKNSLDPAQIFVIRICLELMEEIQKKINTLDIEIMSRIERLKEDVEIAMSIPGIAFTSASSILAEIGNYRDFANGNKLAAWCGLVPKVYESADKRIIGSITKQGSKHVRRMLVQVAHAISRTRNTRLKSFFTRIKAKKGTKVAIVALARKVLCILHHLLVNREMYEEIGNLKPKQPLKFDRTSSPIQVTEQDMIETLVKAGYIIKKMDTRVDAGG

SEQ ID NO: 178503 - protein, 396 aa, unidentified
MVTVGIDIGGRTHVVARCRDGQARADRETVRVSQSRAGFASFDAWLERQPEPVTLMAMESSGHYWMPLASHLRRREIPVAVVNPLAAKYFARSRLGRTKSDPADARSLAEMAMRDSPATRDPLAGAELRQAARFAMTLVTEQAKVCQRLIRLVELGLPELGELFDDPTCRTARGVLRIAPTARAATRRRPSTLANANAGPGRRRLGVTKAERLQAAAADSIAVPELDAEVAFEVGLLLDQYDLLERQIEDADRRVATLLDGETARRLRTIPGVGPSIVATLLAEIGDIERFSDFDQLLAYAGVHPAERSSGKKGSNPETSWPMSKAGNSHLRAAAYRMAIVGVQHNPVIAAHYARKRAAGKSKMNALGHCMRKALSIVWGVWRNGADFDPDWGVEA

SEQ ID NO: 178504 - protein, 499 aa, unidentified
MRSSDRIFDPVGEILKPFVTGPNSILIPIEEKKMSAEKPLRNRKERKELTRRLQSENPGLEVVHPDAAGIDVGNEAHYVAVRPDRDAESVRKFECFTADLYRLAAWLKKCKVKTIVMQSTGVYWIPLFDIMEEQGFEVYLVNARHTKSLPGRKSDVQESQWLLKLHTYGLLSNSFQPPSEIRTLRTYWRQRAEHVAGASTCIQRMQKALTQMNLQLANVISDLSGTTGQKILRAIVAGERNSLKLAELRDCRIKASQEEIAKSLEGNWRPELIFVLQQQIDIYDSYQRWIAECDQQLQKHLAEFADHRNGILTPSPTGQGDKKKTAARHTPKFDLGGELQRIMGVDLTRIDGIDVMVSQTLLSEVGLDMSRWKTEAHFASWLGLCPDNRTSGDRVLRRGTRQVINRAALALRIAAHSLLRSKSYLGAQYRRLRTKLGAPKAITAMAHRLARLVYRMLKYGQQFVDKGMEYYDQRYRNQQIHLLQKRAAQLGLQLVSVQT

SEQ ID NO: 178505 - protein, 332 aa, unidentified
MTRTTTTTPSASEPVYVGIDVAQHKLDLARSDAPGPVLNFDNDTAGIAAIVRLLLSARPAVIVVESTGGLERPLLDALLEACLPTALVHPGRVRYFAKGLGILAKTDRLDANVLMRFARLAAPRLMQKRSAGQAELAALVVCRRQLTLVRAEQTNRRHATANKAALRCINAVLTALDKQVESLDKQIRNLLNADDDFKHMDTQLRSAPGVGPVLSATLTAELRELGQADRREIGALVGVAPFNHDSGKLKGKRAIRGGRTAVRSVLYMATLAAIRCNPVIKAFSDRLKAAGKQKKVVVVACMRKLLSLLNAMLRDGLTWEQLDVVKKFVPTH

SEQ ID NO: 178506 - protein, 370 aa, unidentified
MGAIRVCFKVACGLDVHQAEVVACLSTQDARGRLKRVTRRFRTVYSELLQLRHWLVSEGCEALGMEATGHYWKPIYSVLEGHVRMIVGNPTQMKGLKGRKTDQQDAEWIADLTRLGLIKPSFVPPPDFRALRDFLRTRRGMIQARTTLQNETLKLLEVGGVKLSTFMSSVFGVSGMAMLRALARGESVAAQVHLLAKGKLRSKLADLRLALEQPLPLHLQQILAEIGVDMGVFPTPAHLAAWAGLAPGSFETGGKSKRAPTLRGNTYLKTMLVECAAAAIRAKGTFFSAKFNQLRRRGLDYRKALVAIAHKLIVIIHRVLSGNAPFHDLGATYFEQRNRARTIRNLTRRLESLGFAVSLQNLNIDPEQSQ

SEQ ID NO: 178507 - protein, 367 aa, unidentified
MIINRTRQIDVPLVKKDRWRARIAVSNTHEPEQLPGHLSPYPARLGTKVLYSEGKMDSKSYVGIDVAKDHLDVALRPEGTTWTIQNNDEEIKELGAQIQKINPDLIVMEATGGLEINVASKLALTGLPVAVVNPRQVRDFAKSTGKLAKTDTLDAQVLAHFAEAVHPEPRYLSDEQSRLLKALIVRRRQIIEMCVSEKNRLRLCNKATQEGIIDHIAWLEESLKNLDEELAQAIQASPIWREKDKLLKGVPGIGKITSSVLLASLPELGTLDRKKIAALAGVAPFNRDSGTMRGRRTIWGGRANVRCALYMAALSASRTNPVIRIFYDRLIKAGKTPKVALTACMRKLLVIINSMIRYSTSWRCQIT

SEQ ID NO: 178508 - protein, 520 aa, unidentified
MHQTKYRGIITEGRIIDVSSLGASGFPLVKPLRKSVNPFGGDLCFGWLGSLRLYLYKPLGCVSTLWKWMPAGKDITMHYHKVLEMFESIPYLSVGLDVGADFTWMSIMLPNGILTGKPFKIIHSDPQSRELAVSKIKEAQEMYSLESRCFLESTGIYHIPLLYFLRDKGFDCAVINPIITKNSTNRNVRKLHNDKFDSKKAAKVGLDASLKASIVPDDAIIDLRNLVRDYYYFKDLQSAIVLKLHAELKVSFPAYLNVFSKVTTQTSLKLLEAYPLAADMLAAPKDELVEIIRSTARFGEKYALAKYDAICTAAKDAAVFGRALPSNALRIRLYIKMYREYQAHLDSILEELHQAVDKLEGTPDYDRICLIQTLHGIGFLSAVVLIAEMGSFDLFPSPKKLYAYFGLDPGVNDSGKFHGDRVHMSKRGSSLARRILHMVAINNLKVDKATKAPVNPVIYNYYIRKCASKKKIVAVGAVMHKICNIIFAMLRDNKPFELITPKEHCERYATEHPESVNNAA

SEQ ID NO: 178509 - protein, 366 aa, unidentified
MPSVAHLGPTHLGLDVHKDTISVAILAPDRDGPDVDRILHDEPSLRRLVGRLGDPRLLRACYEAGPTGYELARLLASMHVHCEVIAPSLIPKAPGDKVKTDRRDARRLARLHRAGELVAIRIPTAQEEAVRDLCRARADLVEDRTRARHRLSKFLLRHARPWRGGNAWTLTHERWLLAQRFDQPALAATYAHYRAVLDVRDAQLEAIEADLATWYDAAPFADAVHRLAAYRGVTRLGALTLASEVCDWRRFARAAAFTGFCGLVPSEYSSGTSTRRGHITKTGNAHLRAQLVESAWAYQHRPAVGVDLRERQRGLDPAVVARAWAAQLRLCGRFRRLAARKDSTNVVVTAIARELAGFLWAEMLVA

SEQ ID NO: 178510 - protein, 319 aa, unidentified
MLCAGIDVSKPHLDLALVSTTAKPTRLRFPNTPEGRQALLAALAHHRPTWVALEPTGAYHLPLLQLLAEKGLQVALVNPYHLAAFRRATGERHKTDRQDALLLARYAQVCGESLRAYTLPPKALQELKALVGYREDLAQRERAILNQLEAARWAGSEEILVLLQRELACLEGLLGEVEGRIQALLAALPEAEVLMGLPGVGPQVAAAVLALLPPHLWGKAKAAAAYAGLIPEREESGKSVERSWLSRKGPPLLRRKLFMGALVAVRRDPEMGAFYRRLLSRGKRKKQALVAVAHKLLRRMMGRLREYYAGQSLQVQGVA

SEQ ID NO: 178511 - protein, 387 aa, unidentified
MPQPNDLSRSLVAVDQNSTIIAVIELSQSSWLVGGVVPGIERQPRKKLEPSPERLLAVLHRWRDEAVRAGRTITRIALAFEAGRDGFWLARWLERRGVEAHVIHPSSVPVSREHRRAKTDRLDTELLKRGFLGWLRGERGHCSMARVPTIAEEDAKRPNRERESLVGERTRIVNRIKSTLARLGIRNFKPTLRKAAERLASVHTPEGMPLPPNALAELQRDMARLGFVVSQIREIEDARQKRLEQQPETGAHAMVRLLARIVGVGVETADMLVHEVLSRPMRDRRAVARYAGLTGAPDESGGQRREQGLARAGNARVRRGMIQLAWRFLLFQKESALAHWYRARTADSRIGTRKTMIVALARKLIIALWRFVTTGEPIEGVVLRPAS

SEQ ID NO: 178512 - protein, 349 aa, unidentified
MDRTTYGLDIAKNVMQLHWVEAETGEIGRRKLARAKLSAYFAELRPVRIVMEACGSAHHWARVFTGLGHQVELLPAAQVRPFVRSNKDDAADARAIWLAAQQSDIRRVPQKSVQQQGVLALHRTRQHWISVRTATVNSLRGLLYEFGVVLRGGRKAGLKALAEQRAAIDEQIPVTMRSLVDGQLQTLAQIGERIDALERQIAALQEQLEGARELDQVPGIGVLGSTALAATLGDAKAWRSGREFSASLGLVPAHAGTGGKVRIGHLSKRGDPYLRTLLIHGARSVIEHAKNKPKWLEQLLARRPKNVAVVALANKMARTAWALVAHGRTYQRDWQSARPGSAVAQAAGA

SEQ ID NO: 178513 - protein, 371 aa, unidentified
MCSSTLSGTTPASRARRRRPVGEVVLGVDTHRDAHVAAVLSLTGAVLAIDEFPATAAGYRDLLKWARKSGTVGRAGVEGTGSYGASLPRFLLAQGVDVFDVNWMDRADRRRRGKSDPLDAQNAARAVLSGRARARAKTGDRPVQIARMYKLTKASAVKARTQAINQLKAVLITADPALREELAGLGNAELFRICARFADASSCEQAGEESVLQATRITLSWLAHRIGQLSEQIRDVETRLGRLVKCHAPQLLDVVGIGPDTAVTLLITVGDNPERLDSEASFAALCGVSPVERSSGRRQVRRLNRGGDRQANAALHRIVFTRLRVDPRTQDYYERRIKEGKTRREIVRCLKRYAAREVFHLVKQLQRAPRS

SEQ ID NO: 178514 - protein, 365 aa, unidentified
MLYLGIDQHKRQLTVNLRSEEGSVILKRQVSTQWEKVRAFFADLAEKARPEGGFLAILEVCGMNPWLLEMLHDYGCRETVVIQPTERSKQKTDRRDAGDLSHLLWVHRQQFLEGKHPQGLRRIQPPTPQQADDRQLTALRARLTKKRTAVLNGLHKILRKHNLEQKCPTKKFQTQKVRRWLTEIELPGVDRLEVNLLLPQWELLDGQLEVVEVKIAERAADDEQVKLLESVPGMGHYSAVAIASRIGNIQRFKRADSLANYFGLTPGCRNSGDVTQRLGSITKRGSKMVRYLLNQAVIKVLRFDGAMRGWFKRIKRRRGAKIARVAVMRRLATILWHMLTRKEKYRYDSPIKKHQEFEAFEGATA

SEQ ID NO: 178515 - protein, 373 aa, unidentified
MSDYSAFVGLDVHKDTIAVAVADAGRMGEVRFWGEIANTPDAVGSMLRKLGGRHPLMHFVYEAGPCGYDLHRQIMLTQHHCEVVSPAQTPRKPGDRIKTDRRDAIILARLSRAGELTSVWVPDTIHEAMRDLIRLRQAMVKDLRAARQRTKSFLLRYGRVFKGTSWKRSHRVWLGNQSFAHPAQQIAFQSYLNAVDQAQARRDEVDVQIRIFASDWAMAPVVTALQALRGVAFITAVTVVCEVGDIRRFDKPRQLMAFLGLVPGERSSGETRRQGGITKAGNVLARSVLIEAAWSYRTPAKIGAQMMLRQEGIPQAAKDIGWKAQVRLCGRYRRLMARGKKSALAVTAVARELVGFIWAIAQITEPTGAEGAA

SEQ ID NO: 178516 - protein, 337 aa, unidentified
MIMIGCDFHPGLQQIALLETETGRREDLRLTHDGEGAQVRQFYAALPHPVRVGLESSGYSLWFEELLEELGHELWVGDPGRIRKAAPRKQKTDRNDARLLLQLLEEKRFPRIWVPDRATRDLRQLLMHRHKLVTMRTAIKNQLQAIALNRGLQRHHKLWSEDGRERFETLALPPWAERRRNHLLRLLDQWDAEIAELDQVVRREAEAHPDACYLMRRQAGIGPITALATVLTLGPVERFPTSRKVASYAGLIPTENSSGPHQRLGHLSKQGSPFLRFLLVEAAHTAVRFDPNFKRAYWRLVERRGKPIAQVAMARKLLTHLYWMLRRRREEPCSQPA

SEQ ID NO: 178517 - protein, 378 aa, unidentified
MNTEWNQQSYFAALDWAKEHHDVIVVDRHGIIVADFQFAHTVEGWSQFDQHLQAYGRPPVAIETSCGMVVDQLLQRDYPVYPVNPKAAKRYRERKAPSGTKTDRLDAWSLADALRTDGHAWPVLHAQDEATATLRLLCRDEISLLEERTALVNKLQAALGEYYPLALESFDDWTKPFTWAFVRAFPTAVALRQAGKRRWEKFLHLHSLWRAQTAPQRLAAWAGGQQLQASPATVKAKSLLVLSLVAVLQSLQQQIQEYRRQINEAFAQHPDHDIFGSLPGAKEKLGPRLLAELGSVREIFPDAQSLMCVAGVSPVSYQSGQIRKSHIRWACNRVLRATVHLWADESRRTCAWAQAYYQAKRAQGHSHASALRCLGNGG

SEQ ID NO: 178518 - protein, 350 aa, unidentified
MMIIGGDLHTRYQQIAMVDTDTGELVERRLEHESGEARAFYAGLKGAVRVGIEATGHTAWFEALLAELGHELWMGDAAKIRAAVVRKQKTDARDAAHLLDMLCTNRFPTIWRPSLPERDLRQLLWHRQKLVWMWGAVKNQMHALAMGEGVCRKKKLFTAKGRTELEGLKLGPWASYRRQELLRMFDELQSSVKKLDQAVELAAKSEPLAARLMTHPGVGPITSLAFVLIIGPVERFDRSKQVVSYLGVNPQEHSSGGRQRLGSISKQGNPMMRSLLVEAGHTAARLDPQLQRVYQRLKFRRGAAVAKVAIARKLAVRLYWMLRSTADYAQLVRMRGSSWATLVEDSPSLG

SEQ ID NO: 178519 - protein, 391 aa, unidentified
MIYVGIDVAKDKHDCFITNSDGEALFNVFTVANNLEGFNDLFNKIISVETNPDNVKIGLEATGHYNYNLLGFLIDKGLPTFVINPLHTNLFRKSLSLRLTKTDKVDARTIALMMMSGVNLQSYSDKSYHNEELKSLTRYRFDKVQERAKLKTSVARLMVILFPELEKLVPTLHMASVYALMTEFPSAKAIAEAHLTRLSNLLQKTSRGHYTKNDALLIREAARTSIGTSMPAKSLELKHTIKLIQEISSEIDEIEQQIELIMNTLNSPITTIPGINLRMGAMILAEIGDFSRFDSPDKILAYAGLSPTTYQSGQLDSSYSHMEKRGSRYLRYSLFNAAKFVCIWDPTFSAYLAKKRAEGKHYNVAVSHAAKKLVRVIYQLEKTGQPYIKAS

SEQ ID NO: 178520 - protein, 427 aa, unidentified
MNISECSLLALKCQDRHTKILHQRALSHKLYLFLGRFKPQICKPMKAVCGLDVHKDSVYLCILSEFGELIEKVFGVLTYQLEEMRDLMLHHHVIEVSMESTSVYWIPIWRVLSPHFKLNLANPYFIKQLPGRKSDVKDAQWIAECTMKELIRGSFVPPETIQQLRQYDRRIFDLNEEIVRKLSKLDAVLQRCNIRLSNYVSNVDSKSYKAVVRAISQGITAPEELVKLIHGRIINHHGIDVITASLKGVVSLAEIDMISQLRDELDMAEAHKEKCQARMLEICEREFPEELRRLQTIPGIKERTATSLIAEIGTDMNKFETANHLASWSGLKPRNDESNKKIKSRSITHGNVYLRKTIIECAWAASRTKDCFFSRFSYHQTQVRKKNKMKVLVAVARKMLIAVWHVLHDNTIYIDFTTDRKTSRTKG

SEQ ID NO: 178521 - protein, 456 aa, unidentified
MSKQRKSTMPAVHAKPMQRKHAAGIDIGATSIYVAVPVDRDPQPVRSFQTFTEDLHRLADWLQRCRIKTVAMESTGVFWVPLFQILEQRGFEVCLVNARHVKNVPGRKTDVSDCQWLQYLHSVGLLQASFRPAQQVCALRSLLRHRDSLVQTASTYAQRIQKALDQMNLQLHHVISDITGVSGVTILDAILNGERDPRKLASLRDHRIKATEETVAKSLVGDYRPEHLFTLRQSLDAWRYHRKLIAECDDEVQRHLVQFASKADPKQNPLPHPRKVSSSKVYSSQPGYDLRTEHYRILGVDLTEVPGINTLLVHTLLAEVGPDLSKFRSAAAFASWLGLCPDNRISGGKTLSVRTRHVQNRAALALRIAAHTLHHNQSVLGHYYRRMRAKLGAPKAITATAHKLARILYHLLTTGQPYQESIFAERETQNQKRALFSLHARARTLGYQLIPLTAST

SEQ ID NO: 178522 - protein, 347 aa, unidentified
MHYVGMDCHITTLDFAVVDDAGRLVKSCKVDTSAKNFMEFVKSVAAPRIVYTEESALAAWALETCIRFGEKLVITDPKQNHWIGSSTQKDDPLDAFKLAQLGRGGFIKEIRHPVGDRRRFRELMDCYHDTVKSTTRIKNKIKSKFRQNGIHCTGMTVYSETYREEWRQKLPQDQTLLLIVEGLWNQLKESEQTEKNLLKAARNFAKHYPEIELFEEIPGIGFISAATISAILETPHRFANKRKVWMYAGLGITTRSSGGKTYSEKLSTDYNRLLKYTLKQVAETAVQAKDNPFRQKYLAMTTLRGIAPHRAKLTISRDMLATMWAMWKKGEKYNPEIRRSPGYKQVS

SEQ ID NO: 178523 - protein, 359 aa, unidentified
MLVECRSVGLDVHARSVAAAAIDGVTGELKRARLTPSHDHIRSWLGELAGPVAVAYEAGPTGFGLYRSLTALGIRCVVAAPSKLQRPSGDRVKTDARDAVHLARLLRLGELTAVCVPSVDQEAARDLVRAREDCRGDLMRARHRLSKLLLRQGIVYCGGNAWTDAHDRWLRRQRFDSPATTTAFESDYDTILTVAARRDRLDTTIAELAADSEFTPVVRRLACLRGISTLTAFALAVEIGDWHRFTGNTIGSFIGLVPSEHSSGASRVHGSITKTGNTHARRLLVEAAWHHRASYRPGKTMHQRWELAPAAARARGDAGNRRLHARWITFNLRRKRPVIANVAIARELAGWCWSLAVMD

SEQ ID NO: 178524 - protein, 409 aa, unidentified
MELTPIYKRVIGLDVHQAQVTACALIEQADGTLIVERREFGGFKKDRKALAEWARGLAPDLVVMESTGIYWKSPFAALESVGIVAWVVNARHVKAVPGRKTDVADAQWLATLARSGLLRASFIAKADMRNLRHIARQRQKLGGMLASEKNRLHKLLTDAGIRLGVVVSDLHGQSARAMVKAMIAGKSISAVLDLASTRLRANRKEIFEALQAEELTAAHRFCLDEIMKHIEEIEARMTRFDQELLRCLIEAGHEWSLQLLQTLPGVDVIGAAMLLVEIGDDMNVFCSAQRLASWVGLCPGNNESAGKRKSGRIRKGNAWVRRLLCEFAQAASRSRCALRGKFQALTVRKGHKRSIVALGHKMLRTIYAMLSKKTHYVDKTVDYEALMVARNAPRWLQMLVKHGFITATA

SEQ ID NO: 178525 - protein, 386 aa, unidentified
MLQTTLTTHTTLDYDKTLVLAIELSSKNWVLAAQVPGLPRTKAKRTIEPAPEELMTAINGYRARAAAAGRTVERIIAVYEAGWSGFWLARWLTSRGIETYVIQPSSVPVDRRARRAKSDGIDVELLLRTLLAWLRGEPRVCSMVPIPSAADEDARRAVRERKELVSERIGLVNRIGAVLATLGVHGYNPLRRDRRLRLDALRTGLGDTLPANARAKIVRMLDRLELLLEQIAELDRQRDAVLKDESPDRASAMIQQLTTLRGIGVQSATVLVREAFVRDFASGKALGSYAGLSPTPYNSGGVSREQGIGKAGNRRLRTVMVELAWLWQRYQPGSAHARWFRERVGATGTRIRKVMVVALARKLLIALWRFVTQGVVPEGTTMKTAS

SEQ ID NO: 178526 - protein, 361 aa, unidentified
MKKPSQHLIAEVPRSVAKVRMTIGIDLGDVWSHYCTLNEDGEVVDRGRFRTTPSGVEKWFTDVPRARVAMETGTHSIWVSEQLREMGHEVIVANVRELRAISHSNRKSDTVDAEKIARYARVDPEILRPVSHRTVAQQEALTLIRARNLIVRLRTAAVNSVRGLAKPCGYRLPASSTLCFAKRCMAVLPPGLARALGPVLEQIAAMTVKIQQYDRTIKQLTETEYPETQALLQVYGVGQLTALTYVLTLGGKERFKRSRDVGCYLGLRPRRSQSGDRDPQLGITKAGNIYLRSLLVECANHVLGPHGRDSTLRQWGLHLASRGGKQSRNRAIVAVARKLAVLLHRIWITQELYIPFYAVAA

SEQ ID NO: 178527 - protein, 393 aa, unidentified
MRKPKKHKKPLNDLSRSLTPFDPNQTLIAVVELSKKSWLVAGIIPGVEREPLKKLAADQNELLKLIERWRAEAEKAGHKITRIAVAFETGRDGFWLARWLRARGIEAHVIHAASVPVPREHRRAKTDRLDTQLLKRAFLGWLRGERDHCKMAAIPTFAEEDARRPHRERDTLVGEHTTIINRIKATLARLGIRDFNPTLKEAPQRLEHLCTPEGEPIPPNTLCELKRDFARKQFVAEQIQQIEKARLEQLKQAPKTRPNLMVLVLMRVIGIGIETADMLVKEILSRNLRDRRAVARYGGLTGSPDESGSQRREQGLARSGNARVRKGMIQLAWRFLEFQKESALAKWFEVRTKNARTSRKKMIVALARKLLIALWHLVRDGIVPEGVVLRPAH

SEQ ID NO: 178528 - protein, 373 aa, unidentified
MDTIYIGVDFHARQQTICYLKTETGELVTCELKHQDKDKVRAFYEQFSGQVIVGLEASGYSPWFEALLEQLGCEVWLGDATEIRRRARWRQKNDRRDAELIWDLMHHNEFPRLHRPAVQSREVLRMLRYRQKLTKLSTMSKNSLQAIALQAGLAKGSRLFTKAGQQELNAAVMSPVMQWQREHWLELLEPLNQQLLETMTWFKAQTKDDIRITRLRTHPGLGLLTSLCIVHTLEPVSRFRNQRKVAAYAGFDPVERSSAERKCFLGISKAGSRVLRYLLVEAAHTAIRKDEDLKCFYKRLADRRGRPKAKVAAARKLLIRAYIMLRDEIDYAEFRRRAVAARLARGGQRPNVPAVLIGQPASTERQEPTHSEK

SEQ ID NO: 178529 - protein, 407 aa, unidentified
MEVIYPRCAGLDVHKQTVVACVRIAGDGPPLQEVRTFDTTTSGLLALADWLDSFGVDHVGMEATGVYWKPVWHVLEGHFELVLANAAHVKNVPGRKTDVNDAMWLADLLAHGLIRASFVPPVAVQELRTLTRTRKQFVRERASHVQRIEKVLEDANIKLSVVISDILGKGGRAVLQALIDGHSDPEVLASRITTRVKASRAELLEALRGRASAHHRFMLKVHLSHIDALDKAIAAIETEVGAGLAPFRQAAKLLSTMPGLSAVSANVVVAEIGIDMSRFATPGHLLSWACMCPRNDESAGKRRSTRLRRGGKWLKTTLVQAAWSAVKVKGSYLQAQFHRLRARRGAKKAIIAVAASMLTAAWHMLRDGTEWHDLGAAHFDRADATKTANRLIRRLRQIGYVVQATPA

SEQ ID NO: 178530 - protein, 331 aa, unidentified
MDNSLYFVGADIALKKFDVAIRLDGNRYKHKVFANTPEGFTAFHAWLQGFGSHFHILMEATNVYHEDLADYLLVQGLTVSVINPRCIPNFAKSTNMRSKTDKVDARLLADYAYCNAARLRKYAPLATNYRTLKRLMRQLTHLKKIIAKEQVRIQMMMDALCVEISQEIIAGTKALAKELEKKIKELVKEDKVLSRNAQLLQSIPAVGWMSAMYLLSHLGDGSRFRNSKAAATYMGLTPIVKQSGDSLHIVSGISKMGPRDIRDVLYAPAMSYAFGPWKERVYAPFVQRLTANGKAPKEVIVALMRKLVSIAQAVLQHQRPFDSAILVGKAA

SEQ ID NO: 178531 - protein, 342 aa, unidentified
MTEYVGFDVSKEETAFCVKDRDGKVLARGKVATDPAALFGVLKDHCLCPGRIVMETGTLSGWLARELRKLGIAVDVIDARQAHAVMRLQHNKTDAKDADLLADIARTGFCRPVAVKSETAQEGRVLLKARAHLLGHRRDTENTIRGLLGSLGLRFPKGSGKLAGRVREALEERPELAPMIEPLLSSLAALRDVSARLDKTVRAWAKADPACRLLMTAPGVGPVTALAYVATIGDAERFAQSRAVGAYVGLTSRRWQSGEMDYSGRISKHGDAMLRSLLYEAANSLLTVVRRAHPLKDWARRVRKRTSHKKACVALARKLAVILHRMLITGEAFRWPEKEAAA

SEQ ID NO: 178532 - protein, 425 aa, unidentified
MTTRNDATPAATWVAIDIAKRTHAVLIETPDGKHRRFRMNSLQEDHQRLVDLLHLCPAPVRIAFEPTGDCHRTLAYRLLKEGFDVCLVSSIAGARYREALFNSWDKNDPKDAAVILALLKQGVTQRYVDPLIAGHHGLQELSKTHYQISLARTRLQHSLMTHYLPLYFPESERYFHSTQAEWFARFLIRFPTAASVRALSFEAFEREAWNVVGRKVNKRSWIRELYDTACTSVGLPIAGDDVAIETFRLQLRRYQQLIEQREALAETAHRLLQGRPDYESLRSIPGIGPVLALTILAEAGDLRRFSHHRQFLKYCGLDLSKSQSGQFRGQEKLSKRGNARLRFAFWFAATIAVRMRENSFRQKYERYVQPDPLNADRKRKALTAVAAKMARVAYSLVKHRTTYRCYFETSLPRGSTPLCRAVGTD

SEQ ID NO: 178533 - protein, 343 aa, unidentified
MESIYYIGLDVHKKSIAYCIKTVTGQIVCQGMVKAERRALRKWLVDLPGSWVGAMEATMFTGWIYDFLKPYAVELKVAHPAMLKAITAAKKKNDRDDAEKLADLLRVNLLPECTMMSEELRELRRILRYRNLIVRTASKMKNKISGLLMEVGAVYDKRKLHGKRYFGQLLERVEDVPESVKDLLKLSRSSMELFEAVQKKLLKTLREDSLISKRVELLRSISGVGEVMALTWVLEIGDPKRFSNSGQAISYCGLCSAQHESAGKEQRGPISKKRNKYLQSMLIEAANLAPYWNPQLAILYEKELTRGNRNRATLAVARKLVIYMLAVDRRGEPFVTEKESLVA

SEQ ID NO: 178534 - protein, 427 aa, unidentified
MKQEAPEQQEFGAYIGLDWADRTHVISLRGTDSGKVEHYQLVHKPEALAEWVSDLQRRFPGQRVAVALEQARGAVVHALMGYDFLVLYPVNPKTLAKYREAFSPSGAKDDPTDADLLLELVTLHRDKLRAWLPDDELTRTITLLVEYRRQLVATQTSLSNRLTSLLKLYYPQALAWAGELTTVQACDFLQRWPTLAQVQQAAPAKLRQFYLAHGCRKADVIEQRLQEIKLAQPLTRDGAVISASVVMVQATTTQLRPLMEAIARMEKQIAELFRQHADHELFSSFPGAGPVLAPRLLAALGADRGRFAAATEVQQLSGIAPVMERSGKTCWVHRRWACPKFVRQSFHEFAGQSIRWSTWARAFYDQQRQRGNGHHAAVRSLAYRWIRIIYRCWQMRVPYCEETYCRALQRRQSPLARVLAAPMQNAS

SEQ ID NO: 178535 - protein, 348 aa, unidentified
MARIARIGIDTSKSVFQLHGVDEKEQVVLLRKLRRREFLAFFTKLEPTSIGLEACGGSHCWARQLQALGHEVVLIPPQHVKAYVARGKNDAADAAAICEAMSRPRIQQYLVPIKSAEQAAAQMLLGIREGLVRRRTQLANTIRGHAAEFGLVVPKGLDKIEPLLALVADDAAVPALAKEMFTLLGREFVDLRIRTAEVDKKLKTFHAGNELTRRLATIPGVGPIGACLLATKITNPHGFRSGRMCAAWIGLTPKDHSTAGKQRLGGITRAGDESLRSVLVTGATAYIQQVRRGRTVPSQWLAELLKRKESKPAAIALANKTARIAWKLMTTGQAYDREHAAASAMAAA

SEQ ID NO: 178536 - protein, 351 aa, unidentified
MPKRTNAVAVSTIGIDTGKNTLHMIGLDEKGEIVLREKVSRNRIAARLVNVPPCLVGIEAGMATHYMARELVALGHVVKQVPPAFAKPFRQGHKNDFRDAHAVAEAVQRPSTRCVPIKTDDQLDLQALHRVRSRLVGDRTAVINQLRGFLLEHGIAVRQGHRFLRQQLAQILATRTDALSPRMIRIIGDLVEDWAHLDERIERVTDEIESLARTDSSCGRLMTVPGIGPIIASAMLAAIGNGAAFAKGRDFAAWLGLVPKQLSTGDRTILGRITKRGNRYLRMLFIQGARAIQLHPASWAKHSFGPWLTAAARRLHCNVLTVALANKLARIALTVLVQARNYETRIAPAAA

SEQ ID NO: 178537 - protein, 325 aa, unidentified
MSAIVGIDIAKDKFDVCLLDVNGQVHEAVFDNRTSGINKLHKWLKKKDTKQAHIALEATGIYGELVAETMYQRGYAISIINPARIKAYGASQMRRNKTDQLDAALIADYCRTQKPALWTPPRHEIKALRALVRHFEDLKQERQRAKNRLSSTNSPFVQKQLRAQIRLLDKQIEEVKRAMKDHLNQHPDLKNDADLMQTIPGIGDITACVLLAELGNVRRFDNVREVVAFMGLNPRQHHSGKKQTTHGISRMGRASLRAALYMPAVVAKRCNPTLKAFAQRLETRQLKGKQIIVAVMRKLAHLVYGILKSGKAFDAHYGQQMPIAA

SEQ ID NO: 178538 - protein, 370 aa, unidentified
MLDTTTFVGLDVHARSIKAVSLDVMTGEVRCATFGYDAGAVAEWVRSVDPEARCVYESGVTGFDLQKRLSGLGVDCVVGAVSKMIKPSADRRRKNDRNDAEFLARMLSVGNVVEVWVPDDECEAARDLTRALEDARDDLSRSKQRLSKFLLRHGLAFDERTPTGRRKGNWTRAHWSWIESIRFAEGADNEALAYYVDAVRRAAEEKARLEGLVGAEARKPRWRRRVDSLRCLKGVDTATAANLVFEAGEFSRFRNARSFAAWVGLTPSEHSSGESDRRGAITKAGNKHLRKALVEAAWHYLTCSARPKEPAKGQAPDRVARRHAAKGVRRLVERREALLARGVHNNKANVATARELACWVWAVGLMAEEA

SEQ ID NO: 178539 - protein, 440 aa, unidentified
MRLKIVNPDAAGIDVADGEMQVCVPEDRDGENNRRFDSFTCDLREICAWLKACRITTVAMESTGVYWLNIFLMLQQEGFDVVLANPLQVKNLMDEKTDEADAEWLMLLHSYGMVKPCFQPDNVARQIRNLTRHRSTLITTAGREVQHMQKAMEQMNIKLSTVITDILGKSGMAIIRAIIDGNHNPNSLAQLADGRCRASKDTIAKSLDGTWDDDLLFVLKQSVELYDYYQKKVAECEREIERLMIRYSAQVDVEGAGKLSRSEKHTTYKNAPDIDVEKYGHALWGVNLMAMPGMGAGAILQLIGELGYDFVSKFDTCEKFCKWCNLSPNNKITGGKLISSHIPRRKNPVGQILRQCANTVKSEKSEMGAYFRRMKSKDGHMQAIVATAHKMARILYTMVKTKKEYNPSLVGCNEKELLERKIARTTRQLKKLNEKLEKVA

SEQ ID NO: 178540 - protein, 321 aa, unidentified
MSEAHPEVFVGIDVAKARLDVGTSPGGESWGVAHDEDGIAAVVERLAALRPTLVVLEATGGLELGLAAALVAAEVRVQVVNPRQVRDFAKATGQLAKTDRLDALLLARFGAAIRPEPRPIPDAALQEVRALVARRRQLQAMVSAERNRRASAPQRLHAQIDEHLAWLRRAVGDLDRDLATTITATPAWQAAAGRWRTVPGVGPVVTATLLADLPELGTLTRQQIAALVGVAPLNRDSGQQRGTRSCWGGRAHVRTALYMGALVATRYNPAIRTCYRRLLDKGKPKKLALIACARKLLTILNAMTRSGSDWVAQDSSLDVAA

SEQ ID NO: 178541 - protein, 418 aa, unidentified
MIRIKTKKLRIVNGKKFIVSIDIGKNIHYGYIRDLNNNEVKPFPFHNTLKSFQEFWGKISYFQKEHGLEEAVIGYESSGPYAEPLCEFLRKKPVKLVQVNPMHTKRVKELEGNSPNKTDRKDPRVIADIIQLGHALTVIVPEGTAAELRRLTHTREREIKVQTADKNRLQKLMYVIFPEFLRILKISLKSAMFLMKHYPAPEDIVEIGCESLCKILKKVSRGKIGYQQAEELFEAARTSVGITHGKKSILIEIRHIVAKIENEEVFIKRLETMMEEYLSQIPSSKSIRSIPGIGVITTAGMIGEVGDFRKFKTISEIMKLAGFNLFEVSSGLHTGQRHISKRGRPVMRKLLYYAAVNAVKSYGIMHDNYHLMLDKGKPKTKALIAIARKLLKLIFALARDNSMYVEQYNSSRKRIVAA

SEQ ID NO: 178542 - protein, 409 aa, unidentified
MNASGTVNCVGIDVSKGKSTIAIMRPLGEIVKSPYEVAHTSSELEMLVETIRTLEGETRIVMEYTGKYYQPIARYLNDAGFFVCAVHAKLIHDFANNSIRKIKTDKADAVKIANYGLSNWDTIKQYSNEDETRFLLKSLNRQYNHYMKQYVAAKNSFISLLDQTFPGLNDLFPGARRPDGKVKWIDVASRFWHCECVSGHSLQYFKKAYNKWCKDNDYRGEDAKAEAIYQLAKESIPCLPKNDHTKALVQQAAKGLLNISSALTETQKEMERLASTLPEYPVVLNMGGVGTTLGPQIMAEIGDVRRFPKRENLIAFAGVDAPPYQSGKFEAKSRHISKRGSSELRKSMFQVMGCLCQRKMENDPVYRFVARKKAEGKPYYVYMVAGCNKFLRIYYARVKAYLNSLELQA

SEQ ID NO: 178543 - protein, 343 aa, unidentified
MTQYVGLDVSLKETKVHVLDEAGNRIWRGRCATEAAAIAAAVRRYAPTAVRIGLETGPLTTWLWTALTAEGLPMICLDARHAKKALDMKVNKTDANDAEGLAHLVRAGWYREVRVKGRSAMLAKALLGARSQLLSMSLALENQIRGILKTFGRIVPKGAGGLFEKNVRALIMDDADITAVIMPLLQARQMARGKCAALDRRIIRSVQGDATCRILMTMPGIGPITAVAYVAALEKPDTFKRSRAVGAWLGLTPRRFQSGEVDYDGHISRRGDGQLRALLYEAAAVLLTRVRRESALRSWGLLLRKRLGFKRAATALARRMAVVLHAMWKSATPFNPALGATTP

SEQ ID NO: 178544 - protein, 371 aa, unidentified
MKKSITFVGLDVHKNSIEVALADAGREGEVRHYGAIDGDMDAFGRLLRKLVSTGKELRFVYEAGPCGYEIYRYLTAKGFDCAVVAAPAGDPTKGVRKRIKNDRRDAMTLARLHRAGELTYVFVPREDDEAMRDLTRAREDASNAQRVARQQLTGMLLRLGFRYSGKKSWSLAHIRWLSGIKMPTPAQQVVFQEYIHAIKETTDRLERLTRQIEELAPAWRMFPVLRAYQALRGVCLIVAATVIAELGDLTRFDNPKRVMAFLGLIPSEHTSGERTRRGGITKAGNGHARRVLTEAAHAYQFPARVSRALLERQEGLDKTILDIAWKCQVRLCSRFRRLMTKGKNRKTVVTATARELIAFMWAIAKQVPISA

SEQ ID NO: 178545 - protein, 450 aa, unidentified
MSTLETVQPTPAAAPTPEYAAHIGLDWADQKHFWTMLVAGKKTRGQLNNTPEAIEVWAAELAHRFDGRPVALALEQSRGAVIAVLSKYAHLVLFPVHSTSLANYRKSFSPSGAKSDAVDGDLILDFLVKHPEKLRCLRPDTVPTRSLQFLTEERRKLVDAHTATLQSLIHWLKQVFPQIVRWFDDPGAPLVADLLIRWPTLQKLQKANPKTLLKFFHQHNCRSAERTQERLEQIRQAVPATNDPALLQAGILSIQNAARILASMRQGIAEFDRQIEVTYQAHPDRFITESLPGAGPALEPRLIAAAGSLRDRFESAYNMECCFGIAPVTEGSGNSLWIHWRWACSKFVRQTFHEWAACSIRTCDWARQFYDRQRANKKDHHAAVRALAFKWIRIFFRCWHDRVAYSDQRYEEALRTRAAQAKPAKTGDKVDFNVKWKSCAGFSKIDKVSS

SEQ ID NO: 178546 - protein, 412 aa, unidentified
MKQVLDPVAGLDVHRDNVVAAVRTVGSDGEITFTKRKFPTTRRGVKELAAFLTEAEAFRVAMEATGVYWKSVYYSLEGIFAELWLCNAQHVKNVPGRKTDLSDAEWLADVAAHGMVRPSFVPPPEIRELRELTRYRKTQIDARAHEIQRLEKTLQDAGIKITSVASGVWSLSSRRIVEALIAGERNPTVLASLAVGKLRPKMGQLEEALDGWFGAHNAFVCRQVIDHIDFLDDSIAKLSEEIAARLLPFEAAVALVRSVTGIGEASAQAIIAEIGLDMSRFPTAGHLCAWAGVAPASHESAGKKRPAGTRHGSTWLRRVLVEVARAASRTKGSYFSAQYSRIAKRRGTNKAAVAVANSILAVIWHVLTNGCIYEDPGADYFERRHDPAVEAKRLQARIEALGFDVTLSPKAA

SEQ ID NO: 178547 - protein, 348 aa, unidentified
MNKRIAVDLAKSVYQVAESVRAGQVSQRKRLNREAFRRYIQDQAEPVEWLMEACGTAHYWGRFAQSQGHRVILLHARYVKPYRRRNKTDRNDCDAILEAARCADIHPVPVKTHEQQQLQQVHGLRETWKKSRTQRINLLRGIFREMGLEAPAATAAFLHAASELVERPEVVALRGQLQIVLAEINLYEQCMVECEQQLQRWHADDAIVRKLDEVSGIGLLTASALKTVVGQPERFASGRQLSAWLGMTPREYSSGNRRRLGQISCLGNTYVRTLLIHGARAALLAAQRLYCRTPERLTQLQRWTVATAARIGHNKAAVALANKLVRICWAVWCHERRFSGNWQSSRPA

SEQ ID NO: 178548 - protein, 378 aa, unidentified
MTPPLRPVRWRRVCGHLSERGPGVIVVGVDPHKQSHTAVAVEGTTGELCAERTVPARRAGHEQLLAWARTLDGERLWALEDCRHVSIGLERFLLASGERVVRVPPKLMAGARRSARERGKSDAIDALAVARAALREPFLLVARLAGAEREIRLLVDHRDDLVAERTRIQQRLRWHLHELDPELALPAGCLDRRVWLERLQRRLARLERSAQVRICRELVSRCKELSGRASERERELTLLVRAQAPALLTLSGCGALTAAKLIGETASAERFPTDAHLAMHAGTAPLPASSGNKHRHRLNRSGNRQLNCALHRIAVTQGRCHPPAQAYLARKQAEGKSRKEALRCLKRHLARTVYRLLIAAKQPLEPPTRPTSPALTLT

SEQ ID NO: 178549 - protein, 411 aa, unidentified
MENIYPCCAGLDVHKESVEACVRRMGPNGRLDQQTRPWGTMTRDLLAMSDWMAAQGVTHVAMESTGVYWKPIYNILESRFTVLLVNARHLKQVPGRKSDVRDCQWIAQLLQHGLLKPSFIPPQAQRELRDLTRHRTQLAEERTRTVNRLHKVLEDANIKLASVATDILGVSGRAMLSALMAGEESPVKLADLAERQLRGKIPELERALQGQVTKHHRFMLRLLWKQLAQQEELIAELDARIEEQTRPFADEIERLDAVPGVDRRVAEVVLAEVGADMNPFPSHRHLACWAGMCPGNEESAGKRTRRRIPPGNRWLKRSLVQAAWAASHTKHTYLASQYRRLVGRRGRKRALVAVGHSLLVIFYHVLKRRTTYADLGGDFFDRLEPERLTRYFVRRLEALGHKVTLESAVAA

SEQ ID NO: 178550 - protein, 340 aa, unidentified
MAREVSVIGLDIAKSVFQIHGADREGRAVLRKRLRRGQLGEFFSQLKPCVIGIEATQGAHYWARVLSACGHTVRLISPHFVKPFLKSQKNDANDAEAICEAISRPSMRFVPAKSVEQQDLQGLHRIRSRMIGCRTQLGNQIRGLLAEYGIVIPVHMSQLRRCLPLIIEEDSPLLSGFGRRLFASLYEELCALEERIAELEKQLQRVFQQNELCQRLSAIEGVGPVIATAVIAAIADGRSFRNGRQFAAWIGLVPRQRSSGEKQRLSGITKRGDPYLRMLLIHGARSVIYRAPHKSDSRSQWIAEKQRTLGTSKACVAVANKNARVIWALLAHDEPYRRAA

SEQ ID NO: 178551 - protein, 349 aa, unidentified
MKQILKQVLGVDVAQKELVVTLGKMHNDFTLDLYAYKVFKNNKTGFVNLFKWLNPLINRDVNPQFVMEATGVYHQKFAYYLDEKGCNLSIVLPNKISNYMRTLDVRTITDKTASQAICQFGLERKLECWTKPKKVYTELQQLTRERSQIVDERVIVKNQLHAEKTEAEPNKSSLKRLNARIKFLNQQEKEIKLEIQDIVNKDPELKKELENICTIPGVGILTAVIVIAETNGFELIRSKKQITSYAGLDIKEKQSGTSIRSKTRISKKGNRNLRKAMHLPSLSAVKYNKNHKELYLRLVSKSGIKMKGLIAVQRKLLELIYVVYKNKQGFNQNYEQQKRATLLEIETAL

SEQ ID NO: 178552 - protein, 409 aa, unidentified
MKILYARCAGLDVHKDTVMVSVLTPGPGAEPQQEIREYKTTTAELRALGAWLRECGVTHAAMEATGVYWRPIFNVLESYCELILVNARQVRNVPGRKTDIADCAWLASLLRHGLLRASFVPPPEVRELRDLCRMRTTLVREGVQVGNRLRKVLEDANIKLDSVASNTLGVSGRDMIQALIEGEEDPVVLAQLARGRLRSKKAALEAALEGQVREHHRFLLRQWMQLLKTFEAQIAEVAEEIERHMDPFEWAVELLVTVPGIDRTAARNLIAEIGVDMDQFPSSGHLASWAGLCPGNHQSAGHNRSGKSHRGNRWIKAVMVEIAWAASRSKDTHCEAFYRRLVPHRGKKRALVAVANSLLQAVWFILTHRQSYRDLGGHHFEQLHREKTTQSLVRRLQRIGYRVTLERAA

SEQ ID NO: 178553 - protein, 405 aa, unidentified
MQVLYGRCCGIDVHKKMLAVCLKTGKKQELREYVTHTKELRELANWLIENECEKVAMESTGNYWKPVYNVLELMGLDIMVVNAQHMKAVPGLKTDMNDAQWIADLLQHGLLKGSFIPDRDQRELRDVTRYRKSLVEERAREINRLEKTLEGCNIKLSSIVSHLTGLSSRNLIGAVIAGSVTEERIDELSYGKVKEKKAELLLALDGVLSPVQKRLITAILDHIDDMSRRIGDVDDIISGEMKKYEDAIKSVDEIPGIGRQSAEVILAEIGIDMSRFPTAAHLASWAGVCPGNYESAGKRKSGRTNKGNPTLKTTLVQCAKAAVKKKDTFFRSQYERISIRRGANRASMAVAHSILIAIYHMLKFNQPFHDLGRDYYHQFNPEKKINNYLKKLSDLGWKPPVSVAG

SEQ ID NO: 178554 - protein, 398 aa, unidentified
MLSIGIDVSKGKSTVCGMKPGGEIVYTPFEIQHTREGMSELVSLLRGSGEEVRVVLESTGSYHCPVVAALLENGIFVSVVNSLRMKRFCSQSIRRVKTDQIDAMQIALYGLAYWQELQPTRLPENTYRELQLLARQYYQMTSMLIKAKVDFNALCDQVLPGMQELMSDHAGRHKLSDFVLRYHHTAHILKMGETRFRKDYCKWAEKKGYRNHERMAVLIFATAQNGIPVLPDAPSTQIVITEAIRVLHTVEASRDAILTQMQALAKTLPEYSLVREMPCIGDTLAPRLIAEIGDVRRFHSKRALIAYAGIDAPPYQSGKFSANNRHISKRGNRYLRKTGYEVMQSYVMHKPANDPIFTFIEKKRSEGKSGKLAMVAGLNKFLRVYYGKVTELYRSLPQ

SEQ ID NO: 178555 - protein, 338 aa, unidentified
MDKYIGMDAHSSICFFSVVDEKGTEVNQAKIATNGLLLIEYIRSIKGVKKLVFEECELSAWLFETLHGEVDELIVCNPTRNQQYKKAKTDKLDAQNLARLLRGGFLTPVYHDGSRTEHLRALMSGYQDIVDTGVSVKNRYKSLFRKAGLPARGTKLYDDSSLLEDLPRPDQRFVGHSFYRLLEALEKEREQYVAAIKKLSRPFPEIKLLKGIPGIGDIQAAKIVSQVISAQRFKDKHKFWSYCGLVRHRMESGGQIYGSKRSWGNRILKCVFKMAARNVLTGENELRAYYDELRANGTSDKSARNAVSRKLAAISLSILKTRRPYDETRIASQAEQVI

SEQ ID NO: 178556 - protein, 485 aa, unidentified
MTESGAGAGILKGPFIVASSTRVSFVRSPSGPRAVPGQKAPGQGGTEEITVEEVTDEPLYRERVCGIDIGKAQMLATIRVPPDEGRSRRMQETRTFGTTRRDVLALADWLRSWQVPAVVMEATGDYWKPVFYRLEAEGLECVLADARQVKNLPGRPKRDTSDSQWLAQNFERGAVRSCFVAAPEFRVIRLHTRYRRELTEERTREKQRVEKLLESSAIKLSGVLSDIHGVSGRDIMDHLIAGERDPRVLARLARTRAKAKIPRLEQALDGTEFFTTQHAQLLKAMLRRIDSLDADITRVSTVIEELLAPWEEQLQQAESMPGWQRRAAQDVLAETGPDMSRFPTAAHLVSWAGRAPLDHQSGQRKGRGKRKKGNRYIGAATGETSVSAGRTQTREGARYRRLARRIGKDKAQVAVSNTQLTVYHKLLSNPGMRYQDLGADYYDKHAQTRRKVRHHLAELDALGYDVIITPRPGQDDEGTRQAPAA

SEQ ID NO: 178557 - protein, 412 aa, unidentified
MESYKIAGVDVHKKMLAVVVTDAAREGEVCFVRNRFGTMGSDLRELREWLASQQVREVVMESTAQYWRPVWLELEPHFKLHLAQAQSNRAPKGRKRDFQDAERLARRHLAGELILSFVPEPEQRLWRTLTRTKNQLTRDRVRMQNQMESLLEEARIKLTSCVSDSLGLSSRRMLRALAAGATDAAELAQLAEPELQAPPEQLREALSAAPSMGLTHRRILKLLLERVELIERQRGELEQILATTLKPYEDAVTRLAEVPGFGVNSAQQVIAEVGPAAATFSSPEELASWMGACPGREESAEVSTSNRCPKGNRPLRRVLTQVAHAAIKNQGNVFHAFYRRLVVRKGHPVALWAVVHRLCRLTWKILHQGVSYEERGRVANPKAVQQRKKRLVRALQALGFQVQLTSLQPATV

SEQ ID NO: 178558 - protein, 416 aa, unidentified
MNAVGIDVSSRKSTVAVLRPLGEVVCLPFDVTHDIAVLASLAEKLKAIDGETRVVMEHTGRYYEAVAKALHEAGFFVCAVNPLLIKEYGANSLRRVKTDKADAIKIARYALDNWADLRDFTPMDAIRYDLKTLNRQFQLASKQRTASANNLIALLEQSFPGIRKCFDSPVRSDGTQKWVDFAHSFWHVDCVRKQPFPAFCERYRKWCKLHAYFFKLSNAEEVYALAKRAVVLTPKSKVVKVLVQEAANQLSSISRSVEVYRAEMDRLAAMLPEYPVVMAMYGVGKSYGPQLMAEIGDVRRFERKQALVAFAGIDPMPNQSGDKNVRSNKSSKRGSPYLRKTLFNVIRTYLQCAPQDEPVFQFLNRKRAEGKPFYVYMLAAANKFLRRYYAKLRDFFASLDTLQPVAPIPTILKAAL

SEQ ID NO: 178559 - protein, 407 aa, unidentified
MIFVGVDWAEAHNDVHVEDEDGKRVAGGRLPEGVDGIARFHELVGAHVEEPAEVVIGIETDRGLFVAALVAAGYEVYAVNPMSTSRYRDRHSVSGAKSDPGDAKVLADMVRTDRHNHRPVAGDSDGVEAVKVLARAHQRMVWSRGRQTNLLRSTLREFYPNALVAFDDLASGDALEVLRVAPTPTLGAGLSRSKIAAALRRGGRQRRIDERAAEIQAALRSEQLHASAVVATAMGASVAASVAVIAEMTAQTARLAAELEAGFDQHPDAVVVRSLPGLGTILGARVLGEFGDEPNRYATAKCRKNYAGTSPITRASGTKRVVLARHVRNKRLADAIYLWAFASLTASPGARRYYDARRAAGDTHHQGLRALGNRLVGILHGCLTHQVAYSETVAWAHRPENETAAAA

SEQ ID NO: 178560 - protein, 372 aa, unidentified
MSTLRFVGLDVHAETIAVCVAEGTGEVRPLGTIPNRLESIRKLVGKLGPVEQLRTCYEAGPTGYVLYWQLTTLGVACDVVAPTLVPVKAGDRVKTDRRDAEKLARCHRAGELTAVWVPDAEHEALRDLVRAREAGKKDQLRARHRLGKFLLRHGRRQPEGMTAWTKKYLEWVKSQVHFEQAALEATLSDYFHEVEHAAARIERLEKAIDAAVEKMPPKLRAVVEGLQALRGIAQITAVTIVSEIGNFSRFEPRKLMGYSGLVSSEHSSGNRIQRGAITKTGNSHLRRVIVEAAWAYQHRPWLGGYLLKRQRALKLSEETKQIAWKAQNRLHSRYKKLSAGGKNKNQVVTAVGRELLGFIWSVAVQIEAGDKA

SEQ ID NO: 178561 - protein, 347 aa, unidentified
MTIVSTRAITGGVDTHADTHVAAALDPVGGLLGVEEFPATAAGYAGLLGWLGGFGTVALIGVEGTGSYGAGLTRHITAAGVRVVEVDRSDRQDRRRAGKSDPLGAVSAARAAQSGRAAGAPKGRDGAVEGIRALMVAKRSARIERVQAINQARALIVTGPGELRERFARHTAARLVAGLAALRPRPGGDVPGYATRVALRELGRRAQFLDAQAGRLDELIIPLVTGRAPGLLALHGVGPDTAALLLIAAGDHPQRLRSEAAWAHLCGVAPIPASSGKTIRRRLNPGGNREANHALWRIVISRMSTHPATRAYVERRTEEGLSKKEIIRCLKRYVARQVYPCLRATAD

SEQ ID NO: 178562 - protein, 500 aa, unidentified
MKTKRSKAKIRGDRKGISVPCSEPAKELRILRPDAAGIDCGAQEHYVAVPPDRVSVGQPTVRRFSAFTEGLDAVVDWLKDCRVTTVAMESTGVYWIPLHQKLETAGIEVYLVNARHVRHVPGRKTDVQDSQWLRQLHRFGLLNASFRPEDIICRLRSLHRHRDNLVSSSAAEIQHMQKALQQMNLHLHHVVSDITGLTGLRIIDAILAGQRDPQQLVRLRDTRVYKSTPQEMQAALVGDYRGEHLFVLSQSLQAYRFYQARIEECDREMEPLLEKLAQQIEAASANLMLDALEPSGSKSESNRPEQLPEPKPTSSPKSKRKRKPRANEPKIQLAGLLERICGIDLTQVVGLNVLNVLLIVSEIGVDMSKWRSAKAFCSWLGLCPGNKISGGKLLDSRTRQVVNRVADALRLAAQSAGRTQTCLGIFYRRKQAHLGAPKATTATARKLACLIYHLLKNKQPYQEPDSASYQLRLQKSALSKLQRQAIALGYTLLPTAPVPA

SEQ ID NO: 178563 - protein, 334 aa, unidentified
MKSDMVHIGVDVSKEKLDVFVQAQKEGMRPTAKELDNSVAGFRELRDLARKAGATVCVEPTGGYELELIAFMHKFGVPVAYADALRVRQFARAEGCLSKNDSIDAALISRFADKIGVRVLEEKDVEAVELKRRAKFRQTMSDSRTAMVNRLETEVDPDMKALLKEQIKRINRLIAKAERLCLETVRKNDSTNKLCERFTQVGGVGAITAISILAGLPEIGTLSDEKLNRLVGISPEEDQSGSRDRLRRIWGGRQDVRNALYMAATASLMWNSILGAYYRKKRAEGHPHKWAMVPTMRKLLSLLNRIARDPDFTPRPEPESTKRNAIATRKRKAA

SEQ ID NO: 178564 - protein, 410 aa, unidentified
MVERFVGIDVALREHRIAVLDRDGEAVGPSFTIAASKDGVTTLLRTLDARAATAAQTLIGLEASGHLWENLEAALVGAGYRVIVLNPLQTRRYRDVVRRKAKTDDIDAHVIAGLLRSGAAQASYVPDEQIQSLRELARLRARLMADRQDYQRQLSAQLDVVLPEHHAVLGDLLTARARGILAQFPTAQHLAHANPRAIRRAAEEAGARGFSLNDATGVRDSARRSLYRGKAAAARAHVVRTLVSQLERLTSAIDEVDRAATALLPPSEPGTGPSDAELLQTIPGIGPQTAATLLGELGALTRFTDARALVAYVGFYPVINESGDRAAPPRLSPVGSRIARHSLYLAAVNAVRRSGEWRTIYLRKKAQGKTAKQALVVVAVKLLHAVYAMLKHRQPYNPSRLLVAPATIGS

SEQ ID NO: 178565 - protein, 332 aa, unidentified
MKKKQIIIGIDVSKATLDCFIHGSVGKHFIVDNNSKGFVVLLETVIKSTKCKKEDLLICFENTGKYSKMLSVFLHTQEIPFAMVPALEIKKSLGMTRGKNDKVDALRIALYAHQKKDQLIPTVLPGEKIDRIKSLLSLREKLIRHRTAYKNGLSDLNDCYQEGETNLIRETQQRMIAVLDKEIEALEKEVKTIIKQDPSIRKNFELILSVKGIGEIIGFYLIAFTANFTSFINARSFACYCGVAPFAYSSGKVIGKSRVHPFANKQLKSLLSMAAASAIQHSAECRIYYHKRVDSGKNKMSTINIVKNKLLFRVFAVIKRGTPYVDLLKFVA

SEQ ID NO: 178566 - protein, 358 aa, unidentified
MPNLVFEKKLTKEETMTNITTVGLDIAKNTFHFIGCNQAGKIVKKKMLRRADLLAHFLKLPPCLVAMEACSGAHYWTRELIKLGHQVKQIAPQHVKAFLRGNKNDYNDALAICEAAMKPEMRFVSPKTQVQQDIQTLHVLRKKCERDRTANSNEIRGLLSEYGVIIPIGINNVYKMLPELFDSEKENGLSTLFKELLNQHYKKLTQLKEHLVFYTKKIQLLSKSDECQRLQSIPGFGPIVSSAFYQHVGNGSAYKNGRCVSASIGLVPKQHSTGGKERLQGISKRGNGYLRTLLVHGARSVVNTLKDKQTPLANWLRRLILTRGKNKAIVALANKLARIGWVILTRGGCYNGTLVTAQ

SEQ ID NO: 178567 - protein, 408 aa, unidentified
MSSEKPPPIRFIGLDIHKHYLIAVGVDEQLNPLFGPQRVQLSNLEGWIKKTLNPQDAVVLEMTTNTWQVYDELLPHVHSVTVVHPPHVALITRSQVMTDKIAACHLARLHAKGLLVGIWIPPQEVRDLRSLIAQRAKMTRLSTQAKNRLHSTLHRYHISLPPGDPFLPARRAWWLSLPLTLPERTRLICDLDTLLFARQQIAQLEACLNTLAAQEERLPLLAQLPGVSLITALTLLAAIGDIARFPDAKHLVGYAGLGSRVHDSGQTTRTGRITKAGRKDLRAAMVEAAQTAANTHPHWQAELARLEPRLGRNKAIVAIARKLLIAVWHVLTFQVADKHAQPVLVARKLMNLTYKMGIANRPAGISSAALVRAQLDRLRLAQDLTHIPWGAKKKPIPLPPSSQPSTPA

SEQ ID NO: 178568 - protein, 451 aa, unidentified
MRSTTYAGVDWASEKHDVVIADETGEQVLAATFAHDETGVRGLCRALVRHGVSLVAIERPDGLLVERLLEAGLRILPLHPNQVAATRDRFRASGGKSDGFDAFVLCELARTDHHRFRVLEPDTDQTKALRALTRAREDLVGTRTALTNQLRAELERFWPGPLGLFRDLHSRISLAFLERYPSPADARGLGEARLQGFLVRQHYTGRQTPGQLLAKLRRAPEARVGELELGVRRALVLSLVATIKTLNEQIRQLERQIATAIREHPDGHIFLSLFKKPNSVICAAELLAEIGDCRARYPTRDTLAADAGQAAVAVESGKRKAASFRWACNKRLRQAFVTLADTSRHHNPWAHDLYAAAIARGHDHPRAIRTLGRGWCRIVWRCWQDRMPYDPARHRAMQRHVTVTIPTSSGPVPDTAATQRMLGTAVTRRAARRAEREVLDGTPTSANTLGG

SEQ ID NO: 178569 - protein, 347 aa, unidentified
MTLYIGVDFHPHQQTVSYCNNEEGEVHQALLVHNPEQVRRFYGQLPKAVVGIEASCTAAWFEQLLSELGHELKVGNPSAIRARARSRHKSDKRDADLILDLLLKDEFPELWRRPLPSQSVLEQLRFRHHLVKHRTQVCNRLQALAHAAGLPKRGIQTKRARVALVAANFTETQSFERDQMFELLDDLTERIKQVEKWLEEKAAGDEKVELLLTHKGVGLLTALAVVHTLGDVSRFPSSKEAVAYTGLDPLEQSSAGKVRFGSISKAGSSVLRHLLGQAMHVAVRYDGELRSFYKRLASRRSKSIAKVATTRKLLIRLFIMLRDGIDYSEFKRRGSAVGMPVLSHGLQ

SEQ ID NO: 178570 - protein, 411 aa, unidentified
MDVVHPRCCGLDVHKQTVVACILLASPSGPPQKLVRTFGTLTDELLALGDWLTSESITHVALEATGSYWKPVWNLLEGRFELLLVNAQHIKAVPGRKTDVKDAEWIAELLRHGLLKPSFVPDRPQRELRELTRYRTSLIQERAAEVNRLQKVLEGANLKIGDVATDVLGRSARQMLEAIVGGATEADAATLAQLARGRLREKIPHLERALAGRVAPHQRFLLAQQLAHIDFLDETIERVSSQIAERLCPFDESLANLDAIPGVGRRTAEILLAEIGTDMTRFPSPAQLASWAGMCPGHAESAGKRHSGKTRKGSPALRHALTEAAHAAARSKNTYLAAQFRRLAARRGAKRAAVAVGHSIRSIVWHLLQHGYPYHIRLVDGRSVTRTVMAAVCGRLRRPRPGRTTGAPVVR

SEQ ID NO: 178571 - protein, 422 aa, unidentified
MADSTLCVGGDIHQDELHLRATDKTDGQEVGQPLTVKNNRPGADQAIAHLVQLLTQHGYTHLEFGLEATGLFWLPFYVYLQQSPALMPFHPTWVCFNPKLVAKFKEGVTLSEIKDDDHDALAVAERLRFGHLPVSYVPSSEWLALRMLTRYRYRLSRQITQEKLRALTRVFLKASEWHRGQPFSDVWGATSATLLTEFTIAEIAAMSLPQLTDLIQEYGRKHFDDPQATARQVQRTLQNSFPVTPDLDVALTVVLQVAWTHIRDLEKLMRRLDREIAQRMEHIANPLLSVQGLGPVITAGILAEIADIHRFPDEPQLAKFVGLVWRKHASGQFVAEETRLAKTGNVYLRYYLIEGANLMRQHNLEYQAYYRRKFAEVPKHQHKRALVLTARKLVRLVFALLTKNQTYVRPQAMQSQEAAPVQ

SEQ ID NO: 178572 - protein, 353 aa, unidentified
MDKITRVGVDLAKNVMQIHAVDGAGRVVVRKAIARQRFLSWFANLEPCLVAMEACSAAHYWARKLRALGHDVRLIPPQFVAPNRKGGVHVKNDALDAEATCEAASRPHMRFVPVKSPAQQSVLVLHRMRTGFVEERTALVNRLRGLLAEFGIFLPQGIDQLRKHFVERVEDGSNELAGPARQALMRGWSQWHALDDEIAWLDRQIAEHARHDPQARRCMDVCGVGRLTASAAVATVVDAQQFKNGRQMAAWLGIVPRQKSSGGKQRLGRITRQGDTYLRTLLFQGARSAVLTAHRRNDRLSRWIVQLRARVGYYKTLVAVANKHARILWAVLAKGERFDPSYAPARTGGAAGA

SEQ ID NO: 178573 - protein, 310 aa, unidentified
MDIITVGIDVSKDRLDVAVRPSGETFAVERNAAGLDRLAARLWELSPHIVALEATGGFETVAVAALAAAGLPVVVVNPVQIRAFARALGQRAKTDPIDAAVIAHFAEATKPEVRPLPDEATRLLADLVDRRRQIIEMIGAERQREKRVTMPRLRKSIARVIKTLEKELTSLDADIDDAVRSSPAWRDKENLLASVPGVGSVIARTLIADLPELGHLSRKEIAALAGLAPFTRQSGQWRGRSFIGGGRSAVRTALFMGAMVAKQHNPVLKAFFDRLVAAGKPKMVALIAVARKLLTILNAIIRDQQPWQTA

SEQ ID NO: 178574 - protein, 315 aa, unidentified
MVNVPCFIGIDVAKAQLDIAIRPSGERWAVPNDASGVTMLVDRVQALQPTLIVLEATGGLERAATGALATAGLPVVVVNPRQARDCARATGQLAKTDALDARALAHFADVIRPTPRPLPDAQTQELRALLGRRQQLIGMRTAEQNRLAGTSERLTQDIKAHIAWLNTRIATLDDDLETMLRASPLWRENDDLLQSVPGIGPVCARTFLLELPELGTLTRQQIAALVGVAPLNCDSGTLRGRRTIWGGRAHVRTVLYMGTLVATRFNPQIKAFYQRLLAAGKIKKVALTACMHKLLTMLNAMLKHRTSWQAQEVQN

SEQ ID NO: 178575 - protein, 410 aa, unidentified
MEIQVQRGCGLDVHQATVVACLLIVLANGKVKKQIRKFGTTTRELVALREWLQAEGCTHVAMESTGVYWKPVYAILEGVFEIIVANAQRIKNVPGRKTDMKDAEWIAELLLHGLLKASFVPPKPIRELRDLTRYRRKLVESRSDERNRLQKLLETANIKLASVASDVFGVSGMRMLDALAEGKAAPAEMAELARGRLRGKIPQLEPALEGRMEEHHRYLLKLQLARMRALDKDLAELEARIEEKLQPYRPQLELLMEIPGVDWTLAAVIIAELGVDMKVFGSSSQAASWAGICPGNNESAGKRKNGRTTRGNVHLKTALAEAAHGAARTKGTYLRDKFYRVKARRGAKRAVITVGHKILVAAYHMLDKQVSYNDLGDLYLDKLNKQHLKRNLVNRLERLGYKVTLEPIAA

SEQ ID NO: 178576 - protein, 391 aa, unidentified
MIYVGIDVAKDKHDCFITNSDGEALFKSFTIPNNRKGFETLFQKVQSVSDDLTKVKVGLEATGHYSYNLLGFLLDKGLPTYVINPLHTNLYRKSLSLRKTKTDKVDAHTIASMIMSDVDLKSYSDTSYHNEELKSLTRYRFDKVQERAKLKTSVSRLICILFPELEKLVATIHMASVYALLSEFPSAHAVASAHLTRLTNLLSESSHGRYGKDTAVMFREAARNSIGSNMPAKSLELKHTIKLIQELTSEIDEIETEIKSIMDEVNSPILSIPGINYRMGAMIIAEIGDFSRFDSPDKILAYAGMSPSTYQSGQLDNCYSHMEKRGSRYLRYALYNATKYVCHWDESFGTYLAKKRAEGKHYNVALSHATKKLVRTIYAMEKTGQSYSSAS

SEQ ID NO: 178577 - protein, 340 aa, unidentified
MTYRIAGIDVHKRMLAVVIADVAVEGEYQFERRRVGTSPSELCRLADWLVAQQVDEVVMESTAQYWRPVWATLEQRWRPKRLQESAGARSGQLHLAQAQSNRGAAGRKKDFPDAERLVKRLVAQELKLSFVPDVEQRLWRTIMRRKHQLTRNRVQFQNRLECLLEEAHIKLSSLVSDLLGKSARYMLQAVAEGDQSRDNSGTSGPSVTCHKHLASWVGVCPGEEESAGVNYSHRSPKGNRQMKGLLNQASNAAVKTKGSIFEFIYRRLVVRLGHAQAIGAIAHRLCRLIWMILHQAIRYEERGPAVSRSTTERRAAKMIRELRRLGYRIEPVECKAESSV

SEQ ID NO: 178578 - protein, 318 aa, unidentified
MTNITYQFNIGVDIAKQKLDVSFSDQRVVSFENNLAGFKRLLKEITDNSQTRVVMEATGGYEKPLAHFLQGQGVAVSIVNAKRVRDYAKALGLLAKNDVIDAKVIRLFADAVNPKLLSAASDTQQALDAQVHRREQLVKQRAMEKQHLETVGNKDAVRSIKRTIAFLDKEIERIEKAIKALIRADSILTEKVERLSAIKGVGDITALTLIADLPELGQLSNKEISALVGVAPFCHDSGTQKGKRTTWGGRTQVRSILYMAVLSAVQYNPPLKAFYNRLLMKGKTKKVALVACMRKLLTVANSMLRNNTEWNPNHGKLA

SEQ ID NO: 178579 - protein, 361 aa, unidentified
MKEEEATAGRRSVVGGVDTHKDLHVVAVVDEHDRVLGNECFPTSRQGYKQMLLWMRSFGELARVGVECTGSYGAGLLRYLQQAHVTVLEVTTPDKSDRRKRGKDDTLDAQNAAHAAFAGIRTVTPKSRDGMIESLRVLKVCRKTAIAARRVALQLIHNTIVCAPDELRESLRAMTRMQLIRTLAAWRPDLSDYRNLASAYRITLKSLGRRYLELHDEIADLDVMIAALVDELAPDLISRNSIGYESASQLLLTAGDNSSRLQSEASFAALCGVSPVPASSGKVTRHRLNRGGDRAANSALHIIAIGRLRTDARTKAYVAKRVSEGHSKLEAIRCLKRYIAREVYYLIRQRNRQIAQVQIAT

SEQ ID NO: 178580 - protein, 343 aa, unidentified
MNKFAVAGVEVSADVLVVALDNGQLRSSEFPNTAAGHQQLLRWLGKQAAQVRLCMESTGLYGLDAALVLQQQPGVEIMVANPRSVRHFGCAMMQRSKTDPIDARLLAEYAQRMPFQSWQPPSRAGRQLCALARAIHQLTEINSMQKNQLHAAGATTTTPKIVLRELERSLAHHQRSIQRLTRQALQLIASDPQLRQRFHLLLSFPGIAETSALQLLGELVLLAADCNVRQWVAYAGLDPRQYTSGKSVEKKVRISKVGNRHLRRALFMPVLVAVRCNSRFRAYYHHLLSQGKLKMVALVAAMRKLLHGIYGVFQSLQPFDADKLFSLPTSTPAHTAFAEKRAC

SEQ ID NO: 178581 - protein, 349 aa, unidentified
MHYIGIDYHKRYSYIVIKNEKGEVEYRGAIENTREAFEDLLKPYCPGKAVLEATRNWGLIYDWLEEVLDDVALAHPLKVRAIAEARIKTDKISADILADLLRTDLLPRAYAPSKETRSIKYILRQRMFYVRIQTMVKNRIHNILDRHPRLLSETSRFSDLFGASGMKWLGQLTLSGDDHDLLTSELQLMSLLKEKVHQSDAMVRKLVKRDERATLLTSIPGIGPFFSLLILYEIDDVSRFRDERKLCSYAGLVPSTYASGGKVFHGRITKAGSKWLRWALIEAAQTAVRSDPEFQAYHHKIRVRKGTNAAKVATARRLLTIVYRLLRQGRLYEKKSRRKSKALVALVSP

SEQ ID NO: 178582 - protein, 418 aa, unidentified
MFKIFRKNCCGLDVHKTWIYACIGITDANSRTEYFQARFSAFSKGLQELSHWLDKYNCKQVCMESAGKFWIPVFNILEKTCLVTLAHPKYTKPQKGNKTDRKDAKWICDLFMCDMIKPSFIPPPAIRHLRDLVRYRGKLTNMLTGEKNRAQNCLTVSNLKLDDVFADVFGKSARSITEYILAHPGEPFDVAQFVDRRCKSPLSEIQAAVDGAISPEQAVKLRQCLDHIDQLRLLRQRLEQEILRICEPFADILQLLRTVPGLGNDPMTAIAVLSEIGGDMSVFPTAKNLCSWAGCCPRNDQSGAKVKSSRISRAGSYLKPLLVQVANALIHSRKHPEFAERYRRIKARRGHKKAIIAVCKMLLTAIWNILSKLVPYSPAGFLSTSHDLPPSKSLTVAQGLSLLRRRGFILTDDPLSAP

SEQ ID NO: 178583 - protein, 421 aa, unidentified
MTQSAPHTFAAFVGIDWADAKHDVCLQAAGSAKRECCQLDHTPEAIDAWVTTLRTRFNGQSVAVCLELNKGPLVFALRKYDFLILFPLNPLTLARYREAFTPSRAKDDPTDAELQLELLLTHRDKLRPLNPQSPTMRALAQLVEHRRRVVGDKVRLTNRLTSTLKNYFPHALQWFQDKDTLLFCDFLSRWPTLKAAQLARRSTLETFFRDHHVRSSDVIDKRIHAIHAASPLTIDEGVIAPHALLVQALVSQLRVTLQAIETFDNAIAQRAQSHPDFPLFQALPGAGPVFASRLLVAFGEQRDRSASAAELQRYAGIAPVTERSGKKSWVHWRLQCPKFLRQTFVEWAAESTRHSFWAQVYYQQQRDKGKAHQAAVRALAFKWIRILFRCWQDRTPYNESAYLQALNSRGSSLLHNLAKEA

SEQ ID NO: 178584 - protein, 342 aa, unidentified
MQIATIGLDIAKNVFQVHGIDAGEKVVVRKQLRRRQVLEFFKALSPCLIGIEACATSHYWARELTKLGHQVRLMPAKDVKAYVKRNKNDSADAEAICEAVRRPTMRFVQIKSTEQQGRLMLHRTRDLLMRQRTQVINAMRAHLAELGIVAAQGREGVKELLKIIASEEDARLPVDAHTSLLVLAAELQAMQTLIGCIEKRIMVQHRSSEASQRLESIPGIGVIGATAIAATVPDPKVFRSGRDFAAWIGIVPREDSTGGKQKLGPISKQGDRYLRRILVVGACAVLRYARQHPEKYPWLTQLLARKPFKVVAVALANKMARTAWALLANGGTYRSPMLSAAA

SEQ ID NO: 178585 - protein, 339 aa, unidentified
MQVTTVGVDLAKNVFQVHGITETGEVVFNRTIRRAQLLAFFEDLPACLVGMEACGSSHYWARQLSALGHDVRLIPANYVKPYVKRGKSDAADAEAICEAVTRPTMRFVAIKSEEQQGVLFLHRARDLIVRQRTQLGNMLRGLLAEFGIVIAQGIGSSVKFAKGVLEGGLPRIPEVAVDVLTNLSNQLVALHLRVRWYEIRMRLQARQDPRVTLLRTIPGVGPVTASAIVATVGDARQFKSGREFAAWLGLTPLNRSSGGKEKLGRISKMGDRYVRRLLVTGMTARLRQMKTHPERVGSWTLDLLARKPARLATVAMANKTARIIWAILTKNERYHPHSA

SEQ ID NO: 178586 - protein, 337 aa, unidentified
MLIIGCDFHASFQQIAIFDNRSGREEQRRLGHRGEAEEFYRGLQGQEVLVGMEACGHYPWFERLLDECGHELWLGDAARIRACEVREQKTDRRDAALLLRLLREERFPRIWVPRWEERDVRQLLTHRHQQVQARTRVKNQLQALARGQGLQKKRQLWTGPGRVELEKLELLPYAALRRERLLAMLDGLQAEIGALNGQVEAEVQRRPEALRLMTHPGVGPVTALALVLTLGPAERFRTARQVASYFGLIPSEHSSGGRQQLGRISKQGSSFLRFLLVEAGQSAARGDAELGRFYRRLAMRKHRALAKVAVARKLAMRLYWMLRQDWTYAQLCKAVCR

SEQ ID NO: 178587 - protein, 372 aa, unidentified
MKNKDMVSQIGLDNHKKFSKATARDRAGKIVWRQRLDHRDRQGLRHRLAEWPKGTPVILEASFGWSWMSDELQDAELHPHLANTKKVAGWRKARGLSKSDRSDADLLSELWSQKEPWWKVWLAPPQVRQRREWLRYRVNLVGMQTALKNRIQSILHYHGILHEYSDLFGVQGRRFLNLLISDKDITLAESARASAKGYLQLLDHVRRQIAKVTRRFRREVTKTPAARRLTTIPGIGWILAYTILAEIGDIKRFRNAKHLASYCLLVPRAHDSGKEGQDDQPMGRHVGRVGRRTLKWAFIEAAHGAVRKGGRFRALFDRRTNQGKRDRNRGYIAVAHELARLVYVLLTKETNYMEQAPQRPGSRTVASRPEAG

SEQ ID NO: 178588 - protein, 384 aa, unidentified
MNKDSIIFIGLDTHKSFIQVTVLQEHRGANPLHLGRIKSNKSALIKLAKQLQSKYPKATLHFVYQAGPCGYWTYRLMTSLGHCCYVVAPSLIPKKPGDRVKTDKRDAAKLTKLLKAEELTPIYVPEAEDEAIRDLSRARETAMKDLKDAKFQLKGFLLRNNIQATVNDNWSKKHLRWLTDLILPHHSQQIVLQEMIITINERMQRLQRLDNELLHQVKNWRYYPVVKAIQAMRGVRLLVALGTIAELGDLRRFDHPRKLMAYLGLVPTENSSGGKTRRGSLTKCGNSRARRLLVEGAHTYKHKANISVELQLRQEGLPKEIVDIAWQAQQRLCRRYQRLLQKGKHRNVVVVAIAREMIAYIWAIAREVVISDVDPKTRIARLPA

SEQ ID NO: 178589 - protein, 354 aa, unidentified
MPQPNDLSRSLAALEQDSTLIVVIEMSLSSWLVAGIVPGIERHPAKKLEPDEVALLQLLRRWSDEATKAGHVIARTVVAFEAGRDGFWLARWLRARGVEAHVIHPTSVAVSREHRRAKTDRLDTELLKRAFLGWLRGERDHCSMAAIPTLEEEDAKRPNRERESLVGERSRIVNRMKGTLARLGIRGFKPTLRKAPEQLERLHTPEDTLLPPNTLAELRRGMARLRFVADQIREIEETRLERLEQQPEEGAHAMVRLLARVIGVGIETADMLVHEVLSRNLRDRRAVARYAGLTGSPDESGIRRREKGLARSGNARVRRGMIQLAWRFLIFQKARWRNGSGLGPRMPALARVRQ

SEQ ID NO: 178590 - protein, 366 aa, unidentified
MKKISTMQAFSNEILKEQKLTIGLDLGDRWSFYCVLDEAGKIILEQKVATTPEAMKQTFGKIPRSLIALETGTHSPWVSRLLTELGHEVIVAHAQKVELITKSNRKDDRHDARTLARLARIDPELLGPVRHRSAKAQIHLTVIRARAELVSARTALVNAARGLVKSFGERLPKCGTYQVNEKLAEGVSAELRDVLVPLLREVESLNERIKEYDERMEKIAKEVYPEVALLKQVKGVGTQIALTYVLTIEDPYRFPKSREVGCFLGLRPGRRNSGESEPQKKISKEGDRYLRTMMVQGAHYILGPFGADSDLRRWGLKLAERGGKNAKKRAVVAVARKLAVLLHRLWVSGEVYEPLRNSQKAMRAVA

SEQ ID NO: 178591 - protein, 420 aa, unidentified
MTADNKLWRNRKERKEWARRLRSEDPGLEVLHPHAAGIDVGNSAHYAAVRPDRDPEPVRRFECFTADLYRLAEWLQSCGVKTVALQSTGVYWIPLYEILEDRGFEVYLVNARHTKNLPGRKSDVQESQWLLKLHTYGLLNNSFQPPAEIRVLRTYWRQRAEHVSGAATCIQRMQKALTQMTLQLANVISDLSGLTGQAIVRAIIAGERNPEKLAERSHPGIEASREEIAKSLEGNWRPELVFVLQQEVEMYDTYQRRIAECDQQLQKHLASFGDTVLPQSPEAEPRKRKAKPTKNAPRFDLGSELKRITGVDLTRIDGIDVMVAQTLLSEVGIDMSRWNTEAHFSSWLGLCPDNRISGDKLLGKGTRRVVNRAATALRLAARKRSGWHAAITPQWQTRRCPALKTSRASMHGWERGMWRQ

SEQ ID NO: 178592 - protein, 340 aa, unidentified
MSLENIAVVGLDLAKNVFQIHAVDDTGCVVARRQLRRNQLLQFFEQIPRCLVGMEACSTSHFWARELGKLGFEVKLMPPVYVKPYVKRGKNDAADAEAICEAVTRPTMRFVPIKSCERQALLMQHKTRDLLVRHRTALINALRGHLAEFGIIAPQGAMGVKTALEALHAARDELPAPAVQALEHIRNQLQELSQKIAELDRIIIAWCRSDAAARRLMTIPGVGSLTAAAIVASVGDAAEFRSARQFAAWLGLTPRQNSSGGKERLGRISKQGDRTIRRLLVVGATAVVRRARLDASSFPWIARLLDRRPARLVSVAIANKTARIAWAILRREEVYRPATA

SEQ ID NO: 178593 - protein, 409 aa, unidentified
MEVLHPHCAGLDVHKETVVACVRHMDRQVRNAVKTFPSTTQGLMDLSAWLSEESVTHVAMEATGVYWKPVWHILSDGEFHLVLANAAHVKNVPGRKTDVNDATWLADLMAHGLIRGSFVPDEPTEQMRNLLRTRKQFVRERSSQVQRVQKTLEDANIKLDSVISDVVGVSGRRMLEALIRGQSEPQELAALAYGRIRATGAQLEAALRGRVTVHHRFLLRLHLDHLDAVDAAIARIDKEVDGQIEPFRGAVERLSSIPGVSSLSAEVIVSEVGLDMSRFPTVGHFISWAGLCPKNDQSAGKRRSTRMRKGAPWLKTLLIQCAWAATRVKGCYLQAQYLRLRSRRGNKKAIGAVAASILTAVYHMLRDGTTYQDLGASHFDRHATAQQVGRLLKRLHHLGYEVQIAPVTA

SEQ ID NO: 178594 - protein, 316 aa, unidentified
MNFYNSTHQHYCGIDLHARCFYVCIINQQGETLLHKEISANPDALIELISPYLDNLVLGVECMHCWYWVADFCDDHDIEFILGHALYMKAIHGGKTKNDRVDSFKIAALMRGGNFPLAYVYPRNMRATRDLLRRRTNLVRHGADLKAHVANTTSQYNLDMAVLECYHRELSQVEWFLEKQAKKHQPAYFYLLKTIPGIGRILALTILYEIGDIQRFESVQKFASYARLIKCKAESAGKTYGTQGNKIGNAHLKWAFSEAAVLYLRGNSGAQQLLQRFQKRMSKAKALSALAHKLGRAVYFMLKNEKIFDEKRFLKS

SEQ ID NO: 178595 - protein, 410 aa, unidentified
MASVAQFAPIHLGLDVHRDTISVGILGPDQQVPEVDRIPHDEPSVRRLVGRLGDPRLLRACYEAGPTGFELARLLHRMGVRCEVIAPSLIPKAPGDKVKTDKRDCRRLARLHRAGELVCIRIPTIGEEAVRDLCRTRADMVADRTRARHRLSKFLLRHGRVWRGGATAWTQAHERWLLAQQFDEPALAATYGHYRVVLESRDAHLDAIEADLASWYDRPPFAEQVARLSAYRGVTRLGALTLAAEVCDWRRFARASQFMGFCGLVPSEYSSGQRTVRGHLTKAGNAHLRAQLARVGLGLPAPPRRRRADRPPPAGPAPSGRRPGMGSPAAPVRPVPSPGRPQERQEHRGDRDRPGARRVLVGGDDRLTHHPSSPPRDRPRRCAHPDDAPGRRRCRSDPREPSATATARRP

SEQ ID NO: 178596 - protein, 337 aa, unidentified
MNDHYHPQLGIDVSKFKLDVVLLLPISTPTATFANTPKGFQALRDWLARFHASPRVCLEATGTYGLPVARFLHERGLSVSIVNPMAIHFFGRTQLSRNKTDAHDATLIAHYAQQHQPRPWQPPTPAQEQLQQRVRVREQLVESRVQAQQHLESAPAATAKFFRAQLRLLDRQISTLEKQLRQSLHADPKLGQAVALLTSIPGVGFITAVTVLAIIPPLDQLESARQLAAFAGLTPSQRQSGTFTGRSRLSKMGHRRLRKALYFPALTALRHNRRVQSLAIRLAQKGKSKMVIVGAAMRLLTHLIFGVLKNQIPFDPDYQNKSRHRAAASLQLAPGGG

SEQ ID NO: 178597 - protein, 414 aa, unidentified
MTHYKQNHIYVGLDLHKANHTAVIVNCWNERLGEIKIENKSTAFDELMKFVKKQCPKGLTPVYGLEDTGGNGRALAVHLVENKQVVKEVNSALSYNERMSNATTQKSDSWDAVCFAKVLLARLDELPDANPQDIYWTIGQLVAKRNSIVKHASGLKNQMHQQLSYHYPSYKKFFCDIDGKAALAFWEKYPAPHQALTVGVDELADYLRKASNNTCSTRKAEEILELVKKDGETKRDFQEYRDFLIVNMVHDMRRSRELIKQTEEHLRQVLAQTDYKLESMDGINVVTASELVAEIGDIHRFSSADKLARFAGIAPIRFSSGGKGKDQASGQGNRVLNSIFHNLAVQQIQVAKGKSKRQRNPLFYEFYQRKLAEGKTKKQALICVMRRLVNIIYSMMKNKTEYRAASPLTELKAG

SEQ ID NO: 178598 - protein, 404 aa, unidentified
MTIFVGIDWAEEHHDVCVLDGEGAVLASGRIPDGLEGVALLHALLAEHAATPGEVIIGIETDRGLLVGALVGAGYQVFAINPLAASRYRERHTTSRAKSDRGDAKMLADLVRTDRHNHRPLESDSQLLEAVKVLARSHQSLIWTRQRQLNQLRNALREFYPGALAAFDELGHPDALAVLSVAPDPERGRRLSTTQIVAALRRGGRQRHLDRRAAEIRTALRAPQLSASALVADAYATGVAALIGVIAGLGTQIAAVEAKLVDRFEQHPDAAILRSQPGLGSILGARVLAEFGDAPNRYADAKARRNYAGTAPITRASGTSRAVVARLARNRRLFDACYQWSLCALSSPGARAYYDAHDPGPRSGKTARRKLANKLVGILHGCLTHRTLYDEALAWPRPVEKIAA

SEQ ID NO: 178599 - protein, 401 aa, unidentified
MTAVGSKAWIGVDIGKTHHWVCAVDESGQKLLSLKVLNDEAQIIEVIAAVNEVAPDRVWAIDILGTPSALLVALLAKADEQVRYASGRVVAAMSTAYSGEGKTDAKDAYIIAETVRIRSDLSVIDADADLVRTLGVLTGYRADLVADRVRMINRMRDLLTSVFPALEREFDFASCKGALVLLSGYATPEAMRRMGEARLSRWLRQRRVRGYADVAARAVAAAQTQQTVLPGQDVAASIVAELANSVLVQHERLKVLEQQIQDAFAQHPQADVIESIPGFGPVLGASLLVAAGDLAAYPTAGHLAAAAGLVPVPNDSGRRAGNLHKPRRYSRPLRHALYLSAQTSMMRAGPNRDYYLKKRDQGRTHSQAVIALARRRIDVLWALLRDNRTWTPAPPARAQAA

SEQ ID NO: 178600 - protein, 422 aa, unidentified
MARQEDTKVLQVMHPICCGLDVHKKMVSACLIVQTAAGERVEQREFGTFTRDLASLKEWLLENECPVIAMESTGVYWRPVFNVLEASVQVILVNARFTKHMPGRKTDISDAKWLTGLLRHGLVRASFIPPEEIRQWRDWCRQRKNHVDTLGDYKRRVHKMLEMANIKIDSVLSDLFGATGRNLIQLLMNGGTVTVRDVEDCLRGSLARKDSKQKAAELHDAIQGYFGDHQREVLKPLLRIIAVLEHEIALIEARLKHLLAPYHDLIERMIMVPGIAYVAAWAILAEVGPTLEAFRCVEAFCSWCGLSPGNHESAGKRMSGKNPVRRRMIKTILIEVAWAAIKCKRSYYRAKYHRLKARIGSKKAIVAVAHRIAKALFHIIKDGAEFKDLGKDYLSLLHAQSRYEYLRREAQVIGYKLVPEAN

SEQ ID NO: 178601 - protein, 316 aa, unidentified
MNTIPQIFVGIDVAKDFYDIHLHPLNKAFRITNDKKGISKLLRILSKYQVQLVVFESSGGYGYFLSKELLANGYKTWQVDPSRIKAFIASEGVHAKTDKIDAKMIALFASQKELKYEKNEPTEIEECLRALVKRRQNLVQMIIIENNRVKHPAQIFCKDRINNHIIFMKDEIYYIEEEIDQLINNNDMFNLKAAIITSIPGLGKVSAFTLIAGLPELGKIADKQISALVGVAPFTQQSGASKGTAIIRGGRKPVRNTLYMATLTALQYNPIIKEFYDRLRRNGKKPKVAIVAAMRKLIIILNTMVKKNEMWDPQSN

SEQ ID NO: 178602 - protein, 424 aa, unidentified
MRFIGLDVHLDFCEIAICEAGKVRSAGRVPSSPEGVQVLANSLGPEDHVALEATGNALAIARLLEPHAARVVVAASMEFPATTETKVKTDRRDARTLARLLAAGLLSGCWLPDERTRALRRRLAGRAQLVRQRTRCKNEVHAVLMRNLKGRPPMSDVFGKRGRVWLAELELPADERETVDGCVRQINFVDGEIAILERAIAEHALTSSDVRRLMTVPGVSLMTASTFMAAVGDIERFGDPRKLVSYLGLDPKVRQSGSSPARHGRISKQGAAQARQMLTEAAFVTVSTAGPMRAFYERVRARRGSQIAIVAVARKLAVLFWHLLTREQDYAFARPSLTRKKLRALELRAGAQRHPGSRTLATKNSYSQRAHRERERELSEHAEVAYRRIVADWTASGPAKAGTSATPGRASQGPSKGQAARQTQ

SEQ ID NO: 178603 - protein, 408 aa, unidentified
MQVTFGIDVSKSTSTVCELIGESKNEFTITNDRPGFIQLLKELSAFSKHPQIIFEATGVYSRRLQAFLEDYDYDYVILNPLKAKKEMDMGLRHNKTDKTDAYHLALIQRLHHHPVKKLQSQTYKQLNSLSRFYDQLTSDLVMAKNRLHQALQSTFPEIETLFCSAKGKNYWKIVRHYPHCDLVEKDDKKQIVNWLMQLKGIGFKHAQKTADKLIELAHKAYPVVSSDSVEAEQAQYYAHRLLSLSKHREKIIEQMVKMAKSLSNHDLENLESIPGFAQITAVRVLAELGDLRRFSNPNKINAFVGIDPGRYQSGEMDSNLSITKHGNAVARKLLYRAIGQIALASKTNPCHIADYYESKKLSSQTKGFKKIAIASIHKLIRTIYALIINDQLYDYNVATHNQKDFSRN

SEQ ID NO: 178604 - protein, 443 aa, unidentified
MSRKQRTHLRGKRGQAFADRIRGIPLDRILCVSLDISKYFHVVMIHNALGEIVTPTFEIDIFQSGFDRLCQAIDEAVAQTRAQVVLVGMEPTSHYFENLARHLRDRSRPVTLINSYAVKQNRDQQLMRREKTDEIDVAAIGDLLRRGEGSPFQPASGVYLQLQQLDRVRLSKVKMRTMLKNQILGHLDRIFPGLVLIGAEATRRYTPLFTTDFWACQTLQHLIRVCPDPHRLIAMTPTDLVAAFHAQHFALGRLRAAKILAYARKVLLPDAELAAIRCELLRHDLALLEEVERHIADLEDRLRDLLTQTPYTIWAKLKGLSDIQVASLAAAIGDPAHYAYAGQVFRRTGLVSGRNDSGIRQRKGQGKRVVKTGDGYLRRAVLNGLRSLILHQPVLRRYDRRLQQSKPKGVAFVATARRALGILWATLRDQHPATLILQRGAMM

SEQ ID NO: 178605 - protein, 368 aa, unidentified
MTLYIGVDFHPHQQTLSWCDTETGETKTLDMLHDVKRVREFYSSLPEPAIIGIEASSRAVWFENMLFETGHKLLVGNPVLIRKRATSRHKNDRRDAELILDLLLRGEFPSLWRRPPESDRILEMLRLRSSLVRQRTQGYNRLQALAHSAGLPRGRMRTAAFQAVIKALDLDETDDLRRMHLFKLVENFNEQITQLDIWLKAKAEADPKVRLLETQKGVGFLTALTTVHTLGDVTRFARLSKQVVSFAGLDPLEDSSAGRIRFGHVSKAGSRLLRFQLGQAAQIAARSDMKLKSFYKRLAKKKPKAVAKTATARRLLVKLAIMLRDNINAQEFDRRGKHSWQCPSGTRSEMTAGLIGPSQPFGDRGREI

SEQ ID NO: 178606 - protein, 445 aa, unidentified
MLRIVYERVAGLDVHKKTVVATRMRVTEDDRVEWETETFGTTTPDLLELLDWLYVWDLTHVAMESTGDYWKPVFNVLEDTFGVWLVNAQHVKHVSGRKTDVKDSEWLAELMLHGLLKPSFIPPKPQRALREMTRYRTTLVQERTRIVNRVQKLLEGANIKLASVATDIMGVSGRAMLAEIAAGQTDVELMANLARGRMRNKIPELEKALTGIVQDHHRFVLAQQLDHIDYLDEKIEAISAQIGKQLESMTWPDQPSQPDASKSVEAGTGVADESELPLTWDAAVALLDTIPGVDRRIAEVILAEMGLDMGQFPTAAHLASWAGLAPGNYQSGGKRYSGRTTKGNKALSSIMVQAAWGASRTKDTFLKSRYHRLAARRGKKRAIVAVAHSISVSVWHMLTYQQPYQELGGDYHDERKKESKVNYLVRRLEKLTGGAVSIELQPVTA

SEQ ID NO: 178607 - protein, 341 aa, unidentified
MEEYIGLDVSMKETAVSIRRDGKRVWRGTCASDPKLIANLIQKRAPSAKRVVFETGPLSVWFYHALRAEGLPAICIDARHAKAALDMAANKTDANDADGLAHLAEVGFFREVRVKGFDSMLTRTLVAARSRLVKITTGLSNQIRGLMKTFGLLVPAGKGSTFEKNVRSLLVDQEGLAPIVLPMLEAWRSLRLRAAELGRQLVASSRQNQACRILMSIPGVGAITATSFATAIEDPDNFKKSRAVGAWLGLTTRRYQSGEVDYDGHISRRGDRHLRGLLYEAAAVILTRSSADNGLRSWGLKLRERVGFKRAAVAVARKLAVTMHAMLKTGTFFDRTLGAAA

SEQ ID NO: 178608 - protein, 444 aa, unidentified
MKALLVLDPKAAAIDVGSENLHVSIAGDLPKVFGTFTGELERLRDWFLEQGVRSVALEATGVYWLYVYEVLEAAGLEVVVVNGRHVQNVPGRKTDMADCQWLATLHAHGLLRGGFVPPADIRQLQDYQRLRADHLVGAASQVQKMQQALERMNIKFHDVISDLVGVSGLKVVRAILKGERRPGELLALCDVQIQKNKKERVKESLRGSWKKEQLFALRQALELWETYQQKIADCDQELASLLREMTGPQPRAGDSGNAVSIGPVALGPAKDQGKNTPVIERLQELVARLCGGRDVTQLPGLSVHLVLQLISEVGTDMTRWRTEKHFTSWLGLAGGRKQSGKRKGNVKAHRNRAGRMFCAAARSLARSVDKALGGFYRRLRGRLGGLAANVALARKLALLFYRLLRYGMGYVEQGLKNYEAKVLETETRLLRKLARKQGFTLTPN

SEQ ID NO: 178609 - protein, 349 aa, unidentified
MTANTIIIGVDTHKATHVAVAIDANGSRLACISAPATTKGYLTLESWASALGTIAAFGIEGTGSYGAGLSRHLLAQGHKVVEVTRPNRQLRYQHGKTDSIDAEGAARSVLAGQAAAEPKTQTGSVEMIRHLKIARDTAVKSRSQALVTLKTLIINAPASLRDALDQIGGKMALIRHIAAFRPGAITSTTAPAKTAMRALAQRWLALHDEVQGHDKALEHLVVARAPALIASHGIATMTAAEMLILVGDDPTRIRSEAALAKLCGVCPIPASSGKTNRFRLNRGGNRQANAALYRVAIVRMRNHQPTLAYVSKRKTDGKSNREIIRCLKRYIVREIFAHLCRPETTPTPA

SEQ ID NO: 178610 - protein, 417 aa, unidentified
MWNKVTRVKCPVEPASNKHIGGIIMVSVGIDIAKDKHDCCILSSEGEILADVFTIPNTAEGFDTLWQAICRCTHSGDKIKVGLEATGHYSYNILGFLLDKGLPTYVINPLHTNLYRKSLSLRKTKTDRVDARTIATMLMSDVDLKSYTDTAYHNEELKSLTRYRFDKVRERAKLKQSVSRLVTILFPELEKMVPTLHMASVYALLSEFPGARQIAGAHLTHLKSLLNDASKGHYGRDMAMELRDAARCSVGSVMPAKSLELQHTIRLIRELDAEINDIEVAIQTMMEEIQSPITTIPGIGVRMGAMILAEIGDFSRFDSPDKILAYAGMSPSTYQSGRLSLSGPYSHMEKRGSRYLRYALYNATKYVCLWDPTFAAYLAKKRAEGKHYNVALSHAAKKLVRLIYAMEKSQRPYNGAA

SEQ ID NO: 178611 - protein, 421 aa, unidentified
MIEEIAEEPAELLQRAAALDIGKASLVCCVRVPHESRPGARRQEVRTYDTVTPALLELRDWLICQGVTRVVMEATSAYWKPPFYLLEDDIECWVVNARDVKNVPGRPKTDKLDAVWLCKLAERGMLRPSFIPGRPQRQLRDLTRYRRTLVQERSREKQRAEKLLEDAQVKLSSVISDIFGVSGRDMLAALIAGQRDPYALADLARKSMRAKMSVLRQALTGHFTDHHAFLLGMMLDRTDALTAQIDALTARIEEAIAPFAAQVAQLDEIPGVGITTAQEIIAETGTDMSRFPTPGHLVSWAKFAPKARESAGRAKAAATGKGSPWLGGTIGEAAVSAARTQTFLAARYKRIVRRRGKKRALVAVGNSILTITWHLLSDPGAHFTDLGPDWHDRLAPQRRKRQLIAELERLSGKKVTLHDAA

SEQ ID NO: 178612 - protein, 404 aa, unidentified
MGMIQRACGVDVHRDNFVATILTSKGCETRDFEKSLEDIEAFKAWLKANKCRAVVMESTGVHWIPLYAALEGEFDVKLANPERTRKTSGRKTDQSDAEWLAYLLRAGLIEASYVPERNIRVLRELTRLRTKMVQNRTDYKNRVHKVLQRCNIRLGSKLHSVFGKAGMEVLNGLMTGRSLDEIVNESKSRVLNERRGELEKVVRAGLDQEDIFVLKRCLRMVKSLDEELEELDARIAMLIGGREKEMKNISKVPGVAQVSASSILAEIGDAKRFANGKKIASWSGLCPSVYQTADKNLTGNLKRGSKNLRRMMIQVAHSASRTRNSRLRLFFLRVAARRGKKKAYVALARKILCIIHHLLVTGEEYVEESFVKKVRLRMRALEGLPLEEMAKILVGAGYLVQAPV

SEQ ID NO: 178613 - protein, 423 aa, unidentified
MMKLKYSICCGLDVHKNVIVATIVTTNKDGISEYLQKSFSTINSDIQRFHNWLIENNCYHVCMESTGKYWIPIFNYLENDIDICLTHPKYVKAIKGKKTDKKDSKWIADLYKFDLVRCSFIPPKDFRQLRELSRYRFKLVCMKSSEKNRIQNCMTISNVGIASVLSDPFGKTATEIMSYLLEHTADSMDEKAVRKLIKKGAKAKSDEIIEAIKGYNIETDQAKKLELARGHLEYLDDMITQTEVELYVRIKPYYEFVEFVSTMPGMTELSSTIVLAETGVDMDIFDDAKHLCSWCGLSPANNESAGKKKSVRIAKAGDYLKPMMVQCALAAIKSKKQPYFAIKYGRIKKRRGHKKAIIAIARMMMVCIYHMVSEKKPFTPTDYEELMNPQNHVERVVLNENNVFAYLESLGYDSSKLVKRNDN

SEQ ID NO: 178614 - protein, 356 aa, unidentified
MKSLTDGEFAAFIGIDWADAKHDICLQVANTEKREFAVLPHRPDAIDEWACSLRQRFQSRPVAVCLELRKGPIVYALQKYEFLILFPVNPVTLAKYREAFTPSHAKDDPTDAEYQLELLVKHRDKLKALRPQSAPMRTLESLVEQRRCLVDDSKRITNRLTSALKQYYPQAVQWFEEKDTALFCDFLSRWPTFKQVKQARRATLEGFFHERHVRSAKLVEERLAAIKSATSLTDDIAVITPHRLLAQALVDQLRVTLQAIERFDAEISAISQTLPDYLLFRALPGAGAALAPRLLTAFGEQRERYESAAGVQKYTGIAPVTERSGKQRWVHWRLQCPTFLRQTFVEWAAETIATKA

SEQ ID NO: 178615 - protein, 367 aa, unidentified
MTIVAHAHPYVVGVDTHAKTHALSILATPNGEILHEGQFPNTAAGMARAIDWVARRTGGDLAVLWVIECAASFGAKLARASATAGYRVVEAARMSARSNRGVGKSDPLDARRIAAAVLPLELDRLRHLRNHDDVRVGLRVLTAARDHMTGERTATVNALIALVRFLDLGIDGRRPLTGAQIITISTWRTRSENVGLATARAEAVRLAKRIVALDGELKENTETTTELLHRSPARVLLDKPGIGPVTAAVALAAWSHHGRLRSEAAFASLAGVNPIPASSGNTVRHRLNRGGDRRLNQALHMAVVVRMRMDPDTKAYVERRLTQGHTKREIRRCLKRYLARQIYRSLTAATRTEETSTAPPGAVPIGT

SEQ ID NO: 178616 - protein, 415 aa, unidentified
MKVVFPTCCGVDVHKTFLVATIITTPADSLQPNYQKKRFSTFNSDLNRFADWLLEHNCLDVCMESTGKYWVPVFNILEKRGIRVVIANPKWVKAVKGNKDDTKDSKWIGDLFRIGLVKSSFIPDLNIRILREFTRYRYKLVSMKSSEKNRFQNAFTVCNVALDSVVSDMFGKSATAITDYLTSDESFDAEHCVSLLQRSLKKKAEQVLESIEGFSIADEQKARIKIIREHHDFIEEMIATVDTRVNEMVAKYEGNINLLCTIPGIDRRSAITIISEIGTDMGQFGSSKRLCCWAGLTPGNNESAGKKKSVRISRAGVYLKPALVQVAHAAVKDNDHPYYKLKYERIAKRRGKKRAIIAIARMILTAVYSMFCTGEVWNPVDLYKVDMPGCLKEQQLAKAIKQATRFLEKQGLSVA

SEQ ID NO: 178617 - protein, 418 aa, unidentified
MGDGLLFVGDDWAEDHHDVELMDASGRRLAKARLPEGVAGMARLHAMIGGQLGDDVEDVGDVGDVAGRVKIGIETDRGPWVQALIAAGYTVYPVNPLQAARYRDRLGVSGAKSDAGDAHMLADMVRTQSHQLRPAVGDSAEVGAVKVVTRMHKTLIWERTRAGQRLRHALREYFPAALEAFEDLDAADTLELLGRAPDPASAARLTLAQISAALKRARRRDIPTKAAAIQAVLRTAHLGQPPVVTAAYAASVRALVAVLGTLNEQVKILQEEVEAHFGKHPDATIVLSQPGLGAVLGARVLAEFGDEHKRYVSAKARKNYAGTSPITRASGKKQTVLARFVHNDRLVDALLTQAFASLNNSPGARAYYDKQRARGANYNAALRQLANRLVGILHGCLKTGTPYNETTAWSHHPTEATT

SEQ ID NO: 178618 - protein, 355 aa, unidentified
MTSVKYIGLDVHKESISICVRNSVGKVVMESVIETKASTILQFIDGLRGDLRVTFEEGTWAAWLYDLLKPHVSGVVVCNPRKNALLKDGSKSDRIDANKLSEQLYMNNIKSVYHGEHGLRKLKELARSYLTISKDLTRVMNRLKALYRSWAIPCAGKEVYAPRHRAQWLGKISEPGVRRRAEFYYQQLDALCPLRPAVRRDLLLEVKKHQAWKLLRQIPGIGPIRAAVLMAVMQTPHRFRTKRQLWNYSGLGLETHDSGEYRAVQGQLRRAKKQATVRGLNEDHNHDLKDIFKGAAMRASTAAGPLHDFYDNLLAKGRKPTMARLTLARKIAAITLIVWKKEVRFDANYLKPQAA

SEQ ID NO: 178619 - protein, 406 aa, unidentified
MNRKIYVGVDLAKNFHQVAAVDANHQVVAEPFTIGRGREGIEEMLSRLRFLTRDPTDLVVTIEATSDWWWELSWDLIERGSTVYLAHPKKAHDLRRFYALHTKTDVTDSEALARMPLVDKGLKQLWRPSPQQHSLLRLCRLRWKARCRIADLKRRISHLSDVIVPGLGREMPIRYSKSARVFLRRYLAPEKARRLGKKRLGQVLRRAAWGKLSDEKLDRLWQCVENAPRLGLLADDLQLEVGVQLDELEALERQIAMLDARIAELYGDVDPEQRLLEQPGLGPFLAAGVTAVIGDIRRFHSSKALISYAGLAPRVKSSAGTSKAGQGITKHGSPYLRAWLFIAAENARMYDPELKIYYQAMRKRDKHHLVAVCATAARLLEKVYALLTEGVNETEVESRAQSLSTG

SEQ ID NO: 178620 - protein, 329 aa, unidentified
MVTASMLPVVGLDVSKATLAVCYQIDELVKHLEVSNDKAGFQQLVKACGAQCRFVMEATGTYNLALAYYLHEQGGEVAVLNPLVVKRFIQMHLGKGKSDRKDAQWLLRYGQQQVVKPWQPDETVIVECRQLEQVSEQLLKQKTMVSNSLEALQQQPIVSQLALQRLQQTWSQFDQQLRDLEAELLQLLDQRYAHEMTLLCSIPGIGRKTAGLLLLFAGGFTCFDNYRQLIAKAGLSPREHSSGTSIRGKVRITKMGGALIRSKLFMCSFAAKKRNAACQALYDRLVAKGKSGKLALIAVCNKLLKQAFAIIKSGVPYQADFISKLASNP

SEQ ID NO: 178621 - protein, 416 aa, unidentified
MMKLKYSICCGLDVHKNVIVATIVTTNKDGISEYLQKSFSTINSDIQRFHNWLIENNCYHVCMESTGKYWIPIFNYLENDIDVCLTHPKYVKAIKGKKTDKKDSKWIADLYKFDLVRCSFIPPKDFRQLRELSRYRFKLVCMKSSEKNRIQNCMTISNVGIASVLSDPFGKTATEIISYLLEHTADSMDEKAVRKLIKKGAKSKSDEIIEAIKGYTIETDQAKKLELARGHLEYLDDMITQTEVELYVRIKPYYEFVEFVSTMPGMTELSSTIVLAETGVDMDIFDDAKHLCSWCGLSPANNESAGKKKSVRIAKAGDYLKPMMVQCALAAIKSKKQPYFAIKYGRIKKRRGHKKAIIAIARMMMVCIYHMVSEKKPFTPTDYEELMDPQNHVESVVLNENNVFAYLEALVTTALS

SEQ ID NO: 178622 - protein, 404 aa, unidentified
MSTTSTRSPEASTAHVRPLYLAFELGDRHWTLGFTIGLGQRPRRRVIAARALDALGEEIARAKTRFGLPAEAPVVSCYEAGPDGFWLHRALGAQGITNVIVDASSIEVNRRARRAKADGLDVEKLAEMLLRYHAGERRVWHVVRVPSVADEDRRHLERERQSRVQEHTRLLNRIRGLLATQGVVLPLRGDGPGALARVQLWDGSGLPPGLVARLTREWQRVEAVAAELRTLEAERRALLSGRTARRTPAPAGASARDDTGARTCARRLVQLRSVGPTLAWALSTELFAWRQFRNRREVGAVMGLVPTPYQSGTSHHEQGISRAGNARLRGLAVELAWLWLRHQPESALSQWYRQRFAHGGPRLRRIGIVALARKLIIALWRYVQDGRVPEGAQLKPTTPAARTA

SEQ ID NO: 178623 - protein, 306 aa, unidentified
MHACVGIDVSKATLDVAVYGSSEVRAFANSPAGFRRLAAWLLPQRPRQVVLEATGGYEQAALDALFAAGLPMVRANPRQVRDFAKALGQLAKTDRLDARVLAQLAATISLTPYQPACDWQRRLAQWHQRRGHIVQMLGSERQRLERLVDPALLTWARRHIAMLQRELRSLDAEIKHQVATQPELDPLRSLKGVGPVLQASLASQLPELGRLDSKAIAKLVGVAPLARDSGLMRGQRHVWGGRRQIRAVLYMASLTAIRYEPRLRDFYQALRARGKAAKVAIVATMRKLLVILNARMRDARSKEQPA

SEQ ID NO: 178624 - protein, 355 aa, unidentified
MDSKKYIGMDVHQATISVAVRDAAGKLVMESILETKANTILEFIRGLGGSLWVTFEEGTSAAWLYDLLKPHVAHVVVCDPRKNALLKVGNKDDRINPRKLTDLLRAGLLSPVYHGESGVRTLRELARTYLTVTKDLTRVMNRLKGVYRSWAIPCAGQTVYAPRHRSAWLEKLVQPGVRRRAEQLYQQLDKLVEIRREARQELLRESRKHPAREFLSQIPRLGPIRVALLIALLQTPHRFRTKRQLWAYCGLALQTRSSGEYRYSGGQLQHSKRPPAIRGLNVNHNHDLKSLFKSTATQASGANDPWGDFYQNLLARGMKPAMARLTLARKMAAIVLRLWKKGEHFNPEPLKRKSA

SEQ ID NO: 178625 - protein, 413 aa, unidentified
MIVGVDVGSEKHFFRAFNWRGIELTRKPVPFSNSMEGFNSFYNTVVELMQKNNLEEAMVGIEPTGHYWFDLGQFMSGKNIRFVMVNPHHVHKSKELDDNSPSKNDRKDPRVIAGLVRDGRYFYSYMPTGVYAELRNASNRRFVLVEEQTRAKNRLQKWIAVYFPEYKGIYTHIDSKGGLLVLKHAATPDEIVSLGVDGIIQIWKSEKLRGNGRKKAMEIVNAAMNSIGLKSGLTEARMEIRDLIEDYELHTKRLERVNDLIKELCLQIKHADKLLEIKGIGITTVAGFIAEVGDITRFDDTKELQKLAGLELVADSSGKHKGKSRISKRGRKRLRYLLFEAAISVVGKNEEFRQIHEYYTTRDKNPLKKMQSLIAVSCKLIRVFHVILTKGVSYDASKMLGDIRHPGTQPKAA

SEQ ID NO: 178626 - protein, 336 aa, unidentified
MQIHHFVGIDISKNTLDVTMVNNGKIICYRQMANTAKEINTVILQMMEEHVASIEETLFCMEHTGMYSMILLRWLNSKGAKIWLESSQQIKWSSGRARGKNDKVDSERIALYAFKNHKNMILWKAPKPILDRIAALLHQRSRLLKAKKQLSGTFKEQKRFYEKGILKSIEKFATEPVKVLHAQIFAIEKEINNILKEDEKISHLYKIITSIDGVGPLTAAYVLVTTNEFLTISDPKKYSCYCGVVPFDHTSGTSVRKRSRVSHRANKTIKTLLHLAALSAIQLEGDIKDYYIRKVEEGKNKMSVLNAVRNKLVLRIFACVKQDRIFEKNYIYKKVA

SEQ ID NO: 178627 - protein, 334 aa, unidentified
MQYTHIVGIDISKATIDVAVCQKEATAVILNRRFSNRLEGYEELLAWLEKAGIKLEQVLICLENTGLYHVNLVNFLYSKKGSVWIENAVEIKWSTGLVRGKSDKADAQRIGLYALKNQDKAKLYAAEDEYLTELSDLLTDRERLVKAKNMLLGPLKEKQDLGLGKRADRSKEGCKQSVAALNKDIKGIEKQIAELVKSSKELSKNYKLIRSVKGIGMITALYLIKYTQNFKRLTNPKKLASYCGIAPFEYSSGTSIRGKNKVHPMSNKVLKKLLHMCALSSVPIQEGEMRAYYERKVGEGKNKMSVLNAIRNKLIHRVCACIRDQKVYSYKQVA

SEQ ID NO: 178628 - protein, 342 aa, unidentified
MTDTMIGVDLAKNVFQLHGASMTGQLKFRKKLTRPQFRQFMANQPPAVVVLEACGSASYWARELIKLGHEVRLIAPQYVRPFVKRQKNDAADAEAIVVAAQRPEMRFVQPKSEGQQACAVLFRARERLLHQRTELVNALRSVLYEFGHAVPKGLAHLKRMAAILEEPNSDLPALVREECQDLIEQIAEKTARIEAKTKKARGLSLLTDTARRLQTMPGVGPQTALAISGFAPPMESFKCGRDFAAWLGLVPRQYSSGGKERLGRVSKAGQADIRALLIIGAMSRLTWLARKSIPEASWLARMLARKPLMLVAIALANKMARAIWAMLTKKEDYRDLARAVAA

SEQ ID NO: 178629 - protein, 319 aa, unidentified
MKKRPLCFVGIDVSKDQLDIACRPEDRRWHVANDSAGIADCLLQLRQLKPMLTVLEATGGWQGSLVAALAVAKLPFAVVNPRQVRDFAKATGQLAKTDALDAGIIARFAEAVRPTPRPLPDATMQHIDAVLQRRRQLLEMLVAERHRVALAHPAVRESLARHIDDLQRLIRETDEESATIIQASPAWREKDDLLQSAPGIGPVLSATLQAALPELGVLNQREIAKLVGVAPLNDDSGKRSGTRHIRGGRAEIRAVLYMATLTAARCNPVISARKSAQSGDYGRHAQVPHHPQCNGQNPNPLECQLPRLRLTKTTVAHVD

SEQ ID NO: 178630 - protein, 338 aa, unidentified
MEQVITIGLDLAKNVFQVHGIDAAGKVLVRRQLRRGDVLRFFGGLPRCLVGMEACATAHYWARELTKLGHTVRLMPPAYVKPYVKRGKTDVADAEAIAEAVTRPTMRFVAVKTADQQAALMLHKVRDLLVRQRTMLINALRGHLAEFGIVAARGPGGVTAAIISLHEAQDSLPELARVALHGLIDQLRIVRGEIARVEKRIVAWHRASNASRRLATIPGIGPITASAIAAAVPDATLFQSGRQFAAWLGLTPRAHSSGGKERRVGISKQGDGYIRRLLVTGATAVIRLARQGNASKTWAAKLLERKSARLVSVALANKTARIAWAVLARNQSYVAPAM

SEQ ID NO: 178631 - protein, 348 aa, unidentified
MTLVGCDLHARKQQVAVLDTRTGELVEQELAHDGDAVERFYRALPPPVTIGIETTGYTQWFHALMHQLGHTVVVGEAAKIRAMVVRKTKTDRRDARHLLDLLQHDRFPAVWIPDPDTRDRRALIAHRVRLVRMRTMVKNGLQAIALNQRLALHSALWTQRGLTQLKALPLPPHTTRRRDDSLAWLAWLTTRIDQLDALIAAVASADPRVQLLLTHPGVGPLTALTTVLVLGPLARFPDSKHVVSYVGLAPAVHASADTQRLGKITKQGNALLRWVLGQAAPLAARQDDELRRRYFSVMHRRGRPKAKVALARKLLVRLYIMLRDQIDYEEFRRRGRAPRPQPLPVAVM

SEQ ID NO: 178632 - protein, 339 aa, unidentified
MEHYAGIDVSLECSSVCVVDASGKIIREGKVASEPEALVAWFGSLGFSLMRIGLEAGPQSQWLFAAFRTAGLAVELLETRHVRKAFETMPVKSDRNDARGIAQLMRLGWFRPVHCKSLPAQEVRVLLTARKLVQSKLYDIEMSLRGMMRGFGLKVGPTTPKRFAGRVRELVAGHPTLEFVAERLMAAHEVLLRELNGFEKQVRAMARSDARVQLLRSIPGVGAIVALTYVSAVDDPKRFKSSKTVGAHFGMTPKKYQSGETDITGRISKIGDRSVRTALYESAQVILTRPVKGSGLKSWAARLARRVGMKKAKVALARKLAVILHRMLANGTTFANKTA

SEQ ID NO: 178633 - protein, 319 aa, unidentified
MNKVSHDQIIGIDVSRDWLDIHCLRDGHRLRLPNTADGHERLAGIARDRQAVACFEATGGQEWRLWAALDAAGVQTRQLPPAQIKAFAASRGTRAKTDRIDAELIARFMAFRPDAGRCLPHENLRLLRALTSKRGQLVETRKRLLAQIKAHGKLATAEMFACMDDELKGLLDRQIAELESQIEKAITTDTSLSETAAILRSVPGIGPVASTMLISEMPELGQITGEQAAALTGLAPIAHDSGALRGKRAIGGGRRLLRHVMFQAALVASHHNPILKTFADRLRAAGKPHKVVITAVARKLVTIANALCKSRQKWAHQAA

SEQ ID NO: 178634 - protein, 341 aa, unidentified
MDEVSTIGLDIAKSVFQVHGVDAAGAVVIRKRVSRAKVMEYFGELPPCLVGIEACPSAHHWGRELQGLGHTVRLIPPSYVKAYLKRGKNDANDAAAICEAVTRPSMRFVPIKTKEQQTALMLHRARQLLVRQRTMLSNALRGHLAELGIVSAKGRNGTAELLRIIADGRVSPAVCGILKVLARQYGAIGTEIASIDKSIVALHRGCEASRRLAEIPGIGPIGATALVAEIGDWKTFSSGRSVAAWIGLVPKQHTTGGKDRLGSITKQGNRYLRWLLVVGAMAVIRYARKHGTQKRPWLGRLMERRPTKVAAVALANKIARMAWAIMVRGERYKEPKLSLAA

SEQ ID NO: 178635 - protein, 368 aa, unidentified
MIKRFHGIDRHKLSSTVSILNRKGVEEKLVTIKGNLKNYIKDLGPCDAVAIETVIGCFCWTNRIESQGAKCFIIDPYRFRIIKDSWKKTDKNDSRNIAKALWVYLITGEFGLPEVYKPSRDVIELRKLFSQYRNMNKYINMLKNNVQSILLDDGIVLSLKHKKNLLSNKTGEEFLKLLDVSDASRICIKASLDILWKAINQKEVLTREIIRAGEPFKDKVKILISIKGITPLSALAFLADVGDIKRFKPVRKMNSYLGLVPKVRESANIGKTYHINKASRNLTRTILTQSLIQAMDASTYLRHSYEETKIRRGSGRARIGLIRKLCGIMRRMLLNGELFRSIKMPLYEKKMKQFDKLLKEFEEERKSA

SEQ ID NO: 178636 - protein, 428 aa, unidentified
MGKNINSSKGMKLDLTEENKKLIKTDKQSELNKQGRKGKTAKPDRQTDVKLQQRLGVRSLLQKLEVAKNAPKEVAPDENIEYCIGIDLGDRKSYYCILDKNASIVADGSLATTVTEFELYFKEIPRSRIALEVGTHSPWISSLLEGIGHQVYVANPRKMGGGKKSRRRKNDKLDAEALARQAKSDPNLLYSIQHRGQKARNALVLLRARHAVVSARTKLICGARGLVKSAGQRLPRCSAESFHKIERTHVPEALRDMVEPLFEQIGSLTVQIKKYDAKAKGMCRKAYPETELLQQVNGVGEITSLAFVLTIDNPGRFTKSRNVGAYLGLVPRQYDSGDSRPQLRITKTGDRMMRQLLVQSAHYILSPFGKDSDLRRHGLKIAARGGKNGKKRAAVAVARKLAVLLYRLWVTAEVYEPLRNSAPQEKAA

SEQ ID NO: 178637 - protein, 381 aa, unidentified
MTRATRTAEYTGATTLCLYLAFELGSNEWKLGFTTEPGATPRVRMMPARDLARLTREIADARQWFGLKATTPVRSCYEAGRDGFWLHRYLTSLGIANVVVDSSSIEVNRRLRRAKSDALDARKLLGMLLRYHAGERAVWSVVRVPTVEAEDRRQLHRELRTLKQERIRVANRMNGLLANQGLWLPPGTDVGAAAKTVRLWDGSPVPAALRARLEREWEHAQFLRTRIRELERERQRAITHGGGEAIAKVRQLLRLRAVGPTGAWVYVNEFFGWRRFRNRKEVGAAAGLTPTPYQSGDGHREQGISKAGSRHIRAVAIEMAWCWLRYQPRSRLSGWYQARFGRGGTRARKVGIVALARKLLIELWRFLEFGVVPEGASLKTA

SEQ ID NO: 178638 - protein, 363 aa, unidentified
MARPRTRNNRTYAQRPAPRPANLDRGVVGGVDTHKDVHVAAVCDPLGRMLATAEFVADETGYVALWDWLRAFGDVAAVGIEGCSAWGAGLARFLIAAGVRVIEVDRPNRQVRRRRGKSDTIDAEEAARAVISGRATTVPKAQTGAVEAIRQLRIARRGAIRSRTRALNQLAALIDTAPDALRRELRDLSPTQRVRAAARLRPGPLHSLTAATKIALVSVAKRVEYLADEIAALDEHLTALITDTAPDLLAKRGVGVDTAGALLVAAGDNPDRLRHERSFAALCGASPVQASSGKRHRHRLNRGGDREANSALWRIVIVRLSSDPATRSYADRRSKEGLSKKEIIRCLKRYVAREVYRQLRAES

SEQ ID NO: 178639 - protein, 470 aa, unidentified
MPPPKDFCLAPGPPAPTPMFPPSPVLSDALQICHPHAAGIDIDEAEHWVAVPPGCDPQPVRRFGTFTVDLDAVADWLIDCGVTTVAMESTGVYWIPLFELLERRGFEVKLVDARHVKNVSGRKSDVLDCQWLQQLHTYGLLAGAFRPPDEVCVLRSYLRQREMLRQVASQHIQHMQKALQQMNLLLHNVVSDITGVTGMKIIKAILAGERDPRVLASNRDDRCKQSRATIAKSLVGNYRAEHLFALRQALDLYAVYQAKIADCDEAIIKQLEKKPDLSDEQPPNGDRYVQARDRVRGGIDVRELLFKKSGVDLFAIPGLAADHLLTLASEVGFDMSPWKTEKHFSSWLGVCPGTKRSGGKTLASKTKRNPNRAAQAFRMAAASLSRSRTALGAFYRRLKARRSGAQAVTATAHKLARIYYAMLTKGANYIELGQQAYEQRYKERRIAQLKIQAKSLGFQLVACTADESSF

SEQ ID NO: 178640 - protein, 345 aa, unidentified
MKNTTIGVDLAKEVIQVCIYTNQKVHSNKEMTHHEFLSWLFNTTPSTIIFEACGTSNYWKQKAIEAGHDARLISAKLVATVRQNQKTDKNDALAIVQAAQLPEIKFIKGKSEEQQQLQSVIRLRELAMKQKTALSNQLKALLLEFNIRVSNRNGGLKGTIELLLEDAENGFSCEFRQALDIAWKQYVHILESIRIYDDSLEASVKEHKDCQRLLKLEGVGPVNAVNLYIALGCADLGVFNKGKDASACIGLTPQQYSSGGKTSIGSIGKHVKNGLLRSQLITGSMSAISQILKREPRTKKEAWIQALVERKGKKCAAVALANKTVRTAFAMLTQGTEYKAVLLPA

SEQ ID NO: 178641 - protein, 413 aa, unidentified
MEMEVIVERCAFLDVHRDTVMACARIPDGHGGRREDVGEFGSTTSQLLALADWLTERRVSLVGMEATGVYWKPVHWVLEAHVAEVWVINARHMRNLPGRKTDVADAIWGASLLEHGLVRPSFIPPPPFRALRDLTRYRKSVIEERARESQRLHKVLEDAGVKLSSVASKVLSKSGREMIEALIAGERDSEVLAEMAKGRLRSKIPALQDAMAGRFNEHHALLCRAMLARVDQADSTIEVLTERIEELLDPYEAAVSLLVTIPGVSYRTAQVILAEIGADMSRFPTAGHLASWAGMCPGNNESAGKHRSGRTRHGSKWLRKALIEAGQAAGRTKDTYLAAQYAQIRTRRGPQRAAVAAGHSILVIAWHLLSTGEPYQDLGGDYFDKRRNSAARQRRLVAALEAMGHQVTLEPAA

SEQ ID NO: 178642 - protein, 319 aa, unidentified
MREKVRFLGLDVHAETIAVAIAEPDGEVRSLGTIANRAESIRKLVKKLGPVPQLRACYEAGPTGYVLYWQLAALGVKCEVIAPTLVPVKAGDRVKTDRRDAEKLARSYRSDDLTAVWVPDESSEALRDLVRAREAAKQDQLRARHRLSKFLLRSGQRPAPGVKAWTQIYMAWIRQIRFGQMAQESTRLDYLHEVEHMGERVARLEQAIAEAAKLAPPELQEVIKGLQALRGIAHISAVTIAAELGEFSRFFGARQLMGYSGIVPSEESSGKRTQRGSITKTGNAHLRRIAVEAAWSYRLRPCVGPALRKRQEGVAEEAA

SEQ ID NO: 178643 - protein, 370 aa, unidentified
MKKNSINSQSPKRRVRRQSPITIGIDLGDKNSRFAVLNEGGELYAEGGVATNRKALLEKFAGVPPCRIAMEVGTHSPWVSRLLQSLGHEVIVANARQLRVITHSTRKDDRADAHMLARLARIDPQLLRPVRHRSEEAQGHLLLIRARAAMVDARTSLINAARGLAKPVGERLPRCDADRLGAAHAGSLPPAVQQALTPLLEQIEALTRRIKEAEAQLEQIARSEYPETELLRQVSGVGPLIALTFVLTVEMPERFAKSRDVGCYVGLRPKRRQSGEREPELRITKEGDVYLRRLLVQGAHCILSRRAPDTDLKRWGLKLAGRGGRKAKKRAVVAVARKLAVLLHRLWVTGEVYEALRNSRAAARNNAAAA

SEQ ID NO: 178644 - protein, 350 aa, unidentified
MSTVTIAVDLAKHVFELAVGGRAGAIRERKRLSRAQFERFWSTRAPCRVVMEACASSHFWARFLIARGFEVVLLPPHYVKPYRRRNKTDRADCEALLEADRCAGIHPVSVKSEDQQALVALHRVRSQWQQSRTARINAMRGLLHEFGVGAAAGSQRFMNDLPQLLTSKQHVLPARVRRTITVLWEEVRDLEQRIETIETELESVALEQPVIQALLRIPGIGLLTATALFATVADIHAFRSGRQLACWLGLTPREFSSGGRRRLGRISKQGDPYVRMLLIHGARAALNAASRLAAADKPLTQLQAWSLARARESHRNKATVALANKLVRIAWAVWYHERDFNGNHTVRIAV

SEQ ID NO: 178645 - protein, 453 aa, unidentified
MTKRKTGGHPDLNVVNPNAAAIDIGSTMHMAAVNPDAAAMPVRAFGTFTQDLHDLADWFRSCGVTSVAMESTGVYWIPAFEILEAHGFEVILVNARYAKNVPGRKTDVSDAGWLRQLHSYGLLRGSFRPEAEIATLRAYMRQRERLTDYAAAHIQHMQKALMEMNLQLHHVVSDITGATGMRIIRAIVEGERDPEVLAAFRDVRCKSSMDTIKAALVGNDREEHVFALTQSLELYDFYKAQIETCDRRLEAAVGALTVRENADLAPLPKARIKGKQHNAPSFDVRAALYGVLGTDLTQIHGLGPSLALKLVAECGTDLRAWKSAKHFTSWLCLAPGNKIFGGKLLSSRTRRSSSRAAALLRLAAVTIGRSDTALGAFYRRLSARIGKQKAVTATARKIAVLFCNAIRHGMTYQDQGAAAYDERHRQRVLSNLQRRAKTMGYALAPIPETAAVS

SEQ ID NO: 178646 - protein, 310 aa, unidentified
MDRIIVGIDVSKDRLDVVVRPSGETFVVGRNAVGLEKLVARLRELSPHIVALEATGGFETVVAAALGSAGLPVAVVNPAQVRAFAKALGQRAKTDPIDAGVVAHFAEATNLEPRPLPDEQTRLLADLVGRRRQIVAMIGAERQREQRLTAPRISKSIARLIKALEKELASLDADIDDAVKGSPAWRAKEELLTSVPSVGPVIARTLVAELPELGQLGHKQITALVGLAPFTRQSGKWRGKSFIGGGRTAVRAALFMGAMVAKKHNPILKAFFDRLVAAGKPKMVALIAVARKLLTILNAIVRDNRPWQTA

SEQ ID NO: 178647 - protein, 412 aa, unidentified
MDVIYRRCCGFDVHKDSVSACVLLAEPTGRRRKELRRFGTMTCDLLALLDWLLAMRVTQVAMESTGVYWKPVWNILEGHVEVLLANAQHIKVVPGRKTDTQDCEWIADLLQHGLLRGSFVPPEPIRDLRDLTRYRAILSQETSDVANRIQKVLEDANVKLGSVASDVLGVSGRAMLEAIVKGEQDSTRLAEMARHRLRKKIPELRVALEGRIRDHHRFLLKQLLDHLKFLEGKISEVERQIERCMAPFEKAVTLWITIPGVDVVTAWSLVAETGANMEQFPSAQHLASWAGLCPGNNESAGKRKSGKTRKGSLWLRRALSQAAWAAAHTKSTYLAARYRRLAARRGAKRAIIAMAHNILLIAYYLLRTDRPYQDLGADYFDRINAEGLKRYLVKRLERMGHQVVLMPTAATA

SEQ ID NO: 178648 - protein, 287 aa, unidentified
MKRKVYVGMDVHKETIQIASLTSKTKDLVKEQQIKHEEVQIKKFIQKLKLEKSEIHCCYEAGVTGYPLYRYLKSLGVNCTIVAPGKIPRQSSDKIKTDKRDAIKLARLLRSGELESIHVPSEEDEAVRDYLRSRDSLRLDLGRNRQRLMKFLLRKGIKYSTTKYWTTSHYKWLNNLHFENEILQTTFNDYYSRVRVQEENLKAMDKKIQEIAESEPYREKVGILRCFRGVDYLTAMFLLSEVNDFKRFKTAGSFMSFLGLVPGEYSSGSKRNKRALQKREVRDFEGS

SEQ ID NO: 178649 - protein, 413 aa, unidentified
MTPHLQQRGFTCILKFEQNKGNRDYRIQKEITHMKRILKIGMDVHTTNYTLCAMEPVIGEEDRVFATIKVTPDYKNILMFIENLKQKLGLNYEYDIQCGYEAGCLGYSLYNQLKAVGVKCVILAPTTMFAPQGVRIKTDTRDAHMIAHCLSYGTYRAVYIPTEEDDSVKEYLRMRNDHKLALKKIKQQINAFCTRHGFCYTGTKWTQVHLKWLKNLEINNTLYREVMNEYMISYEEQALKIERFDKRIEEIASQTKYQEKVKRLGCFLGIKTHTALSLIVETGDFERFAKGNQYAAYLGLTPGEYSSSTNVNHLGITKAGNSHLRQLLIEAAGGICKGAVGHKSKALQARQNGNPADVIAYADKANIRLRSRYYKFIRREKKRNVAVAAIARELACFVWGMMTNKIEIRTATA

SEQ ID NO: 178650 - protein, 395 aa, unidentified
MKVNELQVAVDVGARTHRVAVGDGCRRLLEEFDLEHTAAGFAGFFTRIERLRGRGSAPVAVAMEGFNGWARPLDRQVLEHGWRLYNVNNLKLARYKEIFPAPAKTDAIDARRILELFRLRGDLAVARGVLQEIVATTEEAERLKRLTRRRRQLVNEKVRVLNRMHSDLQAVCPGLLAITAEADNLWFLSLLGAREDIRRLAGLRPTSLLALEGVGRAYCVKIQAWQREALFSHEAEWAGPMIVADARRVLALKREIAALDQLIEPLIDGCETARRLRTIPGFGPTCSGELAGEIGAIERFATEASLALYLGMAVLDHSSGTHTGTKRPRQVNARAKAAMMTAVARHMEQVPSSRAYYDKKRAQGKAHNQAIRALGRQLVRVIWSMLKHQRDYEVR

SEQ ID NO: 178651 - protein, 394 aa, unidentified
MKLVGIDVGKNSHHFCVMDKETGEFNVAPSSFSNNKEGFDFLINSLKPYSKKSILIGMEDTGHYHVALLKFLLNNGYTVALINPKTTDLTRKMEGGITKNDKLDTITICDVLDTPERKKQYRITKVDRFDLYEQRQLTRHHHNLKEELNVYCNRLQKSIDLVFPEFNTLFSSKYGIVYMNLLKTFGSAEAIASTDIRTIRKFFEIKGKGNRISLTPEKLKECAKNSIGISSEVETIQIKHLVSQITLIKEQIAEIDKKIEEFSITNNSPILSIPGISHFSGTSILAELGDIGNYSKPSQIIKFAGVAPYHYESSQYNAQHTAITKKGSKYLRKTLYQIILTVINNNPVFKKYYLLKISQGKGHRCAQGHCIRKLLRIIYHLLETGQSFDPALLR

SEQ ID NO: 178652 - protein, 353 aa, unidentified
MKQSIITIGMDLGDKVSCYCLVNPAGEIVKEGKLATTRQAMAQTFGPMKRSRIAIEVGGHSPWVSRYLRQLGHEPIVANARQVKLISQSSRKDDKLDARMLARLARVDPQLLRPIRHRSEKAQGDLMQVRVRAALVDTRTGLVNTARGLAKATGERLPSCDADQMGVGKMQGLPAELMEALRPLLETVESLTKQIKECDQKLEQLAGRDYPETELLRQVSGVGSLISLTFVLTVEDPNRFRRSRDVGCYVGLRPRRSESGQSRPQLGISKEGDEYLRKLLVQGAHCILSHKSPDTDLKRWGLKLAGKGNKNAKKRALVAVARKLAILLHHLWVNGEVYEPLRNSRLLEQKAVA

SEQ ID NO: 178653 - protein, 445 aa, unidentified
MSEPMPSAKSEPEWAAFAAIDWADQKHFWRLVPAGSGQPEKGELENTPEAVEAWAAALQQRFGGRPIAVCLEQARGTLVYMLSKYAHLVLFPVHPTVAARYRETFCTSGAKDDPGDTASLLDLLMRHRERLRQLQPDTVETRLMQFLVEERRRTVNEKTRQSNRLTDCLKLYFPQILRWFDAVDTPLVGDLLERWPSLVELQRAHPGTLRKFLHEHNCRSAERNQERIDAIYQAVPATNDAAVLEACALTARGLVALLRPLRDHIAELDRRIAELVATHPEGVLFASLPGAGPVLVPRLIVAFGTRCERYNSAYEMQCYSGIAPVKEASGKTSWVHFRRACPKFLRQTFHEFALHSIGQSEWAKAYYQHLREDKNKSHQASVRSLAYKWIRIIFRCWKDGKPYDEEVYLRSLRRRGSKLGAALAPTTGIAWQTVAGFQKLSENNT

SEQ ID NO: 178654 - protein, 340 aa, unidentified
MTEVTTIGLDLAKHVFQVHGADGEGRPVLRKKLRRSKLMPFFADLPPCLIGMEACASAHHWARELQALGHEVRLIPPQYVRPFVKTNKNDAADAEAICEAVVRPTMRFAAAKSAEQQSVLMLHRARELLVRQRTMLINALRGHCAEFGIVVAQGAPKVEELIAIIEDADDTRLPSVAREALGALVAQLRSAQGRIKALEARLTAWHRSSAASRRLAAIPGVGVITATALVATIGDASQFRSGRQLSAWLGLVPRQHSSGGKQRLGRISKHGDGYIRRLLVHGARTVLRWRRAKPGTGSGWTDRLLARRPTNVVLVAMANKTARVAWALLRHERIYQPVPA

SEQ ID NO: 178655 - protein, 354 aa, unidentified
MNQIIRIGMDTSKYIFQLHGVDASEQVVLRKRLGRSGMLSFFTKLAPTVIVIEACGAAHCLARELGKLGHTVKLIAPQLVKPYVERNKNDGRDAEGLCEASSRPRMRYVPVKTAEQQAALMLLGVRDQLVMRRTQLSNTIRGHAAEFGLIEAKGLDKLASLLAAIEQGDSVPVLARDLFAMLARQYAQVQVELKAIEARLLAWHRGNALSRRLAEIPGVGPVTAAALVMKAPDPHAFRSGRMFAAWLGLTPKDHSTAGKTRLGKITRAGDERLRQFLVVGATSVVKQATGKHHRGPRWLLELVKRKTPKLAAVALANKTARIAWKLMTTGESYDSARIDAQVDAQGDAQVAAAA

SEQ ID NO: 178656 - protein, 387 aa, unidentified
MYFVGIDISKFKHDCAVIDEIGDTIQSSWSFGNDRGGFSLLKERLDSLPGDKKIGLEATGHYGQNLKLFLEANGFAFMEFNPLLVSRFVRGKSLRNTKTDPIDAHNVAQYLMTVEYKPYPPSFYHLDQLKSLTRFRSSLVRQRSRQLVELTNVLDKMFPEFKPFFKGKFSATALYILDHFRSPERIASMNTRSYEPLRKISRGHFSLNDFVKLKALAKNTVGCTTDFLLQEMSILLELYTQLDAKVEELDDQIEECVRGIDPPMLSIPGVGASSTAVILSEYGDFSKFKNSSKMLAFAGLEPGYLQSGQFESTGHMVKHGSPHLRCALLNCCLPLISNEPVFAEYYAKKRAEGKTHQVAMTHVAKKLLRVIYTLQTKNIPYDPALIR

SEQ ID NO: 178657 - protein, 400 aa, unidentified
MRTVFGIDVSKASSEVAIVINGEKIHGYTMPNDAIGFTRLLDDLKTVQKPEIIFEARGVYSRRLQAFLEENGYAYTQLNPLEAKKQLDSLRVRKTDKIDAETLAISQFVLNRKPTYIQEEVYQELRDLSRFYQNLTEDIVRTKNRLHKVLQVTFPEMENILSTPTREQYWNLVMTFPYKDFVLELSKDELLEGIRQSTSKRISDKRVAYLAQKLAALANQSYCAVKKNSPILEEVRYYAKELLRLSEQRQAVLEQMVELAQPLPEYEILLSIPGIAETTATSMIGELGDIRRFQSANQINAFIGIDLRHYESGNFLAKEHITKRGNPYARKILFKCIHNIAAASHTNHCHIEDFYEKRKRQSQTTSTKPHTIASIHRLIRTMYYLITHNKLYDYTSTQNR

SEQ ID NO: 178658 - protein, 334 aa, unidentified
MSLKLLAIDLGKRSFHIDGIDSDGVVISHKTNRSKLIETIDELAPETIAMEACASAHYWGRRFLAMGHRVLLINPRFVKPFVKGSKNDAADAEGIYEAALRPTMRFVPVKSTEQQDLQSLHRARDRIVCVRTALINHMRGLLAEYGVILPQGAWRFLTQARDAVAGAELSDLARGLFMDMLDELDSLDLRLDKLDRQLLAICRTNEACRRLSKLPGVGPVVATALVATVDDGRHFRSGRELAAWIDLVPRQYTTGGKPRLGGIGRRANYFLRRQMIHGARAVMYRLPKHDDRRSQWLKGLAARRGFNRTVVALANKTARTAWALLTRKEDYVAA

SEQ ID NO: 178659 - protein, 310 aa, unidentified
MGIDVGKYHVDIALSDESEVSRFKNDDSGIEEILRLLDARPVALVVMEASGGYERQLLASLLGAGIPAVAVNPRQVRDFAKALGMLEKTDAIDARVLSRFAQSVRPAVRPRPTQELAEVQDWLTRRRQLVEMMVAEKNRSQQARGGVLKSIRSHIDWLKKRIRDSEKELGDMLKNAPEWNAEVEVLDEVKGIGRVMALMLLGAVPELGSLNRKQIAKLVGVAPLCRDSGTLRGQRTCWGGRADVRACLYMAALAATQFNATIKAFYRRLLAAGKPKKVALVACMRKLLTILNARIRDYRAALPVSRTALS

SEQ ID NO: 178660 - protein, 348 aa, unidentified
MDVIIERACGMDVHKDNITACIITPEGKEIKTFSTKTLFLIQMIDWIKERRCTHVAMESTSVYWKPIVNLLESEDIEFLVVNAQHIKSVPGRKTDVKDAEWIAKLLRHGLLKASYIPDRNQRELRELVRYRRSIIEERARQHNRIQKVLEGANIKLGSVVSDIMGVSARDMLNAIADGEDNPEILANFARRTMKKKKDELRLAPKGYISPHQRLMIKTILKHIDFLSDQIEMLDQEVADRVNKYQDHIERLDSIPGIATRMAEQMLAELGTDIKNQFPSASQMCSWAGLVPGSNESAGKRKKSKTKNGNKYLKSALIEAAHSVRGSKNYLGALYRRTAAGKVRNVQES

SEQ ID NO: 178661 - protein, 275 aa, unidentified
MQRVIGMDIHRTFAEVVFWEAGRLRPAGRIDMTRSGLEGFGRSLSKEDEVVVEATGNAMAVVRVLSPYVARVIVANPLQVKAIAHAHVKTDKIDAGVLASLRAAGFLPEVWLPDAETELRRRLVARRNQVVRHRTQIKNGVHSILQAHLIPPCPHADLFGRLGRNWLGRQELPVDEWAAIDRHLRELDRLGEDLAVLDREISERMIEDPSVKRLLTITGVNINVAAGLVAAIGDVRRFSSPQKLVSYVGLNPRVRQSGLGLVRIPAIVISRSRRW

SEQ ID NO: 178662 - protein, 463 aa, unidentified
MPGRDDAATSQNNNRRQLQGLPVLRRNAAGIDLGSERHWVCAATLDGSGREIASFGATTPELLRLAEWLKARQVESVAMESTGVYWIAPHEVLEAQGFEVLLVDTRQLARVPGRDKKTDPTDCECIQRLHSCGLLRGSFRPEEVVCMLRTLVRDKANLVGERGDWLRRMQKSLDQMNVRVHRAVSDIDGATGMAILRAIAEGERDAQKLAQLRDPRCSKTEQEISEQLSGHWREDHLFSLQQALKMYDAVQERIAAYEKEILRKLGDMEREEHHEPTAPPLPNANKAKKIKKRGQEAKRQALYRISGVDITQIDAIGVETVEVVLSEYGCDLSRFPTEKQFVSHVTLAPHVPKSGGKPTKKKKRNSASTRVAAALRMAALSLRHSQTALGAYYRKLAQRLGGDVAVFATARKLATLIYRLLRWGQPYVDQGAAAYENRYRQQRIRSLMAKAKELGYQLAPASA

SEQ ID NO: 178663 - protein, 531 aa, unidentified
MATTNSHAAPTHAAARGAVENAASDGAGGQLVGNAGWPNGGTGRAHVGVAHDLPTVALENAARFPRWDEPAMVPSQTPRTPSVTGTADSRSIAARLEAVPAPVGGLGGKGTSLPPVAETTDTPACSAAQRVGAQGRLVMRSVGLDLGVRHIAICEVVRGEVVARTTVHSLKELEGRLGPGTPRAQVAFEACREGWHVHDMMEQWGHEAHMLDTTRVRQIGVGHHGRKNDAIDAEAIAKALDAGRIPIAHLLSPARRALRAKLSVRGELVDMRARQVTLLRGLARAKGVRLPSSSTAIFLRVLDQAELDDETRSLMAPLVATLTTAEEQLGNVDEELAQIAKADPAIQLCATVPGIAVIVAATFVSVIDEAKRFRNAHAVSAYLGLVPGETTTGGKQRLGGITKQGNSHARRMLVEAAWQILRTEKPDEPLYRWASHIAETRGKRIAIVALARKMSGILWAIWRDGTVYDAEFAARKSAAGLTAAAENTAHRVQALAHVARKIHARERTAKRAKALVLARTPRTHASKGVAM

SEQ ID NO: 178664 - protein, 484 aa, unidentified
MCLIRPPWPGAATRDENRVARPSSAFLGAREPVDKTDAGAFPAPRTVAVSTRFSVVDSVGPAGRHPRDGEVSTVELLVARCAGLDVAKDEVVACVRVPDGRGGRDQEVRTFPTFTSGLEALAGWLAGEGVTQVVMEATGQYWKPIWYVLEEGGFELLLVNARHVKILPGRKTDVCDAAWLAELLEHGLLRGSFVPPAPIRELRDLTRYRKRLIQAHAAEGQRVQKTLEDAGIKLDSVAADVLGVSGRAMLAALINGERDPQVLAELARGRLRAKLPQLRQALRGRFRGHHALLIRLALGHLEQLEGAIATLDHRVDEVIAPFAWARDRLDTVTGVGKRAAETIIAEIGTDMAVFPTAGHLASWAGRCPGNNRTGGKRRSGKPTKGNRWLGEVLIECAWAAARSRDTYLSAQYWRLARRIGKKKAALAVGHSILVIAWHLLTNDCDYADLGGDYFVRRDTDRQRQRAVAQLQALGYRVVLEPVAA

SEQ ID NO: 178665 - protein, 283 aa, unidentified
MRYIGIDVSKATFVVAYSSDKGGEIRTFNNTTTGIKQFIGALPKDSSIHCVMEATGNYSAMLLYLLNVAGIAVSMENPLKIKNFARAMLSTVKTDKIDARLIALYGEKMNPQPFKIQGEAILRLRQKRTVIRQLTKQITAMSNLRGSLACLPVPDKGATHTVDETIEFLEKRRDRLQSELTDLVEVEFSRQLALLTTIKGIGITLATALIITTGGFTYFQNAKQVSRYLGICPTYEQSGTSVNIRGHINRNGDAYTRGLLYVAAWTASRFNTCLLYTSPSPRD

SEQ ID NO: 178666 - protein, 311 aa, unidentified
MIETIGIDISKGALDAFWMSGKKHRQFTNNKLGLRSLICWVEQAGIPLIVFEATGIYHRLLETSLAARNIPFAQVNPRQARRFAEGVGILAKTDRVDASMLAKMGALLELEPDKPKSEILHDLKEMLTGKRALIKDRTAAEARLSTATQQVLKQQLSRRLRQISEDLEQIDDALETMIAADPNLGEKVEILTSIPGIGKATAFALIIEMPELGTLNGKQAAALAGLAPMSRQSGKWKGHERIQGGRASLRKAIYMPAIVATRFNPDMKAKYEQLISNGKCKKQAFTAIMRKLVVLANALLRDGRKWNENAA

SEQ ID NO: 178667 - protein, 341 aa, unidentified
MGQASTIGLDIAKWVFQAHGADATGRVVFRKRLVRAKVLEFFAGQPPCLVALEACGGAHYWARELGKLGHTVRLIPPAYVKPFVKRQKNDVADAEAICEAAQRPGMRFVPVKDEAQQANAVVFRARDLLVRQRTQCINALRGHLAEYGHVVPQGPAHVDSLVALVEDPKSSVPESARGILQVLIRTLNALEEQLKELDGEIARRAKADPVARRLMTIPGIGPIAATAITALVPAPEGFRAGRDFAAWLGLTPLQKSTGGKHKLGAISKMGERTIRRLLILGASAVVRWASRRGAAAGSWLARMLARKPRMLVTTALANKMARIVWALLVKGGTYRAPAVAA

SEQ ID NO: 178668 - protein, 358 aa, unidentified
MEHVGIDLGAVKSHVVRMNEKGDVVERWALRTRELESWLSRIKPSRVVMEACTQSTAVARMARRLGHEAVIVSGTLVRALGVGARGIKTDDRDAEVLARASVRNETLPSVHLRSEPSAEKRGVIQARNRLVNCRRQCSTSIKSHLRSQLLSIRGRADRKAFASNVRELLQTTPDGLPSYIETLLKTFEFLTEQIDALEVELSELAKNTEPCTKLMELPGVGPLVSLSFVTTIDDPSRFPNADSLASFLTLVPGESTTGGNIHRTGTIHAGPKWLKALLVQAAWVAWRSVPEEPMVQWAKSIGDKRGTRIAIVALARKLATVMWAMWRRHESYRPERAASTRPPSLAPTGSKMMATARP

SEQ ID NO: 178669 - protein, 441 aa, unidentified
MGKQTMKNPLELPIINPHAAGIDVGSEKFFASIAGQEPKVYLTVTSQMHQLCEDFKAAGVRTVVMEATGVYWINLYGALEEAGMEAVVVNGAHCRNIPGRKTDMKDCQWLAVLHAHGLLKGGFVPVPEIRRLRDYMRIRADLVSMASQHVQHMQKALDRLNVKIHVVINDITGVSGMRMLKAILAGERDTERLVALCDQQILKTKHVAVLEALRGIWRKEHLFALELALQSYEQYQRQIADCDRHIAEVVQAISADKSTPDLGKPKELRHNAVDIEGLQKQMAQIFGKDLTKLPCLNESTVTMLLAELGQDMSRWKDWRHFGSWLSLAPCYAQSGRGRKRQKKRLTRAAQILCRAVQSMATGKHTWLASFYRRIRAKRGAKVAIKATAYKLAKLVYLVLTKGWEYVEQGMAKYEQRLHDVQVKVFHKLAKKLNYVVLPKAQ

SEQ ID NO: 178670 - protein, 387 aa, unidentified
MTQAILQEKNVSTKGAALYMALELSNSNWKVGFGAGGKRGPRIRSVEAGDRADLMKEITTSKEKFGLPADAKVKSCYEAGRDGFWLHRYLESQGIENEVVDSSSIKVDRRARRAKNDTLDVGELLSMLMRRHDGGKNEYRVVRVPSVEQEDERRALRERERLMKEHTQHINSIRSMLVTQGVKLDKWDPHLDEDLDEIALWDESRLPENLTKQLRREWERLELVKKQAKEIDREIKDKVERQETPVARVMGILMMLVGIGPVSAGVLASEFFAWRKFTNPRQVGALAGMTGTPYSSGDMSREQGISKAGNWRVRRIMIELAWIWLRYQPDSHLSKWFAQRFANKGKRQRRIGIVALGRKLLVALWRYVDLGVIPEGAVMRGEDIRAA

SEQ ID NO: 178671 - protein, 366 aa, unidentified
MDPIYIGVDFHARQQTICYLKTETGELVISELLHQDKEQVRACYQQFQGHVIIGLEASGYSPWFETMLEQLGCEVWLGDATEIRRRARWRQKSDRRDAELIWDLMVHNEFPRLHQPLPESREVLRMLRYRQKLIKFRTMSKNSLQAIALQAGLVKGRRLFTSAGQQEVRTAEMSPVLQWQRDHWFELLQPLNQQLLETMVWFKQQSKDDVRIKRLRTHPGIGLLTSLCLLHTLQPVSRFRNQRKVVAYAGFDPMVRSSAERAIYLGISKAGSRMLRYLLVEAVHTAIRYDEDLKHFYKRVAERRGRPKAKVAAARKLLIRAYIMLRDEIDYAEFRRRAVAARLARRGQGPTNVPEVLIGQSASPGA

SEQ ID NO: 178672 - protein, 336 aa, unidentified
MSHYCGIDLHSNNHVVVVIDEEDKRMYEKRLGNDLSLTLKALSPYRESLHGIAVESTFNWYWLVDGLQEHGYDLQLVNTAAVKQYDGLKYSDDHHDAFHLAHLMRLGILPTGYIYPKEQRAIRDLLRRRLSLVRTASAQLISVQSQLWRSTGIRIQSGELRKLEFAPPLVDDYTLQAVQAGLAVYQAIQREIDALEQTAHQAVKLTEAFKILQTITGIGKILGLTIMLETGTIDRFAGAGNFASYCRCVDSKRTSNGKKKGEGNAKAGNKYLSWAFSEAAHFAVRFEPLAQRFYERKKVKTNGIIAIRAVARKLARARWMMLKHQVPYDARRMFPG

SEQ ID NO: 178673 - protein, 320 aa, unidentified
MEEVTDEPLYRDRVCGIDIGKAGMVATIRVPSDKDPSRRAAETRSFGTTRREVLALADWLRSWQVPAVVMEATSDYRKGPFCRLEAGGFECVLADARQVKNLPGRPKRDPSDSRWLAACFERGAVRPCFVATPEFRIIRLHTRYRRDLTEERTREKQRTEKLLESAGIKLSSVISRLHLVTGRDIMDHLIAGERNPKVLAQLARTAARRKIAELEEALEGAEFFTAEHAALLAMMLARIDRLTAGIDELTTVIERLLAPYEEQLQQAESMPGWQRRAAQDALAETGVDMTRFPTGAHLASWAGRTPVDHQSGTRKGKSEV

SEQ ID NO: 178674 - protein, 330 aa, unidentified
MKEYKQFFGVDISKKTIDVTMLQNNQNVHKQFSNDESGMQQLLSWVQELKVKTDETLFCMEATGLYCFTLTQFLVNNAIDTWIEHAAQIKKATALARGKNDKVDSLRIATYASKNLERLRLWKPMNSALEKIKHLATLRDRIVETQKRLIVPIKEFEDVGNVEMAKILTKTIKKSIAALDADLRNIEKQILKILNEDVVLARKYTNATSVVGIGFVTAINLMVHTNGFTQMTDVRKLACYCGVAPFEYTSGSSIRGKTKVHFMANKKLKCNLHMASLTAIKFDIDIKKYYERKCADGKNKMSVLNAVRNKLLARVLSCVNNDRVYVNKVA

SEQ ID NO: 178675 - protein, 323 aa, unidentified
MAKRITVCAGIDTGKHKLDVAIDGHSEQLQVENTPQGHQALVDWLRQHRVRRVGIEASGGYEQPVVAELRRRRFVVVVFQPAQVRAYAKFHLQRAKNDKIDAALIAACTAAVRTIHAAPDPRLSPFAEQLTLIDQIGEDIARLKNRIESCRNPRIKALWKQEIRRLTTCKRAELKALVAAIRKHPDLAKRLDLINSVDGIGLPTAVAVLVRMPEIGQITREQAAALAGLAPYDDDSGEQTGVRHIAGGRERLRRALYGAALPASFRWNQQIICLYQRLIAKGKQHKRALIACARKLLVFANTVVARGTPWQNIAPPATAQAAT

SEQ ID NO: 178676 - protein, 404 aa, unidentified
MEVLYPNCCGLDVHKKSIVACAITPEGKEIQKFGTMTSDILSLQKWLKSKGCTCVAMESTGSYWKPIYNILEQEDIKIMVVNAQHIKTVPGRKTDVLDSEWIADLLRHGLLKGSFIPDRERRELRELVRYRTSITQERTREVNRLHKVLEGANIKLTSVVSDVTGVSSLSMIESIINGVEDPKVLAQLAKGRMRNSIDELEQALFGLVGPHQRMMLSIQLRHIDFLDEEIAKLDKEIEERMRPFEQELALLDTIPGVGRKIAEQIIAEIGTDMDQFPTAAHLASWVGICPGNNKSADKQKSGKSRKGNKSLKTALAEAAHGASKTKTYLSSQYHRIAARRGINRATVAVGHSILVIAYNILKRKQPYEDLGVNYFDNRKKDSIVKNAIKKLESLGYKVNLESVA

SEQ ID NO: 178677 - protein, 350 aa, unidentified
MKQRKNAESEPVRIKKFARFIAISGLPACLNPDPDSRLTSIVKVVGLSSNPFFLKSVKDKSMENFYFIGVDVSKKKLDFCVMFEGKVVHEEETSNNQGAIMSLLHHLEEDYGIASGQMLVCAEHTGQYTFPLACACKAVECKLWLENAAEIKYSSGVQRGKNDRVDAKRIAIYASRFQDKVQYYERPTEDIERLKQLESERTLYVTDLAKYKGQMKDQKEYMPKSLYERKMKRLQALMDDLEEAIQSITDEMDEVIASCPVLFRQRELLMSIDGVGRVVATNMIIATEAFTRFGDPRKFNCYAGVAPFSYSSGSSLHSKARVSHRADKVMKRLLHLAAVAVTHQIGRAHV

SEQ ID NO: 178678 - protein, 366 aa, unidentified
MKKISTVQVFGNEVFKEQKLTIGVDLGDRWSFYCVLDEAGKIILEQKVSTTPEAMKQTFERIPRSLIALETGTHSPWLSRLLKELGHEVLVAHAQKVELISKSNRKDDRHDARTLARLARIDPELLGPVRHRSAKAQIHLTVIRARAELVSARTALVNGARGLAKSYGERLPKCGTEQVSRELAAKLSAELREVLEPLLKEIESLNERIKEYDARMEKIAKESYPQVALLKQVKGVGTQIALTYVLTLDDPHRFAKSREVGCFLGLKPGRRDSGESQPQMHISKEGDRYLRTMLVQGAHYILGPFGEDSDLRRWGLRLAERGGKNAKKRAVVAVARKLAVLLHRLWVSGEVYEPLRNSHKAMRAAA

SEQ ID NO: 178679 - protein, 323 aa, unidentified
MSMNPHERQFNHIIAFEVSKASLVVHTLPADRQQTIANTPGQVRRLLKAEQRINSKLGLGPLLVVCEATGGYERYVLAEAAALGLATHRAHGSRTRLFARFNGRHAKTDAIDARLIARYGLTPGLPLYDPPSPEQASLRLLRQRRDELQQMLRMEANRTEHASTKRLKSSIQRHLGWLKTELEAIETEIQALIESAPELERKAKLMRSLKGVGPQTAAAILAYLPEIGSIPKATAAAIAGLAPIAQDSGQHNGKRHIAGGRANLRSSLYMAALVARNHNPTIRTFAMTLKARGKPNKVVLTAVMRKIIVILNAIVASGQPART

SEQ ID NO: 178680 - protein, 350 aa, unidentified
MDIVGGFDVHRKQITFDYVEMDSGEVHRGKIRPADRESLREWLNEFTERFSGKRIAIAVEAATGWRYVIEELQRVGVEPRLAEPAETKALRGRKKRAKTDRLDAGHLRDLMVIDRLPESWIPPDHIQEIRTLMRLRHSLIEERTTHKQRIHAQLFHNGYPRQSNLDSIEGRAHLEDMELPGAARKVVDLSLAMIEHINEELAPIEKELRAYARSQAGCKALMMTHYGVGELTSVALLSELGDTRRFSSSKKAVRYAGMDITVHSSDDKRAAGKLSRQGPPVLRWAAFEAAKRAWRKNSPDHGYYLRNKERIGANRAALSIARKLIRRAHHTLRELGEEAISEPELTGSGG

SEQ ID NO: 178681 - protein, 408 aa, unidentified
MKTLYRRVAGIDVHRVKHVATVLIEQADGSTEAHTREFGGFKRDLRWLVAWLQRYAVELVVMESTSIYWKSLYAHLERAGIEAWVVNAHHIKHVPGRKTDLGDARWLAELGRFGLVRGSFIPPQDLRELRLIARYRHKLSGTLAGEKNRLHKVLDDAGIKLGAVVSDISGVSAQAMLAGLLGGEEPNALIELAKGRLKAKREELQLALDGELSARHLFLLQSLQGHIRQLQAQLDELDGYLIAAMAPYRWAWELLQTIPGIDAIAAALILVEIGEDMHRFGSADRLASWAALCPGNHESAGKRQSGKTRKGNSLVRYLLCEAANAARRTKTVFASKYQGLVIRRGHKKAIVALAHKLIRTIYVILSRREPYRDSGTDYQAAAVSKNAPRWIRALKQFGYWPTQTPVTA

SEQ ID NO: 178682 - protein, 340 aa, unidentified
MGEVTTIGLDLAKHVFQVHGVDAEGATVLRKQLRRAQVLAFFSRLPLCLVGLEACATAHYWARELRALGHEVRLMPAQYVKAYVKRNKHDAADAEAICEAVQRPTMRFVPVKTADQQAAVLLHRGRERLVRQRTGLVNALRGHLAEFGVIAPQGLRNVGKLIAIVRDEGDARLPELARQVLQVLAAQIEQLEAAVAAIEKQLMAWHKSNPVSQRLASVPGIGPIIATAIAATVVEPSGFRSGREFAAWLGLVPRQNSTGGKHRLGGISKRGNQYLRRLLINGASANLLRSKATNADPWVIGLRQRRPSLVVAVALANKTARIAWAVMHRHENYQRVAAAA

SEQ ID NO: 178683 - protein, 424 aa, unidentified
MKRTQNEKILQIKNETLVVGIDIGKETHYARAFDFRGIELSKLLRFSNTNQGYEALENWMQEIMKEKGKTEATVGFEPTGHYWFTLGDHLQRKGHRLAIVNPFHVKCTRELDDNSQTKNDKKDPKTIAMLVKDGRFREVYIPEEVYQELREAVSERERLVEQMISLSNQVIRWLDIRFPEFSGVFKKWSGLAALLTLKNFPTPAKVVETGVSGIVSTWRKGMKKPSRKKAEKLFKLASESIGRTAGSEAAEAALQNLLKQYEMVMQQIQEIEKLMQELLLKVPNASKLVDIKGIGMVTAAVIVSEIGNISRFKDPRQIQKMAGLSLRENSSGKHKGKTTISKRGRKRLREGLFKAIITMLATNQEFRMLHKRNLSREKNPLNKMESIIALCGKLIRVIFAILTKGNDYDANRMISDMNRSMKAT

SEQ ID NO: 178684 - protein, 322 aa, unidentified
MKQKSFLGIDVSKAKAECGLLWADSKYRSKVVSNHTDGFAQLRQWLQKYDAGQAHVCMEATGVYWEELALARSAQGMPVSVVNPAQIKAFGESCLVRTKTDKVDARLIAEFCRAMQPPLWQPPSPSEQALRALVGRLDALQRMRIQESNRLGVARDAVRSNIEAHLHWLDEQIKALTQQIDRHIDQDPDLRRKRDLLDTIPGVGGRTSALFLAFCSRTDAFANARQCAAFAGLNPQQHQSGSSVRHKARLSKIGHALLRKAMYMPAVVTLYKTAWGKAFRSRLKAAGKPPKLIIGAMMRKLIHVAYGVIKSNKPFDPTLHAT

SEQ ID NO: 178685 - protein, 299 aa, unidentified
MEEYIGLDVSMKETSVSIRRAGERIWRGKCASDPRTIAELIRKRAPAVKRVVFETGPLSIWFYHSLRTEGLPAICIDARHAKAALDMATNKTDANDADGLAQLAEVGFFREVRVKGFDSMLTRTLVGARTRLVRITTELSNQIRGVMKTFGLLVPAGKGSIFEKNVRSLLTDQDGLASIVLPMLEAWRGIRIRAAELGRQLVRDARQNQACRILMSIPGIGAITATAFTTAIERPDNFMKSRSVGAWIGLTTRRYQSGEVDYDGHISDVATPICEDFSTKRRRSFWRAAPPRALCARGV

SEQ ID NO: 178686 - protein, 404 aa, unidentified
MIDTGDIDVFLGLDVGKGEHHATAVTPAGKKAFDKRLPNTEPKLRELFAKLQAKHGTVLVVVDQPASIGALPLAIARATGCPVAYLPGLTMRRIADLYRGEAKTDAKDAFIIADAARAMPHTLRAIDGEDETIAELEMIVGFDDDLAGEATRVANRLHGLLTQIHPSLERVLGPRMQHPAVLTLLERFGSPAQIRKAGRRRLVTLLRPKAPRMAERLVEEIFTALDEQTVTVPGTEAAAPIVPSLAASLTAVLDQRELLAGRIEELLESHLLSKVLTSMPGVGVRTGARILIEVGDGSTFPTAGHLAAYAGLAPATRSSGSSIRGEQPSRRGNKQLKRAFFLPAFAALGDPASRAYYDKKIAQGKHHTQALLCLARRRADVLFAMLRDGIFYEPQPVRAVAPQT

SEQ ID NO: 178687 - protein, 355 aa, unidentified
MNAIKYIGMDVHLATISIAVLDSKGKLVMEVTIATQAGALLDLIRGLSGTLHVTFEEGTSAHWLYTVLEPHVGKVVVCDPRQNPRRLGEKKSDRLDARKLAEGLRMGSLKPVYHGNALVPALKELVRSYRTLVSDTTRVMNRLKALYRGRGIGCAGTRVYSPRFRDQWREQLQEPGVRGRADLLYKQLDLLLPLRQEARAAMLAESRKHPAHKILCSIPALGPVRVAVLMALMQTPHRFRGKRQLWTYAGLALVTRTSADYQMVDGQVTRTRKPALVLGLNANHNHTLKGIFKDAAASALAHPGPFKDFYTTRVAQGMKPELARLTLARKIAAITLTLWKKGERFNAEHVKTQAA

SEQ ID NO: 178688 - protein, 341 aa, unidentified
MFYCGIDLSARDSHLCVLDDNLSVHLQRKASNDLPLISSLLDPFKPHLKIVVESTFNWYWLVDGLQASGFDVCLAHSLGLSMISSAKIKTDRRDAFTLAKLLRAGVIPTAYIYPPETRPVRDLLRRRLNLVHLRAQEFGSLRQLLLRQGILSSSRNEIKLSDDEQINEWFSHPLVRLSAYQQLDRIELLSQQISDLESSILDLAQPLPEFRRLLKIPGIGKTLALTIFYEVGQTSRFSSVRHFSSYCRLVPGIAQSGSICRRGRGSKQGNHFLKSAFTQAAVAAVRCYPKIKSYYERHLAHHRGGARKLVAYNIIAHKLARAVYYVLRDGVDYKEEMLFGS

SEQ ID NO: 178689 - protein, 377 aa, unidentified
MREKLRFLGLDVHAETIAVAIAEPDGEVRSLGTIANREDSIRKLIRKLGPAENLRACYEAGPTGFVLYWQLSQLGVACAVIAPTLVPKKPGDRVKTDRRDALKLARSHRSGDLTAVWVPDEDSESLRDLVRQREAAKQDQLRARHRLTKFLLRTGQRPPLGLKAWTERWMRWLAQVRYTQPAQEVTRLDCMNEVEHMAARVKRLEEAILEVVKLAPEPMQELIRGLQALRGVAHISAVTIASELGNITSRFESARKLMGYCGVFPSEDSSGKRIRRGGITKCGNAHLRRIVVESAWCYRHLPRVGEKLRKRHQGVPAEITEIAWKAQHRLHKRYMTMMNAGKDQRKVMTAVARELLGFIWAIGIKAEAVASRQQFAA

SEQ ID NO: 178690 - protein, 340 aa, unidentified
MRQLYVASDLHGNNNLVGIIDGEGKRIFKKKLPNDPLLISDVLKPFKEEIMGIVVESTYNWYWLVDALMEEGYKVHLANPAAIQQYSGLKHADDKHDAFWLAEMLRLGILPEGYIYPREERPVRDLLRKRGHLVRLRTSLIISLENIISRNLGRKLPVNEVKGLRKDRVTPLFEGNEDLALAGKVSKETIDFLTHQIRQIEGVVENRITLKEPYRYLLTIHGVGKILGLTIMLETGPIGRFETVGDYVSYCRKVPSQWTSNGKRKGSGNKKNGNKYLAWAYAEASDFARRYHPEPRAYYNRKMQKSNPAVAHSALSHKLARAAYYIMRDQVAFRPETLFG

SEQ ID NO: 178691 - protein, 324 aa, unidentified
MNIIGIDVSKAKLDCAWFRGENKVKTKVCVNNPEGWKVLVTWAQANTGGEISELHFVMEATGIYHENLATWIHDSGAKVSVVNPAHVKHYAQSLGTLTKNDKKDSVLLARYGLKESPVFWQPAPLEIRTLKALLTRLAEVEKDLQREKNRQEKAIVTDTPASVLKSIGQMIGHFETEREELEKLIDDHIKAHKNLKENKTLLESIPGVGKVIAQQMLMVLGSHQFESASQCAAYLGLVPVHKESGSSIKGRPQLAKNGNPAIRAKLYLAAVTATRYNPDIKAQYERLTGNGKSKMSALGAAMRKLVQICFGVLKHQKTYQPQMG

SEQ ID NO: 178692 - protein, 405 aa, unidentified
MSVRQAAPVTSSTIVVAVDVGKCSAMVSVTDAARCRVLGPIGCAVGCSALSAVVHRIEEAVGPSAQVKVGVEAAGHYHRPVLDYAWPTGWEVLELNPAHVSEQRRIAGRRRVKTDAIDLEAITELVLAGRGRPVGAEQMVLGEIGAWAAHRTRRVAVRSATKNQLLGQLDRAFPGVTRALPDVLGTKIGRLIAAEFAEPTRLSALGVSRLIRFAAARDVQLRRPLAERLVAAAREALPTADAAVARRVLAADVALLADLDAQITATEAELAMLVPHSPFATLTTVPGWGVVRVGNYAAALGDPGRWPGPRQIYRAAGLSPMQYESAGKRRDAAISREGSVALRRALIDLGIGLWHTDPAAKAYAVALKARGKHGGIIACALAHRASRIAYALVRDHATYDRSRWS

SEQ ID NO: 178693 - protein, 388 aa, unidentified
MNVGADKSEPLTAIHTDLGAIFVSLELSRSSWLITSLSPGGGEKMSKHSVRGGDFAGLMERFAQLQEKARLRTGQSFRIIVIQEAGLDGFWIHRALQNEGIESHVVDAASIATSRRRRRAKTDKIDGETLVRALLAYKRGEPRVCAMVKAPTPGEEDRRHLCRERKALTAERVRHVNRIKGFLFSQGVSGYQPLRRDRRQRLEELQTGDGRAFPQHLKALVNRELDRLELLLKQIKTVEAARDALLAVKQTAKPAPAAMLLDIKGIGPEFAAILWSEGLFRHFENRRQIAAYAGLAPTPWQSGAVDREQGVSKAGNPRLRTTLIQLAWLWLRNQPRSALSVWFHERVSRNGGRLRKTTIVALARKLLVALWKYVTAGVVIEGVTMKVA

SEQ ID NO: 178694 - protein, 452 aa, unidentified
MSIIMVRYVGLDVHKRVVEACIIDQSGKVVHRERFALNRRTLELFATKVLRPTDHVAFEATTNCWAVADALRPHVAKVLVSNPLATKAIAQAKVKTDKVDAHVLAQLLRCDFLPEVWQPDEATRRLRELTGRRSALVGQRTMMRNRIHSVLAMRLIEVTRKRLFEAEGLEWLKTVELDPQGRMLIDSDLRQLEFLQKEIAALDLELAQRGHSNDQVKLLMTLPGVDVGTAAALLAAWGDFSRFPDADHAASYLGLAPSTKQSAEHCYHGPITKRGNSTARWMLIEAAQHLDKHPGPLGHFFRRLMKKKTRNVAVVAAARKLAMIGWLMLKGNEPYRYAIPRSTETKLAKLRVKATGQRRKSGPPKGVKASAKLPPPVPGESRKSRTIKSLAAICHSEGLPQPRELSPGERRTIEAAGCESFVDQAAAEQVIPARKRATGSSSLLQETAHGGH

SEQ ID NO: 178695 - protein, 391 aa, unidentified
MICVGIDIAKDKHYCCILDSDGTVRADCFTIPNNMDGFKQLLQTIRNCTKKSGKIKVGLEATGHYSYNILGFLLDNGLPTYVINPLHTNLYRKSLSLRKTKTDRVDARTIATMLLSDVDLKSYTDIAYHNEELKSLTRYRFEKVRERAKLKQSVSRLVTILFPELEKLVPSLHGASVYALLSEYPGAKQISEVHLTKLTNLLVTASKGHYGKEKATLIRETARASIGSVMPAKSLELKHTIKLIQELTSEINEIEDSIQKIIDELNPPILSITGMGVNSAAVILAEIGDFSNFSSPDKILAYAGCSPSTYQSGKLTNCYAHMEKRGSRYLRYALYNATKYVCHWNPVFAEYLAKKRAEGKHYNVALSHSMKKLVRLIYALQKSGKTYLAAA

SEQ ID NO: 178696 - protein, 414 aa, unidentified
MEKQWNIVCGADIHKKFLIATILSRDGTKITKRFGMTLDELLNFKNWVIENGCEQVAVESTGTYWVPIHTVLEGSIGLIVGNAYKIKHTPGNKNDLGDADWIAELCLNGMIEPSRIFPKADRDLRRLTRIREGYVNDMTREKNRIHNALESCGIKLSSVLSDIFGKAGQSILSGLLEGRTIDDILKGVNLKRIKATAEEIREAIKGSLDFTQILLIRGSLEQMEAIQKRIDEICREIKSRIAYRKEDLKIAMSIPGVGFTSASTLLAEIGDITDFKKPEQLAAWAGLVPSVYQSAGKLITGSITKHGSRHIRWILVQVARVIARGRNSKLKRFFLRVKSKKGSNVAVVALARKILCILHHLLTNREMYKEDGINKKIKIDIGNEFSQREMDLEEMIKYIVRAGYEVRKGSAGGG

SEQ ID NO: 178697 - protein, 418 aa, unidentified
MRNSWTPYKFTFGGTRMYNAVGIDVSKGKSTVAVLQPAGVIIRKPFNVNHTSSELDELAKYIGSLEGETRVVLECTGRYHEPVVKTLSEAGLFVSAVNQYLIKNFGNNSIRKVKSDPADAKKIARYTLDNWIELRQYSSMDNTRTQLKTLNSQFSFFMKQKVAAKANLIALLDNTYPGVNKLFDSPVRDDGSEKWVDYAYSFWHVDCVRKIGLKTFTERYQAFCKKHHYNFQPAKPAELFLASKDLIAVFPKEASYKLLIQQSIQQLNLASSHVEELRSKMNELASTLPEYATVMGMYGVGKTFGPQLIAEIGDISNFSHREALTAFAGVDPGVDQSGTHNSKSNKASKCGSNRLRKTLFQIMSTLLQTSPENDKVYQFLAKKRAEGKPYYVYMTAGANKFLRIYYGKVKECIRNLEQ

SEQ ID NO: 178698 - protein, 403 aa, unidentified
MAGTKTAGIDWASEAHEVCVSEEGRVLERFSVSHDERGIASLAARLTRAGIARVAIERPDGILVERLLAAGIEVLAIHPNQVKAARARFAVAHGKSDRFDAYVLAELARTDAHRFRALVPDSDETKALKALTRAREDLVGVRVELANQLRAQLQAFWPGALIFAEVDSPISLAFLARYPSPAEAKGLGAGRMAAFLGRSSYSGRTDPAELVARIKAAPEGTAGEAECQARRTVVLGLLAALGPIVEEIAELTTQIRGALAAHPDAEIFRPLFRDPKTTICPATLIAELGDARGRYPTEAAMAADAGMSPVALESGKLRVATFRRACDKRLRVAVATLADSTRHWHPWAKEVYRKARARGQDHPHAIRTLGRAWIRVLWRCWRDRVPYDSARHGNFNRLQTAGG

SEQ ID NO: 178699 - protein, 417 aa, unidentified
MTTRNERTIISIVNPICCGLDVHKESVSACILFNDGEGKERTIIQEFSTFTDDLLRFRDWLLVYDCPIVAMESTGVYWHPVHNILEGHVAIVLVNARDIKNVPGRKTDIKDSEWLAGLLRHGLLRSSFIPPKEVRVWRDLTRLRRKYVNSLSDYKKRVQKLFESANIKIDSVVSDLFGVTGRNLMSLLASGHTDITMKDIEDCVRGRLKTKTQELYRSIKGFFTEHHCYMLQTLLSTVASLEDTIGSLDKRIKSLMVNHEELLERMKEVPGISDISVRDIIAEIGTTLDAFPSDAALASWSGLCPGNNESAGKRKNPKNHTWKNQLKPVMVEVAWAAARTNNTYYHDKYHRLKTRRGHNKAIVAIAHRIMNCLYHIIKYGVRYKELGMDYLDKKTKTAKLYRLQKQAESLGFQLVTI

SEQ ID NO: 178700 - protein, 420 aa, unidentified
MPYRIAGIDVHKKMLAVVVSDVEVDGEYEFERRRFSSTPDHLRLLAEWLIEQAVEEVVMESTAQYWKPVWAALERYWKPIQKRPGMGRTSGALHLAQAQSNRGRRGRKKDFPDAERLVKRLVANELVLSFVPDTEQRLWRTVTRRRYQLTRNHVRLQNQLESLLEECHIKLSSLVSDLLGVSARRMLKALADGETNPAALAALADQRLRATPAQLVDALGACTELNPVYRRLLKLALEELHLIEQQIAQLDQEMATLLTQHQDAVQRLAEVPGLGVGSAQQIIAEVGATAATFPSDKNLASWVGACPGVEESAGVSRSHRCPKGNRNMRRLLSQCANAAVKLKGSIFHLDYRRLLPRLGHNQTIGAVAHKLCRLIWMILHEGIRYEERGPAVSERATRVRTTRMIRILRRQGYRIEPLTT

SEQ ID NO: 178701 - protein, 273 aa, unidentified
MADTEFPTSPVGYDDALRWARSFGTVVIAGVEGTSSYGAGLTRVLQAAGIEVAEVGRPDRAARRRQRKSDPLDAYTAARSAVAGHGLAVPKDAHTAALRALLTARRSAVKAHTAATNQIHALLVTAPAELRERYRRYSTAAVVKALARCRPASHSDPTAVAVLTAAKALVQRAEFLERQKQDLTAQLDVLVLQINPALRAAYGVGPDTAAQLLVTAGTNPHRLCNEASLAALCGVAPVPASSGKITRHRLSRGGDRAANNALYRIAQVRMSAT

SEQ ID NO: 178702 - protein, 416 aa, unidentified
MIGKKGEIHVMQHVVAFDVSMGKSMMVIYNRYRQCEVEKEINHNRPSFEQLHETLQELIGRGGEEPEIVFEATGVYSKPLERFFQDNNYAYCRINPLEANLQPASMRRQKTDKSDAHELAKSHFRVGREQTYQEKGYYQQMRGLTRYYDELDIEITHLYSRLHAILQLSFPELEQLFTKRSSLFLNIVQLYPHPDEVLAHSKTRICSRLKANTQKRLSLKRVEEKGTALLKAAKISYPAISRNDVRCEQVKDYASRIADLKEKKAQLVKQMVELSNERTEYHVLRSFPGRGEITAVRIIGELGDIRRFKNNKQLNAYVGIDIRRYQSGNTHYKDKINKRGNNKLRKILFFMVTSMITLRKKTKNHLVEYYDKLKKQPLRKPHKVASVACMNKFLKVAFHLITHEKLYDYEIASTGS

SEQ ID NO: 178703 - protein, 383 aa, unidentified
MKKTQRTLRADNSTKAPVMQLAFELSLSKWKLAFGHNGKMRMVSIDARDLDQIQQAIEKAKKRFKLDGEVKIMSCYEAGRDGFWIHRYLECQGIENLVVDSASLEVNRRKRRAKTDRIDAGKLLRMLLRYWGGEKKVWSVVRVPSEQDEDARHLHRSLESLKDERTMHRNRIKGLLVQQGIKVSNPSQKKFLEVLEKLRTWNGKEVPPGLKAQVVREYERLQVVEGQIKALEKEKKERLKNPDTDSLKKVAKLATLYGIGSVSSWTFVMEFFGWRQFQNRREVGGLAGLTPTPYDSGESLREQGISKAGNQRVRALAVEIAWAWLRFQPQSKLSQWYMKRYANGGKRMRRIGIVAMARRLLIDLWRYLEHDKIPEGARLKSVA

SEQ ID NO: 178704 - protein, 343 aa, unidentified
MAEYVALDVSLRSTSVHIVDERGRCLWRGTCPTDATALVDTVRRHAPRVERVGLETGMLATWLCHELAEAGLPVVCMDARQAKAALSCRINKTDADDAEGLAQLLRTGFFRQVRVKSEGTMLVRTLLSARRQLVRTGLDLANQIRGLLKIFGLLLPRGGGRAFEAAVRERLAGHAQLATVITPLLQAWRTVREQVLALDRQAYAVAKRDARCRLLLTAPGVGTITALAYVAAVERPEEFRNGRAVSAWVGLTPARYQSGQVDYSGRISRQGDVHLRTYLYEAANAVLTRSRPDTALKRWGLGLKARLGHKRAVVAVARKLAVVLHAMWSKGEPFETDAVAVAA

SEQ ID NO: 178705 - protein, 407 aa, unidentified
MELVALYKRVIGLDIHQAQITACALIEQADGSMRIEQRQFGAFKRNRKELADWVASLHPDEVVMESTGIYWKSPYAALEALGIRAKVVNAQHVKNVPGRKTDVGDAHWLATLARAGLLRGSFVPPAKLRELRLIARQRQKLVGQLASEKNRLHKVLTDSGVRLGVVVSDLHGQSARAMVKAIIAGQPPQEVLKLASRRLKASREEIFDALQGDLTTSHRFVLDELMQHVEEIEARIVRFDTRLLAELKSEHNALALLQTIPGVNLIGAAMLLVEIGSDMDVFGSADRLASWVGICPGNNESAGKRKSGHARKGNLYVRRLLCEFAHAASRTQSVFKSKFQALVVRRGYKRAIIAIGHKILRTIFFMLQRGEHYRDSATDYEALAVQRNAPRWIKALTKFGFIQPASA

SEQ ID NO: 178706 - protein, 339 aa, unidentified
MQIHSVGIALGKTMFHLVALGAAGKVVVRKKFTQKQLLTYTANLQTSLIGLEACSGAHFLGRALRKQGHDVRLIAAQFVKPFLKSNKNDFVDAEAIAEAVERKNMRFVPIKTDDQLDLQAIHRVRDRLISRRTAVINQLRAFLLERGMVFAQKPAKLKAAMADILENAEADLTPPMRNLIDTLWGEWKLVEQQIEELNDELERISASDAGCTRIRQIPGIGPVVATAIVAAIGNGAAFRKGREFAAWLGIVPRQYSTGGKAKLLGISKRGNVYLRKILIHGARAAVLRIKRDRAPIGAWLDALDSRAPKNVVVVAMANKLARIAWAVLSSGNDYRPVAA

SEQ ID NO: 178707 - protein, 320 aa, unidentified
MMAQNGLVVVGIDVAKDKVDACIRSLSLRQTFPSTAQGHRKLAAWLCKHPVNKAVMEASGGYERAWARMLREGGIEVRIVDPKRVRSFALSAGRLAKNDVIDAEMIAWFAETFSEAPSQTHDAAREELQTLVKARLSLIDVRMRLVSQSEHAAPGLVQKAHAHIMKSLASEIAKLEAAICAKVKSTPDFAERAEIIESVPGLAGTSSANIVAGMPELGQVSDEIAAALIGVAPYDDDSGKRRGERHIKGGRRWVRNAIYMPCVGAATLNNPVLKAYYQRLIAKGKEPKVAIIACMRKLIIILNTMIARRQKWDPSRYALS

SEQ ID NO: 178708 - protein, 349 aa, unidentified
MNATIVAVDLAKSIFEIAAADADWRIAQRSRLPRSKFFGFFMQLQPCQVVMEACGSAHYWARRISELGHTVRLLPAHYVKAYVRRNKTDRADAAALLEAARCAEIREVPVKTVDAQQIQSLHRLRSQWMSTRQRYINTLRGILREFGFAIPLGVNVAKDRIGTALADPESEVPPALRATLAEMLQEIRLLEQKILGIEHQLNALTRHDVRVQQLRQIPGIGALTSTALRAIVGDIQRFPSGRHFASWLGLTPNERSSAEKRRLGKISKQGDVYLRTLIVHGARSALLGAHRAERSGHPLDHLRRWALDCERQRGHNKATVALANRLARIVWATWTHERPFDGNWSTQAA

SEQ ID NO: 178709 - protein, 320 aa, unidentified
MTSKGAEKMKNDTIGVDVSKDHLDAHRLSDGVNRRFANDKTGHRAFIRWLVQPSVERVVFEPTGPYHRAFERALGLAGVPYAKVNPRQARRFAEAVGTLAKTDRLDAAMLARMGAMLELQTRPPRSDALLALKELHLAREALVKDRTAAKNRRTVLTASLLKRQNAQRLEQIERQMAAIEAAILEQILADPDLAQRFAILTSIPGVSAITAFALLIEMPELGALEAGQAASLAGLAPVARQSGRWTGRAFIRGGRAAVRQAVYMPALVAARFNPDLNAKYRELIKAGKPAKVALTAVMRKLIVLANALLKANRSWAPKAA

SEQ ID NO: 178710 - protein, 338 aa, unidentified
MNIVFLGIDLAKNVFQLCGLNQAGKPVYTKRTGRKELLQTLANIPACLIGSEASTGAFYWQREFEKLGHKVKDISPQYVKPFVRGQKNDGNDAQAIAVALMQPTMQFVPPKSPEQQDIQALHRARQRIVNHRTATVCQIRGLLLDRGIPIGSAVSRARRAIPLILEDAENGLSSRMRRTIAELYDLFNDLGRRIHFFDKEIETVFRQSEACQRIAKVKGIGPKTATAVVAAIGKGTEFKNGRHFAAWLGLVPRQHSSGDRQVLMNMTKKGDKHLRTLFIHGARAVVRVATNNNDGHMNQWVNQLKERRGFNKTTVAVANKNARIIWSMLRNDTEYQVV

SEQ ID NO: 178711 - protein, 366 aa, unidentified
MEATTIAIDLAKNVFAVCGTNAAGRVVWHKELRRAQLLGFMRKMAPCLIGMEACGGAHYWARQLTALGHQVRLVSPALVTPYRKGNKTDRNDAEAILEAVTRPSMRFVPVKSLAQQDLLALHRVRSQLLKNRTALCNQLRGLLRERGVAVRPGVTALKHALPTILAEENSEISGEIRDLLIEMSDWLRTLEARIASCDEKLDRKFKADERCKRLAKVPGVGPLVATALVATVGNAQEFRNGRELSAFLGLVPRQHSSGGKRVLLGITKRGDRYLRTLLIHGARASLRWSALKTDSYSCWAARIKTERGPNVATVAMANKNARILWALLNRGERYRSDNSTQRAVSRPGSPPSVERARAAKLRMVED

SEQ ID NO: 178712 - protein, 444 aa, unidentified
MPVCRPDAAGIDISATGGMYVCVPADRAAETVRCFGNFTPQLVELVEWLQECRIRTVAMESTGVYWVPLCQLLDDAGIEVFLVNARHVKNVTGRKTDVLDCQWLQFLHSVGLLRSSFRPPQAICALRSIARHRSNLLREGARHIQHIQKALDQMNLHLHHVIDDLTGVTGLAILEAILGGERDPEALAKLRDRRIKATAATLKEALTGDYRREHVFVLGLALDSWKRVQGQLTQCEAELERMAAELHSVIDEEQLTILRAAQGPGKRRGTSKNAPAGQDWHQRLHGLFGVDLTRVPCVGVSTVLVLLTEIGSDWSRFPTAGHLASWLALCPDNEISGGKVLRRRTRRATSRVRVALRMAAQSLHSDQSVLGDRYRRMRAKLGGAEAITVMAHTLARILWHLVTKQESYDESVYDKAEQMHATRRLKRLKKQAKAMGYELVAQAA

SEQ ID NO: 178713 - protein, 329 aa, unidentified
MTSIGQWEMAQTCSKLESNAVVVGIDVSKDHLDAAQYPSGDLIQTSNDTKGLRTLLRWIGRQRAVHVVFEATGPFHRQLESHLAKASIPFSRINPRHARKFAEATGKLAKTDRVDAMMLARMGALLEPRTSTICNELQSALQELAAGRRNLTRDRTALLNRQQNLQLSLLKRLTRYRLRQIEAQIATIDQAISELISTDESLSRKRTILVSIPGIGEATAAMLIADIPELGTLENGQVAALAGLAPVTRQSGKWQGKSFIRGGRIHVRNALYMPALVAMRHNPDLRSIYLSLTDKGKHAKVALTALMRRLVILANVLLRNDRLWEPRHT

SEQ ID NO: 178714 - protein, 377 aa, unidentified
MKRIIRIGMDVHSTNYTLCAMEPILGGEDRIFANIQVTPDYKNIILFIEDLKVKLGLDAKYDILCGYEAGCLGYSLYNQLTAAGIRCEILAPTTMLTPQGIRIKTDARDALMIAQCLAYGGYHAVYVPTEEDDSIKEYLRMRDDHKLALKKIKQQINAFTLRHGVHYSGTKWTATHWKWLKQLELAPMYREVLNEYMASYEEQTAKIERFDLRIEELANQEKYQKKVKKLTCFLGIKTHTALSLIVETGDFERFAKGNTYAAYLGLAPGENSSGEHIQRDGITKAGNSHLRLLLIEAAGGICKGAIGHKSKDLKARQNGNAAEVIAYADRANTRLRSRYYKFIRHGKKRNVAVAAIARELACFVWGMMTDNIEPRMA

SEQ ID NO: 178715 - protein, 464 aa, unidentified
MARQNRQTGTWEGLSVVHPHAAGLDIGSEEIWVAVPPASTGEAVRRFGTYPPDLMALAGWLRACGVDTVVMESTGVYWIPVYEILEAQGIQPYVVNARHIKNVPGRKSDIQDCQWIQGLHSVGLLSASFRPAGEICTLRAYLRQRATLIEHRAAHIQHMQKALQQMNVQLMQVVGDISGQTGLAIIRAILAGERDPETLAALRHARCQQDGAQFVKALTGNYRAEHVFALKQAVALYDVYTEQLRECDGEIERQFANLKPLAGDPLPPLPPNSKPNSRSKNGSAYDVRSLLYRITGVDLCAIPGLNVLTVQQIITEVGTDASRWPSVKHFCSWLRLAPHNDISGGKVLKSRVLKGANRAGLAFRLAAQAVARETHSAFGAYYRRMRARKGPQQAIVATAHRIARTFYHMLKTRTPYDGMAAEEYTRQAQEREIVWLKKAATKHGLTLTAGSASASGPASEPIMT

SEQ ID NO: 178716 - protein, 405 aa, unidentified
MEVYTGIDWSENKHDIFFMNEAGAVIAQYTIPHTTEGFLKMDAIRRDLGLATDECLIGLETAHNLVIDFLWARGYSQVYVIPPSVVKSNRGRQGQSGARTDESDAWLLADILRTDRARLQPWFPDSLLTRQIRAKVGLIQYLTHHNVRHANRLRAVLLRYYPAAVQVFSSLQTQIALHFVSIYPTPQAAANLTWAEFQSFAQQHGYRHPKRLPACFARLQDDYPEASSETVLIYQDEAVHLAQLLLAGIRAKKESKRALRSLFQQHPDHTIFTSLPGAGELLAPALLAKFGDDRQRFPSPDGLQALAGTCPVTEKSGKRKRVRFRRACDRQFRHFAQQWAIASLSESVWATAYWNAVRPRCDSDSHAYRCLANRWLAVAWKLWQSRTVYDEAYHLQQRAKHGRPH

SEQ ID NO: 178717 - protein, 353 aa, unidentified
MRKQYSTFSFKGQVVYVGIDVHKKQWTVTIRHCGRMSETFSMDPMPEKLAEHLKRNYPDAEYRSVYEAGFSGFEAHRALCELGVQNIVINPADVPTSGKERESKNDNSDSRKLARELENGSLEPIYIPTQENLILRDLKRREDQLAQSIARIKNRIKGHLFFHGIKFVSWAGRSLKIMEEEAKKRDDYALLSMLRELRYFRTERIQVIHDEEECLKLLHREEIQESIQSVPGIGFRTAIALQAELWDMTRFKTEDHLNSYVGLAPHTFGSGEHVTVKCGNRKKKQLHYLLIEAAWRAVRHNLEYKARYGALVGRGMNSKKAIVVIARKLMQTIRAVWLQNRKYVNLMPSAKMN

SEQ ID NO: 178718 - protein, 354 aa, unidentified
MSKEIVAQNRTVMIGVDVHTRSHVVAVKVGREIVDRCTLSPAPKAWQTYMKKFPGCEVHVIYESGPQGYNLHDWLEQMKGQEGQAIFVYIAPPAMIPQAPGKKRVKTDRRDSLRLIQAFESGSFRPVVVPDKATRAERELVRTRDQAKKDARRLKCRIHGFVKFHGVMYPPFTQWTDEWERELLSNAKAVDPTGDLHFTLKAKFRMLRDTEKVVASIEKRIDRLYRSGACSKLAQRIMEHKGIGKTTAVVIATEVADFKAFDNSDAFASYTGLVSGARGTGDTMHQGPITKEGNRRLRWVFVECAWVWVRCDPAAALKFERLKAKRGTRKAIVAMARRLAVRVYHHVVSEAQAA

SEQ ID NO: 178719 - protein, 361 aa, unidentified
MNTINIGVDLHKHQFTNYYLCKNEGFSKKFSTNEAGITSFKEEIKMMQEKGFRVKVAVESTGNTRFFKNQIEQLGIKVVVVNTMKFKVVNESVNKTDKRDAKVIAEFLAKDMLPEVHLSSEKSEKLRRLVGVRKELVKTRVKLKNTIHGMLLSFGIETKAGLLNSQKGLKKAVDLVSDEDNKMIIETIVSSIKVLSEKIKDVEEKLEGLSAGDRVVEILKSIPGTGSLTAITVRAYMDDVKRFSHYNKLSAYCGLVPWVKCSDQTQHYGKITKRGPVELRTAVVQMVLGMIRCKSEKHNRLMTAYRNMKKLKGSGKSIVATARKLTKIIWTMLTNDEEYSLEKINVVYDDVSKKEMSSLAA

SEQ ID NO: 178720 - protein, 351 aa, unidentified
MTEYAGQQFVGIDLHRRRSVLVRTTVAGDVLEATQILNDVDRLNSVMERAGESPEVVLEATYGWYWAVDALQAFGARVHLAHPLGVKAFEYRRVKNDVRDATDLADLLRMGRLPESWIAPPATRELRELVRHRAKLVGLRSHCKAEIHAVLAKCGIQVLMSDLFSDPGNDLLDRVPLPGPYAARVQSLRRLIDDLEDEIELFTRLTRGRLVANPDYVALQQLPGIGPILAAVFTAEVGDITRFRTAPQLACWAGLTPKHHESDTHVHRGRITKQGSRLVRWAAVESVKALGPRTVVGAYKKQVADRRGKNVGTVAAARKQTEFVFYALRDHHVRALHPPRPPAPSPVGAAA

SEQ ID NO: 178721 - protein, 421 aa, unidentified
MTSMTLQPLAATWDTAPNELVAGIDTHKNTHHVAVVDQLGRPISDQQFAATADGYQQIIEFLRTAGTVSRVGVEGTGSYGAGIARILTAAGFDVAEVARPNRRVRRMRGKSDPLDARQAALTVLAGIDTAIPKAGDGQVEALRMLLTERRSASKARSQVMNQIHALLITAPDTVRDDYRRLGTIALVATLCRTRPGSGTSPEHTARRVLKRLAVRHSALSQEIAIIEREMVPLIRAVNPALYASSGVGPVTAATLLVAAGDNPERLTSSASFAALAGVAPIPASSGQRTRHRLSRGGNRNANNALHRIVLLRMRHREPRTVAYFTRRRAEGLSDRDIMRCLKRHIANEIYKVLMSPGLDNPVGQELRQLRREAGIPLTVLADTLGVPRQRLQRLEIGTRADRELEALATATINQLTLEKAA

SEQ ID NO: 178722 - protein, 411 aa, unidentified
MRRVIGIDIHRTFGEVVFWEDGRLRRAGRIDMTRTALEGFGKRLLASDEVVIEATANSMGVSRVLAPFVARVIIANPLQVKAIAQAHVKTDKIDAGTLASLHAAGYLPQIWTPDVGTECKRRSAARRYQIVRHRTRLKNEVHSILHAHLIPKCPHADLFNTRGRAWLAAQPLPEDERAAIDRHVRELDRLAEDLAVLDRQIAQDAVDDPAVNRLMTITGVNLTVAAGIVAAIGDIGRFNSPQKLVSYFGLNPRVRQSGLGAAHHSRISKIGRSHARAMLVEAAWAAAKARGPLHAFFVRIRARRGHQIAAVAVARKLTVLCWHLLTKGEDYLWARPALVANKTRAMQLQAGHPQQKGSRRGPAYAYNIKALRDREMLIAAQAEQSYERFVSQWKARRPKPGARAPQSGRTK

SEQ ID NO: 178723 - protein, 382 aa, unidentified
MPAYADPTPTPISADTIFLAFELSGTSWLVALHAPDADKVERHRLPAGVAAEVLGLIARTKARVTRRLGTTPRVACCYEAGRDGFWLHRVLEAEGIASHVMDPTSLQVDRRARRAKTDRLDAQALLRALMAWSRGEQQVCSMVRPPSPEHEDERRLSRERGTLLKERLRLSNRIKGLCAAQGIYHYEPLGADRRERLARLVTGDGRALPGRLAAEIGRQLDCFELVLRHLAEVEAVRNARAAQAREEGGSKLATLLRLKGIGPELATVLELEVFHRHFANRRDVAAYAGLAPSPYASGGTSREQGISKAGNRRARKALIELAWLWLRHQPESVLARWYRDRVGTATGRVKRIAIVALARKLLVAIWRYVETGLVPAEAAVRT

SEQ ID NO: 178724 - protein, 361 aa, unidentified
MSIQRMSVGLDVHARTVVAAALDASTGEILRAKLSSDNRDVLGWLGGLPCPVAVTYEAGPTGFGLARALDAAGIECKVAAPSKLQRPTGDRVKTDARDALHLAKLLHLGEIVEVTVPSVAQEAARDLVRAREDVRGDLMSARHRLSKMLLRQGIVYSGGKPWTGAHDAWLRQQRFELPGLKLAYESAYDTVVSTTDRRDRLDAAIEIMAADSEFTPVVHRLGCLRGVATLTAFGLAVEIGEWHRLTGRSIGAYLGLVPTECSSGTSRSQGGITKTGNGHARRLLVEAAWKHRARYQPSSRGIRRRWDLAGSAARQRGHAGNQRLHARWQGFDARSKKPVVANAAIARELAGWCWSLAVLEE

SEQ ID NO: 178725 - protein, 319 aa, unidentified
MTKEIYVGIDVSKGTLDVAVHGDKQHWSFANDEAGITKIVSKLKQLNPALVVLEATGGFEVALAADLGVAKIPTAVVNPRQIRDFAKSVGMLAKTDILDARIIARFAATVQPTPHPIPGIEAQELGAITARRRQIVNMITAEKNRLSTASKTVKPRIRAHINWLEKELNDVNRNLRQKVTDSSMWREKDELMQSVPGVGPNLSITILAELPELGTLNRKQIAALVGVAPLNRDSGTLRGKRTIWGGRATVRTALYMAALSAKRHNPVIRRFYERLLADGKAKKVALTACMHKLLTILNAMLKYHTSWNFGVTQILGPCH

SEQ ID NO: 178726 - protein, 337 aa, unidentified
MMYSGIDLHSNNSVIAIIDDGDRVVAQKRLPNDVTKIVGFLARWQEQLAGVVVESTYNWYWLVDGLQDAGFHMHLANTAAIKQYEGLKHSGDETDAQHLAHLLRLGILPTGTILPREHRAVRDLARKRMQLVQSCTAHVLAVENIMARQLGGRLTSNQIKRLTNDAIDNLPVAADVGLAIKANVAVIATLQSQIELLEKCLQERVKPRPQYGLLTSVPGIGQTLATVILLETGPIDRFAEVGNFASYARCVDSVLTSNRKKKGEGNVKNGNKYLAWAFVEAANFARRFCPEAKRFHERKKAKTNNIVATKALAHKLARACYHILKEGKPFDVTRCFA

SEQ ID NO: 178727 - protein, 325 aa, unidentified
MKDFTPCCGIDVSQHTLDVCYQNNLGELFEIQVPNNSTGFEKLRVHAGPAAHFVMEVTGVYYIRLAFFLHRHGCKISVVNGVVIKRFIQMQPERNKTDKKDAKWICRYAINQQPALWQMPDNAYFESKQIYNTIRSFTEQIKMLGNQKHSIGLLPVQSREGIKALEKMIAGFKMEIVKLEKKLLQVLQLWQPEQVKNISSVMSIGKRATAMLIVATQGFKNTVSHRQLVSFAGLAPVQKSSGTSIKGRPSISRQGSKELRDVLYMCAMNAKKNNIACKALYERLIAKGKSGKLALIAVCNKLLRQVFAVVKNNTTYQPNYCSPKP

SEQ ID NO: 178728 - protein, 379 aa, unidentified
MEIITQNEKILYIGIDVHKDTYSLCSFDFHKNELSDEMTIKATTKAVIKYLEAIKKKHREEILFACGYEAGPTGYGLCRGLQKAGYGCVVMAPTTMSNPDGKKRVKTDRIDARAIARILAYKSYSQVHLPSEEMEALKEYTRARDAKKRMFKKAKQELLSFLLRNGKSYPESGNYWTEKFFKWVKTVQFSEKWMQEAFNEYLAEVYSLKAKIELMDMKIREIAELEIIKDKVDKLVCFSGIDVTTAVETAVEIHDFTRFATAAQFVSYLGLCPGEDSSGKTKNMLPLTKAGNKRVRALFCESAKAIKRTNPYGQKSKRILERQKNASPEIVAYADKATKRIRTKMKHLEERGKNYNVSSAAGARELACFVWGMMNGKIA

SEQ ID NO: 178729 - protein, 418 aa, unidentified
MQVETDESEIIERVAALDVGKAEVVCCVRVPGPDGRRMQEVRTVTTMTAALLALGDWLAGLGVTRVVMEATGDYWRAPFYLLEDRFETWLVNAKDVKHLPGRPKTDRLDAVWLCKVAERGMLRPSFVPPPTIRQLRDLTRYRVDLLAARTAEKQRVEKLLEDALIKLSVVVSDSFGVSGRAIMAALIAGERDPGVLAGLARGSLRAKTARLTEALTGRFTEHHAFLLTQMLHRIDAISADIATVQNRIDAQIAPFASAVARLDEIPGVGLTAAQTIIAEVGLDMARFPTPAHLASWARFAPGVSESAGRKKGHAGTGHGNRYLARVLGEAAVGASRTNTFLGERYRRIARRRGKQRAIVAVGRSILMIVWALLSDQDAHFVDLGPQYYAARTNPERRVRNHVRELQALGYTVTLNPAA

SEQ ID NO: 178730 - protein, 417 aa, unidentified
MYYVGLDAHAKSYNGDILDDNGKLFKRFEIRGTRENLLAELKRIPGPFRVCYEASCGYGVLHEALSPLAQSVQVAHPGHLRLIFRSKRKNNRLDAARLAKLLYLGEVPAVHVPPKPVRQWRQVIEFRQRLLGERVRVKNRIRAFLRGEGIDPPKSLWSRKGIVWLKALELEECCALQRDLLEDQLREQNQRIERVESCLARPAEGHPGIALLRTIPGVGPRTAEALIAYIDDVKRFGSVKQVGCYFGMVPCQDASGDQNRLGHITRDGPATVRKLICEAAWTGIRRSPTIKAYYQRVQRGDPERKKIALVATAHYLLRVAAALLRSGECWREAGDAQPRQPGGSAPQTPRNLSLLGPPAEAQEAAPPSNAACCRMAVAAALGSDSSVALSSAATQVSIAPEKARRPGVSGGIEGELS

SEQ ID NO: 178731 - protein, 399 aa, unidentified
MMSRIWAGIDSGKGHHHGLAVDTEGKTLLSRRVANDEPELLKLIGDVLDLADGRQVTWAVDMTGREPALLLALLVNHGQEVLYMPGRLVNRAADGYRGEGKTDARDAYVIADQARMRRDLRPIRPGDEAAIELKLLTGRRADLVEDRTRVVNRLRGTLLSMFPALERALDVTNTGPLKLLTGYQTPAAIRRAGTTRLTKWLANRKIRNARALAEAAVEAAERQHTAVPGEKTIAKLVHTLAGEVMALNEQIAELDKLIKGRFREHELAEIVLSVPGIGTVLGAEFLAAVGGSLDEFDSPDALAAFAGVAPRPRDSGKVSGNLHRPLVYHRRLQRVFYTSALVSVRYDPNSRKFYDRKRAEGKKHVQAVLALARRRVNVLWALIRDRRCYEVTPPAATTA

SEQ ID NO: 178732 - protein, 456 aa, unidentified
MNNYYLGVDVSKGYADFVMLDDKKQPIEANFQLDDTFDGHSRLYEILCTFCEDHPECMIYAGVESTGGYENNWFNALAKFQGTLNLRTARLNPLGVNANSKAALKRNVTDKISAQNVAEYMIAHPEKVSYQHHDQLASLRKQWGFINMLTKQSTQLFNQLEPLLYTANPEVLTYCKNGMPGWVLKLLMRYPTASDLSKAKVVSVARIPYISSARAQELVTVAKRSVASATDKITAQLIIETVKQIIHLKKIITSQIDLMAKQCSVPEVDLLKSFIGIKDYSAIGLILEIQTAERFPSVKKLASFFGLHPVYKISGDGVGRFRMSKKGRKEPRKILFMVTLTAIRSNPLIRGIYLEHTQKGMEKMAAIGLCMHKTLRIIYGMLKHNMAFDPEIDWKNREKSYQFKRKVHQDKNRRYQDFDAKAPISRRQNSKREEQKQSHSDNNTNNGIITSAPLSP

SEQ ID NO: 178733 - protein, 326 aa, unidentified
MLHSLMGFTNQADQTRNDRFQYIPNGMDPSHFYPASQWAKMGIELTIDKVGGSEMKIKTLGIDLAKSVFHLYGVDAHGKAHMKKRLSRKKLLEFMVNLPPCLVGMEACGGAHYWARTFREQGHEVKLLPPQYVKPYVKTNKNDYNDAEAICEAMSRPNMRFVGIKSVDQQDIQGLHRIRSGFMQARTRVVNQARGLLAEYGIVVGRQVGRLRRRLPEKLEDSENGLSAFGRELFAGLYLELVHLDERIQVCDKRIDRVLKENEACQRLAKVEGIGPITATALVASVGDPGVFRKGRQMSAWLGLVPRQHSTGGKTVLLGISKRGDR

SEQ ID NO: 178734 - protein, 316 aa, unidentified
MKTQVFVGLDVSKQHLDVAMRPQGRHFVTPNNDRGIKQLVKRLGALKPQLIVLEASGGYEFLVTAALAEAQLPVALVNPQAVRKFAGAAGKLAKTDKIDAQVLAHFAEALRPEPRPWPDQAHQALKATLQRRQQVVKMIGQEENRLEKTFIPAVRRDIQVHLTWLRRRLEQLNRDLDDQIRQSPLWRDRDRLLQSVPGIGSVVSRAVIAQMPEMGTLPGKKAVALAGVAPYNRDSGRFRGKRMIRGGRSYLRRMLYMAAVVASRFNPVIRAFYQRLLAAGKPKKLALTACMRKLVLILNAMVKNNQPWNQFVTQVP

SEQ ID NO: 178735 - protein, 391 aa, unidentified
MIYVGIDVAKDKHDCFITNSDGEVLFKPFTITNNLDGFNELYQKIESVTEDATKVKVGLEATGHYSYNLLGYLIDKGLAAYVINPLHTNLYRKSLSLRQTKTDKVDARTIASMLMSDVNLKSYSDISYHNEELKSLTRYRFDKVKERAKLKTSVSRLVCILFPELEKLVPTLHMASVYSMLSEFPGAKHVASAHLTRLTNLLSEASKGRYSKDTAITFREAARASIGSNMPAKSLELKHTIKLIQELDSEIDEIENEIKVIMDEINSPILSIPGINYRMGAMIIAEIGDFSRFDSPDKILAYAGFSPSTYQSGQLDGAYAHMEKRGSRYLRYALYNAAKYVCHWDPTFAGYLAKKRAEGKHYNVAISHAVKKLVRVIYHLEKTKQQYIKVA

SEQ ID NO: 178736 - protein, 396 aa, unidentified
MDAAVYLGVDIGKSRHYALAVDGTGKPIYQTGVSNDEPALRKLVDWGKQHDATVVVDQPGGAAALLLKLCWAANVRIGYLHGLAMARARDFYAGASKTDAKDALVLADVGRAHPQRVVWLQPNSEAVAHLELLCGYDADLRADANRITNRLRALLMTHWPALERALGDRLDSRGVLAVVEHYPSGPAIKEVGVEQLTAAFKAQRVRRAAAFAEQLYQAATAQTVTITGSATAARLIGELAVQLAAVLRRRDELDKEIEEGFFVLPEAVILRSLPGIGARLGARIAVEIGSISRFRTPGQLAAYAGLGPTPWQSGTSITANLPSRFGNHRLKNALFLAAFASLRHAPSRTYYERKRAEGKRHNQALLCLARRRVDVLHAMLSHHEPYRTPAPIATAA

SEQ ID NO: 178737 - protein, 424 aa, unidentified
MMPSENRVLIAIELSVSSWFVGVRLPGSEKSRLHRVEGGDTTALLALISDLRSCAETKLRQAVDVACCFEAGRDGFWLHRLLTAHGVIAYVLEPTSILVNRRARRAKTDRLDAEGMLRVLAAWLGGDRQVCSIVSVPTPEDEDAKRPHREREHLVQERQRLENRMEALLFTQGIRGRPSLRSWERDIVKLRTGDGRELPCLMQAELNRLRRRLVLILELIHEMEAERAKALAAKVDDAMTRKIADLQRIRGIGANFSSVLVREVLYRSFANRRQLASYVGIAPMPYQNGGMDRDRSISRAGNPRARTMLHPARLAVAALSAWQRAFQLVPWPRRNAARAHAPDRHRCNGKKAFDRALALCRDRRVARWRRDQSDGRSDGLTNKIYRRRGHHPGDDTGTATVFFFGSFQLPRFRWVAFTRATPRV

SEQ ID NO: 178738 - protein, 366 aa, unidentified
MQEISTMQASGSDNFKGRQVTIGLDLGDRSSNYCVLNATGDILLEDKLPTTSQAMKQLFGRMLRSRIAMETGTHSPWVSRLLTELGHEVIVAHAQKVRLIVKSRKKDDRIDARTLARLARIDPQLLSPVRHRSAEAQIHLTEIRARAELVRARTALVNAARGSVKSYGERLRKCGTPQVGLDLAMGLSAELRAALEPLLREIESLNEHIKEYDRRIEKMAKDTYPEVELLKQVKGVGDLIALGYFLTIEDPHRFKKSRDVGCFVGLQPGRRNSGESEPQMHITKEGDRYLRTLLVQGAHYILGPFGEDCDLQRWGRKLAERGGKKAKRRAVVAVARKLAVLLHRLWVSGEVYEPLRNSQKTVSAAA

SEQ ID NO: 178739 - protein, 378 aa, unidentified
MSENTRFVGLDVHAKSIAVAVAELDGTERFVGKIPNKIESIRKLVKKLEPKEALRVCYEAGPCGYVLYWQLTAMGVACEVIAPTLIPVKAGDRVKTDRKDALKLARCYRSGDLTAVWVPDAEHEALRDVVRACEAAKKDQRKARHRLQKFLLRHGHQRPIGVNSWTAKHGAWLNSLTFEICALQSTFTDYRHEVEHAGDRIIRLKAAIDEAVEQAPAELRAVIAGLQALRGIAKTAAVGIVVEVGKFSRFPNPRQLMGYSGAVPSEHSSGDDPKRGGITKTGNSHLRRLLVESAWSYRHQPGMYSALRKRQKGLAPEVSEISWRAQVRLSGRYRKLCARGKPSQKVITAVARELLGFIWEIAAHIEQQAEQAPEALAA

SEQ ID NO: 178740 - protein, 354 aa, unidentified
MSQNPNIAIAVVGIDIGKNSFHIVGLDQRGAIVLRQKWSRGQVEARFANMPPCLIGMEACVGAHHLSRRLKALGHDARLMPAKYVRPYSKGQKNDFRDAEAIAEAVQRPTMKFVATKTADQLDLQALHRVRERLVSQRTGIINQIRAFLLERGVAVRQGLRFLRAELPRILATPPDVLSPRMVRVIEGLAGDWRRLDERIESLSGEIAAVARQDAGCERLMSVPGIGPIISSAMVAAIGTGDGFSKGRDFAAWLGLVPKQISTGDRTILGKISKRGNRYLRVLFVQAAWVVLIKPKTWERHGLRPWIEAAKKRLHRNVLAIALANKLARIAWSVLARGRAFEVRKVDEAVAQPA

SEQ ID NO: 178741 - protein, 426 aa, unidentified
MEKVNSVMDNRSEEPQFAAFVGIDWADQEHVWCLQACDSEKREMGRVRNRSEEMEAWIGQLCQRFRNQPIAVAIEKCRGTLILLLSRYEQLHLYPIAPQAAANFRKALHPSGATDDGRDAAALLEMVRQHRNHWQRWSPDTEQTRLIQNLVEERRRLVDQRTQLLNRLTAKLKIYFPQMLEWFDRLDTKLVAALLQRWPTLPQLQKAGTTRLRSFFRKHHCRQVELLERRLQGIRQAVPALEDQAVLQAQVPTVQLLTRLLEILNEGIEDLQRRIEQAVTVHQDFPIFDSFPGAGAVLAPRLLAAFGSQRERYRTAAELQNLSGIAPVREQSGRTACIHFRRGCPKFLRQTFHEWAGHSIAFSSWARAYYELQRARGKDHHAAVRALAFKWIRIVFRCWQDRVLYDEQRYAASLVKRNSPLSPLSL

SEQ ID NO: 178742 - protein, 374 aa, unidentified
MKHHPKHERASKKEPVSPSLLERIQPDAAGIDCGQNSHFVAVPPDRDPQPVHEFRTFTAELERLAEWLAHCRIKTVAMESTGVYWIPLYEILEQRGFAVVLINARDVHNVPGRKSDVKDCEWLRELHSVGLLRASFRPAAAIVPLRAFLRQRQTLVEEAATRIQRMQKALTEMNLKLHTVLTDITGHTGLKIVRSIVAGERDPERLAAYRDPRCHASHGEIVAALTGNYRAEHLFALKQNLAAYEFLLQQIAECDREIEALLTQLADQQPPPAALLPQARRNQVSKQAPPFDIRHPLHRLTGGADLSQIDSIGPYAALQLVAEIGPDMHRWKSAKHFTSWLSLAPNNKISGGRLLGSLTPPSAIAPRPFCAAAL

SEQ ID NO: 178743 - protein, 384 aa, unidentified
MKNLKSNVACAGMDVHYKFSNVTFRDSDGRVVARQRLDHPDRQGLAGRLRGWPQGLPVVLEASFGWGWLSDLLSEAGLEPHLSNCYKLEQMRKARGGVKTNKKDADMVSLLPFETTDWWEVWRAPLEVRNRREQMRFRGDLVALQTEVKNRIHAVFHRHGIFHEFSDLFGGKGRRFLTTLCLEGSPYLSPEALQALRGQVRLLDHLRRQLAEVARVLRRQLVKTPLIRRLDHIDGFGLILSHVLTAEIGQIERFRNHKALASYSLLAPRSNDTGQEDPSQSPKGRHLGLRGNRTLKWAFLEAARGAVRSGGRWRALFDRVTAGGTKDRNRGYIKVARELVKVVYAVWAKGVDYQATPPARPGRQRNKNTSRSGTGQLCHPMVHA

SEQ ID NO: 178744 - protein, 385 aa, unidentified
MTIQIQAPRFIPREYDVFGGLDVDKKSMSVVFTDHAGSQRALRMAHQVTPLVNYVRKHFAGQRVAFAYEAGPTGFGLHDELVRRAYTCVVVAPSKVPRAPGERVKTNRLDSRKLAESLRGGQLHSIHVPSAVYRNLRHLVQMRDTHVRQLTSSKLRIKSLLLYEGIAFPDPHEKWTARAMRELQTLPCSETVRFKLDDLLDTLHFHFQAAARATKQIRQYCLDDPELQQSIDLLLSLPGIGWIVGSHLVARLGNPREIKNGRQIAGFLGIVSSEHSTGDKQNRGEITRSGDSRLRNKLIQSAWTAIKRDPELRAFYRRIYQRHPKKVAARKAIVAVARKLTNRIYVVLKEQRPYVIRPDSSIAPLTVAETVGPRERLDAAQNDQS

SEQ ID NO: 178745 - protein, 441 aa, unidentified
MTDTVDKILPGFAGIDIGKEANFVGVAEEVRWFSTMTFGIIELAAFLTEHKVKHVCMEATGVYWVPLYDHLDNAGFDVTLINGGHARNLPGRKTDVKDCQWHGMLHSHGLLKGSFIPDDMIRQLRGAVRDRGSLLETKTQCVLQMQKALDLMNLRPHNVLSQLEIVSGMKMIKAIVEGERDAKRLLALCHVSIRNKKREQMLRSLEGNWSEQHLFSLKLAYDRYQFVLGQLSQCDSQIEKLLIIATQDMEKKESKAVSQTSHNTPKIVGLENHLMTFCGGIDVPSLTGIGANLALKIIAETGVELNRWGTVKRFTAWATLAPGNHQSGKKRRRISNRQRARAGQLFREAAMAISHSKDTALGAFYHRTKARRGAAVAIKATARKLAVAYYNLFTKGSQYVEQGRIEYEKQVLHNKMKYFQRKAKSMGFDLVNTKTGEILAV

SEQ ID NO: 178746 - protein, 452 aa, unidentified
MVKTKRKRKALRVCHPDAAGIDIGANEHWVAVSADCDDSPVRPFGTFTSDLQRLADWLATCGVRTVAMESTGVYWIPLYELLEERGFEVLLVNAAHARNVPGRKSDVLDCQWLQELHTFGLLRASFRPEAKIAELRTYTRHRQTLIEEAARQIQRMQKSLDQMNVQVHHVLADLTGKTGMAIVRDIVSGNHEPERLAQHRDPRCKVSFAVIVEALRGHYKPEHLFTLQQALSLFDTYREHLSTCDARIEGLLSTLAEQAPQLANPPKRSKSYPVGNQIAIDVRSPLQRLLNGADPLTIVGIGPLTALNLLSETGTDMTRWKTEKHFTSWLNFSPGTRITGGKSVSGRRPPSANRAALVLRQAASCIGRTQTALGAFYRRIAARRGKPVAVVATARKLACAYYRLIRYGAEYVERGADAAERDYQNRRITHLHRLAKTLGFSLQPIQPEPGVT

SEQ ID NO: 178747 - protein, 455 aa, unidentified
MGRKKLSMEIINSHAAGIDVGSRSHDVAVGQFTDDVKEFGVYAQDLTAIGKWMKSKEITTVAMKSTGDYWQNLFAELVEQGFEVVLVNGKFTKHAKGKKTDVKDCRWIQLHTLGLLSGSFLPDETTEKLRTYCRQRGNWVDQAASTAHKMQKFLKFLNFRLDVVVKDVCGLTGLAIIGDICKGNLDPMQLAKHRYYNCKKSEEEIAKALHGNNREDFLFGLKQEYEIYLFLQKKINECDQQMEKVIVTALKKFPAKRALKTTEKPHKRINKNAPKIKNLNQVAYQYFEGVDLLAIEGLSHATVLAIMGEIGPEGFKKFESAKHFTSWLRLAPNNKISGGKILSHRIPKGSNRLKIALRQAANSIGNLKDTHLSNFFKRVAFRKGRTAAVSATARKLAVIVWNMMVKKVPYLPPTEYLFLDQKRKLKLVTHLKKNIAKLELKPEDLGFSPTLVSTN

SEQ ID NO: 178748 - protein, 378 aa, unidentified
MPSETTVYVAVELSVSSWLVAVRSAGAEKSRLHRIQGGDTTTLLALITELRSRASTKLGRAVDVACCFEAGRDGFWLHRLLTAHGIAAYVLEPTSILVNRRARRAKTDRLDAEGMLRVLATWLAGDRQVCSMVRVPTPEEEDAKRPHREREHLVQERLRIENRIEALLFTQGIRKRPSLRSWERDVAELRTGDGRELPSLLRVELDRLRRRLVLALELIREVEAERAEALAVTADDEMTQKIAALQRIRGIGPNFAAVLVREVLYRSFANRRQLASYVGIAPMPYQSGGMDRDRSISRAGNPRARKTLIQLAWLWLRYQPGSALAAWFRERVGTLQGRTRRIAIVAMARKLLIALWRYVETGVMPDGVEIRAKADVTA

SEQ ID NO: 178749 - protein, 344 aa, unidentified
MGEVSTIGLDIAKSVFQVHGVDVDGAVVIRKRVSRAKVLEFFSILPSCLVGIEACPSAHHWSRELQALGHTVRLMPPSYVKAYLKRSKNDANDAAAICEAVTRPSMRFVPTKSEQQQSGLMLHRSRQLLVRQRTMLSNAIRGHLAELGIISAKGRNGTTELFKIIADEKDGRIPEAARFSLEILARQHAAITAEIGAIEKRIHAWHRSSEASRRLEQIPGVGPIVATALVSEVGDWKEFSSGRSLAAWIGLVPKQHSTGGKERLGRISKQGNRYLRWLLVAGAMAVIRYARQHGTRRLWLAHIMARRPIKVAAVALANKIARMAWAMMVRAEPFKEPRLLPAAA

SEQ ID NO: 178750 - protein, 408 aa, unidentified
MQRYYLGVDWADKSHQLYAADESGKKIKELEVQQTAEGLAEFGRWLDERRSAGTELWAAIEKPQGRIVDFLLDHGVVVYPVNPKALDRARDRFRMSQSKSDGFDAYVLAEFLRTDHTHLRALEPDSAQGQELKMLTRDHQRLLRQKTRLLNQMTITLKEYYPRALEVFDDLETQIARDFLHAYPTPQGLSRMTRPQWKRFAKGEHHLSEARWQELWEKINKPQITIVDHVVRAKAKLLLALVAQLEVGVKAVHDYSQEVERFFAALPAAKIARTLPGAKSGTTMPTLWAELGDAKNRWNSFRHLQAEAGTVPVTKASGKSRMVQFRFACKKRLRTAMSWFAFNSLMRCEWANKYYRDQRAKGHSKHQALRALGAKWLKIIFVMWRDHKPYDENYHLANIARHAMRQAA

SEQ ID NO: 178751 - protein, 315 aa, unidentified
MTEQQEVFVGIDVSKGSLDFAMSHESQVKQVGNDRKGIARLVAEMRRNPPSLIVVEATGGYEQAVVDGLFHAGLPVARVSPQRVRQYARARGLLAKTDRIDAGNLAEYGEHIRPRLYVAKSQEEEHLSALLTRRKQVGEMLQAEKNRRRTACEAVKSSMQTIIVCLGEEMKRLDKEVSSYLDEHAELKEREQLLRSARSIGPVTAATMLAELPELGKLDRKQIAALVGVAPMNQDSGRRRGYRKTKGGRPDVRRTLYMATLTGIRYNPVIKANYERLVGRGKENKVAITACMRKFLIILNAMMRDQKSFQSPVSA

SEQ ID NO: 178752 - protein, 401 aa, unidentified
MATMQANVQRVKRFRELKATLRTNRARLLVGLDIAQAEHVAHLRHAHTRIVVPTLTIPNSTRGFAQLWARIEQAQRATGCREVVCGLEPTGTYHQAVATFLETRGADVVLLSSSVAYWNRRTQDGTWDKNDRKDAANCADLLEQGKVLFYSQPEGPLAELRRLVKCLRRARAELAACKARWRTTLRPALGPMGEPLPNRLRAELPVLLQTWEAPAPGRPAGAKGRLPLGLATACADLAAQVTAVQARIAVIEQALTPVAERLPAYALLRTIPGVGPTVGAILLAEIGDIGWFTQFSQLRKLAGLDIIRVQTGKFAGQWRISKCGRGLLRWALYQAAKGLARTAGGRARLAALQAKRAGDRYAGLKAIVELAAKVLRIVWGVWRSERPYDPTRAGGLQRQLR

SEQ ID NO: 178753 - protein, 319 aa, unidentified
MSEPAVFVGIDVAKATLDVAVRPSGARWVSANDEAGIQALLGQVRALGPTLVVLEATGGYEHAVAATLATAGVPVVIANPRQIRAFARATGQLAKTDAIDAQILALFAERVRPTPRSLPDDATQALEALLTRRRQLLEMLVAEKNRLGVARPGVRRDIGQHIRWLERRVTDLDRELHAGVRASPVWRAQDDLLQSVPGVGPVLSCTLLAALPELGTLGRKQIAALVGVAPLARDSGTHRGRRTSWGGRAPVRTVLYMATLTATQWNPVLRQCYQRLRAAGKPHKVALTACMRRLLLILNAIVRTQTPWRATPIVARATP

SEQ ID NO: 178754 - protein, 346 aa, unidentified
MICLGVDQSKHFSQYTIGDEKGKIFKRIKIANTSEEIQQLMESLPEGPKRAALEASRHWGWLHDELEKHVDEVLLGNPLEMKAIAHAKIKTDAIDSETIYHLLRADLLPTCFVPPKEIREVKDQIRFRRFLIMLRTMIKCQIHTLVDRNHVLQPRQRPYQDLFSKKCLPALKKVELPEREKKILDELLKLYEQISEQIETGNEWIKELHEQSPESRLIDTIPGLGEFFSVLVCYEIGDIQRFSEAKKLCAYAGLVPSIYASGRKMFYGRITKRGNSHLRWAAVEAVTPAIQSNAFLRGEYEKIKQRKGVNIARVAIARKLLEWVYRVWKTGKTFQELVSQITLVAA

SEQ ID NO: 178755 - protein, 400 aa, unidentified
MRAVFGIDVSKVSSEVAILVNGEKVHGYTMPNDAIGFARLLGDLKTVHKPEIIFEATGVYSRRLQAFLEDNGYAYTRLNPLEAKKQLDSLRVRKTDQIDAEKLAQSQFVLNRKPTYVQEEVYQELRDLSRFYQNLTEDIVRAKNRLHKVLQVTFPELETILSTPTGEQYGNLVVAFPCKDFVLDLSKDELSESIRQSTSKRISDKRVAYLAEKLIALANQSYCAVKKTSPMLEEVRYYAQELLRLSERRKAVLDQMVELAQPLPEYDILLSIPGIAETTATSIIGELGDIRRFQSANQINAFIGIDLRHYESGNFLAKEHITKRGNPYARKILFKCIHNIASASHTNPCHIADFYEKRKRQSQTTSTKPHTIASIHRLIRTMYYLIMHNKLYDYASTQNR

SEQ ID NO: 178756 - protein, 341 aa, unidentified
MTEVSIIGLDLAKNVFQAHGANAAGAPIFRKKLRREQVLAFFAAQPPCLVAMEACPGAHHWGREIGKLGHTVKLIAPAYVKPFVKRQKNDAADAEAICEAAQRPTMRFVAVKSEAKQASAVIFRTRDVLVGQRTQLINAIRGHLAEYGLIAPQGPAHIERLIAQIEDPASDIPPAARASLAVLVCALRHLQEQTATLDAEIATRAKADDTARRLMSVPGIGPLIATAIEALAPPVETFRSGRDFAAWVGLTPVQRSAGGKERLGRTSRMGERTLRRLLIIAASAVVRWAKRKGVPADSWLGQMLARKPPMLVIVAVANKNARIAWALLTKGGIYRAPAVTA

SEQ ID NO: 178757 - protein, 411 aa, unidentified
MGRVIGMDIHRTFAEVVVWEDGRLRPSGRVDMTRSGLEGFGRTLTKTDEVVVEATGNAMAVVRVLGPYVARVIVANPLQVKAIAHAQVKTDKIDAGVLASLWAAGFLPEVWVPDADTERLRRLVARRNQVVRHRTRVKNETHAILQAHLVPPCPHADLFGRLGRTWLAQQVLPDDERAAIERHLRELDRLGEDLGVLDKDIAQVAIDDPAVKRLLTITGVNLIVAAGLVAAIGDVRRFDNSEKFVSYVGLNPRVRQSGLGLAQHGRISKHGRSHARAMLVEAAWAASKAPGPLRAFFLRIRARRGHQVAAVAVARKLAVLCWHLLTKETDYLWQRPALVANKVRAMELQAGQPAKKGSKRGPAYAYNVKELRDREMEAARQAEHAYEQFVGHWQPRGPGKRRTGAANEERR

SEQ ID NO: 178758 - protein, 353 aa, unidentified
MDIKTIGIDIGKNKFHVHGVNEKGKILVRTAMTRQKLYEFMANLKPCLVGMEACGGAHHLARTLKEYGHDARLMAIQHVKPYVKEYKNDFNDAAGICEAVTRPHMKFVGIKTNAQQNIMAIHNDRARLVEERTALANEIRGILLEEGLPIAQGIHHLVPRITELLDPASEEISHALKRLLASMVDDFKHKGNLIQERETLLKELTKNNSQAQNLMTIPGIGFITATAIVGKVGNVNVFENGRQLAAWLGLVPKQYSTGGKVQLGRISKRGDRTLRALLVHGARSVLRAIKLKKEEDLSPPLKWLKSVAERRGHNKGIVAFANKMARVIWAVLANDTVYQADYKRSCRQQQLAA

SEQ ID NO: 178759 - protein, 388 aa, unidentified
MPAEEMSVAYLGIDVGKSSHSACALDVGGRVAFRAELANRPDDIDRLLERAGSGALVVVDQKRNIGALVLARAHVHGNPCAYLPGYAEKQARGMFPGIAKTDAIDAEVIARTALGVPRALRPAPEEPEGTASLRILSSQREFASSARTRAKNRLRATLLEADPALEGAVDPSSRWQVSMLAKFGGAAGCSAAGWRRFSSAARRAGSPVAGASRLWEELLASSRSGRRLPAGEDVAVRILAREIASLDADIEELDSLVADSLAGDEVYECLLTVPGIGPKTAAALVTSIDISAFRGHDELASYCGVAPRDRRSGSSIRSTSPQHGGNRQLKNLLIFSCNSLIGTDNRFGRYYEECRARGMRHSKALKAVARKRLKVIYAIMRDAVPYAA

SEQ ID NO: 178760 - protein, 335 aa, unidentified
MTYLALDVHKTHSTVAYLDPSQQVQIRKIYTRRDDLAQVLAKLPRPWIVALEATRQSPAVCAWLRELDADIHLVDPQKLSALVALRTAKTDAKDAELMLDALLHDYLPEAYLASPEVAERRDLIRCHTAVRRVSTYLRNLLRSLLARQGEELVATDLCGQGAQALLDELEETLAAVPALVCRVYRRVLAEVEQALRVVDAQVKAKVAIDPLAQRLLAQPGKGPLTTLGMLAEIGDPARFPSYKELISYAGLAPRVYQSGDSCATGHLPQRCSRRLRHWAVLAAQCAARSRKPSPARHAYQRVCIRHGPNAAKIAAAREMLRDVYFAAQRQRAEAL

SEQ ID NO: 178761 - protein, 350 aa, unidentified
MNSSSKKPSYAGKDVFIGIDVHKRTYCVAVVVEGTLVKKWQTMAVPEQLARQLQGYFPAANLYSAYEAGFSGFVLHRELESAGMKNVVVNAAGIETSVHNRVKTDKQDALKLASLLEAGRLRGIRVPSKKQEAQRLLTRTRQQLIEERTAVKNKIRMKCHQMGLIAADEQRQMSHKLVQELLEKSVLQELNLVIEAYWQVWKTLDAQLKKLEEELKHQAQSDPNEEIYRSAPGIGPLGARILSNELGDMSQFNNERQLFSYTGLTPCEQSSGDNIRRGHITRQGNSRVRWVLCEAAWRAIRTDPSLKECFERLYPRTGKKKAIVAIARKLIGHIRSALRQGREYRMMPVA

SEQ ID NO: 178762 - protein, 411 aa, unidentified
MHNRQNYLYVGVDLHKEHHTAVMINCWQEKLGEIQFDNKPSAFSKFLLEVETYVCDGIIVVFGLEDVGGYGRALAKYLVDHEQVVKEVNPALSFLERKSHVTTQKSDSWDAECVARILVNKFNQLPDAKPNDLFWSIQQLVSRRNALVKAQSALKNQLHIQLNHHYPSYKKFFSELDGKTALAFWQQYPSPSCLEGANIKQLTAFLLDVSNNTCSVKKASDILKLVKEDGQTMKEYQEMRNFLVRSIVREIEFKKKEMKYIERELKQLVNLLDYQLETMPGIELVTASALIAEIGDVRRFPNANKLARFAGIAPVYFGSGGKGKKHKSKQGNRALHALFYNLAVQQVQVAKGSKMPRNPVFHAYYQKKLKEGKTKGQALVCIMRRLVNIVYGMMKYKTAYELPVVEEKEVV

SEQ ID NO: 178763 - protein, 317 aa, unidentified
MVRDRIGNILIEGEAATLYDELYAHLRQYLGPSIIGLEASTSYYALYQQFLEHGYCVKVANTLQIRQLIAKNDRLDARRLSDMLRLGTFPTSYIPGKEIQHLRGLVNIRHSLMEEKVRCNLRIQALLDRNGAVMPSCKAFSKKWKYALMQYMGSGDISAELRYEYDHYIFLEKKNEQVDQEMIGYTKKYWKNEFMLIQSITGFGQVLSCYIIANIYPIERFPSSKKLRRYAGVVPTFHESGNYTSRGRIPKNSSRKLLRWALIEAANAIAKTNTKLGKYYRKKKKQKKNAGIAKVAVASSLVDIIYKVLTTKKPYMG

SEQ ID NO: 178764 - protein, 343 aa, unidentified
MDQYVALDVSLQKTAVCVLNASGSVVIEAELPSEPAALTAFIQTHAPRAARVGLESGPTSPWLWHSLKASGRPVVCMDARHAHAALSVRPSKSDRNDARGLAEMVRMGWYREVQVKSLAAHERMALLGVRRQLVDMRVEIDGQIRGILKTFGMVVGSGNKGAFAQRARMLVQDHPVLSALVDKLIEVRAVAVAKVAALDKEIRRFVRDDPTLRRFMTVPGVGPVTALAFRSTIDEPDRFKRARDVGPYLGLTPRRYQSGETDRQGRISKCGDRFTRTCLYEAANVLLTKVQRWSPLKAWGTRLARRIGSKKARVAIARKIAVILQCIWTDGTEFWWTKEPATA

SEQ ID NO: 178765 - protein, 312 aa, unidentified
MYHMKEELVYVGVDIAKAYLDTAMGNEKRRFSNDALGHRQLINWIKQMPASVQVICEPSGGYERALVRALVGAQLKISLVPANRVRQFARAKGILAKTDRIDAKLLCAFGEAMQPGTISASQLEQQHLRELESQRRHLTHLLVMEQNRAARMSDLCVCKMNRRLITQIKKQIEQLDLLIKGHIDQSHELSAKAAKLTAISGVGARTAALLLAQLPELGELNRREIAALVGVAPFNRDSGRMRGKRAIYGGRKPVRHGLYMAALVAAHHNPILRNFYLRLRAAGKPAKLALTATMRKLLIVLNSALKPDLSYA

SEQ ID NO: 178766 - protein, 451 aa, unidentified
MPKVKIKSAKANTQLPTLNPHAAGIDIGATALQVAVPCDADTKPVRTFTTFTDDLLKLRDWLVKCGVRTVAMESTSVYWMPLFQILEAAGLEVCLVNARHAKNLPGRKTDVSDCQWLQYLHSVGLLRASFRPPEHICAVRALLRHRSNLIRYAGQQVQHLHKALTQMNVQIHNVLSDIVGVTGLLILDAIVVGERDPQQLARFKNGRVKASRDTLARSLKGNWQPEHLFALKQALTTWRHYQRQIAECEEEIQRVLSTLDAGVDLHQKPLPTPRPSLTHNPQSAFDVRAELYRVLGVDLTQVPAIQQGTAMLLFTELGPNFASKFPTAKCFASWLGLCPDNRITGGKIISVKTRDVKNRAAMALRLAAQSLWRSKDYLGDCFRRWKARMGTPKAITAMAHKLARIIWHLIKYKEAYDPKVWAIAEGKMKVKRLKRLEQSAATCGFKLVCAT

SEQ ID NO: 178767 - protein, 337 aa, unidentified
MMIVGCDFHPSFQQVAVLDTESGELQAHKLMHATGEAEQFYRRLIAPSLIGMESVGNSQWFVQLIEQLGHEIWIGDAAQIRASYMRKQKTDKRDAAHILKLLAEGRFPRIWVPDAEMRDQRQLLIHRHKLVQIRTRVKNELQHLVMNRGVQKKHKLWSVRGRAELEQLPLQHWAGRRREDLLCLLKMLDQQIEHMDQAVSVAAQQNDQVRLLMTQPGVGPVTALAFVLTIGDVKRFARSKQVASYLGLIPSESSSGGKQRMGAISKQGNRLLRVLLVEAANSAVRFDPEFRKEYAHRCHQKHRAIAKVAAARKLAVRLYWMLRTQTPYPKVVTSRAA

SEQ ID NO: 178768 - protein, 343 aa, unidentified
MKKRANFKGMNDRILYVGIDLHERESQLAVFDQGGALLDEKRLPTKELRNHLSSLPGEKRVAMESVGFVYPIYDELSSLKDCHITVANPNRLHLISRSSTKHDKADARALGDLLRTNYLPVAHMRDEETREKLVVIGERVRYGAKGGELKGSIKWLLKRRGIEVEKPFSDEGRKRLRALRLQEVDNRLDELALAESFIKRLDGQILDIASRDEKAKLLDTLPGLAPYTALYLACVLDDIDRFPDAKHACAYLGLVPWLDETADTTHLGHITKKGDKWLRRNLVQCARVAVRKDARLNGFYTRLSHKRGEKKALIAVARKLVSYAYWMIKRKQTYEELSPWVPT

SEQ ID NO: 178769 - protein, 421 aa, unidentified
MNKIKAKKTREVNKKVLIATIDGGKDKHYGYYRCPDGADCKAFGFWNNGRGFQEFWERISSAARTHGLEEIVVGFESTGPYMEPLAQFMRGKKGVRLVQVNPMHTKRLKELTGNSPLKTDQKDPKVIADIIELGHALTVVIPEGPAAELRRLTQARERTSDSRTRLYNQLQSLLVISFPEFLQVMTDVKTASAQHLLRHYPTPEDIVALGESALTALLRKVSRGKLKEDRARGLFEAANESVSVRDGRRSMLLEIELMLDTIARYGRFIEGLEIDMSRYLKQIPYSGVILSLKGIGTVTAAGLIGEVGDFTKFSTIGEVMKLAGLDLYEVSSGQHRGKLRISKRGRPLMRKLLYFAALSAVRKGGVLHEWYQRAVGRGMLRMKALVAVGRKLLGIIFALVRDHSVYLEDYAKQGPNLQEAA

SEQ ID NO: 178770 - protein, 356 aa, unidentified
MDNYTIGCDAHKHYSVFAVLDREGVLKSQKRVEHKTGEIQRYLEKYPMGTRVALESVGNWYWIADEIEAAGCIPLLTHAAKAKVMMGNINKTDKLDAKGLATLLRLNSLPYVWLPPGKTRDGRELPRTRMALTKIRTALKNRIHATLAKYNKKLEGASDIFIPKWREELLSTIDQLPTETRKCMRSELELLDHLSSQIQSLEVRIQDLVEDSDQIQLLKTLPGIGNILGIVIRQEIGTIERFPSAEQFASYCGVVPTVKSSGGKSRYGRMRKQSNQYLKWAFIEAANVVGLRHTSSNWKDRHVVRLYRRIRQRKGRRIAIGAVARHLAEATYWILRKQEPYREPVARSRKVTLQSG

SEQ ID NO: 178771 - protein, 341 aa, unidentified
MKLIRVGVDLAKNVFQVHGVGDHEKAVWRRKLTRASWLKVLLETAEPGCEIGMEWCGGAHHWARQLQAHGFKVRMIAPQFVKPYVKSNKNDANDAEAICEAMSRPHMRFVAVKTVEQQDIQAVHRVRAELTKQRTAKANQIRGLVAEYGLVAPKELEHLRRALPCWLEDMENGLSERFRRLLNGLWGDLQALDERMAELDREIAVIAQNDPVAKRLQQLRGVGPIIATALVAAVGNGEQFANGRQLSAAFGLTPRQHSSGGKERLLGISKRGDVYLRVLLIHGARSVLRTSKDKADRLSQWVTRLAARSHPNVAVVALANKTARMAWAMLKNGTDYQPGTS

SEQ ID NO: 178772 - protein, 323 aa, unidentified
MVVVGTDVHKRTHTFVPVDQVGRQVGQLTVEATVKGHAKALRWARAGFGDDLVWAIEDCLQLSARLERDLLSAGQSVVRVPPKIMPLTRASARTRGKSDPIDALAVARAFLREPALPVASHDEVSRELLVDRREILVAHRTATINSLLWWVHELDPERAPKPRSLDLGKHQDLLRDWLLTQSGVVAELALDELSDIVAFTARAKESERRIAAIVEVVAPVLLAMPGCAHLTAAKLVGESAGVSRFADEAKFARHAGVAPIPVWSGNTAGRVRMTRSGNRQLNAALHRIALTQIRLDASLGKTYYEKKKAEGMSTPEALRCLIG

SEQ ID NO: 178773 - protein, 323 aa, unidentified
MYVGLDVHKRVCHGTVMDEEGHVVKRERFSNDPDSLKSFMKDIGEAKVVMESGYCWQPIYDRLEEAGYDVRLAHPLKVKAIAEAKIKTDEIDSETLAHLLRADLLPESYVPPKEIRDLRELVKRRAFLVGMRTRLKNRIHAELAKRDIDPGSPLFTKRGRALLASLGVDAVSQLLPVMETLDRQIGEISAVLKRAAVEDGRARILTTIPGVGYYTALLLVAEIGDINRFPDAERLCSYAGLVPSVRRSGGSTVHGHITKEGSRWMRWALTEAVHSHLRYDTELTRFHKRLASKKPGQVATTASARKMLKAIYCMLKAGEPFQP

SEQ ID NO: 178774 - protein, 342 aa, unidentified
MSIVYVGLDLGSSSFHEVAISAAGSLLVNRSFSTSELNLRRAFSDLRGELHVHLEAGELAPWVSAVIAPLVERVVCSHPAANAWIAKDADKCDRIDAFKLAELLRLNRFKEVHYPQERARRDFKTLVQHYDELTAQQARLKTKLKARLRMQGVIVTGERLFSSAGRKPVLAQVRSPDVRTAINQLYEVLDQSVTAQGQARLLMLRAAQAFPEIKLFRTVPGVGPIGACRFSAYIHSPQRFSSKRKLWKYCRLSVSQRSSNGKPLRRPRLDRSGCGRLKDVSRKAFEVAVRARQDNSFKRAYQQALETTHDAVHARLTVQRKIVSTLRAIWLSHSPYCEPLSH

SEQ ID NO: 178775 - protein, 337 aa, unidentified
MIHVGVDLHQRFCYMTALDSTGRPLKAGPVANEPRALRRWLGGFPEPVSVAVEACSFWPAFKEAIEKEVEQIHLVHPQRVKAIAAAKLKNDRVDSATLAHLARCDLLPAAWMADRRTRERRQQVRLRISLGRHRAALKNQVHAILHQQGLRPVVSDVFGKKGRLWLKQIDLPPAARNALETYGALIDEVNGHIRKQGQRIGEMAEADPRAKWLATIPGIGVYSAMILLSEIGEIQRFPTAKALYSYAGLVPWVRESAGHKSRGGISRCGSPRLRWVMVEAAHTAARHSPSAKKYFDRMRRRKHPHVARVALARKLLGAVYALLRDGVCFDESIFAAV

SEQ ID NO: 178776 - protein, 447 aa, unidentified
MDTKRARTPKNQKAVLNKINYNVAGIDLSSEDMFIAIIEKNVRQFSTFTKGLEDAAGYLKTERIEKIVMEATGVYWIPVFEYFEKQGFNISLVNGAHAKNVPGRKTDVLDSEWLRELHTYGLLRASFVPDEKIRELRYYVRLRDDHISMGATHINLVQKNLDMMNIKLHKVIDSIMSKSGLLIVQAILDGERDPEQLWNLCKELIDCKKKEDVIFSLKGNYRAEYLFGIKQALEMWQHYQYLQKQCDAEIEKILHQMTFDKGEPQNQGPEKPIKKRNKPVIEDFHLLMTKLTLGKDTTSIAGINDYSALKIIAETGTNLDKFKNEKHFTSWLGLSPSAHQSNKKKRKKGRRHCNRAGMIFRQIAVNVGNGKHTALSSFYKRIRARAGKMIAIKATARKIAVYFYNLLTKGVQFVEEGIRKYEQRYTEQQEKYLQRKASEMGYMLVKA

SEQ ID NO: 178777 - protein, 351 aa, unidentified
MSNPTRWVGVDLHRRRSQIAIIDEHGELTLSRRIVNDPETFKELLGDPDATHVALEATYGWEWLADLLEEVGYDVHLAHPLRTRAIAAARVKTDAVDAPTLAHLLRAGLLPEAYIAPAELRDLRELLRHRAVLTRMRTAVKNRVHALLARHGIRHEHTDLFGKAGREFLAGLELPEGSRRRLDSLMSLIADFDREITATTREIDARAKTDDRVPVLCQIRGVGRYTAMLVIAEVGEVKRFPTARHLCAWAGLTPTVRSSDGKARLGHISHQGSPALRWALSEAAQKIPTGGGPLRAMFERIAKRRGRNIAKVAVARQILTLCYYGLRDGEIRCLTNQPDSNDHDDELAEAA

SEQ ID NO: 178778 - protein, 349 aa, unidentified
MRSFQPPADTRFYAGIDLHARNLFLVILDREEQTHLARNLPAAPEPFLRAVAPFREGLLVACECMHCWYWLADCCRDENIAFVLGHAWAMKAVHGAKTKCDRKDADAIARPLKGGNFPPAYAYPKERRGLRDLLRSRLRLVRQRAELYGHVHTARRQANLPPVSSDVNYKCKRSGCTADIVDPFVRRRVETHLTLLEPLDTAIRRLEAEIEDAARGVFPVELAVLQSTPGVGPVLSLTILLEIDTIARFAARQQFCSYARLCGAVQTSDNKRCGGGNAKAGNAWLKWAFSEAAVLSAQKDQRLGAYLARLASRLGKAKAYSALAHKLGRAFYHMLHTKEVFAVNRFVRH

SEQ ID NO: 178779 - protein, 426 aa, unidentified
MLKSQELKLATIEETQIIVGVDIAKKTNWAVMISPSNRLLQKAFSFNNTKEGFESLVEIIEKIKETLKVKNVIVGMEPTGHYWKPLANYLFNKNIKVVMVNSFHVKKAKELDDNSPTKNDKKDALTIARLIKDGRYNEVYIPEGVYADLRNISNTRFELIRKRNAVKNRIVAIMDEYFPEYGYVFKGIFCKTSIQILKNCPFPEDIKLKGIEELITLIKQEVKKLYSKKQIIELKNNAQVTVGVTRGITTAKIQLKMYVEDYELLERQIQETEEQLEKLLKQVPYAKQILEIPAIGTVNFAHFLGEIGDLTRFSHWQQVRKYAGYNLVENSSGEHKGKSKISKRGRHMLRSVLYQMALVMIAKNKEIKQLYRYLTKRKNNPLKKKQAVVAVIGKILNIMFALIKKDEKYNSEKVFNQIRQIELMAA

SEQ ID NO: 178780 - protein, 483 aa, unidentified
MVNHKGKSSPHSKRSARPKKAKKVVVSDDLRIRHPHGAGIDVHSREHWVAVPASCAPVRPKDHPVHLPAHVRQFGTCTADLELLADWLTECGITTVAMESTGVYWVPLFELLERRGFEVILVDPRQTRQVSGRPKTDILDCQWIQRLHSYGLLAPSFRPSDEVCVLRGYLRQRQMLIGNAARSIQHMQKALEQMNIKLTEAVSDVTGVTGMLILKAILRGERDPKRLAKYRHENCKRTEEQIARALQGNWREEHLFALKQAVKAYEFERRQLKECDAAIENYLKTMEDKSGGEVLEPKPTKGKKTAATAPQFDARNLLFQVSGKDLTLIEGIEQSSALTILSEIGFDMSKWATEKHFTSWLGLCPQHRGSAGKIKNRRLRGGANRAARALRMAAQGCHHAKNAMGAFYRRVQARAGGAKALVATARKIAERVYRLLKYGENYVRQAMNDYENAYRIKLTKGLAKKAAELGYKLVPNAEAASTV

SEQ ID NO: 178781 - protein, 378 aa, unidentified
MDRATNSTAPADRLFCAVELSKNSWLLGIQFPDRQKASIYPLKGGDSEGLMAKLVAACDRWTKVSGKKPSIILCYEAGYDAFWLARFLKARGIDCLVVDSASMQVNRRSRRAKTDRIDLGKLLRALIAWCGGERHVWSVVRIPSVDEEDLRRSHRERSRLITERTAHINRIKGLLFAQGIRGINVKARYKTLQIDKLVTGEGRPLPPRLAQEITREIERLGLVQQQIATIEHERDESPTTCKETEKKRVQLLLLKGIGPTGSAVMAREVYYRQFSNRRQVAGFLGLATSPYDSGQMERSQGISRAGSGPVRATMIQMAWLWIKHQPKSAIAQWFVQRTEGQNGRIKRIMIVAVARKLAIALWRYLEQGLVPQGATLTR

SEQ ID NO: 178782 - protein, 349 aa, unidentified
MSSTPSTADYRCFVGIDIAAASFTAIWTTDGRTQPKAVTFSQSASGFAAFQQQLQATRVAPAQTLIVLEATGSYWIALAVTLHEAGYAVAVLNPAQLHNYAQSLPRRGKTDALDAQVFVRFAAERKPVPWTPPPAVYHELRQRLVARDGLLSMRQQARNQRHALQQWPVIVASVVEQLNGVIADIDQRLASLDKEIAEVLRDGAWASSAALLSTIPGVGFVTTAWLLVSTLNFSLCATPEQASAYAGLVPLQRESGTSVRGRAQLGHGGNGRLRTALYLASLSATRYNPAIKVFYERLRAAGKPMKVARCAAARKLLHVAWAVVTKGQAFEARQVQPKSALPAVVALAA

SEQ ID NO: 178783 - protein, 346 aa, unidentified
MTIVDSSRPITGGVDTHLDNHVAAALDANGGVLGVEPFPTTPAGFVALHDWLCAFGPIARVGVEGTGAYGAGLSRYLQSRGLVVIEVDRTNRQVRRMFGKSDPVDAIEAARAALSGRASGIAKTADGNVEAIRALLIAQRSGRQARARCLNQIRHLGFTSPDLLREQFRDVPKAHLARQAAGLRPRLDGDPVLHATKLAMRTLGRRALAIDDDLHELERVLAELVVQTAPALLSCHGVGVDTAAILLVAAGDNPERVRNEAAWAHMCGVAPLPMSSGKHRRHRLSRAGNRQANHALWRIVFTCMGTDTRTRVYVERRTAEGLSKPEIMRVLKRYVARETYQLLPRS

SEQ ID NO: 178784 - protein, 398 aa, unidentified
MDLPVYYELETNNGNRDYRIQIGGHYMNYNTVYVGMDVHKESFTLCSCKYEDEKASHYQRTPASYKNVLRYLAFLRTIYGEDTRFVCGYEAGCLGYSLYHQLENFNVECVILAPTTMLEQRSKRRIKTDKRDAEIIARSLAQHNYSPVHIPTETDNQTKEFIRMRDDHKAELKKIKQQILSFCLRQGYQYDGSGNWTAKHVKWLRSLKTEGLYKEILDEYLLTYTILTDKLNRLDQRIEELASEEEYKEPVSKLTCFLGIKTHTALSVIVEVGDFQRFASARKFAGYLGLVPGQHSSGDDRNGLGITKAGNTHVRRLLVESAQSYTRGKIGYKSRVLRSRQAGNSPQIINYADRANERLRRRYYKMVLKDGKKYNIAKIAVARELACFIWGMMTDNIY

SEQ ID NO: 178785 - protein, 429 aa, unidentified
MTPLSSTTSPVVRVAIDVAKLTHQVLLELPTGKRRSLRVQNTRIEIERLVTLLRSLDCPCDVAFEPTGDYHRPLAYILGQAGCRLSLVSSLAVARTRDVLYNSWDKNDPKDAQVILHLMKTGTTQRYLDPLVTGHQDLQELANTYQQVSLRKVRLQHSIVTHHLPLYFPEAERYLHSSRAEWFTDLLLFTPCPAAVRRYTKAAFVAAALEQIAGRKVDKARWLADFYDTAATSLGLPVSESSEAMRMFRIVLEEYRALCVLRKRLEADVVTRLAHQPDFIRLQTLPGIGPILAMIILAEARDLRRFGCARQFLKYCGFDLCTEQSGQFRGTTHLSKRGNARLRYAFWMAGTVAIRMQQNGFRRKFEDYIRPDPQNADRRRKAYTAVAAKMARVAYAVITTGIDFRRFPEAAKPGGRIPSPAAVEAHATS

SEQ ID NO: 178786 - protein, 342 aa, unidentified
MQITTIGLDIAKNVYQVHGIDAAEKVVVRKQLRRSQVLGFFKALPPCLIGLEACATAHYWARELTKLGHQVRLMPAKDVKAYVKRNKNDAADAEAICEAVRRPTMRFVQIKSAEQQGRLMLHRTRDLLMRQRTQVINALRAHLAELGTTSAQGREGLKELLKIVASDADERLPADAHASLVVLAAELQAMQTLIGLIEKRIVTQHRENKASKRLLTIPGIGIIGATAIADTVTDPKAFRSGRDFAAWIGLVPRQDSTGGKQKLGPISKQGDRYLRRILVVGAHSVLRRAKLNPQKHPWLTQLLARRPFKVVAVALANKMARMAWALLAKGGAYRAPALAATA

SEQ ID NO: 178787 - protein, 424 aa, unidentified
MKVTFQTCCGVDVHKAFLVATIIKTTGGIEPSYQKRRFSTFNNSILEFKRWLLENECLDVCMESTGKYWIPVFHLLEDEINVTIANPKWVKAVKGNKDDTKDSKWIGDLFRLGLVRGSYIPCKKIRILREFTRYRYKLVSCRSSEKNRYQNALTVCNVALDSVVSDIFGKSSTSIIDYLLEQSGTSIDHEVIASKLLKRLKAKEDAVIESIEGYQMTDSQKYRMHLVRTHMDHITAAINDVDSEIESLITSDPDYQNAIELLCTIPGVKHDSAVTIISEIGIDMSQFCTSKRLCCWAGLTPGSNESGGKKKAVRITRAGVYLKPALVQCAHAAVKSDKSPYYKKKYESLVKRRGKKRAIIAIARMILTAVFQMLTTGEAWNPCDLYKIDMPEILLEKQKQKAIKQAQKLLIREGLLPPIETVAS

SEQ ID NO: 178788 - protein, 347 aa, unidentified
MKRYVGIDVAQEQCALCIVDDAGTILFEGSCATDPDEIVRTIAVEVDDVEKVVHESGPLSIWLTRELIKRQVPVVCIDARAAHKVLSARMNKSDKSDAVGLAQLARTGWYGTVHVKSEASDQLRLILSARERLIRIRMDIEGQVRGLLKAYGIRLGPVNAGYSRQSFRDQLAAAIKGVPSLEMIFASLIAVHETVCHETTAIDARVQRLAKDTPLARRLTSIPGVGPIVSLSFIATIDDVARFGKATDVGAYLGLTPRRYQSGETDWSGRISKRGDGAMRKLLYEAANILIQRVSRFSPLKAWAMRLVARRGMKKAIVATARKLAVIMTRIWRDGTTFAWTKEELPA

SEQ ID NO: 178789 - protein, 349 aa, unidentified
MIARRDAACFVGIDLHKDTLTACVVSAKDREVSFEKIACKSRERIRKFFSSLPRPSAVAIETVGFYRWLWTELDPVVDQLVLCDARGARALAGRRIKTDREDALNVALLLADGRLPLAWAPPENVQLLRNWTRHRNGLSRQHAKVLHHVKSIMHRVNRPGPTRLDASGLQRYLLAGVERFSADDVTMLWQHQRRLVEIEQDRAQSERRISELMRAPEFARLRTVLESLPGVALVVSATAIAEIGDFSRFPDSKAIGRYAGLAPRVYASGNSSRLGRISKTGSPDLRWALQQAAWTAIRCDAGFKKTWLRIAKTAGKKAAAVAIARKILVLMWTLVRKDDLYKAREPVAA

SEQ ID NO: 178790 - protein, 318 aa, unidentified
MTPTPARFVGIDVSKSTLDVHVRPDATAHQFANTDAGCRALIEWLTPLAPSLVVLEATGGYEGTVVAHLSLAGLLLGVVNPKRVRDFAKALGRLAKTDAIDAAVLAEFAEVVRPPVRPLPDANAKRSQAILARRGQLIGMRTAETNRLGGETDAFTRASIAAVLRTVGRLIGRVDRELDTAIRSCPAWAAKDDLLQSIPGIGPVVSRTLLAEMPELGTLTRGEVAALAGVAPMNRDSGQQRGKRRIAGGRAAVRSVLYLASQAARQGNKQWRAFSDRLKAAGKAPKVIRIALARKLLIVANAVLRSGQAFREIEPKIA

SEQ ID NO: 178791 - protein, 346 aa, unidentified
MMIIGCDFHPSWQQVSWLDTETGETGERKLVQAAGDAERFYRQVPAPALIGMEATGNCHWLVDLLAELGHELWVGDAAQIRASVVRQQKTDKRDAAHIRKLLVEGRFPRIWMPSREGRDVRQLLLHRYKLVIMRARVKNELQHLCLNQGVQRKHKLWTKTGQQMLRELPLQPWAGRRRDDLLKLMAMLDQQILPLDLAVKEEAQRDKMALLLQTQPGVGPITSLAYVLTMGDVSRFPRGKQVASYLGLIPREHSSGGRQKLGAITKQGNRMMRMLLVEAAQIAVRHDPEFRREYLHRCHSKPKAVAKVAAARKLAVRLYWMLRTQKPYPAVVHIESSPRVPLVGES

SEQ ID NO: 178792 - protein, 411 aa, unidentified
MVKENFIYVGIDLHKETHTAVMIDCYNQKLGEITFPNRPAAFPKLVTKVKKCNTDGKEVVYGLENAYGYGRALAVWLIDKGYLVKDVNTAISHRQAKHRGAMYRKSDSDDAKAIALATLNMLDKLPDACPNDAYWSLGQLVHRRDNIMKQRTRLVNQLHEQLCIAYPSYKQFFNDISRPTALYFWEHYPSRKYLKGKSVEDLRAELVPVSHNKCSTKTCEKILDAVASDKVKNNAYQDARDMVTLSIVSDLQHYDSQLTEVDKMLEQMYKMLGCTLTTIPGVNVITAVKILAEIGDIKRFSNANKLAQFAGIAPLHLSSSGKGKDVATKQGNRRLQATIYFLAIQMVQVSSKGTPRNPVVRAYYEKRKAEGKTSQQALICISRRLISIIYGMLKYGTEYRMPVVENAGEKL

SEQ ID NO: 178793 - protein, 350 aa, unidentified
MDIVGGLDVHRKQITFDYVQMDTGESPRGEIRPADRENLRSWLDEFTEMFPEQEAAFAVEATTGWRYVVEELRRAGCDAHLAEPADTRALQGRKKRAKTDRIDAKHLRDLLLIERLPESWVPPEHVQEIRTLMRMRHSMVEERSSYLQRIHAQLFHNGCPKQEKDLLSAEGRERLEKLDLPKAARKVVKVCLKMIEHINEEIYPIEAELRVYAHTQAGCKALMEHYGVGELTSVALLSELGDTRRFSSSRKAVRFAGLDVTVHSSDEKRTAGKLSRQGSPVLRWAAYEAAKGAYRKSSPDHEYYLHTRERIGTNRAALSIARKLIRRAHHTLRELGEEAMSEPLAVSSRA

SEQ ID NO: 178794 - protein, 402 aa, unidentified
MTYDYVIGMDVGKYFHHACVLDIDGTQVLSKRINQNEKSLRALFSTFSAHDHKVLVVVDQPNNIGRLTVAVAQDLGIDVRYLPGLAMRQLSRIHAGNAKTDIRDAYIIAHAAKNLPESLRSVDRVEEAFLQLKVLNGIDEDLARSYTRLINQIRSALVGCYPQFEQALRGQIIHRKWVLHLLARYGGPTKIKRLGKAKAAAFARRYKARNPEPVLDAIFAAISEQTVAIAGAHYAEMGVAMSAKDALLKLEHRKQIEQEVIELINDIPHTQILLSMPGIGPKTAAQILMTAGDMSDFPSVGHLASYAGLSPRTNQSGTSIMSNSLNRAGNKKLKNALWQSSFASIRFHERSRQFYERKRREGKRHNAAVVALARRRLNVLYAMMRNHEHYHDPAPSQEDLAA

SEQ ID NO: 178795 - protein, 362 aa, unidentified
MEFFCGLDVGMDETAICVVDDKGKVALEVAVVTDPEAIKAALTPYLGRLRRLGHEAGSLSPWLPPELLKLGLPAVCLETLHVRAALKAQRNKTDRTDALGLAHLMRTGWFRKAHIKSAACYRLRLLLTHRRNLKRKFVDLENAIRHSLKVFGIRLSHVGRGGFAQAVREAVAGDALVSELIDAMLNARAALWKEYCRLHDLVVKLVAGHELCRRFMQIPGVGPVAALSFMTAVDDPSRFKRSRDVAAYFGLTSRRWQSGTSIDVQGRISKAGDADVRRALYEAASALLTRFKRKDKVKTWGLAIAKRTSHRKATVAVARKLAVIMHAMWVEGTFYCGDPAASQADVSARAAVKERKLLGAHA

SEQ ID NO: 178796 - protein, 392 aa, unidentified
MYIVGIDICKNHHEASIVSPEGKQIGRSLRFATTHKGADSLMSFIFKNIGNSPCVFGMEATGHYWYPIYSFLKAKGYTIYVINPIQSDSLRKMYIRQTKNDSIDSFLIAEVIRFGQFGTTSMADENILAMRQLCRYRDSVISSRTEIKLRIGTIMEQIFPEYEKQFSSLWVSTSMGILEKYLTPENIENAPIDELFEIIKDKSHNRLTKAKAISIKEAAADTFGIKIAQDAFSFQLKQLIDRMNFLDKQIEALDCQILEYYEKFDCYLHTIPGIGMIAAATILAEIGDINRFKSSSALVAFAGIDPTVRQSGEFSSTHNHMSKRGSPYLRHAIFLAATTCSFHNSPLNAYYKKKRDQGKHHLTATGAVARKLTTIIYAVLRDSKPYEPKSFC

SEQ ID NO: 178797 - protein, 352 aa, unidentified
MRYAKIDSQYYCGIDLHARTMYVCVMDKQGNILLHRNMDNNFNEFKNYLEPFIPDVAVGVESSCYYYWISDACKKENIDFYLGHAFYMKAISGGKVKNDRVDSRKIADLLRANLFPLAYPYPEKMRATRDLLRRRHYFVRRRAGTYTHMQILCMQHGMYDVSSKIVKDEKDRLKLIKFFDNPDLKLMLQIDIDYIESLHPIIERLEKRIRKQAKHHNQRDYQLLMTIPGVGEMLGLIILYETHDISRFEKVQHYSSYCGVVKCERSSAGKIIGSKNNKIRNPYLKWAFGDVIIKAQQVEPKIDKLYQRLKSKYGLGRAKSIIAHRFAVAAYFMLKNKQVFDVDRFCQSPKYN

SEQ ID NO: 178798 - protein, 348 aa, unidentified
MKNKSFVGIDISKKVIDVSIFREDTNIKMFPHEVFNNTRKGFGDMCSWLKKSRVVLSQALFGMEFTGCYSLDLEKFLTSKNYSFCMLSTRIVKHHPMGTIDKSDKNDSAKIADFLYRYDGTECAKPYKLPSKAMQQLKQLVNERKFLVEQRTNFMNRMQMFETKEDSAMYESYIKKLNHDIEKIDQEECELMSKEEDVLDTFQNLLTIPGIGFVNATNIIAITRNFTAFDTARQYARYVGVAPCSHTSGTSVKWRSRPSAHCNGQVKADLSMAALRAVEYDVEMQIFYNRKLGGRKDSDTKRKALNAVKFKLIRRMFAIGKQKRKWEVLKTSDDRKNLHIEKSKASEL

SEQ ID NO: 178799 - protein, 421 aa, unidentified
MSSIENEITKTRNHSRQRGNMMRTVFGVDVSKASSEVAIVINGEKIHGYTMPNDTIGFTRLLDDLKTVQKPEIIFEARGVYSRRLKAFLEKNGYAYTQLNPLEAKKQLDSLRVRKTDKIDAETLAISQFVLNRKPTYIQEEVYQELRDLSRFYQNLTEDIVRTKNRLHKVLQVTFPEMENILSTPTREQYWNLVMTFPYKDFVLELSKDEPLEGIRQSTSKRISNKRVAYLAQKLAALANQSYCAVKKNSPILEEVRYYAKELLRLSEQRQAVLEQMVELAQPLPEYEILLSIPGIAETTATSMIGELGDIRRFQSANQINAFIGIDLRHYESGNFLAKEHITKRGNPYARKILFKCIHNIAAASHTNHCHIEDFYEKRKRQSQTTSTKPHTIASIHRLIRTMYYLITHNKLYDYTSTQNR

SEQ ID NO: 178800 - protein, 341 aa, unidentified
MQITTIGLDIAKNVFQVHGIDAAEKVVVRKQLRRGQVMKFFAALPPCLVGMEACASAHYWARELRKLGHQVRLMPAKDVKAYVKRSKNDAADAEAICEAVRRPTMRFVEVKSAAQQGRLMQHRTRDLLLRQRTQVINALRAHMAELGVVAAQGREGLKSLLTIIADEKDERLPVDARASLIVLAAQLQALQTMIGSIEKRIIVQHRASEESKRVATVPGIGTLGASAITATVTDASAFRSGRDFAAWIGLVPRQDSTGGKPKLGPISKQGDRYLRRILVVGAHSVLRRAKQNPEKHPWLMQLLARRPFKVVAIALANKMARVAWALLARGGIYQAPRLAAA

SEQ ID NO: 178801 - protein, 386 aa, unidentified
MQKLNDLSRSPSPLDPDGTLIAVIELSLSSWLVAGIVPGVERQPLKKLAVDESALLKLLHRWREEAAKAGHRIKRIAVAFEAGRDGFWLARWLSAHDIEVHVIHASSVAVSREHRRAKTDRLDTSLLKRSFLGWLRGERDHCKMVAIPTIKDEDAKRPNREHENLVGEQSRIVNRMKAALIRLGIRGFNPKLKKAAGRLEDLRTPEGEPIPPNILAELRRDMERRRLISDQIRQIEAARLERIEQAPGDGPNAMVRLLARVIGVGIETADMLVQEVLARNMRDRRAVARYAGLTGSPDESGIKRREKGLARSGNARVRRGMIQLAWRFLMFQKESALAQWFRARTESARGTRKTMIVALARKLLIALWRLVREGVVPDGVVLRPAQ

SEQ ID NO: 178802 - protein, 371 aa, unidentified
MKQQGSKINFNGEKVFVAMDVHKNDWKVAFCTVNRQPSRHPITITHPFIENLSSYLNKHYPGAAFEICYEAGFCGFWIYHELTALGHKVLVANPADIPTSDKERKHKEDKRDARKIARGLKEESIIGIYVPDEEVLRERSLVRERYSIAKSLRRIKTQIRSHLMLYNQELRDYPSKNHWSKRYINDLSALAEKESDLTLQLQLTRLNDLRVLMLKANRSLRAIGKSAKYEKLFGILISVPGVGMLTTMQLITEIVDMKRFSNFDKLCSYVGFIPMTHSSSDNERVGPITKRSNKRLRTALVESSWTAVGSDPELLLKYEQYRKRMKGQQAIVYIAKILLRRIRYVWLNEVEYKKGVNLETQIENKTSQKSK

SEQ ID NO: 178803 - protein, 346 aa, unidentified
MMIIGCDFHPSWQQVSWLEVETGETGERKLVHASGEAQQFYQQLSAPVLVGMEARGNSQWFIELVEDLGHEIWIGDAAQIRASYVRKQKTDKRDAAHILKLLLEGRFPHLWAPDREQRDLRQLVLHRHKLVLIRSRVKNELQHLSLNKGMQRKRTLWSQAGQQLLRELPLKKWAACRREDLLGLLTMLDEQIGKLDRAVQQAAEENPHSKLLMTQPGVGPNTALAFVLTLGDVGRFPRGKQVASYLGLIPREESSGGRQKLGAITKQGNRMLRSLLVEAAQNAVRYDPQFRREYLHRCHQKPKAVAKVAAARKLAVRLYWMLRTQKPYPEIVRIESSSGLALVGAS

SEQ ID NO: 178804 - protein, 345 aa, unidentified
MRYFAGLDVSLEETAICVVDETGRIVKETRAESEPSALIAALLALGLPLERVGLEACSLTAWLHDDLRAAGLPAICIETRQANAAMKMMPNKTDRNDARALAQIMRTGWYRQVHVKSRQSRLWRSLLVARRTVLNEMRAIENVVRAILREGGIKLGTPARAAFAGRVRELAGDDPEIRPLVEPLLTVLGTMLEQLDQLSRQVLLIVRGEAVCRRLMSVPGVGPITALAFRATIDRPERFRRSRDVGAHLGLTPARHQSGETDTQGKISRCGDELARTALYEAAHSLLVRSRKWSRLRAWGLKVAKRRGMARARVAVARKLAIVLHTMWREETLFRFGKAPISAAV

SEQ ID NO: 178805 - protein, 345 aa, unidentified
MEITTIGLDLAKNVYQVHAINGTGEVVVRKTIRRAQVLRFFERLDPCLVGIEACGTSHYWAREISKFGHEVRLMPPAYVKPYVKRGKTDASDAEAICEAVSRPTMRYVAIKSCEQQAALTVHRTRDLLVKQRTQLVNMIRGLLAEFGIEIRRGITHALSLAERIAAGDMPGIPALAAKMIASLAGQILDLEARLREIERELLAWHRSSEIARQLATIPGVGTVCATAFAASVTDPHQFRSGRQFAAWLGLTPLQHSSGGKEQLGRISKMGDKYLRRLLVVGMTSLVRRAKYKPDAVDARLAHLLSRKPVRVVTVALANKTARVIWASMTRGGTYRAPQPAGAVVA

SEQ ID NO: 178806 - protein, 347 aa, unidentified
MSNTNLVTIGIDLGKNTFHVVGLDARGAITLRKKRSRNQLDQSFANVAPCLIGMEACAGAHHLGRKLEKLGHQVRLLPAQYVKPYLKGHKNDFRDAEAIAEAVQRPTMRFVPLKSAEQLDLQALHRVRSRLVTQRTAVINQIRGFLLERGLPVRQGAAALRLALPQILSMQTENLSLRVVRLIQDLAEDWRHLDQRVASITKEIDELADQDVHCRRLMSAPGVGPIISSAMVAAIGTGDAFHKGRDFAAWLGLVPKQISTGDRTILGRISRRGNRYLRTLFIQGARAVLLRRQSWPKHGFGAWLEAASKRLHSNVLVVALAAKLARIAWSMLAKGRDYDANFLGHTA

SEQ ID NO: 178807 - protein, 452 aa, unidentified
MLAMMVPREIEDEEYEQVLERVAAVGVAKATGMVCTRVPHPSRLGRRQARVWRVDADTGSVMELAGHLAAGRIGKVTLGSASGYWRIWFCLLEARGLDVQLVNAREVSNVPGRPKSGKLDCVWQAKLTERGMLRPGFVPPAEIRRLRDYTRLRADLTRERTRHWPRLEKLLEDALIKVTAVASKIGSKPVRDMVEALIDGQRDPEVLAGLARGKMRAKHDRLAGALTGRFDEYHGELARMLLDQIDALTAHIDKITGRAGELIMAMPGAWGVDADGVTGPGAGLGPGAPGLPVVARLDEITGIGAPAAQVIIAEIGLNMAVFPTPGHLVSWAKLSPRTIQSGARSQPGRTGKGNPYLKGVLGEASAAAGRTDTFPGERYRRIARRRGKLRALAAVARSILVIAWYLLAGPAARFREPGAGYYASRIDKNRKTRGHVRQLEALGYTVTLAQAA

SEQ ID NO: 178808 - protein, 345 aa, unidentified
MKQITTIGLDLAKQIFQIHGADAESNVIINRKLRRAEVLRFFEKTPPCLVGIEACSSAHYWAREIAALGHDVRMMPPAYVKPFVKRGKTDAADAEAISEAVTRKSMRFVPIKSAEQQAASMVLKTRALLVSQKTQAINALRAHLSELGIIAAVGAGKVATLIEIVRDEADGRLPRAARLALMEIADQIETLTRQIEKLEREVVAEARRDADMRRLATIPGVGAITAAATKAFVPDPAAFRSGRHFAAWLGLTPKPHSSGGKERLGRISKMGNPMLRSLLVVGATSVLRHARGKANAPRWLIGLLARRPFKVAAVALANKMARIIWALLVKGGIYRKVEAMSPASA

SEQ ID NO: 178809 - protein, 352 aa, unidentified
MNAIKQTVGVDVAQKELVCAVGVLLEDFSVSIKARKAFGNHLSGFKAFLKWVKSFTEASQDLTVVLEATGVYHEKFVHWLVGQEQQVAIVLPNKISNYMRTLSIKTITDNTAAEAITQFGLERKLETWTPPKPIFRTLKQLTRERDQIVTERVVIANQLHAEQTEAFPNTNSLKRLNTRKMLLNKQEKEIKNEIHLLVKSNPDLEENVSYMTSIPGVGELTAVIALAETNGFELVMNKRQLVSYAGLDVKEKQSGTSVKGKPKISKKGNRHLRKAMHLPALSAIKNCSLYKNNFARLVGRHGIKMKAVVAVQRKILELMYILYKTKTSFDLEYELKKEQQLEAATPLQSSLC

SEQ ID NO: 178810 - protein, 348 aa, unidentified
MTRILAIDLGKFKSVACLYDAESAEAVFQTLQTTPQTMHDLLVELEPDRLVIEVCGIAGWIHDMATDLDIPIEVANPQHEGWRWNKVKRKTDRDDALKLARLAAMNQLPTVYMPGRRTRQWKSAIAYRHALVDRRTAIKNTIRALLDTQGLRMPSGASGWTAVSLERLRSLARPIGRCGADDLWRGQLQSELTSLRQINELLKKIEQRLDRLAAGDERVRRLQSIPGVGTRLAELVVATIDRADRFRTGREVSAYAGLVPRQFESGTMSRQGRISKQGPTLLRRLLVQIAWGMERRSAHVAALFARISGGQKTRRKKAAVAIARKILVWCWAMLRDGTPWRDPSLKPA

SEQ ID NO: 178811 - protein, 366 aa, unidentified
MRKVMAGMDLHGNNVMVGIVDDQGARLQHRRLACELPEIIEFLAPYKAELESIAVESTFNWYWLVDGLRAAGFPVVLANPAKIDQYSGIKHADDKNDAYFLAELQRLKILPTGYVYDPELRPVRDLLRRRMSLMRQRTTLYLSAKSLHQRTTGRALELRRLKAMEPEEAAALYTHPANQLIAQIQKEHIDSLDQSIRQIEKAVLKVALQQPYYQRLQTIPGVGIILGLTISMEVGDIARFAGPGQFASYCRTVDAKRISNGKTKGDNNQKCGNKYLAWAFVEAAHGARRFDATCRRWYDRKAGKKCTTVATKALACKLAKAAWYVMAKGTEYQAGKIFPGLTEPKAGEISGEQASASKGVGPNPED

SEQ ID NO: 178812 - protein, 348 aa, unidentified
MTSSSTLVTGGVDTHRDLHVAAALDQIGGLLGTATFPTTPAGYRALLGWLVGFGPVEAVGVEGTGSYGAALARHLTRNQVMVVEVGRPNRQVRRRHGKTDVVDAIAAARAVQSGEATAVPKSRDGAVEALRALKTVQRSATKARTQALNQLHALVLTAPEDLRGKLRGLNARALITTCAGFRVRADDDSLPAMIRLSMRELAQRIQLLQTQKKTVTARMRSITTALAPELVAKPGVGPDTATTLLITAGDNPDRLRHEKSFAALVGASPIPVNSGQIQDRFRLNRGGDRQANAALWRIAIVRMSSDQATRDYIARRQSEGKTKSEAIRCLKRYIAREVYNALPFQAIA

SEQ ID NO: 178813 - protein, 407 aa, unidentified
MELPMLYKRVIGLDVHQAQITACALIEESDGATRIEQRQFGAFKKDRRALADWAAQLNPDEVVMESSGIYWKSPYAALETVGIRAKVVNARHVKNVPGRKTDINDAQWLATLSRAGLLRPSFIPPAKLRELRLIARQRKKLTDQLASEKNRLHKVLTDGGIRLGVVVSDVHGQSARSMIKALIADKTTQEVLKFASQRLKASRDELFGALQGELTESHRFVLDELMQHIEEIEQRIVRFDQHLLARLKSEHNWLALLQTLPGIDLIGAAMLLVEIGADMDAFGSADHLASWVGICPGNNESAGKRKSGRVRKGNAYVRRLLCEFAHAASRTTSVFKSKFQSLVVRRGYKRSIVALAHKILRTIFFMFKRREHYRDCATDYEKLSVQRNSARWIKALTRFGFIKPAEV

SEQ ID NO: 178814 - protein, 376 aa, unidentified
MSEGISFAGLDVHKKSISVALLKPGAREPIEWQQANDAQSVKRLVRKLKREGGETVRCCYEAGPCGFGLQRTLCSAGIECEVIAPALIPLKPGERIKTDRRDARKLAELHRADLLTAVRAPTPEEESVRDLCCCRDDVREELMSVRHRLGKFLLRRDLRYGEGRAWTQKHRRWLKSVQFEHRAAKATFDSYLHAIEVLEERMRAVDKELAAVAAEEPYREPVAWLRCFHGIDTVTAMTIVAELHNFRRFETPRALMAYLGLVPGEHSSGAKTSRGSITKAGNKHVRRILIETAWHYRHKPTVGANLRRRREGQPAAVIAIADRAQHRLHRRYWRLLLHNNKVPNKAVVAVARELVGFLWAALYDGDWSASGGCPTS

SEQ ID NO: 178815 - protein, 361 aa, unidentified
MGIDAHKKDLFVAMLIGNEPKAVTWQLANEPQAVRRLVRKLEREAPGPVRVFYEAGPCGYALQRQVTTSRVSCDVVAPALIPRKPGERVKTNRRDARKLVELGRAGLLTAVQPPTPADEAVRDLARARDDAREDLQRCRHRMGKLLLRRGLHYAGRNWTRGHRQWIDGLAWTHAAERAVVDDYLLAIDHTESRLIELDAQLAKIAETEPYREAVGWLRCFRGIDTLTAMLILAELHDFRRFASAPALMAYLGLVPGEDSSGEKHRRGRITRTGNALVRRLLVEVAWHYQHRPGLGVALARRRKGQPARVIGIADKAQQRLCRRFRKLGAEHKPAPKIAVAIARELAGFLWAALQPAPALAK

SEQ ID NO: 178816 - protein, 418 aa, unidentified
MEPNRFRHYIGIDWATEAHRICLLDHNGQLCAKVSIPHSGAGLDQLLEWLASHGVEPAFAAVAIETPRGALVETLVERHFAVFAINPKQLAHFRDRYTSAGAKDDDRDAWVAASALRTDEKAFQRVAIDAPELIQLRELYRTADELREEVQRLTSRLREQLNRYYPQMLALYSAADQPVLWDLLELAPLPATAHQLTLPQVETVLRKRRIRRFPAGKVLEQLRATPLTLANGAAAAASQHALVLVAQLRVIYELRKQTLKRLAGVVKKMRQTTTGSGAPSDAAIVASLPGAGILSTAALLSESSRAVAERDAPALRAYAGVAPVTQQSGKTLKVSMRYACNNRLRNALYHFAMGSLRDPLARRHYDRLRGEGHSHARALRGVADRWVTVLMAMLRSGTLYDATRRKAWSAADAAGVTA

SEQ ID NO: 178817 - protein, 451 aa, unidentified
MPRRSPRRDCLPPQLEQVHLNAAGIDVGSESHFVAVPADRDDQPVRQFKAFTADLNALADWLTECGIETVALESTGVYWIALFELLEGRGFEVLLVDPRRLKSVPGRKTDVVDCQWLQQLHTFGLLSGAFRPAEQVCVLRSYMRQRAMLVQYASHHTQHMQKALQQMNVRLDTVLSDITGVTGMSILEAILAGERDPSQLAKLRDPRCQMDEATIAKALQGNWRAEHLFSLKQALALYKVYRQEMAECDRQIEAHLETFSPRTEESLPPRGRGRKPSRNQLRFEARAQVHRITGVDLTKIDGIDEHVALKLLSEIGTDMSRWPTVKHFTSWLGLCPGNKRSGGKTLSGRTKPCANRAAAALRLAANTLYRSKTALGAFLRRMKSRLGAPKAITAAAHKLARMIYNALKYGSNYVDPGQDWYERQYRDRVLQTLTRKALELGYELVPVAPAQ

SEQ ID NO: 178818 - protein, 412 aa, unidentified
METLVERGCGLDVHQATVVACLLIVSKNGKVHKQIRTFGTTTRELLALREWLLSQDCTHVAMESTGVYWKPVYAILEGQGTFKIVVANAQHVKKVPGRKTDVKDAEWIAELLCHGLLRSSFVPPKPIRELRDLTRYRRKLVESQVAERNRLLKLLESANIKLASVAADVFGLSGQLMLRALIEGKASPQEMAELAKGRMRAKIPELEPALEGKLEEHHRFLLRLQLQRLEAGEKDLAVLEQRIQEKLKPYEAQLTLLDEIPGVNWAVAAAIIAELGVDMSVFQNVLQAASWAGVSPGNHESAGKRKSSRIPKGNVYLKTALVEAATAATKAKGTYLRDKFYRLKARRGYKRAIVAVAHKILVAIYHMLSHQVCYNELGDLYLDKLNRHTLTRNLVHRLERLGYAVTLEQKAA

SEQ ID NO: 178819 - protein, 375 aa, unidentified
MSKIRFIGIDVHADTIAAAVAEPDGEVRPLGVIPNRLESVRKLVAKLGPVNQVKACYEAGPTGYVLYWQLTSLGVACEVIAPSLVPVKAGDRVKTDRRDAAKLARSYRAGDLTPVWVPDAAHEALRDLVRAREDAREDQQRARQRLGKFLLRHGCQPPQDIKKNWTQKHMDWLKRQVRFEQPASQAAFLDYVHEVEHAADRLERVEKAIDEAIAAAPAEIQAVVQALQALRGVGKIVAVSVVAEVGSLSRFHNPRQLMSYAGMVSSEYSSGHHIQRGGITKTGNAHLRRVIVEAAWAYQHKPWIGGWLAKRQQGLDEETKAIAWKAQWRLCTRYKKLAARGKNKPQIVTAIGRELLGFIWAIAVRAEARAATPAA

SEQ ID NO: 178820 - protein, 385 aa, unidentified
MAPPRMPEAVIGLDVGKSSHWACVATRDGEILLSAPVANREGDLDSLFGRFPDALVVVDQSRNIGALALARARAAGMSAAYLPGLAAHGAARLFAGDAKTDERDAMVIAKTALGIPDALLPVGDPGPTIAAARALAAQRNFLTCENTRNKNRLRSILLESCPAFEALVDLSDGPQLRLMASLGGAWSVADAGPRRAAALTRGAARGKIEALVRSTASSTRPDAAAIAAEDRAVRLLARRISENSAEIDVITAEISALLEGDDTYRCLLTVPGIGPKTASELAISIDIEDFPSHDRLASYCGLAPRNRQSGTSISSVTASRQGNKRLKNLLIFSCNCLTRTEGRWGDYYARCRERGMPHGKALKALARKRLKVIYAIMRDRVPYAA

SEQ ID NO: 178821 - protein, 340 aa, unidentified
MQITTIGLDIAKNVFQVHGIDATEKVVVRKQLRRGQMLAFFKALAPCLIGMEACATAHYWARELTKLGHQVRLMPAKDVKAYVKRNKNDAADAEAICEAVRRPTMRFVRIKSAEQQGQLMQHRTRDVLIRQRTQIINALRAHLAELGLVAAQGNAGVNELRAIVTNEQDTRLPIDARASVIVLAAQLEALESVIGAIEKRIKMQHRSSEASQRVEAIPGIGVIGATAIVATVADPTIFRSGRDFAAWIGLVPRQDSTGGKQKLGPISKQGDRYLRRILVVGAIAVLRRAQENPGKYPWLTQLLARRPFKVVAVALANKVARIVFALMTRGGQYDDRPVTA

SEQ ID NO: 178822 - protein, 342 aa, unidentified
MYYIGLDVHKKTISYCVKDASGQVHQEGKVGATRRELDSWIKTLPQPRTMAMEATIFTGWIYDHLLPHAQQVKVAHPLMLRAIAAAKKKNDRIDAGKIADCLRCDFLPECHIASTQIRDRRRTLRYRHLLVRQMVQMKNRISGLLMETGVSYNKQRLHKVGYFRELLATNEDVHESIRPLLKVSRDTVVRLQKTEYALVSSLQRDRLLADRVKRLRTVPGVGPITALAWALEIGDVARFRSIRQAISYCGLCGEEKSSADKVMRTPLSKQRNKHIQRVLVEAAKLAPRQDHDLALVYETEKQKGNANRATLAVARKMVAYLLAVDREERDFVPAENYQRAAA

SEQ ID NO: 178823 - protein, 371 aa, unidentified
MTKRINRGLTTPQRMIAMKYYTSTTQFNCGIDLHARQMYVCVMDRDGKKLVHTNIRNNDFDYFLKLVAPYQHDLTVCAECMFGWYWLADACQAAGLHFVLAHALYLKAIHGGKNKNDRIDSEKIAHLLRSNLIPPGYVYPAEKRPLRALLRQRLLYVWNRTELLARIQSHQLAHNRPILRQRPETREDWTEQLLAQEDNPVRQFALKNDLALIGHYDAQLATLEKELLKLTQKSAGRDFTLLQSTPGIGKLLGLTLLHEIGDIARFPTVKDFLSYCRLVKGTVASAGKIKGLRGAKLGNPYLRWAFGEAAVVAKRDGVVGPLAQRLEARMCGNKFKANTVLAIKLARAVYFMLKTKTVFEPDRLVAALSRN

SEQ ID NO: 178824 - protein, 326 aa, unidentified
MQGKEASEQETRGQSSVGIDVSKHRLDVCVLPCGERLAVANTPEGIRRLKRWLARFDLHLVAIEATGKWHRPLWRSLHAAAIPVAMVDPFKTRMFAKATGVFAKTDRLDAAVLARFAAVMAPAVRPPPPQIQEELCELVAGRAAAVAEQTDLRNQLAAAAVALFRQQLTRRIARLDKDIEALERAILTRIKADAGLARRFAILTSIPGIGATVAATLIARLAELGTLTDKAVAALAGLAPVARQSGERDDKRVIFGGRASVRRMLYLAALSAARHNPDVATFYRRLRANGKPAKLALVAVARKLATLANLLIAQDRTWLPIPPNQA

SEQ ID NO: 178825 - protein, 415 aa, unidentified
MSKTLLIGIDAHSKSNTACFMDKEGEIIEKAYRFQNNFPCAQIFEDKIVAAMITGQFLSIKIATESTSLYHTHLIDFLAASDKLRQFEVEIIVFNPKTTTAFKKAYPDKDKTDSVDAFVIADRLRFGRLPEPYASNQNYLPLRRLTRYRCHLAESIAREKQYFLLHLFLKYSSYSSLKPFSNTFGNTSVSFILEDFFIDELAEKPLEELVEYVSKHGKNGFADPTAVAEALKQIARESYRIRPALASSVNLILTSTLANIRALEKSIKQVNNAIEEELKAFPNTLDSVPGLGPVMSAGIFAEIGNINKFPSHNALAKFAGLTWRQNSSGDFAAEITRMTKTGNQYLRYYLIEAANLLRMHNKEYSDYYSKKLLEVTKHRHKRALALTARKLVRLLFFLLKNNKLYQHSSGKVGVQ

SEQ ID NO: 178826 - protein, 345 aa, unidentified
MTVYIGVDFHARSQTISYLKTEVGEIQRLELHHGQPAEVRSFYQQFAGEQVVVGFESSGYAAWFEELLEELGCEIWIGHATAIRLFARRRQKNDRRDADLILDLLLRGDFPRIHRYSGASRAVLQQLRYRQRLVKMRTMIVNSLLFLAASRGVSLRTQLKSRRGLERLKQVALPAPLAGQRDELCQLLGELQTKIAQVERWLEAQAEADVRVQRLRTHYGIGPLTGLCLVVTLECPERFANPRKVTAYVGFDPVEDSSGQRQRMGSISKQGSRLLRFYLVEAGQIAIRKDPDLARVYQRVLARRGHAKAKVAVGRRLLVRAFIMLRDESDYAEFQRRGVAARSSR

SEQ ID NO: 178827 - protein, 331 aa, unidentified
MNYSHFVGLDVGKKTFDASLMSADEKELSHKSFDNTPTGIQSLLDWIAGYHLSLSKLLFCAENMGSYVTELSVSSVSMGFSLALVCPLTIKKSIGLQRGKNDRIDAKRIANYAVLHYRKLELYKLPDKDLVRLRGWIIIRDNLVKQKVSSIKLLETFSWMAKLADVTESISSLEEQLKSIKERILEVEEDMEQLIAASTSLYTNYLLLRSIKGIGIINAIVLLCVTDNFQRFDNPRKFACYCGVAPFEHTSGISIRGKTQTSSLANKEVKVYLTRAAITAISWDPQMKAYYKRKIAEGKHKASVINAVRAKIIARSFAVIRRQTPFVALAV

SEQ ID NO: 178828 - protein, 337 aa, unidentified
MGLYCGIDLHSNNHVLTVIDEADRRVYERRLPNRLAITKAALEPYRAELVAVAVESTFNWYWLVDGLMEAGYTVRLVNTAAVRQYEGLKHTDDEHDAFWLAHLMRLGILPTGYIYPKSERGLRDLARQRMRLVQHRSSLITSVQNQVWRSTAVRLRSETIKGRGKQPWPEISDPDLALSVKVGRAAIDTLTVQIERLEKLILKRVDLSPQFRMLKTVSGIGPILAMTIALEVGDIGRFTAVGEFASYCRCVDSQRLSNGKKKGEANRKCGNRYLAWAFMEAAHFAIRVLPAAKRFYERKRRQRHALIAVKALAHKLARACFYVLRDQVPFAPERLFA

SEQ ID NO: 178829 - protein, 347 aa, unidentified
MNFYHSTHRHYCGIDLHARSLYVCIIDQQGEVLLHKEIKARPEPLLAVLELFRDDLVIGVECMHCWYWISDLCEEHGIHFILGHALYMKAIHGGKTKNDRIDSFKIAMLMKGGNFPLAYVYPKEMRATRDLLRRRTRIVQHGAMLKAHVVNTTSQYNLPPNKANLKNIGAREQVRATFADRDVQHNIDLDLAIIECYHRELSKLEEHLERQAKQHDPASLSVLRTIPGVGRILALTMLYEIGDIQRFETVQKFASYARLIKCKAESAGKVYGTQGNKIGNAHLKWAFSEAAVLYLRGNDKAQRYLQKLQKRMNKPKALSALAHKLGRAAYFMLKHQRVFDEQRFLKG

SEQ ID NO: 178830 - protein, 315 aa, unidentified
MPPTVAQTAGVDISKATLDVYLHPDAIARQFPNTVAGVVDLLSWLEQRPIHHVIFEPTGAYHHRLERRLGTAGVPMVKVNPLQARRFAEAIGQRAKTDAVDAAMLARFGALDALQVRPMVSQTLSDMKELLVARRGLAKDRVAASNRNHTHRAPLLKRLADRRLRQVERQIAAIDAALRTLCQADAELKARFDILVSIPAIGEATALAMLIEMPELGTMDNKRAASLAGLAPVARDSGQHSGKRFIRAGRAHLRQALYMPALVAIRFNADMKTKYQALVATGKPPKVAITAVMRKLIILANALLREHRSWTPKPA

SEQ ID NO: 178831 - protein, 359 aa, unidentified
MLYIGIDQHRKQLTVCIRNEQGDIILRRQVSTEWDRVRAFWAEIRTMAGETGFLAILEVCGFNDWLLKMLSEYGCRQVFLVQPEKQSKKKTDRRDANMLGEILWLNRQRLLDDKRVQGVRVIHLPSAKDAEDRQLTEIRKRMGQLCTRTINRVKHLLRKHNLEQECPTKGLNTLKGKKWLSEVALGAMDRLEMDLLLSQWELWKEQIYALEAAICNRQKENATALLLATIPGCGAYSSLALAVRIGEIKRFPRPASLANYWGLTPGCRNSGEATDRLGSITKQGSVTARFILGQMVLHVLRRDGKMRAWYGKIKRRRGSKIARVAVMRRLATIIWHMVKNNEPYVVGGPPQKKLAKKVA

SEQ ID NO: 178832 - protein, 398 aa, unidentified
MISVGIDVSKEKSTVCALKPYGEIIMSPQDVQHTESELSKLISMLRGLKEEVRVVMESTGAYHLPILTYLKEKGFFVALINPLEMKRYRCQGIRNAKTDKIDSKIIANYGIDFWYRLSDFKASEQQYLELRLLGRQYRQYMKFRTENVLALANMLDKTMPGIKTLLCDWNKYTGKDKLADFAYEYWHFDNITKKSEKQFLESYSKWANKKGYRQSESKAKQIYALAKEGIQTLPSGTPSTKMLVQESVKIVREVDDTLTQILSRMNEIAKMLPEYQVVHDMGGVGDVLAARLIGEIGDVRRFNNAKSLIAYAGIDAPPYQSGKFTGTNRHISKRGSSTLRKVGFETMTCLVMQKKCGDPVYDFIKKKQAEGKACKVAKIAGFNKFLKIYYARVMEVYQ

SEQ ID NO: 178833 - protein, 351 aa, unidentified
MNSIDCIGFDIHKKTISFCAKAQDGRILDEGTIPARRTDLSAWAERRSRPWWGAMEATLFTGWVYDHLKPLAQELKVAHPAMLKAIAASKKKNDKVDARKIADLLRCDLLPECYMAPSAVRELRRVLRYRNLVVRQATRMKNRIAGLLMETGTLYNKERLHGKAYFSELLGSLREIPASVIELLKLSRAQLEFFATIQLRLVKGLRADAGLRERVERLQSIRSVGEILALTWALEIGEVSRFPSIADAVSYCGLTSAQRNSAGKEQRGPISKQRNKHLQTILIEAAKLAPRYNPQLAAVHEGELKRGDRNQATLAVARKLVAYLMAVDKSGKPFQVRISAGEANQDEQPVG

SEQ ID NO: 178834 - protein, 351 aa, unidentified
MEKITTVGLDLAKQVMAVHAVDREGRMVMRKVLRRDQLLRWTASLPACTVAMEACGGAHYWARELTAQGHTVRIIAAEFVQAFRKSGKNDANDAEAICTAARQPNMRFVAMKSVEQQAALCVHRLRQGLVEERTASINRLRGLLTEFGVVAPLSPEKLRRELARCQDPEDTRLPPTLRQLVRDQVSALDALEQRLATYAEQIAAQARDSETAQRLQTIAGVGPTTAAAVVATVGQPQEFRHGRQFAAWLGLTPKQHSTGGKTRLGRITKRGDAYLRTLLILGAKSALQAALRKPPETRHRLQQWIVATFGRVGYHKTLVAIANKHARIIWALLVKGGDFDVQSLAPKVAAV

SEQ ID NO: 178835 - protein, 343 aa, unidentified
MQVSTIGVDLAKNVFQVHGVDSAGKVVITRQLRRKQVIEFFSKFPPCLVGMEACGTAHHWAREVSKFGHTVRLMPPSYVKGYVKRSKNDAADAAAICEAVTRPSMRFVAVKSADQQALLMLHRTRDLLIRQRTQLINALRAHLAEFGLIAETGREGLAQLAAIITDESNREALPSAMKQALQAIVDQLAALELQIGTLDRAIHAQHRANDMSCRLETVPGIGVIGATAITSTVTDPSGFKSGRDFAAWIGLVPRQHSTGGKERLGGISKQGDRYLRRLLVIGATAVVRHARQRPQKHPWIMRLLAKKPAKLVAVAVANKMARIAWAIMAKGGHYRAPELAIAA

SEQ ID NO: 178836 - protein, 342 aa, unidentified
MSGDYDGRQYVGIDLHRRRSVIVRTTEQGEQLGWVRIDNDPVALGLELAKAGPDPEVVLEATYGWYWAVDALQTAGAHVHLAHPLGVKGFAYRRVKNDVRDAADLADLLRMHRLPEAYIATPHERELRELVRHRAKLVALRSGLKAQVHATLAKQGQLPAASDVFGRAGTAWLRSAPLELVYRQRIDSLLELIDAYDGEIECFRAMIANRFTGHRGYRVIQQISGVGPTFAAVLVAEIGDVNRFSRPEKLCCWAGLTPRHRESDATVHRGPITKQGSKLVRWAAIEACQRTRPGSKLAADRTRIITARGRNIGVVAAARRLLTLVFYGLRDGQIRALAAGAA

SEQ ID NO: 178837 - protein, 409 aa, unidentified
MEVLYPACAGLDVHKNNVVACIRVHGASGRASRETRTFATHTAALMDLEAWLVENQCTHVVMEATGVFWKPVWHILEDSFELVLANAQHVKNVPGRKSDVNDAQWLADLLAHGLVRSSYVPERPIQELRDLTRTRKQLIRQRAQHVNRIQKVLEDANLKLGSFITDITGVSGRAILEALIQGETDPEKLVALAKKRLKASRETLLLAAQGRVTKHHCFLLRTHLEQIDATDRSVALIDAEVEELTRPFAEMADRLERMPGVSALAARVVLAEIGPDMSRFPTAGHLVSFAGLCPRLDESAGKPRSTRLRKGSPWLKATLVSCAWAAARSKDTYARAQFHRIKTRRGAKRAVVAVAASMLVAIYHLLKNRTEYVDLTAAHFDRRDKTRIANRLKKRLESLGYAVQMAPAA

SEQ ID NO: 178838 - protein, 463 aa, unidentified
MSKGSGTTRGDRRRNARRDRLRGLLPRDGAVVGIDLAEDKQALAVVDHDVRVLARKTVKVKAFRLGEALDWAAAQAKVKGFGQVTVACEPTGPRWMQVQRLCAERGLPMVCVQPLVSHIAREQQDYTTHKTDESDCVLIGRLAAELHCYVPEELDETWAHLRHLGRRRAQLITAATASVQRIRDFLSVAWPVVTEACAQPFESVTWLAALQVVTGRCGGDPARLAAVGLEEFTALVRGAVPAWGGKKGWGPIIGRVFAALTDTEGAVTWSRRGLFRRCADELGDLARTRAQLRAVEADMVLVLGEPGLSRLGDIPGLTVVGAAAILAETGDPRRYDSSSSLVKHAGLSPSENASGAFEGQAHISRRGRPGLRLTAWRAVWPMLQFNPVMAAKYTTMTQAADTAAVPAGSQQPRAAAAAARARRAKARVACAASLLRWIYSMAVHGTSWDAAVASGAASQPEAA

SEQ ID NO: 178839 - protein, 418 aa, unidentified
MEVLHERCAGLDVHKKTVVACVRLARDGGVEKEVRTFKTTTADLLALGEWLDGHDVNHVVMEATGVYWKPVWHILDDGERELVLANAAHVKNLPGHKSDVSDCDWLSDLEAHGLIRGSFVPNRQTQELRGLLRTRKQKVRERSSNTLRLQKTLEEANIKLDSVISNVIGVSGRRMIEAMIGGETDPVALAGLADRRIKAPPEVLCEALRGRVTGHHRFLLGLQLEHIDALDRMIDKIDQQIDASVEPFRAAAGLLTTISGVNQLAGRAIVSEIGIDMSRFETAGHLISWAGLCPRNDESAGKRRSTRIRKGAPWLKDILVQCAWAATRTKATYLHAQFVRIRSRRGPKKAIIAVAASILTAAYHMLKNGVPYRDLGPQHFHSRNKQAQAKRLLARLRDLGFTAEFDSLKPIPDAVVSY

SEQ ID NO: 178840 - protein, 342 aa, unidentified
MSIASVGIDIGKLTFHLVALDDHGKVVVKKKFSRKQLLAYTAKLSTALIGTEACSGAHFLGAALRDQGHDVRLIPAQFVKPFLKSNKNDFLDAEAIAEAVTRENMRFVAIKTDDQLDLQALHRVRDRLVQRRTAVINQIRGFLLERGITFAQGPANLRRGMPSLLEDAEQNLTPRMRHLLAHLWEEWKQLESDVARISDEIDTIAEHDPACQRLRQIPGVGPLVSTATVAAIGNGAAFRKGREFAAWLGLIPRQHSTGGKARLLGISKRGSVYLRRMFIHGARAMLLRVKYDTGRLGQWAHQLELRAPRNKVIVAVANKLARIAWAVLSTGNDYRNMAVTAA

SEQ ID NO: 178841 - protein, 435 aa, unidentified
MKRIRKNASGIDIGAKKVFVAIENQPVVSYFTFTEDFETLRDYLLENKIESVAMEATGVYWVILYAILEESGIDVWLVDGRETKQVPGRKTDIKDCQWILQLHCYGLLNRCFVADPDIKELRSYMRLREDHIRSALMHINHMQKALTEMNIRLKEVLSQIQGKSGLTIIEAILAGERDKDVLVNLCHGSILKNKKELILKSLQGRYSSTGLFALKQAYEAYLFYNNQIKECDSQVNRVVNRMGDYGNEQLETRSRKPIRHHKPKIEKFGSNMLSIFDGKDATLISGITDYTWLQLLSETGRDLTKWTTEKHFTSWLGLAPGQNNSGNKRKRPRKKGRPAAGQIFRIIAQSLINSKDIAIGAYGRRLRARKGPSIAIKAMARKLAELYWRTMVKGLDYAEYGVKKYEQQLIAQKMKTTLRLAKELNLQIIDNQVYV

SEQ ID NO: 178842 - protein, 387 aa, unidentified
MPEPNSLSRSLVALEQDRTLITAIDMSRSSWLVAGIVPGVERQPLKKLEPDEAALLRLLERWCGEAAKAGRTISRVAVAYEAGRDGFWLARWLRARGIEAYVIHPTSIAVSREHRRAKTDRLDTELLKRAFLGWLRGERGHCSMAAVPSLEEEDAKRPSREHESLVAERTRIVNRIKANLARLGIRGFKPLLRSAAERLETLCTPEDVGLPPNTLAELRRDMALLHFVREQIQQLEDARTERLEKAPGGGGNVMVRLLAQVVGVGLETADMLVHEALSRDLRDRRAVARYAGLTGSPDESGASRREQGLAKAGNARVRRGMIQLAWRFLLHQKGSALAQWYRARTADARPGTRKTLIVALARKLLIGLWRLVTTGEVPEGIVLRPAI

SEQ ID NO: 178843 - protein, 350 aa, unidentified
MLIIGCDYHPGLQQIAFVDTDTGELSQERLAHREQAERFYRELKQRGIAVRVGMESSGHSRWFERLLQELGFELWIGDPAEVQSKRVRKQKTDRQDAQLLLRLMIEDRFPRIWIPDAANRDMRQLLWHRHRLVQMRTRVMNQLHVVALNEGLRRKKALWRPAGRAELEAIVLAPWARRRRQDLLDLLDQLTPKIQELTHALEEEVEKRAVTRRLMTHPGVGPLTALAYELVIGTPERFHCGKQIASYVGLVPEEKSSGDRRRLGHISKQGNALLRFLLVEAAQVTVRSQPQWRSKFFHLAMRRGRKIAKVAMARKLAVHLYWMWRQGWDYDQFKKLGSHAGAPGNPYGGK

SEQ ID NO: 178844 - protein, 705 aa, unidentified
MKSWKDLSHYAGFDWAREHHDVVVVDRAGKVAADFRLEDTATGWADFTERMKRFPAVGVVVETCQGAAVERLLQMEVTVYPVNPKCAERYRERKTPTGLKTDRLDAWSLADALRLDGSAWRSLKAEDPGIQELRLLCRDEVGLIEERTAHVNQLQQALHEYYPVALEAFDDWTRPSSWEFVIQFPTPQALAKAGTKKWNSFLHTHRLARTEKDEERMNCFARAQEFCGSEPTTRAKSLLAVSLAKMLLTLEHRLDAYRARINELFEQHPDHDLFGSLPGAGEKTLPRLLAELGDDRARFDSAEALQCYAGTAPVTYQSGKMKKARMRRACNKHLRFAVHWLADLSRGSCEWARVFYGAPLHPWPAKPGPVGLGYILTPPSGATRGTVGSPDNSAPRGIEGSPSDGASRGRENYLDGTERSSAVHGRTMLRHVTPASPAWNSVTSTGRTWSPSTSRRRAVRGAAVLTIARPPIASTVDPYGSSVSTTWYPSNVPAGKAPLRARMRRSSSGVAPVLRWSSPATRTVRTSTPTSASSPARHLAPSSFVRPESPTNAVFPATRTSPPSRWPRSMSTTRSRVARKARTDGTSGSRAGAPGRVITARSPTTTAVSSTKQASGRSASGASHATAHPAHASAAQYSVCCACARPTSIGREGSSRMHRAYAREGGLTSAVGRWSPASRLAIHGALTGASPELTGRSSRRAPRRR

SEQ ID NO: 178845 - protein, 338 aa, unidentified
MTIETLGVDIAKNVFQLHGVNRNGRVVLKRRVMRDELLKVIAQIDRCTIVLEACTGAFYWARKFEVLGHEVQLISPQYVKPFVRRQKNDGNDAEAICTAARQPHIPFVPKKTIEQQDIQALHRARQRMVNHRTAVVSQIRGLLLDRGFAFAKSITRARRVIPEILADQDNELTAMAREAIAELYDLFRDLDRRIASFDKKIDAVFRNNEACQRIAKIKGVGPKTATAVVAAIGDGSEFKNGRHLAAWVGLVPRQFSSGDRKVLMGISKRGSQHLRSLLVHGARSVVRTAPNKTDSTNQWINQLRQRRGFNRATVAVANKNARIIWAVLKTGEPYRAAG

SEQ ID NO: 178846 - protein, 331 aa, unidentified
MTDDTPNSVGVDISKAHLDAYMVPAGKAARFSNDAAGLKALIAWVERPVRTVTYEPTGRWHRAFEEALFEAELPLARVNPLQARRFAQAIGQRAKTDAVDARMLAQMGAALDLRRTEASSPARRALEELQVARDALVKDRTAALNRQKHLQHRLLRRQNTNRLSQIDRQLTAIDTEIEKCCSEDAVLTRRTEILTSIPGVSRVTAAGLLTQMPELGSLDAKAVASLAGLAPVTRQSGTWQGRSFIQGGRARARRLLYMPALAAICHNPKLRAKYRQLVAQGKPGKVAVVAVMRKLLVLANALLGQDRCWQQDWPGRASAAAPSASMPFVEA

SEQ ID NO: 178847 - protein, 435 aa, unidentified
MSKSLEIVHPKAAGIDIGSQSFYVDAGEEEIKIFPTYTEGCHLLREYLTELGIKTVAMESTGVYWVILYSVLEDAGIEVYLVNGRDVKNVPGRKSDVKDCQWLRQLHSYGLLKKSFIPPDNVRKLRNYIRLRQDHIRAQATQVHLMQKALTQMNIRLTEVISDIMGASGSQMISAILAGQRDPEELVKYCHDSILKKKRDLVVKALQGEYREEHIFALRQANQTWHYYQSLIFECDKELEKLLELITKDKSDLDNYAKRKPIRYNKPQIKNLHQSLLKMTDGKDPIGIAGITDYSFLQILSEVGVDMKAWKTEKHFVSWLKLAPMRSSSGKMSRRISVKRTNKASLLFRNIAQGLLTSKNLALGSFARRIKAKRGSGVAIKAVARKIACYYYRVMTKGEVFLEKGIQLYEENLKEQKRNYLEKMARQLNMQLIPV

SEQ ID NO: 178848 - protein, 385 aa, unidentified
MRDKTFVPREYDVFAGLDVDKKSIAATFSSHQGFIRSLSMPYKVEDLLNHVHNHFADQKVAFAYEAGPTGYGLYDGLTAQGYRCLIAAPSMIPRAPGQRVKTNRLDSKALSESLRGGQLKSIHVPSPLYRQLRHLTQLRDTMMSEAVGMKQRIKSLLLFEGMAFPPAPAGSQWSFIVKAKLRKLPCSHTVRFKLDQLLDSLEFAEKQVFKSTKEIRRFCQTDPELSQCIKYMMTVSGIGWIVASQLLARIGDWRELENIRQLGGFLGLVPMEHSTGDKTDRGPITHTGDGRLRSKLIQAAWSAIRKDGELREFFRSVCQRHPRKVASRVAIVAVARKLSVRISVVLMQQRPYEVREKVHSAPLTQEETSPQGTTRRQAEPGVETP

SEQ ID NO: 178849 - protein, 365 aa, unidentified
MFLNGKKSRMQVFKQSVGVDISKSDFVAYFEVMLSNQRIKKIGRRKFDNTPSGAKRFVQWLVKKSVKDVLLEVVMEATGRYHEVLAYHLYEGHYRVCIVLPNRIKYFARSLNQFSKTDPIDAAVIARYGLSQPLEAWEPPREGMRRLRELSRERQDLVKMKTQAINRLHAMRSSAKLANSTIERLELQLAFFEQQIAVVEAEMNQLSNQDQHLAYQVKQLTSIPNIGTTSAYTILAETAGFQLFSNRNQLIKYAGLDVVENQSGTSIEGRSRISKRGNANLRAALYMPAVSALTKPSVFRDTYQRHLDSHKNKSKALMAVQRKLLLVAFGTHQSGQMYDEQQHRCRTSKQVGEHKGSPTVAHLVN

SEQ ID NO: 178850 - protein, 408 aa, unidentified
MNAVGIDVSKGRSTVAILRPMGEVVQMPEDVTHDAISLERLAYKILALGDETKVLMEATGRYHEPVAAELHEHGIFVSVVNPLVIHNYSTESSVRKVKNDQKDSIKIAKFCLDRWTELREYTPMDALRQQLKLISRQYDLYMKTRVTLENNLISLTDKVFPGVNEMFKSPERADGHQKWVDFITTFWHCECISRVSEEAFTERYKKWCKRKGYNFSVAKASDIYIDSLGHIVTLPKNDNTKLLIQTAAKEFTSTSELMALVKAQMISLAKQLPEYDTVMAMYGVGEVTGPQLMAEIGDVRNYPRRSSIVAFAGIDPEVDKSGKNQSDGKPTTKRGSPHLRKTLFQILSTYLKLSPQDEPVYQFIDKKRAEGKPYYVYMTAGANKFLRIYYARVKECMAALEAQESSEG

SEQ ID NO: 178851 - protein, 350 aa, unidentified
MNILALDLGKFNTVYCDYICETGEHKFGKVKTTPQAIHDLIVDKEPERVVMEVSEIAGWVVDIARALGKKTETANTSHEAWRWKNVKKKNDKEDARKLAKLSAMNQLPTVHIPAKPIREMRSLIKYRQRLVKHRRSIQLAIRAIFCAQGITGVPRGKSAWSQEGLGWLRKHARPLEEIKDLEQLWRGRLHVELETFDAINRALKTVEDKLNKLGSADARVRRLQTIPGVGPRLAEMVVAFLDDPQRFQSGKQVGNYVGLTPKQYQSGQMERQGRISGQGNKLLRNLLVEACWASLRYNPWAREMYSRLLRGSPSRKKIAITALARKLVVRCWAMLRDQEDWKYDIREDAA

SEQ ID NO: 178852 - protein, 340 aa, unidentified
MNIVFLGIDLAKNVFQLCGLNQAGKPVYTKRTGRKELLQTVANIPACLIGIEASTGAFYWQREFEKLGHNVKVISPQYVKPFVRGQKNDGNDAQAIAVALMQPTMQFVPPKSLEQQDIQALHRARQRIVNHRTATVCQIRGLLLDRGITIGAAVSRVRRAVPLILEDAENGLSVRMRRTIAELYDLFNDLGRRINFFDKEIDAVFRQSEACQRIAKVKGIGPKTATAVVAAIGKGTEFKNGRHFAAWLGLVPRQHSSGDKQVLMNMTKKGDKHLRTLFIHGARAVVRVATNNNDGSLHQWVNQLKERRGFNKTTVAVANKNARIIWSMLRKDTEYQSVGS

SEQ ID NO: 178853 - protein, 309 aa, unidentified
MDVIVGIDVSKDRLDVHVLPAGDSFLVGNDHAGVDGLITRLREAKADVVALESTGGYEMLAAAGLSSAGLAVVVVNPAQVRSYANALGKRAKTDPIDAAVIAAFVAATKPDIRPLRDEESEAFSAIVSRRHQIVQMITAEENRARMAQTKETQKSIKRLLAALRHELASLDDELDGRIRKSPLWRVREALLTSVPGVGPTTARTLIAEMPELGTLDRRQIASLAGIAPFTRQSGKWRGKSFIGGGRGKVRAVLFMAALVASRHNPVLKAFRDRLVAAGKPKIVAIVATMRKLLTILNAIIRDGKPWKNA

SEQ ID NO: 178854 - protein, 412 aa, unidentified
MQDILTCAMGLDIHRDVIVACLAKGELGTDPEIEIRSFSTLIPEMRKLRDWVLEAECRYVAMESTGIYWQPIYEMLEPCFDGQINILVVNARHMKNVPGRKTDMRDAQWIATLLRAGLLKGSFIPDKTFRELRHLTRYRKSIVRDITAQKNRIDKFLQSSGFRFTAFLSDAFGASGRNIIRHLMEYGNISREALDRCLKTQTRKRIDEILIALNGSLSEHQRGFLRMIFGHLEALEQHRHTVEDAITKEITKHEEALSLLCSIPGIDVTAAAAIIAEIGTDMSAFPDSQHICSWAGLSPGNNESAGKRKSAHINKGNPYLKSMLCEVGWVISGKRSLYLSGWYWRIKQRKGAKRATIALARKLLALIYTMLKTGSPYNEDCFEIRRKQSERKRASRMVNELQKLGYFVVAPD

SEQ ID NO: 178855 - protein, 392 aa, unidentified
MQPVVGVDVAKGSSVVQAFRTRNEPFGKAVDIVHEKSGFEQFSRILDGLQAETGLAPVIVLEATGHYHRALVSYLERSGYTYYIVNPLQSKRAKGTQLRKVKTDAVDAWHLAEMYYRGDVKPHRTWEETFTELQHLTRQHEFVTGIFVQAKLNSRALLEQVFPAYEGLFSNVFSATSLMVLARCLEGSTADWIEVIQGNTGRSRSRMWASEKNDKLKEMLGDWKEARHSQSQSQALLGMVKLLLTMIEQLDELEQQMEEVAAGLPEVELVKSIPGIGTKLAAAIVAEMGDIRQFSDAKQLVAFAGLDPGIFSSGKFTATNTRITKRGSKRLRRSLYLAVQCGIRKNANARIGSYYEKKRKEGKPYKVVVIACANKLLHHIFAILQKGLPYQV

SEQ ID NO: 178856 - protein, 365 aa, unidentified
MIKSIRFKFLTMGISKQCIGIDISKGTFTACLCQRSDDGGLAFSKTIDFSNDSKGFNQFLRWTKGVIARDAALVFLMEATGVYYENLAHHLHKIKKMVHVVLPNMSKHYFSSLNIKTKTDAVDSRILSQFGVERIHKAWTPPPAILLQLRNLTRYYVQLQEQKTGLGNIKHSKDCSHDIQTFILKSNKKLITEIDKEIVRCLREINRLVKSDVGLHKKIEKLATIKGIGMITIVTILAETMGFEEFGSAKQLVSYAGYDVVQRESGTSVKGKTRISKKGNRYIRNALYFPAMVACRYNSVLKDAYTRIILKKPSKMVGQVAVQRKLLILMYTLWKNDTVFIENYKVSSPDPKTETTLDSSEPELL

SEQ ID NO: 178857 - protein, 455 aa, unidentified
MPRTKRSRMEMSPVHANAAAIDIGATLHMAAVGPDRDPEPVRSFGTFTGDLHRLADWFKQCGVSTVAMESTGVYWIPVFEILEQLGFTVVLVNARDAKHVPGRKTDVTDAQWLQRLHEYGLLRASFRPERRIAALRDYLRQRERLLDYAASHIQHMQKALMQMNLQLHHVVSDITGATGMRIIRAVVAGERNPVTLAALRDQRCKESAETIRQALVGNDREEHIFALAQAVELYDTYLAKVNDCDKRIEAVLTELKATCPPPPAQLPAPRHRTRQPNALSFPAREALHRILGVDLTQIHGLGPYLALKLVGECGTDLSAWPSAKHFTSWLCLAPSNKISGGKVLSSRTRRSSNRASALLRLVAVTVGRTETALGAFYRRLAGRVGKAKAVTATARKIAVLFYNTLRHGMGYADPGASYYEDRYRQRVLANLKRRAKSLGYALQLTEPTPAGTEVS

SEQ ID NO: 178858 - protein, 408 aa, unidentified
MKVEVKKRSASVIVGCALGVRRATCRAPEGDSLQSQRRQTMNEVITSFVGLDVHQDSIAVGLAPEGREEPRFLGTVVPQWAVLSRTLRRLGSPKALKIVYEAGPCGYTLARQLRAHGYACEVIAPAKIARAPGDRIKTDRRDALLLARAARAGELVSVSIPDERDEALRDLSRTREDAVRARLKARQQLKALLLRQGRRYTGKSSWTQAHERYLAEVSFSQPAQNIAFTEYRSAARDAQERVERLTEALRSQLEHWRMRPVVEALMSLRGIDLIAAMTLVAEIGDFTRFARPRELMGFLGLIPSEYTSGPIRRQGPITKAGNGHARRVLIEAAWNYRFPARISRTLEARQQGQPKAVREIAWRAQLRLTQRYRRLAARQLPFNKICVAIARELSGFVWDIACQVKPSA

SEQ ID NO: 178859 - protein, 500 aa, unidentified
MGKRKVKGQPQGATKQPSTEPSAKKQPARKRRQRGRPVLSDSLHVTSEHAAGIDIHQREHWVAVPPGSTPPAPKAPKAPKDPKDHPANVPAHVRCFCTNTADLEELADWLTTCGVTTIAMESTGIYHIALFELLERRGFEVYLVDPRQTKHVPGRPKTDVHDCQWIQRLHSYGLLSAAFRPADQVVVLRGYLRQRQMLLSYGGQHIQHMQKALEQMNVKLGVVVSDVTGVTGMAIIKAILAGERDPLKLAKLRNEKCKHSEAEIARALYGTWRAEHLFELKQAVALYEFYQARLRECDRELEAHLRTFEDKSDGEILPPRLRRYKHPANDPHFDVRPLLHQMSGVDLTVLEGIDDSTALTILSEIGTDMSKFPTEKHFTSWLGLSPQHQGSAGRIRSRHVRRGANRAARAFRLAGQGCHHAKNALGAFYRRIQSRSSGGKAVVATARKIATRVYRLLKYGLDYVRQDMDAYEEAYRLKLIKGLARKAQQLGYRLEPAMTP

SEQ ID NO: 178860 - protein, 404 aa, unidentified
MAVHPAPVTSSTIVVAVDVGKTSAMLSVTDGGRQQVLGPVEFAMNRSGLVKVVDQVSTLIPACAQVKVGIEAAGHYHRPVLDYRWPIGWEVLELNPGHVAEQRRVAGRRRVKTDAIDLEAITELVLAQRGQVITERGALFGELAAWAAHRSRRVTTRTATKNQLLGQLDRAFPGLTRALPDVLGTKIGRLVAAEFTDPARLSALGVSRLIRFAAARGIGLRRPVAERLVAAARDALPTRDGAVARRVLATDVVLLDGLDAQIGGAEAELAMLIPRSPFATLTSVPGWGVVRAANYAAALGDPARWPGPRQIYRASGLSPVQYESAGKRRNGKISREGSVALRRALIDLGMGLWLTEPAAKAYAAELKSRGKHGGIIACALANRACRIAHALVRDHSSYDPAHWI

SEQ ID NO: 178861 - protein, 344 aa, unidentified
MEHYAGIDVSLERSSVCVVDALGRIVKEAKISSEPAVLVAFFEALGFAVKRIGLEAGPMSQWLHAGLKRAGFDILLLETRHVKAALSAMMVKTDRKDARGLAQLIRMGWFRPVHAKSIRSQEVRALLVARKQLLGRLIDVELSIRGILRGFGLKVGPVTRKGFDARIRELVTGQATLERIAGAMLSARVALKAEYEKLHKTVLAIVRDDAVCRRLMTVPSVGPVVAITYKSAIDDPNRITKSKAAGALFGLTPRKYQSGEKDVTGGITRAGDEMVRTALYEAANVLLARITRFSKLKRWAMDVAKRRGSKRAKVALARKIAVILHRMWVDGSTYRWTETQPIAA

SEQ ID NO: 178862 - protein, 374 aa, unidentified
MSYSIAGIDVHKKKLAVVVADLEVGGEYQFERRWYGSHPEQFRALAEWLIEQQVEEVVMESTAQYWKPVWDALERYWKPICQRREDAGPKSGTLHLAQALSNRGRRGRKKDFVDAERLIKRLVSQELTLSFVPNSEQRLWRTVTRTRYQLTCNRVRLQNQLEALLEEAQIKLSSLVSDLLGLSGRRMLQALADGETDPAALAALAHQRLRATPEQLCDALDACRELNPVYRRLMKMALEDLQLIEQQIAQLDQEIATLLRQHQDAVHRLADVPGLGVDSAHQIIAEVGAKAESFESAKKLSSWVGACPGDEESAGVNYSSRSPKGNRLCVAFSISVPTLPLSAKAASSRSYIVVSCYAWDTTKPSVPLRIVSAN

SEQ ID NO: 178863 - protein, 318 aa, unidentified
MKLDSIKYFVGVDISKDTLDICFLTIDETKKDFYKIKNNHTNIKALFDSFKFNEIAVCYEATNNYHIELAKYLTNQKISYSEINAYKSSLFLKHLTHIKTDITDSYGLAYYCKHFGNTFIQSKFNSKYKLIQSYNSTYSIVVKMQTQLKNFEKSQISANDETLKQIIVNLKNIIKQTLKRLEDIAYELLKDEIPVTDEIISSNKGIGKSLALSLFPILHYNKNRSSKEIISYLGLSPRIYESGISVKKSQKINKIGNSNIRRILYLSALSCIRHNEVFKQRYERLLTNNKSKKVAIVAVMCAIIRYLKSRYFKDDIYK

SEQ ID NO: 178864 - protein, 312 aa, unidentified
MIQESLFVGIDASKLRFDGYVHPSGKRFTSSSSPQAIEDLTERILAIGPVAVGLEASGGYERRLADSLHAAGLEVHILPPARVRGFARAIGQSAKTDAIDAVMIAQYLAATHHRLRPYAPDPARSRLSALAAHRRRLLAEKGGLASQCDTIEEPLVRDMILSRLDMIARHVAALDKAMQQLLADTPHLGRQHRRLREVAGVGPVFATALLADMPELGKVSPKVAAALLGVAPHARQSGALSRPGRCSGGRKHLRDIAYMGALSAIKVRNPILHGFYQRLRTKGKPFKLAMIATVRKLISILNAIARDDPAFI

SEQ ID NO: 178865 - protein, 410 aa, unidentified
MEIVLGCCAGMDVHKDSVEVCVRRMGEGGKVEQQVRHWGTMTRDLVEMADWLKAEGVTHVAMESTGVYWKPIFNILEEGFEILLANARHLKNVPGHKTDIKDCQWIGQLLQHGLLKGSFIPPRGQRELRDLTRQRAQLTDESSRTINRIQKVLEDGNVKLGSVASNVVGVSGRRMLEEIVRGQDDPAQLADLAQRRLRAKIPQLQEALYGKLTEHHRWMLGLLLDQLRTSEKFIARLDERIAELTRPLAPVLEKLDAIPGVDRRVAEVLMAEIGPDMTPFPTDAHLASWAGVAPGNHESAGKKRSGKTTKGSRWLRQSLVQAAWAASHKKDSYFQAHARNLMHRRGRKRGLVAVAHSLLIDVYHMLKEGTDYRDLGPQFLDRLRAKHLIRFHVKRLQQLGLQVELTPLAA

SEQ ID NO: 178866 - protein, 348 aa, unidentified
MRFYTQQHKYYCGIDLHARTMYICILDQEGNTVLHKNVRSNPESFLRAIQPYREDIVVAVECMFVWYWLSDLCARESISFVLGHALYMKAIHGGKSKNDKIDSKKIAALLRGGTLPTAYVYPEGMRSTRDLLRRRNHLVHKRTELLAHIYNTKSQYNLPDFEKKLSIACHRVGIADHFPDPSVQKSMEVNLQLSELYDRLLTDLELYIVRQAKGHDVQSFHLLRSVPGIGKILSLIILYEVHDINRFERVQDFVSYCRLVKCVRESGGKKSGPKNSKIGNAHLKWAFSEAACLFLRGNEQAQSYHERLVSKHGKGKALSIIAHKIGRAVYFMLKRKEPFNMDTFFARA

SEQ ID NO: 178867 - protein, 360 aa, unidentified
MALNVGCDLHKKYAVFVAMDERGKASPAVTVPCDSLELSSHLHRYPPGTPMAVEASGSWYWFIDLVEAAELDARLVHPLEAKKRMGGRNKNDRLDAKGLAMLLLNGTLPEVWIPPAPLRDLRGLVRSRLALRRHTTTLKNRIHGALRRYGQYEPGEAKDLFQGKGRVQLSVYVGALPPETRLATRHEWELVDEAERHIEELEKRIHLGIGQLGYVRLLKSLPGVGDILSAAIYLEVGAVDRFPVAARLASYSGLTPTVHESGGKRRMGPTSRQANIYLKWAFVEAANCIVRHKHRYADRHVVHLYDRLRAKGKNHSQAAVAMARHLAEATWWILTKKQPYRESAPATMSSSENGSARQSV

SEQ ID NO: 178868 - protein, 344 aa, unidentified
MDVMIGIDPHKRSHTASMLDRRQRELRQITVRAGDRQVVELLAWANGARRRTWAVECAGGMGYLLAQQLVAAGETVLDVPATLASRVRVLGTGQSTKTDPNDARAVAIAALLAPTLAVVQRADHATVCRLLAKHHTDVARWRTKQCCRLHALVAELVPGGISKEVIVTQARSVLDGIQPGDAAAVERHRQAVELVDEIDHLDDVLRDSRARITAAVAASGTTLTEIFGVGPVVAAMLIGYSGDPLRFATASRYAAYTGCAPIEFSSGGRTTHRLSRRGNRRLNHALHCAAITQIRHRHSPGRGYYDRKLAEGHTPREAIRALKRRLSDVVWRQLVADAGRAVAS

SEQ ID NO: 178869 - protein, 396 aa, unidentified
MELMDERGRVLARGRLPEGVAGMARLHELIGEQLGEGADDAEVVIGTETDRGPWVGALVAAGYTVYGVNPLQASRYRERHGVSGAKSDRGDAHMLTDMVRTDSHQLRAVAGDSPGAEAVKVVARTHKTLIWERSRQVQRLRHQLREYFPAALEAFDDLDAPDALELLGKAPDPAKAAKLTRAQISAALQRARRRDIPGKTTVILAALRSAQLGQPPAVTAAYAVTVRSLVAVITVLNEQVKTLQGQVEADFGRHPDAEIYRSQPGLGPVLGARVLGEFGDDPHRYISGKARKNYAGTSPITRASGKRKIVAARFIRNNRLTDALMAQAFAALSASPGARALYDAERACGTGHNPALRKLASRLVGILHGCLKTRTLYDEATAWPQREKTPQSDLAA

SEQ ID NO: 178870 - protein, 416 aa, unidentified
MSGKREIACGVDVHNRFIMATILSSDGLKLQGRFETSLEDLLKFKSWLKENCCHKVALESTGNYWLPIYHILEGSANFILANAYQIKHIPGRKTDSLDSEWIAELCLKNLITPSRIFTKDHRELRSLTRARESLIKVRTKIKNRVTHELEAACIKLSSVIADVFGKSGRHIVDGLLNGIDLEKILESIPSGRVRKNKEEIRGIIQANLSSSQIFLLRSHLNTIDAVTKQITEIDAKISDQISMRNEDMKIALSMPGMGFISASTILAEIGDFRDFSSANKLAAYCGLVPSVYQSAGKLINGHITKHGSPHVRRIIIEVAHAIILTKKLSKLKKFFLRVKARRGAKIGIVALARKVLCILYHLLVSRELYQDDLLNKPRCIKKPRMHPIAAMELDEMIRTIIRAGYEVRKNECIGGG

SEQ ID NO: 178871 - protein, 434 aa, unidentified
MARKSKNSTKGTGRMLPLLHPDAAGVDIGAEEIFVAVPADRDVESVRSFDTFTRDLHELVDWLQKCRVRTVAMESTGVFWIPLYQILETRGFQVFLVNAQHIKNVPGRKSDVSDCQWIQYLHSVGLLKASFRPPDEICVIRSLWRHRESLVQMAAEHIMHMQKALSQMNLQLHHVLSEITGVSGLAILDAILAGERDPAKLASLCNWRVRSSHETVAKSLEGDYRPEHLFTLRQSLVGYRFYQKLISEVDQELELGMRELPRAEGAPEQMPPRTKACIYQRAGNEPAFDLKAELFRIAGVDLTDVPGISTITAHTILMEVGPDVSRFRNASAFASWLGLCPERQVSGGKILSTRSRKVKNRAAIALRLGAQLPVSRQELPRGVPPKDEMETGRTRGRHSDGPQTCPHRVSPAVYQGTILGKGLDQMRPASQQSR

SEQ ID NO: 178872 - protein, 328 aa, unidentified
MSHFIGIDVAKATLQIYIPQGELDLEFTNTKSGLNKLYKTLKLSYKESLQELVFVYESTGCYSRPLEEFCQKMKVNCFKVGAYQSASFSKTIKNRNKTDKVDARMLSAMQMLASEGDIKVPYRDEDAHQLRSYVKYYQSLNKEKTRQKNYLEALEINQEDDYILKQVKKRIKQIDKEQDNLMVLSMKLIKANTEYLNAYNNITSIKGLGQISGIILLYLFLRYPNASRQQMTALTGLDPVQKESGTSLKRKTRISKQGISLVRGLLYMPILSTVQHNNEMKHFYERLIESGKVKMSAQIAVMRKVILLAHSLYKNDEMYDENKYLTFI

SEQ ID NO: 178873 - protein, 348 aa, unidentified
MAIVGGFDIHRRQVTFDYLDTGTGQVRRGRIDPACRATLRSWLERFAGRGDVTFAVEGCTGWLFVVEELQRAGITALLAEPAETANLRGPKKRAKTDKADSRHIRTLVADGKVPLSWVPPQQVTEMRALLQLYKDLREEHTAWAQRIHATLFHQGVPSLAGRLSDPQARAVLASGQGIGLSPAGAQAVQVALRRMEDLEGELAPVHAQIAAFARRQPGCKTLQQQLYGAGPLVAAIVWAFLGDTRRFSSSAQAVRHTGLDVTVYSSDGKRTPGRLSHQGPPILRWALFEAGHQGSRASSPDHRYYADVAARIDANRAALSVARKLARRSHHILRALGDQAYAPVPAGR

SEQ ID NO: 178874 - protein, 433 aa, unidentified
MTPDDIDVWVGLDVGKSAHHAHALDHGGNTLYDKPLKQDEKAIRTMLGKLSKHGRVLLVVDQPNTIGSLPLTVARNMGIAVAYLPGTAMRRTAQLLPGDAKTDRRDAHVIAWAALKLPETLRDAGPDDETLAALKLLAGHDEDLAHESTRHVNRLRSLLLQTHPAFERALKGERITRDATLALLERYGGPMGVKRAGIEDVKDWAKSNGLRAGRIIDDMFKAIGEQTVTVPGTLMAETIIPSIAYDIKTIRDRRREVGRQVEKLLEDHPLLTVLTSMPGIGVRTASNILLGIGGDIANFKSSAHLAAYAGISPVTGQSGTSIKGERPSRRGQQTPQERAVADRVRRIHQTPALRGLLQAQTRTGQTPQRRHHLPRASALRRDLQHAQKRNPLPGTSPRSLNRATRERTPDATGRAKRAHDSQPESRHVNSPRS

SEQ ID NO: 178875 - protein, 335 aa, unidentified
MQAVTTIGLDIAKSVFQVHDATGNVVIRRQLKRRYVLAFFQKLAPCVVGIEACATSHHWSRELKALGHTVRLMPPAYVKPYVKRQKNDAADAEAICEAVTRTNMRFVETKTPEQQSCLMLHRTRHLFIRQQTAVINAIRAHLAEFGIAARVGRHGVKDLLHVVADSSDRRLPEVARACLAALGVQLRMLKAQVLAFDRRIMAWHRSHETSKRLDEIPGVGPALATALVASVADPKAFRSARHFSAWVGLVPKQHSSRGKDRLGSISKQGDRYLRSLFTAGVLAVIRYAKIHGTKHRPWLTALLARRPTKVAAIALANKIARMAWAMMKEPAALAA

SEQ ID NO: 178876 - protein, 391 aa, unidentified
MEGLQPLHRRVAGIDVHRMLHVVTVVVEQPDGSIEQTSREFGGFRRDCRALAAWLAELRVELVVMESTGIYWKSVHAHLENAGIVAWVVNAHFIKHVPGRKTDMSDSQWLAVLARFGLVRASFIPPKDLRELRLVSRYRRKLTQMHSAEVNRMHKVLDDAGIKLGGVVSDINGVSATAMVKGLIEGQGIASLLDMARGALKLKRDDLQAALDGEFSPRHLFVLKHLHAHIQALQRELADIDAYLLAAMQPYALAHGLLQTIPGIDQISAAHILVEIGDDMGRFGCAERLASWAALCPGNNESAGKRKSGKTRHGNGVIRYILCECANAARMTKSTLAAKYRSLMVRKSHKKAIVAVAHKMIRLIYVLLTRKQAVAYGPYLCLGALLTLYLM

SEQ ID NO: 178877 - protein, 340 aa, unidentified
MKKPKYYIGLDVHKERTTYVVRDKIGNILSEGETATLYHELFPRLKSYLTQAVIGLEASTSYYTLYQTFLKQGYTIQVANTIQLRQLITKNDRLDARRLAEMLRLGTFPRSYIPDEHIQQLRSLIQIRHSQMEEKVRCNNRIQAFLDRNGVPMPPYKAFSKKWRYALMQHMGSGKVSIELRHAYDHYTFLEKKQEQIEQEIQGLTQKHWANEYNLLQSITGIGPVIACYAIAHILPIQRFSSNKKLRRYAGVVPTCKESGNTRSPGHIPKTSSRQQLRWALIQAANTIGKTNTNLGRYYRKKKKQKKNAGIAKVAVASSLTDIIYKVLTTKQPYTPHIKC

SEQ ID NO: 178878 - protein, 373 aa, unidentified
MPKYSTAFGMDVHLRSTTVCALDADTGEAVTRRFPGNPWGEIAGWMDGFPGPSLAAYESGYLGFAPQRELAGLGVECVVAAVSKIPRSAADSASKNDRNDAARMAKAILAHDISPVWVPSPEVEGIRDLAGAYDGATARLATAKQRLLAFLARRGFVYGGTTPAGNPRKYWTYDFLRWLDKVRPEDDGGVRALDALRNEVEAAAEARADLLSEYRAAVDASPIAAEVAALQSIKGCAFALAAAFSAEVGDFTRFRSGRQVTSYFGLAPKQRSSGDSVRLGGISGAGNALVRKLAVEGSWCYAAARHQPKLMPRDTGVPLEIRVHGRKGSERLLRRREEMLARGMPAAKANAATAAELVRWLWALGMMCREGAE

SEQ ID NO: 178879 - protein, 328 aa, unidentified
MFYLGMDVAKAKLDCCLLLDEPAGRRKTKVVNNTKSGIAELLAWVAKLNVSAGELHVIMEGTGVYHEQAALALADAGVTVSIVNPAQIKDFGRGLAVRTKNDGMDSFVLARYGALVKPAAWTPPAPEARLLQALLARRDAIAQDLQRERNRQEKAEATDTPELIRQSLADSIEFLVKQLKQLQADIDQHIDRHPGLKDDLALLQSIPAVGPQVGSNMLSVLHCHDFGSAEQLAAYLGLVPVERQSGSSVLGRARLSKAGPARIRAVLYMAAVVATRCNPHVKAVYERLLERGKSKMSALGAAMRKLVHLCFGVLKTRQPYQANYAKID

SEQ ID NO: 178880 - protein, 386 aa, unidentified
MKRTVCGLDVHKDSVFCCIICTDGRKIQHKFGVLTEELVVLRDLMESEGVEECAMESTSIYWMPIWRVLEGSVKLHLVNPYFIKQLPGKKSDVKDAEWIAACLMNNLIASSFVPDEKIQRLRQYDRRIFDLNTSISRNLVKLDQCVQRCNIRISNYISTTDSKGYRSIVKLMSQGITDSSVLVRQLHGRTINKHGKETLIKALTGVVNDTDIDIISQLVEEIEMQQRHKDEAQKKMTALCEEWFPKELGNLQTVPGVKERSATSIIAELGADMEQFQTPKKLVSWVGLRPRNEESAGKIKSRRITHGNKFLRKTMIECAWASSRTKESFFAEFAYRQCVERRKNRMKVQVAIARKMLVAVWYVLHDGVPYKKPSDHYPTAVAAVES

SEQ ID NO: 178881 - protein, 412 aa, unidentified
MARISREATEVKMKVYIGIDWSENKHEICFMHETGEVLLVREIPHTIAGFQQLDQARQSLGVGRQEVIIGLETAHNLLVDYLWDQGYEQIYVLPPSAVKSAQKRYRQSGAKDDAWDAHLIADLLRTDRQRYAAWKPDQPLTRQIRAEVRFAQQLGHELVRDGNRLRSILLCYYPSALEAFPHLDSVVFLAFFQTFPTFQQAQALSFAQLKVFLREHHHTQTRFWPTIYAGLHSEPPASNPEVEAAYAPLALAQARILETLVRSRSECLARLGKLYLLHPDREIYDSLPKAGTLLSKLGDDRTRYPSPAILQAVAGTCPVTNRSGKHSRVYFRSACDHEFRHIVQQWARLTLEASPWAATYYRTVRPHCKTDSDAIRRLANRWLEVLWRLWVDRKPYDEAFHLKQHVLRMQVH

SEQ ID NO: 178882 - protein, 352 aa, unidentified
MHATTVAIDLAKDVFELAFADAQGRIIKRKRLSRFAFTCCLANRPPLRVLMEACGSAHYWARVFQSQGHQVRLLPARDVRPYVRGNKTDRADAAGILEADRCGQIASVAIKTPEQQGVQAQHRVRERLKAQRTSLSNLLRGVLREFGIVIPLGAAKVRPAVREALEDGENALPMPLRETLCALLDQIDALETMMAEIEQQLAAFARRDADSRRHQQAPGVGVLTATAITASAGDLHRFVSGRHFAAWLGLTPREHSSGRSRKLGSITKRGDPYLRTLLIHGARSVLNAALKRRKRGQALDRFQSWALEVAERRGHNKAAAALANKIARRLWAMTRDGKPFDGDHVSKMPAMS

SEQ ID NO: 178883 - protein, 342 aa, unidentified
MTPSTHPCYEHFLGIDVSKDMIDCLLRPGEAYCQQANRPEGFRRLHRWLGNHHCSRQHTLICIENTGIYSERLLAGLTHREWKCAVVKTTATSKVAPEHHRKEDRFDAALLAEYGQRYADRIELTDPPETVIKQLQQLYAERGRLIKARGGTQNRRQQSSHALVPSPLLARQWTQQLKLYSQQIETLEARMHQLITKHPGLHHYYKLLRSIPGVGPVTAWLWLMLFYGDDHLNYKQVASRFGFAPHRHVSGSSVRNRTRSAGHGHSQMRACMTMVARSVSYHYERFARYKKRKLEEGKPWPVVRNNLINKLIKIICAIWNSGQPYRQDYESRYDQQKKSLNT

SEQ ID NO: 178884 - protein, 412 aa, unidentified
MSLALTEALFFVGIDWATAEHAVCVTDATGKIVSQFVVKHSADGIAALIRRLARFGDPAGIPIGIERPNGRLVDLLLEAGHPVVPVKPNAIKTWREGEVLSGAKSDAGDAAVIAEYLRLRQHRLQVAVPYSPQTKALRTVVRSREDLVQMRVAATNQLSALLEAYWPGAKAVFADVESPISLAFLTRYPTPAAAARLGEKRMQAFCVKHGYCGRRPAAELVRRLRDAPAGTTDEALAEALRDAVLALVAVLTALNTAIKDLDRSCAAHLGEHPDGKIFTSLPRSGQINAAQMLAEWGDCRQAYDGPDAVAALAGATPVTKRSGKHEATHFRWACNKRFRKAITTFADNSRHASPWAARIYRDATTAGKDHPHAIRILARAWIRVIWRCWLDGTPYDPTRHGAAQRLNTSTAA

SEQ ID NO: 178885 - protein, 404 aa, unidentified
MYNAVGIDVSKGKSTVTVLQPGGTVIRKPFDVSHTSQNLNELAAYLDSLDGDTRIVMECTGRYHEPILKALSEAGLFVSVVNPHLIKNFGSNSLRKVKSDPADARKIARYTLDNWAELRQYSGMDNTRTQLKTLNSQFSFFMKQKVAVKANLIALLDNTYPGVNKLFDSLVREDGSEKWVDYAYSFWHVDCVRGIGLKAFTERYQAFCKRHHYIFQADKPEKLFNASKELAAVFPKEKTYKLLIQQSIQQLNLASGHVERLRREMNELASTLPEYSTVMGIYGVGRTYGPQLIAEIGDVSRFTHREALTAFAGVDPGVDESGQHKSKSNRASKVGSARLRKTLFQIMTTLLQNAPEDDPVYRFLDKKRSQGKPYYVYMTAGANKFLRIYYGKVKECLRNLEQES

SEQ ID NO: 178886 - protein, 359 aa, unidentified
MQTRGQTLNFSGQNIYAGFDVHLKSWAVTIMTDEITYKTFSQPPEPEVLYQYLQRNFPGGEYYSAYEAGFCGYWIHNSLVSLGIHSIVVNPSDVPTTNKEKVQKEDKRDSRKLAKSLRSGDLVPIYVPSAKTIEDRCLVRTRSMLVRDLTRNKNRIKSFLHFHGIKILASFENSRTHWTKRFINWIEAIEMKEDSSKLTLSLLVSECKKLRGTILTVTRSIRELSQTEAYMQQEKLIRSVPGIGPITAITFLTEVETITRFNNNDQLHSFVGIVPSTRSSGEKDVVGNITSRGHSILRSAIIESAWIAIKHDPALMKTYHDYCKRMEPNKAIVRIAKKLLNRISFVLKNKQPYSLSVVK

SEQ ID NO: 178887 - protein, 319 aa, unidentified
MAATAHAEKLFVGIDVAKDKLDVHVHPAGEDFTLSRDAAGVEQLVERLGGHALALIAIEATGGFEGPVVAALGVAGLPVVVVNPKQVHNYAKALGLNAKTDRLDASVIARFAAAVKPEIRPLPDAETVALSELLARRQQLVQMITAEKNRSMRIASNRRLQQSIARIIAALEAELARIEDGIDTMIKGSPLWREKEDLLASVPGIGKTIARTLLGEMPELGKLTGKQIAALAGLAPWTRQSGQWRGRSMIGGGRAAVRTALFLGAMVASRHNPQLKAFRARLLNNGKPKMVVLIAIARKLITILNAILRDRTPWNPKTA

SEQ ID NO: 178888 - protein, 453 aa, unidentified
MPKKRQNREVKLPVLRPDAAGIDIGAEEIFVAVPADRDSQPVRRFPTFTQDLNALADWLTKCEIRTVAMESTGVYWIPLHQILESRGFEVYLVNAQYVRNVPGRKSDVSDCQWIQYLHCVGLLRASFRPPAEICPIRSLWRHRESLIQMASQHTQHIQKALDQMNLQIHHVLSQITGWSGLRILDAILDGDRDPVALAELCNWRVRTSRDIVAKALEGDYRPEHVFTLKQSLAGYRYYQNQIAEVDEELNKYLRDLPNAVEGQASPPPRTKTRVYQKQHNDPAFDLRGELYRIVGVDLTDIPGINELTAHTIVSEIGTDVSRFRNASAFASWLGLCPEKQVSGGKVLYTKTRPVKNRVANALRLGAHCLYHANNYLGEFFRRMRRKLGAAEAVTATAHKLARILYHVLRTKEAYNESVFLRHDQEAIKRAEDRLRKQAAKLGFQIVPQQPSEV

SEQ ID NO: 178889 - protein, 464 aa, unidentified
MRTDKRLWRNRKAKKELARRLQSENPGLEVVHAHAAGIDVGNGAHYAAVRPDRDLQPVRRFECFTADLYRLADWLQNCGVKTVALQSTGVYWIPLYDILEERGFEVYLVNARHTKNLPGRKSDVQESQWLLKLHTYGLLNNSFQPSSKIRILRTYWRQRLQHVTGAATCVQRMQKALTQMNIQLANVISDLSGVTGQLIVRAIVAGERDPQKLTELSHPRIQASRGEIAKSLEGNWRQELIFVLQQEIEMYDTYQRRVAECDQELQKHLRAFADTVAPVQQELPPKKKKKQNKNNPHFRLADELQRITGVDLTRIDGVDVMVAQTLVSEVGLDMSRWKTEAHFASWLGLCPDNRISGDKVLSRGTRHVLNRAANALRLGASTLLRSQTYLGAQYRRLRSKLGAPKAITAMAHRLARLVYRMLKYGQQYVDKGAEYYERRNRQQQIEFLKKKAARLGLQLTPVYP

SEQ ID NO: 178890 - protein, 343 aa, unidentified
MKLFIGLDVSLAKTAVCVINEHGKIVKEAQVLSDPQAIVDFANTLEGSVAIIGLEAGPLSQWLHRGLADARLEVVLMETRQVKGALKAMPIKTDRRDAEGIARLLHLGWFRPVHCKSVSAQEVRALLSARKAIQQGMIALELSLRGLLRNFGLKVGAISRGQFDARINQLVEGNSMLQAASGPMLRARTSLRHELAGLERQVRLLAKDDAVCRLLMTMPGIGAVVALTFRSAVDDPARFSSSKKVGPWVGLTPSRNQSGERDVIGGITRAGDANLRRALCQAATVMIHRGRSTWLRSWAAQVAKRRGAKRAMVALARRIGTILHRMWTDGTEFSSDRLLAKSA

SEQ ID NO: 178891 - protein, 402 aa, unidentified
MNAVGIDVSKGKSMIAIMRPFGEIVSTPFEIKHTASDIRSLVELINSVEGESRIVMEHTGRYYEVLAHQLSEANLFVSAINPKLIKDFDNDSLRKVKSDKADSVKIARYALDKWQNLKQYNVMDELRNQLKTMNRQFGFYMKHKTAMKNNLIGILDQTYPGVNTYFDSPARSDGSQKWVDFASTYWHVDCVRKMSLNAFIDHYQNWCKRKKYNFSQSKAEEIYGKAKELVPVLPKDAITKLIIKQAVDQLNSASTTVESLRTLMNETASKLPEYPVVMAMKGVGTSLGPQLMAEIGNVSRFTHKSAITAFAGVDPGVNESGTYEQKSVPTSKRGSADLRKTLFQVMDVLIKTHPQDDPVYQFLDKKRAQGKPYYVYMTAGANKFLRIYYGRVKEYLASLPES

SEQ ID NO: 178892 - protein, 400 aa, unidentified
MRVVGLDIHRSFAQAAIFEDGRVIQEARVELVRERFLKFARSLRNDDEVVVETTGNSAAIERLLRPYVGRVVVANSRLVKAIAWARVKTDKVDAVTLAKLHAGGLLPEVWVADDTTVARRRQIAERMGVLAQLVRTKGRIQATLHANLIPKYEGHLFGPDGRKWLAALPLADDERRLLARYLDELERVSMQLAELDKILAQQSLDDPRARRLMTIPGVSSVVASTILASIGEIGRFPTPEKLSSYFGLTPRIRQSGDHPARHGRITKQGNRDARRMLVEAAWSAKTAPGPLRAFFTRVQNKRGAPTAAVATARKLAVLIWHVLSTDQDYAYARPAFTAMKLRKLALKAGAPRAYGKAGPGRDYWIREIREREALYVERAERAYERMVAAWQATPPKPVGK

SEQ ID NO: 178893 - protein, 347 aa, unidentified
MITIGIDPHSRTHSAAALDEGGRVLAEITVGSDAGELDRLVRWIKGVGPERIVAIEGARGFGLALCRRVLAAGETVLDVAPALTASERRSSRRPGKDDRGDAVAVARVALREQGLPRASAEVGGSDLKLLVDARDQLVAEAPRTRNRLHAMLVTIAPGYHEQIRDLTTSAALLVARRLASRARGADRVRSSLACSAITRLRSLSGEIGVLEREITFLLDEAAPANLLSICGVGPLVAAKILGEVRDVGRFSSAAAFASYSGTAPIPASSGTIIRHRLHRGGNRQLNRALHTVALTQARRDDRAKLFLTRTRAEGKTPREARRTLKRLASAVYRALLLDAEEVRSTPA

SEQ ID NO: 178894 - protein, 415 aa, unidentified
MDASLPTGKVIGAHIDETAVYQEENHELLEVDPLMDTASKCPNVINQGLHKHHRGSIMNRNTGMNAGKIIGTMNGQQVVGLDIAKKVFQLHTVDMGTGEIINVQIKSGKVREHFANRKSCLIAIEACGSGHYWARELQALGHTVRLLHAKVVRPFVSGNKTDATDARAIWLAVQQPGVKFVGVKTVAQQATLTLHRQRESLMKMRIMQTNALRGLLYEFGATFAKGKKALFSEIEVTLEALVETLPQVVVDSLREQVERIKKIDEDMLTIEKRLKLQLKQDPQMQRIAKIPGVGLLTATAVIATMGDASAFKSGREFCAWLGLVPTQTGTGGKVRLGSISKRGDTYLRTLLVHGARSVVNNGKTPGPWLQGLQARRPANVVCVAQAAKVARTIWAITAKDQEYQNAHKSIRPQAA

SEQ ID NO: 178895 - protein, 360 aa, unidentified
MSDGSKGRPKITAGLDLGDKYSYLFLIDQESGEVVEEGRLRTTPEALRRRFGSEQPMRIAIEAGTHSPWVSRVLEECGHEVLVANARKLRLIYANKRKTDEVDAENLARLARLDPKLLYPLKHRGEDSQAHMAIIRSRQALVGARTQLVNHVRGAVKSFGARLPKCPARSFHKRASEHIPEALLPALGPILEQIGSLTERIRDYERQLEAISKEHYPETELLRQVEGVGGLTALTFVLTLEDPYRFERSRSVGAYLGLVPATERSGERDPQRRISKEGDQMLRKLLVGSAHYILGPFGSDSDLRRHGEKIASRGSKNSKKRAAVAVARKLAVLLHRLWVTAEVYDPLYNAHRSQEREEAA

SEQ ID NO: 178896 - protein, 421 aa, unidentified
MNMTSKSAQFAALIGIDWASQRHALCLYDCATAKRESSILEHTPEAIAQWARGLQERFKGKKIALCLEQSKGPLIYALLEYPFFVLYPINPATAARYRMAFKTSRAKDDPSDAQVCLELVLHHREKLNPWLPNDAPTRELSCLLQHRRAAVDLRTLLTNMLRDALKSYYPQALELAGQDLFAPLGCQFLLKWSSLQELQRARKESVRKFYYAHNCRRMDVIEKRLDAIAQMTPLCRDRALLEPAMVQVRMLARQLLQLGGALKEYDSKIEQLFAQHSDALIWESFPGAGPTLAPRLACAFGTQRSRYQSAVAIQQYSGTAPVTEKSGKNQHWVHRRWARPHFTHQSFFEYASQSVLHCSWAKLYLKEQMARGKAYPTAIRALAFKWQRIMFVCWRDRVPYDETIYRQSLQRRGSHLARKLN

SEQ ID NO: 178897 - protein, 341 aa, unidentified
MKSKFPTDRYFRQCVGIDVSKSKFTACMCMLSWGCPAQFTGSVEFPNTKTGFNQLVRWARKEAEDGHPLLFLMEPTGTYHEDLAYHLHKLSFTVHVVPSGRVHAFFKEEGIKTKTDSVDASGLALMGSSKPCLKEWNPPCPAYRELRQLTRLQVHFKDMRTMLANHREALSHQHAPSSHAISHIDALIKSIGLRIGKNRASIEELAGNDREISEKLAYIQSIKGLGLLAAITILAETDGFANISGRSQLASFAGLDVVARDSGKSTPARHISKAGNTHLRRIVYICSLSATVYNPQMRALYLRISQRNPSKVARVAVMRKLLLLAYTLCKSKQMYDPEKLK

SEQ ID NO: 178898 - protein, 359 aa, unidentified
MASKVKKNKINFKGKTVHIGIDMHKRSWHITALVEGDIVLTLTLARPGYETFLKVLSRFKGNYVRIVYEAGPGGFDLYDRLTADGIECIVTPPSCIPTESGSRVKTDKKDSYKLARLFENNMLKKVWVLSPEERAHRQLVRTRRQIVNHRSDVMRQIKSLLFFHGIQVPFSSNQQWTGPFVTWLREVELGNEYLNRSLKSLVDLFDHLSAEKKSLTLEVNQLAKEEKYAHRVQLLKTIPGIGCLSALEILVEIQDVSRFKTADELAAYLGLTPAQYSSGEHIRMGHITHAGNDRVRTTLVESSWLLIAKDPQMRCKYENIKHRRGGKRAIVAVARSLSARIRRMLLDQVPYELDFQKAA

SEQ ID NO: 178899 - protein, 343 aa, unidentified
MQVITTIGLDIAKSVFQVHGVDAGGQVVMRRQLKRRYVLTFFQKLPPCVVGIEACASSHHWSRELQALGHKVRLMPPAYVKPYVKRQKNDATDAEAICEAVSRPNMRFVETKTPEQQSCLVLHRTRHLFIRQQTAVINAIRAHLAEFGIIAPVGRNGVEQLLGVVADASDKRLPEVARACVAALGAQLQMLKAQILEFDRMIRAWHRSSEASRRLDDCPGIGPALATALVATVADPKVFRSGRNFSAWIGLVPKQHSSGGKDRLGSISKQGDRYLRGLFVAGALAVIRYAKIHGTKHRPWLTALLARRPTKVAAIALANKMARMAWAMMAKGERYKEPAALAA

SEQ ID NO: 178900 - protein, 339 aa, unidentified
MKITTIGLDIAKSVFHLFAVNKMGRFVKKKQLKRRQVLSYLARLEPCLVAMEACGGANYWSREIEALGHEVKLIAPQYVKPFVKGNKNDYNDAEAIAEAAQRPTMRFVPIKSVEQQDIQNLHCRRERVKKARTAVGNQVRGLLAEYGIVINKGIAAVRRDLPDILEDAENGLTMRSRELFADLYEELRELDERFKQCDKQIEISNRGNEVCQRLDEILGVGPLIASATYAAAGDGKNFVNGRHLSAWIGLVPGQHSTGGKPTLLGISKRGNAYLRTLFIHGARAVLRHSAGKTDPFSLWAQALLARRGHNKACVAVANKMARIAWVVMAKGETYRPAMS

SEQ ID NO: 178901 - protein, 385 aa, unidentified
MKGQTFKPTDYEVFAGLDVDKRSISVTFTNHQGFIRSLRMPYSVEHLVNHVRKHFADQKVAFAYEAGPTGYGLYDGLVAQSYPCLIASPSMIPKALGQRVKTNRLDSRGLSENLRGGQLKSIHVPSALYWELRHLTQLRDTFVSEMVGMKQRIKSLLLFEGIEFPPAPAGRQWSFMVKEKLRKLECSKTVRFKLDQLLDSLEFSEKQVLKATREIRRFCHNDTELSQCIEYLMTIPGIGWIVASRLVARIGDWRELKNIRQLGGFLGLVPTENSTGERTDRGSITHTGDGRLRSKLIQASWSAIRQDGELREFFRSVCQTHARHLACRVAIVAVARKLSVRISVVLMKQRPYEVRQKVQSAPLTQEETSPQGTTRREPEPGEKNS

SEQ ID NO: 178902 - protein, 352 aa, unidentified
MEMIALDCHKHYSVASVQSPEGRCLAERRIEHRRGSIRAFLAPYSDGCPVAVETIGNWYWIVDEIEQAGKVPRLVHARKAKLMLGSINKTDKLDVRGLNRLQQTGTLPTVWIPPAGLRDQRELPRTRMVFATARTRLKNRIHSVLDKYGFQDQFTGVSDLFGVGIRERLKKCLQQLPPQAAYTSGLLLEQLEAVQETIEALEERMAEVFKPTEELERLDTLPGVGLILGVVLMLEIGDIQRFRCPEHLASYAGTVPRVHASGGKTHYGRTRPDVNHYLKWAYTEAGNAVAVHREHLAHRHVGQLYSRIRSRRGHASAVGAVARHLAEATYWMLTKKESYRERGITEVSPQGV

SEQ ID NO: 178903 - protein, 412 aa, unidentified
MELLHQRCAGLDVHKLTVVGCVRVASESKVVTEVKTFKTTTQGLLALADWLAENGVTHVAMEATGVYWKPVWHVLADGELQLILANAAHVKNVPGRKTDVSDAVWLAELLAHGLIRASFVPDAATAALRTLLRTRKQLVREKTRHAQRIHKTLEEANIKLDAVLADVLGKSGRAMLDAMVAGESDPERLAALAHKGVKCPPEQLREALRGRVNEQHRFLLRTHLGLIDALDAAIASMDRQVEASLSPFRDAVELVSTIPGVKALGAQGIVCEIGTDMSRFPTAGHLLSWAGMCPRNDESAGKRRSTRLRKGAPWLKTLLVQCAWAAIRKKGSYPQAQYLRLKSRRGPQKAICAVAASILTAVYHILKDGTLYHDLGPDHFHRRSKTTQIRRLVTRLQHLGCNVEITPMHAAS

SEQ ID NO: 178904 - protein, 343 aa, unidentified
MDHFAGLDVSVKETSVCIVDDTGRIAREMKVASEPEALLQVLKNPTYRFQRIGLEAGPLSQWLFSALAEAGLPAICVETRHMRAALKAQINKTDRNDARGIAQMMRAGLYRPVHVKTLRSQKLRMLLTHRKLLQSKAIAIENDLRATLRNFGLKVGVVGTVKFEARIKELVEDLPDLAMLVEPLLIVRRALREQIGILHRRLLAIVRDDDVCRRLMTIPGVGPVVALTYRATVDVPARFRNSRAVGAVFGLTPSKYQSGEVDRTGAISRCGDEMMRAMLYEAAHILLVRTTKWSWLRAWAMTIARRRGLKKAVVALARRLAVIMHRIWVDGTEFRWTREAAAA

SEQ ID NO: 178905 - protein, 361 aa, unidentified
MNKISRVGVDLAKYLIQVHAVDAAGKVVTNRAVKREKFLLWCADLPAGCLIAMEACSGAHHWSRKLIERGFDARIIPGSSVAPYRMQGRSGKNDANDAAAVCEAASRPHMNFVPPKTLAQQGMLCVHRLREGLKEERTSCINRIRGLLAEFGVVLPQSPEVLRRHLSDIVEDASNDIAGVARLVLQRAQEHWRELDAHIKWCDQRIADHQKNDEQVQRAAELMGVGSITASALVATVGDFRQFRNGAQFAAWLGLTPKQHSSGGKTSLGSITKRGSVYLRTLLIQGAKAITLTRQYDNPIFLWAQKLRERAGWQKAVVALANKNARILWAVMTREKRYDAHHVSSIPLPAPVTAPALVSVT

SEQ ID NO: 178906 - protein, 395 aa, unidentified
MNHINKTPKKVNTKSFKEQLDRDYPAYIGMDTHKETIAISVADPGRGKPKFLTEIANDPKKVEKIVTTLSKKYIGEVLLFCYEAGPCGYVLYHQIKSLGHDCIVVAPSLIPIKAGDKVKTDRRDANKLARYLRDGSLTSVWVPNTEQEAIRDLVRIRDDFKSHQKKAKQQLGGFILRHGHSWPRRKSRWTKGYFTWLENLKFKHAWQQLVLQEYIEAVNSATLRLGEIDKSMIQAKSQWELSPIIDSLSALRGVDTLSAMTIIAELGDLTRFSHPSKLMAYLGLTPSEHTSSTKRRLGSITKAGNIAARRMLVECAWSYRFPARQTAHLKRKARNASDYAKNVAWKAQKRLCGRYQTFVHSGKDSKQTIVAIARELVGFIWDIVNHEMAKLNTKT

SEQ ID NO: 178907 - protein, 333 aa, unidentified
MMNMHQQGGATEGKRPNAGIDVSKDFLDVCVGDAEVRMPNDPTGCAAVVELMVSSQVDLIVLEATGGFERGAVGALQDAALMVARVNPRQARDFAKSMGALAKTDKVDARLLRDFANVIANHKDRAKYVTPMVEPERQLLSEMITRRRQLIEMQVAEGNRLAGARHKDMVRSIKRMLRAIESQIKELDEDIDNHLDGHFGPQKALLDTVKGVGPVTIMTMIAALPELGRLDRRAISKLVGVAPLSNDSGHRRGKRSIWAGRSHVRAVLYMAALVAKVHNPIIKAFFDRLVAAGKPKKVALVACMRKLLTILNAMMRDQRVWAASSSLVVVQNG

SEQ ID NO: 178908 - protein, 381 aa, unidentified
MTKPYDLSKPLVALDHDSTLVCVIEMSGSSWLVAATVPGVDRRPLQKLPVNPTRLLEQVERWRKEATRAGRTITRTVVAYESGRDGFWLARLLQGHGIEAHVIHASSVAVSREQRRAKTDRLDTEMLMRALLGWLRREPGHCRMVAIPTVAAEDARRPGRERDGLVAERTRLTNTIKAELALWGIQGFKPGLRKAAEHLEALRTLEGEPLPPNTLARLHRLLKRRSLLSEQITAIERSAAQAVERDPTGSNALILLLIKGLETAQMLVHEVLSRNLRDRRAVARYAGLTGTPDESGSKRREKGISKAGNPRVRRGLIQLAWRFLLFQPDAALVRWYRERTAGGTGAIRKTMIVALARKLLIALWSYASARVMPEGVVLKEA

SEQ ID NO: 178909 - protein, 352 aa, unidentified
MSIIAFDSHKYYTFARVEDENGQNVQEYRIEHRRGNIAGFLGRQQPGSVVAIETIGNWYWIVDEIEKAGMRPVLVHAGKAKLMMGCINKTDKLDAKGLNMLQRVGRLPTVWIPPADIRDKRELPRVRMVFGNARTKLQNRIHSVLDKYGLQDEFEDISDIFGVKGIQRLNRVIEQLPEQTYCTTVLLLEHLEQTQQKIDCIEGRMKELFEETPQSILVETLPGVGFILAVVIIQEVGNIGRFSSAECFASYCGATPRVHASGGKVRYGRLRPDTNHYLKWAFSEAGNSVALNSKRLPARHVSQLYNRIRHRRNHGKAIGAVARHLAEATYWMLTKGEAYRERGLLEVSSTGA

SEQ ID NO: 178910 - protein, 338 aa, unidentified
MAILYVGIDLAKSVFAVHGVNEAGKPELVRPNVARAKLVELIAALPPCVVGMEACTGAHHWARLFMAHGHVVRLMAPKFVAPYRLSGKRGKNDAADAAAICEAVQRPNMRFVPIKSVEQQARLMVHRARQGFVEQRTATLNRIRGLLGELGIVLPLKAATVRREAAQVLEDLPGRANLVIGDLLSEVHRLDERIERYDGQIAQMAREDDRASRLMRLGGVGPTTATALVAMIGNGHEFSSGRQLSAWLGLVPGQYSSGGKTRLGRITKAGDDYLRSLLVMGARALLNAAKGKNDSVSRWAVQLAERRGYWRAIVAIAAKNARMAWAVLSRGEKFVMPA

SEQ ID NO: 178911 - protein, 383 aa, unidentified
MNDAKYIGLDVHQATITVAVRDSAGKLVIEAILETKAETILQFLHGVRGSLHVTFEEGTWAAWLHDLLKPHVTRVVVCDPRKNALLKAGNKNDRIDARKLSELLYMNKLSAVYHGEQGIRTLKELARSYLTVTRDLTRVMSRLKAIYRGWAIPCAGEQVYAPHYRAEWLAKISEAGVRRRAELYYVQFDTLAALRQGVRRELLAESRKHPATRLLRQIPSIGPIRAALLVALIQTPNRFRTKRQLWAYCGLALRTYISGEYRFVSGQLKRSKKVLAVRGLNLNHNHDLKNIFKGAATRAAATAGPLQDFYEARVAKGVKPHLARLTLARKIAAITLLVWKKGERLCAGINRHEVENARVSRERTSDSPGPEFCAAYREVHSEA

SEQ ID NO: 178912 - protein, 349 aa, unidentified
MAVTIVEEARPITGGVDTHADTHVAAALDSVGGLLGVREFPATAAGYSRLLGWLGGFGTVCLVGIEGTGSYGAGLARHVTAAGIRVVEVDRSDRQDRRRQGKSDPLDAVSAARAAQSGRARGAPKGRDGAVEAIRALMVARRSAAGERTRTINQARALILTGPDDLRTRFTRHTPAALVAGLASLRPRPGDVAGYAVRVALRELGRRAQFLDGQLGRLDDLIVPLVTVRAPGLLALYGIGPRTAALLLIAAGDHPGRLRSEAAWAHLCAAAPIPASSGKVTRHRLNPGGDRQANHALWRIVFTRLGSDPATRAYAERRTAEGKSKAEIIRCLKRYVAREVYPHLRPAGG

SEQ ID NO: 178913 - protein, 430 aa, unidentified
MKSNTQNAKIEAITEKTLVLGIDVGSETHYARAFDYRGIEYSKKPFKFSNTEAGFVTFKEWILDLKERHEKDKVVPGMEPTGHYWFNLGKFLQDNEMKPVLVNPHHVKKSKELDDNNPTKNDRKDPKVIAGLVREGRYMIPYLPDGVYADLRTASNIRFQLQVELTRIQNRISRWFNIYFPEYKTVYGKPDAKSGMLILKAAPLPEDILTLGIDGVNQIWRDAKLRAVGKARAKTLIEAAEHSVGSKEGAVSARMEIRMLLEDYESRNIRLQEVMTLIEGLVKQIPMAEKLLEIKGVGIKTVSGFLAEVGDISRFNTPKELQKLAGLALVESSSGKHKGETTISRRGRKKLRYLLFEVAMSLVAKNPEFRELHNYYTTRRLNPLKKMQSLMAIAAKLIRVFYAMLTKGVDYDPKKMVSDIKRPAVYLQAA

SEQ ID NO: 178914 - protein, 350 aa, unidentified
MDKDSRFYVGMDIGDRISETHVLDGEGELVEHSRVPTTKSALERKFSAMPASRVAIEVGTHSHWVSRSLSGMGHEVLVANPRNIPLLTKSHRKSDRADAVLLARMARLDPELLSPVTLRSEAAQEDLLEVRARDHAVRQRTRSIGLVRGQAKQFGARLPGCDADAFHHKAVEWLPAELLERLLPTIQLIEACTKTIKAYDRRLKQMLKRYPVAAALERQIRGVGPVTALAFVLLIDDPHRFTSRGAGAYLGLVPKKDQSGESDPQRGISKRGDALGRRLLVQCAQYMLGPFGEDSDLRRFGLRLAGSGNKAQRRRAVVAVARKLAVLMHALWVSGEVYEALRNSRVADAA

SEQ ID NO: 178915 - protein, 341 aa, unidentified
MKQFIRIGVDLAKNYFQVHALAHEGGPAVTRKLKRSKMHEFFAQIESCLIGMEACGSAHYWARELKTIGHEVLLMPPAYTKPYVKRGKNDAVDAEAICEAVSRPGMRFVPVKSAEQQATLMLHRTRELLVKQRTMSVNALRGHLSEFGIVVAKGIGRVDELLELAESDTMLPEAAKAAVKVLAQHLEGLNRSIDDLEKQIGRAHAQSEMSQLLSEVPGVGKIIASVITASVPDPSVFKSGRDFAAWLGLTPRQNSSGGKQTLGGITKQGNRYIRKQLVLGATSLLNVVNKRKGALRDWIVALLAKKPARVVTVALANKLARILWAMMKTGEFFRAEMFAKA

SEQ ID NO: 178916 - protein, 330 aa, unidentified
MERWNVILGVDVSKLTLDISCAERKLYLKIDNKAKGFAVFKRWCKASEINLNETLIVMEHTGGYEYRFMQFCESQAIQYCRIPGLEIKNSLGMTRGKNDQADAFRISRYGEEKIKKLVPSRPLNKTILALKKLLSFRKRLVRERAGFESTIKERRHMFRADKQDTILQIAQAKVKENKKYIRQLEQEIMNLVKGDEALLLNYRLITSIKGIGNINAWMTLAYTENFSSFANARKYAVYAGVVPFSHRSGTSIKKRDRVSHLANKEIKQELNQAAKTAIVHDPELKAYAERKRQNKCYPLVLNNVKFKLILRMFSLVKRGEKYVDNYKRAA

SEQ ID NO: 178917 - protein, 396 aa, unidentified
MISVGIDLSKGKSTVCVMKPCGEILESPFDIGHTADELDSLISLIKSFDEETRVVMEDTGHYHLPVATYLSSHNIFVCCVNALRMKKFCSQSIRRAKTDKIDSIKIASFGITYWNELVKAYPSNVIYDELKFLARQYYQVTGMLVKSKVNFSNLLDQVMPKINDVLSNQGENHKLTEFVSRYIHFQNILDMEEMKFTSDYCKWAKKKGYSLNERKAAEILALAQNGIPTLPNSQSVKIAVSEAVKLIHSIEESRNTILAQMQDLCNTLPEYSVVKEMDCIGDTLAPRIIAEIGDVRRFKNKHSLIAYAGIDAPPYQSGAFHASERHISKRGNSYLRKTGYEIMQSLIKHKPADNAVYDFIQKKRSEGKCGKEAMIAGLNKFLRVYYGKVMEFYSEH

SEQ ID NO: 178918 - protein, 300 aa, unidentified
MNTTTAAHIDRSERNLGIDIGKSMLDVCIFELDVYMRYTNTPEAIPELLKKLSRYKLTRILVEATGGYERSLVEAFAEKELPIIIVQPTQVRQFGKAQGILAKTDKMDSRLIAQFGAVMKPDTRPLNSKKVRYIRDSRKRQLSEMRTQELNRQHKAPAILAATHKRLIKALDKEIDGINKLLAKAVNDVTEWQRTYEILNSVPGVGDGVTFTVLGELPELGQLSPRKIAALCGLAPFNRDSGIRKGRRRIRGGRAPIRTVLYMAMLSAIQCNPVMKKFYRKLVEQGVSTRKLGLRPACEK

SEQ ID NO: 178919 - protein, 357 aa, unidentified
MVERETEAKSSGSGVTNPYRRTEHCDKIHAYRCDKEVGVIGIDISKEHLITSRGRVRRYENSKKGYEEILKMKPCTIVLEPTGVYAIKPSQYFKERGVRVLQVSPNVLSREKDFRGKKTDFYDAEKLENMVDKAKEYDYNPLKEMTTLYLFLKDIETKYKNRLKRALFLVSDNDKVSKDRLEKLAKGDFTQEELYQLEYTPLVLEEIKILAKNLLETQERLKEVRRMIEGQVPQDHVLLTIPGVGRLAAGIIIGIVGDVKRFPKPESFVAYCGLDPVVERSGKAVVSRGISKRGNKYLRSLFYFLAMRSYSRNPTLLKFYETHKDRLKGKKLYVALARKLARVVWSVWYNNKPYEPK

SEQ ID NO: 178920 - protein, 386 aa, unidentified
MQNLNDFSRSRIALKPDGTLIAVIEMSLSSWLVAGIAPGVERQPLKKLAVDESALLKLLHRWREEAEKAGRRIERIAVAFEAGRDGFWLARWLMARSIEAHVIHAASVAVSREHRRAKTDRLDTELLKRAFLGWLRGERDHCKMVAIPSIKNEDAKRPNRERENLVSEQSRIINRMKATLIRLGIRGFNPKLKRAAGRLDDLRTPEDEPIPPNTLAELRRDMERRRLVRDQIRQIEETRLERLDHAPDDGPHAMVRLLARVIGVGIETADMLVHEVLSRNMRDRRAVARYAGLTGSPDESGRKRREKGLARSGNGRVRRGMIQLAWRFLLHQKDSALARWFRVRTENGRGTRKRMIVALARKLLIALWQLVRQGVVPDGVVLRPAQ

SEQ ID NO: 178921 - protein, 335 aa, unidentified
MTITTIGLDTSKTWFQVHCVDADGRTVLRRKLARSKVLSFFANIPSCLVGLEACGGSHFWARELAKLGHDARLMPARYVRAYVKTNKHDAADAEACCEAVQRPGMRFVPVKTEEQQSMLMIHRARDLLVRQRTAAVNALRGHLAEFGIVAAKGTAKAHELMRLAGDDERLPAMAREALGYIVAQIHDIESRLKIFEQRILSLAKEDEVCRRLMTVQSIGPYIATAIVATVGDPRNFASGRHFAAWLGLTPKQHSTGGKEKLGGISKRGDSYIRRLLIHGARATVARVRSGQTKNAWLSGLLGRRHFNVATVALANKTARVAWAVMSTEQTYRRAA

SEQ ID NO: 178922 - protein, 457 aa, unidentified
MLPVSGLPSEFEQINLNAAGIDIGAQKHYVAVAKGRDPEGRDIRYFDTFTIDLHALADWLKQCGIDTVAMESTGIYWIPLFEILEQNGFDVRLVNPRSIKHAPGRKSDVVDCQWIQQLHAYGLLTSAFHPDDQISVLRAYHRQRTMLVNHAGTHIQHMQKALEQMNLKLTNVISDITGTTGMKIIRSLLAGERDPKKLSKHRDPHCKKSEKEIAKSLNGNWRDEHLFALQQAVALYDFYQTQIMDCDKQIQAQLCRFEDRRDTGELPPAASKSSGSGKKLTFDAREHLYRMAGVDLTQIVGLNTPTVLTVLSEVGLDMSRWPTAKHFASWLGLCPGSKISGGKNFSSKSKPSANRAAHAFRMAAYSLHRSQSAIGAFLRRKKAQLGAPKAITATAHKIARIFYEMLKTRTEYKDLGVDYHQNRYKESMLRNLKHKAKEFGLELVNPNQDQLVMANSE

SEQ ID NO: 178923 - protein, 345 aa, unidentified
MKITTMGIDLAKNVFQVHGIDERGKAVLRKQLRRSQVAAFFGNLPPCLIGMEACASAHYWARTLQCFGPTVRLMAPQFVKAYVKTNKNDVADAEAICEAVSRPNMRFVPIKSIEQQAILSVHRVRQGFVKARTAQANQIRGLLGEFGLVIPQGIYNVAKRVPEILEDASNELPVPFRHLIDRLTQHLKELDRQVREFEQEIIAWHRGSELSRKLEKIPGIGPLAASALVASIADARSFKNGRQVSAWLGLVPRQNSSGGKPTLLGMSKRGDAYLRTLLIHGARSAILAAKNKIDNTQGWLTDLLKRRHPNIAAVALANKNVRTVWAILAHGREFKADYVPTRMTA

SEQ ID NO: 178924 - protein, 379 aa, unidentified
MDHAITGTPAETILHGALELSKNSWLLALQFPDRAQPSLYPISGGDTEGLMAKLTAAGDRWAKMSGKAPSIVLCYEAGYDAFWLARFLKARGIECLVVDPASMQVNRRARRAKTDRIDVGMLLRALIAWGQGDRHVWSVVRVPSVDEEDLRRSHRERDRLVRERTAHINRIKGLLFGQGIRGINVKSKYKTLQIDKLVTGDGCPLPPRLASEITREIARLALIQEQIATLERERDQAPTPCKATEKKRVQLMCLTGIGPAIAAVLTREVYYRQFDNRRQVAGFLGLATSPHDSGDVERSQGISRAGRGQVRGTMIQAAWLWLKHQPKSAITRWFVQRTAGQSGRIRRIMIVAVARKLAIALWRFLEQGLVPQGAMLANR

SEQ ID NO: 178925 - protein, 340 aa, unidentified
MTIVGAFDVHRRQITFDYWDSQTGQVQRGRVVACREVLRSWLGRFAGADEVMFAVEGCTGWRFVVEELRRAGIGAYLAEPADSASARGPKRRAKTDRADARHLRELLAEGRLPRSWIPPEQVLEMRATLELFKDLREEHTAWVQRLHATLFHQGVPAPAGDVLANAQRQRLEAGTGLSPAAHQAVLTTLRVLDGLDTELVALRRQITAFARRQPGCRALQQQYGVGAITATAIWAQLGDTRRFSASRKAVRHTGLDVTVYSSDGKRAPGHLSRQGSPILRWALFEAGKCAARPSSPDYDYYTRVKDRCGGNRAALSMARKIARRSHHILKALGDQALAPV

SEQ ID NO: 178926 - protein, 347 aa, unidentified
MNYNQPHKFYCGVDLHARTMFTHVLDHKGKTVFEKDLPADPDEFLYAIKPYRKNLVVGCECMFAWYWLGDLCEDEKIPFALGHALAMKHIHGGKAKNDRIDAGKLAAMLRGGLFPLAYAYPRAKRQTRDLLRRRSYFVRQRASLIAHIVNTNSQFNLPVLPKKLRYAKNRSDAIAERFADPSTRLMIASDLAMIDHYDEQIRAMESYLIRNAKVDDAVTFGLLKTIPGIGPILGLILLYEIDNIKRFPEAGNFLSYSRLVRCEHSSAGKVKGSGGKKIGNAHLKWAFSEAACLMIRAVPAVKSWMQRQEKKRGKRKALSVLEAKIGRSVYHLWRKAVPFDVKRFLKG

SEQ ID NO: 178927 - protein, 372 aa, unidentified
MEERTKIYVGMDVHKDTISVAAAEPGRGGARLIGKVTHDLNKLLKVLAKIGTTAQLHIVYEAGPTGFGLQRALKERGYVCEIIAPSQIPRRPGDRVKTDGRDCIQLAECSRAGQLSAVWIPDPADEAIRDLSRAREDAVNSRIQARHQLKSFLLRHDIRYTGKTSWSIAFYRWLSTLNFSSGATQTAFTEYWQAVESADERVERLTKALEGSITGWRFEPAVGALQALRGVAAITAIGLMAEIGDLARFPHPRKLMGYLGLVPSERSSGERTSRGSITKTGNAHARRLLTEAAWNYRFKARISREALARQEALSESIRTTAWKAQLRLTRRFAALRNRGVQINKACVAVARELAGFIWAIGLQVRREEEQAA

SEQ ID NO: 178928 - protein, 331 aa, unidentified
MKFKEFIGIDISKLTFDVRIHSNQKAIVFDNNTTGYAKMAKWIEKHTECSKGQILFGLEYTGIYSLPISSFFAENNYYFVLIPGLQIKRSLGIQRGKDDKIDAKRIAEYIHQKRDKITPSVLPSEDLLKMRRLLSIRERLVKQRAGYMKDKGENDRFLSRDENGTLFGVVDKVINEIGIHIEEVEKELDKIMNENELVKSQYKLITSIKGVGRQTALYTIIYTNCFTSFSDWRKFATYSGTAPFSYGSGTSVKGKSKVSHLANKKMKALLNMCARSAIVFNAEMKLYYKSRKEKGDNGMSIMNIIRNKLIARIFAVINRGTPYVDTLKCMS

SEQ ID NO: 178929 - protein, 431 aa, unidentified
MDRVMIGVDPHKLSVTFEARDSREVLRAKGQFGTDARSYRQLLAYARQWPERIWAVEGANGIGRPLAQRLLASGERVLDVPAKLAARARVFDTGQGRKTDPADAHAIVMVALRDKRLRELGTDPGLTVLRLLCDRRDELSRSRAQALNRLHRLFLELIPGGAPVKKSTAQYQALLARVRPRDLAGKTRRRMAAEELADLGRLDAKLKAMKAELKAAVLASGSHLMDIHGIGPAAAARILADVGDIARFPNRAHFASWTGTAPIDASSGQHTHHRLSRAGNRRLNHVLYMAGIVQLRNDTPGRAYYRRRVAEGKTSMEAMRCLRRRLSDVVYRQLAADTQPQQAGPGGHSGATLLSSAADLPPGIGTSDQPLPGPAPATLPPSLTAPHSPAAQPGASPRRRTRGVNVERPTGRTTLTPTSAGAHSKSPGPPS

SEQ ID NO: 178930 - protein, 326 aa, unidentified
MKNYVGIDVARISLAVAFPLPTGGWTNTTFANTPDGVRSLIKQLPAQAHCILEATGSYSVLVTYMLCQTSIDVSVINPKQSHNFAKMQMSITKTDPRDAVLLAEYGRLIQPPLYQMATDSLLRLRQKRALLRQYHKQRRTLLNLQHSFAVLPVKDSSTEQSLQTIIATFERAIIDLQQEVCQLCEAEYHEQYQRLLSIKGISHKVATTLIETTNGFQDFHSAKAVAKFIGLAPTTFQSGKMSTHRGICRTGDSHLRSMLYVASWSAIRYNKACREFYQRLKAAGKPSKLALIAVANKLLRQAFALVRFGEDFNDDYQPKFRSATCI

SEQ ID NO: 178931 - protein, 432 aa, unidentified
MKKHVYRAIPLSSWDIASFSEKVKAPGCILGVDVAKEDFVAVVMDAERCVRAAIKWQHPQETPRLVEIVTEELGEIIEAAVMESSGTYGDVLRHALAEKGLAVLQVAPKRTHDAAEVFDGVPSLHDVKAATVIGRLHFDGASHPWPLNDLQRRTWRAEVDTLALFEGQLQRCLNRLEGLLARHWPELPAILALTSVTLIQLLWAFGSPRRVAEQRSRAEALMRRVGDPQLAAEKIADVLNSAEATIGVPCLEAERVHLQVVAGQAVHFRKCAKGVQQRLEARCEKDPATQGLAAAIGRKSAAVLFALLGAPRSYPNAGSYLKALGLNLTERSSGKKKGALRLAKRGSGTARRYLYLAALRLIARERSVKRWYEAKVARDGGVRIKAVVAIMRKLAKGLWQVGQGAVFDPNRLFNAELVSASRHQGALADMKP

SEQ ID NO: 178932 - protein, 342 aa, unidentified
MDHFAGLDVSVKETSVCIVNDTGRIVREVKVASEPEALLAVLKNPAYHFERIGLEAGPLSQWLFSALAEAELPVVCVETRHMQAVLKAQINKTDRNDARGIAQMIRVGLYRPVHVKTLRSQKLRMLLTHRKLLQSKAIAIENDLRGTLRNFGLKVGMVGKVRFEARIQELVENLPDLTELVEPLLIVRRVLREQIVILHRRLLAIVRDDEVCRRLMTTPGVGPVVALTYRATVDVPARFRKSKSVGAVFGLTCSKYQSGEIDRSGSISRCGDEMMRVMLYEAAQSMLRSKKWSWLKAWAMQIARRRGMKKAIVALARRLAVIMHRIWVDGTEFRWTREAAAA

SEQ ID NO: 178933 - protein, 347 aa, unidentified
MRFYTKQHKFYCGIDLHARKMYLCILDETGEVRLHRNIITDREVFLKTIHPFREGIVVAVECMFTWYWISDLCAQEGIPFVLGHALYMKAIHGGKAKNDKIDSRKIAVLLRGGMIPQSYVYPAKMRATRDLLRRRNHLMRKRAELYAHIQNTRSQYNLSDPLGRIAKPQNREGVAERFEDHSVQKMIATDFAVIAAYDPIIAKMERDIIQSAKHHDPVSHALLNTIPGVGRILSLVILYEIENIKRFPTVQDFASYSRLVKCAKESNGKKYGSSGKKIGNAHLKWAFSEAAVLFLKGNEPAKKYLDRLTNKHGKGKGLSILAHKLGRAVYFMLKNKEAFNQKKFLGL

SEQ ID NO: 178934 - protein, 423 aa, unidentified
MEHPRIYAGVDTHSDTHTLALIDEYGRPLATQTFTADPTGYERLAAMIGDPDACLGVGVEGTNSYGAALTRRLVEAGYNVYEVLRPKRAVRRRDGKSDPVDALAAARSVLAGDGTSVPKSADGWVEALRALNAERAQLVTAMTALSNSATGLLTTAPEHIRERYRGLRTPIRMRRLAVCRPSGNMVEQGMLVALKAAGKAWKALKEQADLLEKNMRLILEEHARPLLDIYCASTVTAATLAIVAGDNPERIRSEAAFAKLCGACPIPASSGKTNRHRLNKGGNRQGNSALHHIAIVRMRYHQPTRDYVDRKTGEGKGKMEIIRCLKRFIAREAYRALISIRTGATPIGEPPAERGRRLRELRVTHGITQQQIGDALGVHSSRISEIERGTRNLPELERRATLWIQTITTPNQPNQHTETLDNV

SEQ ID NO: 178935 - protein, 338 aa, unidentified
MKLYGAIDLHSNNNVTVLTDEQDKVVYQKCLTNDLPLILEQLSPYAPSIEGIVVESTYNWYWLVDGLMEQGHGVHLANTAAIQQYEGLKYTDDDSDARWLAHLFRLGVLPEGYIYPKEERAVRDLLRKRSQLVRQKTANLLSIQNLYSRNTGSSISANRIKQLNSEKVDAQFPNVDLALAVKANLTVIRSLETEIAILERIVKERVKLRAAYRYLLSVSGIGQILALTIMLETGDIRRFRKVGNFASYCRCVGSEKLSNGKRKGSGNTKNGNKYLSWAFVEAANFAIRFEPLIARYYQRKKSKTHRVVAIKTVAHKLARACYHVMRDEVPFDVIRAFA

SEQ ID NO: 178936 - protein, 360 aa, unidentified
MHATTVAVDLAKSVLQLAVADEHWRIVETQRLTRTQFERWFANRGVGLVIMEACGSAHHWARWLNGLGVEVRLLPAQYVRAYVRRNKTDATDAAALLQAARACDMRPVRVKSLEQQALQGLHRIRSLWMGTRTSHINALRGFLREFGITVPVGARTGLEAISRVLADPASAVPALIRGSARLLVEEIRLLEARIAQLERELAALARLSPACTTLLSIPGIGLLTATALVAATSGDVTHFKDARHFASWFGLTPREHSSGSSRFLGKISKRGDRYLRMLLTHGARSVLRAAKVAETAQREVCGVRRWALDVQRRSNHNKAACALANKLARICYATLRDKTPFGETERLNKKITRESFVMPT

SEQ ID NO: 178937 - protein, 310 aa, unidentified
MERLYVGIDVAKQHVDVHVRPTDESFRVSRDDAGLGELVARLRCLTPTLVVLEATGGYEIAVAATLGGAGLPVAVVNPRQIRDFARATGQLAKTDALDARNIARFAEAVQPVARPLPTAQAQALAELVARRRQLVEMLGAETTRHQQAREPRVQRRIATHLRWLTKALAELERDLDDTLRASPLGRATDNLLQSVPGVANVTAFTLIADLPELGHLDRRQIAALVGIAPINRDSGTLRGRRMIAGGRPMGRCVLYMATLTAVRFNPVIAHFYQRLIAAGRPKKVALTAAMRKLLTILNAILRDQRPWQPA

SEQ ID NO: 178938 - protein, 343 aa, unidentified
MDHFAGLDVSVKETSLCIVDDTGKIVREVKVASEPEALLHVLMNPAYHLKRIGLEAGPLSQWLFGALAEAGLPVICVETRHMRAVLKAQINKTDRNDARGMAQMMRVGLYRPVHVKTLRSQKLRMLLTHRKLLQSKAIAIDNDLRATLRNFGLKVGVVGTVKFEARIKELVEDLPDLVVLVEPLLIVRRVLREQVGILHRRLLAIVRDDDVCRRLMTVPGVGPVVALTYRATVDVPARFRNSKAVGAVFGLTPCKHQSGEVDRTGAISRCGDEMMRMMLYEAAQIVLVRSTKWSWVKAWAMKIARHRGMKKAIVALARRLAVIMHRIWVDGTEFRWTRDVAAA

SEQ ID NO: 178939 - protein, 351 aa, unidentified
MKRKNKEIQGEALFVGIDLHKRRWHVTIRTADVEIFSNSIVGRWEDLRRVINRYKGCRIHAVYEAGFFGFSLYDHLTKYGVDCIVTPPSLIPQEHGNRVKTDRLDSRKLARLLAKGLLKSVWVPSAKERFHRQVIRRRRQLVGDRVRTQNRIKSELYFYGIDLPAPRGKWSQVYFVNLQRIKFKNHWMQQSFNQLLEQYEFLSAQIDKQTQLLKQLAQLPLYRDRVAILRSIPGIGILTAMEILLELQDVSRFRRAEQLAAYVGLTPSQYSSADKVRMGRITGAGKNTVRSALVEACWHLIRKDKAMRKKYEQIKARAGGKRAIVAVSRKLILCIRRLLLDNRPYVYEPVN

SEQ ID NO: 178940 - protein, 319 aa, unidentified
MAQIDLIVAGIDVAKDKVDVCIRSLSLKRTFASTAEGRRELTSWLGRHKIGKAVMEASGGYEREWAKALRDVRIEVRIVDPKRVRSFAQSAGRLAKNDTIDAEMIAWFAETFDEARGQAYDATREQLHQMVNARQALKDMRTKLVSQGEHALPAVVQRMHARILKTIDAELVKIEGAISAMIQATPHFTELAEIIESVPGISRTTCAALIAGMPELGQANNKIVAALLGVAPYDDDSGRRRGERHIKSGRRRTRNAFYMACLGAATRHNPVLKAFYDRLVARGKEKKVALTACMRKLISILNIMIERRQKWDASRYAVN

SEQ ID NO: 178941 - protein, 355 aa, unidentified
MKYYTSTTEYNCGIDLHARQMYVCLMDRQGKKLVHVNIKDNNFEHFLKLVAPYRHDLTVCAECMFGWYWLADACQQANITFVLAHALYVHLIHGGKNKNDRIDSEKLTHLLRSNLIPPSYVYPAAKRPLRALLRQRMFYVWRRSELLARIYSHQLAHNRTLARQTSRRNRDPWAEQLLKTENHPLRQLALKNDLAMISHFDQQILALEEELQRQTKRTACREFTLLKTIPGIGEILALTILYEIGQIERFPTVKDFLSYCRLVKGTVASAGKIKGLRGAKLGNPYLRWAFGEAAVIAKRDHCVIGPLAQRLEAHFNGNKFKANTVLAIKLARAAYFMLKNKTVFDQERLVAALTA

SEQ ID NO: 178942 - protein, 362 aa, unidentified
MATLSVGIDMAKATFTAACWNGGRGRGLGSSPNTPDGFAALADRLGAEQQDSGSLHLVLEPTAGYELALAGFACQQGWQVSLPNPRQVRDWARGTGRRAKSDTLDAVLLAQYGAERQPPCWHPLAAEVSELERLLRREDDVEQLIRQERNRQHALAGRPNVAATVHDTIARVIAALEVPLRELEEVIAEHLRAHPALHEDAKRLRSVPGIGAKNVAYILVLLHRWMTRTIGEGTEKGLAAYVGLDPQTYESGTSVRRRAVISRMGDQAVRRRLFMGALGDVRGPIPCECSTNAWSRGASPRWSRWSPPRASSSAGPGPSSATGPPSTPRGSPLRLPPTPHSPRGLMHAPTQPPLVRESVLQP

SEQ ID NO: 178943 - protein, 319 aa, unidentified
MAQNDLVVVGIDVAKDKVDACIRSLSQRQTFPSTAQGRRQLTSWLRKHKVGKAAMEASGGYEREGATALREAGIEVRIVDPKRVRSFARSAGRLAKNDTIDAQMIARFAETFDEAPHQTYDAERERLVQIVNARQGLLDLRTELQNRGEHSVPEVVQKVQARLLKKIAAELATLEAAIAATVKATPRFAELAEIIESVPGLAEITSAGLIAAMPELGQVSNKAAAALLGTAPYDDDSGKRRGERHIKGGRRRLRNLFYMACLGAATRHNPVLKTFYHRLIAKGKAKKVALVACMRKLIVILNIMIARRQKWDANLHELS

SEQ ID NO: 178944 - protein, 363 aa, unidentified
MEEEKRRYVGIDLGKREYTMAVIGKNRKMTIHHGKTCIQGRQALYRLLEPADKIALEAGNLAFIMAREIMERIGCEVRVLNSAKLPFIWDAPTKTDKEDAMKLAHLVEERRDEKLPIVPLPSEKEMERRKTISSYGREMNNRTRLINTLHAIFVHQGHTTIVKKNLATAERRQQAIQALTGHEREEAEWLLKYLELHEQRIKELRGKIKEEAANDEDMKRLQSIPGIGPVVAYAYVAHVGDGSRFSKGAQVSNYIGFVPRLDYSGTIQRHGHITKRGNGYLRGLLVQAAWTMTLCKKGGALSTRYKYYTLCQEVSKKKTIVSIARKLAELMYSVLRNKTIYEIRKWDGPKNNPAVLTGQTMCA

SEQ ID NO: 178945 - protein, 342 aa, unidentified
MSEVTLIGIDLAKRVFQLHGARSDGSVAFRKKLSRGQLLAFVAQQPTCLIAMEACATAHGWGREFEKLGHDVRLIPPVYVKPFVKRQKNDVADAEAIVEAAMRPTMRFVAVKTEDQQARAMLFRTRQMFVGQRTQMINALRSHLAEHGLVTARGPAHLKTLAHAIADDDTTLLPEVRELGRMYPEQIEGLNVRVAELDAKMRCAAKKADPVRRAQTMPGVGPVTALAIETFAPDLASFKRGRDFAAWLGLVPKQHSTGGKARLGKTSKMGQRDIRTLLVSGAMAVLQAVERFDTPNNVWLKRLLTRKPRMVAAIALANKMARGLWAMMTKKEDYQNPVATMA

SEQ ID NO: 178946 - protein, 378 aa, unidentified
MSRALQSRWGGWLPLPASERHSGAFLHNDMGATEMEITTVGIDLAKNAFQVHAIGGAGEVLARRALRRAQVVPFFRKLAPCLIGMEACGTSHHWARELAALGHTVRLMPPAYVKPYVKRGKTDAADAEAICEAVTRPTMRFVPVKSVEQQAALALHRARDLLVRQRTQLINMIRGLLAEFGIAIPKGLSHALAFVRRAAAGDAHEVPRLAAKIIGVLAEQAIEAQNRIRQLERELLAWYRSNDLARRIATVPGVGVLGASALAATVTDPSQFRSGRQFAAWLGLTPLNNSSGGKERVGRISKMGDQYLRRLLVTGMTSLVRRNKHHPDAADPRVTTLLARKPPRLVTVALANRAARAIWAIMVRGETYRMPGLGSAAT

SEQ ID NO: 178947 - protein, 346 aa, unidentified
MSTKHITIGIDLGDRRHAVCVLSAAGDIVVETEVTNTRECLTAFAQRYPGATFAMETGTHSPWVSRLLESHGHRVFVANARKLRAISTSPTKNDREDARMLARLARADPHLLSPVKHRSESAQRALVQLKVRESLVRSRVSQMNSVRFLVKSLGLMVPRGVKATAFVRRFRAQADVDTCALVEPLLQMLDALNARIKELDQQLETMADERYPATTRLRQVPGVGPLTALGFVLTVEDPARFPHTRDVGAYLGLVPRRDQSGQTDKQLPITKAGNQQLRCLLVNCAHYILGPFGPPSHLREAGERIAARGGKSAKKRAVIAVSRKLAVTLLALWKSGAEYQPLLKAA

SEQ ID NO: 178948 - protein, 354 aa, unidentified
MAKILYVGMDVHQACIVIAVIDAKGKAVSEAVIETKTETIKDFIRGIKGELHVTFEEGTQATWLYDLLRPLVTEVVVCNPRHNKLLASGNKNDKIDAAKLAQLLRGGLLKAVYHGEAGTRALKELVRSYEYLLSDTTRVMNRLKALYRGWGVTCAGLDVYRKDKESEWLAKLADRGVRQRAQLLYRELRALKELRQEAKHAMLAESRKHPARKVLEGVPMLGAVRVAQIIASVDNPHRFRGKRQFWAYCGLAVVQRTSAEYRMENGKVKKSAKAQATRGLNTNYNRRLKHVFKAAATSACGCEPFKKQYDKLVEEGVAPALARLTITRKLAAITLAMWKQGEPFAAERAMSRAA

SEQ ID NO: 178949 - protein, 392 aa, unidentified
MLLVGIDIGKSNHVASMMDETGIAVFKAFSFPNTSVGGNALFSKLTPYSSNSADLEIGTEVTAHYWLSVYSFLFEKGFLLHVINPIQTDGWRKGTEIRKRKNDIIDSVLIADLIRYGQFVETKLADEDLFSLRTLTRFRTYLVESISDLKRKVVCVLDQVFPEYQSIFSDIFGKTSKEILLQFSSPIDFESVSSETLAQLLAQLSRQKVGATKAEQLKAAASSSFGVTFSKNSFTFQLKALIEQISFIEKQVKETEVEISSIMKKLESPITTITGIGSVTGAAILSEIGDISKFDSPRKLVAFAGLDATVTQSGEFEAAHNVMSKRGSPYLRKAIFQSALIASFKDPVLSVYYQKKRAEGKHHLTCVGAVARKMCNIIYAVLKSNQPYVPKA

SEQ ID NO: 178950 - protein, 386 aa, unidentified
MQTVADRPEPPCAIRNDLGAIFVSLELSRSTWLITSLSPSGGGKMSKHSVRGSDIAGLLERFAELQKKAQARTGRNFPIIVIQEAGLDGFWIDRVLQNEGIESHVVDPASVATSRRRRRAKTDSIDGEALIRTLLAYKRGEPRVCSMVKAPTPEEEDRRRLCRERKVLTAERVRHVNRIKGLLFCQGINRYEPLGRNRRERLEQVRTGDGRLLPDHLKAQVRRELDRLELLLKQIKAVEAERDALLAEQQVAAPASMLLDIKGIGPEFAAILWSEGLCRHFDNRRQVASYAGLAPTPWQSGSVDHEQGVSKAGNPRLRTTLIQLAWLWLRHQPQSALALWFEQRVKRNAGRLKKTTIVALARKLWVALWKFVTAGIVIEGAVMKVH

SEQ ID NO: 178951 - protein, 346 aa, unidentified
MPTSFHCGIDLGSEKTQVAIIDDEQRVLSNVRLDNDLTEIRKQLEPYRGRVQVVAEATFNWYWLIDGLQADGHPVTLAHTAGLAAISAAKVKTDRRDALTLARLLRAGMIPPAYIYPSEHRPTRDLLRHRWDLVAMRATEYRRIRNLLYQHGICDLGLADIKALDTEDVERLLQHPLTQAKALLELERIRLFTQQIDAVESELETVADPRPEFALLQQIPGVGTVLGLTILYEIGDISRFADVRHFASYCRVVPGCADSCESRRRGRNDKSGNPYLKWAFTQAATKAVAHYPRFKQHFERHLRRHGGRAKKIVCYAITAHLLAKAAFHILRTKEPFSEEALFRHQP

SEQ ID NO: 178952 - protein, 322 aa, unidentified
MKQKPCLGIDVSKAQAECGLLWADSKYRSKVVSNQAVGFAQLRQWLQKYDASQAHVCMEATGVYWEELALALSAHGMAVSVVNPAQIKAFGESRLVRTKTDKVDARLIAEFCRAMQPPLWQPPSPSEQALRALVGRLDALQRMRIQESNRLGVARDAVRSNIEAHLHWLDAQIKALTQQIDRHIDQDPDLRRKRDLLDTIPGVGGRTSAMFLAFCSRTDAFANARQCAAFAGLNPQQHQSGSSVRHKARLSKIGHALLRKAMYMPAVVTLYKTAWGKAFRLRLSAAGKPPKLIIGAMMRKLIHVAYGVIKSNKPFDPSFHTT

SEQ ID NO: 178953 - protein, 329 aa, unidentified
MSVNQQGREAVAASRPCAGVDVSKAHLDAAWAGHTERVSNDAGGWDALAAKFQAAGVDVVVLEATGGYENAAACALQAVGLAVVVLNPRQARDFAKALGELAKTDRIDAQVLEQFAGVIARHPQRERYIRELPEAQRSHLAALVMRRRQLSAMRTEESNRLEQAHRATHQSLRAILKALDKQLAAVDHDIDQHMQCHFKEVASLLESAKGVGDVTTSTLVGLLGELGQLPRRPIAKLVGVAPLARDSGTHRGVRSIWGGRADVRTVLYMATLSAIRHNAVIRQFHQRLIAKGKPNKVAIVACMRKLLTILNAMVRDGTPWDDSRHIKTA

SEQ ID NO: 178954 - protein, 328 aa, unidentified
MRPGPADPASLGIDVAKATFEAALLIHGRLLQRSFAMTAQGFDSLHTWIGKQGVEQAHACLEATGEYGAALALSLYAAGHVVSIVNPARIAAYAKSRLARTKTDKADAGLIAHFCSTQHPVPWTPPPAEVRELQARVRRVEMLQEMAQQEVNRLQSGLHSPAVRASMEATLAFLRQEIDAMQRLVQEQLEQSADLQHKQRLLCSIPGIGRWTAARVLAESDQVRTSVSARQLAAYAGLTPRERTSGTSVRGQTRLAKTGNSRLRRALYGPAIVAIRHNPAVRAFAERLRARGKPPMVIVAAAMRKLLHLIYGVLKSGKAFDPALALAA

SEQ ID NO: 178955 - protein, 374 aa, unidentified
MEHHSEAFVALDTAKLRNAVAIADAGRNGEIRYLGEIDNTEAETRKLVAKLASKHARLTFCYEAGPTGYGLYRLIKSIGHDCIVVAPSLIPSKPGDRVKTNRRDAVNLVKLLRAGELTAVWVPDERHEAMRDLVRARDAAVKDYRIKRQNVSSLLLRLGRHYPGKKTWGRAHINWLTGLKLEHREQRIAFEEMLLAVRQVRERIERLEQAMREAVADWTLAPVIEAVQAMRGIDMVGAIAFLAELGDLSRFENPRQLMAYLGLTPSERSTGETVKRGGITKTGNARARRLLIEAAWSYRFPPRVSKDMQTRIGAAPRTAREIAWKAQMRLCGRFRTLTRKGKRPTIVVTAIARELSAFIWAINREVTGSHAMAN

SEQ ID NO: 178956 - protein, 389 aa, unidentified
MLHDHPSVRPTAILTQFGAIFVSLELSRSKWVLTSLSPGNGEKMSQYSLTAGDIGGLLARFADLKRKAKERTGSDYPIITIHEAGLDGFWVHRVLQNEGIESYVVDAASIATSRRRRRAKTDKIDGEALLRALLAFKRGEPRVCAMVVAPSPEEEDRRRLCRERQTLIAERIIHVNRIKGLLFAQGISDYAPLRRDRRKRLEGLRTGDRRPLPVHLKTQISRELDRLELLLDQIRKVEAEQEALLAAESKAAPEGEPHNAVAMLLAVKGIGEHSAAILWSEGLCRQFSNRRQVAAYAGLAATPWRSGAVMHEQGLSKAGNPQLRTTMVQLAWLWLRHQPQSALACWFRARGERGRKGSIVALARKLLVALWKYVTHGVIIEGAVMKPAA

SEQ ID NO: 178957 - protein, 435 aa, unidentified
MEEVTDEPLYRDRVCGIDIGKAELYATIRVPSDKDPARRASETRRFAATKRGVLALADWLRCWQVPAAVMEATGDYWKGPFYRLEAEGFECVLADAKQVKHLPGRPKRDPSDSSWLAQCFERGAVRPCFVPDPEFRIIRLHTRYRRDLTDERTREKNRTEKLLESAAIKLSSVITDLHGVTGRDIMNHLIAGERNPKVLAQLARARARRKITELEHAVEGAEFFTAEHAALLKAMLERIDGLTAEIGKLSEVIERLLAPYEEQLQQAESMPGWGRRSAQDAVAETGADMTKFPTGGHLSSWGGKTPLDHQSGKRAGRARHKKGNKYLAAVTGETAVAAGKTATREGARYRKLARSRGKAKAQVAVGNTQLKVYHKLLSNPGMRYQDLGPDYYERQAATRRKIAYHVREIEALGLEVTLARIPEPDPDGPASTQAA

SEQ ID NO: 178958 - protein, 411 aa, unidentified
MQVIYERCCGLDVHKRTITACRLKWLGSEWQKEIRQFGTMTKDLLALSDWLVGEGCTHVAMESTGVYWKPVYNILEGQFELLVVNAQHLKAVPGRKTDVRDAEWIAELLAHGLLRGSFVPPPSVRELRELTRYRTSLVRDRARTINRLQKVLEAANIKLASVVSDIDGVSARLMLEALVAGQRDTEQLANLAKGRLKEKRAQLVEALSGRLQPHQSFLIAEHLAQIDYLEGAIERLSGQIEERLRPFEQEIGWLDTIPGVNRRTAEVLWAETGGDMGRFASARHLASWAGMCPGNNESAGKRRSGRTRKGSPWLRHCLVEAAHGAAHTKNKYLSSQYHRLAARRGKKKAQVAVGHSILVIAYHLLTRKQAYSDLGANYFDERDRQAVTKRCLNRLQKLGYQVTLEKLSMAA

SEQ ID NO: 178959 - protein, 373 aa, unidentified
MPKYSTAFGMDVHLRSTTVCALDADTGEAVTRRFPGNPWGEIAGWMGGFPGPSLAAYESGYPGFAPQRELAGLGVECVVAAVSKIPRSAADSASKNDRNDAARMAKAILAHDISPVWVPSPEVEGIRDLAGAYDGATARLATAKQRLLAFLAKRGFAYGGTTPAGNPRKYWTYDFLRWLDKVRPEDDGGVRTLAALRNEVEAAAEARADLLSEYRAAVDASPIAAEVAALQSIKGCAFALAAAFSAEVGDFTRFRSGRQVTAYFGLAPSQRSSGDSVRLGGISGAGNALVRKLAVEGSWCYAAARHQPKLMPRDTGVPLEIRMHGRKGSERLLRRREEMLARGMPAAKANAATAAELVRWLWALGMMCREGAE

SEQ ID NO: 178960 - protein, 353 aa, unidentified
MDGEVLISVDPHKASSTLAVFDPVTRTAIDGARFANTKEGYRELARFAGRWAHRRWAVEGCHGAGRSLAQRLVADGERVVDVPAKLAARVRVFSQGHGKKTDRHDAVSIGLAALDANGLHDVALDDATVTLRLLSDRRQELVSLRTQAICRLHRLLAELTPGGVRRELNATKAAAVLGRLRPRDEPGRIRRQLAMDHLGDVRSLDRRIKAVGVQITDVVATTGTTLVGIFGVGPVLAARILAEVGDAARFPDKDHFASYNGTAPIDASSGEQQRHRLSRAGNRRINHALHMAAVTQLRNPTSAGRAYYERKLAVGKTRKEALRCLKRRLSDVVFRQLVIDLQPAATAPNTITP

SEQ ID NO: 178961 - protein, 417 aa, unidentified
MQIVHERCCGLDVHKKTVVACVLVTEAGGGARRRVRTFGTMTADLLALGDWLDGVGVAEIAMESTGVYWRPIFNLLEREDRRITLVNPQHMRAVPGRKTDVKDSEWLADLLRHGLVKPSFIPPVAIRDLRELTRYRKTLVQQRTQEANRLHKLLEGANVKLAAVASDILGKSGRDMLDALLGGEQDPAVLAELARGRLREKLPALRLALEGRVTPVHRTLLAQLLAHIDFLDGAIGQLHDAIDRRLGPFAEAVALLQTIPGVSAKAAAVIVAEIGTDMGRFATHKHLASWAGLCPGNKQSGGKRLSGKTTQGNVWLRGLLSECAWASARGKTGYLAAQFRRLARRRGAYKALVAVAHSLLVIIYHVLRDRRPYADLGADHFDRLDTERVERHHVRRLNALGYSVTLTALPPSDLVPA

SEQ ID NO: 178962 - protein, 433 aa, unidentified
MKVLYERVAGIDVHKEMVKVAVRSPGDKPWTRKTEILEFRTFYGVLQEMGRELRRRGVTHVVMEASGIYTDPVYYALAGQDFDEVAVINPAHAKALKGHKTDAKDCARLAELFECGLLRGSYIPPAELKEVRDLTRYRMKTVQARTSEIQRLGKALESAGIKLGSVASSITGTASTAMIEALIDGERRGGVLADLAIGRMRTAGKLADLSMALTGRFTGHHALLCRLHLDRIAVFDDAVDGLGKQITGKAARWQREQGLLTSVPGFGDVVAQAWLGEIGPAPHRHFASHEKLASWVTLCPGNNISARKRKHGRTGDAGTYIKPMLIQAAWAAIRVRGRLQARYNRLVRRFGGQKNPAAKKKAITAIAHTLLKIAYQVLKSGMPYQEPGEDFYTRRESPGQKQAWLERQLQKLHPGCTVTITISPPEAALPPGA

SEQ ID NO: 178963 - protein, 346 aa, unidentified
MLHAGLDLSRKRLDFHLLDERGETVEVGAAPPDADGLYHLAVHLRRHRQPLRAAIESMTGARFVHDQLELHGFQVEIADAVKVKGLAPLACKTDRIDAWVLAELSRRELVPAIWLPDPQVRAERERARFRLHLVRHRTSLKQRVHATLLTHGQPCPVSDLFGLRGRELLARLCLPEPWAGDVEASLRLLDELEREIDGCEAELRTLGAEHRYVPLLITIPGIAWVLAYTIAAEIGDITRFSSPAKLVGYTGLCPRVYQSGESDRRGRLSKMGPRYLRWALVEATTHASRHPAYSERYERTKRRLGKQRGPRVAQVDLARRLAEAIWHMLTHNRPFAPAGATAPMTA

SEQ ID NO: 178964 - protein, 404 aa, unidentified
MKGPIVSIDVSKGKSDYQAFKNLNVKYTGSRSIKHTKEGFDEIVNLVREMEKKLETEVCVVYEATGVYHRVLKKVLEDNNIKQFIINPLLSAKTKKNDSLRCPKTDKLDPKSIAKTYYSHSLHNSHKPETIYHELRELSRYYEDILVHIRKDKVAFRAQLDIVFPGYDTLFDDLYSPVSLTVIEKYPHPEMLQKKKINTVSKVIQSKTCHRQAVSDTMADKAIEYSKTIYSGCDKDDIEVLILQRLIKKLNEDMAEAERTIGEMIKLAQELPDFSIIKSIPGIGDNLAARIIAELGDMTRFKKKNELVAFAGLDPRISESGQDDGDHMHITKKGNKRLRCLLYLAVTCSIRLKRDDNSIKDFYIKKKQQSNPMCSKAAKTACASKLVRIIYSMCKTGELYQYNK

SEQ ID NO: 178965 - protein, 345 aa, unidentified
MWSVGLDVHQRSSAMCILDENGKIVKQVQVKGPWPEVMGVLKGLVHPFAVCYEASCGYGYLHDQLRPIAQRVVVAHPGQLRLIFRSKKKNDRVDAKKLATLLFLDQVPTVHVPSVHVRSWRSFIVFRQRLIAKRTRVKNSLRSLMRGHGVILPRGKGLWTSQGLVELGEAELPTDESAVQRDLLLEELGHLEGQIRRVTRELDAKGRRHPGVGLLRTIPGVGPRTAEAVVAYIDHARRFARNKYVGSYFGIVPCQDATGAANRLGHITREGPAVVRKLLIEAAWQGIRHSPHIRAFFERIRNDDPDRRKIALVATGHYLVRVMQAMLRTGEVWRHDVPATEKEAA

SEQ ID NO: 178966 - protein, 344 aa, unidentified
MANLNQFCDFTKLIGIDIAKSVFQIYSCDTQTGEITNVQIKRDKVLESLANCGKCLIGMEACGSSQYWARKLQALGHTVRLMDPKLVKPFVRHNKSDKADAEGVYHALVSGVRAVAVKTETERDIQTLLTMRALLVKQRTARINHVRGLLAEYGHVMPKSVDQFDKKVDECINSLEGDAVQLVIDMLRDTVKSIRDEHDRIKTLQREISRLANQTRNAKHFLTVPGIGETIMAYMCVLLADPAQFSSGRQFAAYLGLVPMHTGSGGKTVTTKIPGRCDKALRALLVQGAHAVARSKCRTDWVKNILAKKPKKVAMVAIANRMARQCWAVASKGQDWRRMPVTAA

SEQ ID NO: 178967 - protein, 380 aa, unidentified
MEYCTTIGADVSDRTTKICVMTKAEGGERRIVVETTCATTEAGFEEAFSKFDRSWPVVFETGTHCRWMDRLFRKMGFRTIIGNPGKIPSITKSNTKNDRNDARELARLALADPAMLHPVFLRGETFQQMLRFHHARNMLISQRTQTINQIRGFAKSMGHRIERTSTERFHELGKAEWPEELEECAWPLMGSLKTINLKIKAYDKLIARLAERPEFKAMVERVRAVYGVGIIGSTVFIAAIGGRPDRFGHARDVGAYLGMTPKQDKSGDDDKQLHITHAGTEIVRTALVECAGIVMMSNAKDTDLKLKGLRIAMRGGKIARRKAKVAVARGLAVAMLALLKDPEREYVPLSEEGRRGFERYRAEMEYLAMGKAAKREKKVA

SEQ ID NO: 178968 - protein, 329 aa, unidentified
MQIYGIDLASEKFDVSFVDFEGKIKHIVVKNRKPQIEKFLDKLPVNCRIVAEHTGVYGDLLLMLADIRNIPVSYVSGYEIRHSMGLVRGKSDPVDASRIREYGERYADRLEDTHFPSETIYELRELYATRRLLVEQRKQLQTMLKSDEHRPEKSAMAQEVKLRMMEQLSTQINAIEDKMTELIDNDADLLKNSAIAQSIPGIGPVTAIELIIKTDNFRRVRTAKKCATLAGIAPFPNSTGKSDKGTHVSNMGDKQLKSLLYMCARSAVVHFEKMRIYKMKKLDVEHKHIFVVLNNVANRLLKILYALVKKGEMYDASYLPRDPRLKLAR

SEQ ID NO: 178969 - protein, 362 aa, unidentified
MRTSSNTPPSIVTQAATFIGIDYHKRYSVWHAIDAAGSDLGKGRIEHHSPHDFATLVKRWPNARVVFEASMNWHWLYEELEQHMPAERLTLANPFKTRIIAEAQVKTDKIDARILALLLRAGLVSSVHIPCKETRQRKEVLRQRCFFVRQSAMLRNRIHRLLGAQNELKLPQCSDLFGKKRLSFLEKLELPAPAGLLLKQQLEMLKNVQQRIKEDEKALEAMMSTTEAQKHVLSIPGMGPIPASVVVSEIYDIDRFHSAQKLCGYIGLCPSTSSSGGKTHKGKLMKHCNKLLRWAFVVAAWVAMGCDSYFGDFNKKKRALGKQANSAILCVARRMARITWQLLTQGRRVNGLTIVEPSIADC

SEQ ID NO: 178970 - protein, 346 aa, unidentified
MAGFDLHSNNVVIAMIDQEGERIAQRKVDCNLAEVERFLKPFRPQLQSMAVESTYNWYWLVDGLRAKGYPIDLANPAKIEQYSGIKHADDEDDAFHLAELQRLNILPKAYVYDPQLRPVRDLLRRRTNLVRNRTGLFLSFKSLYTRTTGQPMPLNTLKAMEPAAARDLYEHPANQLIARIELEEIASLDGSIGRIEKAVLACARELPIYAKLLTLPGVGKILGMTITLEVGDIARFKSDGNFASYCRAVDSRRISNGKQKGENNAKCGNKYLSWAFVEAANFAKRSDAHCRRWYDRKKARTNSIVATKALACKLAKAAWHVMARQTDYDPRRMFPELAQKTNGEKA

SEQ ID NO: 178971 - protein, 316 aa, unidentified
MKNPDTKSTPAFAGVDIGKASLDLSLAGQPPCRHPNDAAGIAALVTVLKNLPQPAQVICEPSGGYERDLLAALWAAGLAVSLVHAARVRAFARAQGRLAKTDPIDAVVLREFGELLRPGVLAAPSPTRERLAALVQRREQLVNLLATEDQRLAQTREAVVREMGARLVKELQTQIEQMDGLIEAQIRADETLKNHSERLQQVRGIGPVTATTLLAELPELGTLSRNESAALAGLAPYNCDSGEHRGRRTIRGGRVKVRRVLYMAGLVAARYNPILKAFYDRLVAAGKPKKVALVALMRKLIVLLNHLLKNPQFKLA

SEQ ID NO: 178972 - protein, 457 aa, unidentified
MSKSQNPTKEVIPIMKKRIYRRMPVNDFQPTTISPADLGGKLVFAIDVAKVDMVAAIAAASGRVLQTISWKAPEQNHAVLAILAGFRAAGIPVEAVMEPSGTYGDVLRHQLEQDAFPVFMVSGKRTYDARELFDGVPSLHDAKAAAIIARLHADGLSTHLRDENPDRRQLRAALAIMDLHQERYLQLVHRLESWLARHWPELPTLIELTSSSLMAIVARIGGPADVAAAPDEARRLLRGISHRLLPDDRIAAIIASAQASVGVPLVGLERDALMAIAADAYRAHRAFTSAKTQVDQLAATTPAAALAPAVGHTTAAAVFAEVGDARSYSCTRAFLKAMGINLKEKSSGKMQGQLKITKRGPSRVRQYLWLAVFRWIQTDPIANAWYQRKKQRDGGRASRAAVALMRKLAKALYHVARGAAFDSSKLFDVRRLQLPQGDLPLHRASAMRKSVVCLEAP

SEQ ID NO: 178973 - protein, 359 aa, unidentified
MDIQSNKLDFSNQNIYVGFDVHLKSWKVTVLTEKVTMKTFSQDPNPELLHQYLVRNFPGGIYHSAYEAGFCGYWIHNKLISLGINSIVVNPGDIPTTNKEKVQKEDQRDSKKIARFLRSGELKAIYVPDLKTLEDRGLLRARATMVKDLTRFKNRIKSFLYFHGIVYPESFTKSQSHWSKRFMNWLESIELTEESGKIALNSFIQQSKNLREAVLNLTKQIQALSQTDTYHNNVILLRSLPGIGLLTAMTILTEFESIQRFDNLDKLCSYVGFVPSTNSSGEQERIGDVTSRGHSVLRNAIIESAWIAIRQDPALLKSHLDYCKRMDQNKSIVRITKKLLSRIKFVLKNKQPYVSSWPK

SEQ ID NO: 178974 - protein, 352 aa, unidentified
MTLVGCDLHSRKQQVAVLDTDTGEVLEQELLHEGDAVERFYRGLPRPVTVGIEATGYTLWFHALMQKLEYTLLVGEAAKIRAMVVRKIKTDRRDAQHLLDLLKHDRFPTVWMPDPATRDLRALIAHRVRFVRMRTMVKNGLHAIALNHRVALGPTLWTKRGLAQLQALALPPHTAQRCGESLELLTWLTTRIDQLDAQIAAAAAADARAQLLLTHPGVGPLTALITVLVLGPANRFPTSKHVVSYVGLAPAINASADTYHLGKITKQGNALLRWILGQAAPLAARADGELKRSYFTVLHRRGRPKAKVALARKLLVRLYIMLRDQIDYDEFRRRGGARRSQPAWHPVAAPTM

SEQ ID NO: 178975 - protein, 399 aa, unidentified
MAASPRVVIGADTHLDTIHLAVITDAGKPLADSEFPTSPAGYGEALRWARSFGIIVIAGVEGTSSYGAGLTRVLQAAGVEVAEVSRPDRAARRRQGKSDPLDAYSAGRAALAGHGLAVPKDANTGALRALLTARRSAVKAHTAATNQIHALLVTAPAELRERYRRHTATALVKALARCRPAAHSDPTTMAVLTAAKALAQRAELLEHQKQDLSAHLDVLVRQLNPALRAAYGVGADTAAQLLVTAGANPHRLPNEASFAALCGAAPVPASSGKITRHRLSRGGDRAANNALYRIALVRMSAHPQTRDYVRRQEANGRTKKEILRLLKRAIAREVFRLLTRPGPIDDYSDLRPARQAKNLTLATVAHHFGVPIITVSRLERGHQRNDTLASNYRQWLDAA

SEQ ID NO: 178976 - protein, 393 aa, unidentified
MIYVGIDVAKSKHDCFITNSDGEVLRAGFVIQNSISGFQELYETILSFEPDPNPQNIRIGLEATGHYSNNLIDFLLAKNLNPVVLNPLSTNLFRKGQSLRKIKTDKSDARFITMMLITEDVKPYSPVSYHISELKSLTRHRFRLVRERARFKISYARILDVLFPELAGAVWATTQKSVLLTLLELPNTNAIAQCHLTRLFHLLHKNSKGRYHREKALEIRELARSSIGSNSPALAFELQQIIRSILFLQAEISLLDVQIKKVVQELDSPIMSIPGISYTLAAMILAEIGDIERFDSPAKLLAFAGLEPSTYQSGKFTSSHATMVKRGSKYLRWAILNAVRLVSMRDAAFRAYRDRKQLQGKHYFVVLSHTAKKLIRVIFYMLKNGQLFVAQAV

SEQ ID NO: 178977 - protein, 368 aa, unidentified
MNTVKFIGMDVHKKTITIAIADEGRQNQPRVYGTIANDLDALNKFCRKMISTSTQLHFVYEAGPCGYGIYRHLSKKGYDCMVAAPSMIPKKSGDRIKNDNRDAAMLARLHRAGDLTAVFVPDAQDEAMRDLSRARSDAVLVAKKAKQHLKAFLLRNSVVFNGRSQWSKAYFNWLANIAMPHPAQQVALQEYIDAVHESLHRVDRLTDQIRQMVAGWRLAPMVKALQAARGVSLIVAVTVLAELGDLSRFKKPSQLMAYLGLIPSEHSSGPNIKRGGITKTGNGHVRKALVEAAWAYRMQARVSRLLLKRQQGVPQQICRIAWKAQLRLCARFRRLAAKGKPKQKVVTAIARELSAFLWAIAKQVPSVA

SEQ ID NO: 178978 - protein, 347 aa, unidentified
MRFYNNSHPYYCGIDLHARLLYVCIIDSKGEVVAHKKIGASKDDLLLILEPYIGNVIVGVECMHCWYWVSDWCAELGVDFILGHALYMKAIHGGKTKNDKVDSFKIATLLRGGNFPIAYDYPSEMRAARDLLRRRMKIVRHGAMLKGHVVNTNSQYNLPATELNLKNISARKKLREQYQDPIVQRNIDLDMALLDCYAKELAQVELFIEKQAKNHNPVYLELLKTVPGIGKILSLTILYEIGDISRFESVQKFASYSRLVKCKAESAGKTYGTNGNKIGNAHLKWAFSEAAVLYLRGNDKARNYLNRLQKRMSKAKALSALAHKLGRCVYFMLKNKTVFDEQRFLKG

SEQ ID NO: 178979 - protein, 326 aa, unidentified
MNYFWFIGIDLGKTSFDASILSNDEQEIAHHQFKNSDEGMTKMMAWLASHDVDTTKSLFCAENMGKYTSVLALFSVENKLNLSLACPLDIKHSAGLTRGKSDRIDALRIAQYAQRKCRTLKLYTLPESTLVKLRNWLNLRNIHIKNKVALENQLSTFKSDVVVDREIISYSESAIAESKQKIAELEKKIEAVIEENVSVKRNYTLLKSVIGIGMINAALLLCTTDNFTRFETPRQYASYCGVAPFEHSSGTSVRGKTRTSSIANIEIKTHLTNAAVSAMSADPQLRQYYHRKLAEGKHKASIINAIRFKLIARCFAVVRRQIPFVK

SEQ ID NO: 178980 - protein, 342 aa, unidentified
MTTMHYIGFDIHKKTIAFCEKKVDGTIVEQDTIPSTRNGLRVWASQRTCPWIGAMEATMFTGWIYDFLQPYATELKVAHPAMLKALAAAKNKNDRSDAERIADLLRCNLLPECYMAPEGIRELRRILRFRNLMVREATKMKNKTSGILMEVGAVYNKKKLHGQRYFEELLDTLNYVPESVTNLLRLCRMNTTHFVHLQKQLIKGLVANPDIAKRVKLLMTIPGIGEVTALTWALEIGEIERFTRISRAISYCGLCSAQSESAGKNKRGPISKKRNKHLQRVLIEAAKLAPRWCPQLAAVYDKEFATGNHNSATLAVARKIVAYMLAVDKNQVAFQAQEVKVA

SEQ ID NO: 178981 - protein, 437 aa, unidentified
MRVLHEHVAGIDVHKDMIKVAIRSPGEKPWTRTTEIFEYRTFYGVLQAMARDLRRRGVTHVVMEASGIYTDPVYYALCEQDFTEVAVVNPAHVKALRGHKTDAADCRRLAELFECGLLRGSYIPPAELREVRDLTRYRMKTVQARTSEVQRLAKALESAGIKLGSVASEITGVSATAMIDALIDGERRGAVLADLARGRMRTAGKLADLSMALTGRFTEHHALMCRLHRDRIAGLDAAVADLDERIAVRAGRWQRELDLLKTVPAFGDVVAQAWLAEIGPAPHRHFASHEKLACWVSLCPGNNISARKRKHGRTGDAGTYIKPVLIQAAWNAIRVKGRLQARYNRLVRRFGGEKNPAAKKKAITAIAHTLLKIAYQVLKSGQPYQDLGADFYTRRESPAQQHAYLERRLQKLYPGCAITITISPPEAALTPPANHAP

SEQ ID NO: 178982 - protein, 367 aa, unidentified
MKIIHWIGIDDHADKWTIAHFRGNEDKPAREFELMPGRDGYRKLIKYCKELGGEVRIVYEAGPCGYELYRRLTKAGLKCDVAAPSLTPRKPGERVKTNRRDAAKLGRYLRAGDMLTLIAVPDEGRESVRDLVRARHAVQKDLLSVRHRITKLVLRYGHRYDKGKTAWTNQFWTWLGKIKLEGEHSQFVLTELIAAHEHRLKQRGRYDDEIEAAAKTPQYATYVAALSVLRGIDRLSAMTILSDLGDLRRFATAPQLMAAIGLVPRESSTGDTTNRFSITKTGNAHVRHIAVEAAWQYDRRISNGPVIRRRRKDQPKELLDIAEKCDLRLNRKFHRMTSRGKRSTVAAVAVARELMGFIWAIGQIAHP

SEQ ID NO: 178983 - protein, 387 aa, unidentified
MPQLNDLSKSLVALEQDATLIAVIEMGQSSWLVAGIVPGVERQPLKKLTTDQDALLQLLHRWRKEANEAGHVIKRITVAYEAGRDGFWLARWLRAHEIEAYVIHPSSVPVSREHRRAKTDRLDTELLKRAFLGWLRGEPKHCSMAAVPTIADEDARRPSRERENLVKEITRLVNRMKANLARLGIRGFRPHLAQAAGQLQTLQTPEGTAVPANTLAELRRDMDRLRFVKQQIKQIEAARVQRLESEPGERRHAMVYLLARVVGIGVESADMLVQEVFSRKLRDRRAVARYAGLTGAPDESGNKRRERGLAKAGNARVRRGMIQLAWTHLLHQKDSVLAQWYRARTADARGRTRKIMIIALARKLLIALWRLVTTGEAPAGLLIRPAA

SEQ ID NO: 178984 - protein, 373 aa, unidentified
MPKYSTAFGMDVHLRSTTVCALDADTGEAVTRRFPGNPWGEIAGWMDGFPGPSLAAYESGYLGFAPQRELAGLGVECVVAAVSKIPRSAADSASKNDRNDAARMAKAILAHDISPVWIPSPEVEGIRDLAGAYDGATARLATAKQRLLAFLAKRGFAYGGTTPAGNPRKYWTYDFLRWLDKVRPEDDGGVRTLAALRNEVEAAAEARADLLSEYRAAVDASPIAAEVAALQSIKGCAFALAAAFSAEVGDFTRFRSGRQVTAYFGLAPSQRSSGDSVRLGGISGAGNALVRKLAVEGSWCYAAARHQPKLMPRDTGVPLEIRMHGRKGSERLLRRREEMLARGVPAAKANAATAAELVRWLWALGMMCREGAE

SEQ ID NO: 178985 - protein, 336 aa, unidentified
MQISRVGLDLAKQVIQVHAVDRSGRAVVRKAFKRAALLSFLRDLPPCEVGMEACGGSHYWGRQLQAMGHRVKLLPPQYVKPFVLGQKNDANDAAAVCAAMGRAEIPTVSVKSVAQQDGQALHRVRSARVADRTAMVNQIRGLLAEYGIVLAQGRHTLRRALPELLEDADNGLSFDFRLVLSELYGELVALDGRVEQLTRRIEQQVLQDEAAQRLLKVPGIGPLSASALVISVGNAHQFRNGRQMAAFLGLVPRQHSSGGKERLLGIHKRGDSYLRGLLVHGARSVLRTATDKPDDRSRWLMRVAGRRHRNIATVAQANKTARIAWAMLARNENYRP

SEQ ID NO: 178986 - protein, 379 aa, unidentified
MKEITETGNKVKGRVYPLDNISWVVGIDIGKEKLSCALMKINKALICRFDIEGSLSGYNGLMDRVKRETRGNGKVVFALEPTGHYWMVLGQFFEDHNQSYVLIHPLVVARSREVHHLNKSKTDSLDARLIGELACDKSVIRTQIPEDHWATIRFYAREYIDREKEIAREKNRIMSYLETTLPEFMKIFPRPLCMSGRACLRVLADFKQALKGNGEHFEMRIRKHLACKRLMTSRIRRLHDMLQRGDVLGLRAGRQAMFFRIIHSLDRLEVFEGQEKAAKQAMLDVYEESEYKEYLDSIWGTAPAANALILGFMGDPALYDSPASLVKLAGCDPVPNESGKFKGRTSIFHRGRSLLRKAGDRVSFLLEKRNSVFRVFLIT

SEQ ID NO: 178987 - protein, 405 aa, unidentified
MKLLIGLDWSKDHHHVCFMAPNGSLQASFEIPHTVTGFARLEEERAKFGVPATECLVALETAHNLVVDFLWARQYQVCVIAPTVVKSSRGRYGVSGAYTDASSAFLLADLLRTDRARFIPWRPDGAIVRQMRAKLSLIEALRKDINRWSNRLLAVLLRVYPHPVGLFSKLTTQINLHFLITYPTPHAVRGLSYQEFESFGRQHGYPAAKLPALYAHLQSPRPEPDPVALLAYQDEIPFLARTLLPMVRHRAQLIREVKSLFDQHPDNFIFESLPGTGDLLAPSLLVKFGDHRERFPNANIVQALAGTCPYTKMSGKKRRVLFRKACDRDFRRIAQQFAIESVKQLVWAATYWQEVYARCGKKSQAYRCLANRWLAIIWKMWQTRKPYDEEYHLRQRLLRRQPRSK

SEQ ID NO: 178988 - protein, 461 aa, unidentified
MSRNKPTGPQKGSAQKKMDWRAVEIVHPDAAGIDVGGSEHWVAVSPDRDPEPVRRFGCFTADLHEMGQWLVQKGVRSVALQSTGVYWMPVFEVLEQHGLEVYLVNARHTKNLPGRKSDVQECQWLLKLHAFGLLNNSFQPTDEIRIARTLWRQRGNLVAEASSTIQRMQKVLTEMNVQLSNVLSDLSGVSGMKIIGAILEGERDPWHLAALVEPEVKAAPQDIAKSLQGNWREELLFVLRQHVELYRIYQKKINDCDLQLRKHLESFESKRDLQAQPIGPKPKGKKGSKNAPGFDLRTELYRITGIDWAQINGIDVLTAQTVIAEAGADLSAFPSEKQFASWLGLCPTNEQSGGKILNRRTRKVVNRASVAFRNAASTLLRSQSYLGAQYRRLRTRLGAPKAITAMARKLACLFYRLIKHGQPYIDKGTEYYEARYREQQIRSLAKRAQKLGLQLVIPRTA

SEQ ID NO: 178989 - protein, 353 aa, unidentified
MSAIPSPTAPLKYVVGIDIAKDTFVACFGRIDVNQQLRLGKEASFDNTLAGFAALLAWTAKQQATDAPLWFVVEATGVYYEALAYFLSDNEQALSVLLPNKVKHFAQSTEQKSKTDQLDARLLCRLGLERALPAWQPPTPALRQLRALARERQSLKRQGARLKTQRHAYDHSYQPDARTLERLDARQQLLVAQVKAVDQDLAALLEAEPELARKLAHLTSVPGIGLTTAIVVVAETNGFVLIENERQLASYAGLDVVQRQSGLSAQATRISRRGNVHLRQALYLPAVSSLRYNPQQMAFYARLRARQPSGKPGVIAVMRKLLLLCYALWKNDRPYDPHYHPAHVAEKEVAPTA

SEQ ID NO: 178990 - protein, 373 aa, unidentified
MPMLADCVDAVVGVDTHRDTHEAEIAHSSGAPIRTHRISNDSTGYAELLAWIVDHAPSARIVVAIEGARSYGAGLAHALVAAGLTVIECEQPSRTTRRGRGKSDAIDAHLAVLNTLQLDADQLPTPRADGDREALRVLLTAREELTTTTTGQTNRLRALLLSGDDTDREHARGKLTDHTLAHLAERRASPEAPRAQAVRQAEIRRLARALRNGRRELADNRTQLQRLVDALAPGLTDQRGIGPISAAQVIVSFSHPGRCRNDAAFAALAGVSPLEASSGRTTRHRLNRRGDRALNQAIHTIAGTRMRSCPTTQAYVARRTAEGKSTKEIRRCLKRYIARQLHRTLTAAMAPPSPAARTEANRTQAAPLLQAAP

SEQ ID NO: 178991 - protein, 430 aa, unidentified
MKSNTQNAKIEAITEKTLVLGIDVGSEMHYARAFDYRGIEYSKKPFKFSNTEAGFVTFKEWILDIKERHEKDKVVPGMEPTGHYWFNLGKFLQDNEMKPVLVNPHHVKKSKELDDNNPTKNDRKDPKVIAGLVREGRYMIPYLPDGVYADLRTASNIRFQLQAELTRIQNRISRWFNIYFPEYKTVYGKPDAKSGILILKAAPLPEDILTLGIDGVNQIWRDAKLRAVGKARAKTLIEAAEHSVGSKEGAVAARMEIRMLLEDYESRSIRLQEVMTLIEGLVKQIPMAEKLLEIKGVGIRTVSGFLAEVGDISRFNNPKELQKLAGLALVENSSGKHKGETTISRRGRKRLRYLLFEVAMSLVAKNPEFRELHNYYTTRRLNPLKKMQSLMAIAAKLIRVFYVMLTKGVNYDPKKMVNDIKRPAVYLQTA

SEQ ID NO: 178992 - protein, 451 aa, unidentified
MDRPQELEVDEEREVVERVAAIDVAKATGMVCARVPHSSVPGKRVTKVWEVRATTRALTELAEHLVNEHVERVVLESTSDFWRPFLYVLEGAGLCVWLVNAKQVKNVPGRPKTDKLDAVWLAKLAERSMLNPGFVPQEQMRHVRDLARARFDLVGDRTRVKQRVEKVLEDALVKISSILTDLHGVSGRAMLEALIAGERDPMVLAELAKGRARARLELLAEACDDRFTSHHARLCWMLLDQADDITRRIEAVTTLLDEAISVLEAPPGEPPTAALDPATGEILPAPVAYLSAIERISQIPGAGPQTARAVIGEIGLDMAVFSTPQRLCSWAKCSPRTVQSGTKTKGAPTGKGNPYLKAVLGQMATGAAKTDTFLGERYRRLVKRMPKKKALAAIERSILVIIFHLLSDPSATFTDLGTDFYPKRIDAKRRTDHLVRQLEALGHQVTLVPAA

SEQ ID NO: 178993 - protein, 368 aa, unidentified
MKKSITFVGLDVHKNSIAVAVAESGRNGEVRNYGVIGGEIDDLLRLVKQLSSSDKELHFVYEAGPCGYDIFRSLTAKGFDCKVCSPAHIPKRAADRIKTDRRDAMVLARLHRAGELTYVFVPHADDEAMRDLTRAREDAKKAQRVAQQQLSGMLLRLGLRYPKHNWTRQHFFGLADQKMATPGQQVVYQEYINAIKETTLRVERLTKQIEGLAPSWRMAPVVNALQALRGVSLIVATTMIAEIGDLTRFEHPKLLMGYLGLVPSEHSSGEKKKRGSITKTGNGHARRVLIEAGHAYRHPARVTQLLLKRQDGISKEVTEIAWKCQVRLCGRFRRFLAKGKNSNTAITAIARELAAFMWDIANKTPITV

SEQ ID NO: 178994 - protein, 348 aa, unidentified
MLADQLDYVVGVDAHRDSHALAVVQVVSGAVLFEAAVSASSDGSANALKLVDQHAKGRRAFAVEGTGSFGAGLTRFLTANGERVLEVGRLRRERRSGGKTDALDAIRAARSVLTQNRPATPRASGEREALRALMAAREGAVNAKRAGLCQLRDLLVTTPEPLRSELRPLTRARLLQRLAATRPERRHDPELRGALLALRSVARRVLQLTAEERELAREIETLTRKLAPQLLEQPGVGPLAAAQLVLSWSHRGRISSEAAFARLAGCAPIPASSGQTVRYRLDRSGDRRLNRALHMILVTRRRTHAPTIAYISRRTQEGKTKREATRCLKRYLARNLYRLLEQGAPPAT

SEQ ID NO: 178995 - protein, 362 aa, unidentified
MSYRNRNDAQWREKPERTVGLDLGDRFSHYCILNAHGEVIEEGRIATTEKGLRQQFANVPRQRIALECGTHSPWVSRRLQQWGHQVIVANPRAVPSITHSVSKNDRHDAEQLARLAHSDPELLKPIQHRRQTRQQDLNWLRVRHTLVRARTLVINSLRGLAKSAGGRLPNCSSESFPKRVAQHIPASLTPLATALLEQVAALNTHIAALDQQIETLAQRYPEIALLRTAPGVGPVVAAAYVLTLDRPDSVAHSRQMGARLGLRPKQHQSGDRDPQQGITKISNRYLRSLLVQSAHYVLGRFGPDSALRRWGLQLAGTGNQGAKKRAVVAVARKLAVLLHAMWRTGQSYRPFPPVRAVPHSNP

SEQ ID NO: 178996 - protein, 368 aa, unidentified
MDQHSTVVGMDVHKRNLTVAILPPGKARPIEVLTIENRGKAIARMATRLTTGRAVFVYEAGPCGYEVQRQLHRLGCRAVVIAPALTPIRPGDRVKTNRRDAEKLARLYRAGELTEIRVPTREEEAARDLVRAREDAVADRLRARHRLSKFLLRQGRLYHDSRAWSKGHRVWVRQQRFDLATAQQTFDAYLRALEEAEARLESLNSQVLELAQTPAYAALVRALSCLKGIDTLSAVTIAVETQDFRRFPNARGYMKFTGLVCAEASSGDKTRRGGITKAGNAHLRRVLVEAAWSYSHRNTTGPTIRRRRHGRPTSVVQIARRAQDRLHRRFWRLVHRNKLRQVAVVAVARELAGFVWAIARESTAALIA

SEQ ID NO: 178997 - protein, 400 aa, unidentified
MRAVFGIDVSKASSEVVILVNGEKVHGYTMSNDAIGFSRLLGDLKTVHKPEIIFEATGVYSRRLQAFFEDNSYTYTRLNPLESKKQLDSLRVRKTDKIDAEKLAMSQFILNRKPSYVQEALYQELRDLSRFYQNLTEDIVRAKNRLHKVLQVTFPELENILSTPTGEQYWNLVITFPCKDFVLKLSKDELSKSIRLSTSKRISDKRVAYLAEKLTALANQSYCAVKKTSPIMEEVRYYAKELLRLSEQRQAVLDEMVELAQPLPEYDILLSIPGIAETTATSIIGELGDIRRFQSANQINAFIGIDLRHYESGNFIAKEHITKRGNPYARKILFKCIHNIASASHTNPCHIADFYEKRKRQSQTTSTKPHTIASIHRLIRTMYYLIIHNKLYDYASTQNR

SEQ ID NO: 178998 - protein, 447 aa, unidentified
MKKTKPPSKRSAKLPKHLLHLNQHAAGIDVGSRSHFVAVPDGTDEQSVREFLTFTDDLERLAEWLISCGVTTVAMESTGIYWIPVFEILEYHGLEVRLVNARHVKNVPGRKSDVLDCQWLQQLHTYGLLRGAFRPADQVCTLRAYVRQRSTLVRSASAHIQRMQKALAQMNLQLHNVVTDITGVTGMSIIKAILAGERNPHVLAALRDKRCKNSEETIARSLHGNYRPEHLFSLQQAVELYEFYQQKIADCDQQILAQLRQFDSPDDGDPDSKPPRSMEEALQRMSGTDLSSINGINTNSALKIIAEIGIDMSRWKTVKHFTSWLGLCPGSKISGGKILSSATKPVANRAAAALRMAAMTLFNSKSALGAYFRRQRSRLGAPKAITATAHKLARLIYNMLKYGSAFVDSGQEQYEERYRSRVLQGLKRKAQELGYKLISIHEEPQTA

SEQ ID NO: 178999 - protein, 430 aa, unidentified
MKSNTQNAKIEAITEKTLVLGIDVGSETHYARAFDYRGIEYSKKPFKFSNTEAGFVTFKEWILDLKERHEKDKVVPGMEPTGHYWFNLGKFLQDNEMKPVLVNPHHVKKTKELDDNNPTKNDRKDPKVIAGLVREGRYMIPYLPDGVYADLRTASNIRFQLQAELTRIQNRISRWFNIYFPEYKAVYGKPDAKSGMLILKQAPLPEDILTLGIDGVNQIWRDAKMRAVGKARAKTLIEAAEHSVGSKEGAISARMEIRMLLEDYESRNIRLQEIMTLIEELVNQIPMAEKLLEIKGVGIKTVSGFLAEVGDISRFNNPKELQKLAGLALVENSSGKHKGRTTISRRGRKRLRYLLFEVAMSLVAKNPEFRELHTYYTTRRLNPLKKMQSLMAVAAKLIRVFYVMLTKGVDYDLKKMVGDIKRPAVYLQAA

SEQ ID NO: 179000 - protein, 356 aa, unidentified
MDNRKYIGMDVHQASISIAVSDAAGKVLMECIIETKAATVLEFIQGLRGSLWVTFEEGTSAAWLYDLLKPHVTKVVVCDPRRNALLKAGNKNDRVDARKLSDLLRAGLLTPVYHGESGVRTLRELSRSYLAVSKDLTRVMNRLKAIYRSWAIPCAGQQVYSPRHRAAWLEKLRETGVRRRAEQTYQQLDFLMGIRKQTRKELLAESRKHPARKLLEQIPRLGPIRVALLIALIQTPHRFRTKRQLWNYCGLGLRTRSSGEYRYTGGQLQHARKPPALRGLNVNHNHDLKNLFKSAATQAGACKDDPLGEFYQNLLAKGMQPQMARLTLARKIAAIALKIWKEGEHFDPTKLKQQAA

SEQ ID NO: 179001 - protein, 347 aa, unidentified
MRFYTKQHQFYCGIDLHARTMYLCILNQEGEILVHRNMPAGPDPFLKTIAPYRENLVVCVECIFTWYWLADLCAREGIPFVLGHALYMKAIHGGKAKNDKIDAQKIAVLLRGGMLPQAYVYPAEMRATRDLLRRRLHLTRKRAELLAHIQNTNSQYNLPEIGKKLAYKANRDGVVERFSDPAVQKSVEVDLALIGYYDQLLSDVELTIVQTAKQHDAHTLYRLQSVPGIGKILSLVLLYEIHDISRFPRVQDFVSYCRLVKCAQESAGKRYGTSGAKIGNAYLKWAFSEAAVLFLRNNPVGQKYLARLEKKHGKGKALTILAHKLARAVYYILRRDTVFDMNKFLHG

SEQ ID NO: 179002 - protein, 427 aa, unidentified
MAAVMIGVDPHKGSHTAMAIGADEGPLGQVRVRACAAQAQQLLAWAAAWPERTWAVEGAGGLGHLLAQQLVSAGERVLDVQPKLAARVRLLAAGAVNKNDPNDARSVAIVALRSAACLPVRPDDHAAVLKIWAKRHRDLSRARTQVACRLHAVLCELVPGGVSKEIYAAHAAKIVEETEPGGAVQQARLELAAEFVADLRRIDAQLLETRKKLAVAVRASGTTLTEVFGIGPVIAAMVIGDVRGVSRFAGRDRFAAYNGTAPIEVSSGNRIIYRLSLRGNRRLNHAIHMAAITQIRYKHSEGRVYYDKKLAEGKTPKEALRALKRQISDAIYKHLKADAARAAAAGAQGPGGQPGNDSDSSAAGSHPETPALRTSHSRASTNSRTATDERMLASRPAPARRRTSRSAAGVQVEPRPGPRSGHGQERR

SEQ ID NO: 179003 - protein, 347 aa, unidentified
MDIAVLGIDLGKNSCSVVGLDGSGRVVLRRRMHRDSVVRLVSGLPECIVAMEACCGAHHLGRLFDDMGHQVRLMSPEYVRPYVKAQKNDDRDAEAIAEAATRPTMRFVGLKSAAQLDMQSLHRARDRLVGERTALINQLRAVLLERGFTAPKGRRNLERALTTLLDEQGEPPPSFVLSGRIRALVDDMRAEWAELDRRIAAFDDEFAATAKADAAARRLATIPGIGVLNATALAAAIGDAATFARGRDLAAWLGLVPRQATTGGKPRLLGISKRGNVYLRRLLIHGARSAMPSLLTTNTALGAWLRGLVGRVHKNAATVALANKLARIAWAVLRRGETFDAAKLAAA

SEQ ID NO: 179004 - protein, 323 aa, unidentified
MTRTICGVDISLQSLDARIGQQGAFAQFPNTTEGIAALRAFCQAHQVDLVAMEATGGYEQQAFAQLSEQGLSVAILNPRAVRQFAQSMGSLEKTDRIDAAMIAWYAEVKKSRPTCLPPQSQQHLRALVTRLRQLTDIRTAQLNQQRLVTDRAVQASFKKLLAMLARQIRDLEKRIAALLDKDPLWRELNQAFRTIKGVADRTVARIMAEMPEIGVLSNKTISKLAGVAPLANDSGKHQGKRAVRGGRATVREILFIVASVVGRHEPDFIAFQLRLRAAGKPPKVVRIALAHKLLVRLNAKAREVRQSMAALQQHPMARTAASL

SEQ ID NO: 179005 - protein, 411 aa, unidentified
MEVVVACCAGLDVHQASVVACVNSTGGGGRSRKEVRSFGTMRDDLIALHDWLKQAGVTMVAMESTGVYWKPVYEALEHHFDTVVVNAQHINNVPGRKTDVKDCEWISNLLRHGLIRPGFVPPREIRDIRELTRFRRKLTQVQAGERNRLIKVLETAGIKLAGVASDVFGVSGRAMIRALIEGEDTPEAIACLARGKLRGKRKELARALDVSLKAHQRFMLRTQLARIEQAEADLERIDITLRELIAPYAHYLQLLMSIPGIDWIIAVTIIAEIGMDMSAFASPAHLASWTGICPGNNESAGKKRSAKSRKGNVFLKTALVTAAITGSRRRGGTYLAEKYRRLVARRGKMRAAVAIAHKILVSIWHMLSNGTFYQDPGTGFLDKLDRERTSKHLVRRLVNMGFEVQLKEKAA

SEQ ID NO: 179006 - protein, 418 aa, unidentified
MKIIYERVAAIDVGKKVIAVAVRTPGERVGRRRQQVRKYNTFHQTLAEMVAWLICEGVTHVTMEATGIYWKPIFHALCEAEHPLEVLLVNAGHVKNVPGRKSDALDAVWLAELTECGLLRGSFIPPPHIAAIRELTRYRKKLIEARTSELQRLAKVLEDSGIKIDSVASALTTLSARDMIEALIAGQRDPAVLADLARGVMRKKIPALTMACAGRFSDQHALMCTLHLEHIDHLANMIIRLDTRIDEATVPFAQQTELLATIPGIGKRAAQVIISEIGVDMSRFPTAAHLASWAGLCPGNNESAGRHRSGKTRKGNTELCQILTECAWSAGRTSTYVGAQFRRFHRRFGKKGGPKAAVATAHTLIVIIWHVLAETTAYRDLGADYFTRRIDHPDTRKRQLIRELEALGHKVTIEPAVA

SEQ ID NO: 179007 - protein, 403 aa, unidentified
MTPHSTFVRSLLLLGWKLMATAKGAWNVTTISAERPDTEVAVILGVDTHLDFHVAVVLDHLGRRLGQASVPTTAKGYERLLCWAEDFGPLRCAGVEGTSSYGAGLTRHLRARGIEVLEVERPKHRRPSSRSNLEKSDPSDAERAARAVLAGEASGVPKSSDGRVEMIRTLRAARRSAIKARTQAANQLQGLRATAPEGLRHRLRGLTTKELVSVAGRFRLAHGPRDVPTATKFALRSVARRYEALSEEIAELEAHLDRLVAQAAPELVSLAGIGTDNAATLLIVAGDNPQRLRSEASFASLCGVAPIEASCGKVVRHRLNRGGNREANRALYMICLARMRRDRRTQEYVARRTAEGKSKREIIRCLKRYVAREAYRVLICCGARSSPTGPQDEAHISSGSSAA

SEQ ID NO: 179008 - protein, 335 aa, unidentified
MDVHSTTTDACVRNEKGVIILHRRIATKANELEKFILSIKGQKRVVLEEDQMADWVTRVLEPLTDEVIRCQPRYNKLITGSEDKCDKVDAESLSELLYLNRIKPVHHPDETYRTLREAVRAYWIASQDLTRAKNRLKGWYLFNGVHEPGRTIYSIRNRSKHVNALKKKKCNTQLAELLYERVDNCRILKAKHIHVLRKAALPVKGLVELVTTIPAIGPIRGYSLVSLLEDGWRIPNKRKLWRYAGLSLRQHESREIGFKGSSKTGNRILKQVVMSAATTIVAQGKHNQLLALWERDIKQKVDPKRARRNLARKIVVIAQHLLRSKQEYRDERIKV

SEQ ID NO: 179009 - protein, 336 aa, unidentified
MLYVGLDVHLKQSTYCILDDNGKRVKTHTVKGPWDAMVKEIAKIKSPFKIVFEATTGYGQLYDWLCKSAETVQVAHPGQTRLIFRSKRKNDRIDAQKLAKLLYLDAVPTTHVPSADMRAWRRLIEFRHWQVRSRTRTKNQIRALLRRHAVSAPRRLWNRKGVAWLETLTFPSSEAALERDLLVDALLRAAAVIGRIEKDLNRRAAQHPGVTLLRTIPGVGVRTAEAFVAYVDRPKRFGRIAAAGSYFGLVPCQDASAGKNRLGHITQQGPSTVRQLLGEAAWQAVRRCPEIRAYFERIAKGAPERRKIAIVATAHYLARMMLSMLKTGETCRFAAA

SEQ ID NO: 179010 - protein, 376 aa, unidentified
MEQDTRFVGLDVHAETIAVAVAEPSGDVRALGTIPNTPEAVRRLVDKLGARERLRVCYEAGPTGYVLYRQLTELGVRCAVVAPTLVPVKPGDRVKTDRRDAAKLARSHRSDDLTAVWVPDAAHEALRDLVRAREAAKRDQLRARHRVSKFLLRHGRRLPTGMKAWSARHRAWLQAVHFDHAAQEATWVDYVSEVEHATDRIARLERTLGVVVATAPPAVRAVIAALQALRGIAALTAVTIVTEVGQLSRFAHPRQLMGYSGAVASEHSSGPRTRRGAITKTGNAHLRRVLLEAAHAYRHRPGLGHTLRVRQRGLDEAVKAIAWKAQHRLHDRYRQLVAKGKPVPQVVTAIGRELLGFIWAIGVHVERHPHTEERAA

SEQ ID NO: 179011 - protein, 406 aa, unidentified
MNAVGIDVSKGKSKIAIIRSFGEIVAKPFDVEHYPDQLAELVEYIRSLPGESRVVMEHTGKYSEPIAEFLCNSGIFICVVNAKLMHDYAGGGDTIRRDKTDKLDAVKIAKFCLDKWTNLSQYEPVDKQRKLLKTYNRQLSQYNKIKTMLKNNLISLLDQTFAGVNDLFTSPAREKDGHEKWIDFVASFPHCNCVTLLSRKNFTTKYEKWCRKNGYKFCEEKAYWIYTAALNCIPTLPHDDLTKTLVTQAVAQLNSLCETVAAVKAQMSLIASQLPEYETVLSMHGVGKALAPQLIAEIGEISRYPRRTSLARFAGIEPPENQSGTYNQHSRRISKQGSPHLRKALFQVMCCVLQNKNPDQPTFQFLDRKRAEGKPYKVYMIAGANKFLRIYYARVMECMELSEQSP

SEQ ID NO: 179012 - protein, 341 aa, unidentified
MEQYVGLDVSMRETSVAVRQNGKRVWRGKCPSDPKALADVIRQRAPDAVRVVLETGPLSTWLYHALKAEALPVVCIDARHAKAALDMAPNKTDANDADGLAQIAEVGFYREVRVKGYAPMLARTLVGARGQLLRISIQLSNQIRGVMKTFGLIVPKGAGRVFETHARALLGTNEAVARVVLPLLEAWRAVRARAAELDRQLIAAARTSPACRRLMTIPGVGAVTAASFVAAVEAPENFGTSRAVGAWLGLTPRRYQSGEADYDGHISRRGDGHLRALVYEAAAAVLTRTRTDSALRSWGLELKEKVGFKRAAVAVARKLAVIMHAMLKTGAAFDPAPSTTA

SEQ ID NO: 179013 - protein, 428 aa, unidentified
MADLLEGALPLNLVAIDVARYSNAVLIELSDGKRQRFRMTNNASDFDRLLSYLQALPGNCRVALEPTGDYHRPLAHRLLTAGHEVVSINSVAQARYREAMFNSWDKNDPKDAQVILEMLRRGTYQRYVDPQIAGHPDLQELAKTYYQVSRARTKVQRSLINHCLPLYFPEMHRYWCTTRNEWFVRFLLEFPTPTHVRALDRESFVAAAWDLVGRKVNKRAKLEEIWETAAHTAALPHALDCLAVETFRITLRRYQELNVLREAIEARAEVELHDNADFAHLKTLPGIGSVIAMTILAEAGDLRRFGHHRQFLKYCGFDLAKIQSGTQRGREQLSKRGNARLRLAFWMAGMAAVRMKENSFRSKYERYVHANPDDADLKRKALTAVAAEMARVAYSMIKKNQPYRQFFELGLPSGSIPLSAAVGAQATP

SEQ ID NO: 179014 - protein, 342 aa, unidentified
MEQIKVVGLDIAKNVFQVHGVDGEGEVVVRRQLKRSRVVSFFASIEPCRIGIEACATSHFWARELGALGHDVKLMPPAYVKPYVKRQKNDAADAEAICEAVTRPTMRFVPVKAVEQQGVMVLHRARELLMGHRVRLSNAIRGHMAEFGLIAPIGRNGLQRLIGTIDDETDERVPTGARLCIKMLVDQLLLVNAQVLENDRQVRASARSSEVGRRLMEIPGIGPVIASALIATVPDPKAFRCGRNLSAWIGLVPRQNSSGGKERLGGITKQGNRYLRKMLFIGAMAVIRYAQRNGTRRPWLVQLMARRTTKIAAVALANKTVRIVWAIMMSGEHYREPVVLAA

SEQ ID NO: 179015 - protein, 442 aa, unidentified
MDLLHTHGAGLDVHKKTVVAHARITDARGRVERHTRTFGTMTADLLALAAWLLSLEITHVAMESTGEYWKPIYNLLEGSFTVLIVNAQHIKNVPGRKTDVQDAQWIADLLCHGLVRGSFIPPQPQRDLRDLTRQRTNLVRDRATVVNRLQKVLEWANIKLASVVSDVVGVSARAMLAAIVDGQSDITLLADLARGRMREKRADLERALSGRVRDHHRFVIASHLEQIDFLDGQIASFDAQIVACVAKQAPPSPPAALTDSPPAPLPPSSGDGDELSWEAAIQIWDSVPGIGRRLAEQLVAEIGPQPEQFPSAGHLASWAKVAPGNRESAGKRLSGKTGKGNRWLRTSLVQAAHGAVKVKGSALAVYYRRLAKRMSGKKAMMAVAHKILTIGYTLLCKREWYREPDVSVREARRTEQLVVQMQRRIERLGYTVTIEPPAAVAA

SEQ ID NO: 179016 - protein, 328 aa, unidentified
MNSICLFTDHVALPVLGLDMAKKSVQAELRKNGNKVRFGFDNNAKGFAQLARVLQEQSAPKIWAGLEATGSYSQALALWLHGQGHRVSLLNPRRVKQYARSAGNRNKTDLLDAARDADFICAHQPAPWQPPTLEVAQLRALVRRREELSLMLQAEKNRLEGVAPNVRSSLERIIITLSTQKRRLEKLITQQIRSHHQLSRDHQLLCTIKGIGSLTAAILLAEMARPGQVERARQAAAHAGLAPRREQSGTSVRRNRGPGKEGSPYLRKALYMPALVAIKYNAPLRHFASPLRTAGKPKMSILCALMRKLTHIAFGVLKHQKPFNPSLA

SEQ ID NO: 179017 - protein, 396 aa, unidentified
MRQSRTALTVRRGIRIASFRSQCWVDGPLTASNVPSWRFDVTPAERTVQMNASMIGLDISKSVFQVHGEDAAGCIVMQKRLRRAQVESFFAKLPPAVIGIEACGSSRYWARSLGALGHEVRLIPAAYVKPFVKRNKTDARDAAAICAALGRPDMRFVAIKTIEQQAARGLERSRDLLLKQHTQLTNSIRSQLAEFGIVAAQGRRGFAALAELIAAGDTRIPAALLAALQMLLAQVRALQQAVQELEDKIVAIAKADQAMRRLATIPGVGALIAHAMVAAVGNGKQFACARDFAAWCGLTPKQTSTAGKRRSQGISRMGEMRLRKLFALGAATIMRNARSRSATATTWQRGILARRPMKVAVLAQAAKTARIAWAILVSGETYQPQRTANRSLATAP

SEQ ID NO: 179018 - protein, 323 aa, unidentified
MEAIGIDIAKRKFDLLWLCASTGKKKNKTFENTPAGFKEMFQWMSKYGISSEDSHIAMEATSQYYEAVALALFDAGFTVSVVNPLQIKRFAESRLQRQKTDKADAELIAQFCAQTQPRPWQPPPREVRELQRLIARLEAVQGMHVQEQNRRYESQGVALESVERVAESLKDEEERLRKMIKDHIDHHPDLRSQQDLLCSIPGVGEQTSSYFMAWLRSERFEDARQAVAFVGLSPQHRESGDSLKGKPRICKLGHSRLRRALYMPALTALKHNGAAIALAERLRSNGKRGKVVVVAVMRKLVHWMVGVIKSGTRFDPQLALAKL

SEQ ID NO: 179019 - protein, 331 aa, unidentified
MKNKELIGIDVSKKVLDVFILGVSYHFIVENSPAGFAKLLETCCFKLSCNKDHLFFCFEHTGRYSWLLSIFLSESSIVFAKVPAMDIKQSRGLIRGKSDKKDAQMIANYAHRRRDELIPTLLHKPEVGQLRQLLSLRNKLLRHRTAYKNSIKDLQDYFIEGESEFIRTTQERLIEQLNGEIDNVEEQIDTIITSMPDWENNFKLMQSVKGIGPVVSRYIIIYTENFTRFTDPKKFACYCGIAPFEYSSGSSIKGKTRLHPCANKQLKSLLNIAAMGAVRLKGEYKTYYERRTEEGKNKMSTLNIIRNKLLFRMFAVVKRQTPYVDLTMFAA

SEQ ID NO: 179020 - protein, 437 aa, unidentified
MDLSAKAWSERTAFAGLDWAKDHQDVVVVDHHGAVVDDFRIEETAEGWQRLRERLSKYPDLVVAIETSSGAVVERMLEAGYGVFPVNPKAAKRYRERKVPSGTKTDRVDAWSLADALRVDGQAWRPLRPDDPLTVELRLLCRDEIGLIKQRTALVCQLRAALHEYYPTALRAFDDWTARASWAFLERFPTPQALVGSGKRRWEKFLHTHKLYHSKELYQKRLSLFATADQFCGSPAVINAKSLLAVSLAMQLGVLQKQLDEYRRKITKLFDRHPDHDLFGSLPGAGEKLAPRLLAELGDNRDRFDSAQGLQCYAGTAPVSYQSGQIHQTRFRRACQKTLRSTVHLWVNLSRRACPWAEAYYRKKREEGKSHACALRCLGQRWLKILWKMWQTRRPYDAELHQRNQVRHGSWVIALQPATAESATRPTRRMARPPKVL

SEQ ID NO: 179021 - protein, 342 aa, unidentified
MQVTTIGIDLAKTVFQVHAVDADGATVVRKRLRRAEVLSFVSGLEPCLIGMEACATSHYWGRELAKFGHTVKLMPPAYVKPYVKRGKNDATDAEAICEAVSRPNMRFVPVKSADQQAVLMLHRTRALLIRQQTMLANAFRAHLAEFGIVVAQGIRHVRALIEKVFGEDTVDLPALARTALRPLVAQLMELRLQIKTIEKELLAWHRTSQQSRRLETIPGVGFITATAIAATVTDPSHFRSGREFSAWLGLTPRQNSSGGKDRLGRVSKMGNGYLRSLIVVGATAMIRYAREKGPVSARWINALLEKKPARLVSVAVANKTARIAWALLVRKEDYRVPVPVAA

SEQ ID NO: 179022 - protein, 420 aa, unidentified
MAPLSNQQFKAFVGIDWADTKHDICLQQAGDDRREFDCIPHQVTRIDEWAKALHQRFGGPIAIALELARGPIVSVLQKHAFFTLFPINPLMLAKYREAFKPSRAKDDPTDAELALDLLLRHPERFSPLRPQSAGMRSLLSLIEQRRELVGDKTRFTNRLTNALKQYYPQALEWFDDIDTVLFCDFLTRWPTLPAVRRASRKTLETFFHAHNCRRAQLIEGRLESIRCAVSLTDDPGIVAPHRLLALMLVAQLRTALAAIDVFDKEIATVARTLPDFDLFDSLPGAGPHLTPRLLAAFGEQRDRFKGAEELQKYSGIAPVTERSGKKCWVHWRWQCPTFLRQTFVEWAGQTINKSFWAGAYYRQQRAKGSSYQAAVRALAFKWIRILYRCWQTGTRYDESIYLNALRKRGSPLLRNLGLPE

SEQ ID NO: 179023 - protein, 401 aa, unidentified
MLFCGVDWASDHHDVCIVDVDGTVRWRRRIAHDPSGIAELRTAISTHEPNPANVCVAVEINHGLLVGALVEAGYVVYPINPKAAERFRDRRKPSGGKNDRLDAEILAQAVRTDRASLRALLPDSDLASEIAVLARDRHALVREHTRLLNQLRSALGEYFPAALVAFDLDADSTLAFLERYPTPEAAAKLSGFQIAAFLRARRANRDLAAKAAAAKEAFHAPALRARPQIARAKARLVRVVCAQLRALRPELSAYEHELERLLKTHPEGELLQSLPGLGVILASRVLAGTGDNPQRFRSAAGLCAYAGTAPIVLQSGKRAVVKARSACPKEFRDAVQQWADQSRRRSAWAAEFYRRHRDRGHAHNESLRALGNRLLELLFDLRRRGINYDESVHAANIRWAA

SEQ ID NO: 179024 - protein, 342 aa, unidentified
MKKYFIGIDVSKETIDVSFVESDFQQQPEYLAQYPNGKKGYRSMIRDLKLALRGASSGQWLFCCETTGAYDRQMCHWLVEHGMHVWRESALQIRQSLGIRRGKNDKADSMAIADYARRHPDKVNLFEIPSKVLSALKDLYLYRQTLVDKLKGVKNRQKALKSQGEAASPAARFIRRDSNNETKRLERSIAECESAMMEVIRSDEQLMSNYEHVRSIKGFGLVVTVALMVYSGNFQTVPTANKMATYCGVASFRNKSGTTLDARQDVRHLSNLRLKGVLTMAARTAIRHDEAIRQYYQRKIAQGKQHGVAINNVKNKLLHIAYALVRDGQLYQSGHVANGDAA

SEQ ID NO: 179025 - protein, 368 aa, unidentified
MNTVKFIGMDVHKKTITIAIIDEGRQKQPRIYGSIANQLEALDKFCRKTVSTAARLHFVYEAGPCGYGIYRHLTQKGFDCMVAAPSMIPKKSGDRIKNDRRDAVMLARLHRAGELTAVYVPDAQDEAMRDLTRAREDAVVAARKSKQRLNAFLLRNSLTFTGRTKWSKAFFNWLSDIAMPYPAQQVALQEYIDTVHENLKRVNRLTDQIRQLVPAWRLAPVVSALQAARGVSLIVAVTVLAELGDLSRFDNPSQLMAHLGLVPSEHSSGENIKRGAITKTGNGHVRKVLVEAAWAYRMQARVSRLLLKRQQGVPEQVCQIAWKAQLRLCARFRKLTARGKTKQKVVTAIARELSAFLWAMAKQLQPVV

SEQ ID NO: 179026 - protein, 345 aa, unidentified
MSEFYESQQFVGMDLHRRRSVLVRMTESGEHLETVRILNDRDSLAEVMSRAGESPEVVLEATYGWYWAVDALAELGATVHLAHPLGVKAFSYRRVKNDQRDAFDLADLLRMGRLPHAWIAPPATRELRELVRHRAKLVAMRSQCKAHVHAVLAKGGIWVPMTDLFGVEGNLLLDKATMPAPYKERIASLRRFIEGFDAEIDLFTAMVQRRLTHDAGYTAIQQIPGIGPVLAAVFVAEIGDVHRFAGPAQLTCWAGLTPSHHESDTTVRRGRITKQGSRLVRWAAIESVKILPKTSHIGAIREQVAHRRGNRNIGAVAAARRQLELVFYGLRDHHVRALHRSPHAA

SEQ ID NO: 179027 - protein, 347 aa, unidentified
MLHAGLDLSRKKLDVCLLSDRGEHLDQLAVAPEVNSLRRLARRIEEVHCQPVCAVIESMTGARIVHDTLEQQGWSVQIADAQKVKGLAPLACKTDKIDSKVLAVLSHRDLLAAIWLPDPSVREERELARFRLHLVKHKSALKNRIHSTLINFGKPCPVSDLFGVEGRRLLKRLQVPEPWRGNITASIELIDDLERQISEINRRLKEGHAEHPYVPLLLTVPGIGWVLAFTIAAEIGEIERFSSPEKLTGYTGLCPRVNQSGEKDRRGPLTKHGPTYLRWALLEATMHASRHPAYAERYQRTKRRLGKQRGAKVAQVDIARRLAHAIWHMLSHKEKFAPRGAAFRLAA

SEQ ID NO: 179028 - protein, 381 aa, unidentified
MFEGITYVALDDHKRKHQVAVLLPGMDRDDAITWRIENTRAGIRKMVRKVLKMAPGDVRFCYEAGPNGYVLQRRIEGFDGVSCVVVAPTKTPRRSGDRVKTDRRDAKKLVGLFRAGELQGIVPPMPEEEAIRDLCRCRRAAQRHLMASRHQLDKFLTRNGFVYWEGKNWTRRYREWLRTLSFDDWRREKTFHSYLFGEEQDEDRVKRLDAEIIRAAEEEPHRTLVGFVRCFRGLDTLSAMILITELYAVGRFMTAPAVMGFVGMVPSEDTTGWDPHRGPITKTGNGHVRRILVEAAKHYRHPARISRALATRRKGQPDWVIAIADKAQARLHQKYWKLVMGKGKHPNVATTAIARELVGFIWSVLSRAATEMPSVADELVA

SEQ ID NO: 179029 - protein, 328 aa, unidentified
MFFIGIDVSKAKLDCSLLLDIATGKRKSKSVANSKAGITDLLAWCIKQAVVATDLHAILEGTGVYHEQAALVLFDTGVTVSIVNPAQVKDFGRSLGVRTKTDNIDSLILAKYGALLNPKPWSPPTPEARELQGLLSRREAIAQDIQRERNRLEKTEATELPPPVQQSILDTIAFLEQQLAKMQHNIDQHIDNHPRLKEDRDLLTSIPAVGAQVGSHLLAVLHNHPFRSAEQFAAYLGLVPVERQSGSSIKGRPRLSKTGPAHIRAKLYMAAVVATRHNPHLKALYQRLQANGKPKMSALGAVMRKLAHLCFGVLKTRIPYQPDYAISC

SEQ ID NO: 179030 - protein, 392 aa, unidentified
MIYVGIDVASKKHDCYIMSDVDENSNLLVTINNDIEGFTKLKETIYDFMSETNDKVRIGLEATGHYSHNILHYLVREGFDTMQINPLLTNMERKASSVRKTKTDTIDAKSICMFLTRNKDFKPYTIKQYHNAALKSLSRRRISLVRQLSKQKVQLHMLITLTFPEYLKVFSSLYASSSLELLHKYSIPSTISKTRIDALANTLKKASKGKLGHQTALLIKELAANTAGDKNDFYAIQIKLTVEMIRFLDTQIKVYTDAIKVIVDENCPIILSIPGISYVTGAIILGEIGEISLFQSPTKLLAFAGLDPNVYQSGNYSANNLKPSKRGSSYLRWAIHISSSVIIHNDKTFASYYAKKRKEGKHHLVALGHVSKKLIRVIFSILKYDNTFIPNH

SEQ ID NO: 179031 - protein, 349 aa, unidentified
MVVLGIDAHKRTHTAVAVDENGKKLGAKTVPATSAGNLELVRWASQFGEHRFAVEDCRHLSRRLERDLLAAGETLVRVTPRLMASLRRSARERGKSDPIDAMSVARAAQREQDLPTAHLDGPEREVRLRTDHREDLVNERTRAENRLHWHLHELDPTLELAPGSMGRYVVLDRLALLCAGHEGTVAEIAAELVERIRALTTRINELERQIAAIIAELSPELLELRGCGALTAAKIVGETAGARRFADRDRFARFNGTAPIPVWSSNTTHFRLNRGGNRQVNAGIHRIAVTQLRGGPGKDYVERKIAEGKTKSDAIRALRRKISNEVYRRLISDEMAREAGPVTCISIAA

SEQ ID NO: 179032 - protein, 397 aa, unidentified
MYYIGIDISKFKHDCAVIDDSGEIVTPSWSFTNDAKGFSQLKLLLNSLDTETRIGLESTGHYGMNLKLFLESNNFSFMEFNPLLINRFVKSKSLRKTKSDSIDCMMIAHYLMTVEYKPYPSSFYHTEKLKSLTRFRDSLIRLRSRQLVELTNILDKVFPEFKPFFGSRFSVTALYILSNYSSPEKIANMNSKSYEALRKLSRGRFSTVDFAKLKQLAKNTIGTTEDYLLLQMQIVLDIYRQLDSKVDETEVSIKECVSDMNPPMLSVPGIGIESAAVILAEFGDFSKFKNASQMLSFAGLEPGYFQSGTSETTGKMVKHGSSYLRYALMNCAQTVVNYEPTFAMFYSKKRAEGKPHRVALSHVVKKLLRVIYTLQTKNIAYDADSVSYTHLTLPTKA

SEQ ID NO: 179033 - protein, 417 aa, unidentified
MKAWTELTHFAALDWADDHHDLVVVDARGQVALELTFAHNAEGWQQAQQALAPWPGLPVAVETSAGPAVDQLLQRGFAVYPVMPKAAARYRERKRPTGSKDDRHDAWSLADALRTDGHAWSALSPLDPLTGELRALCRDEITLIEQRTALVNQLQAALKEYYPAALEAFEDWTVPYTWAFVLAFPTPKALAAAGKRKWEKFLHTHKLWRPQTSSQRMEIFARATAFSGAEAITAAKSLLAQSLARLLQTLEQQLANYRARIQALFDRHPDHDLFGSLPGAGAKLAPRLLAELAGADWSQLSQVQARAGTAPVTYESGKIRRVKIRRACTHPLRATLHLWADLSRHYSAWAAAFYRAHRDKGQSHSCALRCLAHRWLEIIGAMSRTHTIYNAEHHLREIQKHGSYVLQLISSPDPKPL

SEQ ID NO: 179034 - protein, 368 aa, unidentified
MAIAQQGVITQATVYAAIELSKKSWVVGVAHPDRDRPSIHRFAGGDLSSVVARLRKAAGDERRILVCYEAGYDGFWVARSLTRLGIDCRVLDPASIQVNRRARRVKTDRIDALALLRALIAVDRGERHICSVVRVPAIEEEDARRSHRERQRLVRERTGHINRIKGLLFAQGIRGIDPKLRRTRIDFRALITAEGNPLPERLSRELEREYQRLELVQKQLRAVEEERDKADAQDPAVERKRELLCALQGVGNAGAAILAREVFARSFANRRQLGSYLGLTPSAYDSGSTTRCQGISKAGNSWARRILIELAWLWRKYQPDSPLSRWYAQRTTGQSPRIRRIMLVAMARKLAISLWRYVETVSFPMAPS

SEQ ID NO: 179035 - protein, 427 aa, unidentified
MSYRIAAVDVHKKMLAVVVADIAGEGEFQFERRKFGATPGELHVLAQWLDQQGVEEVVMESTAQYWKPVWGMLERFWKPARQQRESAPKMAGTLHLCQAKSNHGPRGRKNDFLDSERMVKRLVAQELVLSFVPDAEQRLWRTVTRRKHQLTRAKVVYKNQLESLLEQAHLKLSSFVSDLLGVSARRMLKALAEGETDPVALAALADCRLQATPEQLRDALGACTELNGTFRRLLQMALDELQLIETHIEKLEREAMDLMKEHQDVVQRVAEVPGFGPDSALQMIAEVGPKAATFRTAKKLSSWVGVCPGNEESAGESHSTRSPKGNHHMRRLLNQAAQSAVKVKGSIFDLTFSRLLPRLGYQQAIWAIAHRLCRVLWVILHEGVRYEERGPTVSAKSKRTRAARMIRELKKLGYRVEGGPLPAVTRA

SEQ ID NO: 179036 - protein, 407 aa, unidentified
MIFVGDDWSEVHHDIELQDDAGERLARVRLPEGVAGIAAFHELVAGHALSPGEVVVGIETDRGLWVQALVAAGYQVYAINPFAASRYRERRSPSGAKSDPGDAAMLASIVRTDRRHHRLVAGDSALAEGIKVLARAQQNLIWSRQREARRLRALLREFYPAAITAFEDLTSSDALAVLAIAPSPPAAARLTTKRTAAAMRAGGRQRNAQVKAAETLTVLHTDELHAPAEFVDASAAVVRALIGVLTAMSDQLESLDAALADHFEQHPDAEILRSLPGLGVVLGARVLAEFGDDPTRYADARARRNYAGTSPITRASGTRHTVLARIARNRRLAAACHWWAFNALHTSPGARAFYDDRRARGQNHNQATRALANRLVGILHGCLHHRQPYAEQRAWPTPNPRPQGVAA

SEQ ID NO: 179037 - protein, 364 aa, unidentified
MAQVLEDSRSQVMISVEPHKASWTAAAVDASLRPLATIRVPVGDDGYRSLRRFARKWSNTHWAIEGATGLGAPLTSRLSEDGVDVVDVPAKLAARVRLLSTGHGRKSDDADAVSVGVAALTAHGLTTARMDAAVTALRATVEHRDDLVKTRTQTVNRLHVVLHPPDPRLRTPRPERRPRRRDAAPGPTPRSRRQDLRGLAVDLVGEIRQLDRRIAKATSDIEAAIAESGTSLTELCGIGTLIFARVGSIHRFRSAAAFASYTGTAPVEASSGDIVRHRLSRAGDRQLNCALHTMAITQIGRDTPGRAYYQRKRAAGKSHREALRCLKRRLSDVVYRQLLRDSATELAAGPGGHSGAALSSCAAG

SEQ ID NO: 179038 - protein, 382 aa, unidentified
MNRIIKIGMDVHSTNYTLCAMEPVLDGEDRIFTNIQVTPDYENVIQFIDNLKERLGSPDSYSIECGYEAGCLGYSLYHQLTKAGVKCTILAPTTMLTQQGKRVKTDKRDAVMIAQCLSYGGYHAVHVPTDQDASVKEYLRMRDDHKLALKKIKQQINAFCLRHGYIYDGHKWTIKHLDWLKQLDLSELYRETLNEYMTSYEEQTAKIERFDKRIEELAADPDYHENVRKLSCLLGIQTYTALSLIVETGDFKRFRKGNTYAAFLGLAPGESSSGEKISRTGITKAGNNHLRTLLIEAATGICKGQVGHKSKALCARQAGNPVEVIAYADRGNIRMRSKYKRMIRREKKRNVAVSAIARELACYVWGIMTNHIEPREEGKKAA

SEQ ID NO: 179039 - protein, 344 aa, unidentified
MLADTAGRVEFVVGVDTHRDAHTLVVVDGVGRVRAEFVVSASRAGYAEALRFADRHAPVRLWAVEGSGSYGAGLVRYLIDRGERVREVERPTRRGREARLKSDLLDARRAAQHVVSGGGSTPRQSAEGEALRLLVRTRESAVTQRTEATNQLRAAIVTAPDPLRERLQGLTRPALVAACVKLKPRPGDPAEAAFTLAVRGLARRIRELTNEADQLQEAIHRRLKDKHSALLERPGIGPIVAAQVVISWSHHGRLQSEACFARLAGVAPIPAQSGQTSHHRLDRGGDRHLNRALHTLALCLARTDPRTQRFLAERTARGKTRREAIRLLKRYLARSIYRQLEAAT

SEQ ID NO: 179040 - protein, 406 aa, unidentified
MEGPIITVDVSKGSCHYQPFIENGHPMRKPKQLSATIDGFQKLGQTIKDLEAKTEREDIPVIFEATGVYHRPLQKYLDDHRIRYYIISPLLSATYRKTDLHSNKTDALDCAHIAKAYYCEKELRQYQAQPQEYKRLYQLSRIYESELVHLRKRKVSLRSMLDIIYPRIDKTFKGNQNLYDPIPMEILKRYPHPLLLLSHREDTIVKTVGHRTGHLKGYTERIVHKIYEKAKECYSGCEINDIEVINLPRLIENVQEQKKKCDSLLKEMIEIARTCPYFASVVSIVGIGENLAARIIAELGDVNRFDNRAAIVAYAGLNPKIQQSGDIDGLHLKISKKGNKHLRCLLYLGAQCNYRLRKEDPLYEFTKKKRQQTQCPLSSKAAYTASAHKLLVIIYSLCKNGTRYHS

SEQ ID NO: 179041 - protein, 353 aa, unidentified
MKISEKISYRNRNVFIGVDVHRRHYTVSCICEGDLVKKCQILAGPEYLLSLINKYFSEATVKVVYEAGFSGFALYRYLEKHHTSCIVVNPCSIEVSSRDRIKTDKRDSLKMATQLAAGRLRGITIPSEKRENQRLITRSREQLLKERTRIKNQIRFKFHQFGLFPLEFQTRLTRNQVDLLLKNDLCEELRASVNLFIGIWDLLDKQIKQLDSELRKQAADDPLEKIYRSACGIGIVAARTLVCELGDMSQFANEKALFSYTGLTPAEYSSGEHRRLGHISRQGNARLRRVLIECAWSAIKKDKKLNEDFIRISSRAGKKRAIVAIARKLIGRVRAAVRKKEMYEPGHNAADLK

SEQ ID NO: 179042 - protein, 348 aa, unidentified
MTIAMIGLDTAKTVFQVHGIDKSGRAVLRRKLHRSELVRFFEQQPQCTVFLEACGAGHYWGRLLSGFGYEVKLIAPEAVRPFVKRGRKNDAADAAALCVAGTRPETRFVPIKSVEQQAVLALHAARSLLVKQATMLANALRGLAAEFGLTVPKGLHKLEELMTLVSAEESIPAAGRQAMAELYAQGQAVAERLATLEAKIASHARQDATARRLATIPGIGPITASLIAATVGDNISAFKSARHFAAWLGLVPRQHSTGGKTRLGRITKAGNTESRRLLVLGATSMVWRAAHWNSKAGLWVQGVLARRPARLVTVALANKMARIAWALMTRKQVYQAQGHAQAAAEAAA

SEQ ID NO: 179043 - protein, 479 aa, unidentified
MPYWTRLMIPGQNVFTDKETVMKHFYLGVDVSKGYSDFMLLDAKKRRVEEDFQLDDTFDGHQKLYHMLSSLCAQHPDAQVYAAVESTGGYENNWFEALVKFQSSLPLKTARLNPCGVHNNSKAGLERNITDAISAENVAKYMIEHPENVRYQQHDALASMRKQWSFIKMLIKQKTQLLNQLESNLYGANPEILAYCKNGVPKWVLSLLLRYPTAAKLAKAKKSAIASIAYVTEQKAKELIQSAKKSVASATDQISAQIIKAMVTQIRQLCQAIEAQENILIKTCSIPEVQILKTLQGIGDISAVGLMLELGSVERFASAKKLSSFFGLPPIYKKSGDGSYGFHMSKKGRIVPRQILYMVAMTAVQCNPLIKEIYLKHTEKGMKKKAALGLCMHKICRIIYGMLKHNTAFDADIDRNNRKKSTKADTKKLRSDKKRRYQSFDCKAPISGRHNKKRKERKQSQSDNIANNGIIKASVPICV

SEQ ID NO: 179044 - protein, 243 aa, unidentified
MMIGVDYHPSFQQIAFFVEETGEYGEERLNHDGGEAERFYRDLQGKGIHVRVGMEATGYARWFERLLAELGFELWIGDPAEIKAKRVKKQKYDREDARLLLRLMREDRFPQTWVPSPENRDLRQLLWHRHRMVQMRTRIMTHPGVGPITALAYVLIIGTPERFARGKQVGTYVGMIPAEDSSADKQRRYLHLAMRRHKSIAKVARGRRMAIRLYWMWRNGCDYSPSFEFGSYAGKLGTRHGVQ

SEQ ID NO: 179045 - protein, 345 aa, unidentified
METITTIGLDIAKSVFQVHGVDAQGKVIVRRQLKRRYVLAFFQKLPPCLVGIEACASSHYWSRELQALGHTVRLMPPAYVKPYVKRQKNDSTDAEAICEAVTRANMRFVPTKTTEQQSCLMLHRTRHLFIRQQTAVINAIRAHFAEFGIVAPVGRTGVEQLLNVARDGNDKRLPDVARACIAALGAQLQMLKARILEFDRLIMAWHRSNQVSQRLDELPGVGPALATALVASVADPKAFRSGRDFSAWIGLVPKQHSSGGKNKLGGISKQGDRYLRSLFVAGALAVIRYAKIHGSKHRPWLAALLARKPTKVAAIALANKIARMAWAMMAKGERYRQPVALAAAW

SEQ ID NO: 179046 - protein, 402 aa, unidentified
MKKIVIGVDPHKLSATIEVVDQRENRLGSGRFTTDKAGFAAMRKYVHQWPEREWAVEGSLGVGRPLAQRLLEAGERVVDVPAKLAARARLLDTGHGRKTDAHDAHSVAVAAVRAKNLRVLAPDGQLEARRLLVDHRDQLANQRVATVNRLQRMLAELTPGQAKKDITALQAKAMLASVRPRDLAGKTRRRIAVDELATLMAIEKKVKALTVEIKGIVKERGSNLMDLCGVGPVVAARILADVGDVARFADRNRFASWTGTAPLDASSGEQTRHRLSRAGNRRMNRMLHIAATTQIRLDTAGRAYYRRKLADGKTRMEAMRCLKRRISDAVYRQLIADAHANNQGVGTGPGGHCGATQESSAVDLPPHIDTSDQPLPGPANPTLQPSPRPRKPMARRPLKRAG

SEQ ID NO: 179047 - protein, 347 aa, unidentified
MNFYNNTHPYSCGIDLHARTLYVCIIDREGEICLHKEIPADPARLKQLINPYIGNIVIGVECMHCWYWVSDFCEELSIEFILGHALYMKAIHGGKAKNDRIDSFKIANLIRGGNFPLAYIYPKEMRATRDLLRRRMKIVRHGADLKGHVSNTTSQYNLPPNNVNLKNTYAREQLKSTFPDPVVQRNIDFDMTILDAYAKELSKVEWFIEQQAKQHNPNHFRLLKSIPGIGRILALTIIYEIGDANRFESVQKFASYARLVKCKAESAGKTYGTQGNKIGNAHLKWAFSEAAVLHLRGNDKAKNYLLTLQKRMSKAKALSALAHKMGRCVYFMLKNETVFDENKFLKS

SEQ ID NO: 179048 - protein, 339 aa, unidentified
MKYTPVGVDIAKHLIQVHFINEHTGEVVDKQMRSKDFLAFFSNREPCLIGMEACGGSQYWARELKKLGHEVRLLQARFVKAFVMGNKNDVMDARAIWMAVQQPGKEIAVKTEEQQSVLVLHRSRRQLVKFRTAQINALHGTLLEFGETIHKGRAAMDRELPAALERMKTKLPPYLITVLEDQYNRLSELDSLIDGIEKQLHSVARQNEACKRLMEIPGVGPLIATAAVATMGEASAFKSGREFAAYVGLVPKQTGSGGKVRLLGISKRGDTYLRTLFIHGARAAALLTKEPGPWITELKKRRPTGVAIVAMANKLARTVWAIAAHDCKYDKDHISIRPY

SEQ ID NO: 179049 - protein, 330 aa, unidentified
MDEVKRFVGVDVAKVALDVFIGSSGTAFSVANDEVGIRELLRQLTSGDFVILEATGGLEIPVASALVTAGLAVAIVNPRQVRDFARATGRLAKTDRLDAEMLARFGEMVRPAARPLANEQAQALEALVTRRRQLVEMLTAEKNRRTNAPKVLHRSIDEHIRWLEKRLSGFDDQLAELIRDTPLWRERDELLRSVPGVGKVLSSTLLAQLPELGMLNRKQIAALAGLAPFNRDSGTLRGSRCIWGGRAQVRRVLYMATVAGVRSNPTIRAFYLRLRANGKHAKPALTACMRKFLVILNAMLHNKTHWQIPALTSPSSLSPLLGAVSEHGCC

SEQ ID NO: 179050 - protein, 387 aa, unidentified
MSKQNDLSRCRIAHQQDATLIAVIEMGQASWLVAGIVPGLDRYPLKKLGPDRDALLQLLHRWRNEAAKAGYAIDRIAVAYEAGRDGFWLARWLRSQSIEAYVIHPSSVPVSREHRRAKTDRLDTELLKRAFLGWLRGEPKHCSMAAIPTVEDEDARRPGRERQILVEERTRIINRLKANLARLGIRGFRPNLARAPGQLEALRTPEGVAIPMNALAEMRRDLDRLRFVKQQIKEIEKTRAERLAKAPDERRHVAARALTRVVGVGVETADMLVQEVFSREIRDRRALARYAGLTGAPDESGQRRRERGLAKAGNARVRRGMIELAWGHLTHQKGSPLSVWYRMRTADARRGVRKTMIVALARKLLIVLWRLATTGEAPEGLQLRPAA

SEQ ID NO: 179051 - protein, 422 aa, unidentified
MLEEAQDSQELIERVAALDIGKAELVCCARVPSPDRPGRRLQEVSTYPTMTRSLLVLADRLGALGVTRVVMEATSDYWKPVFYLLEAQGFEVWLVNAKDVKHLPGRPKTDRLDAVWLCKVAERQMLRPSFVPPPAIRRLRDLTRYRADLVVGRTAEKQRVEKLLEDAQIKLSVVASDIFGVSGRDMLAALVAGERDPKVLARMARTRLRAKTARLEEAFCGRFSDHHAFLLGRMLSRIDQASADIAAVEAHIEEAIAPFAQAVDQLDEICGVGRAAAQVIIAEIGTDMGRFPTPGHLVSWARFAPGVKESAGKRKGKATTGHGNPYLARVLGEAAVAAGRTNTFLGERYRRIARRRGAKRAIVAVGRSILIIVWHLLSDPTVRYQDLGPSFYDTRIDAERKKRNHIRQLEALGYRVTLQPAA

SEQ ID NO: 179052 - protein, 351 aa, unidentified
MIILALDLGKNKTVGCIFDTADNKFRYKKIKTVAFALINLVEEAKPERVIFEIGTSAGWVYDIVHGQGIGDIQVANPNHEGWRWRNVKSKTDRLDALKLAKLSMVDQLPLIHMPSAKVREHRALIHYRGQLVSRRTRIKNTIRSLLHRIGLEMPAGKNGWSKKAVAELAEISCPTEECDIAQLWRCELHEELIGLEAAEQSLARVEKRLDAIGESDERIQRLRTMPGVGPRLSELVVAVLDDPHRFQNGGKASSYVGLTPRQYQSGQMDRKCHISKQGHRQLRQMLVEVSWIALKYNPQLRAFYHRVCRGQKSRRKIAIVAVARKLLVYCWAMIRDGTNWTPVVTDMQQAS

SEQ ID NO: 179053 - protein, 367 aa, unidentified
MSGDTFVGLDVHAESITAAILRPGSEQPEVIKLSSDLMKVRRLFRQLAGHGPVRSCYESSGAGFVLQRVLAGDGFSCEVIAPSLIPHKPGEHRKFDRLDAVNLARLYRSGHLTAVHVPTEDLEAIRRLLRLRTTYHQYITSTMHRISGILRNHGFVFKDGKSTWTKKHRMWLARLRLTLQGPLSTALAMELQHLEYLETELQSMDTEPERYAQSPLYRTRVEALCCLRGVKILTALNIVCEVDDVYRFSSPRQLMAYFGLVPSEHSSGNKQHRGSITKAGNIHVRRLLVEAAWNNRHSAGAALILNHRRQGQPPEIIAIALKAQHRLTRKFLRLDQRKHRHVAITAVARELCGFVWAILMALPQTHH

SEQ ID NO: 179054 - protein, 344 aa, unidentified
MPSIVGGLDIHRKQITFDYLDLVTGEVSCGQVAPADRAHLRAWLARFENPAEVAFAVEACTGWRYVTGELQRAGIEAHLAEPADTAAARGRKRRAKTDRADARLQRDLLIQGRLPECWIPPEHVLECRALLELYHDLRAGHTAWLQRVHAVLFHQGAPVFHDLSRADAPAELAAVAREHLSPAGQLQVTLCLRMLEVTAGELDALRRQLTAAARHLHGAKVLAESIYGVGPLTALALTCWLGGAGRFTSARKAVRFAGLDITVYSSDGKRSPGHLSRQGPPVLRWAVYEAGKTHARPAAPDHGYYAQVKDRKDGKRAALAEARKIIRRACHILSELGDDALAMD

SEQ ID NO: 179055 - protein, 312 aa, unidentified
MDLPVIGIDVSKSDLTIAVHPSGESWTSATTAAALDVLVTRLTALRPTLIVLEATGGYETATAAACAGAGLRVAVVNPRQVRAYGQARNRLAKTDALDARLIAEFGAQVQPPARALPDAATQALAALVARRRQLLDMLGAEQRRLAQATTTPVRRDLRTHIRWLERRLGEVDDDLTGAIQASPIWRVQENLLQSVPGIGPTTARTLLAELPELGQLDRRRIAALVGVAPFNRDSGTRRGHRAIWGGRASVRSALYMAALVASRHNPLLRPFYQRLRQAGKPPKVALVALMRKLLTILNAMARDQQPWKPTPA

SEQ ID NO: 179056 - protein, 360 aa, unidentified
MRIIGCDLHARQQSVAMLDTATGEVVNRTLMHEGKEVREFYSQLPPPVLAGIEAIGPMQWFLQLLDELGIECRVGDATKIRAAEPRKQKHDRRDAELILKLLLENRFPAIWRPSQELLDLRALLLHRHQWVRLRTQIQNGLQAIALANGLRRGPGLWSYDGQAKIAFLPLPPHASYRRSMLQALYRQMEEEVEQLTAQVAEQAEQRSGARLLMTHPGVGPVTALATEVFLGDPQRFADGKALASYVGLIPREYSSGAHQRLGALTKQGSPFLRFLWNEAAAHAVRRDPDLQRFYRRKLVQKGLGKSRVAAARKLGIRLWIMLRDQIDYEEFCRRGQKHSSAACAGMPEVAFGANRHRPVG

SEQ ID NO: 179057 - protein, 358 aa, unidentified
MAVNEGTRRIVGGVDTHKDLHVAAVVDEQDRVIETRSFATTRQGYRQMLAWMRAFGDLQRIGVESTGSYGAGLLRFMQQAGIAVLEVTTPDKQDRRRRGKNDDLDAQNAAHAAFAGQRTVTPRSRDGMIESLRVLMACRKTAVSARRVALQMIHNTIVCAPDGLRDQLRSLTRMQLVRTLASWRPDLTAYRDLDSAYRIGLKSLARRYLELHDEIADLDVMIAAIVDELAPNLVARNSIGHIGAAQLLLTAGDNPERLRSEASFASLCGVSPVPASSGKTVRHRLNRGGDRAANSALHIIAIGRLRTDQRTKDYVTRRIAEGHSKLDAIRALKRYLAREVFTLITQRRREINATRIAA

SEQ ID NO: 179058 - protein, 341 aa, unidentified
MNEYYYIGLDVHKKVISYCIKRVDGRTVKEGTVNATRKALKEWALGIKKPWYGGMEATLFTGWIYDFLLPYSVDLRVGHSYMLRAICASKKKSDRIDASKLADMIRCDWFPESYMSSSEVRDLRRVLRYRKMLVGEAIRMKNKTAGLLMEVGAQYNKKRLYGKKYFNELLENLDDVPDSVIDLLILSRSGMEIFDSNQKRLIAALRDEPLLKNRVERLMSIPGVGEVTALTWVLEVDDPHRFSTIKKAVSYCGLCSAQDESAGKVRRGPLSKQRNKHIQTVLVEAAKLAPRWNPQLAHVYDKERERGSNRNTATLAVARKLVAYMLYVDKKEKTFELKTAA

SEQ ID NO: 179059 - protein, 338 aa, unidentified
MAIVGGLDLHRRQITFDCLDTESGEVSRGRVVPADREHLRLWLRRFEDLEAAFAVEACTGWRFVVEELERVGAVVHLAEPADTAALRGRKRRAKTDRVDARHLRELVVAARVPESWIPPAHVSEARTRIRLYKALVDERSGWLQRTHAVLFHHGAPAAPGLVRAQARARLDLSVLPPAAQAVVEISLRSVDRINDELAPLRLELTRLARVQPGCRALQDHYGVGPLTAFAIWAELGDCRRFSSSADAVRHTGLDVTVHASDSKRARGHLARQGPGVLRWALFEAALCAARPASPDHDYYLTVRARLGHQRAVLSVARKLTRWCHHTLRALGDEALAAA

SEQ ID NO: 179060 - protein, 450 aa, unidentified
MNLPKHLQCLNLNAAGIDIGSKSHFVAVPVGTDDEPVREFECFTADLHRLADWLISCGVTTVAMESTGTYWIPVFEILESRNLEVKLVNARHVKNVPGRKTDVLDCQWLLQLHTYGLLEGAFRPPEQICALRAFIRHRMNQVRYSSAHIQHMQKALTQMNLLLHNVVSDITGVTGMRIIKAILDGERDTRVLAGLRDKRCKNSIENIAKSLEGNYRPEHLFSLKQAVATFEFYQNQIADCDREIEALLASFDSAATSLPSQTNGDESSKSRRVEQKFNLQNELNRVSGVDLTKIDGIDSITALKVLSEIGLDMDRWKSEKHFASWLGLSPGNKISGGKRLSGKTKPVVNRAAMALRMAASSLYKSSCALGAYYRRMKSRLGAPKAITATAHKLARLIYSMLKHGTEYIDAGQDYYEQTYKSRVIKNLKKRAQQLGYELVESMMPNQTKIA

SEQ ID NO: 179061 - protein, 482 aa, unidentified
MKAKPQEKNKRATNHPTQHHWHEMNRKQRRETMRKIQSEDLSLEVIHPDAAGIDIGNESHYAAVPPSRDSQPVRCFGCTTAELKAMAAWLQQCRIRTVAMQSTGVYWVAVYDILEQAGLEVYLVNARDTKNLPGHKSDVQESQWLMKLHTYGLLRNSFRPSQKIRTMRTYWRQRNDLVQSASRHILRVQKALTQMNVQLANVLSDISGVTGQAIIKAILAGERNPHKLAEFRDPRVQASEEEIAHYLEGNWQPDLLFVLKQEQDGYEFCQQQMAECDRQLEQYLQSTEDRSHGAPLPEEKRKGRLKKKKGNKPQFDLREGLFRMSGTDLTRIDGIDVMTATTVISEAGYDMSKWKTENHFVSWLRLCPDNRISGGKVIGKGRLPTNNPVSIALKMAATTLRQSKTYLGAQFRRLRTRLGAPIAIKAMAAKLARLVYRMLRYGMKYVDQGAAFYELKHRERQVHQLKWKAAQLGYKVTLLPAA

SEQ ID NO: 179062 - protein, 430 aa, unidentified
MNCVNDIRLEQFLQLKKEIRGSEQYLIVGLDAAKEKHNAFFGTAQGKTLVKKLVFDNTIEGFDKLDAYVERVKVQYSLSKVVFGIEPTANYHKPLAEHLIKCGRMVVLVGGVAVKNNRQLLDGRWDKHDVKDADNVADLIAQVKCLFYEYPLMTLRNVRILNALKRRLKKREHGTSVCIRNNIIAQYFPELDQQYGPSVTLAVVRECLDPSAIAGMEYDTFCRTVSPGKMTLAKSRRTEAIWRAAVNSIGCTMGEAASFEAQVMVDSLKQIRQTIKSVEDKLEDACLQFPEYTYLLSIPGFGPDVSSKVLGAIGNPHRFASGKQVLKMAGLDLCANRSGQTSSSSIPVISKQGKTDLRYALYQAALIASLKNKDFIAYYTNKLKGRAREKGIGVKMRVKLSAKLLIIAWTLMKKKEPFDPGRLNRLDKAA

SEQ ID NO: 179063 - protein, 344 aa, unidentified
MKGVTTIGIDLAKNTFQLHGVNAQGKPVLRKTLRRDQVVAFFANLPECLIGMEACGGSAYWARTIEECGHIVRRIHPRFIKPYLLAEKNDANDAAAICEAVSRPRMRFVPGKSQEQTDIQAIHRVRRGFVQARTAAINQARGLLAENGIVVRQGPSQLRLSLPIFIGDDSNGLSEIMRRLLRSLYEYIVFLEASISTQDNILKGIAKENEACKRLMKVPGIGVMTATILLTMVGAASDFKNGRQFAAYLGLVPRQYSTGGKQRLLGITKHGDSYTRTLLVQGARSVLRALQFSRHPLVRGGPGEWLLQLVDRRGTNRACVALANKTARIVWNMLHTGSEYKNAA

SEQ ID NO: 179064 - protein, 424 aa, unidentified
MKVTYQTCCGVDVHKSFLVATIVKTTGGIEPSYQKKRFSTFNNSILEFKQWLLDNDCHDVCMESTGKYWVPVFNLLEDDINVVIANPKWVKAVKGNKDDTKDSKWIGDLFRLGLVKGSYIPCKKVRILREYTRYRYKLVSCRSSEKNRYQNALTVCNAALDSVVSDIFGKSSTSIIDYLLEQSGSSINHEEIASKLLRSLKSKEDAVIESVEGYQMTDAQKYRMRLVRAHMDYITAEINDVDKMIENMISSNTDFENAVQFLCTIPGVKRDSAITIISEIGTDMSQFSSSRRLCCWAGLTPGSNESAGKKKSVRITRAGVYLKPALVQCAHAAVKSDKSPYYKKKYESLVKRRGKKRAIIAIARMILTAIYQMLSTGEQWNPSDLYKIDMPVALVEKQKAKAIKQARKLLQREGLLPPDEPFAS

SEQ ID NO: 179065 - protein, 411 aa, unidentified
MRRVIGIDTHRTFGEVVIWEDGQLRHVGRVDMTRTALEGFGRTLLATDEVVIEATGNCMAVSRVLAPFVKRVVIANPLQVKAIAHAHVKTDKIDAGTLASLYAAGYLPEIWTPDAATERMRRLVARRYQVVRHRTRIKNEVHSILYAHLTPRCPHADLFGRLGRAWLTRQPVPDDERAAIQRHIRELDRLGDDLRVLDREIAESALDDAAIKRLLTITGVNLAVAGGLVAAVGDIGRFSSPQKLVSYFGLNPRVRQSGLGAAHHGRISKVGRSHARAMLVEAAWAAAKTPGPLHAFFVRIRARRGHQVAAVAVARKLTVLVWHMLTKQEDYLWARSSLVAHKMRSLEQAGKPQKKGNRRGPTYAYNVKELRNQEMRVAEQAQKGYEHFVEAWRPRPPKERARGRLSPARLE

SEQ ID NO: 179066 - protein, 337 aa, unidentified
MKQYVALDCSLKQISVCVMTEQRRIVKEAVIAADAGSIAEFVWSQVPDPELIGLESGPSSAWLFHALRAEGLPVVVIDARHARAVLSLRINKTDRNDAVGLAGWYKPVTVKSLESHRVRTVLTNRALLVGIRQDLENQVRSVLKTFGFVLGKGRGSFADRVSEILAGKRLLLRLVRPLLKAWAAIREQLLSVDKEALAIAAQDDTCRRLMSVPGVGAITALAFKTTIDNPWRFSSSDKVGAYLGLTPRRYASGETDRAGRISKCGDGLVRTYLVEAAGVLLTRSKAASDLKDWGLRLAKRASAAKARVGVARKLSVILLRLWTDNSVFQPRVNVTAG

SEQ ID NO: 179067 - protein, 370 aa, unidentified
MYVCILNQAGETLLHRNMKTTPEAFLKAIAPYRPDIVVAVECLFTWYWLADLCADEEIPFVLGHALSMKAIHGGKAKNDKIDSQKIAVLLRGGLLPQAYVYPAEMRATRDLLRRRMHLAHKRGELLAHVQNTNSQYNLPALGKNIAYKANRDGVAERFADPAVQKSIEVALSLVSYYDELLRDVALTIVKTAKQHDANTLYRLQTVPGIGKILSLVLLYEIHHIDRFPRVQEFASYCRLVKCAKESNGKRSGTSGAKIGNAHLTWAFSEAAVLFLRENPAGQKFLARLEKKHDKGKALTILAHKLARAVYYMFKRKVAFDMKRFLNDEGRGVGERDVSLDNHGMNLILATLSNASMTASLNAYERLGHYP

SEQ ID NO: 179068 - protein, 310 aa, unidentified
MSEERFVGIDVAKAYLDVCVLPEGESWRAANDEAGIAALTERLVALAPQSVLLEATGGLQQDVVAALVDAGLAVQVLNPRQVRDFARATGRLAKTDKIDAAVLALFGQAVRPAPRMLPDRESQALKALVKRRREIQEMLTAEKIRRHTATSRVLLSIDAHIEWLKRLLKDVDDDLDKTIRSSPVWREKDDLLRSVPGIGKVVSLVLVSGLPELGRAARRQLSALVGVAPFNRDSGLMRGRRTIWGGRADVRVALYQAALVATQHNALIKAFYQRLLQAGKPKKVALVACMRKLLGILNAMLRSGERWQPA

SEQ ID NO: 179069 - protein, 362 aa, unidentified
MITYRSFVGLDVHARTIVGCALDDQTGEIVHRRFGYDLAEVAAWVGSLPGPQTVTYEAGPTGFGLFRLLTGSGIECVVAAPSKLLRPSGDRVKTDARDAFHLARLLKLGEITVVHVPTVAEETARDLVRSREDTRQDLMASRHRLSKLLLRHGFVYSGGQAWTGKHDVWLRSHRVGDMAFTTAFDASYEAVIQTVARRDRLDQTINLMAADSQFTPLVNRLGCLRGIGTLTGFGLAVEITNWHRFTGKTIGAFLGLVPSESSSGGSRSLGSITKTGNSHARRLLVEAAWHHHRDYSPNATSVMHARWAKAPLQAQLRGQAGNERLHRQWVAFTARKKRPVIANVAIARELAGWCWSLAVMDG

SEQ ID NO: 179070 - protein, 407 aa, unidentified
MHYLRIDISKKSFTVSILDEEGEAITKFLTFPCTRKGMEKLVDKICSLKLEKDKTVIGIEATGNLWENLYSFLEGYKVIILNPYQTRKYHQLLSKKAKTDKVDSLVIAGLLRSKEALTSYVPEDEVQVLRELVRLRHYLQKDKKNYLRKAYTLLNLVFPEYTNLIRSPFKKVSSVILLKYPTAVDMARAKKTDLVKWVRRIQGNNYSFELADKLIEAAKESIYSGKASEVRGMALRILIDEIQSLQNKIKEIEDKIDEILSFNEPSSPQKRLLSIPGVGPKTVAAFLGEVGDDVSRFSSANKLIGFIGWHPRISESGNSKNLHPKMSKKGPSALRASLYMAAVASLKHNPHLRSLYHRKISEGKESKQALVSVGKKIICIMYSMLKYEAEYDPQRIFFQFEKEQVLI

SEQ ID NO: 179071 - protein, 339 aa, unidentified
MARYLGVDLHRNNFTVCTIAENGRRYFREYALHAMPLFVKGLRKTDQVAVEVSTTTRLFHDAVAPHVDRVVVVNSSEFDVIRKSVKKTDRGDAETLATFLSKDLLPEVRMKDKLHAELASLTQTRDMLVKQRTALKNKINNMLAARGFSPKREMLSSEKGLRQVEELPLGPVVMAELRALVAQIRSLGKTIAELEGTIKQEAEKLPGHENLKSIKGIGDNGAAILLSAIGDINDFPSEKKLASYFGIVPRVRNSNQTERTGRITKRGTKLGRTTLVQCALVAMRYSEYLQIFYRRIARKRGKGKAIIALAKKFLGVIYRTLKNDWIFEDFPNFVLAERA

SEQ ID NO: 179072 - protein, 408 aa, unidentified
MKTLHRRCAGLDVHSDSVVACARLTVRTKATHEVRRFSTTTRDLLELADWLAAQGITHIAMEATGVYWKPIWHVLEGRFELVLANAAHIRNVPGRKSDVNDAVWISDLLAHGLIRASFVPPTQIQEVRDLTRTRTQLGREVGQHIQRIQKTLENANIKLTSVISNIMGTSGRRILKAIIRGETNPANLAELGSTGLKCPRTDLTAALDGRVTAHHRFLIAHHLRLIEELEKHIAAFDARIEELLAPLGNAVAQLITIPGVSRVSAQVILAELGADMTAFPTSGHLLSWAGLTPRLDESAGKRRSTRVRKGAPWLKPVLVQCAWGSARTKGTYYQAQFFRIKARRGPKKAAIAVAASLLTAAYHMLKNGTFHQDLGADFLVQHDKARIATKLANRIKDLGYDVCLTPVA

SEQ ID NO: 179073 - protein, 334 aa, unidentified
MSNIRWFIGLDIAAETFTAAIGTTPWKLLVKGTEFANTPDGFQQLMAWMRQHHCVLEQTVLCMEATGVYGEALAYFLVAQGYRVAMEPPLKVKRAFQTNGRKTDAVDSQQIAEYACRYTDELVVWQPPSELVEQLKVLLSTREHLVQQSTAHQNALKALRRKPVRTPFAEQIYEQLIGEIKSRIKAVEQEMRRLIDQHPTAHRLLLLLLTIPGVKLLLAAHILVLTHCGTRPFAASKLAAHLGIVPYEHQSGTSVHTRPTSRHFGPSQPRKILHLAARSLSTHNKRFRTYYQRKVAEGKAKKLAINNVANKLVRIICAVMESQTAYQANYEIST

SEQ ID NO: 179074 - protein, 418 aa, unidentified
MKIVYPICCGIDVHKSFLVATIIKTEGITPKYSKKRFSTYNNSILKLKQWLIENNCFDVCMESTGKYWVPVYNLLEDVINVIVASPKWVKAVKGYKDDEKDSKWIGDLFRLGLVPGSFIPAKPIRILREYTRYRFKLVGCKSSEKNRFQNGFTVCNIALDSVVSDMFGKSARSIADYLLKTDNFDPKHCRSLLQRSLKNKGDAVVESIEGYEITPAQKERMLLIHSHLDFVCESIDKLDSILDKLAQPYEDHIALLCTIPGIKRHSAITIISEIGTDLNQFSCSKRICCWAGLTPSNNQSAGKKKSVRISRAGVYLKPALVQIAHAAVKCKDFPYYKNKYERISKRRGKKRAIIAIARMILTAIFHMLSTGEAWNPSDLHKVDMPPVMQEEQKQKAIKNAIKLLVSQGVISQPELSVS

SEQ ID NO: 179075 - protein, 399 aa, unidentified
MEQVVIGVDPHKLSATIEVVDQHEKLIGSGRFSTDQAGYCAMRNYAKTWPDRVWAVEGANGAGRPLAQRLLEAGEQVVDVPAKLAARVRLFDTGHNRKTDALDAHSVAVVAVRTSNLRVLKVDGELEALRMLADRREALTRRRVQTVCRLQALLAELLPGQGKRDITTGQAKAMLATVRPRDIAGKTLRRIAAEELAELIAVETKIKKATAELKAMVLARGSRLMDIHGVGAVVAARILADVGDVARFADRNRFASWTGTAPLDASSGEQNRHRLSRAGNRRVNHMIHIAAVTQLRLDTEGRAYYRRKRAAGKKPQEALRCLKRRISDAIYKQLVKDAARAGGADPGGHCGASQESSAVDLPPRIDTSDQPLPDPQTRRYAAPPSTRKIPATGSFASTG

SEQ ID NO: 179076 - protein, 346 aa, unidentified
MKKIFIGIDFSKEKFDATVIKAEGVEERAARQHEVFDNKIGGFRRLLRWVRNVVEEQDASMWLFCGENTGGYSKALCNYLYACGYDMWLENALSIKRSSALQRVKSDKADSGIIAEYAMRNYDQMRPYKPLSRNLERLREVFLYRHNLVKLKASMMTRKGEKQITQEKSDISRFMAMSSKHLISEFNKKIEECDKRIQQIIDEDEELQKNFEIITSVPGVGVQNAVCLMVYTDNFGRFDYNSRKIACYYGVAPFGRQSGTSVNTPAHVSPFANKLIKSLLTQAALASVNFCPQMAIYYHRLVEAGKKKQVAVNNVKNKLLHVVTAMVRKGEKYNPDYDYHAAIEAA

SEQ ID NO: 179077 - protein, 230 aa, unidentified
MVYIGIDISKNNFVVAYPSTNGYSTKTFPNSTAGVRTFIATLSVAEHHCVMEATGNYCFLLLYLLHQSSIAVSLVNPKQIKHFARMMMAVTKTDEKDACMIAMYGEKMNPPIYKMPSQATIRILTTEGFTYFDNAKQLSRFIGICPTYQQSRTSVNIREHINRNDDERLRSLLYIAFWTALRYNSRECYIRLKANEKPFKVALIAVTNKLVRPVLTITTINSIYRWICPG

SEQ ID NO: 179078 - protein, 383 aa, unidentified
MSAQHRYVGLDVHKDTIVIAVAETGRTGEVRSYGTISSDLHAVERALAKLRADGATLHVAYEAGPTGFVIQRHLSKMGIDCLVVAPSKLPVPKGGRQKTDRRDAALLARLLRAGELTAIAVPDEVDESIRDLARARSDAVDDLTRAKQRLKSFLLRLGYHYTGPGNWSAPHQRYLRALSLPLPAHQTVLAEYLLALDQGAQRVARLDDLLATQVPRWIHYPAVQALMNLRGFQLIAATVLVAEIGDIHRFAHPRHLMAFLGLVPRETTTGDARRLGSITKAGNVHARWMLIETVQSATKPPKVSAPLALRQEGQPADRRELAWKVQCRLYKRGWHLLNRGVLKPKVTVALAREMAGFVWAMLHLVPAPAAPTAGPAGPVLRRA

SEQ ID NO: 179079 - protein, 353 aa, unidentified
MTGPKYIGMDVHKESISIAVRNDAGKIVMECVIETKANIILDFIHGLRGELQVTFEEGTWATWLYDLLKPHVTKLVVCDPRKNSRQGNKNDRIDARELSDRLYMNKLSSVYHGEAGVRTLRELARSYLTISKDLARVMSRVKAIYRSWGIPCAGKQVYAPGHRAEWLAKITELGVLRRAEFYYQQLDALRSLRHEVRRELLVESKKHQVTKLLCQIPSIGPIRAALLIALIQTPHRFRTKRPFWKYSGFAIEMHSSADYRKVQGRLQKSRKRVSVRGLNRDCNHDLKNLFKSAATIASVKPGPFQEFYAALVAKGMRPEMARLTLARKIATIVLIVWKKGVSFDAKYLKPQTA

SEQ ID NO: 179080 - protein, 423 aa, unidentified
MNQTVPVAGVDVSKRFSDLCVLAPNNDILTRMKIYHDLPSMERALTELRRIKGAYGATPVVVMESTSHYHLILFQFFQEAGFEVIVVNPIQSGALKNINVRKVKNDKVDAYKIAMLYRLKVLRASQVPANSLRGLRLLCRQRSELMGDVTRYKNRLTAYLDQVFPGYDKVFSDVGGVSSRAVLKECATPQALLSKSEDELADLIHTASRCGMVFSCKKSAKLHNVAKEAVKFGISAPGSTAVIDTVLNVLEILLQNIRQIEQDIKALVKQETYIQKNLILLQTIPGIGFNSALTILAEIGDFSLFQKPKQLAAYFGLDPGERQSGKFRGSKNKMSKRGSSQVRAALHMAAVNSVAVQKKRPPCNPVLAAYYEEKCKSKPGKVAMCAVMRKISNIIFAVLRDQKPFELRQPQEHIQRINTTVAA

SEQ ID NO: 179081 - protein, 360 aa, unidentified
MAKTKSVRPPFVVGGVDTHKDLHVAAVVDENNRVLGSDFFATTRQGYRQMLTWMASFGTVARIGVECTGSYGAGLLRHLQNAGITVLEVTAPDKMERRRRGKSDTIDAESAAHAAFSLIRTVTPKTRSGMIEALRVLKVCRKTAVAARRIALQMIQMNIVSSPDELRDQLRNLTRMQLIRTLAAWRPDVTVYRNVQDAYRIALKSLARRYLELHDEIADLDIMIASIVDELAPELIKRNAIGYESASQLLITAGDNPQRLQSEPGFAALCGVSPVPVSSGKTNRHRLNRGGDRAANSALHIIAIGRLRTDTKTQEYVAKRVAEGHSKMEALRCLKRYIAREVFTLLRNQNRQINSTQITT

SEQ ID NO: 179082 - protein, 390 aa, unidentified
MIYVGIDVAKDKHDCHILTSDGEVLCDNFSFLNSREGFNAFITLLFGYCKDISNIKIGLEATGHYSKNLLLFLYKANLFVVVFNPLSVSQSRRAISLRKTKSDKSDSRYLAEMLFSNMSCPYQEQTSDVSTLKSLTRARYRLVKEIQPLKNRYRRSLQILFPELPSFFPSFYSNTVFTLLKAMPSAKDIACCNILRLTNILSKSSRGRLKRDKAEALKLAAINSIGSYNFGDATELKFIIERIEFLKSQQIELENSIKSVMNNINLPITTIPGIGFTLGAIILSEIGDISRFSSPSKLLAFAGCEPSTYQSGKFTATNTPMVKHGSKYLRNALYLATTMAYLHSPSFHTYIDLKRSQGKHYYIAISHGMKKMSRVIYSILSSDKPFTEVI

SEQ ID NO: 179083 - protein, 424 aa, unidentified
MSKKKSSLAGLQALFARVCGLDVHKKLVVACVRILNPKDGTVQSTLRKFGTMTADLLELRQWLAEQKVTNVAMESTGVYWQPVFNLLEGHFQVWVVNAQHIKKVPGRKTDMKDAEWIAQLLQCGLLRPSFVPDRQQRELRDLTRQQTKLVQQRNAVDNRIQKVLETANIKLGSVASDVLGVSGRKMIEALMAGEKDVTILAELAQRKLREKIPQLQRALEGELTEHHRFLLRQLLGQYDFLEKEIASVSERLGAVAPPSFRAAVEQLDAVAGVGERGARALLAETGTDMSRFPSHKHFASWAGRCPGNHESAGKRRSGKTPAANRHLDAVLTEMAHAAVRTKNSYFKAQYHRLAGRRGKKRAIGAVKHSLLVTVYFMLRDNRPYKVLGVDYFDKLNPQQRIRYHVRRLRELGQEVELSPMADAA

SEQ ID NO: 179084 - protein, 430 aa, unidentified
MISPSPCLPPDASVFAAFVGLDWADQKHDVMLYDQRGGLAEHSQLIHTPEAIDEWACGLRQRFGGRPIAVCFEQSRGALAYALLKYDFLMLFPLPPARLAAYRESFSNSGAKDDPSDAALLLDYVLRHRDQIRVWQPDTPATRELQLLAEARRAAVDQRTRFSNQLTAVLKQYFPQALVLVGCDVDTLLACDFLARWPTLAAAQAAAPSTLRKFYYAHHCRQEERIAERLQLAKSAVPLTTDAALIQAGTLQVQYLVGQLRPLARAIQKFEARLQQLMDEHPDAGLFLALPGAGPALAPRLLVAFGTDRERFTAAAELQTLSGVAPVTQRSGKRCTIGRRWACPKFLLQTFHEFARCSCKKSAWAQAFYLLQRSRGKGHHAALRSLAFKWVRILFRCWKTRTPYSEQRYLDNLHKRHAPLLAFLSTPSSG

SEQ ID NO: 179085 - protein, 310 aa, unidentified
MDAIVVGIDVSKERLDVHVVPGDEAFQVGNDEMGIEELAVRLKRLAPRLVALEATGGYEGVAVATLGGAGLPVVVVNPAQVRSFAQALGKRAKTDTIDAAVIARFVIATNIEARPLADAATRHLADLVARRRQIIAMITAEEGRAKRASERELKKSIARLLAALRRELGNLDGQLDGQIRKSPIWRVKEALLASVPGIGKAIARTLIAELPELGRLSGRQIASLAGLAPFTRQSGKWRGKSFIGGGRTSVRNALFMGALVASRYNPHLKAFRDRLIANGKPKMVAIIAVARKLLTILNAIIRYQTPWQNA

SEQ ID NO: 179086 - protein, 320 aa, unidentified
MSASSVVVGIDVAKAHVDVSVLGAQLDAQRFDNQAEGHSALTAALKRLDVALVVMEATGGYETELACALQAAGLPVAVVNPRQARDFAKSMGRLAKTDAVDARMLAEFAAVLLRREDLARFLRPLADEQQQWLAALVTRRRQLLIMLLSERQRLQITPKGLHPSIQAIIAAIQAQLDDIEGQMVAHVREHFGELDRLLQSASGIGPVASATLIAELPELGRLNRREIAALAGIAPMANDSGSSKGRRRIQGGRFEIRRVLYMAALTASRRNPVIKTFYDRLIAAGKLPKVALVACMRKLLTTLNAMVRTNKPWNNSLHGT

SEQ ID NO: 179087 - protein, 400 aa, unidentified
MISVGIDVSKNKSTVCIRKLYGEILEKPFEVKHTLEELKKLADKIISFDEESKVILEATGHYHIPVVSYLQERGIWVSVVNPMLMKKYASISIRKGKTDKLDSKTISKFGLDNWHGLSNYKIEEDIYYELKALSREYFQFMSLRIKLKVILSNLLDETMPGIAGLLASNSPNFAKDKLSDFVQKYWHYDNIIKLSQNKFTENYKKWTKKEGYQFSENKAHEIYILAKNSITTMPSKMSGTKMIILETIKGIHSTGITLNKILSRMKELAKLLPEYDVVLNMNGVGERLAPRIIAEIGDVRKYYSAKALVAYSGIDAPPYQSGNFNGNNRKISKRGSRYLRKTGYEIMKSIKCRVPTKDTAVYDYIIKKESEGKAKKQAKIAGLNKFLRIYYARVSEILKN

SEQ ID NO: 179088 - protein, 407 aa, unidentified
MKHVIALDVSNGKSTMVIYDPYRQCDFEGQLNHTRAEFDQLHTRIEEMTRLNGQAPDIVFEATGVYSRPVEAFLKDRGHAYCRMNPLEANLQMAKMRRHKTDTSDAHELAKTHFRMERESTYIQEDYYDQMRALARYYDEVDDEITLLKNRMHALLQMSFPELEKLLTPGSALFLNVVQLYPHPDYLIEQSKTVIKNRLRANTRKKISSTSAEKKAAILLVAAEKSYPAIKSTDVRCDQVRDYAARLADLQEKKASLVKEMAERSKERTEYHVFRSIPGIGETTACRLIGELGDFRRFQHAKQLNAYTGIDIMRYQSGNTQYRDRINKRGNKQLRKILYFMICAMLMAKGKPNHFVDYYYKLKKQPQRKPHKVAIIACINKFLKVTLHLLTHGILYDYESTRPAHQS

SEQ ID NO: 179089 - protein, 411 aa, unidentified
MNPLLERCAGLDVHKKTVVACRITLSDVGQWQSKTHTFGTTTRDLLQLADWLEAVGVTHVAMESTGVYWKPIFNILESQCQVMLVNAKHIKQVPGRKTDVKDAEWIAQLLQHGLLKASYIPEAPQRNLRDMVRYRIKLIQARSSEVNRVQKVLEDANIKLASVVSDVMGVSSREMLTQLIAGQDDPSQMAQLARGRMRSKIDELEHALTGSVQDHHRLMLRLHLEHIDYLNLQIGHLERAIEKAIIPFDDTDVTRRLTEIPGVSVHTAHTIIAELGIDMARFASSGHAASWAGLTPGKNESAGRNYSSKTAKGNKYLKSALVQAAHTQRRAQNYLGAQYRRLARRRGSKRAAVAVAHSILVIAYHLLRDGTEYRELGADYFDQHDKQYLQRSLIRRLEQLGNVVKVEPLTA

SEQ ID NO: 179090 - protein, 414 aa, unidentified
MERVYERCAALDVHKAQVTACVHVPDRQGKRAELCAEFSTMTAELLALRDWLKGLGVTHVAMEATGVYWKPVYYLLEDDFELLLVNAQHVKNVPGRKTDVQDAQWLCQLLEHGLVRSSYVPPKPIRELRDLTRYRKSLVWERAREANRLHKVLEDANIKLDCVASRPFGASGKAMLKELCEGNNDPVALADLAKGKLRAKLPALHQALEGRFRDHHALLVGHLLAHIEYLDQTIAELSEEIEERMRPFEHKRELLCTIPGVAERTAEVIIAELGPDMERFPTHRHAASWAAICPGHHESAGKRRSGRTRKGDSWLRTALIEAAQSAAGRTKDTYLNSQYLRVKRRRGHKKAIVAVAHSILVAAYYILRDQVPYEELGGDYFVRREDQDRLTRRLVRQLERLGQHVTLEPALEAR

SEQ ID NO: 179091 - protein, 354 aa, unidentified
MKRTAKYVGLDVHQATTVVSVRDPGGRVIAHSILHTEEREVVGFLRGLRGSVSVALEEGTQAQWLHDVLEPVVDQVVVCDRRGKKRQGNKGDLVDADEISEQLRLGTLRPVYHGSAHQANLRELARTYRGVVGDATRVMQRLKALFRARGIKTPGARVYHPATRSEWLDKLPKGGARFRAEVLYAQLDVLRMQRPKVKAAMMAEARRDPAWDALRSVPFLGPVRVAQILAIARTPWRFRNKRGLWAYSGFAVVTAASSEYVLVDGRPVRRRRAPITRGLNRNHNATLKDIFKGAATAAIARPGPLQDLYLSMTEGGMRAELARLTLARKIAAVSLRLWKTGERYDPTKLTMQAR

SEQ ID NO: 179092 - protein, 323 aa, unidentified
MTRIVCGIDISSATLAARIGHEGEAASFPNTASGIDALAAFCHAHQVELVAMEATGGYEKQSFAQLSEQGLPVAVVNPRAVRQFALSMGRDEKTDAIDAGIIAWFAEVKKSQPMCLSPASQQHLRALVTRLRQLTEVRTAQLNQQRLILDLVVQNSFTELLSLIKRQTHELETAIAALVAADPLWHQLDQAFRTIKGVADRTVARLMAEMPEIGTLSNKTISKLAGLAPLANDSGKHQGKRRVRGGRATVREILFIVASVVGRYEPDFIAFQQRLKALGKPAKVIRIALAHKLLVRLNAKAREVRKLLQTQTPLLSNLQPATP

SEQ ID NO: 179093 - protein, 430 aa, unidentified
MTAEQPQAPEHEPAWFVGFDWGKEQHRVALFDRHGKLIKQRDVRHSATAYAALADWLLQTTGAAPGEIAVAIETSHGPAVDALIDRGFRAFAINPKQLDRFRDRYNVAGAKDDNRDAFTLGRCLRTDRDAFRELSPDNPLIVRLRAATRLTGELTADRTRLTNRLGEQLWRYYPQMLNLANDLAGDTWLLTLWQQAPTPAKGARLHKETIARILKAHRIRRLDADQVRAVLRQPPLPAAPGVTEAAVSTIHSLIPRIRLLNEQIKAAQAEIDALCAELAGPQVIEPGESVPGQSTGQRDVAILHSVPGVGRIVLATLLAEAGGPLGRRDYHALRALAGQAPITKRSGKSCVVQRRLACNKRLAVAMYHWGRTAIERDPRSRQRYDELKARGCSHGRALRTVVDRLLKLVCTLLQRQVLFDPNHSFGGAAA

SEQ ID NO: 179094 - protein, 343 aa, unidentified
MEQYVGLDVSLKETSICVVDGSGGVLCEGTVISEPAAIAGFVQSKAPKAKRIGLETGPTTTWLWHELRALGLPVVCIDARHAKAALSMQINKSDRNDAVGLARIMQTGWYKQVRVKSVACHEIRAILNSRAQLVKIKGDIDNQIRGLLKNLGLVIGKVKGSAFARRVEELLGQHGRLYDAVCPLLEVREKVGREIAALDRQVLHLARNEERCRRSMTVPGIGLITALAFLTAIDDENRFPRSRSVGAYIGLTPRRYASGEVDWTGRISKCGDRMLRTYLFEAAGVLLTRVAKWSKLKAWGHRLWKRIGFKKAKIAVARKLAVILHRMWRDGTDFQYSAKDAAA

SEQ ID NO: 179095 - protein, 335 aa, unidentified
MELKHYVGIDVSKATLDLAVCEDGKIILQLQCENNKKGIVKAVKQLRQLSDFAMTTSVFCMEYTGIYNNPLLDYLLSCKSYIWLETALQIKQSQGMKRGKTDAIDALRIAEYAFIHKQKMRLWDPPRKELKRLRTLITMRERLVNSIKELKTPVKENAGFVEKDITQMEASLMKSSIATMQKTKQKIEKEIKELIKGDASLKHLFDLMTSVTGIGSVVAMNMLVVTDEFKKFDAPNKFSCYAGIVPFEHRSGSSIRGKSKVSHLANKKIKTLLHMAALSAITAEGEFKDYYRRKVAEGKNKMSVINAIRNKLVHRIFAVIKRSSPYQKNISPGLA

SEQ ID NO: 179096 - protein, 440 aa, unidentified
MSDTTTTAPEPAWAAFVGLDWGSQKHAWILEPAGGKREQGVVDNTPEAIAVWAADLRQRFGGQPVAIALEQKRGSVVNLLLPYAHLVLFPVPASMSASYRKTFVPSGAKDDPSDAGWMLDLLLRHRDRLRRLEPDEPNTRLLLMLVEDRRQLVDDKTRLALRLQDCLKQYFPQLVQWFDVDSALVADLLKRWPDLQHLQRCHDGTLRTFFRQHHYGEERIVQRIDAIRAAVAATHDPAVLEAGSMKARHLIASMATLRDQITRLEYRRDELVASHPDAPIFASFPGAGRSTVPRLIAAFGTRRERYQSAFEVVCDSGIAPVHIRSGKIDRVSIRRACQDFTRQTFHEFAGQTIPQCEWAKAFYRAHCLKPEQHHAVLRALAFKWIRILFRCWKDRQPYDDQLYLTSLRRRRTLLGHDLASATSAGWTTVAGFSKLSEKNS

SEQ ID NO: 179097 - protein, 411 aa, unidentified
MHNRQNYLYVGVDLHKEHHTAVIINCWQEKLGEIQFDNKPSAFSKFLLEVETYVSDGLSVVFGLEDVGGYGRALAKYLVDHERVVKEVNPALSFLERKSQVMIQKNDSWDAECVARILVNKFNQLPDAKPNDLLWSIQQLVSRRDALVKAQSALKNQLHIQLNYHYPSYKRFFSELDGKTALAFWQQYPSPSCLEGANIKQLTAFLLDVSNNTCSVKKASDILKLVKEDGHTMKEYQETRDFLVRSIVRDIEFKKKEMKYIERELKRLVNLLDYQLNTMPGIELVTASALIAEIGDIRRFLNANKLARFAGIAPVYFGSGGKGKAHKSKQGNRALHALFYNLAVQQVQVAKGSKMPRNPVFHAYYQKKLKEGKTKGQALVCIMRRLVNIIYGMMKYKTAYELPIVEEKEVV

SEQ ID NO: 179098 - protein, 290 aa, unidentified
MCHNFIGIDISKNDFVIAVHGNKKAFKYLNNPKGFNELLKEHPILKNNSFVVLETTGGYEKALLDYLLSHKIAVHRANTRVVKYFIRSTGQLGKSDNIDAIGLARYGRERHKCLTLYKPNKDNLQELVKYTLRKQDLKKQLVAEKNRSQAPDQECTKESHIRVIEFLEQENAIVESLIDDLVKDCEYLTKARDLLVKEVAGLGKATATSLLALMPELGNLNRKQVAFLAGVAPYPYESGKKIGYRKTYGGRADLKPVLFMPAMTASRSNGKLGTFYNKLVENGKKRWLLL

SEQ ID NO: 179099 - protein, 347 aa, unidentified
MMVVFGVDAHKRSHTVVAVDQAGVELDRLTVPATAAGHLRAVAWAGSFPDRRWGIEDCRHVSSRFEADLLAVGETVVRVPPRLMAQTRKSGRQPGKSDPIDALAVARAVLSNPDLPYASLEGPTRELKLLLDYRESLIRERTAAQNRLRWRLHELEPGFDPPKGSLDRYRTLNQIDQLLEHHQGTVADLARRETNRIRQITKEANQFQNDITALLGTISPTLTTIPGCGPLTGARLLAEAADISRFRNRDAYAMFAGTAPIPVWTSNQQRFRLNRGGNRQTNAAIHRIAITQLRIHPPAQQLVARHTTQGKTKKEALRNLKRRLTNIVYRTMTQDQQPQTNTQPQAA

SEQ ID NO: 179100 - protein, 462 aa, unidentified
MTVPKTKGRRKRATPVPTSLPAIRSLVAGLDVGSSEHWVCGPARADGQPNVRCFGTTTDQLQELADWLADHRVESVAMESTSVYWIPIWELLEARGIEALLVNARQLHNVPGRKTDVSDCQWLQLLHSCGLLRGSFRPGEAITRLRALQRQLANLVAERTRCVQWMQKALDQMNVQVHRAVTDLTGTTGLAIVRAIVGGERDPARLAQHRDPRCRKSAAEVARYLTGTWRAEHLFNLASALRLFDALEAEIAAYDAHLLTAIESLQPPDRQAAPVPPHPNLAKEKAIRTHGEQPARTTLWRFAGVDLTRIDGIGAGAAQVVLTEVGPDLAAFPSEDQFVSWLRLCPRTPISGGKPLKKPRNGLGANRIAGVLRLAATSLQRSKTALGAAFRRIARHKGSAVAVFATARQLAKLIYRMLRYGHDYVDIGEQAYDRQFQTRRLAALTETARSLGYTLLPNAAAK

SEQ ID NO: 179101 - protein, 357 aa, unidentified
MKEYIAFDSHKHYTLMERENRETGRAVQLRVTHQPGAILSCLRNCEAGSEVAVEATGNWYWIVSEIEQAGLKPQLVHPRKAKLMMGLINKTDKLDVHGLNRLQRNGTLPTVWIPSAELRDQRELTRTRLVLVAQRTRLKNRLHATLAKYGLVVQGCSDAFGTLARSQWPELLGRLPEQTRWVSQQLLEQLDGLEQQIKQYEKRLADLLKVTPEMQRLQSLPGVGLILGASIALEIGTVSRFGSAERLASYAGTTPRVHSSGDKLRFGRLRPDINRYLRWAFVEAANVVALHHLRRPERHVSQLYCRLKQRKGHAKAIGAVARHLAEASFHILSRREEYVDPALPKGRSKAGVSASPS

SEQ ID NO: 179102 - protein, 338 aa, unidentified
MELYGAIDLHSNNNVTVLIDEQDRVVYQKRMPNDLPLMIQQLSAYRESLQGIVVESTYNWYWLVDGLMDQGHRIHLANTAAIQQYEGLKYTDDPSDAHWLAHLLRLGVLPEGHIYPKQQRPVRDLLRKRGQMVRQRTANLLSIQNLFSRNSGSSMSANRIKTLDSQEVDDLVPNGDLALAIKANLAMLRCADEQIDILEKTVIERVKLKPQFKLLKTVPGIGHILALTIMLETGEITRFPTVADYASYCRCVGSKKISNGKKKGSGNTKNGNKHLSWAFVEAANFAVRYSVKINSFYQRKKFKTNGIVAIKAVAHKLCRACYYIIKDQVAFDVSKAFA

SEQ ID NO: 179103 - protein, 403 aa, unidentified
MNSVGIDISKGRSTVAVMRPFGEVVISPFEVRHTDSELSELARQLKSLDGETRVVMEATGNYHTPVAKLLHDAGLYVSVVNAKLVHGYGNNDLRRVKTDKKDSVKLANYGLDRWLTLPRYFPEEDTRLLLKNCYRQYRQYSKVQTVLKNNLISLLDTVFPNANRLFSSPIRGDGSEKWVDFVAEFWHCRCVSEKSERAFTSKYLRWCRKHGYNFSEAKAHTIYAEASGHIGVMPKSETTKLLVEQAVAQLRATSTALAALKHEMQALTSMLPEYPVVMDMFGVGPTLGPQLIAEIGDVRRFYSKKALVAYAGLDAPPNDSGDVTGRHKSMSKIGASSLRRTLFLVMSVYLQTAPLDEPVYQFMDRKRAEGKPYRVYMMASANKFLRIYYATVKAYLESLEHTA

SEQ ID NO: 179104 - protein, 431 aa, unidentified
MLKINPLSTLYVGIDVSSKSNYICALDFFKNKYINSSFANNQPGAEELALKILECLKEHPDITTIVAALESTSVYSIHIANYLSSCEELMRFKPYVFVLNPKCTANYKKSYIGLGKSDPIDAFVIADYARAGNIESEPWRGSQFLALKRLTRHRLHLVECMTREKTYLISNLYLKFSELQMLEGDDQPFCDIYGATSSSVLMEYFSPEEILDSSEEDLIAFLAKKSRNRIKDISKTVDLLKKAARDSYRLDKALYEPLNVSIASSFNCIETFKREIKVIDNAIEKEIKGLNPNAFIILQSIDGIGPVFAGGIIAEIGDITAFHSSDALAKYAGLTWKSNQSGDFYGEDTPMIKAGNRYLRYYLGEAANSMRKHNVEYGAYYRKKYNEVPKHQHKRALALTSRKFVRLVYGLLARNQLYSGVSLDTSIKDSN

SEQ ID NO: 179105 - protein, 342 aa, unidentified
MTTITYFVGIDIASRTFTACVGRTPWQVVLKPQLFENTENGYQAFLDWLASHPVLAKQSVVCMEATGVYSEGLAYFLFAKNYQVAVQSPLEVKRTFKPNGPKTDAVDSLQIAEYACRHMDKLSFWQPRNEILEQVKALLATREQFVSQNVAHKNALQAIQRKAVRTPFAEQAHSQMIAQFKKHILAIDHEIRRLIESDPTFKEMLLLLLSVPGVGLLLAAHMILLTQQSLQYKQLASYLGIAPHEHSSGSSVFKHATSRHFGPAAVRKLLYLASCSVRTHQPHFKSYFLRKTKEGKPAKVVLNNIANKLIKISCTVLLTKTAFIKNYHSVQPFALQMALTKS

SEQ ID NO: 179106 - protein, 356 aa, unidentified
MSRDIKYIGLDVHKEAIVIAVLNRSGKLIMETIVETKASSILQFIHGLRGELHVTWEEGTWAAWLYDLLQPQGLQVLVCNPRRNALLKEGNKSDKVDARKLAELLRTGMLRPVYHGENGLRTLRELGRSYQTITKDLTRVMNRLKALYRGWGIPCAGTQVYAPRYREEWLSKISQAGLRRRAELLYQQLDGLQTLRRNLRPEFLAESRKHKAAKLLRQIPCIGPIRAARLIALIQTPHRFRSKRQLWTYSGLGIETHDSAQYRYVRGQLQRSKKPQQLRGLNQNHNHEMKEIFKSTAIRASCGTGPFHDFYTALLAKGMKPEMARLTLARKIAAITLTLWKRGERFDAQQLKTQAA

SEQ ID NO: 179107 - protein, 415 aa, unidentified
MALKIVYKICCGIDVHKTFVVACIASTNDKGVTSYESHRFSTYTSGLKTLPQWLLDRDCKDVCMESTGKYWLPVYNILEKDCSIVLAHPKYVKAIRGKKTDKKDAKWIADLFKHDLVAGSFMPPADIRQLRDLMRYRFKLTCFKSSEKNRLQNCLTVSNIQLGNVVSDTFGKSAQAILDKLLENPADTSFDLEPLVFKSLKKKLPELRDAIDGYITTEQDGKLKVIKAHYENLESRKAELEELILALAAPYQQELAILQTAPGISSDFTAIGIISEIGTNMEAFPSAKHLCSWAGLTPTNNESAGKKKSVRVSKAGCYIKPLLVQCANAVVTSKKHPEIRNRYLRLKKRRGHKKAIIAIARMLLTALYHMLKNGENYNAELYRKSDLPPVNREITVEQALMIARNQGYKIKSATA

SEQ ID NO: 179108 - protein, 347 aa, unidentified
MKYVSTIGLDLAKHVFQVHGADIAGSPLFNRKLRRGEVLRFFEKLPSCLVGMEACGGAHYWAREIANLGHDVRLIPPAYVKPFVKRGKTDAADAEAISEAVIRKTMRFVPIKTAEQQADAMVLKTRALLVQQRTQSVNALRAHLAELGIIAAGGLPSVAALMTIVREGEDSRLPAAARFALMAVADQIDTLADQIFKLERAIVTEAKRDEDMRRLTTIPGVGAITAATIKALVPDPGGFKSARHFAAWVGLTPRPHSSGGKERLGGISKMGNPELRVLLVLGATAVLRIARNDDRARPWLKALLARRPFKVAAVALANKMARIIWALLNKGGIYHRPEPLSIAAVAR

SEQ ID NO: 179109 - protein, 344 aa, unidentified
MTDRNLIAIDLAKTVFQVCRVTTSGKTISNKPVNRAQLKELLVNSKPSIVAFEACGSAHYWGRFAQAHGHIVRMLPPKAVRAFRQGHKTDETDAQAIAIAAQQEAIKSCNLMNVEQQTLQSFESSRRYISKQCRALSNHIRALAYEYGLIIPKGNGQLFKNIPVILEDADNGFPHILRATLNSLCEQLKVQQALLKVIEKEKAQQVKTIEPCQRLTALEGVGPVGSAMLYSCLGKGQMFKNGRQAATYIGVTPKQHSSGGKTVMVGIDKTGGNKDLRAVLYQGALSVISRLPKEPATVKQRWLIQLVQRVGVKRACIALANKTVRTAWALLATGEEYHPKALNV

SEQ ID NO: 179110 - protein, 347 aa, unidentified
MKYVSTIGLDLAKHVFQVHGADIAGSPLFNRKLRRGEVLRFFEKLPSCLVGMEACGGAHYWAREIANLGHDVRLIPPAYVKPFVKRGKTDAADAEAISEAVIRKTMRFVPIKTAEQQADAMVLKTRALLVQQRTQSVNALRAHLAELGIIAAGGLPSVAALMTIVREGEDTRLPAAARFALMAVADQIDTLADQIFKLERAIVTEAKRDEDMRRLTTIPGVGAITAATIKALVPDPGGFKSARHFAAWVGLTPRPHSSGGKERLGGISKMGNPELRVLLVLGATAVLRIARNDDRARPWLKALLARRPFKVAAVALANKMARIIWALLNKGGIYHRPEPLSIAAVAR

SEQ ID NO: 179111 - protein, 310 aa, unidentified
MDAIFVGIDVSKDQLDVHVRPNGERFAVGRDGKGLEELIGRLRTLSPQLIAIEATGGFETIAAAAIAGAALPLVIVNPAQVRHFAQAVGKRAKTDPIDAEVIAFFAEAVKPEPRPLPDEQARLLAELVARRRQIIEMIVAERQREKRAENVRVRKSLTRTIKSLEKELPEIDGDIDTLVRGSPAWREKEDLLVTFPGIGNTLARTLLAEVPELGTLNRREIASLAGLAPFTRQSGRWKGKSIIGGGRTALRAALYMAALSAIRCNRTLKSFYQRLLSAGKPKMVGLIAAARKILTILNAMLRDRKQWQPA

SEQ ID NO: 179112 - protein, 342 aa, unidentified
MTPSPTPSYDLFVGVDIAATTASAAWMTSDRKVSRALTLDQTPQGFNALQQRLLATGHPAQSVLVVMEATGSYWMRIATTLTQAGFAVSVINPAQAHHFAKALLKQAKTDAIDAQTLAQLAALLQPAVWNPPPAIFVALYQRLTERENLIEIRQQLLNQLHALTQCPQIIASVHTRMKQLVASLTKQIMEVEAELDEALTLDPTWATSATRLQTITGIGSLTAAWLLVTTLNFTICDTAEELTAYAGLAPHPFQSGTCVHGRASIGHTGNAALRTAIYLATLSAAQYNPVIKTFYDRLRAAGKPMKVARCAAARKLLHIAFAVVKNGEDFDPLYASTQRKAA

SEQ ID NO: 179113 - protein, 330 aa, unidentified
MIIIGCDFHTRYQEIAWLDTDTGEIHARRLEHAGDQVRKFYAALPGPLRVGIEATGYSQWFERMLGELGHEFWIGDAALLRASRVRKQKTDRRDAAHILDLLRTNRFPRIWVPTPAERDLRQWVLHRVKLAQMRTKVQNQLQAMAMGQGVCRKKKLWSVRGRAELESLPLDRWAQRRRQELLRLPDPLDGSIRELHGAVEQPARQHPEAVLWMTPPGVGPVTSRAFVLTIGPVSRFARSQKVSSYLGLNPGEHSRGGHQQRGSISKQGNSTMRWRLVDGTDGGTTRSGVGANVSTVEIPSGKRDCQSGGGAQAVHVAQSIRLRTFGSHVR

SEQ ID NO: 179114 - protein, 343 aa, unidentified
MTVMIGIDPHKASHTAVAIDNTECVLDELRVRACSKQTDQLRAWAAPFPDRVWAIESARGLGYLLAQQLVAAGETVVDVPPVLSTRTRLLGSGKAQKNDPNDARSVAIAALRHDGLGRVVLDDHARVLKLLVKRHRDLGRLKSKAACRLHALLMELEPGGMAKEMTVTRANEILDRIEPATQMTEYRLAVARETLADVDHYETQMKASIKRLRTAVAASGTSLVEIRGVGVVVAAMIIGQAGDVCRFASAAHFASYNGTAPIEASSGEKKRHRLNQRGNRQLNWAIHMVAVTQLRYPCEGREYYDRKRAEGKNTKEAIRALKRQLSNVIYRALVADAQRSASR

SEQ ID NO: 179115 - protein, 395 aa, unidentified
MKHILSFDIAKGKSVYCFIDEFKNIIIEPTLIEHNKNKFDNLLNLVKDYSNLIVVMESTSIYHLPVENYFRSKGIETIVMNPKLVKQFKDTLNKSKTDKLDCFKIARCYLGTIDNFYQKQDEYFMYNPLARQYWSLVEGQTRLKNRYKQLIEIIFPEFYLIFNDLYDDLALDFIHDFPHPTFFINRRIDYLMNYLKEKNGTTQAYRFKNKVLKMKELASNSLCYVAFDSFQVQNLVQVIEMIQFHKTEINKIKNQLINEMKNKNLFKIINSIPGFGEFSTALFLAEVGDITRFDDKYQFISFIGIDSVTSQSGVSAYHGPISKTGCKFGRTILFNIVTTIIQISAHADKTNPIYLFFRKKQSEGKHHYKCIIACETKLCKIIYKLCSSNCLYENK

SEQ ID NO: 179116 - protein, 431 aa, unidentified
MKYKLKQKQIQRITQITDSTLVVGADIAKKIHVARAVDFRGIELGKDCTFHNDASGLTKLATWMKELKQTHTKTEIVFGIEPTGHYWFPLAAYLNEQGIKIVVVNPHHVNKSKELEDNSQTKSDYKDAKVIADLIRNGKYSEPNLPTKEYADLRILMNLREKMSVSLTQVKGRIVNWFDRFFPEYTNVFKVWEGKASLMTLREFPLPAEIVEKGSRGVLERWKTDVKRGVGIKRAEKLVAAASTSIGLTEGVEAARIELAVLLQQYDLFSEQLETTMAKVLEILERIPGTAQMLSVPGVGVVTVAGFLAEVGDIHNYDHGQQIIRLAGLNLKENSSGKRKGRTGISKRGRSRLRALLFRAVMPMVAKNPAFKALHHYYTTRSHNPLKKKQSIIALCGRLVRILFTLGTKQKEYNANDVMGPVRQAQIQVAA

SEQ ID NO: 179117 - protein, 410 aa, unidentified
MLELFVGDDWAEEHHDVELMDPAGRRLGRARLPEGVTGMARLHAMIAAQLGEGVEDAVVKVGIETDRGPWAQALIAAGYEVFAVNPLQAARYRERHSVSGAKSDKADAHTLADMVRTDSHQLRPVAADTPRAEAIKVVARAHKTLIWERTRHTQRLRHALREYFPAALEAFEDLAASDTLELLSKAPDPAAAVRLSISQISAALRCAGRRKIEEKAAVIQTALRAEHLRQPEVVVAAYAASVQSTVAVLKVLVEQVKTLQGQVESHFGRHPVAEIILSQPGLGPILGARVLGEFGDAEDRYVSAKSRKNYAGTSPITRASGKKKLVLARFVHNDRLIDALAAQAFAALSASPGARAYYDRIRARGVGHRAALRQLANRLVGILHGCLKTGTVYDETTAWPADATDSPAAA

SEQ ID NO: 179118 - protein, 482 aa, unidentified
MKKRNIFQNRSQQLLALFEKAGNRLKMMCVPIDYAKKDHIVMFCNGYGDIVRKPFSVKNTLEGVKYLIDQVMRSCRQRRIKKEHVFFGGEDANSYAENFANALRAKGFLVANVNAHDAKKQRETLQASTDRIDLMGIATMLLNLRAKCTPAQDGIYRNLRTLVRHRKKLVKMKTEVKNRMHTLVDRLFPGFLNEKNTGINPFSKISLTLMQDRFSAQQIRRRRQPTLIKILKRCATANAEKVAAKLHNYAAQVITTPDEYAATLQLSLQHHIRHFRCLQENIDQLLSEIALLLAQTQGAFLTSIKGVGIVLAVGVSSEIGNPFEQKPLNNLTSYCGIIPRVKQSGGVEGQTHTGRVSKRSNHLLKDYVVQSAFQMGLRGPEPLLQDYKRREAAGQHADFGIGRRFLRMAMCLMRSSQVYLPPKLRSPKAQMQERAGYYLTTWPLLRDKWKKAHAHQLAFGKNQPLGKWRQMVQELYDIKLKL

SEQ ID NO: 179119 - protein, 399 aa, unidentified
MLNPQSLQLRVGVDVGTQCHSVAVGLTDGSLLEEFEIPHTAAGFDDFFARIEGHAKRHPYPIAVAMEGYNGHVRPLDSLVRARGWRLFNVNNLKLARFKEIFPAAAKNDRIDTRKTLELFQLRDHLPMAGDVLQEVMATPAENNILKRLSRRRRRLVDERGRVLNSIQADLQAVCPGLLAITRQAGNLWFLNFLTCRKGLCKLARLRRASLLKVPSIGNHFADAIQAWQTSAFFSDDAGLVGDMIQQDARRILELGRQIKALEDQMAPVAAVSTIARQIISIPGFGSVCTAELAGEIGTIERFRCEASLALYLGMAALDNSSGKFRGSKAPKHVNARAKAAMMAAVDHHRKWVPQSQRYYEKKRAQGKRHNQAIRALGRHLCRVIFKMLSQERPYRIEP

SEQ ID NO: 179120 - protein, 393 aa, unidentified
MAACLRHVSDGKVTTEVRTFQTTTADLLRLSEWLAVNGCTHVAMEATGIYWKPVWHILDDGEFELVLANAAHVKNVPGRKTDVNDAMWLAELLAHGLIRASFVPDAQTQEMRNLLRTRKQLVREQSSHVLRVQKTLEDANIKLDSVLSDVMGKSGRAMIEALIAGETNPAKLASLADRRVKASPEQLREALRGRVTKHHRFLLRLHLNQIDALDAAMATVDAQVEANLAPFRTAVELITSIPGIKTLSAHAIVAEIGIDMSRFPSAPHLISWACICPRNDESAGKRRSNRQRKGATWLKTTLVQCGWAAVKKKGSYLQAQFHRIKARRGPKKAIMAVVASILTAIYHMLKDGTMYQDLGCDHFKRQSTDQQKKRLVKRLADLGYTVELKPLAA

SEQ ID NO: 179121 - protein, 345 aa, unidentified
MESIGLDVHRHYTVYARVDETGRVLARDKVAHEALPTIIRQAHAPCRATLEATGNWGYIADLLQPVVEELVLAHPLQVRAIAAAKVKTDKIDATILAQLLRGDLIPRAYLAPPEVRELRDLLRLRASLVRLRTAVKNKVHAILAKRGLRVPVTDLFGRAGRRWLAEQVLSPVHQSAIQSYLAVIEPLDAEIDRVSREIDRQAEERQETPWLTSIPGVGRYTALFLLSEIGDIRRFPDGDHLAAYAGLVPIVRASGGRARLGPITKQGSPWLRWLLVETVHRAVRRPGCLKERYEGLLRRKGTAVATVAVARSLATCVYALLSEGRPFAERPSGSRRDMVERGRQL

SEQ ID NO: 179122 - protein, 357 aa, unidentified
MHERTFIGLDVHARSVQAGVLDGLTGEVKSLAVPVATKALVAWVCAQPAPAVTYEAGPTGYELARALLAAGVPCLVAAPSRIPRAPGDRVKTDRRDAVRLARLLRLEELVAVRVPGLAEEAARDLVRAREDARGDLMRARQRLSKLLLRRGIVWEERAWTQAHELWLVRQRFSERPLQIAYEEALAAMLSVRDRRDALDAAIAVEAAMEPWAETVARLACLRGVSTLTAFALTVEIGDWQRFSGRSLAAFLGLTPSESSSGASRRQGAITKTGNAHVRRLLVEAAWQQRRRPGKSLRTRLARTAQPAAVRERAVAAERRLRRRWVRFDERGKRSTVAAVAVARELAGWCWSLAVMDA

SEQ ID NO: 179123 - protein, 337 aa, unidentified
MLRYKVMEKNVFIGIDVSKSKLDVTFILKGHIENARHFQVSNNTKGFQTLIQRIRNISTEESSWLFCFENTGIYSISLACFLSDKAINFCHESALRIKRSLGIKRGKNDKLDSKEIAEYAYVQREKIKLTTMAQQELQELKLLISYRERLLRQKNALLVAAKEGYECFENDTTKFILDDSKEIIAQYEGKLKNVEREMKKLIEKDEELNNNFKLATSVIGISLIVGSYMLVQTNNFTQFNQRQYACHAGIAPYENSSGTDIPQQKRTSKMADKRIKALLTNAALNAKMHDPQIRLYYNRKINEGKNKFCVLNAVRFKLVSRVFATVKRGTPYIKMAH

SEQ ID NO: 179124 - protein, 366 aa, unidentified
MKKNNTMATGRKQIFKQAKLTIGLDLGDRTSHYCILDEAGNVILEGNLLTTSNGIRQAFIRIPRCRIALETGTHSPWVSRQLAQMGHEVIVAHARNVRLIGESSRKDDQFDARTLARLARIDPGLLSPVRHRSAQAQIHLTVIRARAALVGTRTALVNAARGLTKSYGQRLNKCGTEQMNRDSSQGLSQELRDALDPLLREIESLNERIAEYNGRIEQIAKQVHPEVARLKQVKGVGTLIALTYVLTLDDPHRFRRSRDAGCYLGLRPGRRNSGQSEPQLHISKEGDRYLRTLMVQGAHYILGPFGQDSDLRRWGLKLAERGGRNAKKRAVVAVARKLAVLLHKLWVSGEVYEPLRNNHKVESAVA

SEQ ID NO: 179125 - protein, 309 aa, unidentified
MKEQLVYLGVDIAKSYLDAAVGNEKRRFSNDAIGHRELIKWVKQLKAPVQVICESSGGYERALVQGLARARVKISLVQANRVRQFARAAGILAKTDRIDAELLCEFGKVMRPQTVTAAKLEQEHLRELESQRRHLTHLLVMELNRGARLSNASVQRLNRNLINQIKKQIEQLDLLIKGHIDQSPELSAKAAKLTSISGVGARTAALLLAQLPELGELNRREIAALVGVAPFNRDSGRMRGKRAIYGGRKPVRHGLYMAALVAAHHNPILRNFYLRLRAAGKPAKLALTATMRKLLIVLNSALKTDLRYA

SEQ ID NO: 179126 - protein, 442 aa, unidentified
MTTDKETRLERRSDRRLLVMPRVVTTHTRGRWEQVLLVGIDWADKEHVYCLMDDAGTTLATGTVEHTAEGLERFMNAVRARVQTPNDILIALETPHGPLVGALLDQGFTVYAINPKAVERHRERFRVAGAKSDLRDAWVLAALLRTDRALYHPLTPDSDVAQELRALTRDRADLVRTRTMLSNQLTACVKAYFPEFLTLFSDPDRPVALALLQAFPTREHLQAAPRAELETFLRRHRCPHSRKRAAAIHERMQAPGFHIASPIVRAKARLAATLVAQLQTLGEYLDAYEREIQRVLRLHPDGELYRSLPGAADVLAARMVGELGDNRDRYRDPNIAQCEAGTAPVTKKSGSTRTVHFRRACIHPLRETLWQFAFSSLRRCGWAQAYYNQARKRGKKHAEAIRMLGNVWLRIIIAIRRNRRPYDEEVLQKARLRHGTPGLCFA

SEQ ID NO: 179127 - protein, 339 aa, unidentified
MNVVGLDLHKSYAQVAILDKETGVLDDFRVDSSASGLRTLVEMVEPGTRVALEACSHWGWALDLLQESGLDVMLSHPSKTKAIGSAKIKTDKIDARMLACLLAADLLPEAHAATPQVRELRSYLRYRYGLVTMRTIAKNRVHAILAGYGLKCPTKDLFCAKGRKWLSSQKLRSLHREIVDGHLEIIDLLDRKVTEVDERLAPIAEQDAQAMIVDTVPGIGYYSALLIVAEIDGAERFASAKCLVSYAGLCPSTRSSGGKEWHGHITKMGSRYLRWILIEAAQKAAWPTSPLHRFYRSIARRKGNNSAKAAVARKLLESIYQMLKTGKPFDVKVWIKPTG

SEQ ID NO: 179128 - protein, 367 aa, unidentified
MNQIIRIGMDTSKSVFQLHGVNGAEQPVLRTKLRRREVLAFFAKLAPTQIGIEACGGAHYWGRALAWLGHEVKLLPPQYVKPYVRRNKNDAADAEAICEAMSRPRMRFVPVKTADQEAAQMLLGMRDRLVRYRTQLANAIRGYAAEFGVVAAKGLDKIEPLLARIAADPAVPELAKDLFAAHGREYAQLKVQLREIEAKLKAWHRHNELSRRLAEVPAVGPIGACVAAIKVTDPHAFRCGRDFAAWVGLTPKDHSTAGKTRLGVITRAGDEMLRWVLVAGSTAAIQQVRKGRGNPSPWLLDLVRRKPPKLAAVALANKTARILWKLMVSGERYNGAEDRARARRGASLNGGCAPRRSLNTITATMEA

SEQ ID NO: 179129 - protein, 403 aa, unidentified
MISVGVDVSKGKSTVCILKPYGEVLMSPSDYEHTQRDLKKLVDQMDSFEDEIHVTMEATGNYHFPIATYLKKRDYDVRIVNPLEMKRYRCQGIRNPKTDSIDAIMIAQYGIDFWFRSFQEYVASDERMELKTLGMQYFKTMKTRQDRYLVLESVIDRTLPGIGGVLNGYDKSTGKDKKSDFVYDFYHAEKITVYSENRFCDRYESWSKKKGYRYSEKEARQLYSIAKDSIPTLPSSKNTKLMIQDAVKILREVDSALYSILNQMNVIAKKLPEYTTVMEMKGVGISIGPRLIAEIGDPRRFHSAKALIAYAGIDAPPYQSGKFTGTERHMSKRGSRIMRKLGFELMDTINKHQKLYAGDPVCEYFLAKRNEGKKYRVAMFAAYNKFLRIYHSRVSSVLNESVK

SEQ ID NO: 179130 - protein, 401 aa, unidentified
MKYVCGIDIGSQSCSGCVTRPDKRVMVKPITFANTKEGWKVMEEKLAQLDAAPSQIVIGMEATSRYHENLYHELEQRGYQMRLLHPGQTHHYHQQQGLRAKTDRLDAMTIARVILGGEARVGYIPGEQVATYRELVRLHTQLSEEAARYQNQIQILVVVLFPEFSQIFADPCGQGALAVLKAHPDAQAVAQAGVEAVYQVLRAVPAAHFGRPTAKKLVAAAQVSSSSGRAVSGRASSLRILCDQLEHTQANLKRLEEELEHLITMDPSTKGLQQMPELGPKTVAVLRAELGEVDRFACTDQAVAYAGMDIEIKESGKFKGKAKLSKRGSGLLRQILYLAALRSIQLEGSAFGAYYHHLVERGLKKMSAMMAVMRKMVAVATHLMKTGEDYDPSKVWVGTTS

SEQ ID NO: 179131 - protein, 318 aa, unidentified
MMTTQVEFVGIDVAKKKFDVVTLHGGEHRTVRNDGEGIHDIREQMLALRPQLIVMEATGGYERELAIALVLAGLPVAVVNPRQVRDFAKAMGKLAKTDKVDAGVMALFGERVRPEPRGVPEKEVRELDALITRRSQLVEMVTAEKNRMGVAPRAMKPSIQEHVRWMERQVKEIESELDQVIEASPVWRAREELLTSMPGVGDILAHTLIAKLPELGYVSAKRSAALVGIAPFARDSGPQKGKRSIWGGRAGVRSALYMATLSAIRWNPVIRAHYQQLIARGKLFKVAMVACMRRLLTILDAMVRKNERWTDVTLVRVA

SEQ ID NO: 179132 - protein, 393 aa, unidentified
MICVGIDVAKDKHDCFILSSEGEVLADVFTVTNNRDGFETLYQRIRSCARPTDNIKVGLEATGHYSYNILGFLLDNGLATYVINPLHTNLYRKSLSLRKTKTDRIDARTIAAMLMSDVDLKSYTDTAYHNEELKSLTRYRFDKVRQRAKLKQSVSRLVNILFPELETLVPTLHMASVYALLSELPGAQQIAAVHLTHLKTLLANASKGRYDRDKAVEIREAAKCSIGSKMPAKSLELRHTIQLIHELDKEIDEIESSIEEIMNSLQSPITTIPGIGYRMGAMILAEIGDFSNFDSPDKILAYAGLSPSTYESGKLKASGAYAHMEKRGSRYLRFAIFNATKYVCHWDPTFAAYLAKKRAEGKHYNVAISHAAKKLMRVIYSLQKSGQAYRTAA

SEQ ID NO: 179133 - protein, 340 aa, unidentified
MEKRYIGIDLHRNRFTCCIQLENERTYLTEWELESLPKFVKKLRASDEIAVEITGNTRLFFDAVKEHVARVVVVNTTQFKVIRQSVKKTDPNDARTLALYLSKNMLPEVRMKDKEHGQLASLTQTRDTLVKLRTALKNKINNILSARGLNLPKEALSSEKRLNEVLSLPFDEIVQIELRVIVEQIRSLNKSIADLEKTIGDAGSKLEGHKGLSSIKGIGKITGAILLSVIGDVNDFADEAHLASYFGIVPRVSNSNETERSGRIHKRGSKLGRTALVQSALIAANYSPYLKRFYEQVKSRRGAGKAIIALAKKFLGVIYRTLKNKWVFADFPNFVLAEES

SEQ ID NO: 179134 - protein, 421 aa, unidentified
MNKIKPKRTKVVNGNVLIATIDGGKDKHYGYYRCPDGTEGESLPFWNNGRGFQEFWERISSAATAHGFEEIIVGFESTGPYLEPLVQFLRSKKGVRLVQVNPMHTKRLKELSGNSPLKTDRKDPKVIADIIALGHALTVVIPEGAAAELRRLTQARERTTASRTRLLNQMQSLLVLSFPEFLQVMKDISTASARYLLQHYPTAQDIVGLGESALAAVLRKVSRGKLREDRARALFEAANESVGIQEGRHSMLLEIRMLLDTIASYDRFIDQVETEMERQLELIPYSHIILSIKGIGAVTAAGLIGEVGDFTKFKTISEVMKLAGLDLYEVSSGKHRGKLRISKRGRSHIRKLLYLASLSAVKKGGVMHAWYRRALDRGMQKTKALVAVSRKLLGLIYALVRDHSVYVDNYEQQKPIYQEAA

SEQ ID NO: 179135 - protein, 437 aa, unidentified
MSDYAGVDWAAEKHDVIVQDEAGEELLAATFAHDEDGLRALCRQLVRLNVTLVAIERPDGLLVERLLDAGLRLLPLHPNQVAATRARFRAAGGKSDRFDAFVLCELARTDNHRFRVLEPDTDQTKALRALTRAREDLVGARVALCNQLRAELERFWPGPIGLFKDLDSPISLAFLAKYPSPRDARGLGEKRLEAFLARQRYSGHKPAGELLAKLRSAPEGRAGEEEMSARCQVVLALVATLTPLVQQIRQLDRQIAAAVRAHPDGEIFLSLFKSPDSTLTAATMLAEIGDCRTRYPSRDALAGDAGQAAVAIESGKRKAACFRWACNKRLRSAFCTLSDTTRHWHPWAADRYAAARASGHDHQRAIRTLGRAWCRIVWRCWQDRTPYDPARHRALQQHCTVTIPTSSGSLPDLAATQRMLGDTVTQQGRPQGRARSA

SEQ ID NO: 179136 - protein, 408 aa, unidentified
MYNAVGIDASKLKSTITIIQPAGVVIRKPFDVLHTSDELNTLVTYLKSLVGETRAVIECTGRYHEPVVKSLSEAGIFISAVNPKLIKGQKQNTLRNVKSDPADARKIAKYALDNWAELREYSSMDTTREQLKTLNSQFTFFMKQKVAAKTNLISLLDNTYPGVNKLFDSPTRDDGSEKWVDYTYSFWHVDCVRKIGLKAFTERYEAFCKKHHYNYQKNKPALLFEESKQLVAVFPKEKSYKLLIQQSIQQLRLASEHIEIIRKEMNELASTLPEYETVMSMYGVGETYGPQLIAEIGDVSRFTHREAITAFAGVDPGVNESGQFKQRSNRASKNGSTRLRKTLFQVMSTYLQNKPVNEPVYQFLDRKRAEGKPYLVYMTAGTNKFLRIYYGKVKECLRNLEQSQIEES

SEQ ID NO: 179137 - protein, 350 aa, unidentified
MKVTTIGLDLAKNVFQVHGADAAGTPVLRKQLRRAQMAEFFAQQPPCVVAMEACGGAHHWGRKLRALGHQVRLIAPQYVKPYVKSQKNDAADAAAICEAATRGHMRFVSVKTVEQQSVLALHTARSGFVKQRTALSNQIRGLLAEFGVVVPQGLSKLSGQLPIVLADQNNELTGTIRNLFRTLHAELAHIDDLVARLERQIREWANQDPGARLLQQILGIGPITASALSAVIGDIRQFKNGRQLAAWLGLVPRQHSSGGKSVLLGITKRGDKYLRTLLIHGARAALKAYQRNPEKMPAHLAQLLARKHPNVVCVALASRNARVAWAMLSRGEDYKGWEVAKRPALPAQLS

SEQ ID NO: 179138 - protein, 342 aa, unidentified
MDHFAGMDVSVKETSVCILDDAGKIVQEVKVASEPQALLKVLGNPAYCFKRIGLEAGPLSQWLFSALAEAELPVICVETRHMQAVLKAQINKTDRNDARGIAQMMRVGLYVHVKTLRSQKLRMLLTHRKLLQSKAIAIENDLRGTLRNFGLKVGMVGTVRFEARIQELVETIPDLAVLVEPLLVVRRVLREQIVILHRRLLAIVRDDEVCRRLMTIPGVGPVVALTYRATVDAPARFRKSKSVGAVFGLTSSKYQSGEIDWNGRISRCGDEMMRVMLYEAAQSMLHSKKWSWLKAWALQIARRRGMKKAIVALARRLAVIMHRIWVDGTAFRWTREPTAATA

SEQ ID NO: 179139 - protein, 349 aa, unidentified
MDKDTMTIIGCDLGDRSSHLCLLAPEGSVLRRAKIATTQKAFDKFFSALEPSLVVLEVGTHSRWTSALIRELGHHALVANPRHVRLIYGGTHKSDRLDAEALARLGRLDPTLLRPVEHRSQEAQTQLSTLKARDALVRSRTRLIASVRGIAKSAGMRLVACDADYFTRKVTLPPALQPALGPMLKSIEALDAQIKDYDTQIAELCAQHPETRLFQQVSGVGPITALAYTLTLERPERFSRSRDAAAFVGLVPKQRQSGRHDPQLGITKAGDRFLRRLLVQCAHCILSARGRDSDLRRFGLRLAAQGGKRAKKRAVIAVARKLAVLLHRLWVSGEVYEPLRLAPEHSHAA

SEQ ID NO: 179140 - protein, 353 aa, unidentified
MQHCVCVLEMSKASWLVSGAVPGVERQPLKKLEPDAEALLRLIERWRNESVRAGRPISRIALAYEAGRDGFWLARWLIARGIEAYVIHSASVAVSRERKRAKTDRLDAAMLMRVFLGWLRGERGHCGMVAIPTMEEEDARRPSRERESLVNERSRITNRMKSALARLGVRGFKPHLRKAPERLADLRTAEGTGLPANIIEEFRRDMARLALVREQISSIEKARAERLERAPDTGPHAMVRLLARVIGIGIETADMLVREILSRRLRDRRAVARYAGLTGSPDESGLKRREKGLAKAGNARVRRGLIQLAWRFLVFQKDSALARWYRMRTEGPSGARKTTMIVALARKLLRRLT

SEQ ID NO: 179141 - protein, 413 aa, unidentified
MEQLIQRCAGIDVGQAESMVCVRVPDAVTGVPAELIASYGTTTPDLLELVDWLRGLGVTHVAMESTGVYWKPIYYLLEDDFTVLLVNAAHIKHVPGRKTDTIDAAWIAQLLAHGLLTASFVPPPPVRELRDLTRYRKALINEKTAQVNRIHKVLQDSGIKLTTYATDVMGVSGRAMMRALIAGQSDSAALAELAKGRMRTKIPDLRKALTGRFREHHGFLLKRMLDHVEAQEAEIAALDERIEAALAPFVAQVELLATIPGVDRRSAQVILAEIGPDMSVFPTSGHLASWAGMCPGQRDSAGKHGSGKTRKGSKWLRGALVQSARAASRSKGTYLSERYRQVMRRRGDAKAIVALGHEILLAAYRVLATAQPYTDPGPTAFSRLTTGRLTRQAVKRLQDLGYQVTIAPRTDAA

SEQ ID NO: 179142 - protein, 361 aa, unidentified
MSDATTSEGTKVTVGLDLGDRHIQVCVLDEAGEVIEEARLATKPQALRRRFCGAERLRIVLEAGTHSPWVSRLLAELGHEVIVANPRKLRLIYQNDSKSDRVDAEYLARVGRLDPALLAPLSHRGAETQADLALLRSRNALVRARTSLISHARGTTKSLGARLPACSTESFVAKAGACVPDELRLALDPVLVVIAGLCAQIRALDERIEEMARQRYPETALLTQVPGVGTLTATVYVLTLEDPQRFPRSRSVGSYLGLRPRQRDSGSLQPQLRITKAGDEHLRWLLVGAAHYILGPFGPDTDLRRWGLKLAAQGGRSGKKRAAVAVARKLSVLLLRLWVTGEVYEPLRNARLRDELLPSPT

SEQ ID NO: 179143 - protein, 406 aa, unidentified
MIFVGIDWSEAHHDVCVLDDQGTVLAKGKVSDDVSGVGRLHAMLAEHVEDPSEVVVGIETDPGLLVGSLVQAGYHVYAMNPLAASRYRDRHAVSRAKSDPGDAKVLADLVRTDRQNHREVAGDTELAEAVKVLARAHQNLIWSRQRQVNALRNTLREFYPGALRAFSTSQLATVEACGVLAMAPTPTWARDKLTLQRLRRSLAASGRKRNLDRRAGQILQALQAPELSAPPLLEQAYGEVVGSLVVVIDGLTHQIMGLEAELSERFEGHPDAEIITSLPGLSSVLGARVLAEFGDDPTRYVDARARRRYAGTAPITRASGTRLVVLARVARNRRLFDACYWWAFSSLNASPGARRYYDAHRRKGKTHHQALRAVANRWVGILHGCLVRQEFYREDVAWVASVEAAA

SEQ ID NO: 179144 - protein, 439 aa, unidentified
MRTRDEEIVFPNAAGIDVGASSHWVAVPRHAADDPVREFGAMTDDLNAMADWLIACGVDTVALESTGVYWIPVYEVLEQRGLKVWLVDARQMKYVPGRKSDVQDCQWLQKLMSLGFLRAAWRPESEVCVVRAIARQREVLIAEQASWVQRMQKALVQMNIQLTEVLTDVMGLTGQAIIRAIVAGERDPKALARHRNGRVKASAEQITKALTGNWREEHLFVLEQALAMYDDIARHLSECDTKLHALLSDLGQSKVDLGKVPRAGSKLRGEFDARQILANWAGVDLTRIDGLGLSAVMKILSEIGVDLTRFETVKHFCSWLGLCPGTKISGGKVLSAKTKRSANRVRQALKMAAMSLSHSDSALGAFYRRMCSRMDKPRANTAVAHKLARMVYFMLTRGEAFVDKGQQHYEEQQRQRSVAALKRRAAALGFEVNPTTVPA

SEQ ID NO: 179145 - protein, 323 aa, unidentified
MNHKVGNDNTVARFIGIDVSKQWLDVACLPERETRRFGNDCAGLEQLCAWIVPLAPELIVMEATGGFETNVATALAARGLALAVVNPKHVRDFARAFGILAKTDRIDALVLAGFAQKVHPPVRPLPDEERRELIDLVDRRRQLVTMRAEEKTRLTQATPAARQDIKEHIEWLNERLRRLDIDLTAKLRSSSLWKTKEQILTSAPGVGRVTVATLVARLPELGTLNRRAIAALTGVAPFARDSGQHRGRRMIWGGRADVRNVLYMATVTAARINPVIRSFYLRLKQAGKPPKVALTACMRKLLTILNTMVRTNQPWQTPPTQTI

SEQ ID NO: 179146 - protein, 317 aa, unidentified
MTKIICGVDVSSTWLDVFIHPSGPAGGFRNSVEGIAELAVFCHQHRVELVAMEASGGYEKQAFALLWAEDIPVALLNARATRDFAKGMGMLEKTDRLDARVIAWFAAVKGSVPSVPASAAQQRLKALVTRLRQLTEMQTAQRNQRRLVTETTVLESMAELLKVLRSQMRRLEEEIAALLASDPLWHKLDQALRSIKGVADRTVARVMAEMPEIGTLSNKAASKLAGLAPLADDSGKREGKRVVRGGRRHVRAILFVVAGVVRRHDPDFAAFHQRLSAAGKPLKVIRIALAHKLLVRLNAKARDARQAFAASSVCQSA

SEQ ID NO: 179147 - protein, 344 aa, unidentified
MQTMYYIGLDVHKRTISYCVKDGSGAIHAEGAIPATRFDLDRWMKTLPQPWTAAMEATVFTGWIYDHLQPHAAALKVAHPLMLRAIAAAKKKNDRIDASKICDCLRCDFLPECYMASTAIRERRRTLRYRNLLVRQMVQMKNKISGLLMEAGVSYNKQRLHRAGYFRELLATNAGIDEGLCSLLRLCRETVVRLQKTESAMVLSLERDSLLMDRVERLMTVPAVGPITALTWALEVGDAQRFSSIKKAISYCGLCGAEKSSANTVQRTPLSKQRNKHLQTTLIEAAKMAPRYSPNLAMLYDKEKQKGNANRATLAVARKLVAYLMAIDRGQRNFQAVETNCIAA

SEQ ID NO: 179148 - protein, 371 aa, unidentified
MTAQTLPRPSRYEHRSYPGPGSVIGGVDTHADTHYGAVLDCVGRLLATQQFPADACGYRQLLEWMRSFGHVDRIGVEGTSSYGACLTRHLRAAGIQVIEVNRPNRRARRLHGKSDPLDAENAARRALSGEEDIVPKDTTTTLESIRVLRIARTGAVKARTAAFNQLKDLLITAPDAVRDRWRGKTLYRVSLEAARSRPDAGHAEDPTTATRLALRSIGHRIQSLNEEITALDKQLVDLVARTAPTTIALTGVGTETAAQLLLTAGANIERLHNEASFAALCAASPIPASSGKTTRHRLNPAGDRDANEALYIITIVRMRYCPRTKAYVERRQAEGLTKKEAIRAVKRYIARDLYHAIRADLTQVPSPLDDL

SEQ ID NO: 179149 - protein, 409 aa, unidentified
MEIVHTYCAGLDVHKKTVVAGIIVPGKKETRTFETMTSDLLALSDWLTSEGVTQVAMESTGEYWKPVFNILENNFEVLLVNAQHIKSVPGRKTDIKDAEWIADLLRHGLLKASFIPPVGQRELRELTRYRTTFVQEKATLVNRIQKVLESANIKLASVASNVVGVSGRAMLAAIIEGKATPTEMADLSKGRLREKRDALIKALEGQVKSHHRFVLTELLCQIDSLDETIARFDQQIEEYCRPFEEMVTLLDTIPGVARQTAEVIVSEIGVDMSRFESADHLAAWAGVAPGNNESAGKRLSGKTRRGNKALGVALNQAAHAAAHMKNTYLSAQYHRLAGRRGQKRAIVAVSHSILVIAYHMIQRKEPYHELGGDYFDKRRPEASAKRLVKRLEQLGFSVSLEQASVPTAA

SEQ ID NO: 179150 - protein, 345 aa, unidentified
MEQISRIGMDTSKHIFQLHGVNAAEEPVLRKKLRRKEMFAFLEKLAPTVIAIEACGASHHCARLLQSFGHSVKLIAPQLDKPYLKRGKNDAADAEALCEAMSRPTMRFVPVKTAEQQAALMLVGVRDRLIRNRTQLSNAIRGYAGEFGLTAAKGKAHLDPLLERIQADESLPALARELFAAQAQEYAQLQGQIDQVDARLIAWHRADECSRRLIKIPGVGPIGAVLLKMKTPEPELFRSGRQFAAWIGLTPKDHSTAGKVRLGAITRAGDEALRSVLVVGATTVIQHAQRGGRPSPWLTELLKRKPPKLAAVALANKIARIAWKLMVTGENYAAKAAPATLPGAA

SEQ ID NO: 179151 - protein, 457 aa, unidentified
MSKRRKRAQSQSFKLQSLPKQLQHINLNAAGIDIGSERHMVAVPEGRAEVAVLEFGAFTADLIALADWLRQCGVTTVAMESTGVYWIPLFELLERRGFEVKLVDARHVKNVTGRKSDILDCQWIQQLHTYGLLAGAFRPADELCVLRSYLRQREMLTQTASMHIQHMQKALQQMNLLLHNVVSDITGVTGMKIIKAILAGERDPQVLANHRDNKCHHDRATIAKSLVGNYRIEHLFALRQAVDLYEIYQTKIGDCDEAIVTQVSAQPDLTDELPPPEQKRTSARDRQRGGVNVRDLLFQKSGVDLFAIPGLAADTLLVLSSEVGFDLSPWKTVKHFSSWLSLCPGTKISGGKVLSRRVKRNPNRAAQAFRMAAATLSRSKSALGAFYRRIKARSGGKQAITATAHKIARIYYALLTQGTTYVELGQRAYEQKYQERRLKHLMAQAKSLGFQLVPSQT

SEQ ID NO: 179152 - protein, 338 aa, unidentified
MSSITVLGIDLGKSTFHLIGHDQAGREQLRKKLNRTKLIEFLSNHEPIVIAMESCGGSHWLARKCQEFGHRTKLIPPQYVKPYVKTNKNDFIDADAIAEASTRPSMRFVSVKSEETQVLAVIQRIRSGYIKERTACMNRTGAILLEFGLSFPRGHTHMKKLFDWLSQQPNKIPKLLLQELIEIHEYYVLLNERVKQQEKKLLNIVEQDERAQLLKTIPGIGDLVASQCISSISTVHDFKNGRHMAAWIGLVPHQYSTGGKTKLLGISKRGDKALRTLLIHGARAILSRLDCAEKYFGHWIVELRARKPFNVAVIALANKMARIAWSVLMYKRPFEIIK

SEQ ID NO: 179153 - protein, 350 aa, unidentified
MKYIGMDLHKNTSNFSIKDRNGNEIDSRQIPTEPSAIKGYLKHFRKARLVLEPVSQWYFYANLISKLGIDVRLANPLKVKAIASARIKTDKIDASVLCDLLRTNLLPEAYFSSPKVRFWKEMTRFRASLIHLNTQIKNKIHNLLFKNGIRHPFTDLFGKAGIAWLRSLKLEEQFQFNLDRYLGLTEILEDLIKEADQKIERTVKSHSQARLLTSIPGISYCSGLTIMAEIGDIHRFPSAKKLQGYAGLVPSTYASGERMAHGRITKQGSRWLRWTMVMIAHRQLLCRKRPGFAWYYERIRQRKGSGAAAVATARKLLAVVWRILKDNRPFEIIPPKTVGSPGAHPKTIVL

SEQ ID NO: 179154 - protein, 482 aa, unidentified
MKAKQKEPTEKSSGQSSQLHWRQMNRKQRRDLERKIQSADLTLQIVHPDAAGIDIGNESHYVAVPPDRDSQPVQHFGCTTAELRAMADWLKQCRIRTVAMQSTSVYWIAVYDVLEQAGLEVYLVNARETKNLPGRKSDVQESQWLMKLHTYGLLRNSFRPPQEIRTMRTYWRQRNDLVRSAARHIQRIQKTLTQMNMQLANVLSDVSGVTGQAIIKAILAGERDPQKLAAFRDPRVKASENDIARSLEGNWQEDLLFVLKQEQAAFEFCRKQMAECDRQLEQYLQKMEDRSQGATLTEEKRKDRLQKKKGNQPQFDLQQQLFRMTGTDLTQIDGIDVMTATTILSEAGWDMIKWKDEHHFVSWLRLAPDNRISGDRIIGKGRLPTSNRVTVALKLAASNLRTSQSYLGAQFRRLRARLDTPVAIKAMAAKLARLIYRMLRYGTKYVDNGSRYYELQQRTRDIRRLKLKAATLGFHLVQSTAT

SEQ ID NO: 179155 - protein, 388 aa, unidentified
MIYVGIDIAKLNHFASAISSDGEVLIQPFKFTNDGDGFSLLFSRLESLEPDNIIIGLESTAHYGDNLVRYLVAKGFHVCVINPIQTSTMRKNNIRKTKTDTVDTFVIAKTLMMQKTYRFVTFYDIDLMDLKQLGRFRMKLIKQRTRLKIQLTSYVDQVFPELQYFFKSGLHQKSVYAILKEAPTPNKIASMHMTHLAHLLEVSSHGHFKKEQAKELRALAQKSVGASDSAISIQITQAIEQIELLDSQLERIEAEMKEIMKFNDSVIMTIPGIGYINGGMILGEIGDIHRFSSPSKLLAFAGLDPTVYQSGNYSAKHTRMSKRGSRALRYALINAAHNVVKCNATFKAYYDAKMAEGRTHYNALGHCAGKLVRVIYKMLTDEVEFNLE

SEQ ID NO: 179156 - protein, 408 aa, unidentified
MRAKLSGAGSSCLQKEERSDTMNYIGVDIAKEKHYAAILSADGAVVKKPFSFMNTAEGFSVLKDAITVFDKEEALIGMESTAHYGDNLLSWLLGQGYHVCVINPVQTAALRKTGIRKTKTDKTDALLIAKSLIVNKHRVYTERDNETSELKTLCRFYRNVMQSKSKLKTQLAAYVDVLFPEFATFFKGGIHLKTSYSLLKLYSSPGDIVALHLTTLTNLLKKSSRGRFSKPEAIALKTLAKSSVGVHRPSMSVQIYQTIEHIELLEKQLDELKSRIEYIMRTLDSPILSVPGIGYFLGGAILGEIGDITRFSNPAKLLAYAGLDPIVSQSGKFNAARTRMSKRGSSLLRYALMDAAFELTRHSSTFADYYSKKRTHGLSHFAAIGHLAHKLVRILFKILTDNIPFSLA

SEQ ID NO: 179157 - protein, 339 aa, unidentified
MKLYAAIDLHSNQQTLMVLDEQDRQVHRRRLPNVLEVVLAELAPFQRELEGVVVESTYNWYWLVDGLMAAGYRVHLANTAALEQYEGLKYGDDDSDARWLAHCLRLGLLPEGYIYPKETRPVRDLLRKRAQLVRQRTADILSIENLTSRNTGVQINGNRVKQLTVEEVRRQYGQEDLALPVESTLAVIEVLDQQIHRLEKRVKGKAKLAAEFQPLLTVSGVGEILGVTIMLETGDIRRFAQVGDYASYCRCVDSLRFSNGKKKGSGNRKCGNKYLAWAFMEAANFAIRYDATVKRFYQRKKARSNVAVARKAVAHKLARASYYVMRDRIPFQVERCFGG

SEQ ID NO: 179158 - protein, 364 aa, unidentified
MKYQEVLRMPESIPYLSVGLDVGADLIWMPIMLPNGTLTGKPFKILHSDPDSRNLAVAKIKEAQETYSLESRCFLESTGIYHIPLLCFLRDKGFDCSVINPIITKNTTNMNVRKLHNDKFDSKKKAAKVGLDVSLKTSIIPDDEVVDLRNLVRDYYYFKDLQSAIVLKLNAELKVSFPAYLGVFSKVTTQTSLKLLESYPLAADMLAAPKDEIVKIIRTTARFGEKYAMAKYNALCSAARDAAVFGRALPSNAVRIRLYIDSYREYQKHLDTILEALHESVGKLQGTAVYNRIRPLQSLRGVGFLSAVVLIAEMGSFGLFPSPKKLYAYFGLAPAVKQSGKFSFYCLFVPQTEIWATITSQLFS

SEQ ID NO: 179159 - protein, 343 aa, unidentified
MQAVKTIGLDIAKSGFQVHGVDADGQVVFRRQLKRRNVLAFFQKVPSCLVGMEACATSHQWSRELQALGHTVRLMPPAYVKPYVKRQKNDATDAEAICEAVTRANMRFVATKTPEQQSGLMLHRTRHLFIRQQTAVINAIRAHLAEFGIVAPVGRNGLEQLLNVVADAGDKRLPEVARTCLMALGTHLRALKAKLLELDRMITAWHRSNETSKRLDAIPGVGHVLATALVASIADPKVFRSGRDFSAWIGLVPKQHSSGGKDRLGSISKQGDRYLRSLFTAGALAVIRYAKIYGTKHRPWLTALLARRPTKVAAIALANKLARMAWAMMTRGARYKEPVALAA

SEQ ID NO: 179160 - protein, 327 aa, unidentified
MVVGIDVHKQSHTAALLDERGALVETVTVPNSVEGAAQLHRWLCEQGGEDAVVGIENAAGYGRLLCGALTDAGHVVLNVPAWRTKRDRHAHGPGKSDAGDASAVAEVVLRRRSELGPALEPELVRALRLLEGLRRQSVYDRTQAIQRLRAIWTQVDPQAEAQLAKCATQRALRKLKRLDFGDGLAAEAATQCVRELAREIEQLNQRIASLDRQLERLLREHGNPLADLPGAGPVVAVAVLAHSGDVRRFRNAAAYARFCGAAPIPCGSGKTASRHRLDRGGNRQLNAALHRIAIVQARVDPRARDFLARKRPKARPPAKPAARSNAT

SEQ ID NO: 179161 - protein, 320 aa, unidentified
METKNAVIYAGVDVAKATLQLHLLGRQNELANTPAGLRQLLKQVQKVPGLHVVCEATGGYEQPMVKALHHAQVPVSVTNPARFRAAAQAQGQRAKTDPIDAAGLTDYGQRFEPQATPPTSATQQKLVALTQWLQQLIHGQAMAKTQAEHHQEPFVRRQHAKLMVHLHSQVDAVEQQIEALVKENAELQERVNCLDDIKGVGSRTAWMVLAHMPELGQLNRRQVAALAGLAPWTRDSGTIKGKRCIGGGRPEVRVALYMASLSAARSNPVLCALFKRLRAKGKLGKVALTAVMRRLVIYMNHQLKDLAAKKANEKTEPAKA

SEQ ID NO: 179162 - protein, 359 aa, unidentified
MEAQRKALSFKGQNIYIGIDVHLKSWSVTLMSEATQLKRFSQSPDPDALYAHLVRNYPEAEYHSVYEAGFCGFWIHYRLVGLGIHNIVVNPADVPTTTSEKLRKTDAVDSAKLARSLRAGELKGIYVPGSESLETRSLIRLRDSITKDQTRLKNRIKSHLRYLGIEIPEEFSGPGRCWNRRFVVWLKGAETGTAYGRQTLDFLVRQYEALRGQRLEMLRAVRALSRTERFEKPLENLMTVPGIGQLTGMSLLSEIDDIRRFKSADQLAAFIGMIPMCHSSGEREGVGDITVRRSARLRSVLVEASWVAVRQDPALSMAYGNYCKRMAPGKAIIKIARKLVNRIYFVMKRNQPYVKCVVA

SEQ ID NO: 179163 - protein, 386 aa, unidentified
MSKPSDLNRSRTALEQDCTLIAVIEMSLNSWLIAGIVPGIERPPLKKLAVDEHALLKLLRRWQAEAVKAGHTVKRVAVAFEAGRDGFWLARWLRARDVEAHVIHASSVAVSREHRRAKTDRLDTELLKRSFIGWLRGEPHHCHMAAIPTIEQEDAKRANRERENLVCERSRIINRMKACLIRFGVRAFKPTLRKAPERLVKLRTPEGVPLPPNTIAEMRRDMARLLFVRDQIKEIEQARVQRLAQAPKQGSHAMVRLLARVVGVGIETADMLVHEVLSRKMRDRRAVARYAGVTGSPDESGRKRREKGLARAGNARVRRGMIQLAWRFLKFQKGSALAQWYRERTAGARRGARNTMVVALARKLLIALWRLVTAGEVPAGVVMRTA

SEQ ID NO: 179164 - protein, 414 aa, unidentified
MDTLYPCCAGIDVHKTNVVVCVRKLNGGKVRQEVRTFRTETNALLELADWLAQEGVTHAAMESTGVYWKPIWNLLEGLFELLLVNAEHIKQVPGRKTDVKDSQWIAELLQHGLLKPSLVPEKPVRQLRDLTRQRVQLIRQKVQVANRIQKTLEDANIKLASVASDVLGASGRDMIRAIIQGENDPITLAELARQRLRKKMPQLQEALRGEVQDHHRFLLGMLMEQVEFLERQIEKLSQRIEAVMPAPFVEAIERLDTIPGIDRRAAQNIVAEVGADLLPFASAGHLASWVGMCPGNNESAGKRRSGKTTKGNRWLRVVLVQCAWAASRSKGTHLKQIYGRLAGRRGKKRALIAVGHRLLHIVYNVLKKGQRYQELGEDYLDKQSDKERLARRLLKRLEKLGVKVTVVQEAEALV

SEQ ID NO: 179165 - protein, 343 aa, unidentified
MQTITTIGFDIAKSVFQVHGVDAAGEVILRRQLKRRYVLAFFQKLPPCLVGIEACASSHHWSRELQAVGHTVRLMPLAYVKPYVKRQKNDMADAEAICEAVTRANMRFVPTKTPEQQSCLMLHRTRHLFIRQQTAVINSIRGHLAEFGIVAPVGRKGVAELLHVVADPSDKRLSEVARACVAALGTQLLSLKQQILEFDRLILAWHRSNQTSKRLHYIPGVGPMLATALVASVADPWTFRSGRNFSAWIGLVPKQHSSGGKERLGSISKQGDRYLRSLFVAGALAVIRYAKIHGTAHRPWLTALLGRRPTKVAAIALANKIARMAWAMTAKGERYKQPVALAA

SEQ ID NO: 179166 - protein, 340 aa, unidentified
MENMHFVGLDVHKKIIAFCVKQIDGKVISQGTIDANRAALKCWVNTLPSPWVAALEATLFTGWIYDFLRNYTSDIKVAHPQMLEAITVAKKKNDISDAEKIADLLRCNLLPECYMQPKEIRELRRVLRYRSLIVREIVRMKNKISGLLMEEGIEYEGRRLHTKRYFFNLLEQIEISEELLQILKMSRECLEFLKSIEKKIVAGLKVHSEIKERMERLTTIPGVGPITALTWILEIGDPHRFPNIKKAVSYCGLCSGQKESGGKQYRGPISKKRNKRLQTILIEAAKIAPLWNKQLTEVYEREKKKGHRNRATLAVARKLVAYLLAVDKSGKPFELRNTGK

SEQ ID NO: 179167 - protein, 342 aa, unidentified
MRIIGCDLHAAQQTIAMLDRETGEIVERTLTHDGTTVRDFYAGLPPPVVVGIEATGSMGWFLRLMEELGVTCQVGDPAKIRSVETRRQKHDRRDAALLLELLAEERFPSIWMPSSELSDLRALLRHRDQWVRMRARVKNALQGLALAHGIRRRAGLWTRGGQAILAALPLPPHAGQRRSELQALNDHLTTHIDELDQQVSEQARARPQARRLMTHPGVGPVTALATEVFLGDPSRFGDAKALASYVGLIPSEYSSGARQRLGTLTKQGNPMLRFLWCEAAIHAVRRDAALGRFYRRKLQQKGLGKARVAVARKLGIRLWILLRDQIDYQEFCRRAPADATAR

SEQ ID NO: 179168 - protein, 320 aa, unidentified
MAKRITICAGIDTGKRKLDAALDGNSERLQVENTAEGHKTLMAWLRRHKVKRVGIEASGGYEQAVIAALRRKRFVVVVFQPAQVRAYAKYRGQRAKNDRIDAALIAACTAAVKQTHPAPDARLAPFAEHLTMIDQIGEDIARLKNRLETCRDQRHRQLWHEEIARLVKRERIERKALVAAIRKYPDLAERLELIHSVSGAGLPTAIAVLVRMPEIGQISREQAAALAGLAPYDDDSGDQIGTRHIEGGRQRLRRALYAAALPASFRWNPQLIALYQRLIAAGKEHKRALIACARKLLVFINAVVARRTPWLNKLPKCSAA

SEQ ID NO: 179169 - protein, 493 aa, unidentified
MVKCGTDVCKRTIGRWRPYRRLPCSETSGLLVNPKTNSQMAKLAKKVKTAKGLKLDVVNPDAAGIDVSSTELQVCVPLGRDVTNNRVFGVYTKDLHEISGWLTRCRVTTVAMESTGIYWLPLFRVLKEDGFDVLLVNARDAKNYSGKKTDEADAEWLMLLHSYGLLKPCYQPDNISRQIRNLVRHRENLVRSSSREILHLQKEMEQMNLKLDNVFSDVLGKSGQAIINAILDGERDAERLASLADWRCKKSKEEIMLSLQATWDDDHLFVMKQSHDLYLYYQKMIEFCDKKIESILSQYTAQIDGQGAELIRSDKQRQAKGNVGMDIERYAFDLWGINAMKIPGISQNSVMKLVAELGADFTRKFPDVKHFVSWANLVPNNKISGGHLLSSKVPKKKNPVGFVFKQCANSLKSSKEPLGDYFRHIKSRSGHMQAIVATAKKIATIFYIMVERKQDYDLTIYTSHRKTQLAKNIARLRNKLDRLELEQSLAIAH

SEQ ID NO: 179170 - protein, 355 aa, unidentified
MNSVKYVGLDVHQSTISVAMLNAEGRLVMQSVIATQAAAILDFIAGQRGTLQVTFEEGTHSAWLYDLLVRRVARLVVCNPRQNALLKSGNKSDPIDARKLAELLRAGMLSPVYHGENSTGGLQQLVASYTALTQDTTRVMARIKALYRSQAIACAGKKPLGKRHRQQWLEKLTAAGQRQRAEWLYAELDAVQGLRRQARQALVAENRKHAAAKLLRTMPFLGPLRAAVLLAKVQTPYRFRSKRQFWAYCGLGLETRSSADYVIQNGEVVRRRRALYIRGLNWNHSHPLKNLFQSAATTASTMQGPLREFYQARVAKGMQPALARLTLARKMAAIALILWKKGEVFEAKHLNSQAA

SEQ ID NO: 179171 - protein, 324 aa, unidentified
MNVIGIDVSKAKLDCAWLKEDNKVKTKVVTNQLEGWKELINWTKIQTGSQLSELHFVMEATGIYHENSANWLYDSGAKVSIANPAQVKYYAKSVGGRTKNDKKDSIVLARYGVKERPLFWQPAPQEIRVLKALLTRLDAVERDLQREKNRQEKALVSETPATVIASIDQMIKHFKTEQKALGKLIDDHIKAHKKLNENKALLESIPGVGKVVAQRMLMVLGTHQFKDAHQCAAYLGLVPVQKESGSSIKGRSQLAKNGNKTVRAKLYMATVTATRYNPDIKAQYERLTKKGKTKMSALGAAMRKLVQICFGVLKHQLPYQPQTG

SEQ ID NO: 179172 - protein, 399 aa, unidentified
MIGQFRIEHGPAGVGRLVSRCLELEPDPAEVRVVLETRHGLLVEALADAGFTVLPVNPDLVARRRGPAKKKDDAEDARICCLLALDQYAELRKLIPHGETGTELRAIARDDERAARDERRIGNRLRADLLAVFPAAVDIAAGDLGAPVFLKLLERWPPAAALAAASRDEIEAFARSCRHGWPGRFADRVTGAMAAPRLAARPELARAKAGAIRLAAAQLLAIRAQRREWARRMGELLLGAPRYGRDKTPKDPAPGKAFPGGEIYLSMPGLGDRLAARIAGEIGEHPEQFTTPNALQCYAGRAPVTRRSGRSEFTIARRLACNRHLGEAVQQWAFCSLSRSGWAREFYDTKIAAGDTHHAALRKLGNRWLEVLWHCLDKGACYDEATHAANRNRFLRQAA

SEQ ID NO: 179173 - protein, 405 aa, unidentified
MLFVGDDWVEDHHGVELMDDTGRRLAKARLPEGVAGMARLHAMLGEQLGEDAADQAVIGIETDRGPWVQALIVAGYRVFAINPLQASRYRERHGVSGAKSDAADAHVLADMVRTDSHQLRPVAGDSAQAAAIKVVARAHKTLIWERTRHAQRLRHSLRDYFPAAREAFEDLTAADTLELLAKAPDPASAAKLTVAQIAAVLKRARRRGIADKTAKIQAALRTERLGQPEIVVSAYAARVRSAAAVLAVLNEQITALQGQVEAHFGRHPDAEIILSRPGLGPILGARVLAEFGDDRTRYVNAKARKNYAGTRPITRASGKKKVVLARYIHNDRLVDALGVQAFAALQASPGARLYYDELRAREVSHHAALRQLANRLFGILHGCLKTGTLYDEAAAWSHRVEKLAA

SEQ ID NO: 179174 - protein, 418 aa, unidentified
MKTYILRDPKAVEPQNPRPPRRKDPARTVTVASAPPPPGPVLFLGLDVHNDTIAVSLAPSDSTEVRRYGIIGGQHDDVLRLSKKLSAAHPGAALKFCYEAGPRGYPLCRFIRQHGAECLVVAPSKVPRQPGDRVKTDRRDADQLARLLRAGELTGIYVPDPQDEAVRDLIRARYQVQKQQHRARQQLKMFLLRQNIRYAGTKPWSPAHLRFLATVKLPFGEQQFVFQEMVNVISEAGQRLARYEKEIASVVENWRWQPVVAALMSLRGVALLTGATLVAELGDLERFASAPQLMSYLGLCPSEHTTGQDRRQGGITKLGNGIARKAIIEAAWNNSRAPRISRTILARQEDLPKAVTEAAWKAQTRLHQRYQHLTGVGRKKAQVAAAALGRELAGFVWAIGRMVKPRALPMEDRKPQAA

SEQ ID NO: 179175 - protein, 408 aa, unidentified
MDVVYSHVCGLDVHKKTVVACIITPDEKEIRTFSTMTDDLLQMVDWIKSKGCTHAAMESTGSYWKPVYNLLETEEIQTLVVNAQHIKHVPGRKTDVKDAEWIASLLWHGLLRGSFIPPRDQRELRELIRYRRSLIEERAREVNRIQKVLEGANIKLSSVASDILGKSARAMIEALIAGNVDPESLSELALRRLKNKKADLQRALKGLIGPHQRLMLQTQLRHVDELDALIQQLDEEIKRRMLPFEEDLERLDTIPGVARRTAEQIVAETGTDMIRFPSAAHLCSWAGLAPGNNESAGKRKSGRTTKGNPKLRSALIEAVRAAVRTKHTYLSSLYHRIAARRGANRAAVAVAHRILTIVYHLLKEKQVYNELGPHYYEERRREQMARQAIRKLEMSGYDVMVKEREQTA

SEQ ID NO: 179176 - protein, 336 aa, unidentified
MLIIGCDFHSRFQQIALLDTQTGETVERRLEHETGEAEQFYRALPHPVRIGMESSGHAHWFERLLAELGHGLWVGDAARIRAAVVRKQKTDTRDASHILDLLVTNRFPRVWRPSPVERDCRQLLVHRQKLVWARIRVKNQLQTLAMNQGVCIGRKLWASAGRHALESLALGPWTSRRRNELLQMLDELNSSVEELDRAVEEEAEKRADVVRLMTHRGVGPVTALAFVLTLGPVERFHRSKQVVSYLGLNPQEHSSGGRQRLGSISKQGNTMMRYLLVEAAQTASRFHPELRRNYQRLKFRRGSAVAKVAMARKLAVRLYWMLREKVDHAQLVRNAR

SEQ ID NO: 179177 - protein, 404 aa, unidentified
MWYAGIDWADTHHDALVIDEKGRQVGSLRVDHSPQGMSKLNAFLEQIIGTAPKEQMACIIETTHGLLIAHLLEVGWPVYPVNPRTVDRRRSASGAKTDTIDAYLLAKTGRADFADLHRLTPDSEKVAELKLLTRDQDALIQTQTRLVNQLTACLKAYYPVALELFTKVQQHTTLVFLQTYPTPQAAESASTDQITQVLKKAGHPNPLGVAPKIVERLQQPHLQADAVITRTKSRLMLALVGQLLPLLAQIAQYDKEIATLFLTHEDHEIFESLPRAGQRLAPRLLAEIGDDRKRYQDESLLQALGGTSPVLYQSGIYSKAHRRLGCIKPLRNALHQFAWQTTQSEPWARDYYQRKRAEGKSHTVAIRALANVWVRIIFAMWIKRTCYEAMTFEQAQQQHARRAA

SEQ ID NO: 179178 - protein, 450 aa, unidentified
MSNGSGVSRGDRNRNARLGRLRALVPVGNAIVGIDLADAKQMVVVTDHDSKVLARKTFRCRAWDLGAALDWAAERAAAKGWAGVTVACEPTGHRWRVLGQLAGDRAMPFVCVQPMLTSWARRSEDLTADKTDEKDAVLIARLTAQLRCYVPEPVDATWGRLRHLGARREQLITEMVSQVQQIRALLECVWPAALDTAKQPFRSRTWAAAMTVICERDGGDLAHTRRLGAARFEQAVRREITRRGGCKPCLRILGQLFTALADPTGVIAHRPGALERVAFLLQDWRAAADKLADTETRMTDVLDELKLTDLATSIPGLSAVGAAAILAETGDPHRFATARALVKHAGLAPREKLSGTFVGRTKLTGQGRPALRLAAWRAVWGAQRGNAVYAARYQHLTTRQANKLTATQAQTVIAAAILRQLHAVITTGRAWDADIATYGSHRRRQVALAA

SEQ ID NO: 179179 - protein, 527 aa, unidentified
MQLRPLRKLDNYSKQECGSVSYVSYELTVGGPYRRVNSTEAAGQRAFDFIKSKVMSKKTSKKAPPKKNIVSMPLVNAHAAGIDISDKEQVVAVGENICAERVRKFGAMTCDLQSIAAWLKECNIETVAMESTGVYWKPLFSLLVQEGFEVYLVNSKHVKNVTGRKTDEDDAMWIQKLHSCGLLKSSYLPGDEQDALRTLTRYRRTLVQDSSRFINRMQKSLELMNIKFHTVISDIVGVTGKAVVEAIIAGERKAENFLPLIGSRIKANHETIRKSLEGNWRDEHLFTLKESYEFYKMYQRRIAEFDKEIEKQLQCFEAKCNEGVIETKKDDKAKSNTAKADNTSAKGDKEKKTKKKKDKNHPPFDVRGYLQRIHGVDVLAIPGLSETGGLEILAETGTDLSDWERDANFRSWLNLCANNKISGGKIISSAMMKKKPNAASQAFRNAANAVQRSDNWLGDYFRRMKSKGGNKYAVLATAGKIATIYYKMVTNKEEFKAVDLVEYQQKYKKAKIAYLERMLDKLKGEAA

SEQ ID NO: 179180 - protein, 411 aa, unidentified
MEKQDKMIYVGVDLHKEHHTAVIIDCWYKKLGEIQFLNKPSAFPQLLKEVKKHTKKGMKVVYGLEDIGGNGRALAVFLSDNNCWVKEVNPVLSNARRKSHVTVQKSDSWDAECVAKVLRDELEKLPDAKPMDLYWALSQLVTQRKWLVKNQTGLNQKLHQQLSYHYPSYKQFFSQVDGKTALSFWKKYPSPRHLAGVTEEELAQYLRKLSNYCLSNGKAAQIFALIKEDGDTTRDFQDKRDFIVQSLVRNIRFNQIELARIEGEIKELMTGLGFQLETMTGIDVVTAAELVAEIGDIHRFCTPEKLARFAGIAPVFAGSGGKGKNYKSKQGNRVLHEIIKGIAIRQIAVTRGKKEPRNPYFYSYYEQKLAAGKTKQQAIVCIMRKLVNVIHYLMRTKAAYVMPTVPEKQAG

SEQ ID NO: 179181 - protein, 333 aa, unidentified
MNKSETTFLPCGIEISSKVLVIDLSGKAPCEFPNTPAGHESLIRWLQRAGSEIRICMEATGLYGLDLALALHAAGIAFMIVHPRSARNFARAMMQRSKTDRLDAMVLREYAARMPFEPWRLPSPQALHLMAIAHRIQALTRMITAEKNRLHAASLSRALPAVVRYDLARSIQSLERALKRLTLAALELVGSDPQLARRNELLLSVPGIGVTSALNVLAEILRLGPDCGVRQWVAFAGLDPRHYTSGTSVAKKTIISKSGNAHLRRALYMPALVTVQHQPHFRAFYQHLLDRGKTKLQAIVAVMRKLLHAIFGMFKHNQLFDGSKIYAMENSCT

SEQ ID NO: 179182 - protein, 387 aa, unidentified
MIYLGIDVAKNSHVAAAMSSEGEVLLMPFPFANSADGFALLREKLNSLPRLPLLVGLESTAHYGENLIYFLCRNGYHVAVINPLQTAAIRKSAIRKTKTDKVDAFVIAKSLMMEGYTELQQADLQILKLKGLCKTRQNLILMRTRCKIQLGSFVDQLFPELNQFFRSGLHINVSYTLLKAHPRPAEVCSLHLTYLSNLLRKASRGKYTKKDAIRLRELARNSIGTDSPALALQIRQAVSQIELFSTQLEQVENEISIIMDSLNSPIMTVPGIGHLNGAMILSCIGNIQRFSSPAKLLAYAGLDPAVVQSGNFNAKSTRMSKRGNSMLRYALINASHNVVRNNETFAQYYNSKIAQGKSHYCALGHTAHKLIRVIFTLLTKNIAFNLA

SEQ ID NO: 179183 - protein, 363 aa, unidentified
MNFIGVDLHKKSITICVLNENLKVLARKTVFCDQTDQIVEFFRQLRPFKVVVEATASYLWFVELVEPLAEEVVLANPKKLRVIAESTKKTDRLDAQVLAEFLARDQIPRAYMPTPRQRQHRRLVRHRQYLRQRMTSVRCKIRHILSDYNADRKDLFSTQCGLAYFKEIALSDADRFVIKQLWSEWQDHQSRILALTKKIKAFIVKAPNREKETRAILKTAPGVGFVTAEVIVSEVGDVSRFRNAKAICAYAGLVPTVRQTGGKKSKDLRITKEGSGLLRWALVESAWRLVKTSPKWSAFFSQLRKRSGSKRAIVAVARKLLCVLYAMLKTSTPYKIVATETKAPKPTRRRLVRKSSPKETVTT

SEQ ID NO: 179184 - protein, 368 aa, unidentified
MRQNGDFYPIKIEARRTMNDHSENRDIKVVAIDLAKKSFQLHGVDANGHKVMGKKLTRNKLKNFMVNLPPCLVVMESCSGAHYWGRLFQSFGHEVKLIAPQFVKPFVKSNKNDAADAAAIYEASQRPGMRFVAIKSVEQLDMQAIHRVRSQLVKTRTAAVNQVRGLLLEHGIDIPKGRAQVLRKLPGILEDAENGLSGRFRSVLHDLQEELRHIDQRIQRYDTQIEQIVRDSEQARLLLTIPGIGPKTATALLSSIGDIGQFKNGRELAAFLGLVPRQHSTGGRPTLLGISKRGDVYLRTLLIHGARAVLRYVDNKQDHTSRWAKELMHRRGVNIAAVAMANKMARTVYALLSKGEKYNINHIAAKSA

SEQ ID NO: 179185 - protein, 343 aa, unidentified
MQAVTTIGLDIAKSVFQVHGIDAEGKVVVRQQLRRSRVLGFFGKLSPCLVGIEACASSHHWSRELQALGHTVRLMPPAYVKPYLKRQKNDAADAEAICEAVQRPSMRFVATKTPDQQACLMLHRTRHLFIRQQTAVINSIRAHLAEFGIVAPVGRKGVEELLNVVADPDDGRVPELARECLKALGHQLQRLKAQILEFDRRINAWHRSNVTSRRLDDLPGVGPALATALVASVPDPKAFRSGRDFSAWIGLVPKQNSSGGKERLGNITKQGDRYLRSLFCAGALSVIRYAKIHGTKHRPWLAKLLERRPTKVAAIALANKIARIAWAMMAKGESYREPVALAR

SEQ ID NO: 179186 - protein, 400 aa, unidentified
MNAVGIDVSKGKSMVAILRPYGELVEAPFEVKHTSSGVQSLIQTIQSIDGESRIVMEHTGRYYEPLFCQLTQAGLFVTAVNPKLIKDFGTNSLRKVKSDKADAIKIAKYALDSWSDLKQYSVMDKIRKQLKTMNRQLDFYMKHKTSMKNNFIGLLDQTFPGVNNYFRSPAREDGSQKWVDFATTYWHVDCVRNMSRSAFINHYQNWCKRKEYNFRQSKAEEIYETAKELVPVLPKDNVTKFIVKQAASQLADASETVAQLKAKMNEAASKLPEYPVVMAMYGVGSSLGPQLMAEIGDVSRFTHKGALTAFAGVDPGVNESGSYEQKSVHVSKRGSAQLRKTLFQVMDCLIKNMPQDDPVYRFMDKKRTEGKPYYVYMTAGANKFLRIYYGRVKEYLLSLQ

SEQ ID NO: 179187 - protein, 387 aa, unidentified
MSQVDDLSRSLAAFDQNTTLTVVVELSEASWLVAGLVPAIDRQPLKKQEPDPRALLRLLERWRAEAAKTGRMIERIVLAFEAGRDGFWLARWLRARGIEVYVIHSTSVAVSREHRRAKTDRLDTGMLMRVLLGWLRGERGHCRMVAIPTLEEEDAKRPSRERESLVGERTRIINRMKSALARLGIRGFKPALRKAPQRLEALRTPEDTPIPPNMLDEVRRDMIRLAVVREQIDAIERARLVRLEQAPARGSHPMVRLLARVIGVGIETADMLVQEVLSRKLRDRRAVARYVGLTGSPDESGKRRREKGLAKAGNARVRRGLIQLAWRFLRFQKDSALAQWYRARTEGPKGVRKTTMIVALARKLLIALWRLVMTGEIPVGVVLRAAT

SEQ ID NO: 179188 - protein, 410 aa, unidentified
MDLVSAELPAKTLVVAIDPGKVTNRVLLANGEQGLIGEPVSLPTQREGIERLCELIEAAAAPETVIAIEATGSLHVPWVTELERRLPGSLRLFAPSETHAARTQLGSRRFKDDDRDCAALVSLARQGRGRPAHGGTFDALLDAVRHRRRLVGQRKVTRQHLHHQLNALCPGLSAPPGHGKALKLETPTGGAVLACAVDFAGRAPAPRSLIARAPGRLSPATAGSWAQRWGGCLAPPPDAELRAERLGRDVRRWRTLEADIGAVEEQIAALLAETPGQVLMTLPGVATTRAAAFAAHALPIERFPTAERLYSFTGLAPARYESATIRKARGISRQAPGERRDALMAIAWGLSQHSAAFKERDRELRGRGMRPIEARVALARHACRLCHRMLKTQEPFDEKRYARTRHRRGR

SEQ ID NO: 179189 - protein, 347 aa, unidentified
MEQYAGIDVSLDSVSVCIVDAQGKILKEAKVACEPEALIAWFAAHGTPMARIGLEAGPLSQWLFAEMRAAGLAVELLETRHVRAAFKAMPVKTDRTDARGIAQLMRLGWFRPVHCKSLPAQEVRALLTTRKLLQAKRHDVEMSLRGVLRGFGLKVGPTTPKTFAMRVQELVAHHDTLRTIAEALLKARAVLAQEFKAIEKRLAALARTNAPTRQLMTTPGVGAIVALTFASAIDDPSRFRSSRRVGAHFGLTPRKHQSGETDVTGRISRIGDHGVRVALYEAANVILTRAVRGSDLKSWALRVAQRAGMKKAKVALARKLAVVLHRMLADGTTFMASKVAQSAAGAA

SEQ ID NO: 179190 - protein, 338 aa, unidentified
MKLYVGLDVSLVRTAVCILNESGEIVAERQVDSEPDAIAGSLAKVQGIIERIGLEAGPMAPWLFAGLSGQGLPVVCIEVRQMKAFAKASPVKTDKRDARLIAQAMRTGLFKATHVKTDESQRLRLPLRHRQAVMRRNKDLINTVRGTLKAFGIRTGGGKNTPYARRVREAVADPSLLTVTEPLLVAYEQGLAVLAELDRMVLAAAREDAVCRLLMTVPGVGAVTALAFRTGIDLPERFAKSRLVGAVLGLTPRVYASGESEHIGRIAKCGDGTRWLLYEAANVMLTRVKGDNWLKSWALGVAQRRGMRKAKVALARRLAVVMHAMWISGQAFSLAKPL

SEQ ID NO: 179191 - protein, 413 aa, unidentified
MELLHARCAGIDISKKDAKVCVRVQGRGKSPTAAVVTTWGAMTNQILALREHLLAEKVTCVVMEATGAYWKPFYYLLDDGLDVMLVNARDARNVPGRKSDVSDAAWLADLGAHGLVRASFVPPPPIRELRDLTRTRTVITRERSREAQRLEKLLEDAGIKLSSVATDITGASSRRMLEALIDGQRDPTAIADLVHWRMRPKIPALIEALTGRFSEHHRFMTRLFLDRIDAHSADIARLDTRIEAAMEPFAAARELLMRVPGISRITAEVFIAETGADMSVFPTAGHLASWCGLSPGSNESAGRVKSTKTRPGNPYLKGALGIAALSVIRRKETYFWAKYRRITVRRGPMRALAAVEHAMVIAAWHMLTNGEFYREPGPDYFTRRVPAKAQARAIAQLESLGYKVTLEPLADTA

SEQ ID NO: 179192 - protein, 416 aa, unidentified
MFAVGVDVANGRSMVAVLDGMRNMVAKPFEVVHTAQGFAALVEKLRQLDGEVRIVMEHTGRYYESFAMTMHRAGFFVSAVNPLLIKNCQGSINVRKVKTDKADAQKIAQFALDKWTILPHYTPMDTIRYNLKTLHRQFQLASKTKTALSNNLIALLEQSYPGANRYFDSPVRADGSQKWVDFVDTFWHVDCVAMSSEHAFVERYRKWCKRHGYVFSEQKAIQLHADARQKIPLVPKSDTCKLLVREAVSQLNAVSRTVETYRAEMDRLASQLPEYETVMGMTGVGKSMGPQLMAEIGDLRCFAHQKSLVGFAGTDPIKEESGDKVSQSAPSSKRGSPYLRKTLFVIMTILLQLQPQEDPVYQFLDKKRSEGKPYYVYMTAGGTKFLRVYYGKVRDCLKAKGLWEVPAPDSQEVNPD

SEQ ID NO: 179193 - protein, 424 aa, unidentified
MAGPSTGFTCENERTARVTATDVVWVGIDAGKASHHAAAVDAGGKRLWSVKVANGQQQIEELIARAAKTAGDGEVRWAVDLVSPAAALLLAILLAGGQKVVYVPGRVVHGMAGVFRGEGKTDAKDARIIADTARMRADLTELTATDELVVELTRLTSYRADVMADWVRGINRLRDLLTSIFPALEASFDYSTRSALILLTGFCTPAAIRQAGPGAVAAYLREHGAWAKGIDAMAATADRAARQQAIALPGEATTALLVKKLARQLLDLDREIKDTDKLLTSRFREHPQARIIESLPGMGPILGAQFLVATDGRVLEAFTSPGRLASYAGLVPVPKDSGRVTGNYHRPRRYHRPLRNVFYMMALSSLRTEGPSKAFYQRKRDENKIHVQALLALARRLVDVLWALLRDNRAYSPIPPSQVIATAA

SEQ ID NO: 179194 - protein, 379 aa, unidentified
MYIVGIDIGKNHHEASIVSPESKQIGRSLRFATTHKGADSLMSFIFKNIGNSPCVFGMEATGHYWYPIYSFLKAKGYTIYVINPIQSDSLRKMYIRQTKNDSIDSFLIAEVIRFGQFWTTSMADENILAMRQLCRYRDSVISSRTEIKLRIGTIMEQIFPEYEKQFSSLWVSTSMGILEKYLTPENIKNAPIDELFEIIKDKSHNRLTRAKAISIKDAAADTFGIKIAQDAFSFQLKQLIDRMNFLDKQIEALDCQILEYYEKFDCYLHTIPGIGMIAAATILAEIGDINRFKSSSALVAFAGIDPTVRQSGEFSSTHNHMSKRGSPYLRHAIFLAATTCSFHNSPLNAYYKKKRDQGKHHLTATGAVAYHRNLCRVTG

SEQ ID NO: 179195 - protein, 363 aa, unidentified
MDESTTVTVGLDVHARSVRLAAVRADELLEERTLPYDEEAVERTLRRWPGVRCCYEAGPTGFGLYRHLVERGIDCAVVAPGLVPQRPGDRVKTDPRDARKLARLLAGGLLEPIHVPSPELEAARDLVRAREDARLDRMRDRQRLSKFCLRHGRLLPTSAWTVVRRKWLGEQQFAYAAEQQTFDTYLHAVDLVDARIARLEQAIRETAEQGPWRELVARLRCFRGIDSLTALALVAEIGDFSRFRRAEELMAFVGLVPSEHSSGERRRQGSITKVGNAHVRRLLVEAAWHARRRPKVGYELSRRQRGQDARVIERAWRCQQRLYQRWQRMAGRGKPQQKIVVACARELAGFVWAIATNQPLRTT

SEQ ID NO: 179196 - protein, 342 aa, unidentified
MNLPVRIGMDTSKSVFQLHGVDENEVVVVRRQFRRAEMIRYFERLPPVLVAIESCGSSHHWARLLQSFGHQVKLIPPQYVKAYVKRGKNDAADAEALCEAVTRPNMRFVPVKSKERQAACMLMTVRERLVSVKSQLSNAFRSYAAEFGIVGPAGRQNIAQLIKRVLEDDSLPEMAKDLFRLQAEEYAAVEARLAKIEAKLMRWHRDDDVSRRIATIPGVGPIGSSMLSMKAPPPETFRSGRDFAAWLGLTPKDHSTGGRQRYGGITKAGDSMLRSTLIVGATALLRHIRKGRHKPTPWLASLLERKPPKLVAVALANKFARIAWRLMISGGVYNRPVAAMPV

SEQ ID NO: 179197 - protein, 358 aa, unidentified
MEKLIRVGMDTSKRVFVLHGVDAAEKVVLRKKLRRQQVIEFFGKLKPTKIGLEACGAAHYWARELEVLAHEVVLLPPQYVKPYVKRGKNDAADAEAICEAMSRPTMRFVPVKTAEQQAALMLAGTRDRLIRTRTQLTNAIRGYAAEFGLTAAKGLDKIEPLLARLAAAPALPKLAKELFAAHAREYAQIKVAIQKIEAKLMAWHKHNELSRRLVEVPAIGPIGASLAVMKVPDPHAFRSGRDFSAWIGLTPKDHSTAGKTRLGVITRAGDETLRSTLILGATAVIQQVRRGKGHPSPWLIDLLKRKPPKLAAVALANKTARIVWKLMVSGESYNPMRLRDTRGPSARYGSKATAITQA

SEQ ID NO: 179198 - protein, 356 aa, unidentified
MKYYTSTTQFNCGIDLHARQMYVCLMDRQGKILVHTNVRNNDFDFFLKLVAPYRHDLTVCAECMFGWFWLADACQEANLPFVLAHALYLTAIHGGKNKNDRLDSEKLAHLLRSNLIPPAYVYPARLRPLRALLRQRTFFVWRRSDLLARLQSHQLAHNRPTLSGRNRYNRDSWEQQLLAHEDHPLRKLALENELALVRHFDTQIIALETQLQRLTKEYAGRDYALLQTVPGIGQYLGLTILHEIGDIARFPTVKDFLSYCRLVKGTVASAGKIKGLRGAKLGNPYLRWAFGEAAVIAKRDHQVIGPLAQRLEARMGGNKFKANTVVAIKLARAVYFMLKNQTVFDPARLVAALARP

SEQ ID NO: 179199 - protein, 318 aa, unidentified
MDAKFETFVGVDIAKDSLDVCFLGTEKRFTTTNDQAGFRQLLQGLPSVEGCLVVVEATGGYQREMVAELIAAGHQVAVVNPRQVRDFARGLGILAKTDRLDAEVIARFGQQAKPRPTEKMPEKQDELQQLVVRRRQLIDLRTAENNRLPLARSKSVIKSIRSMVEQLQKKIRQIEKEITDLVESDDQLQYQATLMESVPGVGAVTAAALLAELPELGRLNRQEIAALAGLAPFNRDSGKFHGRRSIWGGRATVRKALYMAALTARRCNPAIRALSQRLEAAGKPFKVVLTACMRKLLVILNTIVKNNSVWNNKLQISN

SEQ ID NO: 179200 - protein, 355 aa, unidentified
MDSKKYIGMDVHKESISIAVMNGAGKIMMESLIETKASMILQFIDGLRGDLQVTFEEGTSAAWLYDLLKPHVTKLVVCDPRKNASMKEGNKSDKIDARRLAELLRLNHLNPVYHGEHGLRSLKELVRSYLTITKDLGRVMTRVKAIYRSWAIPCTGKQVYAVRHRAERLGKIGEAGVRRRAEFYYQQLDALRTVRQEVRRELLAEGKKHKAWKQLCQIPSIGPIRAAVLLGILQTPHRFRTKRQLWTYSGFGIETHSSADHRSVNGQLERAKKQISIRGLNRNCNHDLKNLFKGAAIVASSKPGPFQEFYTALLDKGIRPEMARLTLARKIATIVLMVWKRGACFDAQHLKLQTA

SEQ ID NO: 179201 - protein, 417 aa, unidentified
MSGRLEMPVLHGRCCGLDVHKDLVVACVRLGGGDGRLTQEVRSFGTTTRGILQLGDWLGGQGVSIAAMESTGVYWKPIWNLLEDRLKLILVNAAHIKQVPGRKTDVKDCQWIAQLLSCGLLRASFVPDRPQRQLRDLTRQRIQLMGDKTRVANRVQKVLEDANIKLASVATDILGVSGREMLMALIQGDQSPRQMAELARKTLRKKIPQLTEALTGKVNDHHRFMLKMLLTQLQQIEEQVELFDNRIEEVMSPLQQEALRKLDEMPGIDRRSAQIILAEVGWDMSRFPSASHLASWAGLCPGNNQSAGKRKSGRVTLGNRWLKATLCQCAWAASRCKNSYFRSQHRRITTRRGPKRATLAVAHSQLCVAYQLLKGDQPYHDLGLNYFQQQNHDGLKRKLLSGLKRLGYKVTLESQAA

SEQ ID NO: 179202 - protein, 312 aa, unidentified
MGEFSHRQFSNDKEGFKRMLLWLKKETRIPSSQWIFCGEHTGLYCEPLSEYLTTKGLFIWIDSALQIKLSMGIRRSKNDKVDSEQLALYAYRFEDKAKAYVIPSKELRSLGLLYAYRDRLIKAKVGLLQAATEMRAVIKRDPTARFIYEKTIGQVNRLKKEIKEVEKKMLECIKKDPLLDKSYKLLTSIIGISLVNATMMLIYTANFTRFLSARSYACYVGVAPFARDSGTSKHAPPRISKIANKEIKALLTQAARCATRFDTQIKEYYDRKRKEGKKERVVINNIRNKIIYRAFAVINRQKPYCENYLITN

SEQ ID NO: 179203 - protein, 336 aa, unidentified
MEEVQSVVGIDVSKKSMDIALLRNGKVKSKSLGNTPAGHKELLEWLIASKADMATIHVCMEATGVYYEALALAMHDAGLKVSVVNPSCVKGFGRSENIRNKNDTIDAALIARYCAAMKPESWVPVPLEQRQLRAWSLRVQSLKDIRQQEENRREAHIVSGMLDVAAHVAEHVRWIDDQIKKLENEIDDHIDRHPGLKRDSELLASIPGIGKTTVARILGHLGDVRRFKSAKALAAFLGVTPKHNTSGTSVKGRSVICRTGSTSLRAALFMPSMVACRYNPIVKQFAERLLATGHPKKAVICAIMHKLTHLIYRVIRHGKPFDANYLSKPLAIQDGI

SEQ ID NO: 179204 - protein, 349 aa, unidentified
MTIVGCDWHTRKQQVAVLHTDTGEVVEQELLHAGDAVEPCYRPRPRPVTVGIESTGDALWFHDLMQRLGHTLLVGEAATIRAMVVRKTKTDRRDAQHWLDLLKHDRFPAVWIPDPATRDLRALVTHRMRLVRMRTLVKNGLHASAMNRRLTLGPSLWSPRGLAQLQGLVLAPQTTQRRDESLLRLAWLTARLEALDARVAAAAQADPRARRLLTHPGVGSLTAVTTVLVLGPVSRFPDSKHVVSYTGLAPAVHASADTCRLGQITKQGSPLLRFVLGQAGLIAAHSEVDLQRHYRTILRRRGRPKAIVAIARKLLVRLYIMLRDQIDDEEFRRRGQTPRGQEVPPPARA

SEQ ID NO: 179205 - protein, 342 aa, unidentified
MDHYAGIDVSLECSSVCVVDASGKIVREGKVASEPEALIDYFGSLRLPLVRIGLEAGPLSQWLYAAMQQAGLAVELLETRHVRDAFKAMPVKSDRNDARGIAQLMRLGWFRPVHCKSLAAQELRAMLTARKLVQSKLRDVENHLRGILRGFGLKVGKTTARSFAVRIRELVAGQANLETIAPALLAVHAVLLREFNGFEKRVRMMAREHVKARLLMTTPAVGPIVALTYVGAIDDPARFKSSKQTGAHFGLTPKKYQSGQTDVTGRISKIGDATVRTALYEAAHIMLTKPIKGCAPLKSWAMRIARRSGMRKAKVALARKLAVILHRMLVSAMPFNAAAAAA

SEQ ID NO: 179206 - protein, 361 aa, unidentified
MAQAKTWVAFDVHVSGVVAAMLDRDSGELRVRRLPGSSDEVAAFAGTLAGPVRATYEAGPTGFVLARKLRAVGVDCVVCAPGLIPRGATDRVKTDRRDAERLVRLLVAGELHRVAVPSVEEEALRDLVRAREDLRGDLMRARHRLAKLLLRHEVRFDGPQANWTQAHLGWLAGVRMGQPASQRALEDYRGAVHALMVRREQLEAEIARALPESPWAQTARRLMCMRGIDTLTAAGLCAEIGDFRRFQHPAQVMSYLGVTPSEHSSGERRRRGPITKSGSQHARRLLVEAAWHYRRAPRVAGSLARRQRDGEPEVIALSWKAQRRLHHVWARMEARNKRRTIIAVACARELAGFCWAVATTG

SEQ ID NO: 179207 - protein, 367 aa, unidentified
MSNVRYVGLDVHKDSIVMSVAESGNADAKVLGTFPNDINKIIRQLKKLSPDLSLLRVCYEAGPTGFGLSRRLKKEGIDCVVVAPSLVPQKSGLRIKTDRKDSRKLAHYLRSGDLTEVWVPDEQTEALRDLERTRDDAKNAERTARHQLSKFLLRNDRAYRDGREWTAKHMIWVRQQKFDDACRQCVMDDYVKAADDATARVKQLMKHIEIFIEGHALQPLVKAMMSFRGIQILSATVIAAEIGDLRRFKTARQFMAFLGLVPSESSSGNSVRRGSLTKTGNGHVRRILIEAVQHYRHRPVLSAALRKRQEGISKEVRDISWQAQQRLCSRLTHFTNSGKPRNKAIVALARELAGFLWSLGQVSQLLA

SEQ ID NO: 179208 - protein, 420 aa, unidentified
MQILYPRCCGLDVHKASIAACILVYKDQGEPEIRRRTFSTFTKDLVRLKMWLSSSKVSQVALESTGVYWKPVWNILEPGSFQLMLVNPQHFHAIPGCKTDPKDSRWLAELLSYGLLRPSFVPPQPIRELRDLTRYRVHLKQDRNRIHNRVHKVLEDANIKLDCVATDILGISGRRMIDGIVEGRHSAEFLADRARSRLREKLPSLRLALKGRVTDHHRLMLRELLGDLDAVDSKIERLEQEIVTRVAPYADLIARLCTIPGIDTVTAWTLLAEIGVDMTAFPDADHLASWAGLCPGLKESAGKRMSGRTRKGDCYLRRALCQAAWAVSHTKDNYLAALFYRIAGRQGLKKATIAVAHQLLRIVYHILRDGGAYRELGGNYFDRLHPERTRNRLVRRLENLGLKVVLERRDPTAAPAAQTL

SEQ ID NO: 179209 - protein, 349 aa, unidentified
MHSTTVAVDLAKNVFELAVADAEGKIEERLRLNRARFSSFFVHRAPCRVLMEACGSAHYWARRIGEHGHEVQLLPAQYVRQYVRRNKTDRADAAALIEAARCTAIRTVPAKSLEQQQVLVLHRLRSQWMSTRQRYLNTLRGLLREFGIAVPLGARVARARIAHYLAQPPQELPAATRPLLSQMLSEVKELEHRIEQIERDLTALTRADPVVQQLRQIPGIGLLGSTAIRACVGDVERFTCGRSFASWLGLTPREYSSGERRRLGGISKRGDVYLRTLLVHGARSALLAAHRQQRTGHPLDHLRRWALQCERQRGHNVATVALANRLARIVWATWKHGRAFDGNWGRTPQ

SEQ ID NO: 179210 - protein, 424 aa, unidentified
MKVTYQTCCGVDVHKSFLVATIVKTTGGIEPSYQKKRFSTFNNSILEFKQWLLDNDCHDVCMESTGKYWVPVFNLLEDEINVVIANPKWVKAVKGNKDDAKDSKWIGDLFRLGLVKGSYIPCKKVRILREYTRYRYKLVSCRSSEKNRYQNALTVCNVALDSVVSDIFGKSSTSIIDYLLEQSGSSINHEEIASKLLRSLKSKEDAVIESIEGYQMTDAQKYRMRLVRAHMDYITAEINDVDKMIENMISSNPDFKNAVRFLCTIPGVKRASAITIISEIGTDMTQFSSSKRLCCWAGLTPGSNESAGKKKSVRITRAGVYLKPALVQCAHAAVKSDKSPYYKKKYDSLVKRRGKKRAIIAIARMILTAIYQMLSTGELWNPSDLYKIDMPVALVEKQKAKAIKQAKKLLQQEGLLPPDEPLAS

SEQ ID NO: 179211 - protein, 341 aa, unidentified
MKKLFIGIDFSKEKVDVAIIFAEGLSETGKRVFNQFKTTTAEYGKLVKWVEQNANGTDPSLWLFCGENTGDYSKGLCNYLYGKGYEMWLENAKCIKDASGIRRLKSDRADASMIAEYAMRNHDRKVPYKPLSEALNQLRELFLCRQMLVRHRSSFITRKGEKEYTMEKSPARKAISLCQKHVVTSFDKEIDSIEGKIKQLIESNKELSEVYHIVTSVPGVGPQNAVSLMVYTDNFQRFNYNARKIACYYGVAPFGKDSGTSVHSDPHVHYMANRQIKALLTQAALTAIRHNPVMSHYYNRLIARGKTMPVALNNVKNKLLHLLTAMVRNKLVFDPNYKISA

SEQ ID NO: 179212 - protein, 336 aa, unidentified
MKQIKVLGIDLAKSVFQLHGVDERGVAVLRRQLRRTQLLSFLAQLPACLVAMEACASAHYWGRQIKALGHQVKLIPPQYVKAFVRGNKTDRNDAQAICEAALRPDMPAVAVKSEEQQAIVSLHRLRELLEKQRKQLANQLRGLLGEFGIAIPKGMTALRRELPQAIERVPTVLRSSLRDSAERLRQLQDACEQQSQQIQQLAQATPVCRRLMQERGIGPLTASAYTATLGDPGHYRNGRQVAASLGLVPRQHSTGGKPVLLGISKRGDAYLRTLLIHGARAVLRHAPGKTDPLSVWLQQLAKRVGANKAAVALANKNARRLWAIWRAQSAEFAVMA

SEQ ID NO: 179213 - protein, 347 aa, unidentified
MNFYNNMHPYYCGIDLHARILYVCILDQEGKSCVHKEIPADPEKLHALLKPYIGNIVVGVECMHCWYWVADFCEDLGVDFILGHALYMKAIHGGKAKNDRIDSFKIANLIRGGNFPLAYVYPKKMRATRDLLRRRMAIVRHGANLKAHVVNTTSQYNLPPNKVNLKNMSAREQLKSMFPDPVVQKNIDLDMTLLDCYAKQLSKVEWFIEQQAKQHNPVHLHLLKSISGIGRILALTIIYEIGHIDRFESVQKFASYSRLVKCKAESAGKNYGTQGNKIGNAHLKWAFSEAAVLYLRGNEKAQKYLLKLQKRMSKAKALSALAHKLGRCIYFMLKNDKVFDESKFLKG

SEQ ID NO: 179214 - protein, 411 aa, unidentified
MDVVNARCAGLDVHKATVVAGVRVPGPQPGARRGETKTFATTTRGLRDLTNWLRTHGVTVVAMESTGVYWRPVYEALEGIVQLVVVNARHVQMVPGRKTDVKDCEWLAQLLECGLLRGSFVPPRAVRDLRDLTRLRKALIRERGHHVNRIAKTLELAHLKLSCVVTDLMGKTGRAILQALSAGIDDPERLAACAQGLLRKKQAALREALGGRLTPHYAFLLQQHLSLIDGLDAHIATLDTRIEAAMAPLAEAAALVQTMPGVAARAAQAILAETGVDMDLFPTPAHFASWARLCPGNHESAGKRQSTTTGKGATWLRATLQETAWAAVRSKKSYYRALYHRLKGRRGAKKAIVAVQHAMIVALWHMLKHGVTHQDLGADYFERRNIARIRRHHVRRLEQLGYDVTLRGKAA

SEQ ID NO: 179215 - protein, 407 aa, unidentified
MTVAVGIDIGGSSHAVAVCREGAREADRTALKIAANRGGFDDLDAWLRRQPEPVARVVMESSGHYWFNLASHLCRQGYPVAVVNPLEAKYFAKRRLQRSKSDPADARTLATFAMVDQPPTREPLVGAELREASRFAMRLTREQGQVCQRIIRLVDIGFPELAEVWDDPTCVSALAVLRRAPTARAVARMRVETLAQLRRPGSGGRAIGPAKATELKRLAATSVAAPELETQVGFEMRLLIGQYDLLEQQIQDADRRVAALLDGEVAQRLLTIPGVGPSTAGALMAEIGDIWRFTDVDQLLAYAGVHPKEQSSGKKGANPETSWVMAKTGNAFLREAAYRMAVVGIQHNPVIRAHYTRKRAAGKSRMNAVGHCMSKALSLVWGVWRGGKPFDAAHGSAAKTPQTAPEA

SEQ ID NO: 179216 - protein, 372 aa, unidentified
MLDTTTFVGLDVHARSIKAVSLDVMTGEVRCATFGYDAGAVAEWVRSVDPKARCVYESGVTGFDLQKRLSGLGVDCVVGAVSKMIKPSADRRRKNDRNDAARMAKAILSHDVTPVWVPSPEIEGLRDLAGAHDAATARLAAAKQRLLAFLARRGYVYGGTTPAGNPRRYWTYDFLRWLDKVRPADDGGIRALAALRNEVEAADETREALLAEYRAAVAAGPLSAEVEALQSIKGCGFVLAAAFASEVGDFSRFRSGRQVTAYFGLAPKQRSSADSVRLGGISGAGNALVRRLAVEGSWSYVQASHQPKLMPKGSGVPLEVRMHGRKGSERLLRRREEMLERGMPQAKANAATAAELVRWLWALGMMCREAGE

SEQ ID NO: 179217 - protein, 340 aa, unidentified
MRIAVLGIDLGKNSCSIVGFDDGGAVVLRRRMRREGVIKVAGKLSACVVAMEACCGAHHLGRVLRAQGHEVRLMSPEYVRPYVKSQKNDDRDAEAIAEAATRPTMRFVELKSEEQLDMQTLHRARDRLVGERTALINQLRAVLLERGITVAQGRRKLERHLAGLDAQGGLSQRMRVLIEDMRLQWCELDRRIAELDKELTKWVRNEEVARRLMTIPGIGVLNATALIAAIGQGESFARGRDLAAWLGLVPRQLTTGGRPRLVGISKRGNKYLRKLLIHGARAALPTLLESPTSLGAWLRGLMTRMHKNAVVVALANKLARLAWAVLRHGETFRFAVSAAA

SEQ ID NO: 179218 - protein, 349 aa, unidentified
MLIIGCDFHSRFQQIAMLDPATGEVVERRLEHENGEAKTFYATLPSPARIGMEATCDAPWFERVLREHHHELWIGDAAEIRAAMVRKQKTDSRDALHILDLLLTDRFPRIWVPSPAQRDLRQMLRHRHKLVRFRTSVMNQLHALAMGQGLCRRKKLWAKVGRKELKGLVLDPWASLRREELLQLLDQFDPWIAKLDEAVVQAAESHPAAVCLMQQMGVGPVTALAFVLTIGPVSRFANSKKLVSYLGLNPSEDSSAGRQRLGAISKQGNPMMRCLLVEAAQTASRLDPELRRDYQRLKFRRGSSVAKVAIARKLAVRLYWKLREAEQPVPTESLVANYLDVDLRFRWQE

SEQ ID NO: 179219 - protein, 360 aa, unidentified
MTATMTWVGLDVHARSTHAAAIDRESGELTRARFGTGADPVVEWLLQLPQPVHACYEAGPTGYALYRAAVAAGLRVDVVAPSKTPRAAADRIKTDRKDAELLVRLLLAGSLASVAVPSAESEAARDLARAREQVRADLARLRHRVSKLLLRYGRVYDGGGTWTQAHRTWLAGQRFEHVATELAYLDTLAAIDGLLARRAALDERLSLLATEPQHWPTVARLRCFRGIETLSALILHLEVGDFARFQRPGQLAAWLGLVPSLHQSGESETRGSITKTGSGFARRILVEAAWHYLREPRIGATLRDRHAGQPDHILQIAWRAQHRLYRLQRSLRARGKPGNVAVVAAARELACFLWAAAVAD

SEQ ID NO: 179220 - protein, 310 aa, unidentified
MDAIYVGIDVSKDRLDVHVRPSGEAFAVERNGKGLEDLVDRLRGLSPLLIAVEATGGFETIVAAAVAGAGLPLAVVNPSQVRHFAQAVGKRAKTDPIDAGVIAHFAEAVRPEPRPVPEETAVLLAELVGRRRQIIEMLVAERQREKHASNVRVRKSLARHIAILEKELPTIDQDIDGLVRGAPVWREKEDLLISVPGIKNTLARIVLAETPELGSLDRRSIASLAGVAPYTRQSGRWRGKAMIGGGRTALRSALFVAALTASRHNPVLKPFYERLLAAGKPKKVALIAVARKLLTILNAMLRDNRKWQSA

SEQ ID NO: 179221 - protein, 366 aa, unidentified
MKKISTVAMERIDIFKQNQLTIGLDLGDRISHYCVIEEAGQVILESQLPTTPKGIEEVFGRIPRSRVALETGTHSPWISRQMSQLGHEVIVAHARNVQMISESSRKDDRLDARTLARLARIDPALLGPVRHRSAKAQIHLTVIRARATLVGARTALVNTARGLTKSYGARLPKCGSEQMGREIAKELSQELRDALDPLLAEIESLNERIAEYDRRIARVAKEVYPQVALLQQVKGVGTLIALTYILTLDDPHRFRHSRDAGCFVGLRPGRRNSGMSEPQMHISKEGDRYLRTLLVQGAHYILGPFGQDSDLRRWGLKLAERGGKNAKKRAVVAVARKLAVLLHRLWVSGEVYEPLRNNHKAESAAA

SEQ ID NO: 179222 - protein, 411 aa, unidentified
MSAQKARFVALDVHKSYVMVGAVDSEQEIVLHPRRVAFNGFESWINKHLRPSDELVLEATTNAWLVHDMLEPLVGRVVVAHPYHVKLISAATVKTDKRDTLALAKLLAAKMIPEVWVPPHHVRELRALIAHRKRLISQRTAAKNRLHSILHRNNLVPPSGRPFADDNRSWWDDLTLPNSEKLRLRQDWTIIEHLTDLIAEVELELTHLSVSPDWVDLVPFLIQLPGIGLLTAMTILSAIGDISRFPSAKKLVGYAGLGGRIHASGNIHHTGSITKQGRKELRSALVEAAWITIKNHPYWLAQFQRLEIKKGSKKAIVAIARKLLVVIWNVLTAHASDRRAEPELVAKYLMNWASQHGLSNQLLGIRRPLFVRQQLDRLGIGQDLQGFKWGSTYFKLPPSSLLEQSPQPMAA

SEQ ID NO: 179223 - protein, 368 aa, unidentified
MKKVITAATIESRNFSMQQRLTIGLDLGDRHSWYCVLDEAGRVQLEQRVRTSAKTLEEAFGAMPRSRVALETGTHSPWISRVLAALGHEVIVANARKVRLIGESRKKDDRLDSQTLARLARIDPQLLCPVKHRSPKAQADLTVIRARAGLVRARTSLVNTARSLAKSYGERLRGCNVRNMNPEKAESLSPELQTALEPLLAEIESLSERIAEYNDRIDALAQQSYPQVALLKQIKGVGTLIALTFLLTLEDPHRFGKSRDVGCYLGLQPGRRNSGQREPQMHISKEGDPYLRTLLVQGAQHILGPFGVDCDLRRWGLKLAERGGKSGKKRAIIATARKLAVLLHHLWVSGEVYEPLHNSSRATGAAAA

SEQ ID NO: 179224 - protein, 456 aa, unidentified
MGNARARKIPARLVEDEDYQLRHERVAGIDIAKAKADVCTRLPPTREGGRRASQVEEVPAAAGQILALARRLLAGRVELVVMEATSDYWRIWYYLLEAAGLSVRLVNPSHARQLAGRPKTDRLDAQWIARLAEMGLLRPSFVPPPEIRALRDLTRTRLMLVRDRSREWQRLEKLLEGALVKLSSAVWSLGASKSARTILEAIAGGERNPGTLAALASGRVTGGRAAVEQALDGMLLGDHHPMLIRMHLDHVTLLDRSIAAIEDEIEAAVDAIPAAWGISADGIPSPDPGPDAAALTAVERLAEVPGISPKLAMAIIAETGLDMTRFPTADHLVSWAGLAPVARQSGPRSRKPKKGQGDAYLKGYCTQAALGAARTGTFLGERFRRLSKRIGGIRAQCAVGRSILIIVWHLLADPAARFRDLGPDWHARKGDRDRKIRAHLRQLQALGLDVTITPAA

SEQ ID NO: 179225 - protein, 472 aa, unidentified
MKKTSAPRPRTKTSHASKSKSKNPPGTAPPGSRSRAVPGVLHPRGAGADIGAREIYLCVPEDCAGPRIRSFGTFTEDLEEIAAWLKECRVDSVAMESTGLYWLPLHQVLNRHGIAVVLVNARHVKHVPGRKSDVLDCEWIQYLHSVGLLRGSFRPEDEICVVRSLVRHRESLLEQAADQIRHVHKCLDQMNLQVHHVINDLSGATGQAIIAAIVAGERNPAVLARLRDHRLKADEATLRKSLKGDWREEHLLVLRLAHATWTHLRGQVAQLDEEIARRVRALESSPAPAVRAAESERCRSANAPAADLSAEYARILGTDLMLVPGLNELTIQAVVTEAGSDLSQFRSAEAFSAWLRVCPGTKISGGKKLSTRSGRGKPRLALLLRQAALGLHRSATVLGVRYRRLRARLGAPKALTAMAHLLARIIYTLVNRREPYNESIFQAAEKKHQQRQISRLRKQAKSLGFELAMPAA

SEQ ID NO: 179226 - protein, 381 aa, unidentified
MTTAATYHEPGNTPAGTLFVAFELSEKTWKLGFTTGHGQKPRERTVTARQQERVLDEIAQAKRRLRLPDTAPVVSCYEAGREGFWLHRFLQGHGITNHVVDSSAIEVNRRRRRAKSDGLDVRKLLSMLMRYAQGERQVWQVVKVPSVEAADHRHLHRDLETLKQERASTTTRILGLLSSQGLRVTSLTKLPEQLEALRLWDGSPVPPGLRRRVLRVYAHHTFLREQIAAVEAERRAQLQVSTDARIDKVRQLMLLKGIGINGAWLLVMEFFGWRAFKNRREVGGLAGFTPTPYQSGESAREQGITKSGNRHVRWMTTELAWSWLRFQPDSTLSVWFRERFGGGGKRLRRIGIVAVARKLLIALWRFLETGVVPEGAILKAA

SEQ ID NO: 179227 - protein, 396 aa, unidentified
MSPVNSRIAAIGIDIGKNSFHVVGQDERGALVLRQKWSRGQVEARLANLPACLIGMEACVGAHHLSRKLQALGHDARLMPAKYVRPYSKGQKNDFRDAEAIAEAVQRPTMKFVATKTAEQLDLQALHRVRERLVGQRTGIINQIRAFLLERGIAVRQGLRFLRAELPTILATRSDALSPRMLRLIEDLAGDWRRLDERIEAISGEIEALARQDQACERLMTVPGIGPIISSAMVAAIGTGDAFSKGRDFGAWLGLVPKQISTGDRTILGPISKRGNRYLRALFVQAAWVVLVKLGKKWERYGLSAWIEAAKKRLHHNVLAIALANKLARIAWAVPRAVLGPVKAWPGDASARGKASATANLDGPCARRACTRRPGRRNGRKARTKEQPRSWSSPMT

SEQ ID NO: 179228 - protein, 331 aa, unidentified
MHFSQFIGVDISKDTLDAAIYPAKDKKMDFLHFDNTTRGLNEMLKWLKSRGIKPSEMVICAEHTGVYTNPLIDFTEKKGLSLSLNSPLDIKHSMGITRGKNDAIDAGRIAEYAHDHKDKLRLYQKPSEAIVKLKYLLTERHQYVRQRTAMLSFNKIMGKYETPEARSRNGSDIHHCETLILKVERQMLDIIKENPELKRNYDLVSSVKGVGLINAINIVVFTNNFKSFETPRQYACYIGVAPFGYTSGTSVKGKTQVSKICRTRQKAELSMAARSAIIYDPGLKRYYQRKMKEKGEGKDAHGVVLNAVKFKLILRMFAVVKSGQPYKILNY

SEQ ID NO: 179229 - protein, 384 aa, unidentified
MNPDRTDAPAAGEYGTVFVAFELSKSKWKLGVIVPGSQKMSRYTVAGGDLAGLAQLFASVRAKIEGCGKPVRIMSCYEAGFDGHWLHRWLTDRGVINHEIDPSSIAVNRRARRAKTDRIDLDLLMRAFLAHLRGEPRACSVVHVPTAADEDRKRRTRERERLIKERTAHTNRIKGLLHAQGIRDAMPLKPGFLSKLDQLCTGDGRPLPARLKDEIRREHERLSLICQQIKAIEAEHQAAHRAPAPGSVEAKIVQLAELKGIGPVFAQVLGNEVFYRRFANRRQLGSYLGLTGTPFDSGDSRREQGISKAGNSRARATAIELAWLWLRHQPDSALSRWFRERVGELKGRMRRIAIVALARKLTVALWRYLETGLIPTGAVLRPSF

SEQ ID NO: 179230 - protein, 320 aa, unidentified
MSATLVVVGIDVAKAHVDVAVLGGLLEAQRFVNEAEGHSALAAALAPLGVALVVMEATGGYEAALACALQAAGLAVAVVNPKQARDFAKAMGRLAKTDPIDARTLAEFAALLVRRDDLAHFIRPLANSEQQALAALVTRRRQLLAMLLGERQRLQLAMALVRPSIEAMIAAIRAQLDDVEAQMVAHVRRHFTELDQLLQSASGIGPVASATMIAELPELGRLNRREIAALVGVAPMANDSGTSRGRRHVQGGRFELRRVLYMATLSAATHNPAIRAFYHRLLAAGKLPKVALVACMRKLLTILNAMVRHNKPWDKSFHHA

SEQ ID NO: 179231 - protein, 363 aa, unidentified
MAVKAMPLVGLDVHARQTYAAILDPGSGELRVSRLRMAPVEVADFLEALGSGVVGVYEAGPTGFGLARASRERGIDVRVAAPGSIPKGPSDRVKTDRRDAIRLVRLLAAGELSFAFVPCVADEHFRDLVRAIEDVRGDLMRSRHRLGKFLLRRDERYPGPGSPWTSAHVKWLRALDLDDACSRATFADYLAAVELLSGRRASLLAALEQQIPASSHAPVIARLRCFRGIDTLSGAGLCAELGDWRRFAKPARVSGFLGIVPSERTSDTKRRQGSITKAGSGHARRLLVEAAQHYRRPPRIGAALARRQHGQDPRVIAIAWRAQQRLHARWQHLYHERRKPAGVVAIAVARELAAFCWEAATLD

SEQ ID NO: 179232 - protein, 351 aa, unidentified
MMIIGVDYHPGFQQIAFLVEETGECGERRLNHSDGEAENFYRDLKVRGISVRVGMETTGYSRWFERLLAELEFEVWIGDAAEIKTRRAKKQKTDRQDAQLLLKLLLEESFPRIWVPNPENRDLRQLLWHRHRLVQMRTRIMNQLQALAMNENRYWKGKLWSERGRAELEKLPLAFWASRRRQELLELLDRMNPTIEELTFAATLEAKKRPEALRLMTHPGVGPLTALAFVLIIGTPERFGCAKQICNYVGLIPSEDSSGGRQRLGHITKQGSSLLRFLLVEAAQAAVRCNEDWRRRYRHLAMRRQRNIAKVAMGRRLGARLYWMWRNGREYSPSLEFGSHAGELGTGNGGQ

SEQ ID NO: 179233 - protein, 338 aa, unidentified
MKRYLGVDLHRNCFTVYTRQEDGSGESREWSIRSLKAFAKAVTANDAVAVEATGNVRLFCEALKGRGCRIVVVNPHQFQVISRSVKKTDEHDAKVLAEFLAKDMLPEVRMKDEAHARVASLAQTRDKLVKLRTTLKNKVNNLLAARGILIRKESLASEKGLAGVLAAPVSELEHLELEILVGEIRHLNESIKKLEGLLHGQGPKLPGWENLTSIKGIGDTGASILLSTIGKIEDFADEGKLAAYFGIVPRVSNSNETERSGRITKRGCKLGRTTLVQCALIAARYSPYLQAYYRRIAAHRGTGKAIIALARKFLGIIYKTLKNNWVFEDFPNYVLVKT

SEQ ID NO: 179234 - protein, 353 aa, unidentified
MEQFIGCDAHKKFSVFVAVNEKGHAGEAMRVAHDRQLYREFLGRLPPHSMIAVEASGHYSWLVDEMERLGHYPKLANPLEAKRRMALTKKTDKLDARGLAILLRNGTLPEVWIPPSELRDQRELLRLRIFLVRLRTRVKNRIHGTLARRNVQIPGADLFGVAARLKLGARLPELPTHSREAVEQELATLDFLEIQIESAEQRLEAIMKVSVEADLLKTLPCVGKILSMVLMLEIGRVDRFPTAAHLASYAGLVPRVHSSGGRTRMGQVCGNVNRNLKWAFVEIGNLIVINQTRLAGTHVVRLYQRIKCAKNHQKAVVAVARHLAEAAWWLLTKQEVYREPQGPRQRTLSSTLG

SEQ ID NO: 179235 - protein, 367 aa, unidentified
MEKIITYVGLDVHKDTISVASAEAALREEVREHGKIPNTPAALNALLKRLASERKTLRFCYEAGPCGYGIQRQIASAGHECAVVAPSLIPRKPGARIKTDRRDALNLAKLHRAGELTSVWVPDQAHEAVRDLVRARMAAVRTLRQARQQLSGFLLRHGRHYSRTAWTQLHRRWLASLKFDEAVHHVVLEDCIAAVEAAAARRDRLEAHIDAALPDWSLAPVVHALQSMRGMGVVTAATLVAELGDITRFANPRQLMAYVGLVPSEHSSGRSRRQGGITKAGNHTARRVLIEAAWSYRFPARISREQLLRQEQLPKPIRDIAWKAQERLCRRYRMLLRAGKEPKVVIAAIARELSGFVWAIAKQTPAR

SEQ ID NO: 179236 - protein, 344 aa, unidentified
MQHYVGLDVSVKETSVCIIDEAGKVIREVKVATEPVAIFAVLTEEALAIERIGLEAGPLSQWLYSALAEAGLPVICVETRHMKAALSAQIKKSDRNDARGIAQMMRVGLYRPVHVKTLASQKRRMLLTSRQLLQAKALDIENDLRGTLRNFGLKVGMVGTVKFEARIRELVADHPDLAAIVEPLLIARRVLREQLGVLHRQLLEIVRHDEVCRRLMTTPGVGPVVALTFRATVDVPSRFSNSKAVGAAFGLTPRRQQSGEIDRMGGLSKCGDALMRETLFEAALVLMTHSRKWSWLKAWGMKIARHRGMKRAIVAVARRLAVIMHRMWVDGTEFRWTTKEAAAT

SEQ ID NO: 179237 - protein, 320 aa, unidentified
MMAQNDLVVVGIDVAKDRVDACIRALALRQSCPNTAQGHHKLVAWLRKYHVSRAVMEASGGYEREWRKVLHNAGIEVRIVDPKRVRSLALSAGRLAKNDAIDAEMIAWFAETFSEAPNQTHDAAHEELVALVKARIGLVELKTRLQSQDAHAAPGQVRKTHARVLKGLAAEIEKLEAAIAAKVKATADFAERAAIIESVPGFAETTSANLLAGMPELGHVSDEIAAALIGLAPYDDDSGQRRGERHIRGGRRWIRNAIYMPCLGAATQNNPVIKAFYDRLIAKGKPPKVALVACMRKLIIILNTLIARRQKWDPSRYVVG

SEQ ID NO: 179238 - protein, 462 aa, unidentified
MTKRRKKAKSRSFQITKLPAQLQHINLNAAGIDIGSERHLVAVPEGRDEVSVREFGTFTVDLEALAAWLKTCGVTTVAMESTGVYWIPLFELLERRGFEVKLVDARHVKNVSGRKSDVLDCQWLQQLHTYGLLAGAFRPPDEVCVLRSYLRQREMLRQVASQHIQHMQKALQQMNLLLHNVVSDITGVTGMKIIKAILAGERDPRVLASNRDDRCKQSRATIAKSLVGNYRAEHLFALRQALDLYAVYQAKIADCDEAIIKQLEKKPDLSDDQPPSGDRYVQARDRVRGGIDVRELLFKKSGVDLFAIPGLAADHLLTLASEVGFDMSPWKTEKHFSSWLGVCPGTKRSGGKTLDSKTKRNPNRAAQAFRMAAASLSRSRTALGAFYRRLKARRSGAQAVTATAHKLARIYYAMLTKGANYIELGQQAYEQRYKERRIAQLKIQAKSLGFQLVACTADKSSF

SEQ ID NO: 179239 - protein, 359 aa, unidentified
MQTQSKTLDFDGQNIYVGFDVHLKSWKVTIMTDDLILKTFSQPPEPVVLHQYLLKNFPGGVYHSAYEAGFSGYWIHNSLVALGIHSIVVNPADIPTTNKEKVQKEDKRDSRKIAKALRSGDLVPIYVPSSKTLEDRYLIRARGLLVKDLTRNKNRIKSFLYFHGIKYPPCFDNSKTYWSKRFIDWLEGIDMKEDSSKLTLSILVSEGKKLRTTILNVTRSIKELSITVAYQEQERLLRSVPGIGLLTAMIILTEIETITRFANTDHFHSFVGIVPSTSSSGEDEKVGEITPRGHTTLRSAIIESSWIAARIDPALTKAYHEYCKRMEPNKAIVRIAKKLLNRISFVLKTKQSYRLSVLK

SEQ ID NO: 179240 - protein, 400 aa, unidentified
MKSGANILHLGLDVHKESIAVAIASGEGPVRRYGEIPGHLQAVDTLIKKLQKPGEELRFCYEAGPCGFVLCRHLRRKGLVCEVVAPSLIPKKAGDRIKTNARDAEQLARLFRAGELTAVRVPDEIDEAIRDLIRGRLSAVFDQRRARQRLKGFLLRLGFRYPGKTSWTPAHMNYLSKLKMPHPAQQIVLEEYIGAIQSAGERLERLTTQVHGQLTDWKWEPVVRALMCLRGISVINAMTLVAEIGAIDRFNHPRQLMGFLGLVPSEHSSGSKRHQGAITKAGNGAARRALVEAAHHYRIPPRISPTLRQRQHGQSESVCQIAWKAQQRLHARHRRLSARKKKAVVVVTALARELCGFVWAIARSVPNPIQSNATQPGARIYVLNRRLKFKRAADRQPASS

SEQ ID NO: 179241 - protein, 410 aa, unidentified
MELLHRRCCGLDVHKETVVACLRLVSDGKVTTEVRTFQTTTADLLRLSEWLAANECTHVAMEATGVYWKPVWHILDDGDFKLVLANAAHVKNVPGRKTDVSDAMWLAELLAHGLIRASFVPDAQTQEMRNLLRTRKQLVREQSSHVLRVQKTLEDANIKLDSVLTDLMGKSGRAMIEALIAGETNPVKLASLADRRVKASPEEFREALRGRVTKHHRFLLRLHLNQIDALDAAMATLDAQVEANLGPFRTAVELIMSIPGIKNLGAHVIVSEIGIDMSRFPSDAHLISWACICPRNDESAGKRRSNRLRKGGTWLKTTLVQCAWAAVKKKDSYLQAQFYRIKGRRGPKKAIMAVVASILTAIYHMLKDGTMYQDLGSKHFDRRSTDQQKKRLVKRLADLGYAVEIKPLAA

SEQ ID NO: 179242 - protein, 338 aa, unidentified
MRLYGGVDLHSNNNVLAVVNERGAVVYRRRLRNELPMVLRELEPYRAGMTGIAVESTFNWYWFVDGLMEAGYALHLANPAAMQQYAGLKHTDDAADATWLAEMLRLGILPEGYIYPREERSLRDLLRKRGQLVRHRTAHILSIQNQWHRNTGHGLSSNAVKSLTAEQLESSMGDPDRVLAIQANLALVACLNEQLKPLERRILERGKQMPEFRPLQTVPGIGKVLGLTVLLETGRVSRFPSVGNYASYCRCVPSEKLSNGKRKGQGNTKNGNRYLAWAFGEAAHFAIRYYPPIRRFYQRKRARTKAMVALKAVAHKLARASYYVMRDQVSFDLVKSYG

SEQ ID NO: 179243 - protein, 233 aa, unidentified
MPEGEAFALANDQEGIDSLIERLEEAPPELVVLEASGRYERPAAAIAAAGIPVAGIPVAVVNPRQARDYAKATGRLAKTDRIDAEILARFAGAVGPKPSVLPDEEALTLQAILARRRQLSAMSIAESNRAQMAPEAVARRIRAHVRWLEKEIERTDRDLDEAIKASSAFEHNEALLRSVPGVGPVLARTLLAELPELGTITHKRLCALVGVAPFNNDSGKRRVSGRCGAGGHR

SEQ ID NO: 179244 - protein, 337 aa, unidentified
MISSLVSIGAARAVSKATLDFAVLKANQLLFHQQVSNDKKGIAEFLKQLRQQTKASIKQCLFCMEFTGIYNNPLLNALHEQSAPVWVERAAHIQESMGLTRGKTDQVDAKRIALFAYKNREEVRLWKPKRPVLAQLDRLTAQRARLVKVIKMLQTPLTDSEGFIDKADRKADQQACKASLKALKADLKAADKAIGELSLQDPELKRLFERVTSVVGISQTTAAEIILATNEFQDITDPKKFACYAGVVPFDRSSGQKKGRPQVSHMANKKVKSLLHLGAMSAIQHCTQLKAYYQRKVKEGKNKMLVLNNVRNKLVQRVFACVREDRNYDKKYVHSLA

SEQ ID NO: 179245 - protein, 333 aa, unidentified
MQTNFVFTGVDVSKDELVIGCLQAGGWQKAKVRNDLEVIGAWLDGFGVAGKSFVLESTGTYSDRLVHALHQRRAVFSVVSPAQSRAMSGALLKTNKNDDQDAQTLSLLGEKLQPKPYHMPTGQQKKRAEALSALGSLQKQAQQLHNQLHAFEYRVEPNPVAVGALKKILQAVQEQIQALEKEASPQQGEEDKQGLVERIGSIKGVGRKTAQTFVAYFGDFSVFQTAKQFGRFVGLSPSEFTSGKSVRQRPRITKKGRGKLRALLFNCARSAMQHNPTCKELYQRIVAKGKNGALAFTAVMHKLARIIFGVARSGQNYDPNYHLNKQKVLQSLA

SEQ ID NO: 179246 - protein, 343 aa, unidentified
MERYVGLDVSLKQTAICVVNEAGSIVQEGVVGSDPEAIAGFVRSKAPGVVRIGIETGPTTTWLWTELKRFGLPIVCIDARHAKAVLKMQINKSDRNDAAGIARIMQTGWFKEVRVKDLESHAVKALLASRALLVKIKRDLENQIRGLLKNLGLVIGRAKFNVFAVRAEGLIENRPELAAVVRPLLEVRKTIEQQVDDLDRKVHKLARQDVQVRKFMTVPGVGPITALCFKATIDDPTRFRRSRSVGAYVGLTSRRHASGEIDWSGRISKCGDAMLRMYLFEAAGVLLTRVPKWSMLKAWGAKLAKRNGLRKAKVAVARKLAVILHRMWVDGTEFNWSTKKAAA

SEQ ID NO: 179247 - protein, 409 aa, unidentified
MDRQLERCCGLDVHKETIAACVRIGGRSGRAAQHVQTFRTTAADLVVLRDWLAAHGVTHVAMESTGVYWKPVYYALESDFTCLLVNAAHIKQVPGRKTDVHDCVWIAQLLEHGLLRGSFVPPVPIRELRDLTRYRKALIQDRTRVANRLHKALEDAGIKLATVASDILGVSGRAMLEALAAGTTDPTMLAELARGRLRGKLPALRAALAGRFRTHHAFLVGQLLTHLDYLDEAIGTLSTEIEDRLAPFADQLNRLDSIPGINRRTAEVIIAEVGVDMSAFPTAAHLASWAALCPGNNESAGKHKSGKTRKGNRWLRTALIEAAAGASRAKDSALQARFRRVLRHRGPKKAVVALAHALLRIAYHVLARGTNYRELGGHYYDRGQTQRLTRRAIRLLEGQGYRVTLEPAA

SEQ ID NO: 179248 - protein, 359 aa, unidentified
MPTKFGVVALFPGRPIVDQYVALDVSLQKTAVCVLNASGSVVIEAELPSEPAALTAFIQTHAPRAARVGLESGPTSPWLWHSLKAAGLPVVCMDARHAHAALSVRPSKSDRNDARGLAEMVRMGWYREVQVKSLAAHERMALLGVRRRLVDMRVEIDGQIRGILKTFGLVVGSGNKGAFAQRARMLVQDHPVLSALVDKLIEVRAVAVAKVAALDKEIRRFVRDDPTLRRFMTVPGVGPVTALAFRSTIDEPDRFKRARDVGPYLGLTPRRYQSGETDRQGRISKCGDRFTRTCLYEAANVLLTKVQRWSPLKAWGTRLARRIGSKKARVAITRKIAVILQCIWTDGTEFWWTKEPATA

SEQ ID NO: 179249 - protein, 322 aa, unidentified
MITPISCVGLDIAKAKFDVALLNALGKYRSKVFANTPEGFDQLLNWLRKHDALEAHLCMETTGVYGRGLVRFLAQQNLLVSVVNPAQIHAFGKTELVRAKTDKADARLIARYCQMHRPPPWIPPADEIVILQALVQRLDDLLGLQNMENNRLETAESAAQPSIEAILVVINQQIDTVRRQIQEHIDDHPDLKSQKKLLLSIPGIGDNTSATLLAFISPFERFHSAKQLVAYAGLNPRIRQSGQWAGKSPIAKAGNILLRKALYMPALTAKRYNPVITAFCNRLLARGKRPMQVIIAAMRKLLHIAYGILKSGQPFDPEKALA

SEQ ID NO: 179250 - protein, 429 aa, unidentified
MTRISVGVDVSKNRSTVCIMDQDGKVIMRPFLVWHSTEELDFLADTLKRLNGEVRVIMESTSVYQYPIALQLKERGLFISIVNAYEMKQFANIDFRGGKTDKKDSRTIASYGISYWDKLVEWQIPKDTYFNLDLLNRTYMNAKKHRQIILQELQHYIDCAMPGMDKELHSLNLNTKKDFMLDFVEKFWHRDEIVNMTEAEFTEVFTAWAKKKGYRPVEGKAAKIYAIAKSCIPYYPANPTVKTILQCIVDKLSGVNRTLVTIVTQMIEEAKKLPEYQIVREMPGVGDPLAARFFGSAGDIRRFKNSKALVAYAGIDSPPDESGDFSSTHRHITKKGSKVFRDTGYEIMMALRAQKRTWEKVRKNPEVYDYMLKKEAEGKPPKVAKIAALNKFLRIIYARIKELYDNMALAERAKTKTRSKTRAKTKVTA

SEQ ID NO: 179251 - protein, 274 aa, unidentified
MLYENYVGIDVSKLSIDAFIRESRIHRQFRNEESGFKQLIQWIKEHIGETWESLLVCFEHTGLYSLSLALFLEREHITYAMVPALDIKRSLGITREKNDQIDAKRIAEFAYRFNDRVMPTSLPAEDIRKLHSLLAMRDKMMRNMGGYITSRNELFRVIPDRELPVLTSVYENIISTLKNEVHELEREIRSIIMANKELKTTFELITTVKGIGFIVASFLIVYTCNFTRFENWRKFACYSGIAPFEYQSGTSVHARTQVSSIANQRMKWLLHLAA

SEQ ID NO: 179252 - protein, 327 aa, unidentified
MKYTPVGVDIAKHLIQVHFIDEHTGEMIDKQLRRQDFLMFFCNREPCLIGMEACRGSQHWGRELTKLGHKVRLLQAHFVKAFVMGNKNDVMDARAIWMAVQQPGKDIAVKTEEQQSVLVLHRSRRQLVKFRTMQINSLHGTLLEFGKTIHKGRAAMERELPEALERMKERLPPYLITVLENQYNRLNELDSLIEDIEKKLTSVARQNETCKRLLDIPGVGPLIATAAVATMREASAFKSGREFAAYVGLVPKQTGSGGKIRLLEISKRGNTYLRALFIHSARAAALLPKEPGPWITETEKTSSNQRGNRRHGKQTSTNSMGDSSSWK

SEQ ID NO: 179253 - protein, 353 aa, unidentified
MTLYIGVDFHPYQQTLVWCDTETGETETHTLSHEVEQVRAFYEQLKPAIVGVEASSKALWFEHLLAQTNHQLEVGNPLLIRRRATSRHKSDRRDAELILDLLMKGEFPSIWRRSPENTEVLEILKLRDSLVRQQTQTLNRLKALATNVGLLKGRMKADYFQAQFKELAVDEVTGLQRSQLLKMVESFNERIGQLESWLRQKAENDERVQLLLTQPGVGYLTALAVVNSIGEMTRFTHPTKQVPAYLGLEPLERESAGKRKSASISRAGNSITRYLLGQAGHLSARSDEKLKAFYKRMAKKKARGVAKMATARKLLVKLVIMWRDQISAAEFDERGGTVNNARRTQGLKDPQPD

SEQ ID NO: 179254 - protein, 345 aa, unidentified
MPIVGGLDIHRKQITFDYLDTVTGEVKRGQIAPADRAHLRAWLARFAGCGDVAFAVEGCAGWRYVAEELAAAGIAAHLGEPADTAALRGRKRHAKTDKTDARHLRSLLAEGRLPECWIPPAQVLEYRALLETYHDLRREHTAWVQRIHAVFFHQGAPPLGEGALRTEPGLEALRAAAAAHLSAAGQQQVATALDLLAATEAQLGPLRHQLREAARHLTGAKVLAERLYGVGPVTGLALTCWLAGKDRFSSSRKAVRFTGLDITVHSSDRKGPPGRLSRQGPPVLRWAVYEAGKTHARAAAPDHPYYAAVADRKNTKRAALSEARKIVRQACHILTELGDDALTAA

SEQ ID NO: 179255 - protein, 341 aa, unidentified
MSVIIGIDPHKLLHAACAIDERETELARLELRTGPRQMNDLLAWASPFECRSWAIESAGGLGYLLAQQLVARGEVVVDVPATLSSRVRTLGSGRSTKNDANDARAVAVAALRSPLLAQVRPEDHVSVLRLLAKAQLDTSRARSRACCRLHALVRELVAGGIRKEIVVCQAEQLLTDIVPTTAAQRQRLDLAYETLEEIRMLDERAKRSKARITQAVTASATTLTDIFGVGPIIAGLVIGYTGDIGRFPTPGHYAAYNGTAPVEFSSSGRTVHRLSRRGNRTLNHALHMIAVTQIRHPGSEGRCYYDRKIEAGKTSREAMRALKRQISDRVYRQLRADLRSK

SEQ ID NO: 179256 - protein, 360 aa, unidentified
MGEITRVGVDLAKRVIQVHAVDESGRVIVAKQLQRDGFTAWCAQLPPGCLVAMEACSGSHHWGRRLRAMGMEVKLIAPHFVSPYRLSGKTGKNDAADAAAICEAASRPSMRFVPVKSVEQQSMMALHRLREGYKEERTACINRIRGLLAEFGLVFAQRPEVLRAALAEVIEDAGNELGAVARMALQRAHLHWIELECHIAWCDERIARHVRSDEQAKAAAQLCGIGPVTASALVATVDDFKQFKNGRQFSAWMGLVPRQSSSGGKSVLGEITKRGDEYLRTLLIQGAKSAVFTAHRRSDRLSRWIVQLRERVGWQKAAVALANKHARILWSMLVNGQSFDPEHVPTKHLIRPTAALAAAG

SEQ ID NO: 179257 - protein, 410 aa, unidentified
MNSYQKRTRAQGADAIVGVDAGKSQHALVVRPRGGADSEPFMIDTTRAGFEEADGRIMALAPGACRERTLVGIEFAGNYGFTFAHYLDQRGYQVVNILGSSSKRWKEVVHIQRLKTDPKDAVTITDLTSQGHFVGFPFLQPIYADLRYLASHRRRLTVLRSASIARLKGILQVTWPEFERQFKHFNKKTPLALLDAYPSPGSLLGAPRAAVLRLMKRESRNHLGIEAYELLRRGAEGTIGLPGAEAVLKDLVPLELDLLRSYERQLADVEARMAEHVARTPEAEALLSIPKMGPITAAVFLGSISDPQAYDSSRQILRVAGLSLYEQSSGAKKGQQRISKRGRPQLRRAAYLFALRSVRSGGIYRAEYQRHLASNGGIGKKALVAVSRKALCMMFAVAKDRRLYTPEPPK

SEQ ID NO: 179258 - protein, 439 aa, unidentified
MSPCIPFPRVQCDVHKRTAVFTILLENGTVQTTHTVNVTRENLSEFATLHLSKQDRLAMEATTNTWAVAEVLRPHVQEIVIGNPLRTRAIAEAKTKTDKVDSKVLAELLRADYLPSVWQPDPDTQRLRRLTHRRAALVSDRTRLKNRLHSILHHCLIPLPHFDLFSQHGRTWLRELSLPELEAAARDSDLRLLELTEQEIAQLEKKLVKEAWQDEKVRLLMTIPGIDYTVAQTCLAAIGDVSRFASAKKLTSYLGLNPSTRQSATHCVHGPITKQGNAHARWLLVQAAQHLGLYRGPLGHTMRNIMRRKNRKVAVVACARKLTVLVWHVLTSGQPFRYAVPKTLEAKYARLRVRATGKRHRSGVAKGSPRSPQYGKGRTRAIPSLPQVLKQNGLPSGTPLPPGETKMLAKKKLGTFYTELQTASRVPKSTSGAANKSMD

SEQ ID NO: 179259 - protein, 365 aa, unidentified
MASVAHLAPIHLGLDVHRDTISVGILGPGEAVPAVDKIAHDEPSVRRLVGRLGDPRRLRACYEAGPTGFELARLLHSMGISCQVIAPSLIPKAPGDRVKTDKRDCRRLARLYRAGELVAIRIPTSTEEAVRDLCRTRGDMVEDRMRARHRLSKFLLRHGQVWRAGKAWTLAHERWLLTQRFTEPALQTTYDHYRAVLQARDVQLEAIEADLAVWQDRAPFAEAVARLGAYRGVTRLGALHLAAEVGDWRRFARASAFMGFCGLVPSEYSSGQVTHRGHITKAGNVHLRTQLIESAWAYQHRPSVGARLASRQQGLDPQVVARAWAAQLRLCGRFRRLAASKPSTNIAAAAIARELAGFLWAEMAA

SEQ ID NO: 179260 - protein, 508 aa, unidentified
MSLNDKETAVIVPPKDVVRNKLCGKAREKALARAQGRKRKKSAAPENKPGGRVRKSHRGGQAIPTTRSLNQLEQVNRNAAGIDLAATVHYVAVPPGRDAETNVRCFETFTADLEAIADWLTSCAVDTVAMESTGIYWIPLYELLEQRGFEVLLINPADLKKFRRKTDVSDCQWLQTLHTFGLLRGSFRPEEKIVTLRAYLRHRDTLVKCATDEVRRMQKALEQMNVKLTQVISDITGMTGMAIIRAILAGERDPQRLAALRHVGCKNDVQTIALALRGNWRQEHLFALRQALELYEVHLEKLEDVDGQIKAYLQTFEDRSEGQQLQPSRRKRALDPCLNSRDLMCKMTGVDLTEVDGIAGNAALQIVAEIGMDMSNWDTDKHFVSWLCLCPELHLSGGRRKSTKSHTQPSKNRAAAIFRMCAQSLLNANCALGAFGRRMRAKKGGAHAVTAIARKLAIIVYHMLKERRPYKDQGATYYEDKYRERVVANLRRRAKELGLELVPLALSE

SEQ ID NO: 179261 - protein, 348 aa, unidentified
MARNIGIDLHRNNFVAATRAENGRTYLRTWKLEDLGRYAETLRPDDRLAVEMTTNTRLFHDAVRPAVGEVQVVNTTQFKVITKSTKKTDKNDAQTLALYLEKDMLPTVRLKEAEQGQLAALVSTRDTLVKQRTSLKNKINNRFAMYGRPIQREMMSSEKGLAAVEAEAFDVMVKVEIGVLVAQIRALNASVAELERTIAREGAKLKGYDSLVSIKGIGTTGAVTLLTVIGDIDDFADAGKLAAYLGIVPRVSNSNETERSGRITKRGSKLGRTTLVQCGLIAMRYSGFLRSYYEGVKRRKNGGKAIIALARKFLDVIYRVLRNGWVFDDFPSFTLADGTCPLKNRRRT

SEQ ID NO: 179262 - protein, 370 aa, unidentified
MPQSTPLFVGLDVHKDSIAVAHAQGHSADPPVFVGAIGPRQADLDKLIRRLQGKTPDLVFAYEAGPSGYVLHRYLTGKGFPCQVVAPSLIPKKPGDKVKTDRRDAVELARLRRSGDLTGVYVPSVDDEAIRDLCRARDAARLTLTNAKLRLKGFLLRLGLHDVGRAAWNDAHRRYLAKVVCPTAAQQIVFQESVRAADEQVDRLARLEAELLERAPAWRLYPVVQALQALRGVQWLVAITVVAELGDLTRFDSPRQLAAFVGLIPSEYSSGSARRQGGITKAGNGRARRALIEGAWAYRHPAKVSPHIQKRIDALPKPLQDLGWRAQVRLCTRFRRLTARGKHPNVAVTAIARELIAFMWAIAKEVAVTR

SEQ ID NO: 179263 - protein, 326 aa, unidentified
MNPSSSSEAILGLDVAKASVQAELQLSAGSKVRFAFGNNTSGFNKLERVLAQHPAALVYAGLEATGSYSQALAGWLHAHGHRVSLLNPRRVKDYARSAGLRNKTDELDAAVIADFIRAHRERLPLWQPLAPQVRQLQELVRRRHQLEGLLLAERNRLEGTTATVRASIQRLVEVLSAEKASLEKAMAKQIRSHPELLRNHQLLCTIKGIGSLTATVLLAEMATPAQVQRARQAAALAGLCPRREQSGSSVRRHKGIGKEGSRYLRKALYMPALVAIKHNAPLRHFAQKLQGAGKSQMAIIGAIMRKLIHISFGVLKHQQPFNPSLA

SEQ ID NO: 179264 - protein, 399 aa, unidentified
MSDVCVQDMATGRRRTNQVRHRPEDLDEWARSLHRRYGGPIAVALELSKGPIVSVLQKYDLFVLFPIDPSMLANHRKTFTPSGAKDDPTDAELALKLLLTHSEHFKPLHPQSVEMRTLMILVEQRRKLMHDRVRITNRLRNALKQYYPQTLEWFDHIDTPLFCDFVRRWPSLPQARRARRTTLETFFREHNMNRKALLQRRIQAIKSAMPLTKDEAVIVPYRLQALTLVAQLEVALESIKTYDEEIAALVPQHPDHRLFTVLPGAGPSLTPRLMVAFGEQRERYACAAEVQMYGGIAPVTKRSGQSTWIHWRWQCPTFLRQTFVEWAAQTIKKSYWAGLYYHQQRAKGCSHQAAVRALAFKWIRILYRCWKTRTPYDEARYLKALQNRGSPLLKMAETA

SEQ ID NO: 179265 - protein, 339 aa, unidentified
MKLYVGLDVSLVRTAVCILNESGEIVAERQVDSEPDAIAGSLAKVQGIIERIGLEAGPMASWLFAGLSGQGLPVVCIEVRQMKAFAKASPVKTDKRDARLIAQAMRTGLFKATHVKTDESQRLRLLLRHRQAVMRRNKDLINTVRGTLKAFGIRTGGGKNTPYARRVREAVADPSLLTVTEPLLVAYEQGLAVLAELDRMVLAAAREDAVCRLLMTVPGVGAVTALAFRTGIDLPERFAKSRLVGAVLGLTPRVYASGESEHIGRIAKCGDGMTRWLLYEAANVMLTRVKGDNWLKSWALGVAQRRGMRKAKVALARRLAGVMHAMWISGQAFSLAKPL

SEQ ID NO: 179266 - protein, 417 aa, unidentified
MSWQKLQQKRAAIKPDTLVIGVDIGKYEHVVRALFPGGRFSSPLAISTDRSGFERLLDQVRHWQQESDCHEVTVGMESTGVYWMSLVYWLEERGIRVVQVSTLHVHQSKEMLDNSPAKTDGKDALLIADLVAQGKYLSFVLPRGVHAELRQLVALRDRLAGERTSRLVQLQVVASSLFPEFGRVYHDFAAKTARRVLRCFPTPAEVLKVTPERMARRVRSGGRVYIKAGQLAALRRLAVDSVGVVEGSGAATLALLDSLTELDRVEARLAKVEELLAELTAQVDEARYLMSFHGIGVVTAATILGETGGLGRYDSAAAVLKLAGLDLYEISSGIHKGQRRISKRGRSRLRRALYFAALHHTVPGTPLYDDYRRMVDRGVPKMKAVVALSCRLTRLLYALARDQRCYSAQPPQSLRVA

SEQ ID NO: 179267 - protein, 446 aa, unidentified
MPAKKKRSPSPPPRVVRPNAAGIDVGSEAHVVAVPADRDAEPVRTFGVFTADLRALADWLKQCAVTSVVLESTGVYWMSLCDFLEAQGFEVLIVDPRTLARNLKKKTDVSDAAWLQELHAFGMLKSCFRPDQEVRALRTLWRHRDHLVTEAAKLLQMMQKVLVQMNVYLHLAVADIAGVTGMRILRAIAQGQHDPQTLAAMRDANCKKTRAEIAKALEGTWDPAHLFELKQLLKAWDFYQGQLHRCDKEYDKAAGKMPDQTQGQALPEPEKRPNKHRNAPTAFASDALIFKMTGVRITEVDGLGANTVLTVLSETGPNLAAKFATEKHFAAWTTLAPRKHQSGKRTKFPAQTASRVAKAFRLAARALLNCKSVLGNFLRRLRARLGIGTALRATACKLAKLFYRLITKGEAYRRESTAVEEAKQRERQLKNLEAKARELGMRVFPA

SEQ ID NO: 179268 - protein, 351 aa, unidentified
MQRYIGLDVHAASTTFAVLGESGRRLGTHVVETHGQALVEQLKAIPGNKHVCLEEGTQSAWIYEILAPHAEEVIVAMVPESRGQKSDESDAFALAEKLRTGAIKKRVFKEVGQYQTLRELGRAHAMVVQDVVRVQNRIKSLYRSRGVAVAGKAVYSETGRQPALEKLPEATRGAAMTLYAQYDAVEEIRRQAEKALVTEAHRHPISRVLETCPGLGPIRVAQLIPIVVSPMRFRTKRQFWSYCGLGIVMRSSSDWVPKKDGGWVRAEVQKTRGLNLSHNHALKNIFKGAATTVINQLKTEPLHQDYQRLLAAGTKPNLAKLTLARKLAAIALSMWKSKEKYDSTKHRKQGS

SEQ ID NO: 179269 - protein, 343 aa, unidentified
MTIKVLGIDIAKNTFQLHGADDAGKAVLKKRLPRNRLSPYVANLHPCTIVMESCGGANYWARVFQRSGHTVKLISPQFVKPFVKTNKNDANDAEAIVEAASRPSMHFVPIKRPEQQDVQSIHRVRSRLVKNRTALINEIRGLCLEYGVIIAPGAARVKKSLCAVVADSGNGLTPSSRDCMQELYEELVDVEARLKKLDARNRQLCRQNDSCRRILSIPGVGELTATAIVAAVGDAQEFKNGRHMSAWLGLVPRQSSSGDKRVLLGISKRGDRYLRTLLIHGARAALSHYKTTDNDYGLWLDRKKTTLSFNKAAVALANKNARIIWSLLNSGEEFNYGVQTAAA

SEQ ID NO: 179270 - protein, 414 aa, unidentified
MEKQWNIVCGADIHKKFLIATILSRSGTKKTKRFGMTLNELLNFKNWVIENGCEQVAVESTGTYWTPIHAVLEGSVGFIVGNAYKIKHTPGNKNDLADADWIAELCLNGMIEPSRIFPKADRDIRRLTRIREGYVNDMTREKNRIHHALDSCGMKLSSVLSDIFGKTGQSILDGLLEGRNIDDILKGINLKRIKATAEEIKNAIKGSLDFTQILLIRGSLEQMGAIQKRIDELRKEIKERIAYRKEDLKVAMSIPGVGFTSASTLLAEIGDINDFKKPEQLAAWAGLVPSVYQSAGKLITGSITKHGSRHIRWILVQVARVIARGRNSKLKRFFLRVKAKKGSNVAVVALARKVLCILHHLLINKEMYKEDGINKKVKIDVGKEFSQQEMNLEEMITYIVRAGYEVRKGSEGGG

SEQ ID NO: 179271 - protein, 331 aa, unidentified
MFPVGIDVSKNTLDLCMLYDGIKGRIKTRNIQNNRHSVENILHWLRLQHCSPEDVHVVMEATGVYHEQLATELHDAGFRVSLANPHRSREFARGMGIMTKTDKVDAYMLACYAFLKKPHRWEPPAPEIRYLGALLRRRDVLLGDALREENRLEKYLSTDTPADIISSCRRMAQLLREEISNIERQIKAHIKASPALRRDYTLLTSIKSVGPQLGMHMLIVLRSHNFVSAEQAAAFLGVVPIEKRSGTSVRRRPRMSKIGPPQLRAKLYMSALCGKIYNKRMRNIYDEICLRGKPKMVAIGALMRKLVHWCYGVLKTGTVFNDEDLKPVLST

SEQ ID NO: 179272 - protein, 381 aa, unidentified
MITLGMDVHVRNSYLHVKDEAGDVMRHGRCRNTTMDLAKFLDPLEQVARQRGEPIYAVLESTTNSRAIQRLLTQYGEAAGIDLTAEVLDARKIRIIAESVCKCDRLDAKVLCELARSNLKLPVCYMPDDEEFALREHLRARNDLVRMRTMLKNRVHAVLHRRGILAPVATLFTKAGRAYLAQLSLETAGREILDRFLAMMDEIDRTITASTVSMRELMRSPRWAKPAALLQTMPGIGLITAMTILAELGNLDRFRSRAAVANYAGLVPICRSSNDKRYSGGITHRGSKHLRAALGEAAWSAMPRVPAYRAMFERIAQKKNKLVAITAVARRMLEDAFTMLRQDEAFRYVGLSVADTPQQVGTVTPAPAPSSDRKVASSVAG

SEQ ID NO: 179273 - protein, 366 aa, unidentified
MEKIYIGVDFHARQQTICYLKTETGELVTCELKHQDKERVRAFYQQFQVPVVVGLEASGYSPWFERLLEELGCEVWLGHATEIRRRARWRQKNDRRDAELILDLMLHQEFPRLQRPAPESREVLRMLRYRQKLIKLRTMSKNSLQAIALQSGLAKGRGLFTRAGQQQLSTAEMSPVMQWQREHWLQLLDPLNQQLLETMVWFKEQSKGDVGITRLRTHPGIGLLTSLCILHTLQPVSRFRNTRKVAAYAGFDPIERSSAERKCFLGISKAGSRLLRYLLVEAAQTAVRKDEDLKRFYKRLAERRGRPKAKVAAARKLLIRAYIMLRDEIDYAEFRRRAVAARLARRGQGPTNVPEVLIGQPASPAP

SEQ ID NO: 179274 - protein, 338 aa, unidentified
MGEVSTIGLDIAKSVFQVHGVDVAGLVVIRKRIGRAKMLEYFGGLPRCLVGIEACPSAHHWGRELQALGHQVRLVPPSYVKAYLKRNKNDANDAAAICEAVTRPSMRFVPIKTKEQQAVLMLHRTRQLLVRQRTMMSNALRGHLAELGIVSAKGRNGTAELLRIIADGRVSPAVCSILKVLARQYGAIGTEIASIDKNIMVLHRACEASRRLGEIPGIGPIGATALVAEIGDWNAFGSGRSLAAWMPKQCSTGGKERLGRITKQGNRYLRWLLVVGAMAVIRYARKHGTGRRPWLGRLMERRPTKVAAVALANKIARMAWAIMVRNERYKEPKLLLAA

SEQ ID NO: 179275 - protein, 360 aa, unidentified
MFRERTSVGLDVHARSVVAAAIDGQTGEVFKARLTPSHAEVLEWIGKLPGPCAVVYESGPTGFGLARALTAAGWRCEVAASSKLHRPAGDRVKTDARDALHLARLLRLDEVVPVRIPSPAEEAARDLVRAREASRQDLMRARHRLSKLLLRHGIVYSGGKAWTELHDRWLHQQRFDSMPTQAAFDDAYETVVLAAARRTRLDEKITALADDSEFTPVTRRLACLRGISTLTGFALAVEIGDWQRFTGASIGAYLGLVPSEHSSGESRVQGAITKTGNTHVRRLLVEAAWHHRTTYRPGVVLQRRWDQAPAAARARGHAGNQRLHARWVNLNLRKKRPVIANVAVARELAGWCCSLAVLPD

SEQ ID NO: 179276 - protein, 355 aa, unidentified
MNQEKYIGMDVHDASISAAEMNAEGKVLMECVLETKAATILEFIQGLRGTLAVTFEEGILAAWLHDLLQPHVSRLVVSDPRKNALLRDGNQNDRADARNLAELLRTNHVHAVYHGNHGTRTLKELGRSYLALTKDSTRVMNRIKSVYRSWAIPCTGTSLYSRRHRAEWLAKLVEPGVRMRAEHLYQELDGLKPLRQAARRELLREASKHTAVKRLRQIPVIGPIRSALLVAPLQTPHRFRTKRQLWAYSGFAVQTYDSGEFRFVRGKRQRNRERITVRGLNRNHNPDVKNLLKGAAISAIGRPGPLQDFYAALVEKGMRPSMARLTLTRKIAAIALIMWKKGVSFDPKQLPRQAA

SEQ ID NO: 179277 - protein, 328 aa, unidentified
MFYLGMDIAKAKLDCCLLLNEAGDKRKSKVIPNTKAGVSALLEWAAKQGVSAVQLHVVMDATGVYHEQAALALVDAGVMVSIINPAQVKDFGRSLGIRTKTDGMDSVVLAKYGALLKPAAWQPPSVEVRALQALLARRNAVADDLRRELNRQEKSEAIETPALIVQSIAQSIAFLEAELKRLQQAIDDHIDRHPGLKRDMTLLTSIPAVGERVGNNLLAIMHGNRFESAEQVAAYLGLVPIERQSGSTVLGRARLSKTGPARVRAVLYMAAVVATQYNPHVKALYERLLARGKSKMSAIGAAMRKLVHLCFGVIKTQLPYHPNYPKIA

SEQ ID NO: 179278 - protein, 351 aa, unidentified
MMIIGIDYHPSFQTMAFLMEETGECGEQELNHSDGEAERFYRELKLRGVSVRVGMEATGYSRWFERLLAELRFEVWIGDAAEIKRLRVRKQKTDREDARLMRKLLLENRFPRIWVPSPENRDLRQLLWHRHRLVQMRTRIMNQLQAVAMNEGYRWKKKLFSAQGRALLEKLSLAPWASRRRKELLELLDQLDPKIAELTAAVEQEAQQRPEVLRLMTHPGVGPITGLAYVQVIGTPDRFPCGKQIGSYTGLIPCEDSSAGKQRLGHLSKQGNALLRYLLGEAAQAAARCNPDWRRRYVHLAMRRHKNIAKAAMARKLAVRLYWMWRNGWDYSQLVEFGSHAGKLATGHGVK

SEQ ID NO: 179279 - protein, 371 aa, unidentified
MADYREAFVGIDVAKLKNAIAVAESGREGEVRYFGEVDASYASMRRIIQRIAAEFDRVHFCYEAGPTGYGLHRLIQSLGHECMVVAPSLIPRKPGDRVKTNRRDALALARLLRAGELTAVWVPDEGHEAMRDLVRARAAAVETLRVHRQQISAFMLKHGRIYPRKKGWTMRYLCWLQEQQFDHPAHQIALQEMVEAVRVSKERVERLEKVIEEFVPNWSLAPVVRALQTLRGVDLIVAVTFATEVGDVSRFESPRQLMGYLGLVPGERSTGETVRRGAITKAGNGRVRHMLVESAWTYRHPPKVGARKLYRLEQAPPKVREIAWKAQSRLTARYRMLTGRGKRTTVVCTAIARELTGFMWAVAREAQAIRL

SEQ ID NO: 179280 - protein, 338 aa, unidentified
MGYKRISIDTSKHVFAIHGVDEAERPTLRLELRRSQIEAFFARLAPTEVALEACGGAHHWGRQLSAMGHQVKLIPPQYVKPFIKRNKNDRHDAEAIGEAASRPSMPTVAVKTVDEQAATMIAKHRELLVGQRTAAINALRGHAAEFGVIAAKGTAKIEALLVVLTSEPGIPAAAKAMFAAMGEHIADLDAKLTAAERQLLEQHKRNPVSQRLAAIPGVGPITAITMALSVNPANFESGRHFAAWLGLTPRERSTGGKQRLGRISKAGNERLRQLLVVGATAVIRVARPGRPSSSVWLLGLLARKPKKLAAVALAYKVARIIWAMMARGEAYRHQPITA

SEQ ID NO: 179281 - protein, 410 aa, unidentified
MEVLHPRCCGLDVHKETVVACVRLVIDGKLVKEVRTFSTTTAGLIELSEWLTETKCTHVAMEATGVYWKPVWHILADDGFQLVLANAAHIKNVPGRKSDVKDSDWISDLLAHGLIRPSFVPDGPTQEMRTFLRTRKQFVHEKGSHILRIQKTLEDANIKLDSVITDIIGVSGRKMIEALIAGERDPAKLASLADPRLKASQQTLRQVLRGRVTAQHRFLLRLHLDQINALDAAIARIDREVEASIAPFRTAVEQVSTVPGIKSLAAQTILSEIGIDMSRFPSSGHLISWACICPRSDESAGKRRSTRIRKGSPWLKTTLVQCAWAATRKKGSYLQAQYYRLRARRGPKKAIVAVAASILTAIYHMLKDGTMYQDLGPNHFDARAKERQKNRLIKRLADLGYAVELAPLPN

SEQ ID NO: 179282 - protein, 386 aa, unidentified
MHDSTDLPFPERTAIRGDSATLFVSLELSRSTWVATSLAPGSKKMSKHTLVGGNGRELLDLLARLKTRAEQRIAAPVKVVAIHEVGLDGFWIHRLLDANGVESHVVDPASIAVPRRHRRAKTDAIDGETLLRTLMAWQRGEPRVCAMTVPPSPSEEDCRRVSRERATLLRERIQHTNRIRGLLFGQGITNYNPLHKNRRECLEELRTGDGRSLPTHVKAEILREIDRLELVLRQIGEVEAERDEILRPAEASSPAALLMRLKGIGAEFATVLYLEGLFRHFENRRQLAAYAGLAPSPWKSGSIDHEQGISKAGNPRLRTTMVELAWMWVRYQPDSALSCWFRQRVGSERGRTRRISIVALARKLLIALWRYVTHGEIPAGAVMKPV

SEQ ID NO: 179283 - protein, 409 aa, unidentified
MSFKILKNNCCGLDVHKTWIYACIGITDSFKRTEYKQARFSSFTKGLQELCLWLAKYNCIDVCMESTGKYWIPVFNVLEKNNIFVTLSHPKYTKPQKGNKTDRKDAKWICDLYMCGMVKPSFIPPADIRQLRDLVRYRFKLTCMITGEKNRAHNCLTVSNLKLDDVFSDIFGKSSRSITEQILQHPGETFDVSPFVDHRCKTPIEEIQAAVDGAISNEQTVKLRQCLNHIDELEMHKAEIEREIFRLSQKYESVLDLIRTIPGFDKNPLTAIQVLSEIGADMSVFPTAKNLVSWAGCCPRNDQSSRKIKSTRISRAGSYFKPVLVQVANALIKSKKHPEFTTRYRRIKARRGHKKAIIAICRMILTAIWHILTDLKPYTPEGFLESRPVNKEKVHTDSDFNKVVLCYTQ

SEQ ID NO: 179284 - protein, 349 aa, unidentified
MKIIGCDFHPSYQQIAVLDSVTGEMVEKALSHERKEEVRAFYAELEGPVRVGIEASGPSQWFERMLTELGHEVWIGDAAKIRASCERKQKTDRRDAELLLKLLAEDRFPRIWVPTAAERDDRQLLLHRHKLVRMRTQVKNQLQALALNQGVQQKRKLWSEAGRKQLESLPLLPWASRRRAELLQLLDQLEVPIAALDRAVAEQASARPAARRLMTHPGVGPVTALAFALTMGPAERFQRGKQVASYLGLIPSEHSSGGRKQRLGHISKQGSPFLRGLLVEAAQSAVRHEPEMRRAYQRLAQRKCRALAKVAMARKLAVRLYWMLRLQVNYAQLIQGSHAGQPGTFCGRG

SEQ ID NO: 179285 - protein, 316 aa, unidentified
MKEPTVFVGIDVSKKALDIAVRPSGIHQRVANDAEGIGEILELVRGPDALVVLEPTGGYELELVCALVEAKTAVAVVNARQIRDFAKSRGKLAKTDRIDAEIIACFAEANRPEPRDLPDEQTRTLEAFVIRRRQLVDARAAEQTRIKIAPKVIRPNIQSMIDFLSKQIDDIDKEIKISIESNDQWRAKDDLLQSTKGVGRVVSSTLMALLPELGTLNRKEIAALVGVAPFNNDSGAKRGRRTIWGGRAAVRAVLYMATVVSTTHNPAISDFYKRLLAKGKGVKVALVACMRKLLTILNAMVRDGQRWNPSLATKIA

SEQ ID NO: 179286 - protein, 415 aa, unidentified
MEGLSPLHRRVAGIDVHRMLHVVTVLIEHPDGSISKHCREFGGFKRDCRALATWLAELQVQLVVMESTGIYWKSVYAHLENAGITAWVVNAHFIKHVPGRKTDMLDSEWLAVLARFGLVRGSFIPPKDLRELRLVSRYRRKLNANCASQINRLHKMLDDAGIKLGAVVADIHGVSARAMVRGLIEGQPLAVLLSHARGALKRKTEELTASLDGELSERHLFVLRHLSDSIDSMQRQLADIDAYLLRAMQPYAWAHALLQTIPGIDQIAAALILIEIGDDMGRFGSPARLACWAALSPGNQESAGKRRSGRTRHGNNVIRYILCECANAARMTKSTLASKFKSLVVRKSHKKAIVALAHKMIRLIYILLSRRQPYLDQSIDYAAISAKKNAPRWIKQLRAIGKWPSHNPAAASAAH

SEQ ID NO: 179287 - protein, 377 aa, unidentified
MSKVRWIGLDVHADTIAVAVAEANGTVRSLGVIPNRPESLRKLVKRLGPAEQLRTCYEAGPTGYVVYWQLTALGVRCDVVAPTLVPVKAGDRVKTDRRDALKLARSYRAGDLTPVWVPDAAHEALRDLVRGREAAKRDQLRARHRLSKFLLRHGWRPPVGTKAWTQSYLAWVKQAVHFAHAAQEATLLDYVQEVDHVAERVARLERAITEAVALAPPAMRAVIAALQALRGVALVSAVTIVAEVGTLSRFTRPPQLMGYGGLGPREASSGARTWRGGITKTGNAHLRRIVVEAAWAYRHRPAVIGALRRRHAGLSEPVKAIAWKAQHRLHGRFRKLLGRGKCPQQAATAVGRELLGFIWAIGVAVEAEPRPARAVAA

SEQ ID NO: 179288 - protein, 397 aa, unidentified
MIAVGIDISKAKSTVAVINSDGTILASPFTMAHTRPEMEAFVTYLKGLGEPTTILMEYTGHYHYPVLKKLQDEGFPVCIVNPYQMKKYGDVEIHKAKTDKKDALRIATYALEKSYKLVPYSSMEQKYEDLKFLSRQYNQRISYVTKLKVQLISLLDQTMPGITKILPLNSRNPEKCALLLFIKRFKSFDEIQRIGKARFLASYDVLAKKASERSASSKGLSIYELAADSITTRGEDPYIWLSQNQCVDLLSATQNAADDIISQMRNIAETIPEYKILRAMHGVGDRLGPIILAEIGDIRRFHSGKALNSYAGNDAPPYQSGQFESRNRHISKRGSSALRKACYEVMQALKLTKPQDDPVYLFMLKKEQEGKPFNVAKMAGVNKFLRIYYARAMELYK

SEQ ID NO: 179289 - protein, 332 aa, unidentified
MYTFFVGCDVSKATLDVAYIVEGKSVYFGQFANDHAGFIHMIDELSLVTTEPTDSWFILFENTGLYSKALLEWLISYEIPCREEGPILIAKSARMKRGKSDRLDSEVICKYLYQFRDVILPSRLPNPLIVKLKHLLSRRDFLTRQIRSVRASTNKKSMVLEPVIFEFMHDQDAQVISILKKQISDTDALIAETIKQNPQMDKNNQLIQTVIGIGPVIAAYMIAFTDNFSSFSRARKFASYCGTAPILHYQSGTNKGRYKVSKKANKKIKSLLTMGARSARVHDPEIRLYFDRKIDQGKKSSVVINNVKNKLIQRAFATVRRQSPYVKMMNYA

SEQ ID NO: 179290 - protein, 341 aa, unidentified
MKISTVGLDLAKNVFHVVGFDQDGKQVKKLMLRRHQVAEFFVNLPTCTVAMEACAGCHYWARKLMEMGHEVKVIPPQYVKPYLRGNKNDYNDACAIAEAATRPTMPNVAVKTVQQQEMQALHRLRSRMVKERTALGNSLRGLLAEFGLIIPQGVSALRRGIPAILEDADNGLSDSFRSVVARSYEHFVALDEQIDFYTQQLSQLSRSDEACVRLQTIPGFGPIVASAFRSAVGDGRDYKRGRDVSASLGLVPRQHSSGGKQNLLGISERGDRYLRSLLVHGARAVVTYAAGKDDPLSRWINRIRLERGANKAAVALANKMARIGWAILRNGSRYQSSQAAS

SEQ ID NO: 179291 - protein, 326 aa, unidentified
MQSILGIDVSKDKLDLILMVNDKRYHRVISNNSKGFQVMDKWLKSYHAEDLHACLEATGQYGESVAEWLYSQGYQVSVVNPARIKRYGESKLHRNKTDKADADLIAEFCLKEKPDLWKPLDPDVKHLRALIRRLQALKDNLQQEQNRKDSGELDAWVSNDLDTHINFLQERIEATKKEIKELSDQNPGLKSQQKLLTSIPGIGDLTANTLLAEVGDFSAFENAPQLAAYAGLNPRAHHSGSSVYKKTRISKQGRSEIRRCLYMPAVVAIFHNPVIQALSERMTKTNHQKMEIIVAAMRKLLHLAYGVLKSQLPFDPDYGAQFNFSS

SEQ ID NO: 179292 - protein, 455 aa, unidentified
MSNSKRHTARSPKVPKLKVRNGAAAGLDIGADEIWACVPAEGDAQPVRAFGTFTPDLVALADWLAQCQVTRVALESTGVYWIPIYEVLEARGFEVAVVNARHLTHVPGRKSDVQDCQWLQQLHSYGLLTASFRPAEELRGLRAYLRQRAMLLDNRAAHIQHMQKALQQMNVQLTQVVSDITGTTGLRILRAIVAGERDPQTLAQLRHERCHASAATIAKALSGHYRAEHVFALKQALALYDFYTTQVQECDTAIEQHYAVIKPVPDAPPPLGPNPKPNSHAKNAPDCDVRGKLYRILGVDLTAVAGLEASSAQILVSEIGTDMSKWPTEKHFASWLGLAPHNDISGGKVLRSKPLKGNRRAAQVLRLAAQTLGRTQTALGRYYRRLRTRKGPAAAITATAHKLARIVYHVLKHRTPYQPQSWEAYDEHLRQRTLRHLKRTAARLGFTLLPQPVSA

SEQ ID NO: 179293 - protein, 319 aa, unidentified
MDNLSHGRVIGIDVSRDWLDLYCLPDGHRGRAPNTPAGHAVVVALARDRDAIVCFESTGGQEWQLWAALEVEGVTARQVPPAQVKAFAQSCGTRAKTDRIDAELIARFFAFRPEAGRSLPAEKLRLLRALTSKRAQLVEMRKRLLAQIRAHQKLGTAAMLEDVDTELKQRIDSLIKELEDRISQAIASDERLSETAGVLRSIPGIGPVASTMLIAEMPEIGTITGEQAAALTGLAPVAHDSGTLRGKRAIAGGRRALRHVMFQAALVAAHHNPSLRSFADRLRKAGKPHKVIITAVARKLVTIANALCKNRQKWAVPTT

SEQ ID NO: 179294 - protein, 356 aa, unidentified
MVSRSCLHFSGIVIGVDTHKDEHLAVAVDHLGVHIGQRRLPTTDMGYAGLERWASRLGKVGAFGVEGTGSYGAGLARFLTDRGHRVIEVSRPDRSARRKLGKSDPIDAEMAARAVLAGVVQDPPKSGVDKVEMIRMLKSTKDSAIKARTQAINQMQALVVTAPDELRTELRGLTTARLVARCAGWRHGHLGTPTAAAKYVLWSLAQRHTQLTKEIDVLDAELARLTAAFAPALMKSFGIGPDTAAALLVTAGSNPERLKSEAAFAALCGVSPIPASSGKSNRHRLNRGGDRQANAALHRVVVVRLRYDDRTKAYLQRRIEEGLTKTEVIRCLKRYVAREVFAILHYLGKQNTAQGT

SEQ ID NO: 179295 - protein, 355 aa, unidentified
MNDAKYIGMDVHTATISAAVRDSSGNLVMEATLETKSATILEFVHGLRGSLSVSFEEGTCASWLHDLLKPHVTEVLVCDPRKNALLRVGNKNDREDARKLSELLFLNKLHPVYHGETGIRTLKELARSYLTITRDLTRVMNRLKAIYRGWGIACAGRQVYAPRYRAEWLAKITEAGVRRRAEIYYQQFDALAALRQEVRRELLAESRKHPAMRLLRQIPSIGPIRAALLIALMQTPHRFRTKRQLWAYCGLALRTYDSGEYRFVGGQLKRSKKAVTIRGLNKNHNHDLKNIFKGAATRAAATAGPLQNFYEARIANGMKPPMARLTLARKIAAITLLVWKKGVRFDAEQLKQQAA

SEQ ID NO: 179296 - protein, 341 aa, unidentified
MKNLFIGIDFSKEKVDVAIIFADGLTETAARVFNEFKTTVSGYKQLVKWVEQNSYGIDPSLWLFCGENTGGYSNGLCKFLYGRGYDMWLENAKSIKDASGLRRLKSDRADASMIAEYAMRNHDKAVMYKPLNESLEQLRELFLFRQTLVRYRCSFQVRREEKRLTMDKSPVKTMISQIGRHMVTTLEKEIEKVNKRIADLIKSDDELTEVFTIVTSVPGIGTQNAVCLMVYTDNFRRFNYDSRKIACYYGIAPFGKDSGTSVHSDPHVHYMANRQIKAMLTQAALAAVNYNPVIARYYKRLVERGKKKQLALNNVKNKLVHLVSAMVRNRQLFSPEYKISA

SEQ ID NO: 179297 - protein, 371 aa, unidentified
MKGTRFVGLDVHAASIAVAVAEPSGEVHALGTIPHEPEAVRKLVRKLGPLDTVRVCYEAGPCGYALYWQLTQLGVACVVVAPTLVPVKAGDRVKTDRRDAEKLARSFRSGDLTPVWVPDAAHEALRDLIRAREAAKRDQLRARHRLQKFLLRHGRRPPTGVTPWTQRFRQWLGGLVFDHPAQAVTHLDYLTEIDHAAERLVRLERAIDDAVAATPAPMRALIEGLQALRGVARVAAATIVAEVGPLSRFDHPRRLMGYSGAVPSEHSSGPRTRRGHITKTGNAHLRRVIIEAAWAYQHPPRVGRTLRHRQQPLSAAITAIAWKAQHRLHRRYRRLTARGKPKQHVITAVGRELLGFIWAIGIQVERERAVA

SEQ ID NO: 179298 - protein, 320 aa, unidentified
METIVASPGIGIDVSKRELVTCIRRSSGVTEPPATFANSSIGLKKFVVHLVSCDVEKTTPIILESTGPYHWPAARYLADHGYLSKVVNPLHTKHIARYSIRKRKTDKIDAAQLAFLASQQYGYTFVETKEIAKKKALIRHYWKLKMTAGNLFIHERYLKQHRGITAASVTKYMLERCKTLKARIVKEYGTGNDVKYLDSIPGITPFLAATILAELEPLDRFARVEQIVAFAGLDPAVSQTGGKPGIHGKLTKRGSRVLRHALYMAAFGSFRGAWRPLYDSYRNRGLKHTEVLCILSRKILRTAVALLKKRRVFDPNYIEL

SEQ ID NO: 179299 - protein, 353 aa, unidentified
MPTNKTTDFTGQSFYVGLDVHKKSWSVTVRTLGLEVAHFSQAADPDHLVRYLHKRYPGGDFISAYEAGFCGTSAHCSLRRAGIQNIIINPADLPQTDKQKKNKNDHNDSRATARYLEAGILRSIHIMTDEQQELRALFRLREAKVGDVTRANNRLRSFMHYFSIRFPAHLQDRQYLSNAHLDWLRTVNSKTQQGQDTLFQYIEDLVYHRKQLLGLTKKLKAAVLNKYPQYYASGLSVPGVGSITAIGLLTEMGEPDRFDDPDQYCSWLGLVPAERSSGDTVYSVVTQTRCNKHLRPMLIEAAWVAIRKCPFLLAYYKKHVGKDSKKAIIKVPAKLALIILAVMRNKTTYNPAK

SEQ ID NO: 179300 - protein, 345 aa, unidentified
MKQYAGIDVSLEYSSVCVVDADGRIVREAKVLSEPDALIAWFAEHGVAMERIGLEAGPLSQWLHAGMTKAGLTVEQIETRHVRAAFKTMPVKTDKKDARGIAQLMRLGWFRPVHCKSLPAQEVRALLTARKLIQGKLHDIEMSMRGILRGFGLKVGPTTRRTYALRIRELIEGHPTLEAIAASLLKVRDALADEFAGFERKLRGMARQDDKARRLMTTPGVGVLVALTFVSAVDAPERFRSSRAVGPHFGLAPKKYQSGETDYSGSISKIGDVGVRTALYEAANVILTRPVKGSDLKTWALAVARRAGPRKARVALARKLAVVLHHMLRDGTKFIPHKPMRAMAA

SEQ ID NO: 179301 - protein, 344 aa, unidentified
MEHFAGLDVSVNETSVCIVDETGKIVREVKVASEPGALLTVLNSGAHHFKRIGLEAGPLSQWLYSALGEANLPVICVETRHMRAVLQAQINKTDRNDARGIAQMMRAGLYRPVHVKTLRSQKLRMLLTHRKLLQSKAIAIENDLRGTLRNFGLKVGIVGKLRFETRIRELVENLPDLAILVEPLLVVRRVLREQIAVLHRRLLVIVRDDDVCRRLMTVPGVGPVVALTFRATLDVPARFRNSRAVGAALGLTPCKYQSGESDRTGGISRCGDEMMRVMLYEAAQVMLVRSTRWSWLKAWAMQIARRRGMKKAIVALARRLAVILHRIWVDGTEFSWSRQEAAAA

SEQ ID NO: 179302 - protein, 416 aa, unidentified
MDTMYERCCGLDIHKKTIEACFRSGKKKTHMSFGTTSAELRKLTMWLVENDCQSVAMESTGSYWKPIFNILELSGTDMEIIVVNARHMKNVPGRKTDVNDAEWIAELLQYGLLRPSFIPDREQRELRELSRYRKSLVGERAREINRLQKMLEGGNIKLTSVVSEVTGYSSRRLLDRLLRNDEPMTEEVISELVHTSLVGKSKELEIALDGLLSELQKELLIKVLDHIDDMSRRIADLDDFCRKQMDRYEDALDKLDEIPGIARRTAETILIETGLDMSRFPTAKHFARWAGLAPGNNESAGKRSSGRTTKGNPTLKSTLIQSAKVAARKKDSFFKARYQKIAARRGANRASVAVAHSMLIAIYHILKSGERFKDLGEDCYNQFNKEKKKKYYLKKLTKLGVNLKEATLSISIQTAT

SEQ ID NO: 179303 - protein, 387 aa, unidentified
MYYIGIDISKFKHDCAVIDGIGNVIAPSWSFNNDCEGFSLFKALLNSLDGEKRIGLESTGHYGMNLKLFLESNNFSFMEFNPLLINRFVKSKSLRKTKSDSIDCMMIAHYLMTVEYKPYPSSFYHTEKLKSLTRFRDSLIRLRSRQLVELTNILDKVFPEFKPFFGSRFSVTALYILSNYSSPEKIANMNSKSYEALRKLSRGRFSTVDFAKLKQLAKNTIGTTEDYLLLQMQIVLDIYRQLDSKVDETEVSIKECVSDMNPPMLSVPGIGIESAAVILAEFGDFSKFKNASQMLSFAGLEPGYFQSGTSETTGKMVKHGSSYLRYALMNCAQTVVNYEPTFAMFYSKKRAEGKPHRVALSHVVKKLLRVIYTLQTKNIAYDADFVR

SEQ ID NO: 179304 - protein, 310 aa, unidentified
MEQIFVGIDVAKDRLDVHVRPSGEAFAVARDGEGLAALVDRLRGVCPRLIVSEATGGFEQVVAGALGAVGLPIVVVNPRQIRDFARALGRLAKTDRIDAETIAIFAERVQPELRPLPDAQARLLGELVARRRQVIEMIVAEGNRARLLESRRLKKRIERHRSALQDELSKIDSEIDETIRGTPIWRENENLLKTVPGVGNGLARTLLAELPELGKLGRKQIAALVGVAPFNRDSGTLRGKRTVWGGRAPIRASLYMAALVASRFNPVIARFYRRLLAAGKPKKLALTACMRKLLVILNAIIRDQKPWQPA

SEQ ID NO: 179305 - protein, 457 aa, unidentified
MARKHKTKQSSRAVRPGAIPVLNRNAAGLDIGANEIYAAVPADRDESPVRCFGTFTGELTRLANWLRQCGIDTVAMEATGVYWIPPYQILESAGLEVCLVNARYFQNVPGRKTDVSDCQWLQRLHSAGLLRGSFRPAQEVCVLRSLARHRDNLIHLASTHVLHMQKALDQMNIQVHHVLSDITGLSGLAILDAIVAGERNPRTLAGLRDVRVKAAGETIVQALTGDYRPEHVFTLKQSLAAYRYYQGLVAACDLEIEQQLKLFDARVDVEARPLAPPKVRRRKLFSNEPGFDLRSHLYRIFGVDLTAIPGISVLTAHTILSEIGPDISKFRSAAAFASWLGLCPHNDISGGKVLSVKTRRVKNRVAVAFRMAANALFRSQSPLGDFFRRMRAKLGAPQAITAAAHKLARIVYRLLSTGEAYDQTIPYRNQQQLRARAEARLQAQAKALGFSVVTATT

SEQ ID NO: 179306 - protein, 332 aa, unidentified
MSIVSTVGIDLAKNVFSVHAVDAQGTTLVRRSLSRAKLSELVAQLPPCLIGMEACSGAHEWARRFTAFGHTVKLMAPKFVTPYRKSGKNDGNDAEAICEAVARPNMRFVPVKTVEQQSDLSLHRVRQGFVEERTATFNRLRGLLAEFGHVLPVRTSELCRRVPQLLDKLPSRLAGCVRDLLEHAEQLQAKALEYEREIKAHVHSNALACRAQTRLGIGPITASALVATVGNGRDFKNGRQFAAWLGLVPRQHSTGGKTRLGHITKRGDSYLRTLLVMGARAVLQRAATLTDPLSRWALAVRERRGYHRACVAIAAKNARVAWALLSKEPMPA

SEQ ID NO: 179307 - protein, 412 aa, unidentified
MDVYCGIDWAEDHHDIALVDRDGQLLARRRISDDAAGLAGLLALLAEHGDSGDERIPAAIETPRGLLVACLRATGRQVYPINPMAVARYRDRHSIAGKKSDHGDAVVLANVLRTDLHAHRPLPADTELAQAIAVLARAQQDAVWDRTTAHNKLRSHLREYYPAFLAAFAEARGGILRPEARTVLAAAPTPADAATLTLTQLRGLLRKAGRIRGIDAEATRLREAFRAGQMRQLPLVEAAMGRQALALLGQLNAACAAADDLERAATESFSLHPDAGIITSFPGLGALTGARVLAEIGDDRSRFQDAKGLKAYAGAAPITRASGKTKSVTRRHIKNNRLNAAGYTWAFSALTASPGARAHYDRRRADGDRHAGAQRNLFGRLLGCLWHCLTTSCEYDEATAFPTTPEKLPKAA

SEQ ID NO: 179308 - protein, 336 aa, unidentified
MEREYVGIDLHRRRSVIVRMSAAGEKLSCVHLANDPVALSLEVAKAGPDPDVVIEACYGWYWLVDLLQAQGAKVHLAHPSGLGWEGRRVKNDEIDATDLADRLRMGRLPEAWIAPPAVRELRELVRYRAKVVALRSGLKAQVHAVMAKQGILPGLDDMFGPGGQRLLDEMPFDRVYRLRVESLRDMIDRYDHEVAALEREIHTWLRDDKGYWAIQAIDGVGKTMAAIFVAEIGDVSRFATPDKLCCWAGLTPRHRESDTKVSRGAITKMGSTLVRWAAVEAVARYRGGEPIRDAYERIAARRGRRVARVAAARRLLTLVYFGLRDGEIRCLAERAG

SEQ ID NO: 179309 - protein, 359 aa, unidentified
MFTERTSVGLDVHARSVVATAIDTTTGELFKERLIPSNEIVLEWLARLPGPVAVTYEAGPTGFGLARALAAASIRCEVAAPSKLARPAGDRVKTDARDALQLAKLLRNDDITSVRVPTITQEAARDLVRAREDVRGDLMRARHRVSKLLLRHGHVYYGGKTWSAKHHAWLHRIRFNELGTHCAYEADLEAIEFAVARRDRLDKLIAQLAADSEFTDVTRRLCCLRGISTLTGFALAVEVGDWQRFNGSSLGAYLGLVPSEHSSGQSRRQGSITKTGNSHARRLLIEAAWHHKPRYTVGPVLRARWEQAPEAARGRAHVGNTRLNQRWASYTRRHKKHTIANTAIARELAGWCWSLAVLE

SEQ ID NO: 179310 - protein, 377 aa, unidentified
MKNVRFVGLDVHAETIAVAVAEAEGEVRSLGVIPNRAESVGRLIRKLGKPEQLRVCYEAGPTGYVLYWQLTQLGVKCEVVAPTLVPVKAGDRVKTDRRDAAKLARSYRAGDLTAVWVPDAAHEALRDLVRARWAAKRDQLRARHRLSKFLLRHGRRAPEGVNAWTDKHLQWIKSQVHFAQRAQEITLGDYLHEVDHVAERIARLERSIDAAIESLPVKMRAVIEALQSLRGIAQLSAVSIMAEVGEVSRFEHPRQLMGYSGAVSREHSSGERIRRGAISKTGNAHLRRIVIEAAWAYRHRPAVGKTLAARQRHSSAAVTELAWKAQQRLHQRYVRLMGRGKSKQQTITAVGRELLGFIWAIGTHVERDVKVPLRQAA

SEQ ID NO: 179311 - protein, 354 aa, unidentified
MSQQTNCAIAVIGIDIGKNSFHVVGHDARGAIMLRQKWSRGQVEARLANLPPCLIGMEACVGAHHLSRKLASLGHDARLMPAKYVRPYSKGQKNDFNDAEAIAEAVQRPTMKFVATKTAEQLDLQALHRVRERLVSQRTGIINQIRAFMLERGIAVRQGIGYLRTELPTILATRTDALSPRMLRVIEELAGDWRHLDQRIDGLSGEIEALARQDPACSRLMTVPGIGPIISSAMVAAIGTGEVFSKGRDFGAWLGLVPKQISTGDRTILGKISRRGNRYLRVLFVQAAWVMLVRIKNWERYGLKSWIEAAKRRLHHNVLAIALANKLARIAWAVLHKGRAFECVKTNEAVSQSA

SEQ ID NO: 179312 - protein, 346 aa, unidentified
MLYAGLDLSRKRIDYHLLDEHGTSVELGATAPDLDGLHAFAERIAVHRQPVRAAIESMNGARFVHDQLELAGWEVEIADARKVKGLAPLACKTDRIDAWVLAELARRELVPALWLPEPAVRGERERARFRLFLVQRRSSPKQRVHQTLVSFGHPCPVADLFGAGGRRLLERLELPEPWRGTLAASLRLIDDCEREISACERELRSLGADHRYVPPLTTCPGIAWVLAYTIASEIGDIARFASPAKLVSYSGLCPRVYQSGASDRRGPLSKLGPRYLRWALVEAALHASRHPAYTARYQRTRARLGKQRGARVAQVDVARRLAEAIWQMLTHDQPFAPAGATSFLAA

SEQ ID NO: 179313 - protein, 408 aa, unidentified
METVIKRCCGLDVHQGSVVACIIITERRKPRREIRTFGTMTKDLEALRDWLKAEGITHVAKESTGVYWRPVHNLLHSSFDLIVANAHHIKSVPGRKTDVKDAEWIANLLRHGLINASYVPTPEIAELRDLTRYRRKLVSTASAERNRTLKLLETANIKLASVAADVFGVSGFAMLRALASGATMAKEMADLARGRMRRKLAPLAAALDGRVTDHHRFLLTVALGRLDAIERDIALLDERIAAKVAPYDRQIALLMQIPGVDRLSAIAVIAEVGIDLSHWATARKLAAWAGLCPGNYESAGRAQGSGIRRGNVHLKAALYIAASAAARQRGSYLKDKYHRLRARRGARRAGVAIAHKIIVSAWYMLTREVPYQDLGDAYLDRLAEHRVTRSLVRRLKGLGYEVTLSKTA

SEQ ID NO: 179314 - protein, 372 aa, unidentified
MHVCQTLCRSRAGAPVDRSSLGPLRLTGSGIAGGLRVKARTVAWTRLEVRIHKGGMLHMQNEEVFVGIDISKDQLDVHMLPKGMHTTVKNDAQGIVSLIEILRAENPRVIVMEATGGYEITVAAELGVASLPVAIVNPAQVRDFAKGIGKRAKTDAIDAYVLAQFAQTVKPKPKPLGTDDENQIKELVSRRRQLVDLCASEKNRLHRARSDRVRHSIQTIIAALDKEIQDIDKDINGLVRKSPLWRETEKLLRTFKGVGPVTARVLIAKLPELGHVNRQQISRLVGLAPLNKDSGKKKGKREISGGRADIRATLYMAAVSAIKSNVVIRPFYERLSASGKTFKVVITACMRKMIIILNAMLKKKQPFQVVFS

SEQ ID NO: 179315 - protein, 484 aa, unidentified
MARRLSVRPNLTAVPLLPHETLYVGVDVGKFRHLAGFLSRTLLQRHERFEGCPTLVFEQSREGFRALVDRIREYVPLTQATVLLEHTGHYHRLLEQYLLELDITVYRIHVQERPKGMVKTDKRDALGLANRLYTQLELGAQVEDKMQLVRRALPPTKEASQLRGLIQRRYELSHQCTHHRNKLTAICDELFPEFTRVFADPNRSIALAVREQFPTPHAIATASLADLSNAYKSEQTKTQRGYHLSEAKVLQLQELARQSIGTQDLARQRSLLIEQKQLIRELRLIFEHLKQLNDEITSIVATSREGQILLSIPPTGSIQAATILALVGNIGNFERASELKSYLGWAPKRDQTGVSFDRTKLARRGTRPGKQILFLMAARAITLDCEWKRIYQRLLPRMAAYDERLKDYRGKLRVIGRIAGQMASMIFALLKTDYETLSQLPAGQELPPPMLYDPAIHRKHQEGYYRSLKPGTLPRKIVQLPKKT

SEQ ID NO: 179316 - protein, 375 aa, unidentified
MKEKVRFLGMDVHAETIAVAIAEPDGEVRSLGIIPNRSESIRKLVKKLGSVDQLRACYEAGPTGYVLYWQLTELGVECQVIAPTLVPVKSGDRVKTDRRDAERLARSHRAGDLTAVWVPDEGSEALRDLVRAREAAKQDQLRARHRLSKFLLRTGRRPERKMKAWTGVHMTWVRQLRFEQPAQESTRLDYLHEVEHMEERVLRLEQAIREAIQLASPGMQEVIQGLQALRGIAEISAVTIVAELGQLSRFESARQLMGYSGAVPSENSSGKRTQRGSITKAGNAHLRRIVVEAAWSYRLRPGIGPRLRKRQENVPEEIKEVAWKAQIRLTKRYARLAAAGKDQRKIVTAVGRELLGFIWAIGIKAETASKQRMAA

SEQ ID NO: 179317 - protein, 339 aa, unidentified
MMEHFVGIDLHKYVSQLAVLRESKPASQLRIANDVVTVERVLKKLPPGSKIALEAMGSWWWLVELAQKSGHEVFLSHPKQTKAIASARLKSDKVDALMLAKLLKADLLPTVWIPPRHQRHVRELLAHRARLVRQRTAVINELRAVYAKRNIDPQARLQRMHPVVTGANELGGYGPRIVDEDLKLLGFINGQVGGMDKELKNIAHEDAQAKRLMTIPGVGPVSAVAMSCWIGEIQRFSNAKKLASYLGLAPRVRQSADQERHGHITKEGNRMVRMLVIQAALVHTRRGQGPSRKHYLGVLKRRGKQIARVAAANKLLGAIFHMMRERIDYQEILRRSGAQ

SEQ ID NO: 179318 - protein, 343 aa, unidentified
MTEVSMIGLDLAKNVFQVHGVDASGAVVLRRQLRRSQVEKFFAQFPPVLVGVEACGGAHHWARVIGRYGHEVRLMPPSYVKPYVKRNKNDGRDAEAICEALSRPTMRFVPVKSVEQQATLAVHNTRSLLVRQRTMVANALRAMLSEIGIVAAQGIKGLGELMQRLAQPSAEVPELMRGALLLLVRQWQALDAAERALERQIKQMAAADQEARRLMQVPGVGPIIASSVVAKVPDARVFRSGRGFAAWIGLTGRDRGTGGKPRPGPISKQGDRMLRALLINGASAYLRQARRRGVSDPWLRELLARRPYKVVLVALAAKTARIMWAMLVTGERYRDRASVSAQA

SEQ ID NO: 179319 - protein, 399 aa, unidentified
MPTTMFIVGIDIAKRSHEAIIIAEDGQVVRKAFSFRNNCTGYNLLLEQVRRLTLVKSQIVFAMESTAHYWLALYARLLKDGYTVMVLNPIQSHSLRELYIRKAKTDARDSLIIADLVRFGRCKASNVPQDKILALRELCRSRAYLVDMAADLKRKLIALLDRIFPEYESLFESVFSKASIAVLSKYSTPQKVKNANLRKLTDILMESSNGHFGEWKAHQLKEAACSSFGIDDSGGVYSTLLGMFLEQILSLTAQADSLEKQISVFFQEFNNPLNSIPGVGTILAATILSEIGDITRFSSADKLLAYAGLDPSVKQSGEFKSNQNRMSKRGSPYLRRAIWLASTVAVHRDPMFQTYYEKKISEGLHYMNVIGHVSRKMTAVIFAVLRDGQPYQPILQSAG

SEQ ID NO: 179320 - protein, 343 aa, unidentified
MNIVRIGLDLAKYVFHLYGVDERGKVVLRKTLRRPGVAPFFANLPRCVVGMEASNGAHYWAKTLSEFGHDVRLISPQFVTPYVKSNKNDRNDAEAICEAVGRPNMRFVSVKSAEQLAIQAVHRIRIRLVASRVRLVNQIRGLLGEHGVVVAQTIGNLRRALPRIIDDEANGLNSIVRALIGELREELSNLDGRITIYDRKIINLYRMSEACQRLGEVEGIGPITATALVAAAGDGKCFKNGRQFAAWIGLVPKQRSSGGRSRLLGISKRGDRYLRTLLIHGARAALGRTRGKQDPRSLWLLKMRERRHANVVAVALANKNARIAWGLLASGMNYDQHLTVSSA

SEQ ID NO: 179321 - protein, 491 aa, unidentified
MINTSIFSAQSKDLRKLFEQAGHRSKVLCAPLDYAKKQHTVLFCNGHGDILKKPFSVDNSPAGLKFLLDQLQHTLTGRHLQAKHVFFGGEDIPAYAENFIAQLRQQGYLVAQVNAWEAKKRRENFQASNDNLDLTGIAKLLLDWRGNVAPAAHGTYRSLRELSRTRRRVVRDKTALSNRIHTYVDRLFPGFLDVAQSGLAPFSKASLALMSERFSAPQIRRRRRPSLSLQLQRHGVEKADEAARQLQQLAAQVLAPSTEHVSVWQVSLQQQVLLYNATQAACHALEAEVAHWLALTPGAFLTSIRGIGVTLAAGLSAELGDPKRLRRLACLCSYAGIIPGSKQTGGPQSPAHTTGVKPRCNRILKDWAVQASVKLGQCGPPELQTAYRALEAQEQHAQFIMAKRLLRLCKCLLRTQSVYRPPHLLAADTPRGKLAAYYLELWPALLTKWKGTCDLRHVFAAQHPLGCWRLMVQDLYGLALPLPKETAMTPD

SEQ ID NO: 179322 - protein, 387 aa, unidentified
MKKSNQRVIGLDVHPDSFAGAILEGRDPASAKVVSTSTRVALVELEKWVERHTTGHDLLVMEASGNAFAVAQRLRALKRQVEILDSHRAGKVGKAYCANDRVDAVKIARIYLTHLSPLVWQPDTRTLERREVFSAYQGVVKESTRLKQQIKAMLNEHCVRLGNGFRLSHPTAIARLLKLKEWSPVQAMLLEQLHSGLVSARVRRSKLRRYMAQEVLAEPKLLRLTRLCGISLITLYGLSAAIGDIGRFSNSRKLVAYLGLNPSVCETGNWEGNTALKRHGRGALRALLVQSAKKLLQVNNPLQKWGLAVAVRRGRNKAAVAVARKLCVAVWHVMQGHVIGAIERVDTLHTKLHKLATELGLPAVKALGYETKEAFVQKKLYLLKSYL

SEQ ID NO: 179323 - protein, 388 aa, unidentified
MQIITDRPQAPTAIRTDLGAIFVSLELSRSTWLITSLSPGGGEKISKHTVRSGDVAGLWARFSQLKDKVQVRTGQVAPIIVIQEAGLDGFWIHRLLQDEGVESHVVDPASIATSRRRRRAKTDKIDGEALVRALLAYKRGEPRVCAMVRAPTPQEEDRRRICRERKTLTAERIEHVNRIKGLLFAQGISDYEPLRRKRRERLEALRTGDGRLLPEHLKAQIGRELDRLELTLQQIKSVETERDAMLSPSDEGTPAPGAMLKSLKGIGPEFAAVLWAEGLFRSFSNRRQVAAYAGLAPTPWRSGSVAHEQGVSKAGNPRLRTTMIQLAWLWVRHQPRSILTLWFHQRVQLNGGRVRKVLIVALARKLLIAFWKYVTAGVVLEGAETTAA

SEQ ID NO: 179324 - protein, 353 aa, unidentified
MQFYCGIDLGARKTHVCLIDEDDHKLLDMKMYNDFESIEAVLRPYKSSLEVVMESTINWEWLVCGLQKYDYEVKLAHTLGLKAITWSKKKTDTWDAFTLAKLLRGRLIPEAYIYPYELRPVRDLVRERIRLVTKRATEYGAINRMLLKYNIQGFDRNSVKHLSEKDMHELYHHPFVRVKATMELQRIELLTEQIRLIEKALFERARQDTMFTLLQTIPGIGDILALTILYEVGDINRFAHTRGFCSYSRVVPGIHQSSGKAYRSPNSKQGNRYLKWAFSQAAIMAIRYYPEIRRLYERLAAKRRKAARLVARSIIAHKLAQAAFQVMKHNEPYKEELLFRFSKDYAEGKTVTP

SEQ ID NO: 179325 - protein, 391 aa, unidentified
MILVGIDVAKDKHDCFIMNSDGEILAKAFTFSNTIEGFNFLYEKICSVSSHQDKIKVGLEATGHYSYNLLGFLLDKGLPTFVINPLHTNLYRKSLSLRKTKTDKVDSRTIAMMLLSDVDLKPYSETSYHNEQLKSLSRYRFTKVKERAKLKTSVSRLVQILFPELGQLVSTLHMASVYRLLEEYPGASYIASAHLSRLTNIIFESSKGKYNRDTAITFREVARKSIGSVMPAKSLELKHTIKLIRELSNEIDEIDAEIKIMMEEIASPITTIPGIGYNMGAMIISEIGDFSRFSSPDKVLAYAGVSPSTYQSGMIDNCYSHMEKRGSRYLRYALFIAAQKVCHWDNTFSEYLSKKRSEGKHYYVAISHAVKKLVRVIFHLERTRQPYLKAA

SEQ ID NO: 179326 - protein, 341 aa, unidentified
MEIYILGIDLAKQVFQLHGADRRGRAVHRAKVSRGSLFEAVRTLTPGVIVMEACGTAHHWARRFQSLGIEVRLISPQYVTPFVKTNKNDRNDAEAIVEAASRPTMRFVTVKSVEQQDILAAHRMRAILIRHRTALINQMRGLLGERGLTISRSPEAFKRAIPELLRTSADELTAFCQTLLAELLQHLTAIEERIHLIDTSIQAFMKHSALCRKIAAVPGIGPITATAVVGAVGNATQFRNGRHLAAWLGLVPRQYSSGGKSRLQGISRRGDTYLRTLLIHGARAVLRYVKGKTDPHSVWLQQMIARRGHNCTAVALANKNARIIQALLSGEASYVSPGTTT

SEQ ID NO: 179327 - protein, 416 aa, unidentified
MHVVYAHCCGLDVHKRSITACLLVSGVGGKGQHEIRRFGTMTRDLLELADWLQSQQVTHVAMESTGVYWKPVWNILEGHFEVVLVNAQHIKAVPGRKTDIKDCQWIAELLQHGLLRGSFVPPTPIRQLRDLTRMRASLRQDHTAVANRMQKILEDANIKLAAVASDWLGVSGRAILAQLLAGEEDAEKLAALSRGRLRAKLPAMQLALAGRMTEHHRWMLRLLHEQLVFLEAQITTLEAKIQDQLSDYQEAIALCTTIPGIEAVAAANLIAEIGVNMAQFPSAQHLASWAGICPGNKESAGKRLSGKPRKGNAWLRRSLCQAAWAASHTKDTYLAARFRRLAARKGKKRAIVAVAHTILISLYHLLKNKQTYGELGADFLDRRNAENIKRYLLKRLERLGLQVTVQSSEDTAPLLA

SEQ ID NO: 179328 - protein, 421 aa, unidentified
MTQSAPHTCAAFVGIDWADAKHDVCLQAAGSAKRECCQLDHTPEAIDAWVITLRTRFNGQPVAVCLELNKGPLVFALHKYDFLILFPLNPLTLARYREAFTPSRAKDDPTDAELQLELLLTHRDKLRPLKPQSPTMRALTQLVEHRRRVVGDKVRITHRLTSTLKNYFPHALQWFQDKDTLLFCDFLSRWPTLKAAQLARRSTLETFFRDHHVRSSDVIDKRIHAIHAASPLTIDEGVIAPHALLVQALVSQLRVTLQAIETFDNAIAQRAQSHPDFPLFQALPGAGPVFASRLLVAFGEQRDRYASAAELQRYAGIAPVTERSGKKSWVHWRLQCPKFLRQTFVEWAAESTRHSFWAQVYYQQQRDKGKAHQAAVRALAFKWIRILFRCWQERTPYNESAYLQALNSRGSSLIHNLAKEA

SEQ ID NO: 179329 - protein, 349 aa, unidentified
MGEVSTIGVDIAKSVFQIHGVDAGGTVVIRRRVGRARVLEFFADLPPCLVGMEACATAHGWARELKKLGHDTRLMPPTYVKAYVKRGKNDAADAAAICEAVTRPSMRFVPIKNVEQQSVLMLHRTRDLLIRQRTQLINALRAHLAELGLVAAKGREGVHQLVTVVTECGGERLPSNARFACQAIVTQLHAVQIEISGLDKRITQTHRVNADSKRLDTIPGFGVILSTAVVATMTDPKAFKTGREFAAWIGLVPRQNSTGGKDRLGSISKQGDRYLRRLLVVAATSVINSARARPYKYPWVIELLGRRPTKVVAVALANKMARIAWAVLAKGEPYRAPTRSSKAVVPAAA

SEQ ID NO: 179330 - protein, 339 aa, unidentified
MELYAGIDLHASNNFIGVLDKNGKRIFKRKLPNIPEEILVSLGGFKEQMVGVVVESTYNWYWLVDLLGDAGYRVHLANPSAIQKYSGLKHADDQHDAFWLGEMLRLGILPEGYIYPKEERPIRDLLRKRGHLVRLRTSLVLSLQNIVARNCGVRLNVNDVKRLRENVVVPLLEENEDLAMAGMVSKEAIDFLTRKIRQVEKMVEGKLKLKEPYRYLLTIPGVGRILSLTIMLETGPVGRFPAVGDYVSYCRKVSSKWISNGKAKGKGNKKNGNKYLAWAFSEAAELARRYDSQCRNWYNRKMQKTNFMVAHQALAHKLARAAYCIMKREVPFMPEKLFA

SEQ ID NO: 179331 - protein, 405 aa, unidentified
MSNDVFVGLDWAVHTHAVCVIDVAGTVLDRFEVAHDGGGLAELMRRLARHGQRLRVAIERPSGLIVDALVEAGHQVFPIHPNAVKASRPRYRSHGAKSDASDAYLLADLLRTDGHRWRALAPQSDDIRALRALVRSRDDLVAARVATANQLSSTLQLFWPGAAAIFADIASPIGLAFLRRYPSPRSAKRLTEAQLLRFCQRQHYSGRRSPAELLNRLRAAASGHVGERTEHALAEVVRAQVKVLEPIVTQIAELTRRIEHFMHSLPDGLLMMSFPRAGQVCAAQILAELGDVRERFPSADQLAAEAGAVPVTYQSGKTRSVAFRWACNHRLRQATTCLADNSRHANDWARSVYQAARARGCDHTHAIRILARAWLRVIWRAWTDRQHYDPALHGSAVALASAQGG

SEQ ID NO: 179332 - protein, 430 aa, unidentified
MMTQDRVAVWLGIDWADQRHQWAMRIDGETRVHQGELEHTPEAIEQFVSEIAIRFPGQRVAVALEQSRGALMYMLGKYAHLILYPIHPTTLNHYRKSAYPSGAKSDPGDAVLILDFLYTHTDRLRPFNPDTVETRTLQLLVEARREAVDDKTRYLNRLTAQLKMFFPQVLEWFSAPDSVVVGRLLQKWSTLDALQRAPARQVARFLCENRVPDSRIAALQQLIKHAVTAIQDTAVLETSVLIVRRIVRQLEILREAIAEHDKAIADLAQSHPDYRIFSSLPAAGPVMVPRLIAAFGTQRDRYPTVSALQCYAGIAPVTESSGKQRWVHWRWACPKFLRQTFHEWAWLSTRKSEWARGFYDQQRERGKSHHSAVRTLAFKWLRILFRCWKDRLPYDERRYSLALQKSTLAKPVEFRLKKVSGFTKLDAFSR

SEQ ID NO: 179333 - protein, 341 aa, unidentified
MGVYVGLDVSLASVAICVIDEDGRVLWEGKAAGDPEAVRVTLEPWLGKIEQLGLEAGPTSEWMGGQLLAAGFQVACLETRHVKAALSAMVVKTDRNDARGIAQIVRAGWFKAVHVKSAGSQRHRTLTTARKFLVRSMAATEQAIRGLLRPFGLKVGAVTRRRFAGRVHELVADDLALAAIIQPLLRAHERLVAETAQLHRLVLQTVRADPICRRLMTMPGIGPVTALTFRATIDDPHRFRRSRSVGAYLGLTPRRHQSGEIDRIGRISKVGDGEARTALFEAANVVLRPSTRWSAMKAWAVRTAKRQGSRRAKVALARRMAVTLHRMWIDDEDFRWASAAA

SEQ ID NO: 179334 - protein, 419 aa, unidentified
MKCFVGLDVSSTKLDVCIMTNNTELGVLFSASLANDLSGASEIKKKVLELNERYDFNRIVIGMEATSLYSFHPAMFFNDDSDLKKLNTEVMIEQPNKIKKYREAFEENKNDTIDAFYIADYFRIERFTRSYLKEEKYLALQHLTRTRHQLVEQLVHTKQHFIENIYYKCNTLSVELKNEALNTSVWSATIMTLMTEDYTLDELAEIPLEEFAELIQKLGRGRFKAPEKLAKAIKAAIRGSYRLSLVQQDSVNIVLSLLAREIRSLEKMIKEIDQAIEDMVEILPEYQCLTSVPGIGKVFAAGIIAEIGQIERFKDHPQVAKYAGLNWKETQSGTTSSQNTSLAKRGNRYLRYYLVEAANSVRRHNVEYAEFYMKKKDEVPKHKHKRAIVLTARKLVRLVDVLLRNHQLYTPPRRFMEDN

SEQ ID NO: 179335 - protein, 416 aa, unidentified
MKIVRPICCGMDVHKNIIVATIGITNKKTRITEYIQETFSTLNPDLLNLKQWLINHKCFDACMESTGKYWIPIFNILEDEINIYLTHPKYVKAIKGKKTDKKDSKWICDLFKHDLIKFSFIPPKEIRALREISRYRYKLVGMRSSERNRYQNCMTVSNIGIGSVFSDPFGKSAQAIMKEVLESDIIEDEKILKCIHRSCKNKDKILDSIKHCNIETDQRFKMNESMTHMEELQVHIDNCEIEMMKRAAPMFDQFMHITQLPGISTLSAILIISEIGVDMKQFESDKQLTCWAGLAPANNESANKKKSVRISKAGQYLKPLLVQCALGAIKDKEGYFGIKYSRIKKRRGHKKAIIAIARMMLVSIYHMILTGETFNPSDYESFRNPKPPIKQQVLTEESAIEFLKKSGFDVSKLTKP

SEQ ID NO: 179336 - protein, 391 aa, unidentified
MVKLIKYVNGIDMSKDKFDACLMSVDVELNYKVIAQRQFSNNTTGFKELLQWMKKHCVQKIPLHILMEASGVYHEKLAIWLTEKKQQVMVVLPNKARKYMQALGLKSKNDKIDAQGLALMCAQHKFDLWQPIAKFYYELRLLTRHYQSTQEAKTMFFNQHHALSHSGYSSKEVCKQLEKTITIFEKQIKENKQHIINHINTNSEVQRKVNQICQIKGVDILTVATILAETNGFELFKNQGQLVSYAGYDVIENQSGNHTGKTRISKRGNGRIRRILHMPAFNVVRFKQTDFVNLYQRIYNKTKIKMKAYVAVQKKLLIVMYTLWKKDQTFKNSYNKKLTSGNEEHRALFPFFTEGEITTDNKIVVPPYSSTTQDGLRYNVSHEALLPLPQT

SEQ ID NO: 179337 - protein, 400 aa, unidentified
MSLAVGDDVGAYKCAVAVCREGEREAERKVLSITTQRAGFTNLDAWMAKQGAPIDVVVMESSGHYWFNLASHLRRQGYPVAVVNPLQAKYFAKSRLQRSKSDPADARTLAALGTCDQPRISEPLVGAELKEAARFAMRLVREQAQVCQRIQRLVDIGFPELRDVWDDPTCVSALAVLRQAPTAAAVARMREDRLARLKRPGVGGRVVGPMKAAQLKQLAQTSVAAPELEQQVRFEMRLLIAQHDLLDTQIASADARTASLLDGEVAQRLLSIPGVGPSTAATLMAEIGDIWRFSDVDQLLAYAGVHPKEQSSGKKGANPETSWTMAKTGNAYLRAAAYRMAVVGVQHNPILRAHYARKRAAGKSAMNSLGHCMSKALAIVWGVWRGGKDFDPAHASARSA

SEQ ID NO: 179338 - protein, 414 aa, unidentified
MQGLTPHHYCGIDWASDKHDVCVLDPAGTIRAQFVVAHTAEGLAGLIRRLSAFGPREQLPVLIERPSGLLVDTLAEEGFPVAPMHPNALKAMRPRYSAARGKSDPGDAYIAADVLRTDGHRIALRRAPSDGTKALRALVRTRDDLVATRVQLANQLRSLLEGFWPGALNIFADLVSGIALTFLERYPTPGHAAHLSEGRLAQFLTKQGYCGRRSPAVLLSRLRSAALGRTGPQECEARGAAVSGFVPVLRALQAQIRDLEKRIEAQLAAHPDGALVQSFPRTGSVNAAQILAELGDDRERFTSFEHFAAEAGVCPVTFQSGKHRGVGFRQACNRRLRGAVTTWADNSRHANAWAASTYKEAKARGCDHPHAVRILARAWLRVLWRCWKNHEPYDVQQHGRALPFLDPPPVSAAA

SEQ ID NO: 179339 - protein, 441 aa, unidentified
MKKTEKMEIINSHAAGIDIGSKSHYVAVGQNEDQVREFNVYSSGQQQMIFYLKECRIESIAMESTGSYWQSLFRVLQDAGFEVLLVSGAQTKNVRGKTDVKDCQWIQKLHSLGLLRGCYLPSETTSKIRTLSRHRQFIVETAASLSNKMQKALRLMNLRLDVVLNDITGVSGIRIIEAILNGERDGEKLSQLAHPRVRKSKKDIADALQGQWSEEILFELKSSYGLYKVMQNNIADCDIKIEDILNNATKGVVVEQNNKLTKKQTKGKNQQRFNLSSYSYKMFGVDLFAIESISMNTVMTFIAEIGNDINKFNTSKQFTSWLRLAPNNKVSGGKLISSRTPKGKNKFTLALRNAANTIDRQKGGTLNTFFKRIAYKKGRAAAITATARKLAVIIWTMITKKQEYKPLEETKYIELIKTKKMSNIKKMMHQYGITTAELSII

SEQ ID NO: 179340 - protein, 459 aa, unidentified
MGHARARKIPAQLVEDEGYQLRYERVAGIDIAKAKGDVCTRLPPVREGGRRASRVEEVPARAREILALAGRLAADGVELVVMESTSDYWRMWFYLLETAGLRVHLVNSRHARQLAGRPKTDRLDCQWIARLAEMGLLRPSFVPPPEIRALRDLTRTRLQLVRDRTREWQRLEKLLEGALVKLSSAVWSLARSKTARSVLEAVAAGESDPAALAALAAAQVKGGRAAIAQALEGMQVRDHHRTLIRLHLDHIALLDRQVSAVEDEIEAALDAIPAAWGADATGETGPGAGQAPDAAALPAAGRLAEIPGVSPALARAIIAETGLDMTRFPTADHLVSWAGLAPVASQSGSRARKPGKGHGDAYLKGYCTQAATGAATTDTFLGERLRRLSRRLGGNRARCAVGRSVLVIIWHLLSDPAARFADLGPGWHDTRTDRDRKIRAHVRQLQALGLNVELSEAAA

SEQ ID NO: 179341 - protein, 361 aa, unidentified
MAQVRSWAGLDVHARSVLAVTVDGVSGEMRTRRLPGTTSEVVAFCASLPGPTKVAYEAGPTGYGLARALHAAGIGCVVAAPGKIERPAQDRVKTDQRDGQRVLRLLMIGGLHPVRVPSSEEEALRDLVRAREALRGDLMRARQRLSKLLLRHDIIYEDTASAWTARHRAWLTAIDLGGGAQLTLLDYLGAIDAMVIRRDALQTAIGELVPGSPWAQTVARLRCLRGIDTLSAVGLCAEVGDFERFDRAGRLMSYLGLVPSENSSGETRRQGAITKTGSRHARRLLVEAAWHYRKRPARGKALERRQDGQPAHILAISWQAQQRLHHVWRRLDGERGKRRTIVAVAVARELAGFCWALARAD

SEQ ID NO: 179342 - protein, 411 aa, unidentified
MEQIRERVAALDVHRDSVAACARVPGPRGGVRLDKARFATTTAGVAELAAWLAERGVTTVGMEATGVYWKCVYYALEGLFEEVWLYNAHHVKNVPGRKTDMSDAEWLADVVAHGMVRPSFVPPPPIRELRELTRYRKTQVDVRAAEIHRLEKLLQDAGIKLTSVASRVLTQSGRAMVEALIAGERDPGRLAGLAKGKLRAKLPQLAEAMAGRFGPHHAVVARAILDHIDFLDTTIDTLTAQVVARTRVFAEQVELLAEVPGLDQTAIQVILAETGGDMARFPSPAHLASWTGVCPGNHESAGKRRNVATPPGNRWLRRVLIEAARAAARTRGSYFAAQYRQIARRRGPNKAAMAVAHSLVVVIWTVLATGEPFHDLGEDYFQRRRDPERESHRLVRQLEQLGYAVTLQPAA

SEQ ID NO: 179343 - protein, 417 aa, unidentified
MTAYCGIDWAEAHHDVALVDQNGHRLGRCRIPDTAEGLAVLLALLAEHGDSPENPIPVAIETGRGLLVACLVATGRDVVVINPMAAARYRERTTVTRTKSDAADALMLANVLRTDRHAHRSLPNDSELVRAVAVLARAGQDATWQRQQAANQLRSLLREFFPAALTAFQIKHVGLASPEARAILAAAPTPAAAAQLTKTRLRTLLTKAGRRRNLDRWVDRLHATFHAGAMRHPVEVENAYGQAALAILKRLDAAVTAAQDLQHATTAVFEQHPHATIITSFPGLGPLTGARVLAELGDDPDRFDDARALKAYAGAAPVTRASGKSHLVMHRRVKNHRLASAGYNWTFAALSHSPGARQHYDRRRATGEGHAAALRNLYNRFLGQLYYCLSTGQHYDEQRAFSAPASDPSKATMPQVT

SEQ ID NO: 179344 - protein, 330 aa, unidentified
MDHCAIDLGGRKSQVCVRAPDGQVRFEGKWDTPSLPDFLRQLPQSRVILETAAEAFRIADAAKSAGHEVRVVPATLVRSLGVGARKTKTDRRDAQALSEVSCRIDLPSVHIPSARSREWKTICGMHDALVASRTKLINNLRGWLRGQGLRIGRGVTETFALRMARFSLPDYVRWQVEVLAGLTEKIRESEKRIDRLAKDELCQRLMTVPGVGPSTAVRFVAAIDDITRFESAHKVESYLGLVPGESSSSERQQRLSITKAGSASVRWVLGQAAWALQTRCRDPGARPLQLWAAEIVRRRGRRIATIALARKLAGILFALWRDGTTYEPRS

SEQ ID NO: 179345 - protein, 344 aa, unidentified
MVTFGVDAHKRTHTIVAVNDRGTPLGQTTVGTTSQDHLGLLRWAARFGAERRWAVEDCRHLSRRLERDLLAAGESIMRVPPKLMAHVRDSARSYGKSDPIDALAVARAAQREPNLPLARLDGPDREVRLLVDHRESLISERTRLICRLRWHLHELDPAWEPKARSLDAQRTLDEVRGRLQDHVGVVARLAVELTERCAELTITIKALEKEITELTTQLAPALLELPGCGALTAAKIIGETAGVDRFKSRDAYARFNGTASLPVWSSNKARHRLSRTGNRQLNAALHRIALTQARWHPPAKGMIERRKSGGNSGREALRVLKRRLSDAVFQALLHDQTAGLTLAA

SEQ ID NO: 179346 - protein, 526 aa, unidentified
MPYRVKRNGRSQRNRKPRTNRTLQKPNGILGPRVQKVGGERFAIVCVDPAKHRSEWMMADYFGNLLIEPRTLEHRAANFKLAVELIRQAQQEHGIEDTLVVVERTGTYYLSAKRAFAGAGFETRVVHPFATKQYRMPADPGNKTDETDLYAQHRAAVAGFGLCELELESPYRELQLRARHRRSLVEKATALACQIREHLHLGMPGYAELFGRFFDMPAALAIAACGNSPAKLIELGQRGLDRHLRKHKIGHQIRTIDKALAWAAQAVREPIRDGLLHHAIWTDLFELYQHFQRQIAPLERALAGDLVKTPYVRLLAIPGINVVSAGELAAEMGPIARYANANAITGRSGLYPSRYQSDQTDLDRGPLVRQANHRLRCVLMRIADSLACHCNYYRGQAELDEKRGVDKRASRVKIAKRFSRLALACVAGDQPMRHSCFQKPESILEKLRCFHQEHQTPSDEVLADLEAAVAQLPYNTRDREAQIVAEILQQRAHRRRGAGSIAEVLPAVLARLNAKNREANKNGDRS

SEQ ID NO: 179347 - protein, 346 aa, unidentified
MPIVGGLDIHRKQITFDYLDTVTGQVCRGQVSPADREHLRAWLARFHGRDDVAFAVEGCTGWRYVVEELAAAGATAHLAEPADTAFARGRKRHAKTDKTDCRHLRMLLAEGRLPECWIPPGHILECRALLELYNDLRRDRTAWAQRIHAVLFHQGAPVLAEGALRTDKGVAELRAAAAGCLSPAGQLQVATALDLIDALEARLHVVRHQLTDAARHLAGAKALAARLYGVGPVTALAITCWLAGAGRFSSSRQAVRFAGLDITVSSSDRKGPPGKLSRQGPPVLRWAVYEAAKTHARTSAPDHDYYAAVKDRKNSKRACLSEARKILRQAHHILAELGDDALAPAA

SEQ ID NO: 179348 - protein, 333 aa, unidentified
MTTIGIDVGAKELVVAIRHKGRIQKIKTFINNFAGHKKVSILCSKYFKYGTVRVAMEATGVYHLDLAIVLSDIPSLELMVINPRATKSFASASMKRSKTDKADSQVLALFAEKMEYPLWEKPSQTAIQLRYFSRMINVFTTNKAKAHNHLHALTSYSNSPKQLIECLHQEIVFLEEMINRLRQETLTLIKEDKYLEESFNLITTIKGFGEASTIQLLAEIIFIPNGLSRKQWVAFAGLDPRHFQSGTSVNKKSRISKAGNRYLRKSLFMPALSASKNDLYVKKYFTHLVDNRKLSKLQAIVAIMRKLLHAIHGMLLQRTSFDNTRFFGQKVAT

SEQ ID NO: 179349 - protein, 400 aa, unidentified
MLSIGIDVSKGKSTVCGMKPGGEIVYAPFEVQHTREGMLELVSLLRSSGEEVRAVLESTGSYHCPVVAALLENGIFVSVVNSLRMKRFCSQSIRKVKTDRIDAMQIALYGLAYWQELQPTKLPEDTYRELQLLARQYYQMTSLLIKAKVDFNAICDQVLPGMQELMSDHAGRHKLSDFVLRYRHTTHILEMGETRFRKDYCKWAEKKGYRNCERMAALIFATAQNGIPVLPNAPSTQIVITEAIRVLHTVEASRDAILTQMQALAKTLPEYSLVRKMLCIGDTLAPRLIAEIGDVRRFHSKRALIAYAGIDAPPYQSGKFCANNRHISKRGNRYLRKTGYEVMQSYVMHKPANDPIFTFIEKKRSEGKSGKLAMVAGLNKFLRVYYGKVTELYRSLPAIE

SEQ ID NO: 179350 - protein, 335 aa, unidentified
MKVFYLGVDVSKKKLDLCLRSNGKDILYDVIPNDLSSIKSWLTRTFEKFFLSEDSLVVCAEHTGQYTYPLVCATKSIGVYLCLEDAAKIKYCHGIPRGKNDKIDACRIAMYAERYNDCLQPYTASELIIQKLKNLSTERSMLVADRAKYQSQLKDQVDYMEHSIYIAKCNRVEGIINTFTDYIAQIDLEIKELINQAPVIAHQMDLLMSVDGVGERVALKMIMETDAFTSFTDPRKFCCHAGVVPFVYVSGSSQRSKNRVSNRADKSIKHLLHMAALSVSQVKNSPLKKYYDRKIEEGKNKMSVLNAVRAKLVTIMFAVIRTDAFFSRNYQNSLA

SEQ ID NO: 179351 - protein, 448 aa, unidentified
MDKIRTKKETVKKISQLTIINPKVAGIDVSDTEMMVAYPINSAQMEIRPFGCYTRDLRSIAECLKENGITSVAMESTGVYWIPLFLMLQEYGFEVYLVNAQHVKNVTGRKDDESDAEWIQKLHSCGLLKASFQPSNMVRTLRSMVRHRKNMVKTSAIYLNRMQKALELMNIKLHTVISDIDGKTGLRIIEAILSGERNPEVLAEMRDGRIKASKEEIIKSLEGYWVAEHLFELSQCYRLYKEHREMIKECEIEIEKQLIEQIAAENQGIIPEIAPVQRKAQTKHKISFNLTSYLNHVLEVDVTKVCGLSEITSLTIMSEVGTDMSKWKTEHHFTSWLGLAPNTRKSANKVISSRIKKKKHNAGEAFRLAANSLHNSKSPLGDYYRRIRARAGAPKAVVAAARKLAIVYYKMVSNKEAFNPQAIEEYQKKYKEKKINQLRKKIILLEAS

SEQ ID NO: 179352 - protein, 460 aa, unidentified
MGKSSHIQGNKGVKFSQQLRGVNLEQVLIVAIDAAKLHQKALICNYFGDMIERPFFFSVNESGMQLLCRKIDQAATIVQAERIFLGVEATGHYYEDIVRHMAKFGYDVQIFNPYSTFEERASALNWCKTDDLDLVAIAHAIKSNKATETRLLEGIHRHLRVLTRACRSEIRKRSTLRMEIRILMDNVWREFQGFADHSQGKAKKVKVFSDFWGKASLFFMEHHPHPSEILALGELGLRKLSIQNNLKLRTSAIQKLLYVSEQSLSRNVQELRPELIVLKMKLQDLRAFDAKVDALDQEIESLLLQTDGRLLLTVPGLGVSTSAELFAEIGNVTHFTHAGQLIKKAGTNPIIKQTGGGKGSYRQIYKQGNDHLRYVVFLAGRNLCLHNQDLNAFYQRLKSRGKHDRAIFIAMGNKMLKIAFAMLRDRLPFKSQEPDFSIVAEMNKKLKHNCFFANQHKAAA

SEQ ID NO: 179353 - protein, 345 aa, unidentified
MKKIIIGIDFSKETFDATLFDSRNSELSEAVQSAVHEKFTNKKEGFQAFLTWIKSSVKKINSDELLLCGEKTGKYSLALSNFLYAKGYSIWLDSGLRIKRSLGISRGKSDKADSLKIALYAYRYQDMAVCYVPLSKNVSRLKELFLYRQHLVSQMKAMAVRKNVTDDFKKELGDVRFIVDSATKIIQQIKATIKKCEEKMQEIIEEDEELKTTHDSITSVKGISLINATAFIAYTNNFKDFGGNAKKIATYWGVAAFAQESGTSVHKGARVSNIASKMLKSLLTQAARIAVRWEPKFSQYFEHLISRGKHQGVALNNVKNKLIHVITALAVSKEKYNQEYKCINR

SEQ ID NO: 179354 - protein, 349 aa, unidentified
MALASAVTLGIDTHKDVHVAVTLDELGRRLGVATFSTDDAHHQQLWQWASSYGPVTRAGVEGTGSFGYRLAQFLVNTAGVSVIEVNRPNRVARRRRGKSDPVDAEAAARSVMARDSTAIAKTRAGIAGQLRVLMIARRSALKARIQAQHQLRSLILELDDTTRARVDHRRADHLAAACSEMPGDDGIAAGLRALGHRWCQLTAEVREHDHAITRILKKSANGLLARPGVGPITAAQLIVTAGDNPDRLHSSAAFAALCGVTPVEHSSGKTQRHRLNRGGDRAANSALWTITTNRMRHDPRTRAYVQRRSDLGNSRKEIIRMLKRYIVRELFREITAGIAGHPAPDPATA

SEQ ID NO: 179355 - protein, 466 aa, unidentified
MKKMPLTVVNPHAAGIDVGSRTHYVAIGQEQKDVKSFGVYADDLATLVKWLADNQVTTVAIESTGAYWQNLFVELIHAGIEVVLTNGKFTKNINRKKTDVLDCQWIQKLHSLGLLPSSFLPDHTTERLRTLCRHRTNMIQQRADSIHKMAKFLKYLNFRLDVVVRDIAGQTGLKIIEDICKGNLDPKSLAEHRHHNCRKSEEEIAKALVSNKREDYLFGLRQEFARHQFYTIMINDCDKEISQFLEQNIQQKHDIVDDIPDTKYFKRQNKNAIQGIDLNIVSYQYFDGVDLLSIPGVSHSSILTLMSEIGPEGFNKFPTAQHFASWLRLAPNNKISGGRILSNRIPQGSNRLKIALRNAANAVGNLKDTDLAKFFRKIAFKKGRQTAINATARKIAVILWNMITKKQPYLPKDNYLFLDQKRRIVSKMRKQIKDLGLNPDDLGFSRANRDKIAAQIASDYQELSLR

SEQ ID NO: 179356 - protein, 339 aa, unidentified
MKCRIIGIDLAKSVFQVCGVNQYLKPLFNKKLARRDFIAFMSEQPPTQVVMEACYSSHYWARELTKLGHTVRLIPAQHVTPFVRGNKNDHNDALAIVEASQRPYIRFVPIKSEAQQEVMALHRIRERLIKNKTALTNQAHGLLSDFGIIFNQGERCFTVMAHIVATSSEVSENIKSLVASQHEEFLELKAKLKIIEKKLKQNLKNFPQAEILLSVPGIGYIIASAFIASIDKGQAFKSAKDFAVWLGITPRQYASGSNSYMGKITKRGNRYLRKQLIHGARAVLNIYKNDKDALKAWGVAVAHRRGFNKAVVAIAHKIARIAWHLLQKNETYQPQSIKA

SEQ ID NO: 179357 - protein, 360 aa, unidentified
MAKARSFVGLDVHATKIVAAVLDAETGQLQTFVMSGETTKVAGFCAGLPRPVRVAYEAGPTGYGLARELAKREIECVVAAPSKIPRASGDRVKTDRRDAEHLVRLLLAGKLHAVRVPGPEEEALRDLVRARDSVRADLMRCRHRLSKLLLRHGIRFDDGQAWTARHRDWLATVALEWPAAQTTMLDARGAIDALCHRREQLEREIVAMLPSSPWVVQAGRLRCLRGIDTLSAVGLCAEIGDFERFARAEQLMSYVGLVPSEATTGQQRRLGAITKTGSGHARRLLVEAAWHYRSRPSIGRALTDRQDSQPPEAIAVAWSAQRRLLRTWTRLEACAKRRTIIAVAAARELAGFAWAITRIE

SEQ ID NO: 179358 - protein, 341 aa, unidentified
MWIIGVDYHPSMQHIAWVDTETAECGERRLAHCAEAEQFYRELKQEGVSVRVGMEATGHSRWFERLLAELNFELWVGDPAQIRAKQVRKQKNDRRDAAHILKLMLEDNFPRVWVPTAENRDLRQLVWHRHRLVGMRTRVMNQLQAIAMNEGVRRKRGLWSQQGRAQLESLSLPPWSSRRRQELLQLLDQFDPSIDQLSEAIEQEAERWPEVQRLMTHPGVGPITALAYVLVLGSPDRFRCGKQVGSYLGLIPCEDSSAERWRMGHISKQGNALLRYLLGQAAQSVARCDELWRHQYAHLALRRNRAIAKVAMARKLAVRLFWMWRRGWDYQQLKKFGSHVG

SEQ ID NO: 179359 - protein, 346 aa, unidentified
MEHVGIDVHKNQSQICIVTIDGELIEKRIQTRPDRFAAVLGGPQKEILIEASTESEWVARCLEDLGHRVLVADPNYAPMYGSRSRRVKTDRRDARALAEACRNGTYRLAHRASDAQRHVRARLAVRDNLVRTRTRYITLIRALLRREGYRVRSGSSDSFSRRVGELDLAPHLAAEIAPLLVLLEVLGEQIRRATEELEELVREDAVVQRLRTMPCIGMLTASCFVATLDTPERFVGVGRMRSFLGLVPRERSSGEKRRKGTITKAGPPRLRWLLVEAAWRILLGRQEILKPLHEWAMGIARRRGRQVAAVALARKIAGILYAMWRDGTEFDPERLGACSARSTAAA

SEQ ID NO: 179360 - protein, 339 aa, unidentified
MGNITVLGVDLAKSVFHLHGVDQQGKVVLKKRLDREKMLPFFANLPPCLIGLEACSSSHYWAREIRKLGHDVRLMNPIFVKPYVKNDKNDYNDAEGICEAVSRPSMRFVPIKTVTQQDIQALHRVRSQLIQERTALANQTRGLLGEYGIVIGRGIGHLRTRLPSILDDADNQLTEIGRGLFSEQYHRMVEFDDKIAAIDNRIETLFKNDRLCMKIEKIPGISKLTVTAILAAVGDGHEFRNGRQMAVWLGLVPRQNSTGGKTRLGGISKRGDSYLRTLLIHGARSVVYRAIKKDDPRSQWINSVRARRGENVACVALANKNARIIWAMMVNEQEYRIAA

SEQ ID NO: 179361 - protein, 346 aa, unidentified
MEHYVGLDVSLKLTAICIVDQTGKIEREGVVASDPETIAAFIKSHAPHVARVGLETGATSTWLWTELNKMGLPVICIDARHAKAALKLQINKSDRNDAVGIARIMQCGWYKEVRVKDLDSHAIKALLVSRALLVKIKRDIENQIRGLLKNLGLVIGQAKMNVFSVRAAEMAEARPELAAAVEPLLKAREAVGRQIADLDRKVMRLARNVAQVRRFMTAPGVGPITALCFLATIDEPTRFRKSRSVGAYVGLTTRRYASGEIDWTGRISKCGDKMLRTYLYEAANVLLTRVAKWSALKAWGIRLAKRSGLRKAKVAVARKLAVILHRMWIEGSEFKWSSKEAANQLA

SEQ ID NO: 179362 - protein, 308 aa, unidentified
MKKVITVATAGTGKMQARGLTIGVDLGDRSSCYCVLNEQGEIVQEEKVATTPKAMRERFAEVPRCRMALETGTHSPWVSRLLSELGHEVIVAHAQRVELIAKSRRKNDRMDARTLARLARIDPQLLSPIQHRSAEAQAHLTVIRARASLVRARTSLINTIRGVTKSTGERLRGCNPRKVGERAQELSPELQHALGPVLSEIDSLSDRIREYDERIRSIAESSYPKVELLKQVHGVGTLVALTFMLTLEDPHRFSKSRDAGCYAGLQPGKRDSGDSEPQLHISKEGNKYLRAMLVQSAQHILGPFGADS

SEQ ID NO: 179363 - protein, 361 aa, unidentified
MQTKEQGNKLDFEGQNIYVGIDVHKKDWTVCIFSEHLEHKKFAQPPKAEVLKNYLHQNFPGAGYYSAYEAGFCGFQVHWDLVSHGIENIVVNAADVPTTHKEKANKTDKRDSRKIGRSLRAGELTGIHIPKRKTQEDRSLVRLRYTVTKDLTRLKLRIKSFLSYYGIEHPEQFSTPGKHWSRRYMEWLNTIEMKADSGRVVLKKHISIFEEMRAQQLSITREVRDLSRTKSYKNDFDLLLGIPGVGLITGMTYLTEIEDINRFSSTDKFASYVGLVPSSNSSGEKENNGDITSRAKKILRDLIVESAWCAARKDPALHLAYCTFCKRMPPNKALIRIARKMLNRIYHVLKNKTQYVCGTVN

SEQ ID NO: 179364 - protein, 285 aa, unidentified
MKENKPKTCGLDLGDKYSHLCVIDEEGAVVEESRIQTTKAALRSYFRLRQPMRVVLEVGTHSPWVSRLVGAAGHETIVANPRRVRLIAENHKKSDTVDSELLARLGRFDPQLLSPIQHRREQTHIDRVQIRARASLVESRTRLINSIRGMVKSAGYRLPQCSTSTFGKRSEAIPEELRETLLPMMECVGKLTEQIKLYDERIQVCARERHPDTEPLRSIAGVGDLTALTFALTLEDPCRFKNGRAAAAFLGLTSRRRQSGETDPDLRISKRGDRYLRQLLVQSAH

SEQ ID NO: 179365 - protein, 418 aa, unidentified
MRVLFIGDDWAEDHHDVELEDEGGRRLARARLPEGLEGITRLHALVAEHAPAAWAELPSEQVAGQVVVGIVTDRGPWVTALRSAGYVVYAVNPLSAARYCERHSTSGAKSDAGDAHVLAEIVRLDRAHHRPIAGDSELADAVKLLARAHQNAIWERTRLVLRLRSTLREYFPAAIEAFADLTASDTLSLLERAPSPALAARLTRGQLTAALRAARRHHVEAKAVALQEVLRAPALRQPPVVESAYASVVAGQLRIIAALNAQIAGLGEVMGEHFDRHPAAEIYLSQPGLGVVLASRVMSEFGDDKTRFADARARKNYSGQSPITRASGRKTIVLARYATNRRLGAALHMQAYAALTGSPGARAYYDTIRSRGISHHAALRQLANRLVGILHGCLKTGSLYDENTAWQHRQTDTHVAAA

SEQ ID NO: 179366 - protein, 322 aa, unidentified
MNESDGYWGIDVAQATLVVAQAGHGPSTTYPNTTDGHETLLALFAAAPVHRIILEATGGYERGIVAVLGAADLPVVVVNPRQVRDFARATGQLAKTDAIDAQVLAVFGAKVQPELRPLPTTEQVVLRDLLTRYHQVQQMLGAEQTRLLQALGRQAQRPLRKQLKRHIAFLERELHELDADLDDQLRQSPLWREQDDLLQSVPGIGNKTARTMLAFLPELGTVTSGEIARLAGLAPLNRDSGTRRGQRRTGGGRPRIRAVLYMATLAAIRYNPLIRTTYQRFLKAGKPKMVAIVACMRKLLVILNAMLKTKTRWQSLVTTTTT

SEQ ID NO: 179367 - protein, 356 aa, unidentified
MSGKLDSAIAVVGIDIGKNSFHVVGQDKRGAILLRQKWSRGQVEARLANLSPCLIGMEACVGAHHLSRKLRALGHDARLMPAKYVRPYSKGQKNDFRDAEAIAEAVQRPTMRFVATKTTDQLDLQALHRVRERLVGQRTSIINQIRAFLLERGIAVRQGLRFLRAELPGILAARSDVLSPRMLRIVEDLAGDWRRLDERIEGVSSEITALADQDAACKRLMTVPGVGPIISSAMVAAIGTGDAFAKGRDFGAWLGLVPKQISTGDRTILGSISRRGNRYLRALFVQAAWVVLVKVGPKHWQRYGLKSWIEAAKKRLHHNVLAIALANKLARIAWAVLHKGRAFECVKTDAMASRPA

SEQ ID NO: 179368 - protein, 428 aa, unidentified
MANVVKIVYPTCCGIDVHKDFLVACIARTDESSNTIHMMRRFSTNTGDLRRLADWLAFNECKDVCMESTGKYWVPVYNILEETCNVCLTHPKYVKAIKGQKTDKRDAKWIAELFKCDLVRSSFIPPFEIRQLRDLCRYHTKLTWVVTAEKNRIQNSLTTSNFKLDAVFSDVFGKSASRILDSLLALGHSNFEIAPLLDKRCKATIEEVRAAIDGQLSYAQGEKIKLMRLHMDHIKGLQDSLELLIMELAEPYLPQIGLLLTVPGISSKLTAIKIIGEIGADMSVFETSKHLSSWAGVAPQNNESAGKKKTTRISRAGVYLKPLLVQVALAASRTAKHPEIMDKYQQLLKRRGHKKSIIAITRRILTAIWHMFSKNEPYNAKLYHKADKPPASRVLTPEQAFDLLRRKGYQIVEPDSVAKQSSGDEPAA

SEQ ID NO: 179369 - protein, 348 aa, unidentified
MHFYTRQHQYYCGIDLHARSMYVCIVDQTGTVVFHRNLPTDRQHLLEAINAYRADIVVAVECIFTWYWIADVCAEQAVPFVLGHALYMKAIHGGKTKNDKIDSQKIAGMLRGGMLPVAYAYPQAMRSTRDLLRRRMYLMHHQSELLAHIQNTNSQYNLAAFEKRINYRRNRVELSDHFPDPLVRKSIEADMEVLDTLHQVLLKLEAAVLEQARDHDPVALQLIRTVPGIGKVLSLVILYEIQDIRRFSTAGNFISYARLVKPARESSGKKSGSRGSKIGNVHLKWAFSEAAVTFLRNNEPAQRYHNKLVARYGKAKALSIIAQKLGRTLYFMLKHKEVFDPIRFYQGG

SEQ ID NO: 179370 - protein, 317 aa, unidentified
MTQTNITTAGIDTSKLKLDIAVHGRAERWQVANALPGWRALAANLIKAGVVRVGIEATGGYERGVVQHLRAAGLVVLVLQPIQVKAYARVHLRRAKNDALDAVLIAACAAAVDQPRIAPDPRLAELAGDLTFLEQIEEDIARFKVRLEHIDEPRLRRIVTSDIARLKTRRTAQIRTIARHLRDHDDLARRLDLVLSIPGIGERTALALIIRMPELGQISREEAAALAGLAPFDDDSGLRKGQRHIAGGRGRLRRSLFAAALPAAFRWNAALIALYTRLTARGKPHNSALIACARKLLVYANTVVQRGTPWTEKPAML

SEQ ID NO: 179371 - protein, 348 aa, unidentified
MTVYCGVDFHARKQTISYLTTEDGEVQQVELEHEQDNIRGFYAKLRSQGPVIVGFETSGYAAWFEEMLEELGCEIWIGMPAAIRRQARRRQKNDRRDADLILELMLRGDFPRLHRYTLESREVLQQLRYRHRLVKLRTIVVNSLQYLALSRGVSLRTKLLTGRGQKRMKELKLPSHLAKQRDEMCELLKELTEKIETAESWLNLRAEQDTRVGRLRTHPGIGPLTGLCLVYTLEQVQRFANPRKVTAYVGFDPVEDSSGERQRIGAISKQGSRLLRFLLVEAGQVAVRSDEDLKAAYWRVQLRRNHQKAKVAVARRLLVRAFIMLRDEIDYAEFQRRGVAARSTRRTA

SEQ ID NO: 179372 - protein, 411 aa, unidentified
MSKILCGIDWAEGHHDIALVDHDGTQVAKLRISDDSAGFHALIELLTRHGDTAEDPIPVAIETPRGLLVASLRATGRQIYAINPLAAARYRDRGSVSRAKSDAADARVLANILRTDRHAHRPLPDDSEAGQAVAVLARAHQDAIWDRQQMINRLRSHLREYYPAALAAFHGTGKPGLDSPRARVILTAAPTPADAARLTRSQLRALLKRGERPGCGIEAEVERLRTIFRAEYMRHLPQVEQALAHQAVALIRQVDAACLSVTQLAAATEKAFLAHPDADFITSFPGLSVLSGARVLAEIGDDRERFADARAMKAYAGAAPVTRASGRSHVVVARTVKNQRLASAGHMWAFAALRTQAPRAHYDRRRAGGERHTAALRNLFNKLLGCLYHCLQHRVRFDPDRAFAPPVDLAA

SEQ ID NO: 179373 - protein, 419 aa, unidentified
MRSNLSKRTGIINNQTLIVTVDIGKSKHTGYGRCPDGTEIPTFEFFNNGRGFTKFWAKVKAMIHDKQLTEAIVGFESTGPYAEPLMHFLSKKGVRLVQVNGAHTKKAKEIFDNSPNKTDAKDPNVIADLLELGRFLSVVIPEGSAAELRRLSHARERHLERLKTLYNQLHALVFLMFPEFLEVMKKLKTKSSRHLLEIASTPQAILALGCDELTRILRRVSHGRLAEKRAQALYVAASESVGLVAGQKGMVAELEQLLQLIALCESSIAQLEQQLAEELKAVPYSRCLLSIKGVGVVTVAGLIGEVGEFSNFTTIDQLMKYAGLNLYELSSGRHQGRRRISKRGRPLMRKLLYFATLNVVHKGGILHRQYQSYLQRGMPRLKALVAICRKLLGIMFALVRDHSEYQTEYSNYPLLKQAA

SEQ ID NO: 179374 - protein, 349 aa, unidentified
MRFYTSAHRFYCGVDLHARSMYLCILDAGGQVVFDKNLPASGQAFLQAIAPFRDGLVVAVECLFCWYWLADLCAREQIAFVLGHALYMKAIHGGKSKNDQIDAGKIARLLRGGTLPQAYVYPAGMRETRDLLRRRQYLVHKRVEAIAHIQNTNSQYNHPVFGKKLGYAANRDELDIANRFTDPSVKKTVEVDLALIDHYDALLGDVELYLTRSAKVDDVQTYHRLQTLPGVGKILALVLLYEIHDINRFPDVGNFLSYARLVRCAHESAGKQKGSGGKKIGNPHLRWAFSEAACLFLRKSERARRWKAKQEKKRGPAKAMGILAAKLARAVYHVLTKKVAFDEQRFWNC

SEQ ID NO: 179375 - protein, 370 aa, unidentified
MLDTTTFVGLDVHARSIKAVSLDVMTGEVRAATFGYDAGAVAEWVRSVDPRARCVYESGVTGFDLQKRLSGLGVDCVVGAVSKMIKPSADRRRKNDRNDAEFLARMLSVGNVVEVWVPDDECEAARDLTRALEDARDDLSRSKQRLSKFLLRHGLVFDERTPTGRRKGNWTRAHWSWIESIRFAEGADNDVLAYYVDAVRRAAEEKARLEGLVEAEARKPRWRKRVDSLRCLKGVDTASAADLVFEAGEFSRFRNARSFAAWVGLTPSEHSSGESDRRGAITKAGNKHLRKTLVEAAWHYLTCSGRPKGLAKGQAPDRGARRHAAKGVRRLVERRGALLARGVHNNKANVATARELACWVWAVGLMAEEA

SEQ ID NO: 179376 - protein, 324 aa, unidentified
MDKDTTYFGIDISKDVFDVTDSKGNYKQFENKHNGFKKFLKLIDDSSHCVMEATGYYHTQLAYFLQENNIKVSVENPLSVKRFIQMKLSKIKTDKSDSKMICAYGVYNDLKLWKGHSKQQQECLQITRLLSTYTKQCTMLKNKIHGEGVLGVPSKLVLRSLKRHLKQLQKEVLNLESHLLKLVKENYQDLLSRLETIPGIGRKTSLMLIVLTDGFHRFKTASELCSYSGLTPIIRQSGSSVNGRARISKIGNKNLRNLLFMCSFNACKYNKACKAIYDRIVAKGKSKKLALMAVCNKLLKQAFAIANSGLVYDQNYKSTLVREA

SEQ ID NO: 179377 - protein, 357 aa, unidentified
MGKIQSRIGEVVRIGIDTSKEHFQIHGVNSKEQVVIKKSVTRDKFVEFIAQLPACEIGIEACGASHHWGRTFEKMGHRVKLIPAKAVKGYLHKNKNDANDAAAICEAISRPNIKFVPVKTVHQQDIQAMHRLREDIVKSRTALANQVRGLLAEYGIVIRRGIENIRGRMIEIISDGENSLTVHFRETLDSLYESFRGMDERLKVIEKRIAQSSKEDKMPNLLMGIPGIGPIGSSAIVASVGDGRQFETARDMAAWAGLVPSQHSTGGKNKLGKITKNGNRYLRKTVVAGARSVVKYCKNKNDRTSLWIQALVERVGFNKAVIAVANKNMRIAWAILKTGIPYKKAKADLLPGLTVKG

SEQ ID NO: 179378 - protein, 300 aa, unidentified
MIYIGIDVGKNKLDCLWLKDVLSEKIKTKVFKNNPEDFERIAQWLTKVTTAQPEQLHVTLEATGVYHEGIATHLFQLGFQVSVVNPARSKEFAKALGVTHKTDKSDRLLLAKFGYQVTPKLWTPEAPEVRKLKVLIKRIESIEKDIQRELNRKEQAEIAANSYIVIVSVLVKEKNRLIEELDTHIDNHPTLKVNRRFLESIPGVGSVVSAYLGLIPRIRESGTLKGRSMLSKVGPANVRAKIYMAAVVAKQHNPDVKALYERLKSRGKTHMQALGAAMRKLVQICFGVVKHQSEYKPQIV

SEQ ID NO: 179379 - protein, 416 aa, unidentified
MSKKKRSVAGLQALYGRVCGLDVHKKVIVACVRILDPKDGTVQSTLRQFGTMTADLRELRQWLVELKVTHVAMESTGVYWQPVFNVLEGHFKTWVVNAQHIKKVPGRKTDMKDAEWIAQLLQCGLLRPSFVPDRPQRELRDLTRQQTKLVQQRNAVDNRIQKVLETANIKLGSVASDVLGVSGRKMIEGLIAGEKDVAALAELAQRQLRGKIPELQRALEGELNDHHRFLLRQLLGQYDFLEKEIASVSERLGAVAPPSFRAAVEQLDAIAGVGERGAQALLAETGTDMSRFPTHKHFTSWAGQCPGNHESAGKRRSGKTPAANRHLDAVLTEMAHAAVRTKNSYFKAQYHRLAGRRGKKRAIGAVKHSLLVTVYFMLRDDKPYKDLGVDYFDKLNPQQRIRYHVRKLQDLGQQVE

SEQ ID NO: 179380 - protein, 510 aa, unidentified
MAVDFLVFREPVKKHGPGVASGLDIGDAVEAIPFRKVIFSAAPAPGFTHGGPTMQGKQKQARGRSAGQLLTLNEHAAGLDVGSTFHVVAVRSDQDEEPVRTFRSFSGDLHRMADWLGSVGIKTVAMESTGVYWIPVFEILEARGFEVLLVNARDVKNVPGRKTDVNDAQWLQQLHQHGLLRGSFRPRDEVVRLRAYLRHRERIVEYAASHVQHMQKALMQMNVQLHHVVSDITGVTGMRIIRAIVAGTRAPEELAQHRDVRCAASEETIRQALTGNYRPEHVFALKQALELWDVHQAKIAECDIEIETVLKSLNEKRAAPEAPLPPVRHAKARNEPKFDVRPALYTLLGADLSQIHGFGPYTVLKLVAECGDDMTKWPTAKHFTSWLTLAPGNKISGGRVLSSHTRRSSNRAAVLLRIAAVNIGKTQTALGAFYRRLAARTGKAKAVTATARKLAVLFYRALRFGMTYADPGAEYYEERYKRRVIDSLQRRAHGLGFKLVENVAATEGVS

SEQ ID NO: 179381 - protein, 343 aa, unidentified
MDSYVGLDVSLREVSACVVDEAGTIQSERTVAADPDVIAAWVHAQAPTVRRVGLESGPTSAWLWRELAKRGLPVICIDARHAKAALSMQINKSDRNDAAGIARIMQTGWYREVQVKSPHSHAIRGLLNSRSLLVKVQRDLENQVRGLLKSAGLIVGRAKDGVFSARTKQLLAAHIDLAAIALPLLEAREAIHGQLVQLERRVRQLAKEHRQTSAFMTVPGIGPITALAFLATVDDPRRFRRARAIGAYVGLTPRRYASGEVDWTGRISKCGDTMLRTYLFEAAGVLLTRVQKWCALKAWGLRLAKRSGMKKARTAVARKLAVILLRMWRDGTQFHWTAAPAAS

SEQ ID NO: 179382 - protein, 323 aa, unidentified
MAKRITICAGIDTGKHRLDVALDGSPERTQVENTPEGYAVLFEWLQHHKVKRVGIEASGGYEQAVVAELRRKRLVVVVFQPAQVRAYAVFHLQRAKNDKIDAALIAACTAATKKIHPAPDPRLRPFAEHLTMIDQITQDIARLKDRLESCRSERFQKLWREQIAFLAKHKRAELKALVAAIRKHRDLAARLDLIESVAGSGLPTAVAVLVRMPEIGQITREKAAALAGLAPYDDDSGDRTGVRHIEGGRERLRRALYNAALPASFRWNPQLMALYQRLIAAGKGHKPALIACARKLLVIINAVVARGTSWLADPSATARASAT

SEQ ID NO: 179383 - protein, 349 aa, unidentified
MRRVYVGIDIGSKQCSAAAINSRGKLISAETFRTSEMSLISFVEGQQGEVKVLIEEGELAGWVMRTLLPHAKSVEVSDPKRNAWIAKGANKSDRVDAAKLAELLRLGSYSVVYHPEEVEMAAFGIVVKQFDEASRRLAKVKCQIKAGLRRQGIMASGTVVYGKTGRQRMLQKIADPHVARAIERDYDLLDYLTKDKADARRQVSMMSKRFPVIERLMRMPGVGLVLASRFVAIVGNPHRFNKRTLASFSRLGIVKRSSDGSPLGPEHIDKSGNGRMKDVSRKAFERALGTKRPNGIKDFYLGSLSRTGNKTSARLNTQRKILAIMLAVWRDGTEYSDELVTGKRAFARA

SEQ ID NO: 179384 - protein, 345 aa, unidentified
MKQYAGIDVSLEYSSVCVVDADGRIIREAKILSEPDALIAWFGAHGVAMERIGLEAGPLSQWLHAGMVKAGLSVELIETRHVRAAFKTMPVKTDKKDARGIAQLMRLGWFRPVHCKSLAAQEVRALLTARKLIQGKLHDIEMSIRGILRGFGLKVGPTTRRTFAGRIRVLIAGHSTLEAIAMALLKVRDALVQEFSGFERKLRAIARQDDNALRLMTTPGVGVLVALTFVAAVDAPERFRSSRAVGPHFGLTPRKYQSGETDQSGRISKIGDGSVRTVLYEAANVILTRPVKGSDLKRWALAVARRAGPKKARVALARKLAVVLHCMLRDRTNFVAHKGASAVAA

SEQ ID NO: 179385 - protein, 338 aa, unidentified
MSHVGVDLHKNQFSVYWKTGEGKGIFKEYPMTARGITEFKKGLDKETEVAIEATGNSKFFYDSIVEEAKRVRVINPLQFKVISESVKKTDRRDAEVIAEYLSKGLLPEVRVMNKETRELKSLIQTRDKPVKLRSALKNKIHGILMEHGITSRREMFSSEQALDKVKNAEVSETSKFEIGIIVDQIKGLTESIKKIEDKIKEKGEGLKGQKNLQSITGIGKLSSTIILSNIGDINDFDDSKKLCAYAGLVPRVYDSNESIRHGQITKRGDKILRTTLVQVVLIAIKYSPYLRNFYERLKHKKGSGKAIIATARKMLSIIYDTLKNDWVFEDFNNFVLQN

SEQ ID NO: 179386 - protein, 465 aa, unidentified
MPRQTPRRPSRPRRSPAALDRLHPHAAGIDCGSAEHFVAVPPDRDANPVQSFPTFTADLQRLAAWLTTCRITHVAMEATGVYWIPIFEILDARGFQVILVNARHVKNLPGRKSDVSDCEWLRDLHILGLLRGSFRPADGIVALRGYLRHRTTLIESTGALVQRMQKALVQMNVQLPVVVSDITGVTGLRILRDIVAGQRDPQRLARHRDYRCRASEEDLVAALTGNYRPEHLFVLQQNLELFDVHQAQLTACDHAIEAHLAALAAQASAPTAPLPAARPRQKARDNEPRFELRTPLHQLTGVDLSQIDGIGPYNAVRLLSEIGTDMTRWPTEKHFTAWLTLAPQNKISGGRLLSSRTQPSKNRAAAILRLAAMNLGRTQTALGAFYRRLAFRVGKAKAITATARKIAILVYRTLKHHLVYVDPGAAAYDAKDRTRVLRRLHHRAAHLGFGLVNLATGEVLEEAVS

SEQ ID NO: 179387 - protein, 344 aa, unidentified
MNYYAGIDVSLESSSVCIVDATGEIVKEARVESHPDALVKFFKAFGLPLTVIGLEAGPLSQWLYAGLTKAGFVTTLMETRHVNAALSATTVKTDRRDARGISQLLRMGWFRPVHAKSTGSQEVRALLVARKQIQHKLRDIELSLRGILRGFGLKVGKVTEKTFEARIRELVTSHPMLEEIAEAMLAARAALLEQFKKLHKAVLKIVRHDEVCRRLMTTPSVGAIVAITYKSALDDPGRIKKSRNAGPLFGLTPKRYQSGETDITGGISRVGDEMVRTALYEAANVLLSRVTRFSALKRWGMEVAKRRGLKRAKVAVARKLAVILHRMWIDGSTFRWTKTEAAYA

SEQ ID NO: 179388 - protein, 343 aa, unidentified
MTIISHLYAFVVGVDTHAKNHVYSVLTHTGEHVDTATFPTTKAGIKRALTWVGRRTRGDLNTLWVIEGTGTYGAILADHVADAGYTVAEAASMNARDRHATGKDDRIDARRIAGTVLPLDESRLRFPRQADGPRQGLRILVKARESMTGEKTRTINALTALLRTHDLGMDARRKLSVVTIQTMAKWRLRNESVALTEARREAIRLAKRVVDLDVEISDYAMRIEALVKDSPGAVLLAEPGIGPISAAVFYLAWSHHGRVRSEAAFAKLAGVCPIPASSGNVVRFRLNRSGDRRLNSALYMVAITRLSHHQRSQEYMAKRLGGLAPMEYRTKTATAEQPVTALC

SEQ ID NO: 179389 - protein, 595 aa, unidentified
MLPQSPSASQAPRRFGVGIDTSRYGHYAAFLNEQLQPAAAELQFPESAAGYALLRGRLEGLARRHGPAHFVVRLDAAGQYADNLRHFLHGLASPAAGAVGAARFSLTLSCGDPQRNKNYRAALFGSKKSDPVEARAAARFALAERPSTDIPLSQELRILRQVAGRLQAVVRQRTRLLNQFHHLLALTFPELALLTKELAAGWVLELVHRYPTAPLLAAAPPTDLGHIAYLPDRHIAPLLEHARASVASLAGATVAELVREQVRQLRDSGARQKRLENLLVTAYRALPEANHLDSIPGFGAVTAAVLTACTVAIERFATPAKYVAFFGVLPVEVASGVERDGQARAPRRWAMSRRGNDLVRRYLWMAALSAAQCNPAVKALYARVVAKHPQHKAVAVGHAMRKLLHLAFAVWKTGRPFDRDHYPWQTPTHVESSDNGMSPAPETSDNTRSQEGQAAGHKPVRMPAQPVVTAARTDTLADAAAVGEGTYLDFAHLKRQLPLARVLDQLGLTARLRGSGPQRRCACPLHRGDARGRTFSVNLDANVWQCFAQECGRKGDVIDLWAAVQGLSLRAAALELVQTFGLEPAPCGGTEKRHG

SEQ ID NO: 179390 - protein, 349 aa, unidentified
MNNSIVTLSTTKNKRPAQYGHYIAVDWSQKNMAIARSTQKSKHVRTLDVPSELRDLKDYLSNLKGSKILTIEECPAAQWLYVELLDYVDKILICDPYRNRLLFDGAKNDVLDAEKLCLLLRNGLLKEVYHTHNSLFELRKYVSAYLDIIQTGVRIKNQRSSIFRSEGKNFRKESVELDANSFIVGIIDRNIETYEQDKAEYKTLFNKIKRKNTILKNLCNVPGIEIISAVKILANVIDAHRFPKKGNYLAYCGLVKHKRVSGQKTYGLRKPRYNRVLKSVYKSAAWTSIIATSNPMKDYYEYLLEKGVEVHNARNALARQIAIITYGMLKSGEKYQPYKREKETKPILN

SEQ ID NO: 179391 - protein, 407 aa, unidentified
MEVLYPRCAGLDVHAGSVTACARIATDAQVTYDHHTVPTTTRGLLALAEWLTTHGCTHVAMEATGVYWKPVWHVLDAQFTLVLANAMHIRNVPGRKSDMNDATWIADLLAHGLIRSSFVPPAPIQELRDLTRTRRQLVHEVARHVLRIQKTLEDANLKLTQVMSDIVGVSGRAILNALIAGEMDPNRLADLTRGRLKATRADLVDALHGRVTDHHRFMIKLHLTHIDALETAVTTIEARIGDALGPCRAAVSLLTTMPGLSETTARVLIAEIGTDMSRFPSAGHLISWAGLCPRLDESAGKRRSTRTRQTTPWLKPTLINAAWGATRKKDCYLRAQFLRIKSRRGAKKAILAVASSMLTAAYFMLRDGVEYRDLGAQHFVERDKEQLAKRLIQRLRDLGVAVEVKAA

SEQ ID NO: 179392 - protein, 423 aa, unidentified
MSARWKEEAVEQIHERVAGLDVHRDSVAVCVRVRAPRGAVANEKERFATTTTELARLAGWLAERRVTLVAMEATGVYWKPLYYALERGFEVWLCNAHHVKNVPGRKTDMSDAEWLADVAAHGMVRPSFVPPPEIRELRELTRYRKTQIDARAAEIQRLEKVLQDAGIKLTSVASKVLTQSGRLMVEALIAGQRDPAELAELAKGKLRPKIPQLTEALNGHFGAHHAVAARRILCHVDFLEASIATLTEQIDLRMQPYGAVRCLLTQIPGFDRLVIDTVIAETGADMTRFPSAGHLANWSGVCPGNHESAGKRRRVGVVPGNRWLRRTLIEAAHAAARSKGSYFGAQYRQIARRRGPNKAAVAVAHSLSDLVWHMLNTGECFTDLGADYFQRRSDPQREADRLIRQLQALGYRVTVTDPQTPAA

SEQ ID NO: 179393 - protein, 339 aa, unidentified
MPKYIRIGVDIAKNSFQVHALESEDCSATKRKLSRSGIVKFLAEVEPCAIGMEACGSAHYWARRFRAMGHEVKLTPPIYVKPYVKRGKNDAADAAAICEAMSRPNMRFVAVKSEDQQATLMAHKTRELLIKQRTMSVNALRGHLAEFGVIAAKGISHVEELVERAAADLPAMVQATLGVLLAQLRSLDAAIDELERAIVADHRRDPVSRLAASVPGVGALAASAILASAPDPQAFKSGRDFAAWLGATPKQNSTGGKEKFGSITKQGNRYIRRLLVLGAISVLRAAPKRKGALCDWLAALRARKPPKVVAVALANKLARIVWAIITTGEVFRTSIYAKA

SEQ ID NO: 179394 - protein, 370 aa, unidentified
MKMSIGVDLHKTQFTVCYLSEDRKIQESGIYPTMDRGWQAFIKKILDWSGAGYEVRVAVESTGNTRHFCRQIMKAGIEVKIVNTLKFKIVNESVKKTDKHDSRTLAEFLEKDMLPESILCSQESEDIRRLLKSRSVLVKAIVSLKNQVHGLLLGYGIESRRGQLQSKKERQRILDGLADHRSDGNAARAVQPLLDSIDQISFQVKELERVLSELIVQDEEVALLKTIPGVGLITAAAIRAYTDDINRYESAKQYAAHAGLVPWVQNSNKTIHHGHITKRGPSELRTAFVQMVMGMLRLQNKTDGYRLMRKYRMMKECKGTGKSIIATARKMSSIVYAILKTRQPFDSLRMLPVPKDMEMSKDATRYALVV

SEQ ID NO: 179395 - protein, 355 aa, unidentified
MDGTKYIGMDVHKESISIAVMNSAGKLVMECVIGTKANMILQFVAGLRGDLQFTFEEGTWAAWLYDLLRPHVTKIVVCNPRRNALLKDGNKSDRIDAQKLAELLYLNKLRPVYHGEHGLRAVKELVRSYLTITKDLTRVMTRVKALYRSWAIPCTGKQVYGQRHREEWLAKITEPGVHRRAEFYYQQLDALRALRQDVRRELLKESKKHKAWKLLSRIPSIGPIRAAVLMGILQTPHRFRTKRQLWTYSGFGIETRSSADHRSVEGQLRRARKPASIRGLNENHNHDLKNLFKSAAILASNKPGPFQEFYGALLTKGMRPEMARLTLARKIAAITLHLWKKGECFDAQYLKPQTA

SEQ ID NO: 179396 - protein, 375 aa, unidentified
MKKNSSGCKSSKASMKATKSTNVTVGMDLGDKTSRYCMLDENGEVLREASVGTTKKAITQVFATMKPCRVAIEVGTHSPWVSRLLKSFGHEVIVANARQVQLISNSSRKNDRMDAQMLARLARVDPRLLRPIQHRSEQAQEHLRVIRVRAALVEARTMLVNAARGLTKATGERLASCDADQMGVERMESLPAGLQNSLRPLLEEVESLTEKIQALDQQVEQIARTDYPETGLLRQVSGVGPLIALTFVLTVEDRERFQKSRDVGCYVGLRPRQSDSGESEPQLRITKEGDPYLRKLLVQGAHCIMGRRGPDTDLKRWGLKLSARGGKNAKKRAVVAVARKLAILLHRLWVTGEVYEPLRNNQAGPSLKETGEAAA

SEQ ID NO: 179397 - protein, 378 aa, unidentified
MTAPTRPVTTSVNEPTVYVAFELGKKEWKLGLTSGFGGELMIRTLRSGDLRAVARVIGEARRRFEVPDAARIVSCYEAGRDGFWIHRALATLGVHNRVVDSASIEVNRRARRTKTDRIDARKLVMMLVRVCTGEVGVWSEVRVPSVDVEAARHGSRERTALLQERTRLRNQMGSWLQTWGCEVSSRVRRTADWWHQARDWQGSALPSTVQARIARAERRLAVVAEQIEVLETAQRAALHDAVADSPMGRLARLKGVGVTSTTVLLEEGLVWRAFRNRRQIGGLLGFAPMHFQSGEAARDQGISRAGNARLQSVTIQLAWGWLHWQPQSALACWFHAHFGPRRRARRIGIVALARKLLIALWRYATTGLVPAGAVLKVA

SEQ ID NO: 179398 - protein, 311 aa, unidentified
MEHSRFVGIDISKDHLDVHVRPTGDSFRVRDDDAGLVTLVAHLRPLAPVVLVLEATGGHEVTVAATLASAALPVAVVNPRQVRDFARATGQLAKTDTLDARVLALFAEAVRPAARPVPDAQAAALGELIARRRQLVDMLGAEHNRRRLLRDRRLQRHLEAHIAWLEEALRRLDHDLTTLIRSTPVWRETDDLLRSVPGIGPVTAGTLIADLPERGRLDRRRIAALAGLAPIARDSGAFRGRRMIMGGRAHIRRVLYMATLTAITHNPVIRAFHQRRVAAGRPGKVALTAAMRKLLTILNAMLRDRRPWHPA

SEQ ID NO: 179399 - protein, 316 aa, unidentified
MDAIIERCAGLDVHQETVVACVMYGPLDRKPKQDTQTFPTTTKGLLALHDWLLQWECTHVAMESSGVYWKPVWNILEDSFTLVLANAQRIKNVPGRKTDVNDAAWIAQLLRCGLITPSFVPPEDIRDLRDLTRYRRRLLGHATSEKNRIHKILQDANIKLTTYVSDLFGVSGRALLEAVINGEVLTAEQVRDLVKTSLKRKVPELLDALNGRVRKHHRRMMRMHMDHLLYIENQIAELEQEIDRLLQPYRESVTLIQTIPGIKEDAAAVILAEIGNDMSCFPSDAHLASWGGLSPGNNESAGKKKKAPEPPKGTRA

SEQ ID NO: 179400 - protein, 391 aa, unidentified
MFYMGIDIAKFKHDFCIINGDTGEVIVPPRTITNDKEGFQEMLEVLTNLHCSQKIKIGLEATGHYGTLIKAFLTSNGYKFIELNPLQVSRFHSQTSLRRTKTDKIDCQVIARYLMAIATKTYQPQVYHLEALKSLTRLRETLVDQRSRCLVKLTNVLDITFPEFKKFFTAKLRSETALFIIRKYKTPSRIARWTDEDIALVHNVSRKFSTSKLLEIKQSAIDSIGIAPKYLLDELPSILNVYETVNDEVSKLEEKIKSIIFELDPPSLSIPGMGPISLATILGEFGDLSRFPSAEQCIAYAGVDVGISQSGTKCHRGRMVKRGSSHLRYALMNVARTVCIHTPTFKEYWAKKTVTGHKFLRVADSHAAKKLIRVIYYLETHNTKYDPSRCK

SEQ ID NO: 179401 - protein, 420 aa, unidentified
MKAKKKAKLDLIGDDTLVVGIDIGKRNHYCRFINVRGYEIGKGFSFSNNRDGMEKIVSKIEEAKTQNNLTKAVIGMEPSGHYWKAAAHYLSGSGYKLALVNPYHIKRIKEIEDNSQTKTDPKDSLLIAKLVRDGDFFDPNLADGIYAELRRMYRLRLKVNKSLVREKTKLKILMDEYFPEYEDLFCDILGVTSEYIIDNYFLPEVIAKKNILSLTGKIKMISRGKIGAPKVLKLIEYARDSIGITTGIDAAVLEKTYILEEISNLKLKLACLNKKLKYYLDKIEYSKYLLSIPGVGVVTAAGFLGEVGDISKYKSAKEIIKLAGLNLVEISSGIKKGKKKISKRGNNRLRCLLYQCAVVAISKNSQIKKYYSYQVETKNKMKMVVAVQCKLARIMFALLKYKKYYNPEEVLKSMVAQAVA

SEQ ID NO: 179402 - protein, 421 aa, unidentified
MTQTSHNTFAALVGIDRADAKHAMCLQVMGTAKRECLQLEHPPEAIDAWGTTLRTRFSGQPIAICLALTKGPLVSALRTYDFLVLFPINPLTLARYREAFTPSRAKDDPTDAELQLELLLTHRDKLQPLQPQSPTMRALAQLVEHRRRVVGDKVRITNRLTSALKNYFPQVLHWFQDKDTRIFCDFLSRWPTLKAAQLARRSTLETFFRDHHVRTADVLATRLHAIKTATPLTTDEGIIAPNVLLVQTLVSQLRVTLDAIEAFDQAIAQRALHHPDFPLFQALPGAGPVFASRLLVAFGEQRERYASAAELQKYAGIAPVTERSGKKAWVHWRLQCPKFLRQTFVEWSAESIRHSFWAQVYYQQQRDKGNTHQAAVRALAFKWIRILYRCWQERTPYDESTYLQALMRRNSSLIPNRVKAS

SEQ ID NO: 179403 - protein, 353 aa, unidentified
MEQFIGCDAHKKFSLFIAMNEDGEYGKAIRVGHERERMRAFLEELPAGQRIALETSGSYYWLVEEMERAGHVPQLAHALTAKRRMEGRHKTDERDARGLAMLLRNGTLPRVWIPPAELRDQREMLRLRMSLVESRSQAKNRIHGALLRYNVELKAKDIYTGEGRQELAGQLAQVPEWTRQSVVRQLEMVDYLERQIEACEQSLETMLAPNAERDLLRSLPGVGKILSAVIALEIGDIARFGSAQRLVSYAGLVPAARESAGKKRPGKCPADCNTYLKWAFVEAANVIAVHHKKWPDRHVAQLYTRVKHTTKMHGKATVAVGRHLAEAAYWILSKLELYREPKSNRPALSSTHG

SEQ ID NO: 179404 - protein, 368 aa, unidentified
MGHKSSKLYVGMDVHKESIDLAVAEEGGELRHHGQIGGDMNALWRAVRKLESSGRELVFVYEAGPCGFGIYRGLTGRGHACWVVAPSNTPRRVRDRIKTDRRDSLKLAGLARAGELTPIYVPDVRDEAMRDLVRSREDAVVMQRQARQRLAALLLRNDVRYAGKTAWTAAHRCWIADLRLPQSAQRLAFEEYVQAVEEASARVQRLSQCLEQELAHWRWRSVVAALQACRGIQLIHGVRLVAELGDLSRFSHPRRLMAYLGLIPSEDSSGEHRQQGAITKAGNSSARRALVEAAWAYQYTAKVSALIARRQADVPKVVLDIAWKAQLRLCARFRRLAARGVNRNKIVVAIARELAGFVWAIAQQVKPV

SEQ ID NO: 179405 - protein, 396 aa, unidentified
MVGQWVFGGVDSHADTIHVAVVTGNGGHLADAEFPTTSAGYTAALAFLSAHGDVAAIGVEGTASYGTGFTRAARADGLTVIEVNRPDRAERRRSGKSDPIDAYAAARAALSGRASSAPKDETVTGIRALHNAARSTVKARTAAMNQIGHILIGAPDTIRARYRTLDGKPLTDALARLRPTGDAVHTAVLTALKSLARRVKALAAEHDDLTAALDDIVAGHNPGLRAAYGVGPDTAAQLLITAGGNRDRLRTEASFAALCGVAPVPASSGKTNRHRLSRGGDRAANAALYRIALVRMSSDRRTRDYVARQTTAGRTKKEIIRLLKRAIAREVFRYLTTTVAVPDIADLRPARQAKNITLTAVAHHFGVWPAVISCIERGTRRDDDLANAYRDWLTAA

SEQ ID NO: 179406 - protein, 389 aa, unidentified
MLFNHPSDGLTAIRTHIGAIFVSLELSRSNWLITSLSPGKGEKMSKHSVTAGDVAGLMKLFADLRRKAEVRTGQGYPVITIQEAGLDGFWIHRVLQQEGIESHVVDPASIATPRRRRRAKTDRLDGETLLRALLAYKRGEPRVCAMVVAPSPEEEDRRRLCRERATLIAERVTHVNRIKGLLFAQGISDYGPLRRDRRARLETLRTGDGRELPSHLKAQIGRELNRIELLVEQIKTVEAERDALLATARKPASEEAAPDPVTMLLALKGMGANFAAVLWSEAFYRQFANRRQVASYAGLAATPWQSGGIRHEQGVSKAGNPRLRTTMIQIAWLWIRHQPQSALTRWFKERSPQGRKRAIVALARKLLVALWKYVTQGVVIEGAVMKPAS

SEQ ID NO: 179407 - protein, 360 aa, unidentified
MKIVGCDFHPSWQQVAVFDPETGEIAELKLSNGDGEAERFYRELEAPALIGIEACGNSQWFIELAERLGHVVWVGDAAQIRASYVRKQKTDRRDAGHILKLLMESRFPRLWTPTAAQRDLRQLLIHRHKLVEIRTRVKNGLQHLALNRGFPKQSSRLCGVRGRAYMEKLPLTGWTARRREDLLKLLAELDKHLGELDEAVQRAAGEHPQARLLMTQPGVGPITSLAFVLTIGDVSRFKHSNQVASYLGLIPREHSSGGKQRLGSISKQGNRFMRQLLVESVQTVNRLDEGFRKQYAARCHHKAKGVAKVAAARKLAVRLYWMLRQNVGYPEIARIESSPRVALRDESHLATVNGRSRIQQ

SEQ ID NO: 179408 - protein, 376 aa, unidentified
MKHQETLVVGGVDAHADSHHAAALDERGALLGSEGFATTMDGYGELFGWLSSFGKVAVVAVESTGCYAAGLVRYLRSRGVPVLEVNEPHAHARRRLGKSDPIDAELAARVALSGKADAIPKRTDGIVESIRQLRLARQSAVKARSAAMVQLRDLIVTAPQPLREQLAEPRTIRGKANLCRRLRPAMGELELPSQSARLALRSLARRIQALDEEIAALDKQLERLVREAAPRTTALLGVSTGHAGQLLVSAGQNIERLRGESSFAALCGAGPIPASSGKTSRHRLNYGGDRDANRALHLIAVCRLRYCPRTRAYAKRRSAQGKTKPEIIRCLKRYIARQTYRTLTADLASLRPEQRPSRVTTIYCGAGPIGITRSRT

SEQ ID NO: 179409 - protein, 352 aa, unidentified
MIIGCDFHPSFQQVAYVDQETGEYGERRLGHREEAVRFYRSLASGQVRVGVEATGNDRWFRKLLGELGHELLIGDASAIHAAAPREQRTDKRDARHILRLLVENRFPSVWQPSADNEEQRQLLLHRCRLVQMRTRIKNQLDSIAKSEGLTGSRSWSARRRGQIEALPLRGWYAERRADLLLLLDGLEMRIKPLDKAVEAAASQDARARLLMTHPGVGPVVSLAYALVIGDWRRFPRGKQVGSYLGLIPSEASSGKRQQQMGHITKQGNTLLRWLLVEAAATAQRYDAGWHRQYVRLSMAKHHGVAKVAIAHKLAVRLYWMLRSGQDYVAVKERGSHARQSECPVGPSQRPIE

SEQ ID NO: 179410 - protein, 392 aa, unidentified
MKTLHRRCAGLDVHSDSVVACVRLTVRTKASHEVRRFSTATRDLLELADWLAAQGVTHVAMEATGIYWKPIWHILEGRFELVLANAAHIRNVPGRKSDVNDAVWISDLLAHGLIRASFVPPAQIQDVRDLTRTRTQLAREVAQHIQRIQKTLENANIKLTSVISNIIGTSGRRILKAMIAGETNPVKLAELGSTRLKCPRAELTAALDGRVTAHHRFLIAHHLSLIDELERHIAAFDARIEKLLRPLRDAVAQLITIPGVSQVSAQVILAEIGADMTPFPTSGHLLSWAGLVPRLDESAGKRRSTRVRKGAPWLKPVLVQCAWGAARTKGTYYQAQFFRLKARRGPKKAAIAVAASLLTAAYHMLKNGTFHQDLGADFLVQTRQGPHRYQAR

SEQ ID NO: 179411 - protein, 453 aa, unidentified
MARKRKQKGGTTGSANMPVMRPDAAGIDIGATEIFVAVPADRAAENVRSFATFTQDLYGLADWLTACGIKTVAMESTGVYWIPLFQILEERGFEVCLVNARHVKNVPGRRTDVCDCQWLQFLHSVGLLKASYRPAQEVCAIRSLLRHRESLVQMAATHVNHMQKALDQMNVQLHHVISDIVGQTGLAIVDAILAGQRNPEELAKLRGERIKASEAVIAKSLVGDYRPEHLFTLKQSLSAYRSYQKMIDDCDREIRLHLEDLKPPTTPDAPVPPSDDSSKKQSPDGVLRAELRRVWSVDLTKIPGIRTGIAQTLLGEIGPDFTKFRSASAFASWMGLCPDNDISGGKVLFVTTRKVKCRAALALRMAAQSLHHSKSALGDFYRRMRAKLGAPKAITAAAHKLARIIFHLITTRQEFDDSKFAADQLRYQKRLEAKLHAKAKSMGYALIPLEVAG

SEQ ID NO: 179412 - protein, 385 aa, unidentified
MTESSDYESVQVFIGVDVGKDTHHAVAINRSGKRLFDKALPNDENKLRSLISDLKQHGQILLVVDQPATIGALPVAVARSEGVLVGYLPGLAMRRIADLHAGEAKTDARDAAIIAEAARTLPHALRTLKLADEQIAELSMLCGFDDDLAAQTTQASNRIRGLLTQIHPALERVLGPRLDHPAVLDLLQRYPSPEKLASLGEKKLAAQLCKLAPRLGKRLAADIAQALAEQTVVVPGTNAAAVVLPRLALQLITLRKQRDEVALAVEQRVLAHPLYPVLTSMPGVGVRTAARLLTEVACRAFASVAHLAAYAGLAPVTRRSGSSIRGEHPSRRGNKALKRALFLSAFAALRDPLSRAYYTRKMSQENDTIRRLSPWRDDAATFCSP

SEQ ID NO: 179413 - protein, 387 aa, unidentified
MRQPNDLSRSLVALDQDSTLIAVIEMGQASWLVAGIVPGFNRHPLKKIATDQEQLLQVLRRWAKEAETTGRMIKRIAVAYEAGRDGFWLARWLRARGVEAYVIHPSSVPVSREHRRAKTDRLDTELLKRAFLGWLRGEPDHCSMAAIPTLTEEDAKRPGRERESLVGQRTRIINRIKGALARLGIREFKPMLRSAPQLLETLRTPEDAALPPNTLAELRRDMARLSFVKQQINEVERARLERLQQAPGERGNAMVRLLTRVVGVGVETADMLVQEIFSRNLRDRKAVARYAGLTGAPDESGKKRRERGLAKSGNARVRRGMLQLAWGFLVHQPDSVLAKWYRARTADARGVTRKTMIVALARKLLIALWRLATTGEVPEGLAIRAAA

SEQ ID NO: 179414 - protein, 369 aa, unidentified
MAKNGTLANCKDLQPSFNSVSGQITIGIDLGDRYSQCCVLGPEGDILTEGRVRSTPAGLAQHFQELPSARVAIEAGSHSRWISELLTTWGHEVIVANPRNIRMITSSHRKSDSVDAHMLARLARVDPKLLSPINHHSSRTYPAMAQIRARDLLVRSRTRLVNAVRGIVKVVGTRLPACGSPSFPTKAAPCIPDELKPSVLPLLTMIAHLNVQIYQFDRSIEKLAHDQFPETDRLRQISGVGPVTSLHFVLSIGDPNRFKKSRDVAAYIGLTPRRRQSGDTDQQLRISKAGNPHLRTLLVQCAQYLLGRFGPDSDLKRWGAQMAVRGGKNSKKRAVVAVARKLAVLMHRLWVTGEQYEPLRNSKILATTS

SEQ ID NO: 179415 - protein, 378 aa, unidentified
MPSETTVYVAVELSVSSWLVAARSAGAEKSRLHRIQGGDTTTLLALIAKLRSRASTKLGRAVDVACCFEAGRDGFWLHRLLMAHGIAAYVLEPTSILVNRRARRAKTDRLDAEGMLRVLAAWLAGDRQVCSMVRVPTPEEEDAKRPHREREHLVQERLRIENRIEALLFTQGIRKRPSLRSWVRDVAELRTGDGRELPCLLRIELERLRRRLVLALELIHEVEAERAEALAATADDKMTQKIAALQRLRGIGPNFAAVLVREVLYRSFANRRQLVSYVGIAPMPYQSGGMDRDRSISRAGNPRARTTLIQLAWLWLRYQPGSALATWFRERVGMLQGRTRRISIVAMARKLLIALWRYVETGVMPEGVEIRAEADATA

SEQ ID NO: 179416 - protein, 338 aa, unidentified
MLFSGIDLHKRSLAIHTLDAAGTVVRRANLPAQRRALTAYFDALPGPHRAVVECTGMWYWVRDLLVPQGIDLRLGHAKYLKAISYAKVKTDAVDAATLAQLLRVDLIPEAHMISPALRDTRDLLRARLVLVSRVLRCRRSIGALLEKYNVAAPTALPELPRLEATLHAEQQALLTTHVRRLERQLRDRVLPTPDVQRLVWIPGIGALVAYTLVLEIDDITRFPSVRHFHSYCRLVPGAEDSAATRKHKRSRDGNRYLKLAFHHAAVRAAQYNPEIQAEYRRLIRRKGKAIARALIAKELGSIVYHVLSRQEAFNGRFRGLQLTRLKPRRWPRLASPPA

SEQ ID NO: 179417 - protein, 375 aa, unidentified
MEGAPMLDTTTFVGLDVHARSIKAVSLDVMTGEARCATFGYDAGAVAGWVRSVDPKARCVYESGVTGFDLQKRLSGLGVDCVVGAVSKMIKPSADRRRKNDRNDAEFLARMLSVGNVVEVWVPDDECEAARDLTRALEDARDDLSRSKQRLSKFLLRHGLVFDERTPTGRRKGNWTRAHWSWIESIRFAERADNDVLAYYVDAVRRAAEEKARLEGLVEAEARKPRWRRRVDSLRCLKGVDTATAADLVFEAGEFSRFRNARSFAAWVGLTPSEHSSGESDRRGAITKAGNKHLRKTLVEAAWHYLTCSGRPKDLAKGQAPDRGARRHAAKGVRRLAERREALLARGVHGNKANVATARELACWVWAVGLMAEEA

SEQ ID NO: 179418 - protein, 417 aa, unidentified
MSLDHNRSPVPAPARICAGIDWAKDDHAVCIVGPEGEAIDRFAIRHDAAGLRTMIRRLLKAGVQDIGIERPDGPIVEALLQTELTVFVIPPSQMKNLRSRYGSAGNKDDRFDAYVLGDTVRTDRRRLRPLVRDSAQTTALRSLVRSRRDLVHHRVGMANQLRAHLQIVFPAATTLFADIDSQISLAFLERFTTQTQADWLSPKRLGTWLRSVSYSGHTDPAVLHAKLTAAPRGLLGEDEATHAATTLAYVATLRVLSAQIQTLATRIGDQLAIHPDGHIFTSLPRSGTVRAARLLAEIGDARGRFPTPDSLTCLAGVAPSTKQSGKVKAVTFRWAVDKQLRDAVTDFAGDSRHANPWAADLYAKAIARGHDHPHAVRILARAWLHIIWRAWQDQVPYDPERHGALQALLIQDQQRVA

SEQ ID NO: 179419 - protein, 389 aa, unidentified
MKIYVGIDIAKLNHFAAAISSDGEIIIEPFKFTNDADGFQLLVSKLESFDKNSLIIGLESTAHYGDNLVRYLVTELYQVCVLNPIKTCQMRKNNIRKTKTDKVDTYVIAKTLMMQDDLRFITFFDLDMMDLKALGRFRQKTIKQRTRLKIQLTTYVDQVFPEIQYFFKSGLHQHAVYALLKEAPSPKEIASMHMTHLANLLKVNSHGHFTKEQAKELRVLAQKSVGANDSAISIQITQTIQQIELLDSQLEKIEAEMTDIMKFNDSVIMTIPGIGYINGGMILGEIGDIHRFSNPNKLLAFAGLDPSVYQSGNFQAKTTRMSKRGSRVLRYALVNAAWNVVRNNATFKAYYDAKRAEGRSHYNALGHCAGKLVRVIWKMLTGEVEFNLE

SEQ ID NO: 179420 - protein, 467 aa, unidentified
MQAYLGIDVSKGYADFTMLDHQKNELEKVFQLDDTRSGHEKLKQLLEQKIRERHLNMVYCAVESTGGFENNWYASLIEMSKTLPVKAARLNPSGVKNNAAATLSRNITDALSSAYIAKYLIAHPEKVSYEKQNDHYASFRSMHKHIMLLKKQKTQQINEMKMVLYSAFPELMRFCKQGMPEWILAVLKKYSSSAALAKCKAEQLIKINHVTVEKAETLIAKAKSSVSSRTNPMQEFLIKSLAGQIQDKQELIEEHKSYLAQSCKGNEVTLLQSIPGIAAYSAAAIMIEIEDVKRFASPAQLSCYFGVHPVFKQSGDKQGAYRMSKKGRASMRAILYMCAQTAVLFDEHLKSIYHRHRSKGKKHRQAIGAIMHKLLRIIWGVLTNGQDYLSSIDKKNQDRKPVDKKSETVSHEEIKSKRRYQQLDTEAPISNKQNKKRKTYIESQVPTNGQQVRDHQHTPLPFPNVKV

SEQ ID NO: 179421 - protein, 344 aa, unidentified
MQVIHPVCCGVDCHQAQLTVCLRRVSEDGQITSQLREFGTIYQDLLALSDWLVEEACPVVAMESTGVYWKPVYHVLSGVVDVYIGNPFDMRRRPGKKTDKADATWIAELLAHGLIQPSFVPPPEISALRDLTRSRVVLVQTRTRAKNRVQGILQDTNIKMSSVMSDVFGKSGRRMLDALIAGERDPKKLAGLALRSLKRKRAELELALTGQFTDHHGFLIQGALNLIDLVEEQLTELDARIGELISPLQPQIEQLDSIPGIDVTAAWQILAEIGIDMSRFGSARRLSAWAGVSPGNNESAGKRRRGKSRRGNRYLRRVLVQCAWGARPTATFLGRTFRRLERPF

SEQ ID NO: 179422 - protein, 350 aa, unidentified
MKVTTIGLDLAKNVFQVHGADARGATLLRKQLRRSQMAEFFAKQPPCVVAMEACGSAHHWGRKLRALGHQVRLIAPQYVKPYVKSQKNDAADAAAICEAATRGHMRFVALKTVDQQSVLALHTARSGFVKQRTALSNQIRGLLAEFGLVIPKGLSKLAQELPVLLADQNNELTSVMRELLQMLHTQLAHLDDLVARLERQIQVWARQDDSAKRLQQIPGIGPITASALSASVGDARQFEDGRQMSAWMGLVPRQHSSGGKSVLLGITKRGDKYLRTLLIHGARAVLKAYQRNPAKMPEHLAQLLQRKHPNVVCVALASRNARVAWAMLSRRQDYQGRETVKAPALPAALA

SEQ ID NO: 179423 - protein, 370 aa, unidentified
MKDFITIVGLDVHKDSIEVVIAEAFGKQEVRHYGKIGGDMTSLDKAVRKLVSKGGRLHFVYEAGPCGYEIYRRLTKQGYDCSVVAPSMIPKRSGNRIKNDRRDAEALARLYRAGELTAVHVPREDDEAMRDLVRGRQDAVKGLRTAKQQLGAFLLRHGLRYGKKTSWGVAYMRWLADVKMPHAAQQITLQEYIHAVRERVDRVERLTGEILKLLPQWQMSPVVEALQALRGVAPIIAVTVVAEIGDLSRFENPRQLMAYLGLVPSEHSSGDKVSRGGITKTGNTHARGVLVEAAHAYRYPARVSRHLLKRQEGLAQPIRDIAWKAQVRLCGRFRRLVGRGKAINTVITAIARELAGFMWAIAQQVQKLNT

SEQ ID NO: 179424 - protein, 343 aa, unidentified
MTNITTVGLDLAKLVFQVHGADADGKPVVRKKLRRGQVLVFFAGLPACLIGLEACASAHYWARELQALGHEVRLIPPQYVKPFVKTNKNDASDAEAICEAVMRPTMRFAPIKSAEQQSVLMVHRARELLVRQKTMLINALRGHCGELGIVVAQGPSRVSELIEMIEDPDDDRLPAIAREALVSLVGQLKAIRVQIQDLEKKLMAWHRANEASRRLATIPGVGVITATALVATIGDATQFHSGRQLAAWLGLVPRQYSSGGKERLGRISKRGDGYLRKLLVHGARTVLLWSRRKKETRSPWLEALLARRPTNVVLVAMANKTARVVWALLSRGETFRTEARVAA

SEQ ID NO: 179425 - protein, 395 aa, unidentified
MPNAFEFFIGIDWGSERHRVCVIDPAGAKVEERWIEHSGESLAELVTWLRRLPASSPDQIAVAIELPRGPVVETLMEQGFAVFSINPKQLDRFRDRYSPAGAKDDRRDAFVLADSLRTNLHCFHPIRLEDPATLRLRELSRLDEDLRMEQNRLHNQLREQWHRFFPQLLKLSAAANEPWVWALFEAGPLPANAAKLSVQRIERILEANRIRRIDPASVRAILSERPVVVAPGAAEAASEHALALLPRLYLLQKQRAATAKKLEAILEELCKPLPGSDANEHRDAKVLLSLPGVGRQIAATMLSEASQAIAERDYHGLRCYTGAAPITRQSGLLRPAHFLSSSRHDIVSRFEVEEESFVVKYVALAFRPGLKTHRYVLLNVLSPNSYSYLLIWLPY

SEQ ID NO: 179426 - protein, 419 aa, unidentified
MTVDFEWYAGIDWASEQHRVCLLDGGGGPAGEREFAHSGDGLAELCAWLIAMSGCEPHKIAVAIETPHGPVVEMLIDHGFAVHSINPKQLDRFRDRFTVAGAKDDSRDAQVLGHSLKTDGHAFRRLVVDDPMIVELREWSRLGDDLKQERNRLANRLRQQLWRYYPQMLELGGDDIAADWLLALWDEAPTPAKAAEISTQVIAPLLKAHRIRRFEAADVLRILRQTPLTVAPGTIAAASAHIRILAERLRLVNRQVKETNRKLDRLCRKLGQAPESEAGNRPEQRDVAILRSLPGVGRINLAALLTEASEPLKRRDYHALRLMSGVAPVTRRSGKACLVIRRLACNARLARAVYHWARVASQCDPISQKRYAALRQRGHSHGRALRTLGDRLLGLACTLLRRQVLFDPDYHCKEVAAAA

SEQ ID NO: 179427 - protein, 415 aa, unidentified
MDVLYPRCAGLDVHKDTVVAGVRVAGDGTVKSSVRTFDTTTPGLLALSAWLAENGCTHVAMEATGVYWKPIWHILSDGDFTLILANAAHVKNVPGRKTDVADAIWLADLLAHGLIRASFVPEAPTQEMRALLRTRKQLVREQSSHVQRIQKTLEDANLKLGSVLTQIMGLSGRAILDALIAGERNPDTLLTLVHRGVKAPPEKIRAALQGRVTDRHCFLLRLHLRQYDALAVAMAEIDAEVDRDLDPFRQAVRQLRTIPGVSDLTAQVIASEIGIDMTRFPTAGHLISWAGLCPRNDESAGKRRSTKLRHGAPWLKTTLVQCAWSGCRKKGSYLRAQFHRLKARRGPKKAICAVAASILTAAYHMLRDGTLYQDLGDNHFNRASPEQKAARLARQIAKLGFECTIIPSAGGMVSV

SEQ ID NO: 179428 - protein, 344 aa, unidentified
MMYSGIDLHSNNSVIAVIDDADRVVAQKRLPNDIAKVVDFLARWQDELAGVVVESTYNWYWLVDGLQDAGLHVHLANTAAIKQYDGLKHSGDETDAQHLAHLLRLGILPTGTILPREHRAVRDLARKRMQLVHSCTAHVLAVENIMARQLGGRMTSNQIKRLTADEIDKLPLAADVGLAIKANVAVIATLQAQIELLEKRLQERVKPRAQYGFLTSVPGIGQTLATVILLETGPIDRFADVGNFASYARCVESVHTSNRKKKGEGNVKNGNKYLAWAFVEAANFARRFCPEAKRFHERKKAKTNNIVATKALAHKLARACYHILKEGKPFDVTRYGDWGRNQLH

SEQ ID NO: 179429 - protein, 405 aa, unidentified
MNAVGIDVSKGRSTVTIRQPGDVVVLPPRDFRHTQSSINELIATIMELDGETKVCMEHTGRYYEPVASWLSSAGIFVSAVNPCLIKDFGDESLRAPKTDKADAKKIARFALDRWTKLRQYSRMDELRNQLKTMNRQFGFYMDQKTAMKNNLIALLDQSFPGANDFFDSPARSDGSQKWVDFVYTYWHVDCVRGKSLDAFTEHYRNWCKRKEYNFSAEKAESIYRSASDLIAVFPKDDNTKMLIRQAVAMLNTASETVETLRAKMNHAASQLPEYPVVMQMNGVGPTLGPQLIAEIGDVTRFEHRGSLTAFAGVDPRPNESGDYKRQSNPTTKKGSPYLRKTLFQIMDGLIKRSPVDDPVYAFMDKKRAEGKPYHVYMTAGANKFLRIYYGRVNAFLTPAKVSEET

SEQ ID NO: 179430 - protein, 411 aa, unidentified
MNAVGIDVSKGKSMVAVLQPLGVVVAKPFEVCHTAAELGKLSDFLKSLDGETRVVMEHTGRYYEPVAQVIHDRGLFVSAVNPLLIREYGGNSLRRVKTDKADAKKIARYGLDNWTELREHTPVDTTRYELKTLNRQFHLASKNRTACSNNLVALLDQSFPGVRGWFDSPVRKDGSQKWIDFAMTFWHVDCVRSVSRAAFTERYRKWCKRNHYNFSAAKAEQIHNEAREMVALIPKSATSKLLIQESVSQLLSVSRMVEVLRAEMDRLAAQLPEYPVVMDMYGVGESFGPQLMAEIGDIRRFAGKQSLVAFAGVDPMPNQSGMKNNRSNRSSKRGSPYLRKTLFNIMTVLLQKAPTHEHIYQFLDRKRTEGKPYYVYMTAGANKFLRIYYGKVRDHLATIEVDAQDSTSANP

SEQ ID NO: 179431 - protein, 420 aa, unidentified
MRNAGIHANSLLEVRRMYNAVGIDVSKGKSTVAVLQPGGTVIRKPFDVSHTSQNLNELADYLSSLDGTTKIVMECTGRYHEPMVKALSEAGLFVSIVNPHLIKNFGNNSLRKVKSDPADARKIARYTLDNWTELRQYSGMDNTRTQLKTLNSQFSFFMKQKVAAKANLIALLDNTYPGVNKLFDSPTREDGSEKWVDYAYSFWHADCVRKIGLKAFTERYKSFCKKHHYIFQQDKPEKLFNASKELVAVFPKEKTYKLLIQQSIQQLNLASEHVERLRREMNELASTLPEYSTVMGIYGVGKTYGPQLIAEIGDVSRFTHREALTAFAGVDPGVDESGQHKSKSNRASKVGSARLRKTLFQIMTTLLQNAPEADPVYRFLDKKRSQGKPYYVYMTAGANKFLRIYYGKVKECLRNLEQTE

SEQ ID NO: 179432 - protein, 321 aa, unidentified
MNKYKEIYGVDISKDVFDVFGTQSGHQQFKNEAKGFALFAKGIPKESLVVMEATGYYHYRLAQFLFKKGILVSVVNPLSVKRFIQMKLAKVKTDKSDAKAICEYGQINEVPLYTALTDVQSECLQLFRLLDNYLKKRTATKNKLHGEETLGIPSKFVYRSLQRDLKHLNNEVTVLEERLLALVKQDQQHQLTLLKSIPGMGVKTALFLIVVTDGFTKFENASQLCSYVGITPTIRESGSSVKGRSRISKVGNKKLRNLLFLCAFSACKHNKACSEIYERIVGKGKSKKLALIAVSNKLLKQAFAIAKSGRAYDENFVSKLH

SEQ ID NO: 179433 - protein, 318 aa, unidentified
MNIETKSYVGIDVSKRELDTAVNQDGPSWQTTYEDKGIAETIAKLKAIKPALIVVESTGGLEIRLLTAMYEAKLPFSRVHPGRVREFARSIGLLAKTDRLDARLLARFAEAVKPPVTSLPGEDEQRLSALLTRRRQVVEMLTAEKNRLNTAPVATQERISQHIQWLQEECDTLENEIDEFIDQTPTFREKQDVLQSTPGIGPITSAILLADLPELGQLSRQKIAALVGVAPFNNDSGPRRRKRRVKGGRAAIRSTLYMATLSSIQYNPVIQTFYKRLIRRGKEKKVAIVACMRKLLTILNAMIRDNHIWNTQQSVQKA

SEQ ID NO: 179434 - protein, 367 aa, unidentified
MKNHSSIDQSLSSSDLSACTTLAVDLAKQVFQVAGEDVLGQVRYEQRIKSREAFYGFLQQLPPHVVVLMETGPGAQAWARQLQDQGNPARILPAGLVATHRSGPKNDRNDALAILRAGRDEKICAVPVKSVAALAMQALHRARQGYVRRRTAVSNQMRGLLLEHGVALAQGDAAISQKIPRVLEDATQPVPSLLRELIDELLAEWRHLGERISVLTGRLEVAANADMTAKRLMTVRGIGPVTATALVAKETKPERFPNARKFAAYFGMVPDQHSSGQTVRLGDMTKRGDVYLRSLMIQGAHAVLQQLRPDSQQPDDRRLLRWMSRLGRKEAAIRLANRNLRIVWVLLQNDQTYRRHAGDGQQATMSH

SEQ ID NO: 179435 - protein, 315 aa, unidentified
MRDVPCFVGIDVAKAQLDVALRPSGERRAVANDASGVETLVDWVQTLHPTLIVLEATGGLERAVTSALAAAGLPVVVVNPRQARDFARATGQLAKTDALDARALAHFADVIRPTPRPLPDAQTQELRALLGRRQQLIVMRTAEQNRLPGTSERLAQDIVAHMTWLNADIATLDNDLETTLRASPLWRENDDLLQSAKGIGPVCARTLLLELPELGTLTRQQIAALVGVAPLNCDSGILRGRRTIWGGRAHVRTVLYMGTLVATRYNPQIKAFYERLLAAGKVKKVALTACMHKFLTILNAMLKHRTPWQPQEVQS

SEQ ID NO: 179436 - protein, 403 aa, unidentified
MNAVGIDVSKGKSTVAIYQPGDQVVLKPCDFRHTQSDIRSLIGIIRELEGETKVCMEHTGRYYEPVASWLSDAGIFVSAVNPILIKNFGDDSLRAPKTDKADAKKIARYTLDRWAKLKQYGRMDETRNQLKTMNRQFGFYMDQKTAMKNNLIALLDQTYPGANAFFDSPARSDGSQKWVDFVYTYWHVDCVRGKTLEAFTEHYKNWCKRKGYNFSSAKAKEVYSSSSDLIAVFPKNADSKMLIHQAVDMLNLASRTVETLRSEMDRTAATLPEYPVVLAMNGVGPTLGPQLMAEIGDVTRFTKRGALTAFAGVDPGKNESGQYSQKSVPTSKKGSPHLRKTLFQIMDSLIQRSPADDPVYAFMDKKRAQGKPYYVYMTAGANKFLRIYYGRVNEYLSSLSERE

SEQ ID NO: 179437 - protein, 339 aa, unidentified
MHVTTVGLDLAKNVLQVHGVTTDGDVAVNRALRRGQVRGFFESLPPCRVGIEACGTSHYWAREIARLGHEVRLIPPAYVKPYEKRGKSDAIDAEAICEAVTRPSMRFVAVKSPEQQSVLALHRVRDLFVRQRTQIVNMLRGVLAEFGIVIRQGAGHAIAFARRCLEGAEQDLPDLARDVVTNLGHQLVALHRRVLWYGRRLNRVAAQDARVARLRTIPGVGPVTASAIVATIGDGHQFRNARSFAAWLGLTPLNRSSGGKERLGRISKMGDRYIRRLLVLGMTSRIKQIQHRPDQFDAWFADILDRKPPKLAAVAMANKTARIIWAVLTREQDYQLRAA

SEQ ID NO: 179438 - protein, 409 aa, unidentified
MQVFVGDDWAEDHHDIELQDETGQVLTRRRLPEGIEGMTALHELVGEHSAGLETPPQVVVGIETDRGPWVQALLAAGYQVFAVNPMSVARYRERHAVSGAKSDPGDAHVLADLVRTDRHRHRPIAGDSELAEAIKVLARAHQSMCWMRGQQANQLRSTLREFYPAALVAFEQLTSGDALAVLAIAPTPDQGRGVTRSRIQAALRRGGRQRNLAARAEAIHRALRSEQLTQPPLIAEAFGVTVSALVGVLSASVDAITDLEGQLEASFGQHPAAELIRSQPGLGSVLGARVLAEFGDDPDRYTDAKARKNYAGTSPITKASGKSHVVLARYKTNKRLRDALRQQAFAALTASPGARAFYDAHRAAGDGHDKALRALANRLVGLLHGCLRHGTIYDEYTAWGHRTDHTQAA

SEQ ID NO: 179439 - protein, 333 aa, unidentified
MNSIGIDVSCQEVVVVVMVKGKARKAKTFKNTPAGHKTMAQSFTKLKGETKVCMEATGVYHFDLAVTLSREDNIDVMIINPKAAHNFAKALMKRSKTDAIDAENLANYAERMPFETWERPADEYISLRAISRRIAALTKQKTQTKNQLHALKSTQETPQLVIDQTEQLITIFESQIISLRNSALAVIKQSSRLEEAYLLITGIKGIADASGIQILSELMILPENMTARQWVAHAGLDPRVFDSGSSVSKKPRISKVGNRYIRQALYMPALVSSRFEPNIKGYYWHLINDNGLKKIQAVCAVMRKLLHAIHGMLRTNKEFDGSRFYALPISTNS

SEQ ID NO: 179440 - protein, 417 aa, unidentified
MNAETKPCLETAPAPTPPLRVIGLDAHPDSFTAAILCGPTPASAVVEKVFNQVPMTRLRSWAQKHTTAEDLVLLEASGNSFQIVRSLAAIGRQARVLESRHLGQLKEAHANNDKISAVRIGKAYLAGTAKVVWVPDAQTQERRDWFHAHRKAIKRTTQVRNRLRSYLSDNGVRLPRHTRLTEPTSLSPVLRNAGHWSARQWQVLEGLVMEMQHAEQQRQHWRRLIAQEVLEDPLLLSLVRLCGVREMVAFALGAFIGSIERFANPRKLVKYIGLNPAFDDSGQGHWQGGIGGHGRKDLRCLLIEAAQAILRCGQTATARWGRKLLGRKGNVNLAVAAVARKLVVAVWYLMKGRWSAVEEVEASLSRKIGKIISQVGKEALGQMGKSRQPYRQEIHQRLQQGRVYVLNRNKTFQPAVA

SEQ ID NO: 179441 - protein, 417 aa, unidentified
MSYKIAGIDVHKRVLMVVVIDASTPEEKPERRRFTTMPSDLHRLSIWLREQRVEEAVMESTAQYWRTVWLELEPYLRLQLAQAFSNRAPRGRKHDFKDAERLVRRLIADELILSFVPGEEQRTWRNLTRMKTQLNRDRVRLQNQMECLLEEMRIKLSMVVSDLLGASGVRILRALAQGESDSKKLALLGDNQLKCSEEQLVDALTGRPQPMHREMLRLQLERLQLIDRQIKELNALIAQAMKPHQEAVIRLAEVPGLGVDSAQPVIAEVGVQANTFPSAAELTSWVGTCPGKDESAEDNHSSRSAKGNKYLRRVLNQSAHAAVKKKGSHFQAVFRRLLPRLGYKSAIWAIAHRLCRLIWKILHEGVRYIERGSESDPKLREHRARTLARALRKLGYDVAITPINPSTAQKAMQTYGV

SEQ ID NO: 179442 - protein, 395 aa, unidentified
MGIDLHKESHTAVMLDCWNRKLGEITFDNKPSEFTKLTRKVSRFVTEEKTAVYGLENAYGYGRTLAVWLIEKGNLVKDVNTSLSYAQRKSVPMYQKSDSYDAEAVALVLINMLDRLPDAIPDDKYWTLSQLVNRRDNICTHQSRLKNQLHEQLCAAYPSYKQFFNDISRATALYFFNKYPSPEHLQGKLAEELADELRPISHNNCSIKRAKKILDLIQSDGETKREHQETRDSITRSLVNDLEHYRVQLEEVEKAIEMMLPQFRCTLMTMPGIDVITAANMLSEIGDINRFPNANKLAKFAGIAPVNFSSAGKGKDMCPKQGNRRLQAIFYFMAIQMIQISTNGVPRNKIFREYYLKKVESGKNKQQALICIARRLVNIVYGMLKNHTEYREPEQ

SEQ ID NO: 179443 - protein, 281 aa, unidentified
MLIVGCDFHPSWQQVAWVDTETGESGEQKLVNGNGEAERWYRQLPVPSRIGLEATGNSQWFVELLQKLGHEVWIGDAAAIRASYIRKQKNDKRDAAHLLKLLLEGRFLRLWVPSSEQRNVRQLLIHRHKLVQIRARVKNGLQHLALNRGMQKKARLWSTAGQKALRALPLEGWAQCRRQDLLQLLGYLEAQIAPLDRAVEQAAEQDPQARLLLTQPGVGPITALAFVVTLGDVTRFPRGKQVASYLGLIPREHSSGGRQRLGSISKQGNSFLRCWWSRRKV

SEQ ID NO: 179444 - protein, 404 aa, unidentified
MNAVGIDVSKGKSTVAILRPYGEVVVSPFDVAHTGSDLRALADLIKKLPGETKVVMEATGNYFESIARYLHEQNIFVSVVNPVLISDFGGNTLRKPKTDKKDSVKIASYALTYWLDLKEYTPQEDLRKSLKLMNRQYQQSIKLKTMMNNNLISLLDLTFPGINKLFTSPSRESDGHEKWVDFVLEFSHCDMISKLTIKAFAKKYKKWSDKNSYHFTESSCEKIYAFAKDCVSSVSSDKAIVFSVVQAAKMLISATENCHAIQSEMNRVASKLPEYDTVMNMYGVGKAVGPQLMAEIGDPRRFHSRKAITAYFGYDSENNDSGQKTTRSNPMTKKGSGALRRTLFIIMQVLLQTKPQDNPVYDFLIKKKSEGKHYYSYINAAANKFLRIYYARVKEVLNVSEQMT

SEQ ID NO: 179445 - protein, 390 aa, unidentified
MYIVGIDVGKRHHEASMIDGQGNLQGKSLRFANSHTGFNKLLETVRRATGEDEVVFGMEATGHYWLALYTHLRQEGYSVHVINAVQSDALRGMYIRQAKNDSRDSFIIAEVIRFGRFCETTVSTPDLHALRELCRHRFWIVDSVSDLKRKVIALLDQVFPEYEKLFTNTFGKTSLQLLSEYTTPEELLAVDTDKLAETIHAASHGHHGLEKARQIQDAARDSFGILLASDSIALLIRQYIEQIRFVEKQVDAIDAEIARLLAAFDNQLTTITGIGPTLAAAILSEIGDIRRFDSPGKLAAFAGIDPSVKQSGDFTGSRAHMSKRGSPYLRRAIWLAATVAAFKDPAISAYYQRKRTEGKSHLTALGHVSRKMVNIIFAVLRDNSPYSPAI

SEQ ID NO: 179446 - protein, 418 aa, unidentified
MEHTNILFVGIDIALQKFDAEYIDIDSNRFSNKSNRVFPNTPKGLDAFIDSVVSIAQKYDFNGVKIGFEATNYYGFHLPFYFFENEKLQSFKPVIYQINPKIIKNARRTYSEIPKNDSYDAYIIAERLKNGRLPPYTRFNPHYLSLRFLTRERFNLITKMVSIKSRFLSLLFIKASGFVQNKAFSNTFGATSINILTQFESIDAIATMDIRELSDLIAIYSKNSIKDSESMAEKVKNLARESYVINRVMHDNVTYSLLVMFNQIKFYRNQIKEIDKQIQQTITTFRNQYNILLSIKGIGPVLAAGIIAELGDLSDFNNESQIAKYSGIIWRIRQSGKFKSEETELTKSGNRYLRYYLVEVAQSLVMHNPDFKPYYCKKYDESTKHHHKRAILMVARKFIRVIFALLKNNKLYVSPVTP

SEQ ID NO: 179447 - protein, 344 aa, unidentified
MDHFAGLDVSVKETSVCIVDDTGRIVREVKVASEPEDLLRVLANPIYQFKRIGLEAGPLSQWLFSALAEAGLPVICVETRHMRAVLKAQINKTDRNDARGMAQMMRAGLYRPVHVKTLRSQKLRMLLTHRKLLQSKAIAIDNDLRGTLRNFGLKVGVVRTVKFETRIRELVANFPDIAAMVEPLLVVRRTLREQFCVLHRRLLAIVRDDEVCRRLMTTPGVGPVVSLTYRATVDVPARFRKSKSVGAVFGLTCAKYQSGEVEWSGRISRCGDEMMRVMLYEAAQAMLRSNKWSWLKAWAMQIARRRGKKKAIVALARRLAVIMHRIWVDGTEFRWTREQASAAA

SEQ ID NO: 179448 - protein, 316 aa, unidentified
MSQSERVIGIDVSKNLLDVAVVPENDTWSVDNDEKGIRTLIKDAKRLRPRLIVLEATGGLEAAVVAPLAAARLPVVVVNPRQVRDFAKSLGKLAKTDKIDALVIAHFGEATKPEIRPLKDQQAQQLSALVARRKQLVEMLTAEKNRLMTALEPVDNDIKAHIAWLEQRLNDINKDLRKAIKASAVWRAKEELLRTVPGVGPVLSVSLLAGLPELGKLNRKQIAALVGVAPFNRDSGKFRGRRSIWGGRAHVRAVLYMGTLTAIRFNPVISAFYQRLCAAGKAHKVALTACMRKLLTILNAMMKNHAPWQPYFRETA

SEQ ID NO: 179449 - protein, 405 aa, unidentified
MATIVALDVSKGKSFYVMYQEMTCLYEGEITHTKSGFQELHALIKNLPEVPEIVFESTGIYSRPVETFCQKNQLIYYVLNPLQAKQQMEKESLRKWKTDKRDAHRLAQTHWNNSRTKSVSAEPLYKELRDLSRFYQEIMDEIGRMRMHLHNAIQLTFPELEQVLSNRLTPYGLTMIAQYPHPSFVLKQSRTIIKNRLMASTAKKISENRARNKADELIAYAKDSYPAVSETAIPVAKTRYYAEQLQALLNQKERLANQMIETAKQLEEFSVIASFPGIGELSAAQFIGELGDLRRFSDPRKANAYIGIDIRRYQSGNYLAQDHINKRGNPKGRKILFFIVKNMIKAQHAAPNHIVDYYYKLKKQPLPKKEKVAIVACMNKLLKCLHAMIRNGTKYDYSYTVSMDH

SEQ ID NO: 179450 - protein, 330 aa, unidentified
MKKISVGIDISKKTLDVSIYSGSGGQPWMKTTNSEDGFIKILTWVEKQGFNPLEVMFVMEHTGHYGYALAAFLDVHDMSYTFVAGLEVKHHFPLNRVKNDKNDAKRIAQYYYEVQERPEFTVQTIKASEIYALSLLLSERNMYVKQRAHLKTQLAEKQEYSSQNREPRLKEIEQLYNKQIRDVEREIKQLVEQCPEIKRNYELIIGVVGIGLITAVTIIVATANFTRSKNARSFANHICVAPCDKSSGTSVLKGVHTSNIGRKDIKSLLSRGVLLAIKYDMGIKAYYERKKAEGKHYYCIANAIMFKMICRVFAVVKRGTPYVETYGYMK

SEQ ID NO: 179451 - protein, 312 aa, unidentified
MAKDTIGIDVSKDRLDAFWHSRTEACCLPNTPEGFGQLCAWLGKEEDVLIVFEATGAYHRGLERHLGLAGLPFIKVNPKQARRFAQAIGRLAKTDSVDARMLARMGVVLDLTPQVVEGEDVHDLRELLTARRALVKDQVTAKTRLATALNPLVREQLGRRIEDIGADIQALDEVIAQIARQRGTLEERIRRLMTIPGIGRLTATTMLIDMPELGHLEGKKITALAGLAPMTQQSGKWQGKERITGGRSSIRRAIYMPALVAIRFNRDLHDKYQQLLKAGKAKKVAITAIMRRIIVLANTLLRERRDWLPDRP

SEQ ID NO: 179452 - protein, 397 aa, unidentified
MEGNKCLTSIQPLNYEVFVGMDTDKRSIAMSVYDHTCKIESKVMPHDGGAVVKYLNRKYSNKKIAFVYEAGPTGFGLYDALTKEGYDCLVTSPSTVPREPAARVKTNRLDSEKLATTLRGGQIRGIRVPSEPYRHLRDLTHLRDTLVKNVIATKCRIKALLLMKGLEFPEAPPTSQWSNRVTEQLKRDPQYEAIRFELDQLLEILSFTHTKILQVQREVRRFCKADPDISESINYMTSIPGIGPITASEVLARIGDWRNLRNSREVGAFFGLVPCEYSTGDDVRRGNITRMGHQKARNMLIEASWVAIRKDGELREFYKQVYSNHNKNYAARKAIVAVARKLTARIYVVLKNRRQYEIRKKVIVNPSTQLRVDHEPVEMVTKIETVAPKDDSTKYRT

SEQ ID NO: 179453 - protein, 381 aa, unidentified
MKKDSIARLQVTKSQIRRMAEEQKLTVGMDLGDRASRYCILNEEGGKASEDQLPTTKAGLDSLFAKMAPCRIALEVGTHSPWISRHLAALGHEVIVANPRKVRLITQSVKKNDRMDAEQLARLARVDPQLLAPIRHRGPEAQGDLAVIRARAELVDCRTALINTARGLAKPMGERLKSCDADYVKESLADGLSEATQNAIRPLLKSVEEMTKQIGAYDKKIQEIEKRYPETKVLKQVNGVGTLIALTFILTLEDAERFAHSRDVGPYLGLTRKLRDSGESQPELGISKAGDMLMRRLLVQAAHCILRDGAPDSDLKLWGLTKVQAGAGKKGSKRRKKKAAVAVARKLAVLLHRLWVTGEVYDPQYNRKAAEAAKGTKRAAA

SEQ ID NO: 179454 - protein, 449 aa, unidentified
MSDIPTSSTQPEFVALIGIDWGDKKHAWALQAGDSTKIEKGDIEHTPEAIQQWAVGLRQRFPTGRLAVALEQSRGPLVFALSKYEHLTLFPIHPTSAAEYRKIFRPSGAKSDGPDAVLHLDMLARHRDKLRPLNPDTPETRALQLLTEDRRQLVNERTRYSNRLTANLKSYYPQVLQWFDDLYAPVTLDFLDQWPTLEELQKAKPGVWSEFFQEHNCRDAKTQQRLAAIPMAVTATTDFAVVTAGRAGVCAAVRLLRNLNQAIQEYDRQIDQLAKGHPDFAIFQSLPGAGKVMVPRLIAAFGTQRDRYQRAADIQQYSGIAPVTEASGQQLWVHWRWGCPKFLRQTFHEWAAQSIAQCDWAAAYYRVQREDKNKSHHAAVRSLAYKWIRIAFRCWKDRQLYDGSKYELALKTRAKATPEPKQPSSFPLPLRWISCAGFQKLAEKNEENT

SEQ ID NO: 179455 - protein, 353 aa, unidentified
MRIIGCDLHARQQTLAMLDTTTGEAVNMILKHEGDNVREFYSKLPRPVRVGIEATESMQWFLNLMEELGLECLVGHPAQIRASAPRKQKNDRLDADLILKLLAENRFPAIWLPSKELQDLRSLLRHRHQWVRMRTRIQNALQSIALANGLRRGTALWSHEGQSRIASLSLAPHTAYRRSELQAMYEKFEAEIEKLNQRVEQQACQRPGARLLMTHPGVGPITALATEVFLGDPARFADSKALASYVGMIPREYSSAGRQRLGGLSKQGNPLLRFLWGEAGAHAARKDPELKRFYRRKVIQKGFGKASVAVARKLGIRLWIMLRDQIEYNEFCRRNLALSGHGFSVFSFLAIHT

SEQ ID NO: 179456 - protein, 419 aa, unidentified
MTFHIARGYVRTNESVDQSSVNTLIGGSAMFYAGIDVAMDKHDCVVLDSGGNIVFEVFTFENSRDGFRTLKKVLQACSKNPKKIKVGLEATGHYSDNILAFLNNSGYDPVLFNPLHTNLFRKGLSLRKTKTDHVDAHTIATMLRTEDLKSYSQQSYHLAELKSLTRYRSALVSDCSRHKISLVRLCQILFPEIKNLVPTLHMSSVYTLLSECPSADKIANCNLTHLTSLLSSASKGHYGRDKAIEIRDAARKSIGIKSTVKELELKQTIDLIQIYLQQIETVDEEINKHMDEIESPITSIPGIANRMAAVILAETNNFQDFERAEQVLAFAGLDPSVYQSGQLTSTHSKMVKRGSKYLRYAIFNAAKYVCHWDPTFRTYLHKKRAEGKPYNVAVSHAAKKLTRVMFHLVKTNKEFISQA

SEQ ID NO: 179457 - protein, 343 aa, unidentified
MQTVTTIGLDIAKSVFQVHGVDAAGQVLIRRQLKRRYVLAFFQKLTPCVVGLEACASSHYWSRELQAVGHTVRLMPPAYVKPYVKRQKNDMADAEAICEAVTRSNMRFVPTKTPEQQSGQVLHRTRHLLICQQTSVINALRAHLAEFGITAPVGRRGVEELLRVIADPKDSRVPELVRGCLAALGHQLLGLKKQILEFDRMILAWHRSNERSKRLNCIPGVGPVLATALVASVGDPKSFRSARHFSAWIGLVPKQHSSGGRERLGSISKQGDRYLRRLFVAGALAVIRHAKLHGTNHRPWLTGLMARRPTKVAAIALANKLARMAWALMARGERYNYPVALRP

SEQ ID NO: 179458 - protein, 344 aa, unidentified
MSEAIIIGLDIAKHVFHAHGADGRGRAIFSKRISRGKLLDFFAAQPNCTVALEACGGAHHWARQLTQLGHEVRLIPPAYVKPFVKRQKNDAIDAEAICEAAQRPGMRFVAVKSEQQQAAGLVFRTRDLLVRQRTQLINAIRGHLTEYGWIAPKGPSHLATLADLLEEEEMASSLPEAARAMFRLMLDLLAGLDGKIADLDKEIARRAREDEVSRRLMTVPGIGPISATAIAALAPPAETFAKGRDFAAWLGLTPLQRSTGGKRKLGATSKMGERTLRRLLIIGSSAVVLQASKRGAPKGSWLEQMLARKPRMLVTVALANKMARIIWALLVKQENYRAPVAAKA

SEQ ID NO: 179459 - protein, 433 aa, unidentified
MFTERTSVGLDVHARSVVAAAIDGVTGEVFRARLTPNNEQVVGWVRSLPGASVATYEAGPTGFGLARAMAAAQIRCVVAAPSKIRRSAGDRVKTDARDAMLLARLLRMDEIVAVTVPSVEQEDARDLVRAREDVRGDLMRSRHRVSKLLLRQGIVYCGGHAWTGAHLVWLRAQHFDTPGLALAFDAEYEAVLAAEARRDRLDEAIAAMAADSQFTPVVHRLGCLRGISTLTSFGLAVEIGDWDRLTGASIGAYVGLVPTESSSGQSRSQGSITKTGNTHARRLLVEAAWHHHKAYRTPGATMRARWELAPAAARARGHAGNRRLHERWLRFTERKKRPVVANVRDRPRAGWLVLVLGRDGPLTGWAVTRWRPGPGPVLGPPLGSILTGPIICGCSSASTSFMLASLRVLHVDSSHAPAGIAQIEECPSVTLTG

SEQ ID NO: 179460 - protein, 421 aa, unidentified
MENTAARKRKQVPEGYLIIGIDPHKKRHAAVAITQDFTIRDKFKFDNTREGLETILRRTRTEMVKADCRGVMFAIETGGHYWRNIAYFLDKQGIPFRFINQYTLKRRREGKDLNHKKNDYRDSEVAAQLLCTGEFTESTIPQGVYAELRTAHNAYRRLVKERTRITNLVKGLLDGLFPEFTQVFKDPCGLTSLSVLSACAIPGVIAGMMEDEFVAAIEAKHQGRLMRKKLRELHYKAKTSIGIAAGARSVSSEISFLVEKHELIRRHICIIERTLVRLVDETEEGKYLLSIRGLNYIAVAGLLAELGCFKSYRSAKQMIKMAGSNPTESESAGKRGAHTPMSKQGRPVLRYCAWTSVIPMLRFNSDFRVWAKQRRERPAHANPLNGREVVGAALNRLLRLSFALVKNQTYYRLPQLVQVTG

SEQ ID NO: 179461 - protein, 348 aa, unidentified
MLIIGCDFHAGFQVLAIFDNRTGVTTEKRLEHPPGAMEFYRSLREQGERVRVGIEAGAPCQWFRRLLAECGHELWVGDAARIRAAAVGKKKTDREDAKLILQLMREERFPRIWVPTEEERDVRQLLLDRHHRVRARTAAKNQLQALAMNQGVQKGRGLWTEAGRELLAGLTMAEHTARRRDYLLQRVAELDQEIAEMDVRVWAEVQRRPAALRLKTHPGVGPQTALATVLTLGEVSRFRSARAVSAYLGLVPTEHSSGGKRRLGHISKQGSSLMRFLLVEAGQSAVKRDEELKRAYKRLWVRKGNRAVAKVMVARRLAVRLYWMLRKEWTYAELVGHAGKPGSSCGKR

SEQ ID NO: 179462 - protein, 443 aa, unidentified
MSKKPASHLRGERGQAFADQIRGLALDRILCVSLDISKYFHVAMIHNALGEIVTPTFEVDIFQSGFDQLCGAIDAAVARTQAQKVLVGLEPTSHYFENLARHLLQRPQPVTLLNTYAVKQNREQQMMRREKADEIDVAAIGDLLRRGEGTPFRPLTGVYLRLQQVDRVRLGKVKIQSMLKNQIVGHLDRLFPGLIILGEEATQRYTLLFTRDVWACQTLQHLIRACPDPQRLAQLPLTEIVALFHAQGYSMGPTIAAKLQAYARKVLFPEPDLVAIRGELLQHDLALLEVVEHHLLELEARLQGLLAETPYQIWTTFKGLSVVQAASLAAAIGDPRHYAYAGQVFRRSGLVSGRNDSGTRQRRGKGQRILKTGDVYLRRALMNAVSTLILHQPVLLRYYQKLKRHKPAGVARVATARHALDLLWAAVRDQHSNTLIICKGATM

SEQ ID NO: 179463 - protein, 408 aa, unidentified
MDVLHSRCCGLDVHKSSISACVLLREAGRVQKHQRRFGAMTQELQELAEWLRQFGVTQVAMESSGVYWKPVWNILEGQFTVVLANAQHIKNVPGRKTDQKDAEWIAQLLQYGLLRASYIPCEIIRDLRDLTRMRASLSQEASRISSRIQKVLEDANVKLASVATNVLGKSGRAMLEDIITGEDDPEHLASLALGHLRVKIPQLRLALQGKIRSHHRFLLRRLLDQIQFLEHEIALLDERLEDIGRQRPDLAQAVARWDTIPGIDQVAAWALLAEIGNNMAQFPTADHLASWAALCPGNHESAGKRLRGTTRQGSTWLCRMACQCAWAAARTKNTYLSSQFRRLAARRGKKRAIIAVAHTLIVIGYHLQKNQSNSSSLAITCRRIRATTRILAEITSIASTPTASSGTW

SEQ ID NO: 179464 - protein, 345 aa, unidentified
MMVIIGVDPHKASHTAVAICGDEREVAKVTVRATSQQTAKLLAWAEPFVERTWAIESAGGLGYLLAQQLVDAGEHVLDVPPTLASRVRVLGTGRSEKNDPNDALSVAVAALRSDSLRRVEIADHSEIMRLLAKRNHDLGRMRARLICRLHNALADLSPGGIAKELYVSDARALLMAFEPATPIEHMRHELALELVDDVRRLDEQIKESHRRIRTAVRASKTSLTELFGVGPVVACAVIGYTGDVRRFANRDHFAAYAGVAPIEHSSGGRVAHRLSRRGHRKLNNAIHIAAISQIRQPHSDGRAYFDRKVAEGKTKREAVRSLKRQVSNALYRQLVLDAERGPGGH

SEQ ID NO: 179465 - protein, 406 aa, unidentified
MFIGWDWATETHDVTVMDDTGKRIDRWELTHTEEGFAKTLARLRKHGDPADLPVAIETTRGLAVDRLLAAGHPVVPVHPNAFHAMRARWGASKAKTDAGDSMKLADYLRTDGHLLPRLEPTEPATLDLQALTRQRADHIEARIAAVNQLAALLDEHWPGGKAVFGKLDSDIAQAFLERYPTPASAAKLTAGRLETWCKRRGYCGKKPGSVLIERLRSAPTAASRLSETVVEHLIRVQVQLVHGIRATIRALDKAITEATATHPYAPLFATLPRIGTISLGQVIGEIGPLLERAQTCEQLIAEAGVVPVTRASGKSRTVAFRFATNRRARVALTTFADNSRHGSQWAAKIYDDARARKKRHPHAVRILARSWLRVMWACWRTGTCYDPDIHQANNKINTTADAPLAA

SEQ ID NO: 179466 - protein, 339 aa, unidentified
MDTIRFLAIDLAKNVFQVHGLDAAGKLVLRRRVGRAQLTELVLRLAPCTIGMEACSSAHHWARQFLQQGHTVKLISPQFVKPFVKGNKTDGNDAEAICEALQRPSMRFVPIKSVEQQDVQSLHRARSRLVSNRTGLVSQMRGILAERGIVFAQSITRARREIPVIVADTSNALTPLAREMLADLMDQLRELDRRIAGFDRRIDLVFKASETCQRIAQIEGVGPKTATAIVAAVSDPKDFRNGRHFAAWLGLVPRQSSSGDRTHLLGISKRGDRHLRTLLIHGARAVLRTAPTKHDKKHAWALALKARRGANRAIVAIANKMARVIWSMLATGQSYQKAG

SEQ ID NO: 179467 - protein, 347 aa, unidentified
MMRILALDLGKYKTVACEYEAESGRHRFATVLTTPKALHDLIVDREPQRVVIEICSIAGWVSDLVRSLGIELQVANTSDERWQWRKVKQKNDRRDALKAAQLSAVNQLCPVHVPELTMRQWRALIAYRYKLVQRRTKVKNHIRDLLLREGQLLPRGRAAWTQAGMATLAAIAQPFTTVDSDQLWRGELGIELAQLTQMQLQIQEVEAKLDELAAADVRVQLLRTIPGVGPRLAEAIVTMFDDVTRFTTAGQVGAYLGMVPKQFDSGERERSGRITRHGNRLVRSLLVEIAWASLRHNPWARQTFQRISGGKKSRRKIAIVAVGRKLLVRCWGMLRHQTPWDWQTSGA

SEQ ID NO: 179468 - protein, 345 aa, unidentified
MEITAIGVDLAKHVFQVHAVDAQGNTVLRKRLSRSQMVAFFTRLPPCLVGMEACGSAHFWARSLAKMGHTVKLMAPHFVKPYVKTNKNDVNDAEAICEAVQRPNMRFVTIKTVEQQSILHLHVSRQLLVKMRTQVSNHLRGLLGEYGLIIPQGIAHLADIPALAEDATNGLPGVLRQLLMDMLEHVREIDHKIDVMEAQIRQWHRHSDASQRLAEIPGIGLLTATALVGHIGANAQGFTSGRHLAAYLGLVPRQHSSGGKQRLAHISKRGDPYLRTLLIHGARAVVRMCQGIQRRGTTPIDPWLEHLLTRKHPNQAAVAQANRNARIAWALLAGNRVYRSPVTAT

SEQ ID NO: 179469 - protein, 412 aa, unidentified
MRLFAGDDWAEDHHDIEVMDEAGKVLARRRLPEGVAGMAQLHGLLGQFLPEEDPDSVEVIIGIETDRGPWVAALVAAGYTVFPVNPLQASRYRERHGVSGAKSDAGDAHMLADMVRTDSHQLRAAAGDSPEAAGIKVLARTHKTLIWERTRAVQRLRHQLREYFPAAIEAFDDLDAADTLELLGKAPDPARAAKLTRAQVSAALKRARRRNIPDKATAILAALRSEQLRQPEALTAAYAATVRSLIAVITTLNEQVKILQGQVEEHFGRHPDAEVYLSQPGIGAILGARVLGEFGDDPSRYRDGKARRNYAATSPLTRASGKKKVVAARFIHNDRLVDALNAQAFAALNASPGARAYYDELRTRKIEHNDALRRLANRLVGILHGCLKTGTLYDEATAWGHRENLPQSSAAA

SEQ ID NO: 179470 - protein, 391 aa, unidentified
MVCVGIDVAKDKHDCCILDSDGMVRADCFTIPNNMDGFKQLLQTIRNCTKKSDKIKVGLEATGHYSYNILGFLLDNDLAVYVMNPLHTNLYRKSLSLRKTKTDRVDARTIATMLLSDVDLKSYTDTAYHNEELKSLTRYRFDKVRERAKLKQSVSRLVTILFPELEKLVTSLHIASVYALLSEYPGAKQISEIHLTKLTNLLATASKGRYGKDKAIQIRDAARTSIGSVMPAKFLELKHTIKLIRELTSEIDEIEVSIQKIMDELNPPILSIPGVGIQSAAMILAEIGDFSNFESPDKILAYAGCSPSTYQSGKLTNCYAHMEKRGSRYLRYALYNATKYVCHWNPVFAEYLAKKRAEGKHYNVALSHATKKLVRLIYALQKSGKAYLVAA

SEQ ID NO: 179471 - protein, 350 aa, unidentified
MKIIGCDFHTRYQQIAMLDDETGELSTQRLEHESGEAERFYRELAKPVRVGVEATGPLHWFERLLAELGHELWIGDSARIRASEVRKQKTDERDAQLILDLMLTDRFPCIWVPTAGERDLRQLLWHRHKMVRMRTMLGNQLHFLAMSQGLCRKKKLFSEAGRSELCRLPLGTWAARRRAELLRLRDQLDPVIDELDRAVLQEAKRREDAVRLMTHPGIGPVNALAFVLTLGPVARFQRGKQIASYLGLNPSEHSSGGKRRLGAISKQGNTMVRWLLIEAVHHVVRLDPEFRQDYQRLKSRRGNAVAKVAIARKLAVRMYWMLRSGADYARLVRTQASPGATLVPQAGSLG

SEQ ID NO: 179472 - protein, 347 aa, unidentified
MTYFTGIDVSLRSVSICVVDDRGEVCREAKVAAHVDVIVEWLPAFSPELKSVGLEAGALSQYLTYGLQAAGFEVICLEARQVKNTLDAMRNKTDRNDARGIAQILRTGWYSRVHIKSLHSHRVRALLASRKAILAKCVDLENELSGLLRVFGIRLAPRVGHGSFDAQVRSTFADDEMLSCALVPLLDARTVLYKTYLKLDNAVKALTKADPLFVRLMSIPGVGPVTALTFKSAVDDPARFKSSRNVAAHFGLTPKRYQSGEMDNPGHISRAGDADVRSALYVAAHSLLTRNAQWSSLKAWGMRLAKTRGHRRAVIAVARKLAVILHRMWVDGTEFRWGSQEPVAVKA

SEQ ID NO: 179473 - protein, 431 aa, unidentified
MLKINPLSTLYVGIDVSSKSNYVCALDFYKNKYINSSFANNQPGAEELAKKILECLKKHPELNTIVAALESTSVYSIHIANFLSSCEELMHFKPYVFVLNPKCTANYKKSYIGLGKSDPIDAFVIADYARAGNIETEPWRGSQFLALKRLTRHRLHLVECMTREKTYLVSNLYLKFSELQMLEGDDQPFSDIYGATSSGVLTEYLSPEEIIDSSEEDLISFLAEKSRNRIKDISKTAELLKKAARDSYRLDKALYEPLNVSIASSFNCIETFKKEIKLIDTAIEKEIKGLNPNAFIILQSIDGIGSVFAGGIVAEIGDISAFHSSDALAKYAGLMWKSNQSGDFDGEDTPMSKAGNRYLRYYLGEAANSMRKHNVEYGVYYRKKYNEVPKHQHKRALALTSRKFVRLVYGLLARNQLYSGVSLDASIKETK

SEQ ID NO: 179474 - protein, 465 aa, unidentified
MTRGDRRRNARRERLRGVLPRDGVVVGVDLADEKQALAVVDHDVRVLARKTVRVKAFRLGEALDWAVEQARAGGFARVTVACEPTGPRWLQVQRLCAERGLPLVCIQPLVSHIAREQQDYTTHKTDEADCVMIARLAGELHCYIPEELDETWAQLRHLGRRRAQLITSATASVQRVADFLSVAWPVVTETCARPLESRTWLAAVLAVTSRCGGQPGRLAAMGPEAFTALVRAEVPGWGGQRVFGPVCRRVFAALTDTEGVVVSSRRGLLRRCADELGDLQRTRAQLRAVEADMVAVLAELGLSRLGDIPGLTAVGAAAILAETGDPRRYDSSSSLVKHSGLAPADNASGAFAGQARISRRGRPGLRLTAWRAVLPMLRHNPVMTARYQAMTAGDGTAPGPDGAGSRQATAAAAARARRARARTACAAALLRWIYSMVVHGTSWDAAVACGTAGIQHAPRCPAQAA

SEQ ID NO: 179475 - protein, 383 aa, unidentified
MRWTQPHNLKRPLKGQDGKLEHPNRGSEEGPVMKVTTIGIDLAKDVFGLHGVDGEGRVTFKRRLVRSRLLEFLSQLPRCLVGLEACSSAHYWAREIERLGHRVRLMSPRFVKPYRKSDKNDANDAEAICEAVTRASMRFVPIKSEAQHEVQALHRVREQLLKSRTALVNQVRGLLAEHGVVAPHGIARARRLLLGILADPERHGLSGLFRETLQEMAERLRFFDERVGAYDDRIERVFKEDERCRRLAKVEGVGPLVATAVVAAVGNASEFKSGRELSAWLGLVPRQHSSGNRSQLLGISKRGDRYLRTILIHGARAALRRADHKRDQRSRWAMRIKLARGYNKAAVALANKNARIIWALLTRGENYRPAAISVASAGSVESV

SEQ ID NO: 179476 - protein, 375 aa, unidentified
MKEKLRFLGLDVHAETIAVAVAEPEGEVRSLGTIPNRGESIRKMIKKLGPAEKLRACYEAGPTGYVVYWQLAELGIQCEVVAPTLVPVKVGDRVKTDRRDAEKLARCYRSGDLTAVWVPDEGSEALRDLVRAREAAKQDQMRARHRLSKFLLRSGQRPPTGVRPWTRPYLIWVAQLRFTQVAQEATRQDYLHEVEHMRERVARLEQAIMEAVKLASPALQQVINDLQALRGIADISAVTIAAELGQVSRFGSARQLMGYCGAVPSEDSSGKRIRRGGITKTGNAHLRRIVGEAAWSYRRPPGIWYGLRRRQESISEEVKEIAWKAQHRLHKRYMKLGAAGKPQGKIITAVARELLGFIWAIGTRAETTVSQRAAA

SEQ ID NO: 179477 - protein, 464 aa, unidentified
MATRGTPPVLASHARRLIRTSPRWLIEARRHAAWPLYREEGQQVKKSQRIVGFDCGEDGHSAVLLDTAGEFKERFGVVNERGQIQELLAKLILAVGPEAQLVVVVESKRSHGRIVADVALELGCDLRQVNTVALNHFRDLEGQPRKDDEWDAYLGARMVFLRMGGCREATETTEEERTLSRLTRTHSRLVEDRKRHVARLRAVLLELTPEVLHSSWEGPQPGSKAMLYLLERWPGFEGLERAQMRSIEKILRRCRYGSRATYVARLIRKMARGISIAAEERHAFTLELDLLARQIRFCDESRDRLRAEIVHRIERHPVGQKLLDMQGNGPVITGVLVSELLPVTRTSTEPKCATYAGVTPLSRKSGKSLDKDRLTQGVNKRVLHALYTASVVAIKHSAIDRAYYQKKLRDYAGHPKPHVAAFIALSRQRHKLVYKLMTTDARYDKEVLIAAHLARIEQERPAAA

SEQ ID NO: 179478 - protein, 509 aa, unidentified
MPCPIRWGVPLQEVARRMKVLYERVAGIDVHKDMIKVAIRSPGDKPWTRKTEILEFRTFYGVLQQMARELRKRGVTHVVMEASGVYTEPVYYALCEQDFEQVAVINPAHAKALRGHKTDAKDCARLAELFECGLLRGSYIPAPELKEVRDLTRYRMKTVQARTSEIQRLGKALESAGIKLGSVASSITGASATAMIEALIDGERRGQVLADLAKGRMRAAGKLADLSMALTGRFTEHHALLCRLHQDRIAGFDGAVAGLDERIAGKVTRWQREQGLLTSVPGFGDVVAWAWLAEIGPAPHRHFATHEKLASWVTLCPGNNISARKRKHGRTGDAGTYIKPMLVQAAWAAIRVRGRLQARYNRLVRRFGGDKNPGREEEGDHRDRAHPAQDRLPGAQERDALSGPGHGLLHPARIPRAQAGLAGTPAAKAPPRLRRHHHHQPSGGRLNTRRLDQPTADPHWSRSRSRHPGPPAGQPTSVPQPCRRSRQGPLPRAQRDPVSVSGMPAAVSC

SEQ ID NO: 179479 - protein, 399 aa, unidentified
MIPEHETVDVFIGVDVGKSNHHAVALDRSGKKLLDKALPQDEAKLKAIITSLSRHGRALLVVDQPATIGALPVAVAQAAGIMVGYLPGLAMRRIADLHPGEAKTDARDAYIIAEAAHTMPHTLRSIQVADEEVAELAMLCGFDDDLAKQATATSNRIRGLLTQIHPALERVIGVHLDHQAMPELLAKYPNPAALRKAGKARVEALLRKHAPRAGKRWAAEVFAALDEQTVVVSGTNAAGIVLPQLARSLVQTRTARTEVLAQVELLVEAHPLHILLTSLPAVGVRTEARILTEVVGKDFQTAGHLASYAGLAPVTWRSGTSIRGDHPSRKGNKVLKRALFLSAFASLHDPISRTYYDRKRAEGKKHNQALIALARRRCNVLFAMLRDGTIYQKHVALAA

SEQ ID NO: 179480 - protein, 352 aa, unidentified
MLIIGCDFHPSFQQVAIFDNQTGEEQVRRLGHREEAEQFYRSLAGQKVRVGMEACGHYPWFERLLEELGFELWMGDAAQVRASVVRKQKTDRRDAEHLLQLLMENRFPKIWVPSLEVRDVRQLLVHRHKQVQARTRTRNQLQAMALSQGVQKKWKLWTKAGRAELEQLPLLPYAAERRKQLLQALDQLAAEIAELNGRVEEEVRKRPEAVRLRTHPGVGPVTALAMVLTLGPAERFASGKDVGSYFGLIPREDSSGGKQRLGRISKQGSSFLRFLLVEAGQSAARYDPQLKRFYRRLATRKNRGVAKVAVARKLATRLYLMLREQWTYPQLCQAVMQASPSHSVVEHQKPTA

SEQ ID NO: 179481 - protein, 458 aa, unidentified
MSKRHVSLEVVNPYAAGIDIGSRSHWVAVGQDAQDVKEFGVYTQDYQELCKWLKEHEVITIAMESTGTYWQNVFSFLVAEGFDVILVNGRQTKNIKGKKTDILDCQWIQKLHTLGLLSSSFLPDSTTDIIRTYSRHRQNIIKQVGATVQKMQKYLRLMNLRLDVVVNDIVGLTGKQIISAFIAGEKSGKELSKYRHFNCRKPEEEIERALQYNGREDYFFALKQEWKTYLHLQKQIDETDKEIKKLLKTIIRNDENKKKQTVKKKDHKRKNKNAIRNTDMNKIGVQYFEGVDLMAIEGVNDATVMAFISEIGLEGIKKFRTAKEFAAWLRLAPNNKISGGKVLSHHLPKGSNRLKIALRQAANVIGNLKEGHLNDFFRRINYKKGRATAVSATARKLAVIIWNMLYKNIQYQPPTEYLFLDQKRKMKLVLRIRKNIAKFDIKPQDVGFNKALITSAEI

SEQ ID NO: 179482 - protein, 355 aa, unidentified
MDSVKYVGLDVHQATISAAVMDSEGRVVMECVLATRAGAILDFIRGLRGTVHVTFEEGTHSAWLYGLLIRRVARLVVCNPRKNALLKAGNKSDAIDARKLAELLRGGQLSAVYHGEHGVTAVQELGRSYTTLTEDTTRVMARLKAVYRGRAIATAGKKLYGPHRGEWLAQLDERGVRRRTELLYQQLDALQALRRQARQDLIVESRQHEAVKQLRTVPFLGPIRAALLLGRVQTPYRFRTKRQFWTYCGLALETRSSADYRYQKGQLVRRTKPVLIRGLNWNHNHQMKNLFKGAATTASMREGPFRTFYQGLLEKGMVPAMARLTLARKIAAITLSVWKKGEAFDAQQLKPQAAA

SEQ ID NO: 179483 - protein, 316 aa, unidentified
MTTQIIAAGVDVGRDFLDVALAPSGGWFKTANAPAGVAAVVERLKRKGVRRVVLESIGPYGARLVRALAGAGFEVGVVDPRRIKALRIAEGGRAKTDRLDARLIARFALSMSGAARPVPNAETLEIRALSTRRRQLVEMAAMEKTRLKQAIDEEIVQSHRAAIAALAAERKRIEAKLATRVRAGGGDARMAILRSAPGVGPAIAVTLLADLPELGTLSRQSAAALAGLAPFDDESGLHKGRASIQGGRSCVRAALYMAALSAVRCEAGYKHEYRAMRAAGKPAKVALIAVARKLLVALNGMVRENRTWKPIPPHGA

SEQ ID NO: 179484 - protein, 350 aa, unidentified
MQIIGVDLHTRQQTVAMLNVETGEIVEKTLPHEGDTVREFYSTLTGATRVGIEATGSMQWFLELMEELEIDCQVGHPAKIRAAEPRKQKYDRRDAALVLQLLVENRFPSIWMPSREQRDVRSLILYRHQWVRIRTRIQNALQAIALSHGLRRGSSLWSEAGQQAIASLPLTRYTAERRTALQSLYGHLQEQIEDLDRKVEELAWQRPQARRLMTHPGVGPITALATETFLGEPKRFVDGKAVASYVGLIPSEHSSGGRQRLGGLSKQGNPLLRFLWCEAVGHAVRKDAELQRFYQHKLMQKGLGKAKVAAARKLGIRLWILLRDQIDYQEFCRRGQLRQKHGGAHAGMPA

SEQ ID NO: 179485 - protein, 343 aa, unidentified
MQVVTTIGLDIAKSVFQVHGVDAVGQVLIRRQLKRRAVLAFFQKLPVCLVGIEACASSHYWSRELQALGHSVRLMPPAYVKPYVKRQKNDMADAEAICEAVARANMRFVPTKTPEQQSCLMLHRTRHLFIRQQTAVINSIRAHLAEFGIVAPVGRKGVTELLHIVADPSDKRVPEVARACLAALGNQLLSLKEQIVEFDRMIMVWHRSNETSKRLHYIPGVGPMLATALVASVADPRTFRSGRNFSAWIGLVPKQHSSGGKDRLGSISKQGDRYLRSLFVAGALAVIRYAKVHGTKHRPWLTALLARRPTKVAAIALANKLARMAWAMMARGERYRQPVALAA

SEQ ID NO: 179486 - protein, 319 aa, unidentified
MAQNDLLVVGVDVAKDKVDACIRVLKVRKTCPSTSPGQRELIAWLRKHKVSKAVMEASGGYERVWAKALRRVGIEVRIVDPKRVRSFAQSAGRLAKNDVIDAEMIAWFAETFGEAPGQIDDPAHEELTALVKARRSLIDLRTRLTMQNEHEAPALVEKARARLLNKLAGEIETIEAAIGDKIKSTPDLAERAEIIQSVPGFAEATAVTLLAGMPELGQVSNSVAAALVGVAPYDDDSGKRYGQRHIKGGRRWVRNALYMPCVGAATLNNPVFKAFYQRLIAKGKEPKVALLACMRKLIIILNTMIARRQKWDPSRYVSS

SEQ ID NO: 179487 - protein, 483 aa, unidentified
MSFLRSKAPSPDTCPGETAATDAQWGDRAVERQYRDRMGLRWLVCTRAQSTAPGMALIRRECMMHEERRWFAGIDWASQEHVVTLCDGQGKKIGQRKFAHGGTGLGDMIAWLLKASGGEPCEIHVAIETPHGPIVEALLERGFNVYSINPKQLDRFRDRFTVAGAKDDSLDAYVLAHSLRTDMPRFRKLSVAEPLIVELREWSRIDEELKVERLRLANRVRDQLWRYYPQMLELGDLDEDWMLELWEAVPTPEKAARASKAAISRVLKKYRIRRFDATQVLSELRKPPLSVAQGTIEAAIAHIRVAIERLRLVNRQLADVELQLDRLCKKLAEPVAGDDGENVPGQRQEHRDATILDSLPGVGRIILATMLAESPDALQRRDYHALRGLCGTAPVTRRSGKSCIVTRRRACNRRLRNAAFNWGTVAVQHDAVSKAKYEALRARGHSHARALRSVVDRLLYVACTMLEKGTLFDPSFVTKGSAA

SEQ ID NO: 179488 - protein, 427 aa, unidentified
MGKVARCGEGGQTVKDAAIHVGCDIGSAHHAACIIDDEGNTLERIDRVFNNTKGFAFLLGRIDFWRRRTGAETVRFGFEPTGHYWKTIVNHMRGHGGEVFFIKTTAVKAMRELTDSTPSKNDRRDAHTLALLLREGKVLKGKPPEGAFRELRDLGAHRQRLIEARSAWLMRLRAFLDTFFPELPAFFSQMAAVGLRRLLEEAPFPEDLTARGPAWLSANLKAWTRKGKTAEEKARSIMEAAGRSAGLPVLGADRVRLGTMLRAIELNTTELEVAEREMARALADTGYAELLLSFPGIGVVSAAILLGELGNPVNYERAAEWVKMAGIDPSENSSGTREGRRRISKKGRPVLRLNLYFMALSAINNCPELRAYYMARKKEIEEGRLKIVPNQLVFAVAIKQLRVLFAMVRDNKAYEPGRVGVSLRRAA

SEQ ID NO: 179489 - protein, 314 aa, unidentified
MIIIGVDFHPEFQEIASVDTDTGEYQEKHLAHPEEAEQFYRALASVGQMVRVGMEASGHGRWFERLLEELRIELWRGDAEVIRAKRGRKQKTDREDARHIFKLLLKDDFPRIWVPSWENRDLRQLLWHRHRMVQARTRVMNQLQAVALNEGLRCKKKLWRTHGRQQLESFRLAPWASRRRRELLELLDRLNPTIAELSRAVDEEAEKCPEAKRLMTHPGVGALTALAFVLIIGNAERFRCGKQVASYLGLVPLEESSGNRRRLGHITKQGSSIVRFLLVEAAQVTVRRLPDWRTKYVHLMMRARTKDRQSCHGP

SEQ ID NO: 179490 - protein, 382 aa, unidentified
MQTIDPVNPTILLAIELSTSTLLVAARVPGLDKPRLSRIDGGDTAALLALISSLQARAACGLGATMGIVCCFEAGRDGFWLHRLLTAHGVVSYVLEPTSILVNRRARRAKTDRLDAEGMLRVLAAYLRGDHQACSMVRVPTPDQEDAKRTHREREHLVQERLRIENRIEALLFTQGIRKRPSLRSWERDLTILRTGDGRKIPHHLRAELDRLRRRLVLTLELIREVEAERDQVTKTKSQDQAHHKITALCRIRGIGENFAAVLTREVFYRSFDNRRQIASYVGITPMPYQSGGMDRDRRISRAGNPRARTTMIQLAWLWLRYQPDSELAEWFRERVGTLAGRTRRIAIVAMARKLLIALWRYVETGVIPTGAEIRAETTVAA

SEQ ID NO: 179491 - protein, 343 aa, unidentified
MVNDIVIAVDVAKSVFEVAVSDRPGHVCKRQRPDRSQLLPFFLAYPGATVVMEACGSAHYWGRELQKRGHRVVLLPPHHVRPYVRGNKTDRTDAKGILEAYRNAAIQPVPVKSVSQQSLTALHRFRSGWMKERTARLNAVRGLLRELGLFIPMGAEKVIPAVWAQIEDADSELPAALRSVFAEACQEIRDIEARIEKVNHELELLAKQTPAVIWLLTIPGIGLITATALVAFIGDIRRFPSGRHLASYLGLTPREFSSGLKRRLGRISKRGDGYLRTLLIHGARSVLIHARKQQPDRLRSWANDLAKTHVHNKAAVAVANKLARIVWAVWTKNVPYELMPRAA

SEQ ID NO: 179492 - protein, 335 aa, unidentified
MPIVGGIDIHREQLTFDYVDTGTGEVRTGQIRPADREHLRCWLGRHAAAGPEDMLAFEACTGWRYVAEEIVRAGATALLAEPADTAAARGRKKRAKTDKADARLLRVLAERGQVPACWIPPGHVLEARALLETYHDLRAEHTAWVQRIHAVLFHQGAPKVHGFTGPGGREQLERAAAAHLSPSGRRQVQTALQMIDALDEQLDDLRRELRTAAKRLKGAVALQQLWGVGPLTALALVCWLGGAGRFTSSRQAVRFTGLDITVYSTGGQGPPVLRWLLYEAGKTHGRAGQGSDYDYYAQVKERIDGKRAALCEARKITRRACHVLADLGDDAFTLA

SEQ ID NO: 179493 - protein, 344 aa, unidentified
MGEVITIGLDIAKSVFQVHGVDGVGAVMIRKRVSRAKMLEFFATLPRCLIGIEACPAGHHWARELQAMGHTVKLMPPSYVKAYLKRSKNDANDAAAICEAVTRPSMRFVAVKTKEQQAALMLHRARQLLVRQRTMLSNAIRGHLSELGIVSAKGRNGTDELLEIIGKDADSRIPLAARSVLKVLAAQYSAIGAEIASISKSILVWHRSCEPSRRLEEIPGIGPIVATALVAEIGDWKAFRSGRGLAAWIGLVPKQHTTGGKDKLGSITKQGNRYLRWLLVSGAMAVIRYAQKHGTKKHPWLGRLMARRPTKVAAVALANRIARMAWAIMARGERYREPAMLLAA

SEQ ID NO: 179494 - protein, 413 aa, unidentified
MDVLHPRCCGIDVHKSSISACILVVVAGRVQKYQRRFGAMTQDLQELANWLRQFEVTQLAMESSGVYWKPVWNILEGQFTVLLANAQHIKNVPGRKTDQKDAEWIAQLLQHGLLRPSYVPCEVIRDLRDLTRMRASLSQEASRISSRVQKVLEDANIKLASVATNTLGKSGRAILEEIIAGQNDPEYLASLALGHLRAKTPQLKLALEGKIRPHHRFLLRRLLDQLRFVEHEIELLDERLEEIGREQPELSQAVARWDTIPGIDRVAGWTLLPEVGHTMAQFPTAEQLASWACLCPGNRESAGKRLGGKTRKGSPWLRRIACQCAWAAARTKNTYLSAQFRRLAARRGIKRAILGVAHSLVIIGYHLQKSQHNYEELGGDYFDRIDSDGLKRYFIKRLEKLGHKVTLVPIKAA

SEQ ID NO: 179495 - protein, 388 aa, unidentified
MSKPFDLSKSLTALDPDSTLIVVIEMSQSSWLVAARAPGLARDPLKKLPPDPEQLFKLIDRWREESRRAGRVVRRVCVAFEAGRDGFWLARLLRQHDIEVYVIHPTSIPVKRDHRRAKTDRLDTELLMRAFLGWLRGEADHCSMAAIPTLAEEDAKRPTRERESRVNARSRLVNRMKGALARLGIRGFNPKLRKAAEKLEELRTGAGEPLPPNTLAELRRDMAQLRFVADQIKQIEKAREARLEKAPREGAHPMVLMLASIKGVGLETAEMLVAEVLSRKLRDRRAVARYGGLTGSPDESGSRSREKGLARSGNARVRRGMIQLAWRFLMFQKESALAKWFEARTANGPRGVRKTMIVALARKLLIDLWRFVEDGTVPVGVELFDSRA

SEQ ID NO: 179496 - protein, 329 aa, unidentified
MKKNWFVGIDVSKKWLDVAIFVENSDLKGYTHTRVNNDKQGYRELLRWLRENGVDASTCTYGMEHTGFYSDGLQHFLDKKDYSYTMLEPAVIKHYPIQPREKNDRLDAAKIADYLYRFRDTIQLSRVPDKTMEELRKLHRERKFYVEDRVCYLNRRQVVDKDEAKRLDKMIELLDKQIDTIEEKIRQIIQNDEALMENYLYLDSIKGIGFVNAVNAIVITQNFTVFKTSREYASYIGVAPHTKTSGTTVRWKPKPRKHCDLTAKADISQAAKIAVVHDVELKKFYERKCNGKDDADTVRKAMNAVKFKLVLRMFAVVRQKHAYRQLTMI

SEQ ID NO: 179497 - protein, 398 aa, unidentified
MIFVGIDVAKDKHDCFILNSEGTVLADVFTIANNRIGFETLLSRIQSCSQGESKIKVGLEATGHYSYNLLGFLLDSGLATYVINPLHTNLYRKSLSLRRTKTDRIDARTIAMMLMSDVDLKSYSNTAYHNEELKSLTRYRFDKVKERAKLKSSVARLVNILFPELEKLVSSLHIAVVYALLSNYPGASYIANANTEELAETLCTASKGRYTKSKTAEIQVAAGVSIGSKMPAKSMELKHTIALIRELDKEISEVESAIDKITSQMDSPIFTIPGIGRHMGAMILAEVGDFSNFASADKLLAYAGLSPSTYQSGQLQNCYAHMEKRGSRYLRYALFNAAKYVCLWCPTFSAYLEKKRSEGKHYNVAISHGQRMLLFAIPIFTTLKFLSKILFWGLTFNS

SEQ ID NO: 179498 - protein, 338 aa, unidentified
MSIVAVGIDLAKNVFAVHGVGASGKPELVKPDVKRKKLLELIASLPPCLIGMEACSGAHYWAREFQKFGHTVRIMAPKFVAPYRLGGKHTKNDAADAAAICEAVTRPQMRFVPIKTLDQQSHLFIHRAHQGYVAERTALINRARGLLSELGIVLPQAYKAFKQGVHQVLEDLPGYCNQVIGDMLSEIAHLDERIEQDAKLIAKLAKEDEQSRRLMQLSGVGPTTATAIVASIGKGHDFKNGRQFSAWLGLVPRQNSSGGKTKLGSITKAGDSYLRMLLVLGARALLLSAPNKTDPVSRWALQLKERRGYGKAVVAIAAKNARMCWAVLSLGEGFRVPA

SEQ ID NO: 179499 - protein, 394 aa, unidentified
MRFAGVDIASETHVVALVDEDGKVLVKPTAFTEDAAGYEKLLEQLGASAELLVAMEATGHYWKNLFAALAARGLSVALLNPVRTHRFAQEDLQRTKTDAIDALGIARFAAQKRPVPTRLPDPATEELRELVRLRERLLQDFGDRVRQLHRLVDLGFPEFTRYVKGLDSELASAILHDYPTAAAFQGVSAKRLAGLRYDGRHQVGAELAGLLIAAAKHSVGHHHGEAYRVQVRYACEDLDILRRRLRQLDRDIAGTLGAHQVGTLLTSIQGIGPNTAARLIAELGDPAHFRSPGALAAYVGVVPALSQSGKRKNTRAPSTAIGNAGLRAALWMPTLTAVRKNPWLRAHYQRLLARGKLPKVALVACMHKLLFAVYSVAKHRRPFVAHLTTAQAIP

SEQ ID NO: 179500 - protein, 323 aa, unidentified
MQKRNVPESIVIGVDLAKQTFDASLGVSGSIKTFANDDAGFDTLLANLAEQAVDLIVMEATGGLESNLACALQAAGFAVAVINPRQARDFAKAMGYLAKTDRIDAKALAELAQVLARSPERDRFVTALPTPEQQALQALVARRRQLVAMQVAERQRLSVSHAAARKSIEAMIMAIRTQLDEVETELAKHIETHHADLALRLSSVRGIGPTTVATLIAEVPELGQLSRREISALIGLAPFNRDSGQMRGKRAIFGGRGQVRRGLYMAALAAIRFNAVIKQFYDRLVAAGKPKKVAIVACMRKLLTILNAMVRTGKAWDDSLHTA

SEQ ID NO: 179501 - protein, 402 aa, unidentified
MNAVGIDVSKGKSMVVIMRPFGEVVASPFEVMHTDSELRELANSLRNLNGETKVVMECTGSYFYPIAYTLHEAGLFVSAVHAKIIHDYGNNTIRKVKTDKADSIKIANYALSHWMELPAYRPEEDTRYMLKAFSRQYTKYQKMKTMLKNNFIALTDHTFPGVKELFTSHPRKSDGHEKWMDFAFKFWHCECITSLSEKVFTDRYKKWCKNDGYHFSQTKAEDIYASACGHFFVMPKNETTKLLITQAIDQINAISENIAVVANEMKRLAEMLPEYSVVSEFFGVGDILGPQLMAEIGNVFRFRNKGSLVAFAGLEAPPYQSGKFDSQDRSISKKGSPHLRRTLFIVMQSYVIKAPVDEPVYQFIVKKRSEGKHYYSYMTAASAKFLRIYYARVKEYLNSLDE

SEQ ID NO: 179502 - protein, 344 aa, unidentified
MQHYVGLDVSVKETSVCIVDKAGKVIREVKVATKPAEILAVLTEEALAIERIGLEAGPLSQWLYGALAEAGLPVICVETRHMKAALSAQINKSDRNDARGIAQMMRVGLYRPVHVKTLASQKRRMLLTSRQLLQAKALDIENDLRGTLRNFGLKVGMVGTVEFEARIRELVADHPDLAAIVEPLLIARRVLREQLGVLHRQLLEIVRQDEVCRRLMTTPGVGPVVALTFRATVDVPSRFNNSKAVGAALGLTPRRQQSGEIDRMGGISKCGDAMMREMLFEAALVLMTHSRKWSWLKAWGVKIARHRGMKRAIVAVARRLAVIMHRMWVDGTEFRWSRKEAAAA

SEQ ID NO: 179503 - protein, 403 aa, unidentified
MECIFGIDVSKATANVAVLVDDSVVKQFIVATDRGGFQTLSDELNSFKSPLIIFEATGIYSRPLRAFLQRDGWQYTEINPLAAKKAMDSLRNNKTDALDAIRLARAMAKNHYKATFQEQPVYTELRDLERTYQQHNEDLVQNKNRLHRELQLTFPEIEQFLSKTDGSLYWHIVERFPHPQLVLGYDVNELAEIILAETPKNMGQKRSIRLAQHLIDLAQQAAPAVTQSAYAVKAVTALAKDVERIDGLKAETITEMANVAKNLSEVKLLMTIPGIGEKTALCLIAELGDVRRFHSANAINAYIGIDLILYESGQYQAGMHIRKRGNAYARKILYKAIMNIVSVAQYHPTRISTTYKRKKQSAQSKKKTTKKIAIAAMSQFNRLMRHLILNNEAYDSTTFTPEQ

SEQ ID NO: 179504 - protein, 429 aa, unidentified
MEINSTNVAGIDIGAKKVFVAIEGQPVVSYFTFTEDFLLLRDSLLKHKVKTVAMEATGVYWVILYEILEEAGIDVWLVDGRQTKQVPGRKTDVKDCQWIQELHGYGMLNRCLVVKADIKELRSYLRLREDHIRSSSMHINHMQKALTEMNIRLTEVLSEIHGKSGMAIIESILGGERDRDVLVNLCHTSILKGKKDLVYKSLNGIYTKAGLFALKQAHDGYQFYLQQILECDAQINIVINRMGNSGKDQDLKNKRKPIRHHRPNVKSLGPNLLNIFGGKDATLISGITDYTWMELLAETGPDLTRWPSEKHFTSWTGLAPGQNNSGKKNRNAKKRGSPKAGQIFRTIAQGLINSKKIALGAFGRRLRGRKGPAVAIKAVARKLAELYWRVGVKGLEYAENGIKKYEEQLVKQKYKTVMKLANELNLQVS

SEQ ID NO: 179505 - protein, 355 aa, unidentified
MNSEKYIGLDVHQATISVAVLDSTGKLVMESILETKAATILEFLAGLRGTLSVTFEEGTWAAWLYDLLKPHVAKLVVCNPRKNALLKDGNKSDRIDAHKLAELLYLNKLSSVYHGETGVRMLRELARSYLTIVKDLSRVMNRLKAVYRSWAIPCAGRDVYYTRHRAEWLGKIKEAGVRRRAERLYQQLDMLQYLRQQARRELLAESRKHAITVKLRQIPSLGPIRSALAVALIQTPHRFRTKRQLWAYSGLALETRTSAEYCYVKGGLRRSKKQISIRGLNKDHNHDLKGLFKAAATRASVLPGPFQDFYQRSLAKGIKPTMARLTLARKIAAITLTLWKKGENFDADKLKSQAA

SEQ ID NO: 179506 - protein, 334 aa, unidentified
MVAGTLGSLDKEGATKMVKSITLAAGIDTSKSKLDVGIHGQTRVETFENTPAGWRKMQAWLVAEGVGRVGIEATGGYERGVAGHLQAGGTTVVVLQPKQVKAFGQLHLRRANSDRIDAFLIAACTHLLDAKDRMPPDPRFDALSDHLTYIEQIEEDIARFKTRLEHVDEKRLQRTINADIARLAKRRDDELKRLQVSLRAYADLARRFDLVLSIPGIGARTALSIVVRLPELGQVSREQAASLAGLAPFVRQSGLWKGEAHICGGRGRLRRALYAASLAAAFHWNPALKALYERLTQRGKSHTSATVACARKLLIYANTVVGRGTPWVDDPTSA

SEQ ID NO: 179507 - protein, 387 aa, unidentified
MQKPHDNSKVCRAAFVQDSTLVVVIEMALTSWLVAGMIPGVDREPLKKIAPDPEELLQLLYRWRDEAIKAGKEITRIAVAYETGRDSFWLARWLRARGIDAHVIHATSVAISREHRRAKTDRIDTAMLRRGFLGWLRGEPGHCSLAIVPTVAEEDAKRPHRERESLVQERTSTVNRMKSILIQFGVRNFNPVLRKASEKLDAVRTPEGIPLPPNAAAALRRHMERLGVIKEQIKAIERTRLQRLQRDPADKMNAMVFLLVQIIGFGVETAEQLVHEILFRDLRDRKAVARYAGLTGSPDESGSKRREKGLSRSGNGRVRTILIQLSWRLLKLQPGSELVLWYQKRTADAKGSRKPMIVAFARKLIIALWRYVNTGLLPEGFELKPAA

SEQ ID NO: 179508 - protein, 458 aa, unidentified
MGRSKSTDKVRRAMAMVHPNAAAIDVGATMHVAAVKADRTPEPVRSFGTFTKDLHRLVDWFAECGVDTVVMESTSVYWIPIFELLDSRGFAVFLVNARDAKHVPGRKTDVSDAEWLQRLHSYGLLRASFRPKGRIVELRAYLRQRERLLEYGASHIQHMQKALTEMNVQLHHVVADITGATGLRIIRAILAGERDPAVLARLRDSRCHATVETIEKALTGTYRAEHLFALEQALALYDTYQEKASSCDTRIEAVLKELSIRRGREAGPLPSPRQRMRRQPNGMDFDVRAALYALLGKDLTQINGLGPYLALRLIAECGDDLSAWPSAKHFTSWLCLAPSNKISGGKVLSSRTRPSGSRAAALLRLAAATVGRTDTALGAFYRRLSARIGKAKAVTATARKIAVLFYNAVRHGMEYVDPGASFYETRYRARVIDNLHRRAKAFGFALQPLKPTAAIPVS

SEQ ID NO: 179509 - protein, 408 aa, unidentified
MEVLYERCAGLDVHKAEVVACVRIGSGPNGRREHRRFRTTTAGLLELKAWLTSLECTHAVMEATGVYWKPVWHVLEEGIELVLANARHVKNVPGRKSDMNDAAWLADLLAHGLVRASFVPPKPIREMRDLTRTRRQLVREQVQHVQRIEKVLEDANLKLSGVLSDTVGQSGRKILDALINGKSDPRYLASLADGRVKATEEDLIAALTGRPTDHHRFLLKLHLDQMDAIDKSIATLDAQIEKCLVPFRWAATQLDAIPGISRVAAVSIIAETGVNMAQFPTAAHLVSWAGLCPSLDESAGKKRNTRTRHGNPWLKSLLVQCGLAAGRKTNSYYRSLYGRIKVRRGAKKAAVAVAASLLTAAYHILKTGVVYEDLGPSFLENRDKKVIAAHLLKRLSALGVEVEIKKAA

SEQ ID NO: 179510 - protein, 362 aa, unidentified
MKQRLASAPVSSATTYPRQVIGIDLGDRWSRYCVLDAAGTVVEEDRVRTRPEALAAKFGELPATRIVIEVGAHSPWVSRLLQAQGHDVVVANPRKVRLIYESDRKNDRLDARMLGRLGRVDVSLLAPVQHRSCEVQADLALVRSRDALVAARTQLINAVRGMVKSMGGRLPRSTTAAFAGKVKLLIPAELKSALEPLVRSIHSLSEQIRRYDERVEQLADKKYPETRLLRQVKGVVPLIALTYVLTIEDPTRFQRSRQMGSFLGLRPRQCESGNSAPQLGISKCGNNHLRWLLVQAAHYILSRLAPDSRLRRWGLQLASRGGKNGKRRAVVAVARKLAVLLHRLWVTGDVYEPLYGLTAEAA

SEQ ID NO: 179511 - protein, 313 aa, unidentified
MLRRAYHERIRGNRCLQGPLEWAQGFEGRILRTRNQPRAIAELVHRLVSLDPARIVVESTGGYERRLVQQIAAAGLPVVVVNPLRVRSFGEGMGLLAKTDALDARLLALFGDKVQPPLRPIVQGNDRLLADLVARRRQLLALIVAEKNRLGIAPPAIRRLIASLLRTLERHLKALDQQIEATLLEDADRALLYDLLQTVPAVGPGVARTLLADLPELGHLGRREIAALVGVAPFARDSGKIRGSRRIRGGRASVRTALYLAAMTGARFNPVLHALYQRLRQAGKPPKLAFVAVARKLLTILNAIARERTAWQA

SEQ ID NO: 179512 - protein, 418 aa, unidentified
MARSVAQKLSRFKPGMLYVGVDLGLDRNEAKVMDERAKVLTSFSFPHSCSGYQYAVERMVACKQRHHATGIVVGMEPTNYFWKLFAAELERRHIDYYLINAYTVRKHREGDQIDRSKDDPRDAFVIGDLLRTGKYTQTRLLHGVHAELRQYVTLHDRLQGDIACQKTLLRNAVGQLFPELTSVFGDLTGDTAAAMLRNHAAAVVIRQLSEEDFITAVRADLKGRRLMVSKLRRAYQLAQVSVGLVDGVQALQLAVRTHLEVLRALQEQADAVLCTLKQTAQAMPETKYLLSLRGLGLVTTATILAEIGDPSHYRNGRQLIKLAGTQPAPDTSGRKRHSLTPMSHQGRPRLRTAVYFACLRLIQLNEDFAQAYRRYQERAKNPLTKKQAIGALMNKLLRVIWALIRQQVVYDPALAQGA

SEQ ID NO: 179513 - protein, 357 aa, unidentified
MKYIGCDFHPSFQVIAMLDKETGELVERRLLHTEEARVFYEGLQGPVLVGIEASGNTHWFESLLARCQHELWIGDAAAIARQEGRKQKHDRRAAALILKLMLENRFPKIWVPSVAERDLRQLLIHRQHLVRMRSRIKNQLQHIALNQGWQKKRKLWSEAGLQLLRSLVLEPWTGQRRDTLLEMLQELEDKIRPLDQAVEKEAYACAAARRLATHPGVGPVISLATVLTMGDVKRFADSRSWVSYLGLNPSEQSSGQRRRLGGISKQGNPFLRYLLVEGAASAVKGDKSLARMYARLKAKKHHGVAKVAVARKLAVRLYWMARTEKSYPEVVRPQGSQSYPVAEVKAVRLNRPPASHP

SEQ ID NO: 179514 - protein, 340 aa, unidentified
MKITTVGIDLAKNVLSVHGIDDHGKAVLKRTISRGKVMEVMASLPPCLVGVEACSGAHHWARELGRLGHTVKIMAPRFVAPYRKSGKNDGNDAEAICEAVDRTSMRFVAVKSAEQQALLVVHRVRKGLTDERTALINQLRGLLSEFGIVIPKGRYQARHQLPVVLDDAGNGIPELARQALLEVNERIRDLDSRILAYDRRIEALARESEAARRLMAIPGVGPVTATALVATVGRATEFKNGRQFVAWLGMVPRQYSTGGKVRLGKITKRGDVYLRTLLIHGSRAVLARLAQKTDRQSAWLRSLIERRGFNRTAVALAAKNARTIWAMLAKGQTYSPALAA

SEQ ID NO: 179515 - protein, 404 aa, unidentified
MYNAVGIDVSKGKSTVTVLQPGGTVIRKPFDVSHTSQNLNELAAYLDSLDGDTRIVMECTGRYHEPILKALSEAGLFVSVVNPHLIKNFGSNSLRKVKSDPADARKIARYTLDNWAELRQYSGMDNTRTQLKTLNSQFSFFMKQKVAAKANLIALLDNTYPGVNKLFDSPTREDGSEKWVDYAYSFWHADCVRKIGLKAFTERYMSFCKKHHYIFQQDKPEKLFNASKELVAVFPKEKTYKLLIQQSIQQLNLASEHVERLRREMNELASTLPEYSTVMGIYGVGKTYGPQLIAEIGDVSRFTHREALTAFAGVDPGVDESGQHKSKSNRASKVGSARLRKTLFQIMTTLLQNAPEADPVYRFLDKKRSQGKPYYVYMTAGANKFLRIYYGKVKECLRNLEQTE

SEQ ID NO: 179516 - protein, 407 aa, unidentified
MLFVGDDWAEDHHDVCLQDAAGRVLAARRLPEGVAGITRLHELVAGHLDGDDPGQVVLAIETDRGPWVRALVAAGYRVFAVNPKQAARHREVVAVSGKKDDTFDAAALADMVRTRRHQLRVVAADSDEAEAVKVAARAHQKLVWERTRHALRMRSALREYFPAALQAYAELTLTGPDTLELLAKAPGPAEAARLTRAQISAALKRARRHDIAGRATRIQAALREQHLGQPEIVTEAYAASVTAAAAVIAVLNEQVKKMEAKVESLFRRSPDAGAYLSQPGIGVITGARMLGEFGDAPGRYADVKARRNYAGTSPLTIASGKRKTVHARFIHNDHLVSAMHDQAFAAISASPGARAYYDELRSRDIDHTDALRRVASRLAGILHGCLKTGTGYDEHTAWGHRSKPAAA

SEQ ID NO: 179517 - protein, 411 aa, unidentified
MEQIYERVAGCDVHRDQVTVCVRTPGPRGGGHKDKARFKTTTAGLTEMADWCGERAVELVAMEATGVYWKPVYYALEDRFRVWLCNAYHVKNVPGRKTDMSDADWLADVAAHGMVRPSFVPPVPIRELRELTRYRKKQIDTRASELARLEKVLQDAGIKLTSVASKVLTQSGRAMIQALIEGEGDPGALAELAKGKLRPKIPELTAALSGHFGAHHALVADRVLAHLDFLDDTIAQLSRQIAERVAEGYEPVLDLLLPIPGLQHTSVEVIIAETGADMSCFPTPGQLASWAGLCPGNHESAGKRRKVGTTAGNQWLRRTLIESARAAARTKGSYFGAQYHQIARRRGPNKAAVAVAHSLLDVIWHALSTGEVFTDPGADYFTTRQDPEHRTRRLVNQLERLGYTVELTQTA

SEQ ID NO: 179518 - protein, 324 aa, unidentified
MKMAKPSIMTAGIDTSKAKLDIAVHGGSAVFCVANDEAGWKEASVKLKRAGVGRIGIEATGGYERGVTRHLQSAGFTVVVMQPMQVKAFAKLHLKRAKTDRIDALLIAACAHVLDAGNKLPPDPRFDALADHLTFIEQVEEDILRMRTRLEHIYDKRLRRIAEAEIKRLTKRCDDERERLLAAVRQHADLAARFDLVESVPSIGARTALCIVIRMPELGQVSREEIAALAGLAPFVRQSGKHTGEAHIGGGRSRVRRALYIAALPGAFRWSPELTALYKRLIARGKSHKCALTACARKLLIYANTVVERGTPWQTNMLQKSIST

SEQ ID NO: 179519 - protein, 337 aa, unidentified
MNDNVIAIDLAKNVFHAVVLNPHGKEKIRRKIKRHQVLDFVLKQDVNIVVFEACGSAHHWGRLFRKHNLKVFLLPPQHVTAYLRGQKNDFNDALAIGEAYMHGRINSVPVKSCEQQTDQAFHRIRRLTSRERGDIVRQIRGFLAEFGLVVPAGLSAFRREVPLILEDAENDLTVEMRELIYRQYQRMIELDAELEWFNSRLSQKVNQDEQIKRLVSTPGFGPVVASAFKAWLGDGKQFSKGRDASAALGIVPRQHSSGGKNVLLGITKRGDCYLRSLIIHGARSVVRAAREKTDPLSRWINSLVERRGKNRATVALANKLVRIAWAITVKQEAYQAV

SEQ ID NO: 179520 - protein, 411 aa, unidentified
MEVVHARCAGLDVHKATVVACVRMPGARPDERRSETKTFTTTTRGLTELANWLIGHRVTDVAMESTGVYWRPVYAALESTVRLILVNARHVKMVPGRKTDVRDCAWLAQLLECGLLRASFVPPRAVRDLRDLTRLRKTLIRERGHHVNRIEKTLELAQIKLSCVVTDLMGKTGRGILQALSAGIQDPDQLAEYAQGLLRKKRAALREALVGHLTPHYAFLLQQHLALITALDTHIATLDARIEEAMAPFAEAAALAQTMPGVAGRAAQAILAETGVDMQSFPTAAHLASWARLCPGNHESAGKRQPTTTGKGATWLRATLQEAAWAAVRTKKSYYRALYHRLKGRRGPKKAIVAVQHAMLVALWHMLKHRVAHHDLGADYFERRNTARIRRHHVRRLEQLGYDVLLVEKAA

SEQ ID NO: 179521 - protein, 392 aa, unidentified
MVVSVGIDVSKDKHDCFIVSSKGEVLADAFTIPNTIDGFHCLLQRIQDCTHAQDKIKVGLEATGHYSYNLLGFLLDNGLATYVLNPLRTNLYRKSLSLRKTKTDRVDARTIASMLLSDVGLKPYTDTAYHNEELKSLTRYRFDKVKERAKLKSSIARLVCILFPELEKFVPSLHIASVYALLEEFPGAKQIAAAHLTRLKTLLETTSKGHYKRDMALEIRDASRNSIGSWMPAKSLELQHTIRLIRELDHEIAEIEEQIQSIMDELHSPITTIPGLGFRMAAMILAEVGDFTRFDSPDKLLAYAGMSPSTYQSGQLKNCYPHMEKRGSRYLRYALYNATKYVCHWDPAFAAYLAKKRAEGKHYNIAISHAAKKLVRLIFAMEKSRQPYCSAA

SEQ ID NO: 179522 - protein, 300 aa, unidentified
MNSPGNTRDIQRYVALDIHKEYVMLGAMNAAQEWVIRPRRVEMNHFRTWAANNLCAGDAVVIETTTNVWDIYDIVAPLVTQAVVAHARAVRQIAEARVKTDTEDIKRLLRLLIADIVPEVWVPPAHVRELRGMIAYRNRLVKTGAMIRNRLHSLLHRHNLPLSEGGLTDQGWWEAQALNTLERLQVRQELALLEKVEQNKAELDLELQKMSVGETWGRQATRILQLPGLGIVVTMTILGAIGDIRRFEDAKHLVGYAGMGAGVHDSGKEHKDKGITKSGRKELRWALVEAAWRAIRMSEL

SEQ ID NO: 179523 - protein, 346 aa, unidentified
MEHYVGLDVSLKLTAVCIVDRTGKIEREGVVHSDPEAIAAFIKSNAPHVARIGLETGATSTWMWTELNKLGLPVICIDARHAKAVLKMQINKSDRNDAVGIARIMQCGWYKEVRVKDLDSHAVKALLVSRALLVKIKRDLENQVRGLLKNLGLVIGRAKMNAFAWRAAELIEDRPELAAAVTPLLNARVAIERQIADLDRKVMKLARNNAQVQQFMTAPGIGPITALCFLATIDDPNRFRRSRSVGAYVGLTTRRYASGEIDWTGRISKCGDKMLRSYLFEAANVLLTRVAKWSTLKAWGIRLAKRSGLRKAKVAVARKLAVVLHRMWVDGTDFRWSSKEAADQTA

SEQ ID NO: 179524 - protein, 412 aa, unidentified
MTATNQFAAHVGLDWADKKHDVCVQFKNGERVFHVIEHTAEALDVWLTELHQKVKGRIAVALELKKGPVVYALQKYPFITVFPVHTLSLARYRQAFSPSGAKDDPQDAELALELMLRYPQKIKAIEPDNADIRLLQQLVEQRRQLVEDKRRFVNRIINTLKQYYPQPLEWFSHRGSLLLCELIIRWPSLQQLKRARRDTIRNFLNAKGGRAMALTEKRVASIDNAIPLTTDPSVIEANALMATALATQIKVVSEIIKTYDERIETLFDTLPDAGLFKSLPGMGPCMGPRMLAALGDNRDRFNSAEEIQNYAGIAPVTERSSQKSWVHWRWQCAKFVRQTFVEWTAKTVNSSYWAKLYYQGQREKGQSHQSAILALAFKWIRIIYRCWKTRTQYDEVKYLLALEARHSPLLKP

SEQ ID NO: 179525 - protein, 402 aa, unidentified
MYSSFVGIDIGKWNHQAAFLEVSGKETARSLAFQNTSEGFQSLSKSLAPFDKGQTVIGLEATGHYWLALFSFLVDNGWTVKVINPMQSDALRNMNIRKVKTDRKDCVVIADVLRFGRYTETVLPDEDLLQLRELSRCRVAHVELLGDLKRRALGILDRIFPEFASCFSTVFGAAPTELLQECTDPEELADYDVDKLIKLLEKESRGRHSREKAEELKAKASRSVGTRFGRDALKFELKMLLEQLDFIKGQVKEFDKFLKKLMKNHELIYTIPGISVTLGSAILGEIGDVKRFGTPQQLQAFAGMDPSVTQSGNFQGTQGKMSKRGSPYLRRAVYLAANAARRFDPVFKEFYDRMIARGKHPKQALAAVGTKLLRVIHAVMTSQKPYNPQKLLPPAAISQLNP

SEQ ID NO: 179526 - protein, 345 aa, unidentified
MLHVGVDFHKNYSVITEMEEDGEVRNQQKIDNDRTVLKGYLSKLPSDTKIALEATCNWYYFYELAEEYDFDISLAHPLKTKAIASAKLMNDKISSTTLAHLLRANLLPKAYIPDQETRDIREVLRTHAFLISMRTRIKNRIHAILLKNGVKCPYSDILGKKSLKWLNTLNFRVCYREAIKSYIRLAEAFNGEIKLMKQTIKSLAVENKNARLLDTHPGISYYSGLLIASEIGDVNRFSNHGKLCSYAGLVPTMHASGGKIRRGHITKQGSKWLRWILVECSAHAVKKSSRYYSLYHRVAYKHGKGTARIAVARSMLRVMYYMLKYNAPYEERSGSKKTPVSASGS

SEQ ID NO: 179527 - protein, 415 aa, unidentified
MKVVFPTCCGVDVHKTFLVATIITTPAGSLQPHYQKKRFSTFNSDLNRFADWLLEHNCLDVCMESTGKYWVPVFNILEKRGVRVTIANPKWVKAVKGNKDDTKDSKWIGDLFRIGLVKGSFIPELDIRILREFTRYRYKLVSMKSSEKNRFQNAFTVCNVALDSVVSDMFGKSATAITDYLTSAESFDPNHCVSLLQRSLKKKADQVLEAIEGFSIADEQKTRIKIIREHHDFIEKLIAKVDTSVNEMVTKYEGDINLLCTIPGIDRNSAITIISEIGADMSQFGSSKRLCCWAGLTPGNNESAGKKKSVRISRAGVYLKPALVQVAHAAVKDKNNPYYALKYERIAKRRGKKRAIIAIARMILTAIYSMFRTGEIWNPVDLYKIDMPEHLKEQQLAKAIKQASHFLEKHGLTVT

SEQ ID NO: 179528 - protein, 352 aa, unidentified
MQHFIGCDLHTRYQVVAWLDEETGEICARRLEHEGKEVERFYQQFARGAVVGVEATIPALWFERLLEGLGHEWWVGDAAAIRAQEVRAQKYDERDARNIEDLLRSGRFPRVWVPSREERDLRQLLVHRMKLVRARTQVKNQLHALAISQGLCWKRRLWSQKGRAELEKLELLPWAGRRRKELLEWLDKLDEQVGELDPAVEEAGRARPEVGLLRTHPGVGRVVALAFVLKVGPIERFAHSRKLVSYWGLNPSEHSSGGRQRLGAISKQGNTMMRWLLIEAAQTAVRFDPQLRRVYQRLKSRRNNGVAKVAIARRLAVRLFWMLRTRHNYAQLVRMSGSPSSAVVPPRAESNL

SEQ ID NO: 179529 - protein, 358 aa, unidentified
MLYLAIDQHRKQLTVNLRNEQGDVILKRQVSTEWPRVRSFLEAVQKQSAPEGGFVTILEVCGFNDWLLKLLAAYGCRETVLIQPEKRTKNKTDRRDANALGELLWTNRQRLLAGKKVQNVRRIVPPSDRDAEDRQLTALRQRLGWLRTRTINKVQHLLLKHNLQQECPTKGLQTQRARKWLAKLPLGAIDRLELNQLLAQWALWDKQLAELEPKIRQRQAENPTAAIVATVPGAGAYSSLALACRIGSIERFPHARSLAHYWGLTPRSRNSGDATQRLGSITKQGSALARFLLAQMVMHVLRRDLVLKDWYRRIKRRRGAKIARVAVMRRLATILWHLVKYQQAYQPGGGKNGKTTAT

SEQ ID NO: 179530 - protein, 319 aa, unidentified
MSHVAIFGIDVDQARLVVARHDMEGTQTIDNQAAAIRAWLKHTPAGSRIGVESTSRYHETVVRLAQAAGHTVYVLNPRDVRHYAKSIGRRGKTDRVDAVVIARYVAKEADQLHPYVPRTDRQQALHVLLQRRAAVQRARTQLRQALTAHGPAPAFQPLMDAARQALRQIDTHIREHMRQGAQAALFQRLVTIPGIGPVIATCLVHHLQRWPLARVDSWIACTGLDPRPNDSGRKIGVRVLSKRGDATLRQMLYLAAMTFARHPLGKALADRYRQRRFCSTAIYTILARLLARIAWHLAKTSSCFDADRFAKDHHIPLQA

SEQ ID NO: 179531 - protein, 372 aa, unidentified
MSQSSTLYVGMDVHKETIAVAYVAKDHDAEVVSLGTFGTRQCDIDNLIRKLQSKAKHLVFVYEAGPCGYWLYRYLTKKDYVCWVVAPSLIPKRAGDRVKTDRRDAMQLARLMRSGDLTPVYVPAVDDEAIRDLSRAREDTLRDLKAAKLRLKAFLLRHDIRYTGRANWSPAHLRWLSEVICPTPAQQIVFQEYVQTVTEQTERLGRLELELHEQVQTWRLHPVVEALQALRGVQCTVAVTTVAALGDLTRFDNPRQLMHYLGLTPSEYSSGARRQQGSMTKTGNTHARRALVEGAWAYRYPAKVSRHLQRRLEKLPTAIQAISWKAQVRLCTRYRHLMATGKHAHQVVVAIARELSAFMWAMAKQVAGSPKA

SEQ ID NO: 179532 - protein, 326 aa, unidentified
MEHELHYIGIDTAKEKLDVDVLRPDGRHRTKKFANTTKGHDELVSWLKGHKIDHAHICIEATGTYMEPVAECLYDAGYIVSVINPALGKAFAQSEGLRNKTDTVDARMLAEFCRQKRPAAWEAPHPLERALRALVVRHQALTDMHTQELNRTETAREVQRPSIDAHLLWLEAELKRLEKQIKDLTDDDPDMKHRRKLLESIPGIGEKTSAVLLAYIGLKDRFAHARQFAAFASLTPRRYESGSSVRGASRMSKAGHVSLRRALYMPAMVATSKTEWGRAFRDRLAANGKKGKVILGAMMRKLAQVAYGVLKSGVPFDASRHNPVAA

SEQ ID NO: 179533 - protein, 408 aa, unidentified
MNTLYVGIDVSSKSNVIYLMLPNGDKHSNFSVANSHEGSTQLVKRIHSALTSHSLDTVLIGLEATSVYGDNLVYFLREDATLAPFNRKIHVLNPKQVKKFHDTYNDLPKNDYVDSFVIADCLRFGRINKEVYMGDYRYKALRNLTRARFFAVQNLVKEKQRFMNVLFKKYSTMTQEKVFSDTFSTTALAVYDEFESAEALANMDLHELTDFIMKKGKNRFPYPDAVAKAIQKAARSSYRLPKTVNDSVNQVLSISITSMKALESQIKEFDKAIKAQMELLPNVLISIPGIGPVYSAGIMAEIGDINRFNSQAALAKYAGLAWKQHQSGGFEAEVTRLIPSGNRFLKYYLCEAAFSLVRCDKEYSDFYHLKYKEVNRCQHKRALALTARKFVRLVFRLLKDNRLYCPAK

SEQ ID NO: 179534 - protein, 326 aa, unidentified
MTLSHLTDNTFVGIDVGGAGLDVAWHRGDSAHYANRPDAIATLVERLRSGPELTRIVLEPTGGYEKPLVKALRQAQLPVEIIHTTRFNAYRQLAGVKAKSDTSDARLLASYAAAPDDIRGRKAGHVELPEDAIREELSELASRRDQLKHMIHAETCRLGTMRMAVLRQEITTHLEMLKAQDKQVLRRMQELVRQRSDLKRDQGLLKTIKGIGVKSALSLLASVPELGRIDNKAAAALIGVAPFVRKSGTMTAPARIYGGRAAVRSILYMAAVTASRHNPVLRPFYERLIAKGKPPKVALIAVLRRLVVFANAVLRSGQPWRGAIAT

SEQ ID NO: 179535 - protein, 361 aa, unidentified
MTTTYYIGADVHSNNTELAVEKSKKIVARYSVPTTIPAISNVLDSLQGKRLLAFEEGPMAGWLYRNLNEKVDELIVCDPRRNNLISSDGDSDDKIDAAKLALLLRGGYLRAVYHSDNDGRAELKHWVNLYHDRVRDAVRNINKIRARCRMFGLSIPRAVLRNPAHRLKWLLQINHPVLARQLKMLWIGYDATAKQARIGKRQLSVLGKEHDIIKLWGRLPGIGIIRATTLFAYLDTPWRFKRKNKLWKYCGVGLQRATSGTDKKGRPRPARLHLPWAVNRTLKNAVLGTAISAINQKDNPFKDYYERMVQNGVITSNARHAVARKMLTAMWGMWKTSSQFDGKLLCLLSDHNRPTASVSSR

SEQ ID NO: 179536 - protein, 418 aa, unidentified
MRLLFIGDDWAEDHHDIEVVGDDGRRLARARLPEGLEGITRLHALVAEHAPSSWTELPDVEAAAQVVVGIETDRGPWVTALRAAGYQIFAINPLSAARYRQRHSTSGAKSDAADAHLLAEIVRLDRDHHRPIAGDSDLADAVKLLARAHQTAIWERTRHVLRLRSTLREFFPAAVDAFEDLAAEDALALLQRAPDPGRAAKLTRVQLAAALKAARRHYVETKADGLLAALRRPILRQSSVLEGAYAAIVVAEVKVIRALNEQISALGTVVGEHFGRHPTAEIYLSQPGLGTVLAARALGEFGDDTGRFSDARGRKNYSGQSPITRASGKKTVVLARFATNRRLGAALHLQAYSALISSPGARAYYDTLRGRNIGHHAALRQLANRLVGILHGCLKNGTKYNEDTAWAHRRAHTENVAA

SEQ ID NO: 179537 - protein, 431 aa, unidentified
MGNKENRRLDEITAGTLIVGIDVAKALQWARFVDDRGREIGKAVNFRNDRQGFETIVAEIRLRCNNKLLRQPITQVIIGMEPTGHYWKTLANYLIHRGLRVVGVNPFHTKKAKELDDNSPTKSDKKDALTIARLVKDGRFFDPYLPQDVYAELRGLSNARVSIIKRGNAVKNNITAILDEYFPELWTVFKKPLKSKAARQILRANPFPSMILALGEIGVLTEMKKAVKRSPGVKRVLRLMEAARQSVGVPYGQQAAKLRLDWLLDELEQNERQLTQVEAVMREMLEATGYADKMLSIKGIGVVTAASFLGEVGDPLRFQNARQIANYAGYNLVEDSSGKNKSGTCISKRGRAQLRSTLYLMAYTMVGKNPEMKQLYRYLLTRKVNPLKKKQALVVVSKKIITVIFNLLKKQQTYLPELVFGAARQEMLLAA

SEQ ID NO: 179538 - protein, 303 aa, unidentified
MYYTGIDLHKKTSFITTVDESGKVVFRRNFANREEDIIDYFVSLDAPTEIVIESTCSWYWLHDLLKAHNFNVVISNPLKTKAIASAKIKNDKVDSHMLAQLLRADLIATVHVCNLKTRKLKELLRHRQRLVRDATRMKNRIHMLLMKNNISFAVRDLFGVKGMKCLQEVELPIYHRQQLKSYLTLYDCLTQQIEPLTKRIYYLAKKDPMAKLLMTIPGIGPLTAMFIIAEIEDISRFPSYRNLSSYAGLVPCLDASADKSRTGRITKQGSPYLRTALVEAAQVIPRMKKTRMKVFYRKRIVRA

SEQ ID NO: 179539 - protein, 434 aa, unidentified
MEQINPHAAGIDLGSREVYVSVPNAPVRRYATFTEDLTQLVAYLMEQKITTVAMEATGIYWIVLYDLLEAAGLEVCLVNGAHVRNVPGRKSDVQDCQWLQQLHRHGLLHASFVPPEEVRVLRSYRRLREDHVERAADCVRHMQKALDLMNIKLHTVVSQLQGASGMRIVDAILAGQRNSFTLTELCDEQILKTKRAAVERSLHGNWKVEHLFALGQARRAWGFYQEQIAACDREIDAQLQKMGEDKPDPPPRNGPVKPIRHNAPQIDGLDEKLRRLTGGIDPTLIPGFTDRTFLQLVAEVGLDMSRWATSGHFTSWLGLAPGLHQSGRTKKRGWGRRKTQAGQIFRIMAQSIGHSKYPALGGFYRRIKGRHCAPVAIVATARKLAVLYYQLMRYGVAYVEQGLAAYEKTYQASQRKRLQQHAAKLGFNLVPVPA

SEQ ID NO: 179540 - protein, 357 aa, unidentified
MDTFISFDSHKRYTLVEMEDFETGKARQFRVNHSHGAIRDCLKGCMPGTPVAVESIGSWYWIVDEIEQAGLTPQLVHPRKAKLMMGLINKTDKLDVHGLNRLQRNKSLPTVWIPPKELRDLRELTRTRMVLTAQRARIKNRILATLNKYGFTLSEYSDAFGRKARIELEKCVDALPVQTAYVTRVLLNQLDGLESGINDMEKRIRELAKATEMMTLLMTLPGIGFILSVVIALEVGDIDRFLSAQHLASYAGTTPRVHQSGDRIRYGKLRSDVNRYLKWAFVEAANSVCLNQRFYPERHITKLYTRIKARKDRPKAIGAVARHLAEATYHVWNKGEPYRDPSLNKVLSTGGVSANPS

SEQ ID NO: 179541 - protein, 360 aa, unidentified
MTTTITAVGLDVHARSTEGAALHLPSGELRRTRFGPGIEPVVAWLRELPQPVHACYEAGPTGFGLYRAVCEAGIRIDVVAPGKTPRRSGERRKSDRKDAELLARLLPTGALTAIAVPSARFEAARDLARAREQLRGDLMRARHRVSKLLLRHGRVYPGKTTWTQEHRRWLAGQRFGDPNSELAFCDYLAAVDGLVARKQALDERLSRLAAEDDLWPTVARLRCFRGIDTLSALVLHLEVHDWERFASPAQLPGWLGLVPSLEQSGESSQQGAITKTGSRYARRILVESAWQYQRPPRIGVTLRNRQQGQPAHVLQIAWRAQHRLHRLGQRLRARGKPENVANVAVARELACFLWAAAVAA

SEQ ID NO: 179542 - protein, 351 aa, unidentified
MDIIGLDLHQRESQLCICDADGTITERRIVTSRERFTAVLGDRPRAKILLEASTESEWVARHLESLGHDVLVADPNYAPMYATRSRRTKTDRRDARTLMDACQTGAYRLAHRLSEPRRHVRAELAVRDALVRTRTRYVALAKTLVRRDGLRVTSSESHLVAQRIGALSLSPALEAELQPLFTVLAPLNEQIAAADRRVATLAATDPLVARLATAPAIGPVTASAVVATIDDISRFRSAHQFEAYLGLVPGERSSGEKRHVGPITKAGNSRVRWLLVEAAWRLLRTKSPEAAALRTWAHGVAGRRGKKIAVVALARRLAGVLYAMWRDGVPYDASRIRGPRIAAAEVTARAG

SEQ ID NO: 179543 - protein, 348 aa, unidentified
MNALHYIGFDVHKKTISFCVKTASGEIVEEGSVPAQRRVLRQWASARPQPWQGALEATLFSGWIYDTLQPYGERLEMAHPAKMKAISAAKKKSDTIDARTIADLVRCNLLPACYVAAPRIRELRRLLRYRSLVVSEAVRMKNKMAGLLMETGALYVKEKLHRKKYFANLLEELEEVPESVIDLLRLSRGALEMFESTQKRLVRELLADPELAQRVERLMSIPAVGEITALTWALEVGDPQRFRSGSDAMSYCGLTAALQSSAGKQQRGPISKQRNRWLQTTLIEAAKLAPRWNPQLAALHARELERGHRNRATLAVARKLVSYLLAVDKSRQPFQVRESSQDLAQKTG

SEQ ID NO: 179544 - protein, 413 aa, unidentified
MEVMYPRCAGLDVHKETVVACVRLAAGSDTSHVVRTFATTTADLIELSEWLEENGCTHVAMEATGVYWKPVWQVLVDSSCFELILANAAQVKNVPGRKTDVNDATWLAELLAHGLVRASFVPEPAIQELRGLLRTRKQLVREKASHVQRVQKTLEEANIKLESVLSDVMGRSGRAIIQALIDGETDPAKLAALAHWKVRASTETLSEALRGRIKRNHRFLLRLHLQQIQALDAGIAEIDREVDDGLACFRDAVDRLSTIPGISQLSAQVIVAEIGTDMSRFATDAHLRSWAGLCPRNDESAGKRRSTRLRKGAPWLKSMLVQCAWAAIRSKGTYLHAQYVRLRGRRGPKKAICAVAASILTAAYHMLKDGTFYNDLGPTHFDRRRPETQARRLIKRLAELGFSVELKSMATAS

SEQ ID NO: 179545 - protein, 325 aa, unidentified
MAYIGIDVSKQKLDCLWVRDLSKGKVKTKVFPNRHQDYPGLLDWLVKQTGEDVENLHVFLEATSIYHEPLAYWLHDVGVTVYVLNPAQVRHHAKGMGVRSKTDRKDSMMLARYGIERNPQPWQPEPSEVRELKRLINRLEAVEDDLQRERNRLEKAEFNTDTKASESISYMLVALEREVQRLQQAIADHFEAHPPLKQDRKLLESIPGIGNVLSARLVATLRSRDFRSARQAAAFLGLVPILKESGSSVKLRSHLSKAGAPSIRRKLYMAAVVSTRCNPDISEQFARLKARGKPTLSALGAAMRKLVHIAFGVLKSQSEYRPQGV

SEQ ID NO: 179546 - protein, 342 aa, unidentified
MQISTIGLDIAKNVFQVHGIDAAEKVVVRKRLRRRQVLEFFKALPRCLIGMEACATAHYWARELTKLGHEVRLMPAKDVKAYVKRNKNDAADAEAICEAVRRPTMRFVRIKSAEQQGQLMQHRTRDVLIRQRTQIINALRAHLAELGLVAAQGNAGVNELRAIVTDEQDTRLPIDARASVIVLAAQLEALESVIGAIEKRIKMQHRSSEASQRVEAIPGIGVIGATAIVATVADPTIFRSGRDFAAWIGLVPRQDSTGGKQKLGPISKQGDRYLRRILVVGAIAVLRRAQENPGKYPWLTQLLARRPFKVVAVALANKMARMAWALLAHGGTYRAPELAETA

SEQ ID NO: 179547 - protein, 445 aa, unidentified
MEEFTAFVGLDVHKDSIVPAVAEGGRGGRVEVLGRIPMEARALRRLVERLARRYRHLEFCYEAGPCGYGVYRLLEGLGHRCLVAAPSKLSRAPGDRVKNDKSDARLLAVSLRAGLVVPVWVPDQRHEAVRGLVRGRRAAVKARKSERQRLTSLLLVHGRCYAGKARWTRPHWAWLADQRFEDPALQLVKQDAIEAIRYNEERVKLLTTSMLATAKNWHLAPAVAALQALYGINAVAAVILMAEIGDPRRFASASAVVAYLGLRPSEESSGDRLRRGSITKAGNAEARRVLIEAAWCYRLPPQVSKAIEGRREGLPAALRAKVWKTHNRLYRRYWHLRKVGNKRSTVAVTAVARELAGVVWAVACWAMDPSRGLEAEEWLDAAGREIVPPGIADELAALDPAPTPDEVAAETVDPEPLDPEVFEPAGFETGTEAEAEIGAPTLTAD

SEQ ID NO: 179548 - protein, 348 aa, unidentified
MRFYNQRHKFYCGIDLHARKMYICIIDAQGKTKLHQNLDTDPALLFDVIFPYLEDVVIGVECMFAWYWIADFCSQHMIPFVLGHALYMKAIHGGKTKNDKIDSYKIAKLLMGGNMPIAYPYPAKMRATRDLLRRRTYMVRQRGLLLAHIQNTNTQYNLPSFEGKKISRKFNHAAVAGRFEDPSVNLAIEADLTMIDAFNRLIKPLEGQIERIACQHDPNNLYLLKTIPGVGQILALTILYEAHDINRFKTVQRFCSYARLIRPEKESDGKWAGKSNKKIGNAHLKWAIRTAAMISLRESEPAKKFVDRLSRKYNKGKALGIYTHKLGRSIFFMLKNKKVFDMKQFFSQ

SEQ ID NO: 179549 - protein, 344 aa, unidentified
MDNHTQYSGFAGVDLAKKVMQIHFVTGDGEITDKQVKRAEFLDFFRNRTKCLIGMEACGASQDWARKLEAMGHEVHLMSPKAVKPFVSGQKNDHNDAIGIYKAMFNGVRRVPVKSTEIRDLQTLRRIRSQVTKDKVKEINHVRGLLAEYGIVMGKSLNAFNKDISSALEILTERGDVSPLVAEELRTTVEAIKAKIERQKKLDQEIEQLARGCKNYENFLKTPGVGPFTAAMLCVLLCDPSIFANGRQFAAYIGLAPRSRGSGGKNYVTGIPSKFNCDSESRAVLVECAQAIARCKNKSLWVEEILRRKPKKVALIAIANKLARQVWAMANKGESFKQMVVLTA

SEQ ID NO: 179550 - protein, 351 aa, unidentified
MIIIGVDYHPSFQQIAFVDQETGECGERQLNHSDGEAEKFYRELKQRGVSVRVGMEATGHSRWFERLLAELGFEVWIGDAAEIKTMRVRKQKTDREDARLMRKLLLENRFPRIWVPSPENRDLRQLLWHRHRLVQMRTRIMNQLQAVAMNEGYRWKKKLFSAPGRALLEKLSLAPWASRRRKELLELLDQLDPKIAELTAAVEQEAKKRPEVLLLMTHPGVGPITGLVYVLVIGTPERFPCGKQIGSYTGLIPCEDSSAGRQRLGHISKQGNTLLRFLLVEAAQAAARCNPDWRRRYVHLMMRREKRIAKVAMARKLAVRLYWMWRNHWQYSQLVEFGSNAGKLGTVHGMK

SEQ ID NO: 179551 - protein, 347 aa, unidentified
MNYIGVDCHISTLDFAVVDGKGIIKKKACVNTGVKEFMEFVRSIPKPRKIFIEEGELASWLLETSLRFGEQLIITDPRENKWISKAKQKNDSVDATKIAQLARGGYIKEIYHPLNDRRRFKELVFAYHDTVKSQTRIKNKIKACFRREGIKCSGATVYSEKYRTEWKKTLPNNKIVHLIIDELWIQLDQLHSAKEKLKRNIRTHARKYPEIKRFMIVPGIGLIHAATISAILETPHRFANKKKVWMYAGIGLAERGSGDKIYSRQLTREFNRPLKNAIKKATEAAIHSNNNSFMRQYLRLTLKQGVPSHKAKLTVARSLLSTLYIIWKKGEEYDPDIDTKRDKGNKK

SEQ ID NO: 179552 - protein, 469 aa, unidentified
MRTDTKLWRSRKAKKELARRLQSENPGLEVVHPRAAGIDVGNSAHYVAVRPDLDPQPVRRFECFTADLHRLADWLEICGVQTVALQSTGVYWIPLYDILEERGFEVYLVNARHTKNLPGRKSDVQESQWLLKLHTYGLLNNSFQPASEIRVLRTYWRQRLQHVTGAATCVQRMQKALTQMNIQLANVISDLSGVSGQMIMRAIVAGERDPRKLAELSHPRIQASRGEIAKSLEGNWRQELIFLLQQEIEMYDTYQRRVAECDQQLQKHLSRFADTAPSKTKEELPPKKKGKQNKNNPHFRLAEELERITGVDLTRIDGVDVMVAQTLVSEVGLDMSRWKTEGHFASWLGLCPDNRISGDKVLARGTRHVLNRAATALRLGASTLLRSQTYLGAQYRRLRSKLGAPKAITAMAHRLARLVYRMLKYGQHYVDKGAEYYERRHRQQQLEFVKRKAAQLGQRVTPIQAEPIK

SEQ ID NO: 179553 - protein, 374 aa, unidentified
MREPITFVGMDVHKKDIAVAMLVEGRTEPLEWRVANEPTTVKRLAKKLQREGGGPAHCVYEAGPCGYTLQRQLRGLGLECDVVAPSLIPIRPGERIKTDRRDARKLAELARAGMLTVVHPPTEDEEAVRDLCRGRDDARLDLMRARHRLGKFLLRRGLVFGQGNQKAWSQAHRWWLGCQTFTRIAERVMFEDYMLAVEQTETRRRSLEQHLEDLSHEAPYAEAVGGLRCFRGIDTITAITLLAELHDFRRFRSPSQLMAYLGLVPSENSSGPRQRRGGITRTGNRHVRRLLIEAAWHYRHKPHIGTALAQRRHGQPAKIVALADKAQLRLCRRYRRMERRGKHPTKIVVAVARELVGYLWAALTPTAQTVATTN

SEQ ID NO: 179554 - protein, 343 aa, unidentified
MKEVSTIGLDLAKSVFQVHGADDEGKEIVRRQLRRRQVLSFFRKLPPCLVGMEACATSHYWAREISGFGHEVRMMPAGYVKPYVKRSKSDAADAEAICEVVTRPTMRFVPVKTPDQQSILMLHRTRHLFVRQRTMLINALRAHLAEFGIVAGVGRLGLEKLLEVIADDQDGRVPPEARDCLLALRDQLEMVKHQILEADRRVLARHRASELSRRLGEIPGVGPLIATALVAWIPDPHAFESGRDLSAWIGLVPRQHSTGGKERLGHISKAGNRYLRTLLVVGALSVIRRAKETGSTRRAWLVALMERRSAKVAAIALANKNARTAWAMMAHGTCYQESRPQAT

SEQ ID NO: 179555 - protein, 340 aa, unidentified
MSIVCGFDVHREQITFDLVDQVSGEVRSGRITPVTRAALSAWLAALESARLRVALEATTGWRFVVEELEQAGAQAVLAEPAETRALRGPKRRAKTDRADARHLRELLERETVPRSWVPPAHLQELRTLVRLRHSLAAERRVWLQRVQAQLFHQGAPPARGRLLGPGGAAASAELSPAGRELVACAERVCTALESEIAQLDGRLAVWARRHPACRALQTLYGVGPTIAVTLYAEIGDARRLRSSRKLVRLAGLDVTVSESADKRSPGRLSRQGAPILRWAAYEAALSACRRGSPDQGDYRLLRERIGHGRATLTIARKLLRRAHHVLVAVGDDLLVPLPHP

SEQ ID NO: 179556 - protein, 408 aa, unidentified
MESQIIFGIDVSSKSSTVCVVNDRIKQGESFRISNDSFGYQKLYEQLNQYLITPLVVFEATGVYSLSLQAFLEDYHIKYLKLNPLKAKKLMDNNLRHNKTDKVDAYRLALIQFNAPQKLRDPQPREYHELQNASRYYEELTRSIVTTKNQLHRNLQSTFPQIEEILSHPSGRIYWALVSLFPHAGYVLEKNETQVTQMLNSISGIGQQRARYLTTRLYAFAREAYPYDSKDSIIVRAIQRNISNLFSLQQERDYVINYMEKLAKAVNARALSIYLSIPGVARITAVRLVAELGDLRQFSTSAQIDAFVGIDPGRYQSGEKDSSLGITKHGNHIARKILYRVITQMETVKATQPCHITDYYDKKKRSSNSQGYKKIAIASVHKLIRTMFALIKHDQLYDYNIATENKRL

SEQ ID NO: 179557 - protein, 409 aa, unidentified
MRLFVGLDVSSFDMKVCFLNGDGEKLDSFSVSNDLPGATTLKEKLLQCVAGKEVDILKIGLESTSVYSFHPSMFLHHDIDLQRFGAKVFLLNPKQVANFKKSYSDMNKTDEIDAFVIADYLRFGRNQMSIVKESQYVALQQLTRSRYQLVKMLTKEKQHFLQHLSFKCNTFSQEVDTSVFGSAMTELFLEKFSLEELANMPLEELAEFLQKKSRNRFGDPKCVAASIHKAVKVSYRLDKVVEDSIDVILGTSIAVIRTFQQQIKELEKSIKKIMAGLTQTLESIPGVGPVFAAGIIAEIGQIERFDDETKIAKYAGLYWRKHQSGRFTAEDTSLSRTGNHYLRYYLVEAANSVRKHVSDYQEYYVKKYNEVPKHQHKRALVLTARKFVRLVDALLRSHQLFTPGRCVKE

SEQ ID NO: 179558 - protein, 339 aa, unidentified
MHYVGIDLANRTSAVCVVDERGNVVRQDGIKTDRSDLEALMNRLDYGRVLVEASPLAEWVAETVETCGHEAEIVEPRAAKKLAEVQKKTDPRDARTLAQLARSGFYTAVHRKSERARLQRSQIQARQGLVDTERAMTNRIRGLLRAHGIVLGQVSKGQFVEKARTKARDYVPELLPFLEPLFAILEGARESAKQLKKGIENQQKQDSVAMRLQTVPGVGPLVTQTFQATLDDPDRFSNGDEVADYLGLSPGIYQSGEMEARGAITKAGDNLVRWHLVEAAHVLLYLGPDCALKRWGQRLAENKGSGKARVAMARKLAVLLWRLWRKGDTFQPFPQTQAA

SEQ ID NO: 179559 - protein, 414 aa, unidentified
MFFAGIDVAKDFNVVSIIDEKEVCIRKPFRVNNTMDAYQKFIEKLHLLSSVHSDFLLGLEATGIYGENLLAFLTNQGFSVKLLNPFQTKRYREGLTMKKVKNDNIDSLMIAHFLKDGKFSSGYVTDDEYQSLRTLYRNRASLQSGIKEIKKRMLTQLSVVFLEFENIVNPFSISGLALLEKYPTASHYQHSSVDRILKLFHHIQGNNFNKEKARQLLDAAKSSTYSGKAFEARGIAIRSSIRLLKSYQNELLFLEDEICTLLESSDTHSSNKTDTLSTHTNTLVDNLKTIPGVSDKTVAAVLSECGDISRFPTLSKFIGYLGLFPTEDSSGKSKRIGHLSKRGSSLAKHALYMSSVSCLIHNDQFKQLYDTKRSQGKSKKEALIAVSRKLASVIYAIVRYNTPYDPTRVFTVKS

SEQ ID NO: 179560 - protein, 387 aa, unidentified
MFKTEHPATAIHTNLAAIFVSLELSRSTWLVTSLSPGNGEKMSKYSVPAGNIVGLFDLFSKLQERSRAKTGHEWPIITIQEAGLDGFWIHRTLVQEGVESHVVDAASIATPRRYRRVKTDRVDGEVLLRVLMAYKRGEPRVCSMVRAPSPEDEDRRRIARERKALTVERVGHVNRIKGLLFSQGITDYEPLHKDRRQRLEDLQTGDGHPLPVHMKAQISRELDRLELVLEQIKVVEEERDALIAAQAAEVGKPSPVTMLLEIKGIGAEFANILWSECFFRHFDNRRQVAAYAGLAPTPWRSGSIDREQGVSKAGNPRLRVTLIQLSWLWVLHQPNSTLTQWYKARVDHNGGRMKKSSIVALARKLLVALWKYATSGVVIEGAVMKRA

SEQ ID NO: 179561 - protein, 342 aa, unidentified
MLYVGIDVAKNKHDVTALNVPGKTVLKPLTFSNNKAGFELLDLSLRQLNQDCLIALENTGHYAFNLLNFLHEQGYKVYTYTPLLIKEFAKSLSLRKTKTDKKDAHGIALKLLSDPNREQFQHDNRQVELKILARHIHRLKKKQSDWKVQYTRCLDIIFPELDKIVGKHSEYTYQLLTCYPNPQKRLEAGFDKLIEIKRLTASKIQDILSVAPRSIGTTSPAREFEIIENIKHYKRLIDKAETCVNDLMAEFNSVITTVTGIGNRLGAVILAEIQNIHAFDNPAQLQAFAGLDSSIYQSGQIDLAGRMVKRGSPHLRWALIQAAKACARFSPAFKAYLKTKLE

SEQ ID NO: 179562 - protein, 408 aa, unidentified
MELMHNRCAGLDVHQRTVVACARVVEDDKVTEEVRTFETTTTGLLELSAWLESKGCTHVAMEATGVYWKPVWHILEGHFELLLANAAHIKNVPGRKTDVKDAVWIADLLAHGLIRGSFVPPTPIQDMRALMRTRKQLVRELARNTQRIQKTLEDANIKLTTVVTDILGKSGRAVLDALVAGETDPHKLAELTRGRLKAPREKLVEALRGHVRDDHRFLIKLHLEQVDSLQKAVRELEARVGEKLDPFRNNVAILTTMPGISDTAAAVLVSEIGYDMGRFPTAAHLVSWAGLCPRSDESAGKRRSSRIRYGAPWLKTTLVQCAWAAIRTKDSYLRAQFHRLKSRVGPMKAIIAVAASMLTAAFHMLSTGSEYKDLGGAHFDRRDHAKLAKRLVRRLEGLGLKVTVEQAA

SEQ ID NO: 179563 - protein, 375 aa, unidentified
MKEKLRFLGLDVHAETIAVAIAEPDGEVRSLGTIPNRLESIRKLIKKLGPTEKLRACYEAGPTGYVLYWQLAELGVKCDVVAPTLVPVKAGDRVKTDRRDAEKLARSHRSGDLTAVWVPDEGSEALRDLVRTREAAKQDQLRARHRLSKFLLRSGQRPPTGIRPWTRPYLIWVAQLRFTQMAQEATRLDYLHEVEHMRERVERLERAITEAVKLASPALKQVINDLQALRGIADISAVTIAAELGQVSRFDSARQLMGYCGAVPSEDSSGKRTRRGSITKTGNAHLRRIVVEAAWSYHRPPCIWYGLRKRQESISEEVKEIAWKAQHRLHKRYMRLAAAGKDKRKITTAVARELLGFIWAIGTRAETTVRQRIAA

SEQ ID NO: 179564 - protein, 302 aa, unidentified
MNSPPETIPIQRYIGIDIHKYYVMIGGQNRHQEWALRPRQVQMSRFRDWAEKNLKPEDEVVVEATSNVWDIYDIVAPLVKKTVVANAYKVRQIAEARVKTDKEDIRRLITLLIADIVPEVWVPPMHVRELRSLISFRWRLTKQITMSKNRLHSVVQRFNLDPPEGGLLTDKNHSWWERQEFSELTGFQVERDLEIVENLEFQKAAIDQKLAELSNTEPWASEMVYLMQIPGFGLIFSMVILSAIGDIKRFPHPKKLVGYAGLGAGVHASGEKYQEKSITKAGRKELRWALVEAACAEGGCPQ

SEQ ID NO: 179565 - protein, 409 aa, unidentified
MELLISRCAGMDVHQATVVVTVRIPDEAGGRRSITETFGTMTPDLLALRDWLHAYGVTHVALESTGVYWKPVYYVLEAGYTLLLINMHDLKRVPGRKTDVKDSEWLAQLLECGLLKASFVPPPPIRELRDLTRYRVQQVRDQAQETNRLCKVLEDAGVKLTSVVSDVMGVSGRAMLAAMMEGTTDPAVLAELARGRLRTKLPALRRALEGRFRSHHAFLLQQILTKIDFLGETIERLTQEIDARVAPFEPMLAALDTIPGVDRIAAISIVAETGGAMHRFPTAGHLCSWGAMCPGQNESAGKRRSGKTRKGNRYLRRTLIQSALAATRKRDSALQAKYHRVKRQRGHKKAVVAVGHQILEIAYFVMRDGVTYHELGADYFDRRHADRAARRHVKHLEALGFRVTIEKAA

SEQ ID NO: 179566 - protein, 402 aa, unidentified
MNAVGIDVSKGKSMVAIMRPFGEIVSAPFEIKHTAGDIHSLVELINSVEGESRIVMEHTGRYYEVLAHQLSKANLFVSAINPKLIKDFDNDSLRKVKSDKADAVKIARYALDKWQNLKQYNVMDELRNQLKTMNRQFGFYMKHKTAMKNNLIGILDQTYPGVNTYFDSPARSDGSQKWVDFASTYWHVDCVRKMSLNAFIDHYQNWCKRKKYNFSQSKAEEIYGKAKELVPVLPKDAITKLIIKQAVYQLNSASTTVESLRTLMNETASKLPEYPVVMAMKGVGTSLGPQLMAEIGDVSRFTHKSAITAFAGVDPGVNESGSYEQKSVPTSKRGSSDLRKTLFQVMDVLFKTHPQDDPVYQFLDKKRAQGKPYYVYMTAGANKFLRIYYGRVKEYLSSLPES

SEQ ID NO: 179567 - protein, 438 aa, unidentified
MSNKVIFNLDELFISVGIDVGADFSWMSIALPNQQFVGKPYKILHNSIDSLTTAVSKIKEAEELYSLESRIFLESTGIYHYPLFCYLRDKGFNCSVINPIITKNSTNINIRKVHNDRFDSKKAALVGLKPDLKVSLMPSDLALNCRNLCREYYDLMDNRSAYVNKLQGELRMAFPQYLGIFSKVTINTSLTLLETYTSPSAFLKADKQEIIDIIKSTARFGLTYAQNKYNAIIQAATDANQFGYIIDSSIKRIRLYISFIRKYDEEINSILESLHELVDANEDSDFVKQIHLIETFKGAGFLSAVSIMGEIGDFSAFSKPKQLFAYFGLDPAVKQSGKFEGTKVQMSKRGSAIARRVIHTLTLQSISISRNREAKNPVLREYYLKKCDSKPKLVAMGAVSHKVCNMIFAILRDNKPFKIIAPQEHIKQYNSAKCDIAA

SEQ ID NO: 179568 - protein, 403 aa, unidentified
MINKNFKVFVGVDVSKDSFSACALHSPQNILFEAKFSMSLSGFKDFIKRLSTFPTNSILIAKEASGCYYINLFAYLAQKGFSCLVLNPLLVNKFFTASLRKTKTDKIDAKAIAIMLYHIHEQLPDKSSLPKDFRDIAREREKIAQQIATVKNDIEKLLTVLFPELEKIVNIYNSSILKLLSKFPSAHAIKNASTEEINEALCPKTPGKPVNVSAQKIKSIAKESIASYWPVKELILVQKIKKLFFLEEQLEFFTDLLRQFCEEASLCQDLEILKSIKGVGNITATYFLAEVGDITRFSSTKKLIAYCGLDPTVYESGRFKGKSKISKRGNRHLRRIVWLMSIGVVMHNEYFREYYNKRRAEGLVFKKAILAVAHKLIRTIWSMLTKKQLFSVNHALSSCSLRR

SEQ ID NO: 179569 - protein, 419 aa, unidentified
MKPWIEITHYAGFDWARDHHDVVIVDRQGQIVADFRIEHSLAGWQAFHDQVKSYPGLAVAIETNQGTAVDQLLSLEATIFPVNPLSAKSYRERKAPSGHKTDRLDAWSLAEALRQDGQQWKALQPMDPLTQQLQLLCRDEIGLIEQRTALINQLQQALVEYYPAALEAFEDWTQPFCWDFIIQFPTPEKLVAAGQRRWEKFLHTQKLWRPETASKRLAIFQHARQFCGSAAVTSAKSLLALSLAKLLNALQLQLDQYRQQIEALFKQHPDHDLFGSLPGAAQTLGPRLLGEIGGDRQRFEDTEALQCVAGTAPVSFQSGQIHRVHIRYQCNKILRHTVHLWAQCSLRVCPWAEVYYRQKRAEGKSHACALRCLGQRLLKILWRMIQTRRPYDADLHARNQKKHGSWVLALMKPEPKAGG

SEQ ID NO: 179570 - protein, 417 aa, unidentified
MKKRTYRSKEVKKIDWNMLKESLSGEEISVAIDIAKQKQFALLTNKDASISELFRWQHPEETPKMLEAIKGLACPVTVIVESTSTYSDALRYQFRACGFDVHQASAKRVHDAKEVYDGVPSLHDAKAATIISRFYRDGLTKPWRELSNNERNLNALRREYEIHQSQYQRNQNRLEAYLSRHWPEVTYLLDTDSVTLEALLMKYGSPEKVAAHEHEARQVIKQACRNMLSPEKINAVIQSAQTSLGMPCIEAEYKYLQALATEMKHSRLQRRATKIALETEIDSDEQLTEMAQLIGKVTTAVLLSFHLDPRNFKCARSFQKAMGLNLKEKSSGRYVGQLKLTKRGCSKARMYLYFAVLRLLQKDPVVKEWYLNKINPKAKNKTVIAVMRKLSKALWHIAQGQPFDANKLFSVPTRKAA

SEQ ID NO: 179571 - protein, 342 aa, unidentified
MKIAVLGIDLGKTSCSVVGLDGTGHVVMRRRMHRDSVIKFASGMAPCVVAMEACCGAHHLGRIVRDHGHQVRLMSPEYVRPYVKAQKNDDRDAEAIAEAATRPTMRFVELKSAEQLDMQSLHRVRDRLVGERTALINQLRAVLMERGITVPQGRRKLEQHLAVLLDGEELRLSPRVRSLVEDMRAEWGALDRRIAAFDDEFAARAKTDDAARRLATIPGIGVLNATALAAAVGNAASFARGRDLAAWLGLVPRQMTTGGKPRLMGISKRGNKYLRKLLVHGARGALPSLSASTTPLGKWLKDLLQRAHKNTVIVALANKLARIVWAVLRHGGTYDAAALTAA

SEQ ID NO: 179572 - protein, 381 aa, unidentified
MTTAATHDEQSNATEATLFVAFELSEKTWKLGFTTGHGQKPRERTVTARQQERVLDEIAQAKRRLGLPDSAPVVSCYEAGREGFWLHRFLQAHGITSHVVDSSAIEVNRRQRRAKSDGLDVRKLLSMLMRYHSGEHQVWQVVKVPTVEAEDQRHLHRDLETLKQERASTTTRIQGLLSSQGLRVTSLTKLPEQLEALRLWDGSPLPPGLRRRVLRVYAHHTFLSEQIAAVEVERRTQLQASTDTSIDKVRQLMQLKGIGINGAWLLVMEFFGWRAFKNRREVGGLAGFTPTPYQSGERAREQGISKSGNRHVRWMTTELAWSWLRFQPDSALSVWFRARFGGGGKRLRRIGIVAVARKLLIALWRFLETGVIPAGAVLKEA

SEQ ID NO: 179573 - protein, 342 aa, unidentified
MTTIKYCVGVDIASGTFTAAVGEMPWKVFLKAQTFENTEDGYQTLLEWFAQHNLSVSETVVCMEATGVYSEGLAYFLHAKGYRVAVQSPLEVKRTFKPYGPKSDAVDSLQIAEYACRHTDKLSFWKPRSEILEQVKALLAVREQFVAQNTAHKNALKAIQRKVVRTPFAEQAYLQLIEQVKKQITAIDLEVRRLIESNPTFKEMLLLLLSVPGVGLLLAAHFILLAQVSLEYKVLASFLGICPNEHSSGTSVFKHATSRHFGPPAIRKLLYLAACSICTHRPQFGLYLARKTKQGKPARLVLNNVENKLVRIMCAVLQSKTAFIENYHSVQPLVFQKALTAS

SEQ ID NO: 179574 - protein, 367 aa, unidentified
MCVGLDTHKAKMAVAVAEPGRSGEVRFQGEITNQPDAVRRLIERLGAKHGRLRVCYEAGPCGYGLQRQITALGHDCMVVAPSLVPRKPGDRVKTNRRDAVTLARLHRAGELTAVWVPDPTHEAMRDLVRARTGAMEAVRRARQQLQGFLLRHGRVFTGRKTWSPAHRRWLAGLRFAHPAQQIVLQEQIDMIEEAERRRDRLDQQIRELVPDWSLAPVVTALQAMRGIAFLSAVALVAEVGDFRRFANPRQLMAWLGLVPSEPSSGAKVERGGITKAGNGRARRVLVEGAWSYRFPARVTSPIQARLDGVSDTVRAIAWKAQVRLCARFRRLVAAGKNVNVVTTAIAREMAAFAWAIACQVQPKEAAA

SEQ ID NO: 179575 - protein, 427 aa, unidentified
MAYRIAGIDVHKKMLAVVVSDVEVDGEYPFERRMFGGNPEQLRSLTAWLLEQEVEEVVMESTAQYWKPVWEALERYWKPIREGAGRRAGTLHLAQAQSNRGRRGRKRDFPDAERLVKRLVARELTLSFVPDAEQRLWRTVTRRKYQLTRDHVRLQNQLESLLEEAHIKLSSLVSNLVGASARRMLKALAEGETNPAVLAALADHNLRATPAQLRDALGACTDLKPVYRRLLKMALEQLHFLEQQIGQLGQEMANLLSHHQDAVQRLAEVPGLGVDSAQQIIAEVGPTAATFPSKKQLSSWVGVCSGDDESASVNYSHRSPSGNRQMRRLLNQSANAAVRTKGSIFEIVYRRSVLRLGHNQAIGAIAHRLCRLIWLILHQGIRYEERGPAVTKRAKQKRTARMIRQLRGLGYRIELPESQHSSSAQAH

SEQ ID NO: 179576 - protein, 343 aa, unidentified
MGDVITIGLDIAKSVFQIHGVDADGAVVIRKRVSRAKVLEFFAAVPRCLVGIEACPSAHYWSRKLEVLGHTVRLMPPSYVKAYLKRSKNDANDAAAICEAVTRPSMRFVSTKSEQQQSGLMLHHSRRLLVRQRTMLSNAIRGHMAELGIISAKGRNGTGELLEVIANAKDNCIPAAARFSLEVLARQYIAIATEIGVLEKRIHAWHRSCEESRRLEEIPGVGPIVATALIAEVGDWKAFASGRSLAAWIGLVPKQHSTGGKERLGGISKQGNRYLRWLLVAGAMAVIRYARRHGTKRLWLTRMMERRPIKVAAVALANKIARMAWAIIVRGERFKEPRLLLAA

SEQ ID NO: 179577 - protein, 378 aa, unidentified
MNRIIKIGMDVHTTNYTLCIFEPSFEHDGTVHCITQVKPEVKNIIRVIETFKKKHENEELNIVCGYEAGCLGYSLYHELKEKGIECVILAPTTMKTEKGGRKLKNDYRDAKMIAECLAYGGYSAVHVPTELDNSVKEFIRMRDDIKENLKSIKQQIIAFLTRNGKQFEGKSFWTRKHIDWINTISFSEPLLQDTLKEYMIEYNHLCDRVETLDKQIEEISLKEEYVEKVQQLQCLIGIKTHTALSLIVETSDFNRFKKGNMYSAYLGLIPGDDSSAGHENKLGITKAGNNHLRRLLVEAAQGYTRGKVGFKSKDLKSRQEKCSSEVVAYADRANERLRRKYYRMTLRGKRYNVAKTAIARELACFVWGIMTDHIDLCN

SEQ ID NO: 179578 - protein, 340 aa, unidentified
MNIVFLGIDLAKNVFQLCGLNQAGKPVYTKRTGRKELLQTLANIPACLIGIEASTGAFYWQREFEKLGHKVKVISPQYVRPFVRGQKNDGNDAQAIAVALMQPTMQFVPPKSPEQQDIQALHRARQRIVNHRTATVCQIRGLLLDRGIPIGSAVSRARRAIPLILEDAENGLSSRMRRTIAELYDLFNDLGRRIHFFDKEIETVFRQSEACPRIAKVKGIGPETATAVVAAIGKGTEFKNGRHFAAWLGLVPRQHSSGDRQVLMNMTKKGDKHLRTLFIHGARAVVRVATNNNDGHMNQWVNQLKERRGFNKTTVAVANKNARIIWSMLRNDTGYQVVCN

SEQ ID NO: 179579 - protein, 427 aa, unidentified
MKQEGQEQQEFGAYIGLDWADRTHVISLRGTDSGKVEHYELVHKPEVLAEWVSDLQRRFPGQRVAVALEQARGAVVHALMGYDFLVLYPVNPKTLAKYREAFSPSGAKDDPTDADLLLEVVTLHRDKLRAWLPDDELTRTITLLVEYRRDLVATQTRLSNRLTSLLKLYYPQALAWAGELTTVQACDFLQRWPTLAQVQQAAPAKLRQFYLAHGCRKADVIEQRLQEIKLAQPLTRDGAVISASVLMVQATTTQLRPLMEAIARMEKQIAELFRQHVDHDLFSSFPGAGPVLAPRLLAALGTDRGRFAAATEVQQLSGVAPVMERSGKSCWVHRRWACPKFVRQSFHEFAGQSIRWSTWARAFYDQQRQRGNGHHAAVRSLAYRWIRIIYRCWQMRVPYCEETYCRALQRRQSPLARVLSAPMQSAS

SEQ ID NO: 179580 - protein, 337 aa, unidentified
MEQEQQYVGIDLHRRRSVIVRRNDAGETLETVRIDNDPVALATELAKAGEHPEVILEATYGWYWAADVIDACGGNVHLAHPLGNNWGNRRVKNDERDATDLVDLLRMGRLAEGWVAPPPLRELRELIRYRGKLVHMRSNAKAQVHAVLAKEGVTVPMTDLFGVGGQRLLDEVELGKAYRIRVESLRDLIEIYDREIAMLEKETAPYFAGDLGFHAVQAIPGVGPVLAAVFVAEIGDIGRFTSARHLCSWAGLTPTHHESDEKVRRGHITKQGSRLVRWAAVEAVARQRGATPIHAHAQRVGERRGKQIGRVAAARKLLILVYYGLRDGEIRCLAKAG

SEQ ID NO: 179581 - protein, 339 aa, unidentified
MELYAGLDLHSRNTYIGIMDKTFNRVFKKRVPNHLELIIQTLDPFRDQMKGFVVESTYNWYWLVDGLMDAGYSYAHLANPSAIKQYEGLKHSDDQHDAFFLAQLLILGILPQGYIYPKKDRPVRDLARKRMFLVQHKTAHILSLQSLLQRCCAMKVRANDMRHLTVEELEMWLEEEHLVLSAQANLDSINFLKQKIKQLEKAIIQKVKLNKAFKYLLTVPGIGNILAMTIMLEVGNINRFPKVGNFTSYCRCVPSRRLSDGKSKGYGNRKNGNRYLSWAFTEAAQLGRRYNERFRRYYNRKVAQANTSLATKALGNKLARICYYIMRDQVPFREELFCH

SEQ ID NO: 179582 - protein, 449 aa, unidentified
MTKKGKSMGLPIVNARAAGIDIGSRIQVAAVPPELCDEPVQTFQSFTSDIERMADWLVSVGVTTVAMESTGVYWVPVYEVLEDRGLDVVLANARDCKAVPGRKSDVNDAQWLQRLHACGLLRASFRPTRDIAALRAYMRLRERHLEYAAAHMQHMQKALTHMNLQLHHVISDISGVTGLRIIRAIVQGERDPDVLASMRDVRCRESVETIRKSLVGNYQPEHVFALAQALKLFDSYQERIADCDAQIEQTLQLLCADKAEPEESLAKPRVRTKQPNALGFDVRPLLYQLTGTDLTQIHGVGPSVALSLISECGTDLSRWPTEKHFTSWLTLSPGCKISGGKVLSSHTRKSSNRIAARLRLVATSVGRTETALGAFYRRLAVRIGKAKALTATARKIAILFYRAMRYGLRYEDPGADQYEQRYRDRVIKQLQRRASQFGYSLQPSEVSVS

SEQ ID NO: 179583 - protein, 355 aa, unidentified
MNSEKYIGLDVHQATISVAVLDSTGKLVMESILETKAATILEFFAGLRGTLSVTFEEGTWAAWLHDLLKPHVAKLVVCNPRKNALLKDGNKSDRIDAHKLAELLYLNKLSSVYHGETGVRMLRELARSYLTIVKDLTRVMCRLKAVYRSWAIPCAGRDVYYTRHRTEWLGKIKEAGVRRRAERLYQQLDMLQYLRQQARRELLAESRKHAITVKLRQIPSLGPIRSALAVALIQTPHRFRTKRQLWAYSGLALETRTSAEYCYVKGGLRRSKKQISIRGLNKDHNHDLKGLFKGAATRASVLPGPFQDFYQRSLAKGIKPTMARLTLARKIAAITLTLWKKGENFDADKLKSQAA

SEQ ID NO: 179584 - protein, 343 aa, unidentified
MKLFIGLDVSLAKTAVCVINEHGKIVKEAQVLSDPQAIVDFANTLEGSVAIIGLEAGPLSQWLHRGLADARLEVVLMETRQVKGALKAMPIKTDRRDAEGIARLLHLGWFRPVHCKSVSAQEVRALLSARKAIQQGMIALELSLRGLLRNFGLKVGAISRGQFDARIKQLVEGNSMLQAASGPMLRARTSLRHELAGLERQVRLLAKDDAVCRLLMTMPGIGAVVALTFRSAVDDPARFSSSKKVGPWVGLTPSRNQSGERDVIGGITRAGDANLRRALCQAATVMIHRGRSTWLRSWAAQVAKRRGAKRAMVALARRIGTILHRMWTDGTEFSSDQLLAKSA

SEQ ID NO: 179585 - protein, 362 aa, unidentified
MLHSGIDLHRRSIVICTVNDQGTIVCRAKIKADTDAVVAYCRQWTEPHRAVVECTSNWYWLCDLLRSEGITTVLAHAKYLKAISYAKVKTDAIDAHTLAQLLRMGYIPEAHQLSQEYRPLRDLLRQRMVMEHKRTILMQHAGSILAKFNLIDLPVKATQTAFADFVASCGLPEEYRITVLMYHYQCLQVTAHERSLEHYFKTKLRPTTTLQLLVSIPGIGDITGAIIAMETGDIHRFADAKHYCSYCRLAPGARNSAGKHHLRSGSKDGNQYLKYAFTEAAIKAMMYYPEIRYFADRLQRRTNSTIARTVVAKELAKIVYYVLSRQQPCTSFKGILVRKRYDWPRSCKPVRLTGEHQLLPTA

SEQ ID NO: 179586 - protein, 387 aa, unidentified
MTVRTVTNLPAVTHGETVRCLFAIELSTMSWVVAFNTPLSEKISRHALTGCKWKRLLELIEEVRARVSRETGRAVEVVSCYEAGYDGFWLHRKLEAHGIRNYVIDPASLQVDRRARRVKTDRSDTDRLLRSLMAYLRGEPKVWSVVRVPSVAEEDARRLHRERDRLVSERVQHVNRIKGLCALQGIYDYNPLRPQAMARLEQLRTAQGGAFPPRLKSEIMRGLQRLEMVVEMIATLEAERNAIVENEASTHLNAKKIQTLHKLKAIGPEFAAVLVGEIFHRDFNNRRQVASYVGLAPSPFQSGNVAHDQGISKAGNRKGRTTGIELAWMWLRYQPESDLSVWYRARVGATKGRIRRIAIVALARKLLVALWRYLETGLVPRGAVLKG

SEQ ID NO: 179587 - protein, 371 aa, unidentified
MESIIYVGMDVHKDNYSICCYNAREDRFYYEKSILAESKRVIKYLESIKKEFGEDTILLCGYEAGPTGFGLYRDLQNAGYSCVVMAPTSLKHPASHKVKNDKVDARFLAKTLFTKDYSSVHVTTEHEESIKEFCRMRLNLKTSLKKARQVLAAFLLRQDKKYTEGETWTLRHRAWLKQLHFDEEYLNEVFNEYMISINSYETRLQAIERRLDEISQDKSIKESVDKLVCFCGIDTVSAVTIVSKVGDFKRFSKAYHFSNYLGLTCGENSSGQKEQHLGITKCGDKELRRIITESAKSIKRSNLKGEKSRRLLDRQKNKDPLVIAYADKCRLRLSGKIIHLEMRGKPANVATTAAARELACFIWGMMTNNIA

SEQ ID NO: 179588 - protein, 316 aa, unidentified
MTSENLYVGIDVSKRTLEVAVRPTDEQWTVCNNDADIASLVVRLRELQPVLVVLEATGGYEVPATLALLVAGLPLAVINPRHARDFAKATGTLAKTDKIDARVLAHFAQAVRPTPRPVPDEEQRNLADLLARRRQVIEMLTAEKNRLKLAPKSLREYISAHVDWLQRHLNELDEELGKRIRQSPVWREQDEILQSTPGVGRVLSFTLLAELPELGTLNRKQIAALVGVAPLNRDSGKIRGKRSVWGGRAQVRSALYMATLSATRYNPVIRDFYQRLCKAGKLRKVALTACMHKLLIILNAMLKNRTAWRHNYANSI

SEQ ID NO: 179589 - protein, 370 aa, unidentified
MLDTTTFVGLDVHARSIKAVSLDVMTGEVRAATFGYDAGAVAEWVRSVDPGARCVYESGVTGFDLQKRLTGLGVDCVVGAVSKMIKPSADRRRKNDRNDAEFLARMLSVGNVVEVWVPDDECEAARDLTRALEDARDDLSRSKQRLSKFLLRHGLVFDERTPTGRRKGNWTRAHWSWIESIGFAEGADNDVLAYYVDAVRRAAEEKARLEGLVEAEARKPRWRRRVDSLRCLKGVDTASAADLVFEAGEFSRFRNARSFAAWVGLTPSEHSSGESDRRGAITKAGNKHLRKTLVEAAWHYLTCSGRPKDLAKGQAPDRGARRHAAKGVRRLVERREALLARGVHGNKANVATARELACWVWAVGLMAEEA

SEQ ID NO: 179590 - protein, 412 aa, unidentified
MKVVHEICCGIDVHARMLVACLILANGEKEIRTFSTMTDDLLRLRDWLVAAQCTHVAIESTGVYWKPVFNILEDALTVILINPEHAHALRGRKTDVKDAEWLADLLRHGLLKPSFIPPPEIRELRELTRYRESLVREQTAVANRIQKVIESANLKLAQVATDALGASGRAILWALARGETDPVKLASLAHGKLKAKRPQLERALHGRLTPNQRFVLRELLQRWEELEAADRRVTKEIDRYLQDHPKLARARDHLDTIPGLGPRAAEIIVAEIGVEMKVNFGSDAHLASWAGICPGNKSTGGKRLSGRTRKGNTYLRSGLVQAAWGATMKKNCYLSSPYFRLVKRLGRKKALVAVAHSLLVIIYHVLQCDQSYTELGGDYFDRHHVGQQREYFIRRLQMLGLKVSVEELPKAA

SEQ ID NO: 179591 - protein, 353 aa, unidentified
MRRPKDKVIAGIDLHSNNVMIGLINQDGKRLAHRKLDCDLQQVTQFLQPFKAQIQSMAVESTFNWYWLVDGLRTKKYPIDLANPAKIEQYNGIKHVDDKDDAFHLAELQRLNILPKAHIYDAQLRPVRDLLRRRTNLVHQRTALLLSFRSLYARTTGQKLDLSEVKKMEPKEAATLYQHPANQLIAQVQAEHIQGLDQSLGRIEKAVLSCARDLPLYEKLLTIPGIGRILAMTITMEVGDIKRFKTDGDFASYCRLVDAKRLSNGKQKAANNQKCGNKYLSWAFVEASNFARRHDESCRRWYDRKAAKTSTVIATKALACKLAKAAWHLMAKLCDYDPARMFPELATKTMNEP

SEQ ID NO: 179592 - protein, 348 aa, unidentified
MAMTIVESTRPITGGVDTHLDVHVAAAVDANGGLLGVESFATTLAGYAQLHGWLTSFGPVARVGVEGTGAYGAGLARHLRGEGLVVIEVDRPNRQVRRRAGKSDAIDAVEAARAALSGRASGIAKTADGDVEAIRALLVARRSGRNVRIKYLNQIRHLGFTGPDELRERLRHVHRDRLARTAASLRPTVGSDTVLYATKLAIATLGRRVLALESDSRRLDELINELVTRTAPGLMEVYGVGIHTAAILLVAAGDNPHRLKNEAAFAHLCGVAPLPASTGKVDRHRLNPGGNRQANHALWRIVFTRMSNDERTRKYVARRLAEGKSTREIMRSLKRYVARELYPHLVRA

SEQ ID NO: 179593 - protein, 352 aa, unidentified
MTVTIVETPTQARAITGGVDTHAGVHVAAALDPIGGLLGVAEFAASPAGYAYLLEWLGGFGTVCLVGIEGTGSYGAGLARHITAAGIRVVEVDRSDRQDRRRRGKSDPLDAVSAARAALSGRAAGTPKGRDGQVEAIRALMVAKRTARSERIQTINQARSLIVTGPDDLRARFAGHSADDLVAELASLRPRPGSMIRYHTLLSLRELGRRVAFLDGQLQRLDALIVPLVTARAPGLLALYGVGHDTAAKLLIAAGDHPERLRSEAAWAHLCATAPIPASSGKVTRHRLNPGGDRQANHALYRIVITRMSSHPPTRAYVDRRSKEGLSKKEIIRCLKRYVARQVYPHLRPGSG

SEQ ID NO: 179594 - protein, 359 aa, unidentified
MEKVDFKGKELFIGLDVHKKSWSVSIFSTESHFKTFSQPSSPKALKSYLDRHFPNATVKCAYEASKFGFWIQRELASYGYDCLVVNPSDIPSTQKENSEKTDPVDSRKIGRNLRAGQLRGIHIPKTETEGLRQLFRYRKRLWADLVRTKNRIKDRVCASGIALPPKFDNAHGQPLLWTHAFLKWLRELELPGPSARTTLDLLLEQYDMLKGHLLKTGKEVRKTLRQKGYKELGKLLRGIPGIGPLTSVQLIVEIEDINRFPSFKHFNSFVGLKPTSYSSGEKERHGFITFRKHSALRSSIVECSWVAIQQDPALLASYEEFKKRMSGKRAIVKVARKLLARIYRVWKTGEPYGPGLVSA

SEQ ID NO: 179595 - protein, 342 aa, unidentified
MTFVGCDLHTRMQQVAVLDTETGEISERQLPHDGMAVEEFYAALPRPVTIGIESTGYATWFHTLIQRLGHTLLVGDAAKIRAMVVRKTKTDRRDALHLLDLLRHDRFPTVWVPDPATRDLRALLAHRMRLVRIRTMVKNGLHAIALNYRLARGSKLLRQAGLVQLHALALPPHTAQRRDQSLELLAGLTTQIRTLDDAITTAALAHPDGPRLITHPGVGALTALATLVVLGPVARFHDSKHVVSYVGLAPALNASADKHHLGHITKQGSPLLRFALGQAAAHAARMDADLKRTYFTLVHRRGRPKAKVAVARKLLVRLFIMLRDQIDYDEFCRRGRPAPVSA

SEQ ID NO: 179596 - protein, 368 aa, unidentified
MKKVSTAAAQQSRNFSVQQKLTIGLDLGDRNSWYCVLDEAGQIQLEQRVRTTGKALQEVFGGMPRSRIALEIGTHSPWISRLLRELGHEVIVANARKVRLIGESRKKDDRLDAQTLGRLARIDPELLYPVKHRSAKAQSDLSMIRARAGLVRARTALVNTTRNLAKSYGERLRGCNVRNMNPEKAEGLSPELQRALEPLLSAIEELSERICEYNDRIEALAETSYPQVALLKQIKGVGTLIALTFLLTLEDPHRFRKSRDVGGYLGLHPGRRNSGQSEPQMHISKEGDPYLRTLLVQGAQHILGPFGIDCDLRRWGLKLAERGGRNGKKRAIVATARKLAALLHHLWVSGEVYEPLHNSNRMMVAAAA

SEQ ID NO: 179597 - protein, 341 aa, unidentified
MQNTAARKRKQVPEGYLIVGIDPHKKKHAAVAITQDLTIRDRFKLDNTKEGLEFMVRRVRTEMVKSDCRGVMFAIETGGHYWRNIAYFLDEQGIPFRFINQYTLKRRREGKDLNHKKNDYRDSEVAAQLLCTGEFTESTIPQGVYAELRTAHNAYRRLVKERTRITNLMKGLLDGLFPEFVQVFKDPCAVTALCVLSCCAIPGIIACMTQGEFAATIEAHYHGHRLMRRKLVALHQVATSSIGIAAGARSVASEITFLVEKLELIKGQICSIERTLVSLVDETEEGKYLLSIRGLNYIAVAGLLAELGCFKLYRTSKQMIKMAGSNPTESESGGKRVLIRP

SEQ ID NO: 179598 - protein, 342 aa, unidentified
MDYFAGLDVSVKDTSVCIVDGTGKIVREVKVASEPDDLLQVLRNPAYCFKRIGLEAGPLSQWLFSALGEANLPVICVETRHMRAVLKAQINKTDRNDARGIAQMMRVGLYRPVHVKTLRSQKLRMLLTHRKLLQSKAIAIENDLRGTLRNFGLKVGIAGRAKFEARIKELVEDVPDLEVLVEPLLVVRRVLREQIAVLHRRLLTIVRDDEVCRRLMTTPGVGPVVALTYRATVDVPARFRKSKSVGAVFGLTCSRDQSGERDRPGAISRCGDEMMRTMLYEAAQSMLHSTRWSWLKAWAMQVAKRRGMKRAIIALARRLAVIMHRIWVDGTEFRWTREAAAT

SEQ ID NO: 179599 - protein, 346 aa, unidentified
MEQISRIGMDTSKRFFQLHGVNTAETVVLRKKLRRKEMVTFFEKLAPTVVGIEACGASHHWARLLQSFGHTVKLIPAQLVKPYVKRGKNDMADAEALCEAMSRPTMRFVPIKTAEQQAALMLVGLRDRLIRNRTQLCNAIRGYAAEFGFTAAKGVANVRPLLERIQADEGVPALARELFAAQAEEYAQLEEQIAEISGKLMAWHKADECSRRLAKIPGIGPIGAALLMMKTPAPELFRSGRQFAAWIGLTPRDHSTAGKVKLGVITRAGDEALRAVLVSGATAVIRHAVGCKGRASSWLIDLLKRKPPKLAAVALANKLARIAWKLMVTGENYAATSTRIASAAAV

SEQ ID NO: 179600 - protein, 410 aa, unidentified
MTAVYSVGIDVALRSHRVAVLGGDGEAVGKSFTIESTAGGFAALVETLHARGAGAAQSVIGLEATGHLWENLEAHLTRVGYRVVVLNPVQTRRYRDVLRRKAKTDDIDAYVIAGLLRSGAAAASYVPAETIQSLRELARLRARLMRDRQNYLRQLGAQLSVVFPEHADALGDLLTARARGILRACPTAYHLAAATPRTIHHAAHSAGARGFTREDATRVRDLGRASIYSGKAATARGNVVRTLVTHLERLTAAIEELDTAMAEELPPPTAGGPPSDAELLHTLPGVGTHTVATLLGELGTLSRFTSSKALVAYVGFYPQLAQSGERAAAPHLVRLGSRLVRRTAYLMAVNAIRGSAEFRTLYLRKKAQGKKPKQALIVVAVKLLHTMYAMVRDRHAYTAGRVLVAPPAGA

SEQ ID NO: 179601 - protein, 455 aa, unidentified
MAHRKKKIAAQLVEDEEYQLRHEKVAGIDVAKDSAVVCTRLPPAREGGRRRSRIEEVTARAAAVAALAERLLAEGVGVVLLESTSDYWRLWYYTLEAAGLGVQLVNSAHARQLAGRPKTDRLDAQWLARLAEMGLLRPSFVPPAEIRALRDWTRTRLQLVRDRTAEWQRLEKLLEGALVKLSSVVSALAENKTALAILKAVIDGERDPRALSALALGSLAGRRGDLERALEGMAFEDHHAWLARLHLGRIEALDRQVAAIEDEIEACLHSIPASWGVTADGAPSPAPGPDAAVLDAVARLAEIPGVSPELAMGMIAETGLDMSRFQTAAHLVSWAGLSPSARQSGPRSRKPRKGQGDGYLRRYCTQAANGAAQTSTFLGERVRRLARHAGGTRARCAVGRSILVIVWHLLKNPEARFADLGPDWHLRKTDRDKKIRGHLRQLQALGLDVTITPAA

SEQ ID NO: 179602 - protein, 322 aa, unidentified
MSQPNPLCVGIDVSKATLDIAASSDVAQFTVSNDSDGFNAIITGLRRHSVALVLMEATGGLEVAVACSLQAEGFEVAVVNPRQARDFARAMGYLAKTDRIDARVLTQMAEVINRHPERKRFIRALPDAERQALAAMVVRRRQLIAMLVAERNRLHPFHPQNKKSINTIIKALEDELVRLEKEMDSHIRNHFKEIAERLSSIKGVGTMTVSAMLAEIPELGTLSRRETSALIGVAPVNRDSGTMRGRRTIFGGRAGVRSALYMAALVATRFNPVIKTFYVRLLAAGKAKKVALVACMRKLLTILNAMLRKNEEWDESYHHVAP

SEQ ID NO: 179603 - protein, 392 aa, unidentified
MFYIGIDVSKDKHDCFCCNDDLQPVFQFQFSNDSIGFNLLFEAIKSLDSSFDNIKIALEATGHYSYNITSFILDNDLPLAIINPLHSNLFRKSISLRKTKTDKVDANVLARMLVAYPDLKFSTSLDDNDIILSELKSLTRFRLSLVKDLSKLKTSVSRIINIIFPEIEKAFSSTNSLYELLYNFPSAKEIANAHLTKLTNVLIKASRGHFSKEKAIQIKELAKNTVGNSSCASTFELKHTINLINEYNYSIDKIDKEINTIMDKIASPITSIPGIGITLASIIIAEIGNFDNFDSPDKILAFAGMSPTIYQSGKYVASSAKMEKRGSKALRYALYNAARLTSIYCPVFREHLARKRSQGKHFNVAISHVVKKLVRVIYHLQTKNELFKNIIN

SEQ ID NO: 179604 - protein, 414 aa, unidentified
MNQQEVAAWIGLDWADKKHSIHLQVRDGKREHRMLEQKPDIIHEWVAELRQRFDGQRVAIAIEQRKGAVVHALMTYDFIVLYPINPKALARYREAFRTSGAKDDPSDSELLLDLVSKHADKLRAWVPDTVEARKLQLLCEQRRKIVNHRVALTNRITSLLKQYFPQALDWVGDVASIQACDFLANWPTLSAVQRARKETLRKFYRQHNCRKTSVIDERISKISNAVPLTNDAAIIEPLSLSVQIYAGQLRSLIRAVQQFDKQIVETFAQHPDHDVFDSFPGAGQVCAPRLAAAFGTDRSRWQSAVEIQSHSGIAPVTERSGDSKWIHHRLACPKFMKQTFHEFSDQSIRFSKWARAHYDELRSRGKDHHAALRALAYKWIRILFRCWKDRKPYSEEKYLAALRRRGSPLTEKIA

SEQ ID NO: 179605 - protein, 301 aa, unidentified
MNQYVGLDVSLEETKIHVLDEAGGRVWRGKCASHPDELETTICKHAPGAVRIGLETGPLTTWLWTELSKRRLPMVRQAQRALDMRANKTDANDADGLAHLVRAGWYKEVRVKSRDAMLSKAVSAARRQLLDISTNLSNQVRGLMKTFGLVVPKGKGRIFEANVRRLLDEEHALAAVVLPLLEAWCAIRNRAAELDRLLLRKVRDDANCRRLMTAPGIGAVVAASYVAAIESPANFKHARDVGAWVGLTPRRFQSGEMDYDGHISRRGDERLRALLYEAATVILTRVRSASALRSWALALQG

SEQ ID NO: 179606 - protein, 312 aa, unidentified
MEQQFVGIDVSKAWLDTEAIPQSQSMRYGNDAAGIVALVEAMQAATPALIVVEATGGYETAVASALSAAGLPVVVVNPKQVRDFAKAMGILAKNDRIDARVLALFGQRIRPQLRPLPGVEQRELAELLDRRSQLVVMRAQERARLATALPVAKASLVEHIHWLDERLRQLDIELTARLRTSAAWKVKVDLLKGVPGIGKVTIFTLLARLPELGQLNRGTIAALAGVAPFDDDSGKRRGQRFIRGGRAEVRNVLYMATLSASQHNAVIKAFFARLTAAGKPFKVAITACMRKLLTILNAMLKNNESWHCPVTT

SEQ ID NO: 179607 - protein, 340 aa, unidentified
MSLYGGIDLHANNSVIVLLNEQDEVIYQKRLPNDLTMILGQLAPYHAELRGLVVESTYNWYWLVDGLMEASYRVHLANPAAIQQYSGLKYTNDHSDARWLAHLLHLGVLPEGYIYPKTERAVRDLLRKRTHLVRQHTANILSVQNILARNTGARFSGKRIQELTKQDLTTLLADETQGLAVASSLVVLDCLRQQIKTLEKSVHKRLHHTPSYEQLLTVQGIGTILAQTITLETGAISRFPTVGHYASYCRCVDRTKLSNGKRKGTGNVKNGRPYLAWAYREAAQFALRCQPAAQRFYQRKLAKSRNNAILARKAVAHKLVRACYDIMRDLVPFEATQAFG

SEQ ID NO: 179608 - protein, 427 aa, unidentified
MKELTKVCGIDVHKMFLQVCILSRSGEYSQHRFHNTPHGILALKDLVLAEGCEVVAMESTGIYWYRLFLELESDIRTIVANARQIKSIPGRKTDMNDARWIAELALHGLIRPSRIFPRQDREFRDLTRNRETLVRTRTTIKNRIHKILDSAGIRLNLALKDIFGKSGRHLLAGIAEQKDLEATLATIPSPLILRRADQLREILQDSPLSPTQLHLLTTQLHLLEAIEEKIAQLDALILASLEDSQMEALPICTSVPGISITAATTLLAELGDVRDFSSADRLVSWAGLAPSVYQSADTLVCGKITKQGSKSLRWILVQVAQAASRTTDTVFSRFFRRIAFRRGRNKAIVALARKILTILWHLLVNRELYVEPGVQRVRKLPARATLSKISIDDATEILLNAGYRIYSPESQKSAGKGVGAKRATHPL

SEQ ID NO: 179609 - protein, 405 aa, unidentified
MEVIIERVCGMDVHKDNITACIMTPEGKEIQTFSTKTVFLLKLVDWIKSHGCTHVAMESTGVFWKPIVNLIEAEEIEFLVVNAQHMKAVPGRKTDVKDAEWIAQLLRHGLLKASFIPDRNQRELRELVRYRRSIIEERARQHNRIQKVLEGANIKLGSVVSDIMGVSSKDMLRAIADGEDDPEKLSNFARGTMKKKKDELELALKGYVNPHQRMMLNTILTHIDFLTEQIEKLDQEVAQRVSSYQEDIERLDSIPGIAKRMAEQILAEIGTDVENQFQSAPRLCSWAALVPGHNESAGKRKSTKSKKGNKYLKSALTEAAHSVGASKNYLGALYRRTLARKGRKRAAIVVAHAMLRIAYYLLTRKEMYVDLGEDYFDKQKQVSIVRHSVRRLESLGYTVTITEAS

SEQ ID NO: 179610 - protein, 343 aa, unidentified
MQIRSIGIDLGKMTFHLVALSDDGKVLLKKKFTQKQLITFTANLQTSLIGMEACSGAHFLGRALRAQGHDVKLIPAQFVKPFVKSNKNDFLDAEAIAEAVDRKNMHFVPIKTDDQLDLQALHRVRDRLIARKTAVINQIRAFLLERGVVFAKSPIRLRERMPDVLENADENITPRMRNLLSSLWEEWKELEQQLDLLNLEVEQIASSDAACWRLRQIPGIGPLIATAIVAAIGNGAAFHKGREFAAWMGLVPRQHSTGGKAMLLGISKRGNQYLRKILIHGARSVVLNSKRDRVQMGQWMSALEARTPRNVLVVAVANKLARIAWAVLSSGNEYRAFPVPMAS

SEQ ID NO: 179611 - protein, 355 aa, unidentified
MTSTKYIGLDVHKESISIAVLNFAGKVVMECIIETKASTLLQFIHGLRGDLHVTFEEGTWAGWLYDLLKPHVTELVVCNPRKIALLKDGSKSDRIDAHKLADLLYMNKIKPVYHGEHGLRMLKELSRSYLTITKDLGRVMNRLKALYRSWAIPCAGTQVYAPRFRSEWLSKITEAGVRRRAELYYQQLDALRLVRQQARKELLAEARKRRATKLLRQIPGIGPLRAAHLVALMQTPHRFRTKRQLWTYSGLGLETHDSAQYRVVEQQLQRSKKPVTLRGLNTNHNHDLKDIFKGAAMRASTAAGPLHDFYEALLAKGRKPTMARLTLARKIAAITLIVWKKEVRFDANYLKQQAA

SEQ ID NO: 179612 - protein, 370 aa, unidentified
MSLPQAPRRTGDYMKVCGVDVHKSFLQVAVVDAEGRVIFREKCEYTPSEVARLIAELLAFRCRLVAMESSGVLWIQLFYRLAAEGFRVILVNPFSTRAYHMKTDLLDAVRIARNTLAGAVIRSYVPARRSVLVLRGMVRLRRRLREDANRILNRIHRLLVCSGVWLDRLVKPRSSRWLRALRRLAEGASLVDLFGADALLRVFCVRLEPEERAMLAELLDVYDRLTASCRRLEEESVRLARELYGELYELVQTVPGVGRLLAACILAEAGDVSRFPSARHFRSYCGLAPRVRESAGRARLGRCSRGNPYLRWAFYQAAVAAIRCDDELRSFYMRLRSRGKPHRVALVAVAGKIAARTWRVLYMREPYRAR

SEQ ID NO: 179613 - protein, 323 aa, unidentified
MQTPSAVLNIGADVAKDAIVVACSEGSFPVREVANQRPAVLALLKGLPAGSRIGVESTGTYHELFAEAAHQLGFLVFLLNPKDTHHYAKAVGLRGKTDRVDAELIARMVAHEHTKLHTWIPPTPQQREIDRLIKRRATLISLREAVAMSLYDLGEFTADLKALRTRFNQLIARIDLRVKALIEASPERQQNFTRLCTITGVGPVVGTALVNTLERVPVKSADAFVAFTGLDPRPDDSGQHHGKRRLSKRGPAELRRLLYLAALSAVKTKPWRQLYEHYRARGLSSTAALVILARRIARTAWSIYTYKTEFDPARLTNPVLRTH

SEQ ID NO: 179614 - protein, 458 aa, unidentified
MNRKRSKSRIDCTMPIMHPNAAAIDVGATLHMAAVRADRATEPVRSFGTFTADLHRLVDWFTECGVETVVMESTSVYWIPIFELLDARGFTVFLVNARDAKHVPGRKTDVSDAQWLQRLHSYGLLRASFRPKGQIAELRAYVRQRERLLEYAASHIQHMQKALTEMNLQLHHVVADITGSTGLRIIRAILAGERDPEVLACLRHYSCHSSAETIAKALTGSYRTEHLFALEQALALYDAYHEKASACDVRIEAVLKELSIHRGRDIGSVPPPSRRRTDQANALAFDVRAALFALLGKDITRIDGLGPYLSLKLIAECGDDLSSWPSAKHFTSWLGLAPSNKVSGGKMLSSRTRRSGGRAAALLRLAAVTVGRTDTALGAFYRRLSSRIGKAKAVTATARKVAVLFYNAVRHGREYVDPGASSYETRYRTRVVNNLHRRAKAFGFVLQPLEPKAGAVVS

SEQ ID NO: 179615 - protein, 353 aa, unidentified
MKCDKYMGMDVHQAMTVVVVLDADGKVILETMVATEAAPIIRLVQSLSGPLHVTLEETTQAAWLHDVIRHFVTEVVVCDPRRNKLLAEGSKTDKVDARKLADLLRTGMLRSVYHGHEVTRKLKELVRAYETLSGDSRRTMTRIKAIFRGRGIRTAGRGVYQPKQREQWLEMLTEPGIQQRAAWLYEQLDQLRVLRRKAKQVMLEESRKHRAVGLLKTIPELGCIRAAFIVATVDTPHRFRTKRQFWSYVGLAVVTHMSSEYEMKAGQVVRRRKPLATRGLNHNCNHRLKEVFIGAATSASQHKSYESVRERLNHNGMRAEMARLTLARKIAAIALMVWKKGVEFDPKKLNATT

SEQ ID NO: 179616 - protein, 346 aa, unidentified
MKHHSENKTISVLGIDLAKQSFQLHGVNEQGQTVMRKSLTRKKLTAFIANLAPCLIGLEACGGAHYWVRVFEHFGHNVKMMAPQFVKPFVKSKKNDAVDAEAICEAVQRPSMRFVPAKGVEQQDIQSMHRIRSQAVARRTALSNQIRGLLMEYGVVIPKGISYVRKEIPLVLEDAGNELSFLFRELLHDLYKEMIHLDERVKTLENKLKTICRQNEDCQRLLSIPGIGLLSATAIVAAISDVSVFKSGREFSAWLGLVARQHSTGGKPTLLGISKRGDSYLRTLLIHGGRTVVRVADKYQDKRNQWISNLEHRRGKNISAVAVANKNARIAWALLSNKTTYQVSTM

SEQ ID NO: 179617 - protein, 415 aa, unidentified
MLKIVYPICCGMDVHKTFIIATIAATNERSVTTYQTKRFSTFTKDLRALAEWLKAAGCIDICMESTGKYWIPVYNILEPSCRITLAHPKYVKAIRGKKTDKKDSIWIADLHKHGLVPGSFIPPEEIRQIRDLIRYYFKLVSFATSEKNRVQNSLTVSNVMLASVVSDTFGKSASAIIDHLLDHPGDRDFDVRRFLHRSMLNKADDIALAIDGLITPPQAKKISLCKTHFDQLKNLMEQIKQIAADLAIPFSAQLQIIASVPGISDFSALAALSEIGVDMSQFHSAKHLCSWAGLAPSNDQSAGKKKSVRISRAGVYLKPLLVQCALAALRDKKFPHYRKRYEQIKRRRGHKRAIIAIARMMLTAIFHCLKNGQFFDPTRYEDPAQQAPNKARELALHKLFQDATRLGYSLVYSGA

SEQ ID NO: 179618 - protein, 342 aa, unidentified
MEIETVGIDIGKTWFHLVGCNRAGTPVARHKLNRGKLAIFIAKLPACLIAMEACPGSQHLARAFQRYGHEVKLIAPKFIKPYLKGQKNDFNDAAAIAEAVTRPTMRFVTIKSNEQLDMQAVHRIRDRLVGQRTAVINQIRAFLLEYGLPIKEGRSSLANSLSDILEDATNGLSHRMRQLVAELRSHWAAIDAQITDYTHEIQLAARRSDDCQRLLSIPGVGPLGATALVAAVGNAAAFSKGREMSAWLGLVPRQHSTGGRATLFGIGKRGNSYVRRLLIHGARSLLKNMHRKDNELGSWLNKLQERVHRNVAVVAVANKIARIAWAVLARHDVYRPSAAAAA

SEQ ID NO: 179619 - protein, 418 aa, unidentified
MKKHSKSLQRSEPTLKRTKARGPVQRDAKEVLAEVLGKLTGKLDAPAVSTSAKGNRRGNTVGPNRDRLTVGVDLGDRWSQYCILGLEGETLAEGQWRTTQEDAREFFQALTVARVVMEVGTHSAWVQDVITEWGHEVLVANPRLMEGSKRRKRKSDRIDANKLARLGRVDPQSLYPIRHRSREVRQDLVVLRARDALVSVRTELINTTRGLVKSMGTRLPGCSSPSFADKVKDAIPVEVREALLPLVQLTEMVNDCIARYDQKIEELGQKKYGHTTLLRQVKGVGPITSLAYVLTLEDPQRFSSSREVGPYLGLVPKQEDSGDSQPQLGISKAGDRMLRRLLVGSSQYMLGAFGPDTDLRRYGLRLCERGGKNAKKRAVVAVARKLAVLLHHLWVTGDVYEPLHHTGAETRTAQATAA

SEQ ID NO: 179620 - protein, 314 aa, unidentified
MKDITTFVGIDIAKKSLDVATLPATTPRTFSHDTKGRKELLNNLPQPETCLVVIEATGGYERLLVAELLTAGHLVAVVNPRQVRDFAKALGILAKTDRIDAAVIARFGQQVTPRPLAEVHEKQDELDQLVTRRRQLVDLRTAEKNRMGMAHSKSVKRSLQLVIDTINKEMKRIEKNILALVESDDQWKGKSDIMNSVPGVGPVTTATLIAEFPELGKINRCQAAALAGLAPFNRDSGAFKGKRTISGGRRTVRNALYMAALSARKHNPVIRQFADRLENQGKAPKVILTACMRKLLVTLNTMLKNNTLWNPQII

SEQ ID NO: 179621 - protein, 411 aa, unidentified
MEVLYPRCAGLDVHEAFVMVCRRVLHADGPVEKVVRRYSTMTADLLALADWLAEAGVTHVAMESTGVFWKPVWNLLEGRFTLLLVNPRDVKQVPGRKTDVADAAWLAQLLQYGLLKGSLVPPPSIRALRDLTRHRTTLIRDKTRVINRIHKVLEDANIKLTAVASDIMGVSGRAMLAALVRGDTDPQELAALAQRRLRRKLPQLEQALQGRVQPHHRLLLQSLLAQVTFLEQEITALDAVIETTLRPFAAPLQLLKTIPGITARAANVLAELGPDMRVFPTAAHCASWAALCPGHDETGGKRRSGKTRHGNRWLKGTLTEAAWVASRTTGTYAAAQYRRLAGRRGKKRALVAVAHSLLIAAYHVLRDGVAYHDLGPQHFDRLNETHLTRHLVKRLEHLGHKVTLEPAHVAA

SEQ ID NO: 179622 - protein, 337 aa, unidentified
MQLYCGIDLHSNNSVISLIDENDKVIKEKRLANDIDLIEDYLSPFQSSIAGVVVESTYNWYWLVDGLVDRGYPVHLANTLAIQQYNGIKHTNDETDARFLAHLLRLDILPTGFIYPEAMRHVRDVLRRRLLMVKQRTAQLLSLQSLIGRHTGKCLSAQQIKTLAVADLASYLSDQSAQFCAQQSLQLIQQLQFQISEIETFVLAHCQKDKYTVLTSTPGIGKILGMTILMETGPIERFAQVGNYSSYARCVPTQKISNGKTKGRGNAKNGNRYLAMAFVEAAHYATIWSPEIKRYYQKKCKKRPVMVAKKAVANKLTRACYHMLKNNEVFDIKRAFG

SEQ ID NO: 179623 - protein, 315 aa, unidentified
MTNLKKSKSVINVGVDVGKFVLDVCIYEKKLHWQDDNSAEGIKRILKRLAHYQVCRLVMESTGRYEFEFAQAAYKKNLPVCIVKPLRVRRFAGAIDQMAKTDKLDAELIAEFAFKVQPEVTPQKSKNLIAIKDLIARRRQLMTMRTQEMNRTKIMGKSLETSCRRIVKYLDQEIARIEKRFAKYIEEQAEWTEKQDILKSAPGVGDALVYTLLADLPELGNLSRNQVGALVGLAPMNRDSGKSKGKRRIQGGRYTVRTMLYMATLSATQCNPVIRGYYQQLVAQGKHKKVALTACMRKFITMLNAMVRDKCVWAY

SEQ ID NO: 179624 - protein, 244 aa, unidentified
MNTEQTYVGIDVSKERLDVVLRPSGEYLEASNDEQGIGSLVACLQEAPPALVVLEATGGLEQPTAAALALAGVPVAVVNPRQVRDFAKAVGRLAKTDRIDAAVLAHFAEAVRPKPRPLADEDARELHALVLRRRQIIDMITAEGNRARTAPKSVKRRIEAHLRWLRKDLERANEDLERAVRESPVWREKDDLLRSVPGVGPTLSATLLAELPELEHLDRRSLAALVGVAPLNRDSGTLRGIRTV

SEQ ID NO: 179625 - protein, 349 aa, unidentified
MTDQRLSYCGRIVYVGIDVHKETYTVTCVCNKQIVKTATVQADPAALAASLPRWFPGATLYSVYEAGFSAFVLHRVLTKAGITNLIVNPASVAVAANDKVKTDRRDSKKLAIDLADGRLRGIYVPTAAEELARLLPRTRAQIVEHRATIARQIKAKLHQFGLIAPSSRRLISRRYLREMAAWSLPPELSVRLTLLAEQWRFATRQLIEMRRLLRDQAQAQEAIEKVYRSVPGIGEVVARTLATELGDMTRFANERALFSYTGLTPSEYSSGASVRRGHISRQGSSRVRHLLVETAWRALPRDGVLKEMFDRIAATRGKKRAIVAIARRLTGRIRACFRQGTTYAVGTYA

SEQ ID NO: 179626 - protein, 341 aa, unidentified
MKKFIRIGVDLAKNYFQVHALESEDGRAVTRKLKRSKMHEFFSQIEPCVIGMEACGSAHYWGRELKAMGHEVLLMPPAYTKPYVKRGKNDAVDADAICEAMSRPGMRFVPIKSPEQQATLMLHKTRELLVKQRTMSVNALRGHLSEFGIVAAKGIGRVDELLDLAESDATLPNAARASVKVLAQALEGLDKAIDDLEKEISSAHAQNEMSRLLDKVPGIGKLIASVIAASVPDPSVFKSGRDFAAFLGLTPRQNSSGGKQTLGGITKQGNRYIRKMLVLGATSLLNVLGKRKGALRDWIVGLLAKKPARLVTVALANKLARILWAMMKTGECFRTEMFAKA

SEQ ID NO: 179627 - protein, 360 aa, unidentified
MRKRGAARGESATVGLDLGDRFSWYCAVNMTGEVLEEGEVRTTPAALKRLFLRRRRSRVAIEAGAQSPWVSRLISACGHEVLVANPSRFRLVYGSATKNDRLDAERLARVARMDPTLLAPIHHRSEKAQADLALVRARQSLVRSRTLLVNHARGSVKAFGSVLPQCSTGSFAKKAAEYIPELLRPALEPVLLEIQHLTTLIRAYDRRMVEIARTQYPQTALLQQVAGIGPVTALAYMLILENPNRFRKSRQVGSYVGLRPRQDASADRDPQKRITKAGDTLLRTLLVQASHYILGRFGPDTDLRRRGLALASRGGKNGKKRAVVAVARKLAVLLHHLWVTGEVYEPLKNTEKQQMLMATA

SEQ ID NO: 179628 - protein, 364 aa, unidentified
MKEEKTRRYVGIDLGKREYTMAIISCKGKMSIHKGKTSIQGRAALYKLLEKSDKVALEAGNMAFTMAREIGQQAGSEVRVLNSAKLPFIWDCPTKTDKEDAMKLAHLVEERRDEKLPVVSLPSEKDMERRELVSSYGREMRGRTRVINTLHSLFWKQGHTEVVRKDVATVAKAQQAIKVLNGQILEEAEWQIKHFELHEQRIKELRARIKETAAKDEDMKLLQNIAGVGPMVAYAFVAHVGDGSRFNKGAQVSNYLGFVPRLDYSGTIQRHGHISKRGNGYLRGLLVQAAWAMVGSKEGGSLKERYMYLTMFQGKSKKKTIVSIGRRMAELMYSVLRNKTKYEIRHWKGTLNNPAFLAGQARSA

SEQ ID NO: 179629 - protein, 320 aa, unidentified
MTSRGMEKMKHDTIGVDVSKGHLDAHRLADGATRRFANDKRGHKALIEWLAETPAIRVVFEPTGPYHRGVERALGLSGVPFVKVNPRQARRFAEAAGKLAKTDRLDAAMLARMGAALELKARPVRSEALLELRELYVARAALVKDRTAAKNRGKVLTLSLLKRHNAQRLEHIDRQIAAVEAAILGIVEADVGLSDRFAILTSIPGVSNITAFALLIEMPELGALEAGQAASLAGLAPVVRQSGRWTGRAFVRGGRASLRQALYMPALVATRFNPDLKANYAHLLAAGKPAKVALTAVMRKLIVLANALLKANRRWAPKTA

SEQ ID NO: 179630 - protein, 353 aa, unidentified
MVYSPNEYDIFIGIDVDQKSFSFNVKNHDTMNNSHKIPASPENLYQHIRNRYNNKRVICAYEVGVTGYYLHDYLTSKKIRCLMVPPPSVPKASNDRTKNNRLDSERISQHLKNGDMLPIRVPDYDCRELRQLLRSREEYVNMRKVAKQRIKSLLLFAHLHTLLKDTTQYWSYLHIKRLKSLPCSPATRQRLDLLLKDLDYARSQTLIILKELKNHYEQNASLKRNIHNLRSIPGIGFITAITILASIGDIEQLHNPRELGAFTGLVPSEYSTGERISRGRITHLGNSVLRSLLVEASWASINKDPRLRQFYDRIRAKHHPQFGARKAIVAVARKLTLIIYRVLKEQREYIANI

SEQ ID NO: 179631 - protein, 349 aa, unidentified
MIARSDAACFVGIDLHKDTLTACTIAAKGGEITYRKIACVAREKVREFLANLPRPSVVAIETVGFYRWLWTEAEPIVDQVLLADARGARALAGRRIKTDREDAFNVADLLMTGRLPLAWAPPGHVQRLRDWTRHRNGLSRDHAKTLHRVKSIMNRLNRPGPARMDAAGLQRYLLASVERIEADDLTMLWQHQRRLVEIEQDISASERRIVDLMKAPEFRPLRAILESIPGVGLITAATAIAEIGDFSRFPDSKAIGRYAGLTPIGYSSADKNRLGRICKTGSPDLRWALQQAAWTAIRCDASIKKNWLKISKTAGKKAAAVAIARKILVLMWTLVRKDEPYKAREPLAA

SEQ ID NO: 179632 - protein, 454 aa, unidentified
MSKKRSKRQKKAKDLDALEQINLNAAGIDIGAEEVYVAVPQGRDEESVRSFPSFTADLHRLADWLEACGIETVAMESTGVFWIPLFEILESRGFEVYLVNARHIKNVSGRKSDVLDCQWIQQLHTYGLLQPSFRPPEQICAIRGLVRHRDMLIKYRSAHIQHMQKALTVMNLRLTNVLSDITGVTGMKIIRSIIAGERNPEVLASFRHSNCAKSQAEIAKSLEGNYKREHLFALKQSLELYDFYDQQLKDCDTELEALYQEFDIPDEPGTPPPDPRKRKRRKNQPHFDLAQSLYCITGVDLTAVDGLEAMTVQDILSEIGTDMSPWPTAKHFASWLRLSPNNKVTGGKVKQRGTLPSQNRANTAFRMAAQSLARSDCALGAFYRRIRARHGGPKAVTATAHKLARIVYFMLKNRQPYHDPGADYYEEQYRLRAIRNLQRRASKLGMRLEPVGVT

SEQ ID NO: 179633 - protein, 501 aa, unidentified
MKAKRSKAKIRAERNSIAVPCKEPAQELQILRPDAAGIDCGAQEHYIAVPPDRVSVGEPTVRRFSAFTEGLDAAVEWLKACRVTTVAMESTGVYWIPLHQKLEAAGIEVYLVNAGHVRHVPGRKTDVQDSQWLRQLHRFGLLNASFRPEDLICRLRSLDRHRDNLVSSSASEIQHMQKALQQMNLHLHHVVSDITGLTGLRIIDAILAGQREPEQLVKLRDKRVYKSTPQQMQAALVGDYRAEHLFVLSQSLQAYRFYQARIEECDRETEPLLQKLAQQVEAASAELKLDALKAANAQQRVTVPESASESKTSASPLKAKRKRKPRANEPKIELAGLLERICGIDLTKVVGLNVLNVLLIVSEIGVDMSKWRSAKAFCSWLGLCPGNKISGGKVLDSRTRQVVNRVADALRLAAQSAGRTETCLGLFYRRKQAHLGAPKATTATARKLACLIYHLLRYKQPYQEPDPALYQLRLQKAALAKLQRQVTALGYTLLPNAPIPA

SEQ ID NO: 179634 - protein, 344 aa, unidentified
MQVTTLGIDLAKNVFQVHGIDDHGKVILKKQLKRAQMAPYFINLPPCLIGIEACGSAHHWARKLQVMGHTVRLVAPQFVKPYVKTNKNDLADAEAICEAVGRPNMRFVPIKNVEQQAVLALHRVRQGFVKARTAQGNQIRGLLAEFGIIIPQGINNIGSRVPELIEDASNELPGSFRVLVQRLLDHLKELDRQVDELEAQIQAWHRNSDLSTKIAQVPGIGPISASALIASIGDAKNFDNGRQLAAWLGLVPKQHSTGGKSNLLSISKRGDTYLRTLLIHGARSVIYHAAKKPESCSWVSAVVNRRNKNVAAVALANKNARIVWALLAHDRRYETGYTRAVEQT

SEQ ID NO: 179635 - protein, 459 aa, unidentified
MRVTIGIDVAVRAAHQASLADGQGVFLFTGHRFSTDPSELAGLWSRLPEGADDVVVIMEPTRNAWVPLASWFRGKGARVVMVPPQRSADLRAYYSKHAKTDRLDSRVLARLPLLHPEGLHVELGLGPGDALKRAVKLRCSLVTRRCANMRRIDALLEIMGPAWTRALGSDLCATALEFVAHYAQPAATRRLGRARLTRFLRLHSRGRWGEREADALLAAADTTLELWGEGGLDLDALAADIALEARLACDLTREIRDLSGRIEVMYRIADPGGILLSVPGVAVTLAAQILGRLGDVGRFDSLAGVRSFSGLVPRHRLSGTGGATGGPSKAGDACLRAALFLAADHARRQDPQLAARYHRLMTQAGKHHTSALCSVAAVLLTRIAACLRDGIPYVIRDVDGRAVGRQEARAICVERYTVSDAVRAARRTVSRNKSIKGRDGATQQGVAKRSDVAPVPVPA

SEQ ID NO: 179636 - protein, 343 aa, unidentified
MTTKLMAGIDLHSNNLFCAIVDLEGKRVFEKKLPCQIESVVQALKPFKKHLENIAVESTYNWYWLVDGLQDYGFPVVLANPAAMAQYDGLKHGDDKSDAFFLAEMLRLKILPTGYICDRKVRPVRDLLRRRMGLVHKRTSLILSLKSLHTRVTGQDLSTGRIKGMEAQEAQELFEHPADQLITRLDLLLVEQLSQSIAQIESAILAEAKSLPCYQVLQTMPGVGKILGLTIMLETVDPKRFASAGDFASYCRCVDSQRMSNGKKKGENNGKCGNKYLAWAFVEAANLARRHDALCRKFYDRKKAQVNGIVATKALACKLAKAAWHMMNNNTPYDPGRIFPGAQ

SEQ ID NO: 179637 - protein, 342 aa, unidentified
MKIIGCDFHPSFQQIAMVDTETGEQTAQRVTLSEAVEFYRELPGPARVGMEACGNTGWFERLLAELGHELWLGDAGRIRATEVRKQKTDRRDAELLLRLMLENRFPRLWIPSQEQRDLRQLLIHRHKLVGMRRQVKNQLQHLALNQGVQQKRKLWTRAGRKLLEELPLTGWTARRREELLELLDSLDRSVGELDQAVKQAAEKDTVAQLLETHPGIGPITALAFALTLGDIHRFAHSRQVVSYLGLNPAEHSSGGRQRLGSISKQGNAMVRSLLVEAGQSAARLVPELKRAYQRLKHRKHSAVAKVMVARKLAVRLYWMWKTQQPYAATRMQGSPSHLVAES

SEQ ID NO: 179638 - protein, 514 aa, unidentified
MRLQEYGRNPNKRKEYVHQPDLLLVGVDVSKAKHSACLGTQTTVSCRKLEFTHTREGFRRFEQTLRAHLVKNKCQRMLIAMEPSGIYWQALYERLKSCGYGVCLVHCQAVRNNRKTMPDGTSKTDEKDAYSIFDLLRQGKFFLPVDRDPELQAAYRLMRRHMALKKRVSQLRNHLRAAIHLTFPELNPLVKDLTQPTALRFLQVNPTPTSILRNGQRHFLETWQPRSRCGQWRPEKFQQLYDLAQHSIGLSDPYGIDEFEITALAHDLADALAKQQLWLDKAIALLAPRTDFQVLMQLPRIGHPTAMAILTAIGDLSTYTNGKQLVKLAGLDIRLFESGSSIRKLPKISHVGSAYLRYWLYHYALRLVAHEPHFTAYYQRRKHQSPGKGAGQRALIAVCDKTIRMIYRILTDPAPYDPKKDQSIAEDYAAYQKAASICRRVPEGVSDGGKPGCAFGPHGGGENQSVSAGPSSLHETRTKNRRSTTNWKTRIDLTRIGVEHSHREASLLISLGAL

SEQ ID NO: 179639 - protein, 413 aa, unidentified
MSVTVEAPSARVCAGVDWAKDDHAVCVVDAHGEVVDRFDVAHTAAGLKRLVARLLRAEVHEVGIERGDGPVVEALLAAGLVVLVIAPNQLKNLRSRYGSAGNKDDRYDAYVLADVVRTDRRRLTPLTRSTPATIALRSTVRARRDLVEHRVAAANQLRAHLQIVFPGVVGLFAAIDSQVSLAFLERFPTQGKADWLSTDRLAAWLSKAGYSGRVAPDVLHQRLLAAPRGATHSDAEAHAAVTLAFVAVLNGLNTQIAVLTEEIAEQLEAHPDAHIVTSLPRAGTLRAARLLAEIGDARGRFPTADSLACLAGVAPSTRQSGKVKAVTFRWSADKELRDALCDFAGDCRRANPWAADLYDRARTRGHDHPHAVRILGRAWANIIWRCWQDGVAYDPNRHNALQRILNQDSPEAA

SEQ ID NO: 179640 - protein, 377 aa, unidentified
MSSMPQNTIDPDPSPLVAMSRVVIGGVDTHKELHVAAVIDTGENVLATHSFSTTRAGYRALVRWVRSFGDIARIGVEGTGSYGAGLTRHLSDAGIEVLEVDRPDRSERRRKGKDDDLDAINAARAALHRRRTSTPKSKDGAVESLRVLRVTRNTAIRARRNALQLLRMSIVSAPEELRDQVRNLTRMQLIRTCAAWRPDTTNAVDPVSATRIALKSLARRILELGDEIAMLDDLIEPIVTMLAPQLLDRVGIGIEVAGQLLVTAGDNRQRMRTEPAFAMLCGVAPLPASSGMTQRHRLNRGGDRQANSALHLAVVTRMRIDERTQAYVAKKTAEGHSKLEIIRCLKRYLAREVYYLLNSTAGGTTTAAMNRQRDTAA

SEQ ID NO: 179641 - protein, 338 aa, unidentified
MIVIGVDVHKQSVTAVAIDAAGRPLGEKMVVVGSDELVGWACTLGGKRLWAVEDCRQLTRWLERQLLSVGEELVRVPPKLTVPERRAGRTRGKSDPIDALAIARAALREPDLSRPRAGEQVFRDLKLLVDHRDDVVDARRRTQQRLRWHLYALDPTFVVPLRMLSRSSHLERVSRWLARQEQELQVRLARELVAHCRSLNRTIRELDQELEQRATEIAPALLELPGCAAVTAAKLLAEIGPVNRFKSDAQLARHSGVAPLEASSGRVQRHRLDRGGNRQLNAALYRIAITQSRYHPGARAYLERKQADGKSRREAIRCLKRLLVRTVFNTLKASPALT

SEQ ID NO: 179642 - protein, 310 aa, unidentified
MQDTIGIDISKDTLDIHRRSDGRHARFGNDRAGLAALRRWIGKTPVRVVYEATGRYHRDMEGALDAAGHALIKVNPGRARRFAQAAGYGAKTDRVDAAMLARMGAVLELEATPVRSESMHEIRELHIARLGLIKDRTACRNRLQAARNKVVLAQLRARLRQVERQIEQIDAELARLVAEDPVLAHRFGILLSIPGIGPVAAIAMLVEMPELGTMDGKEAASLAGLAPITRESGRWKGQSRIGGGRRGLRRALYMPALVATRHNRQLGQTYQALCNAGKPAKVAITAVMRKLLILANALIRDDRKWAETAP

SEQ ID NO: 179643 - protein, 409 aa, unidentified
MQVIHSRCAAIDLGKDLLVVAVRLQDETAVQRACRTFATTHRDLIELRDWLRSLHTTHVVMEATGIYWRSVWAVLEKHFDLMLANPAHIKNLPGRKTDVNDATWMVDLHAHGLIRGSFVPPAQIQALRELTRTRKQFVREVARHTLRIQKILDVADFKITGVISETLGRSGRRILKALIAGETDPHKLADLVDPHIKASRSQLVEALHGEITAQQRRLLKIHLKLIEALESSISEIDHNITKAVAPFRDVLERLKAAPGLSEISAPALVAEIGLDMTRFPTAGHLVSWARLCPRLDESAGKVRSRRTLKSSAWVKTLLIQVAWCAIRKRDSYFRAQYVRLRARRGPKKAIGAVAASFLTAVYHMLRTGEPFKDLGLDYFDRSQKDRLVRRSVARLRQLGYRVSLEKEAA

SEQ ID NO: 179644 - protein, 349 aa, unidentified
MVVLGIDAHKRNHTAVAVDEAGRKLGERTTGATTADHLQLLCWAEQFGDARSWAVEDCRHLSRRLERDLLGAGEQIVRVPPKMMAQARDGARTYGKSDPIDALAVARAALREPNLPVASLDGPAREVRLLADHRDDLVAERTRAINRLRWHLHELDPAWAPPARSLWRPKHLKAILQHLTGEGGTVARLTRGLVERCRLLTDEILELDSELERLVRKQAPALLEICGCATLSAAKILGETADVRRFRSRHAYARHNGTAPLPVWSGNNERHRLSRTGNRQINAAIHRIAITQAHYHPEAKSYLERRRAAGDNKAESIRALKRRLSDVVFKALMTDAEKSSRTPASSVAA

SEQ ID NO: 179645 - protein, 343 aa, unidentified
MTKISTIGLDLAKNVFQLHGVDASGAVVLKKQLRRGALEKFFAQLPPCLVGMEACGSAHHWARVIGRYGHEVRLMPPAYVKPYVKRNKNDGRDAEGICEAVGRPTMRFVPVKSVEQQATLAVHGTRALLVRQRTMAANALRAALSELGIVAAQGYEGLRELMAKLEEPGEEIPEVMRGALLVLAKHWQALDADERLLERQIAKAARSDQDARRLMEVPSVGPIIASTVLAKVPDAKVFRSGRDFAAWIGLTGKDHGTGGKHRPGRISKQGDRMLRAMLICGASAYLRHQKARGVSDPWLRELLARRPYKVVMVALAAKTARIIWAMLAKGEAYRDRASAPAAA

SEQ ID NO: 179646 - protein, 408 aa, unidentified
MIFVGDDWAEDHHDICVLDEAGKLLAKRKVPEGIEGVTQLHALVAAHSPEPAEVVVGIETDRGLFVQALVASGYRVYAINPLAASRYRERHTTSGAKSDPGDAKVLAEAVRTDRHNHRQIAGDSELAEAVKVLARAHQNLVWSRQRQLNNLRSTLREYYPAALEAFGDDLGSRDAMAVLGRAPTPALAKALSAAKIASAMRAAGRRRYLDSRAQEIREHLRGAHLEAPATLAEAYGAAVKATVGVLTEMNAQLAALEGELQSCFEKHPDAEIIVSLPGLGFVLGARVLAEFGDDRTRFADAKGRKCYAGTAPITRASGKSKVVLARFAGNRRLADACYRWAFASLTASPEARAFYDAHRAAQGPKAKNAHAKAMRALANRWVGILHGCLKHHTPYDAAKAWHREEAAA

SEQ ID NO: 179647 - protein, 347 aa, unidentified
MNYYAGIDVSLESSSVCVVDAAGKIVREAKVASEPEALIGYFRSLGFALARIGLEAGPLSQWLYRGMQQAGLAVELLETRHVQHALATAAVKTDRKDARGIAQLMRMGWFKPVHCKSLDAQEMRAMLTARKLLQTNLHRLEMSLRGILRGFGLKVGKVTRIGFADRIKELVDGHPNLQEIATAMLKSRNEALRQFDILEKRVRGVARSDTRARLLMTVPGVGPIVALTFAAAIDDPARFKSSKDVGPHFGLTPRKYQSGETDRTGRISKAGDGSVRFVLYEAAHVILTKPIKGCTELKSWGMRLVKRGGLKKATVALARKLAVIMHRMLADGTPFSTTPSVAPCSAS

SEQ ID NO: 179648 - protein, 334 aa, unidentified
MQNITLIGIDLGKHSFHIHCQDKSGKALLRKKFTRTKLMQFLATCPPSVVVMEACAGAHFMARCISDFGHETKLISPQFVRPFVKSNKNDFVDAEAICEAASRPSMRFVQPRTETQQAMRALHRVRESLIRDKVKTTNQIHGFLLEFGISLPIGDAVIKRLSLVLAEHEIPEYLSRLLVRLHTHYFYLVEQIAELKSELSQSINADDTAQRIMTIPGVGPITASLLSSQLGDGKQFSCSRDFAASTGLVPRQYSTGGKSTLLGISKRGDKNLRRLLVQCARSFIMRLERKHGKLAEWVREQLNKKHSNVVTCALANKLARIAWAITTQKKEYQA

SEQ ID NO: 179649 - protein, 354 aa, unidentified
MEETMKYLGLDVHLKSTVWCLLEADGTIAEHGKVATTVFGLRGLLQQLKPHGELSAGQEVGTLCYFVSDIFNDCGVKLLTFNAYQLRMIASSRKKTDKRDAYWLAKALQTGMTPHPVYLPSGEVRELRGLLSQRQALSRERVRWRVRARRMVQAAGFKPATGGSAKVTKSIEDALSVPETLPAYLADGVQRCLRMEKALALELKQLDDQLRQRVKNSDLVQRLMTIPGVGEQVALTLYATVGDISRFHSARELCSYAGLVPSVRQSGNSQTLGHITGEGSPRLRSVLVQAGHCLLWRCKSEQSLPLKALAERVHTHRQRRKIAIVAAGRYILRTAYYVMRDGTSYDPNKLRTAA

SEQ ID NO: 179650 - protein, 355 aa, unidentified
MNSEKYIGLDVHQATISVAVMDSMGKLIMESILETKATTILEFVAGLRGTLSVTFEEGTWAAWLYDLLKPHVDELVVCNPRKIALLKDGNKSDRIDARKLAERLRLNDLKPVYHGETGVRMLRELARSYLNLVKDQTRVMNRLKAMYRSWAIPCAGRDVYYARHRAEWLGKIREAGVRRRAEHLYQQLDMLQHLRQQARRELLAESRQHPITAKLRQIPSLGPIRSALAVALIRTPHRFRTRRQLWAYSGLALETRTSGEYRCVEGQIRRSKKQISIRGLNKDHNHDLKGLFKGAATRASVLPGPFQDFYQRSLAKGIKPTMVRLTLARKIAAITLTLWKKGENFDAEKLKSQAA

SEQ ID NO: 179651 - protein, 312 aa, unidentified
METKFVGIDVSKSVLDFDCLPVSATRQFTNDAEGIAALVNLLKDSGVDRIVIEATGGYETAVGSALAVAGLPVVVVNPKQVRDFAKAMGHFAKTDRLDAKVLALFGERIKPPLRKFPDEAQRALADVLGRRSQLVVMRAQEKARLAMVTTVARKSVEQHIAWLDKCIAKLDVDLGDRLRKSPVWCSKATLLDSVPGVGNVTTFSLLAQLPELGTLNRQKIAALVGLAPFSDDSGKRKGVRYIRGGRADVRCALYMATLTAIKHNPPIKAMYDRLIKVGKPFKLAMTACMRKLLTILNAMLKTNQTWKIQPSS

SEQ ID NO: 179652 - protein, 321 aa, unidentified
MVYVGVDLHRKVAHVAARPDEMLRVFGELDHQPLEVAFEATLGWGWFADLLADAGIPAHMGHPLATKAISSARVKNDSVDARTLAHLLRTNLLPEAWIAPPEAREARRLARMRTSLVRIRSQLRCQIHAVLADHGVHSEVSDVFGKAGRIFLEELRLPPISSDRLETNLRLIDALTDEVAEAERQLRQLFRGDERIRRLMAIPGVGFITAVVVVTEVWDITRFASPDRLCSWAGLTPSEHSSAEHTRRGHISKQGSRWLRWVLVEAAARPQTDPSLRAFIDRIASRRGTKIARVALARRLLTLCYYALRDEGGCRAFPLAG

SEQ ID NO: 179653 - protein, 313 aa, unidentified
MSHPCYVGIDVAKAQLDLAVVPAGAPRRFPHDAGGLTALVRHVTTLAPALVVLEATGGYETDVATALALAGIPVALVNPRQVRDFAKALGRLAKTDTLDAAVLAEFAARVQPAPRPLPDATQQLLTALVARRQQLLEMLTAERNRLALARGPVRRDLQAHIHWLEQRVKASNDDLRTTLRQSPLWRATEQLLRSVPGIGPTTAAVLIAQLPELGRLTRQQLAALVGVAPLNRDSGPRHGPRTIWGGRATVRGPLYMATLVATRYNPVIRAFYQRLRAAGKPAKVALIAAMRKLLTILNAMVKAQRPWAPQLDS

SEQ ID NO: 179654 - protein, 348 aa, unidentified
MNFKRVGLDTSKAVFTLHGVDHDEKAVLRRNMRRAEMEAFFAKLSPTHVALEACGGSHHWGRRLTAMGHTVQLIPPQYVKPFVRRGKNDRNDAEAISEAAARPDMPSVPVKSAEQQAEAIVLSARELLVRQRTQLVNAVRGHAAEFGIVAPKTISQLPGLLETVAAAKTVPVTAKQMLAFLGAQVAQLDDRIAELECRMKQQHKANPVSQLLAEVPGIGPVSALSLALTIDPSRFTSGRHFAAWLGLVPKEHSTGGRQRLGGISRAGNERLRQLLVVGAMAVIRYAKPGSKTASAWLLALLERKPRKLAAVALANKMARIVWAMMATGEAYRGSKKAAASVAGAAAAA

SEQ ID NO: 179655 - protein, 340 aa, unidentified
MQETTKFYLGIDVSKSWFDISLMLVINHQKQPIQTTRFDNNAEGIKLWHKWLKEQKVPFNQSSLLVIENTGVYHRLIWRFCSKHNMPLYIGNAAHIKWSLGITRGKNDIIDSQRLCNYACKEADDLKTTPVLNIIFMQLKDLMTARTKLLSQLRSTQVFIKELKLSNDAGVQKILEKAHTAAIEGLKSSIQQIEAEMQSIINNDETIKTNYDLLITVPGIGNFTAMYLICCTNNFNGKVTGKQLASYAGVVPFGNTSGSSIKGKNKVHKMANKDLKKLLHLCALTTIKYYPEFKDYYERKKLEGKHTMCILNAIRNKIVLRAVAVVNSGEAYVDNYKKAA

SEQ ID NO: 179656 - protein, 400 aa, unidentified
MMTPDDIDVWVGLDVGKSAHHAHALDHDGNTLYDKPLKQDEKAIRTMLGKLSKHGRVLLVVDQPNTIGSLPLTVARNMGIAVAYLPGTAMRRTAQLLPGDAKTDRRDAHVIAWAALKLPETLRDAGPDDETLAALKLLAGHDEDLAHESTRHVNRLRSLLLQTHPAFERALKGERITRDATLALLERYGGPAGMKRAGIEDVKDWAKSNGLRAGRIIDDMFKAIGEQTVTVPGTLMAETIIPSIAHDIKTIRDRRREVGRQVEKLLEDHPLLTVLTSMPGIGVRTASNILLGIGGDIANFKSSAHLAAYAGISPVTGQSGTSIKGERPSRRGNKRLKNALWQTAFVASTKHPPSVAYYKRKREQGKHHNAAIICLARRRCDVIYSMLKNGTLYQEPALVA

SEQ ID NO: 179657 - protein, 416 aa, unidentified
MSKSLFCGCDVALENNTVWLMLDDGSQPTKLFGVDNNQLGAEILVERIYAIAKEHCVSDILIGTEATSMYDWHLLEYLSETKLSTEFSLKLYRFNAKWIKNFKKSLVPRGKTDPIDSFAIAERLRIGRLPKEYAPDIKYQPLRKLTRFRFHLMQQITREKDFFLANLFLKASAYSSVKPFGSTFSATSLAVISDFFSVDELATASMDELTDFILREGKSRFSHPDEIVANLKRVAKESYRLKPELAPSVNLVLASTYNNIRCYKEQVKLVDAAIAENLKAFKHTLDSIPGIGPVYAAGIIAEIGDVHRFPNDSSLAQFTGLTWPKYQSGKFQAEETRMSHTGNQYLRYYLVEAANSVKRYDATYKAFYEKKYAEATKHHHKRALVLTARKLVRLVWTLLTKQALYQPGYSSTLLTI

SEQ ID NO: 179658 - protein, 443 aa, unidentified
MSRKKRTHLRGKRGQAFADKIRGIPMEQILCVSLDIHKYFHVVMLHNGLGEMVTPTFEIDIFQSGFELLCQVVDEAIVRTEAQVVLTGMEPTSHYFENLARHLLKRPQPVTLINSYAVKQNRDQQMMHHEKDDEIDTAAIGDLLRRGEGTPFKPATGVYLELQHLDRVRLSKVKMRTMLQNQIIGHLDRIFPGLVIIGKEAKERCPPVFSTDFWECKTLQHLIRVCPDPRTLAAMSPQDLVNAFRAQQYRLNRIRAAKIIAYTKKILLPDAELVAIRSELLQHDLALLEEVEGHIVQMEDRMRTLLAETPYPIWVKLKGLSDVQVARLAASIGDPANYDYAAQVFRRSGLVSGRNDSGTRQRKGKGKGVVKVGDVYLRRALMDACMTLLLHQPVLHQYYTMLKVSKHPGVARVATARRMIGILWAILRDRHSLTLILNKGATM

SEQ ID NO: 179659 - protein, 352 aa, unidentified
MKCDKYMGMDVHQATTVVAVMDAEGTIVLETIVETQAASIIRLMQSLSGPLHVTFEETAQAEWLYEVVRYFVAEVIVCDPRRNKLLSEGSKGDKVDARKLAELLRCGMVRAIHHGDGTRQLKELVRGYETICRDTQRTMVRIKAIYRARGIRTPGRSVYQTKQRQQWLQQLDELGVRQRVGWLYEQLDHLKPLRRQAKQAMIRESRKYRGVELLRTIPQVGAIRAALIVATVDTPHRFRTRHQLWSYSGLAVVTHMSSEYELQQGRVVRSRKPIATRGLNRNCNRRMKDVFIGAAAGGSQTEPYRSYLQALQDKGIRKEMARLTLARKIAAIALRIWKKGETFDPKKLNWLT

SEQ ID NO: 179660 - protein, 400 aa, unidentified
MSVVGWDWASQAHDVTVLDDAGAVLDRWAFPHTEAGWVMALARLRCHGEPGDLPVIIEKTSGLVVDRLLAAGHPVVPVHPNSFHAARPRWGASGAKSDPGDSYKLADYLRTDGHRLRRLEPADPGLRELQALVRLREDQVRARTAATNQLWAMLGNYWPGPRDLFYCLASPIALAFLTAYPTPASAARLGEARMAAFLRRNSYRGGTSPALLLARLRAAPQAPLALPAATLTAMVGAHVQQLRSLQAAITGIEHLIAVRVAAYPRTRLLAPLPGAGTINLAQLLAEVGPILDRATSAEQAASECGTAPVTRASGKTTGVYFRWAASTRARKAITAFAHNARMQSPWAAKLYADARARGKRNPHATRIVARAWIRVIWACWHTGTPYDPATHRAARQLLTR

SEQ ID NO: 179661 - protein, 342 aa, unidentified
MKQYVGLDVSQRETSLCVVDDAGRVVYEGKVKSDPGALADVLHKRAPQAERIGFETGAMASWLWHELRRVGLPVVCIDARHAHAALSVRINKSDQNDAKGLAELVRVGWYREVKVKSEESQRVRAMLVARSRLVAIRRDIENQVRSMIKEYGLLFRRAIGRQFRNQVIELLGKDHQLRGIIDPLLLIHESICLQQTNFDEDVRRLAKSDETTRRLMTVPGVGVITALTFRHTIDDPSRFRSASKVGAYLGLTPRRNQSGETDMNGRISRWGDRLLRTYLFEAATVLLYRTKKWSSLKAWGVKLVKRIGMKKAKVAIARKIAVILHCIWVDGTSFEWGQPKVS

SEQ ID NO: 179662 - protein, 347 aa, unidentified
MIVVGIDPHKQTHTAVAIDAATGAVRADLTVKARTVGFERLVAWARELDPERLFAIEDGRHVSGHLERHLIGRGERAVRVAPKLMGESRRTDRVRGKSDPIDATAVARAALRHPDLPVATLAGPEREVGLLAAHRESLVAERTAAQNKLRWLLHDIDLAPGPRTLDRFCPLERLEAALEAMQPTADVRICLELVERCRQITVRANELEREITELVRAHAPALTALPGCASLTAAKIVAETAQVGRFPTEGHFARYAGVAPVPASSGARHRHRFNRRGNRQLNAALHRIAVTQIRMHQPAKDYMAKKRAEGMSKTEALRCLKRRLAKVVFKTMTSMNQPTDRLTAVAA

SEQ ID NO: 179663 - protein, 443 aa, unidentified
MKRNRQRHLRGRRGQAFADLVRGVCPEQILCVSIDVSKDFHVVLLHNGLGEIVTPSFEIDIFHTGFDQFYQAVEAAIADSAAQVVLVGMEPTGHYYENLARHIREMGQEVTIVNSFSVKENRRQQMMAREKDDDIDVAAIGDLLRRGEGSPFRPPTGIYLQLQQLDRARLGELKIQTIYKNRVIGHLDRIFPGLILTKAATKERYEPMFATDFWHCQTLQNLVRICPDPRELAALSPAGLVALFHQHDCRMGPRTAARIITYAQKVLWPDPAVVTIRCQLLATDLQTLDQVSVRIAHYSQQLQQKLAQTPYQFLTRVKGLSPIRVASLAAAAGDPANYRFAGQLFRRSGLVSGRNDSGARQRQGKGRAITKTGDIYLRRALNDLLNGLILHQPILRTYYHRLKQTKPVGVARVATIRRAVGILWATLRDQRADSLLLRGDTMT

SEQ ID NO: 179664 - protein, 353 aa, unidentified
MTIVADHYAFVTGVDTHARSHTLAIIDARSGRELDTRTFPSTPSGRGRVARWLQRHCGTSSGVLVAMEGTNSYGATLRELLSSGGYRVIEAPKPVRSLRRGQGKSDQLDAVRAARAVLSLEVDRLTEVKSDPIAQALRILLTARAGMTRERTASINMLLALLRTIDLGIDARRTLSNQRIKTVAAWRCRPEATPTRIARGEASRLAKRILEIDRHLKDNLIELTVLVQDAAPELLAMPGVGPVSAAVILGSWSQPGRVRSEAALAALAGTCPLPASSGNTTRHRLNRSGDRNLNRAFHTITLVRMSHDERTKAYVQRRTLEGRTKKEIMRSLKRYVTRQVYRTLAARSRVDKL

SEQ ID NO: 179665 - protein, 415 aa, unidentified
MEIVYPRVAAIDVHKKQITVAVRTPGERAWQRRQQLRKLPTYYRSLREMTAWLIEQGVTHVAMEATGIYWKPVFHALTETDDLKVLLCNAHHVKNVPGRKTDANDAVWLAELCEVGLLRGSFIPPADIAAIRELTRYRKKLIEERTRETQRLTKVLEDGGIKLDSVASHTLGVSGRAMIEALIAGERDPHVLAQLAKGTLRRKIPDLTMALAGRFAAHHALLARLHLDHIDHLNTMIGRLDGQIESLTVPFARQMQLLMSIPGIGERAAQIIISEIGVDMSRFPTPAHLASWAALCPGNHESAGKRTTGKTRNGNLQLCSVLVEAAWSAFRTQTYLGARFRRLHRRFGKNGAKKAAVAIAHTILVIVWHVLTNNTEYVDLGTDYYTRRDDPETRKNRLIHQLQDLGYTVELVPAA

SEQ ID NO: 179666 - protein, 309 aa, unidentified
MNYSHFVSLDVWKKTFDASLMSADEKELSHKSFDNTPTGIQSLLDWIAGYHLSLSKLLFCAENMGSYVTELSVSSVSMGFSLALVCPLTIKKSIGLQRGKNDRIDAKRIANYAVLHYRKLELYKLPDKDLVRLRGWIIIRDNLVKQKVSSIKLLETFSWMAKLADVTESISFLEEQLKSIKERILEVEEDMEQLIAASTSLYTNYLLLRSIKGIGIINAIVLLCVTDNFQRFDNPRKFACYCGGAPFEHTSGISIWGKTQTSSLALYEGQKKRNNPGILLSVLTINKRSAIAYYHLFSRLDMLDLNGVH

SEQ ID NO: 179667 - protein, 415 aa, unidentified
MEIVYERVAGIDVHKRQITVAVRTPGQRGKRRTQVRRFATFYAALREMTAWLVGEGVTHVAMESTGVYWMPVFHALAEPDALEIVLCNAQHVKNVPGRKTDVKDAQWLAQLMEVGLLRGSFIPPAQIAVIRQLCRYRRTLVEERTREGQRLRKVLEDGGIKLDSVASDVLGVSSRAMIRALIDGERDAAVLADLAQRTLRRKIPDLTLALAGRFAEHHGVLCQLHLDHIDHLDAMIARLDARIAQATAPFADACHRLTSIPGVGEHAARAIIGEIGVDMSRFPTAAHLASWAGLCPGNHESAGKHRSGKTRHGNAHLCTILVEAAWATDHTRSRLGSRLRRLKRRMGKKSGPKAAVAVAHTILTIVWHLLAHGGTYTDLGADYYTRREHDPEQLAATLKRKIESLGYTVELSPAA

SEQ ID NO: 179668 - protein, 380 aa, unidentified
MKQDNKAKQNKGKVSVEAPQDTCDLGHRRWKVQREGLTVGLDVGDKISHYCVLNEEAEVVERGKLKTTPAALQPWIEALPAGTRVVLETGTHSSWISRLMEQARQEVLVAQPRKMPQIYACKRKNDRRDAEKLARTGRLDPNSMGPIRHRSAEQQADLAVIQARDALVRARTQLINTVRGLVKSTGEPLRGCSARSFARQAEEQIPQRLRAALLPLLSQIAALSEQIERYDVHVEQLAQRKYPETELLRQVSGVGPVTSLAFVLTVADRWRFRHSRDVGPFLGLVPAQDDSGESSPQLRISKAGNTYLRRLLVGSAHYILGPFGPDCELRRWGKKLSERGDKNARKRAKVAVARRLAVLLHKLWVSGEVYEPLPEKRAAA

SEQ ID NO: 179669 - protein, 323 aa, unidentified
MNKYSETFGIDISKDVFDCYGSTQGHLQFKNTESGFKKFQKLLRKDSLVVMEATGYYHYRFAQFLYHQGFLVSVVNPLSVKRFIQMKLAKVKTDKSDAKAICNYGLSQEVPLYNALTEVQSECLQLFRLLDSYLKKRTMTKNKLHGEDVLGIPSKHVYRSLKRNRKHLDTEIASIETKLLSLVKQDQQAQLTLLKSIPGLGVKTALFLIVITDGFTKFETAAQLCSYVGITPTIRQSGSSVRGRSSISKVGNKKLRNLLFLCSFSACKHNKSCREIYERIVNKGKSKKLALIAVANKLLKQAFAIAKSGNPYDDTYRSTLVKN

SEQ ID NO: 179670 - protein, 382 aa, unidentified
MPAYADPPPTPISADTIFLAFELSGTSWLVALHAPDADKVERHRLSAGVAAEVLGLIARTKARVTRRLGTTPRVACCYEAGRDGFWLHRVLEAEGIASHVMDPTSLQVDRRARRAKTDRLDAQALLRALMAWSRGERQVCSMVRPPSPEHEDERRLSRERGTLLKERLRLSNRIKGLCAAQGIYDYEPLGADRRERLARLVTGDGRALPGRLAAEIGRQLDCFELVLRHLAEVEAVRDARAAQAREEGGSKLATLLRLKGIGPELATVLELEVFHRHFANRRDVAAYAGLAPSPYASGGTSREQGISKAGNRRARKALIELAWLWLRHQPESALARWYRDRVGTATGRVKRIAIVALARKLLVAIWRYVETGLVPAEATVRT

SEQ ID NO: 179671 - protein, 378 aa, unidentified
MPSENTVHVAIELSFSSWLVAARLPGIQKVRLHRVEGGNTAALLTLIGELRSRASRELDRTADLACCFEAGRDGFWLQRLLSAHGIAAYVLEPTSILVNRRARRAKPDRLDAEGMLRVLAAWLSGDRHLCSMVRVPTPDEEDAKRPHREREHLVQERLRIENRIEALLFGQGIRRRPSLRSWERDMAELRTGDGRALPPLLRTELDRLRRRLVLVLELIREVEAERAAATAAQADDGAVQKITMLQRIRGIGPNFAAVLVREVLYRSFANRRQLASSVGIAPMPYQSGGMDRDRSISRAGNPRARTTLIQLAWLWLRYQPASALAAWFRERVGSLQGRTRRIAIVAMARKLLIALWRYVETGVMPEGIEIQTQAEITA

SEQ ID NO: 179672 - protein, 429 aa, unidentified
MQESPLSAPAEGVAAYVGIDWADQKHDVILRAASEPAKVEYRRLAQQPEALMEWVAELQQRFAGKGKILVALEQSRGALIYHLMGYEFLELYPINPSQLASFRATFSPGGAKDDRPDAELICELLYCHRDRLKAWKPDDELTRKLTFVNEGRRTAVDQRTQLANEMKSQLKLYFPLALQVLDNDCSTALAADLLLQWPTLDSLQKPSAHKLRKFFYAHNCRQEQKLLERLELIKAAKPLTPDLAVIEPTALRVQLLAQQLKSLLPYIARYEKLIAELFDAHPDSFLFRDLPGAGSALAPRLLTAFGTDRERFEHSMEISSLSGIGPVRRASGKKSGKHATVHFRSACPKFLRQSFHEFAACSIRYCSWAEACYQTQRNRGKGHHAAVRAVAFKWIRILFACWKQRVPYDPQRYQQALQTRGSEYAEITA

SEQ ID NO: 179673 - protein, 345 aa, unidentified
MHYIGMDSHISTLDFAVVNEAGQLVKAHRVATSVNGFMEFVKTVPPPRTIYMEEGTLAAWALETCVRFREKLVITDAKKNHWIGSSGQKDDSIDALKLAQLARGGYIKEIHHPVGQRRRFRELMIAYHDTVRSTTRIKNKIKAKFRQNGIQCTGATVYSEKHREEWKGKLPQEATLLLILDGLWRQLEQSEQTEKELLVAARDQAKQYPEIKHFEAIPGIGFIHAATISAMLETPHRFADKKKVWMYAGLGIMTRSSGGKVYSEKLSTDYNRLLKYTLKQAAEVATQTKDNPFRRKYLDMTLHGIAPHRAKLTIARDMIATMWAMWRKGEKYSPEIREKAACKQG

SEQ ID NO: 179674 - protein, 386 aa, unidentified
MQKAITYVGLDVHKDSIVVSLAEAGLRGRLREVREYGKVLNTPAALKAMATKLAAGGNELRFCYEAGPCGYGVQRQLSAMGHHCAVVAPSLVPRKPGERIKTDRRDAAKLAKLHRASELTPVWVPDPAHEAMRDLVRARLAAVRNIREARQQLSGFLLRNGYHYHRHPWTLMHRRWMADLKFDQPLHYIVLQDCIAAVEASEQRRDRLEAGIIAALPEWSLAPLVETLQALRGIALVSATTLVAELGDIARFSNPRQLMAYLGLVPSEHSSGRSRRQGGITKAGNAAARRMLIEAAWSYRFPARISRYQLSQQKRLPKLIRDIAWKAQERLCRRHRKLMRAGKPKTVVCAAIARELTGFVWAIATETSPANGKKGTGKPATMVAVS

SEQ ID NO: 179675 - protein, 420 aa, unidentified
MTVALPLTNPPLPAEALVAGVDTHKDTHHVAILDHVGRPVADREFRADGRGYAEIITFLRGHGNVDRVGVEGTGSYGAGLSRALATAGMTVIEVARHDRQARRRRGKSDPLDAHQAAATVLADTDTAIPKSGDGAVESLRILIGERRSAAKARAQVMNQIHALLITAPELVRHAFRALTGQRLVNTLAKTRPGTGGSGDPDVVARQTLKRLATRYLTMQAEIDIIEQQLGLLVRQVNPTLLSLGGVGPVTAATLLVAAGDNPERLRTRATFAALAGVAPIPASSGQRTRHRLSRGGNRHANAALHRIVLLRMRHREPRTMAYFERRRAEGLTNRDIMRCLKRHVANEIYAALLNPAADNPTGHELRAQRQQIGIPISILAATLGVPYQRLRRLEIGTRADPELEQRASLALAQLSPPETA

SEQ ID NO: 179676 - protein, 420 aa, unidentified
MKAWNEIKHYAGFDWAKDHHDVIVMDAAGKTVADFRFDHTASGWEEFSKKLASFPDVAIAVETKHGAVIERLMERECCIFPVHPRSAKGYRQRKVPSGNKTDRVDAWSLADALRLDGTHWKQLSAQDPLIKELRLLCRDEVALIRDRTALITQLRQALYDYYPAALEAFDDWTMPAAWSFVVSFSTPQILAKAGKRKWEKFLHVHKLGRPTTYQRRLEIFARAHQFAGSDAAVRAKSRLAVARAKQLLLLEAQLAEYRQEIRRLFAQHPDAKLFGSLPGAGDKIAPRLLAEIGDDRALFPDAQALQCLAGTAPVSYQSGQIHRVYLRRQCNKALRNAVHLWANLSREFCPWAATYYAALRAKGKSHACALRALGQRWLKIVWKMWQTHALYDPDLHARNQLKHGSWVLQLVNKTDASAKA

SEQ ID NO: 179677 - protein, 355 aa, unidentified
MSSEKYIGLDVHQATISAAVMDSQGKIIMESILETKAATILEFFAGLHGSLFVTFEEGTSAAWLYDLLKPHVTEVLVCNPRKIPLHKQGNKSDKIDARKLAERLRLHDLTPVYHGENGIRTLRELARSYLTVVKDLSRVMNRLKALYRSWAIPCAGRDVYYTRHRSEWLDKIPEAGTRRRAEHLYEQLDLLQHLRQQARRELLTESRKHAITAKLRKIPSLGPIRSALAVALIQTPHRFRSKRQLWTYSGLGLETRDSGEYHFVQGQPRRRKKQATIRGLNKDYNHDLKGLFKGAATRASVKPGPFQEFYQRSIAKGIKPTMVRLTLARKIAAITLTLWKKGEDFDIHKLNSQAA

SEQ ID NO: 179678 - protein, 323 aa, unidentified
MMGTTKAMKEGGDMDVIIDKGCGLDVHKETVVACVMGSGIKKEIRTFSTMTGDLFQLKSWLSEKGITHVAMESTGPYWKPVFNVLDDSFDVILANARHIKNVPGRKTDVKDSEWICKLLRSGLLAASFVPPKAIRELRDLTRYRRKLAQSISAEKNRVQKVLEDANVKISSVVSDTFGVSASRMIEAILAGDLNPEAISDLAVGKLKGKKEELKKALVGNFQEHHRFMIQASLDHIESLEKIIAGLDQEINRKLKDYHQEYELLQTIPGVKEQGAAAIIAEIGADMGRFPSEGHLSAWAGMSPGNNESAGKKKAERRPTAIRI

SEQ ID NO: 179679 - protein, 391 aa, unidentified
MLICGIDIGKYHHEASVIDGEGRLIGKSLRFTNTTDGGEKLLAYLSARNPQGENIVIGMESTGQYWLSLYCFLFDKGFQVNVINPIQSDAVRHLFLRKTKTDSKDSFLIAETIRIGRFSSTELAGEDLLCLRQLCRHRLDLVDYIADQKRKIIAVMDRVFPEYQTLFSDMFGKTSTELLNRAITPEEILALNTQELCDLLSAASRGRFGLAKAEEIQQAARRSFGITIGISAFTLQLRQLLEMIALLEKQLADLEVQIEQYLLQMRTFITTCPGIGNVLGATILGEIGDFARFPEPKKLVAFVGIDPSVKQSGEFIGTQNRMSKRGSPHLRRAIWLAATVAAFHDPVLSAFYQKKRAEGKHHNTAIGAVARKLTLIIYAVLRDNKPYIPTG

SEQ ID NO: 179680 - protein, 411 aa, unidentified
MEPLYRCVAGIDVHKKMLAVVVRTPQGEYVQRKFGTTKSEIGHLEAWLQQQQVNEVVMESTAQYWRPVWYGLEAHFKLHLTHPLKTRAPRGRKSDFRDARRLADRWHSGDLEESFIPDAEQRSWRWLTRSRVHLKRTLGMIRNQVEGLLEQGGIKLSAVVSDIFGVSGWAILERIAAGDSDVDQLVKEARGTLNRKKTKLREALQGKLDPLYRLLLRQHMTQAQLLWQQVEELNQALAEALKEHVAALCRLTRVPGINLYAAQELVAEIGPGAVAFPSPEQFASWVGVCPGSQETAGVNYSRRSAKGNRYLRRLLCQNAWAAIHTKGTFFAGLFARLKPKIEGKGAAWAVAHRIAKLVWLILHEGVEYVEKGTAPLNPRTLVRKFRRLVREFGQQGIDVKSLLEHELAATS

SEQ ID NO: 179681 - protein, 384 aa, unidentified
MDNVCGLDIHKDSVFACILKTNGEKIQTQFGVTTPELDRLRDLLVEAGVSRVAMESTSVYWKPLWRILSMDFHMVLVNPYLIKQLPGRKTDVRDAEWIATLLAKELVRESFVPDETQSALRQYERRLHRLNRQIVHAESQMDNQMQACNIRLSNHVSDIGGKSYRKVVQALIEGETRPEELLKLIHGRTVNRCGSDTLIAALTGFVTGVDRDMLRFYMEECLLYERQREECKSMEDICQEHYKEQKELLETIPGVSAQSAMCVLSEAGHDMATFPSASALVGWAGLRPRNQMSAGKIKGRKITHGNRFLRIVLVQCAWAAARCQGTRFALKYEGLKRRMPAQKALVAIARKLLVVIWNVLAKREKYRRNLYETASEDERKGKRH

SEQ ID NO: 179682 - protein, 347 aa, unidentified
MNLSRAGVDIAKSVFHVHAVDRHQKPGWQAKLKRGEWLDALCKHLAPDAEVGMEACASSHHWARKLQQRGFRVKLIAAQFVKPYVKSNKNDRVDAEAICEAMSRPGMRFVAVKSVAQQDMQAAHRIREELVGQRTAKANQIRGLVGEYGIVAPTGIQQLRCALAQWLEDAENELTEGFRVLLADLSEDLRYLDERIAKLDESIACDVRNDPVACRLLELRGVGPLTASALAGALGDGKSFTKGRDFAASLGLTPRQHSTGGKDRLLGISKRGDAYLRKLLVHGARAVLRHAKDRDDGLSQWLKALTARKHVNVATVALANKTARVAWAIVRNDMAYDPRLITGSHAA

SEQ ID NO: 179683 - protein, 341 aa, unidentified
MKLYGGIDLHSNNSVVAISDERDEVLYRKRLPNDLCTILSVLEPYREALEGLVVESTYNWYWLVDGLMDAGYRMHLANTAAIKQYEGLKYSDDDTDACWLAKLLRLGLLPEGYIYPKAQRPIRDLLRKRSQLVRQHTANLLSVQNLMARNRGASISANAVKRLDFDQVGRLLENEPLVLAAAGTLVVMRSQQEMIALVEKVARRHVKHSPAYEAFKRLCTVNGIGEVLGLTILLETGDIGRFERVGNYVSYCRCVDSKRISNGKKKGKGNRKNGNKYLAWAFVEAANFAVRFEPRIRRYYQRKRARSNAIVAIKTVAHKLARACYFILRDGKNFDVERAFG

SEQ ID NO: 179684 - protein, 487 aa, unidentified
MSSHVISLWRVVTSGEFLVSTGGRALVLLDANLVPPAAPPSAPSPAARVQVGIDAAITANHHVAVRRLGADGTVTTTRFVVPPTLSGLAMLTRRLADCPGVLAVAEPTSMTWLPLAAAVSDAGGALALVGSRHAARLRGAISGKNKSDVIDADVLARAGEVFDLVPLRLPGPGQLALRRAVTRRGVAVVDGNRCLRRLISLARWAFPDVWNAFGGSLPTAKTVLARWPHLEALAAARRSSLTAVVAEHTRGVPDVPARVEAIRAGARDWAAFWAGRADLDALAWDVSEYLSDLAVAADRVERATVAATAYWERLYGQDELLTSLPGMGPVTAPTVRAFLGDAAGFPTAKAAAGYVGITPSNWSSGTVTQPGRAITKEGPAVLRLAFYQAANAARRGDPQLAACYHRLMSERGHCHTSATVAVARKLVERTWTVLTRGEAYQLRDLEGQPITERAAKALVASRFTVGADVRARARARSAATHRAKLTR

SEQ ID NO: 179685 - protein, 427 aa, unidentified
MKYTQNEKILQITDETMIVGVDIASEIHYARAFDRRGVEIGKLLKFSNDLEGFVQFATWVRAIGERSNKSKVMVGMEPTGHYWFNIAQQLKDHSMKIVLVNPFHVKRSKELDDNNPTKNDRKDPKTIAMLVKDGRYMEPYIPEGIYSELRTAMETRWQIVKQLNTIRNRVKRWLSIYFPEFNQVFGDWEGKAAMIVLLDFPTPARILEKGLDGIIGRWKQDKLRAVGKKRAVGLLEAAKTSVGVREGIRAAENDLMFLLENYEMYMQQYEKTMNLVEQLAKQIPGLEEMVKIKGVGLITAAGFIAEIGDTSRFQHPRQIQKLAGLSLKENSSGKHKGKTSISKRGRRRLRSLLFQAIMPLVAKNQEFKELHGYYTTRSQNPLKKKQSLILLSCKLIRVFFVLLTKGIAYDPQKMMNDIKRPLLQEAA

SEQ ID NO: 179686 - protein, 359 aa, unidentified
MQKRLTKKDRFFNNINLTVDDGVYVGIDVHKTNCHIAIWLNEAIVLTFVTPSDNVAIAQMLSKLKPGLKQIVYEAGPTGFSLARTLRAASLPVAVIAPSKTLRPAAVQSKSDRLDCRKLAEFAAKDLLAEVAIPSKQQETDRQVVRLCNQLGDKRIRIKQQIKSFLLQHHITEPAGLTRWTKRAVVELKEIELCPEMRFSLDVMLDELSYLQSQIKRVEFQLKKIFSKDRHARYIKILQSHPGAGPITARQFHAEVFSQNRFSKSTQLTRYLGLCPRVSQSGQKRIDGRLMKAGQIKLRAHLVEAAWAWVRVDPAAKETFRRLLANTGEPNKAITAMARRLAVHLWKMLCDDKFYRKTA

SEQ ID NO: 179687 - protein, 400 aa, unidentified
MISVGIDVSKGKSTVCILKPYGEIVSKPFNITHTQKDLSELSSMLFRLNDEVKIVMEATGIYHLPVLTYLQEKGFFVSVINPYLMKSYRNESLRKAKTDKIDSRIIANYGIDHWFKMKEFQTSGEIYEELKLLGQQYRHYMKLHLLSLAELTHLLDLTMPGIKNLLASWNETNRKDKRSDFVERFWHYDVITSMSEQEFTEEYILWAKEKKYVPSQEKAKVIYTLAQESIPTLPSETSSVKMLVTEAVRVLKEVDETLGLILSRMQEIAKTLPEYSVVREMGGVGNTLAPKLIAEIGDVRRFRNGKALVAFAGIDPPPYESGQFVGCNRKISKRGSASLRKVGYETMRSLKMRSRPEDPVYRYVVKKESEGKSKKSAKIAGLNKFLRIYYARVTELYKNI

SEQ ID NO: 179688 - protein, 428 aa, unidentified
MLKHPTEEDPAEAFAAFLAIDWADEKHAFCLQVVGQSKIEIGELEQKPHVLGPWVAQLRKRFGGRPVAVGLEQSRGALIHGLLAYDFLVLFPIHPTTVAKYREAFKSSGAKNDPLDAGQILEILTKHQDRLHRLNPDTVETRLLGRLGEDRRKVVALRTAHIQAQGANLKEYYPQALELTNGNLSSRLACDLLLKWPTFEQFQQAKPSTIKAFYYGHNVRSPAVIKRVLALAEQSQPLTTDPAIVESGSRLSQMYARLILTLNPVIEQYDQRLQQVFDAHPEAKLFRGLPGAGPVLAPRLLAFFGTDRSRYAAALNVQSFTGIAPVTKSSGKSRVVYARAACPKFDRQTFHEFSRLSVTHCQWARNYVQYYTAKGKKYHTIIRALAYKWIRILFKCWQERTPYNEDKYLETLEKRGSIFATWHLQNTP

SEQ ID NO: 179689 - protein, 332 aa, unidentified
MLYAGVDLHRRSLVVAVEDELGKEVAMRQFACEAAQAIKEFFSGLGEFRAVIEASSSYRWLYELISVHGQVVLAHPYRLRAIVAGRAKTDKLDARLLARLLRAGLIPTAYIPPADYQALRDLARARARLSREATHAKNELHALLARANLHSPYYNAFCQRGRQWLAGQDLPPVARGIGDELLRRLAHFESEISRVDAELQGLSEHFPEAEALTILYGVGLYSALLIIGELGEPWRFGDSRQVGAYAGLTARVTQSGSSCRHGSISRQGSPWLRWILVEAAMKLVRRDVQLGNFYQRIRKRSGAKIARVAAARKLAEICWQRLMRWHGEHPAA

SEQ ID NO: 179690 - protein, 359 aa, unidentified
MEAQRKALSFKGQNIYIGIDVHLKSWSVTLMSEATQLKRFSQSPDPDALYAHLVRNYPEAEYHSVYEAGFCGFWIHYRLVGLGIHYIVVNPADVPTTTSEKLRKTDAVGSAKLARSLRAGELKGIYVPGSESLETRSLIRLRDSITKDQTRLKNRIKSHLRYLGIEIPEEFSGPGRCWNRRFVVWLKGAETGTAYGRQTLDFLVRQYEALRGQRLEMLRAVMALSRTERFEKPLENLMTVPGIGQLTGMSLLSEIDDIRRFKSADQLAAFIGMIPMCHSSGEREGVGDITVRRSARLRSVLVEASWVAVRQDPALSMAYGNYCKRMAPGKAIIKIARKLVNRIYFVMKRNQPYVKRVVA

SEQ ID NO: 179691 - protein, 407 aa, unidentified
MLFVGDDWAEDHHDVCLQDGAGRVLAARRLPEGVAGIARLHELVAGHLDGDDPGQVVLAIETDRGPWVRALVAAGYRVFAVNPKQAARHREVVAVSGKKDDTFDAAALADMARTRRHQLREIAADSDEAEAVKVAARAHQKLVWERTRHALRMRSALREYFPAALEAYAELTLTGPDTLELLAKAPDPAAAARLTIPQISAALKRARRRDVAGKAQRIQAALREQHLGQSEIVTEAYAASVTAAAAVIAVLNEQIKTMEARVESLFRRHPDAGTYLSQPGIGVITGARMLGEFGDAPGRYADAKARRNYASTSPLTIASGKKKTVHARYIHNDHLVSAMHDQAFAAISASPGARAYYDELRARDIDHTDALRRLANRQAGILHGCLKTGTAYDEHTAWGHRSQPAAA

SEQ ID NO: 179692 - protein, 417 aa, unidentified
MDPQISFNQVVSRGCGIDVHQKVVVATIGGEGLTKATREFGTFTRSLTELKDWLLENGVTHVAMESTGVYWKPVYHVLEPTTLKVWIVNARHIKYVPGHKTDKQDSAWICKLLLAGLLKPSYIPAKEQRELRDLTRFRTKMIQDVASEKNRIVRILEDCNIKLSSVLSNTQGVVATKLIDKLCEEGTITMSDIEEVYHKRLEASKEDLYEACQGLIDKHHIYLLGLIRQDIASTEAVIKNLNGRIKEVLSGYDNVLENLKAIPGLSTKTVEDLVAEIGLDMSVFPTEKHLASWAGMCPGNNESAGKKKSGRTTHGNKQVKAVITEAAWAATRTKNTFYSARYHRVAARRGKKRALIAVGHSILKSVYHVINGMEGYKELGADYVTQRVEKRRKLYLKKELEKLGYAVQLTPPVPQAG

SEQ ID NO: 179693 - protein, 431 aa, unidentified
MLKINPLSTLYVGIDVSSKSNYVCALDFYKNKYINSSFANNQPGAEELALKILECLKEHPDITTIVAALESTSVYSIHIANYLSSCEELMRFKPYVFVLNPKCTANYKKSYIGLGKSDPIDAFVIADYARAGNIESEPWRGSQFLALKRLTRHRLHLVECMTREKTYLVSNLYLKFSELQMLEGDDQPFCDIYGATSSSVLMEYFSPEEILNSSEEDLIAFLAKKSRNRIKDISKTADLLKKAARDSYRLDKALYEPLNVSIASSFNCIETFKREIKVIDNAIEKEIKGLNPNAFIILQSIDGIGPVFAGGIIAEIGDITAFHSSDALAKYAGLTWKSNQSGDFDGEDTPMIKAGNRYLRYYLGEAANSMRKHNVEYGTYYRKKYNEVPKHQHKRALALTSRKFVRLVYGLLARNQLYSGVSLDTSIKDSN

SEQ ID NO: 179694 - protein, 323 aa, unidentified
MNFIISVSTPLEKLDVDVLRPDGRHRTKKFANTTKGHDELVSWLKGHKIDHAHICIEATGTYMEPVAECLYDAGYIVSVINPALGKAFAQSEGLRNKTDTVDARMLAEFCRQKRPAAWEAPHPLERALRALVVRHQALTDMHTQELNRTETAREVQRPSIDAHLLWLEAELKRLEKQIKDLTDDDPDMKHRRKLLESIPGIGEKTSAVLLAYIGLKDRFAHARQFAAFAGLTPRRYESGSSVRGTSRLSKAGHVSLRRALYMPAMVATSKTEWGRVFRDRLAANGKKGKVILGAMMRKLAQVAYGVLKSGVPFDAARHNPVAA

SEQ ID NO: 179695 - protein, 426 aa, unidentified
MQPHYNCVCGVDVHKEFLQVCLLKREEDPVSFRVFNNFSGIQALKQRIEEEGCECMACESTGVYWYRLYLAFEGQIRVIVGNAYQIKSIPGRKTDVRDAQWIAELAMNGLINPSRVFQKNDRELRELTRSRESTVKSRTQIKNRIHRILDSAGISLGKGVRDIFGKSGVHLILGLLNRAKADDIIKTLPSARVKKKAEILREILSGSLSDLQIILIKRNLDMMAHINEHIRALDEQIIARMTEQDTIRDVEIACSIPGINVTSAVTILAEIGDYHDFENAEKLASWAGLVPSVYQSAGKNCSGKITKHGSEHLRWILVQVAKAAGRTVNTTFRKFFNRIAYRKGGNTATVALARKILCILWHLLKNKELYVDPLKNAKPTKPLVIQKFSKNSSSDVQQAIDFIIECGFEVIHPDSSLDQKFREVSH

SEQ ID NO: 179696 - protein, 475 aa, unidentified
MNSTVLPASVQPNIDCNYIGLDVHSDNVVVCVRRNILKVGGELQGKTIKLKKVSICDSQDSLTQLLSEYADGQQHVMTAESTFNWYWLADIAEEHGWNFRLADPCTVSQANIKAANDETDAQYLAERLRMGSLKSTTVLPRALRGARDLTRHRMRVMQEVSEKKIRLSNLYHNHCAHPLHGKQLQDLQFAYEENGIDAVLASGISGNGSELIIADLLAGLHDAQMRLERIEAQVYERLDQIDTYREGRLLLKNSMKGCGDVLSAVIITEIGDISRFRTMGEFVSYCRLAPASKLSNGKSKGQGNAKNGNAYLSWALTELATLMARYNKSIQHYLERKVKKTGLRVICIRALAAKLARCVYQVLRKKEAFDLLLAFGGSHPQEPSASRAKTEESSQRKTATKSSGTKVTGMTRTVVTDKKKIPGKKPALAVTQTQRLKSAVGQKTASVASRLKAPCALTTTKPAYADRGCVKSRRE

SEQ ID NO: 179697 - protein, 396 aa, unidentified
MTKFNAESTSIHTLGAAVESKQSSLHTAYVGLDVHKETIAISVADSGRQEPVYEGEITNTPKRVERKIQQLSERYGGGLLQFVYEAGPCGYGLYRQLLASGHDVQVVAPSRIPKAPGERIKTDRRDAIKLARLARSGDLTPVWVPDTEQEAMRDLTRARDDMKAQERKARQQLNAFVLRHGHHWPKGRSRWTQTHFNWLESLRFEHDWQQVVLQEYIDAVRAATRRVADMMAQMERALPQWSLAPVVEALVALRGIDKLAAMVLMAELGDISRFDSPRQLMGFLGLVPSEHSSGSRRRQGAITLTGNSHARRMLVESAWSYRFPARQTGHLKRKAANAPEEARAVAWKAQKRLCGRYRDLTRAGKNTKLVCVAVARELAGFIWDIVCRVMPAPQTA

SEQ ID NO: 179698 - protein, 339 aa, unidentified
MNITTVGLDLAKSVFHVVCFNDRDKEVKKRMLRRNQVLEFFTQLPPCRVGMEACASAHYWGRQLSDIGHDVKLISPQHVKPYVRGNKNDYNDARAIAEAANRPSMRFVGIKTVEEQDMQAIHRMRSQCLRDRTALSNSTRGLLGEYGIVFAKGVPTLRKKIPEILEDAENGLSLDFRNLLARRYEQLVEIDEHISFYTKKLERVSREDDPCQRLQTVPGFGPIVASAFRSDIGDGRAYARGRDAAASIGLVPRQYSSGGKNVLLGISKRGNKYLRTQLVHGARAVVLQAANKDDPLSRWINRIREERGWNKAVVALANKMARIGWAILRHNTIYQPSKT

SEQ ID NO: 179699 - protein, 413 aa, unidentified
MDMFCGIDWSEDHHDVALVDATGQVLAQRRIPHSAAGFVELLDLLAAHGDTAQAQVPVAIETPRGLLVSGLRATGRPVYAINPLSVARYRDRRTVSRGKSDPGDALILAHLLRTDRAAHRPLPEDSEQARAVAVLARAQQDAVWDKINTHNRLRSLLLEYYPALVEAFTAKRGGIMRPEARALLAAAPTPAAGGALTRPQLVRILRSAGRRRLLHAHAEDLHTALRSDQLRQPAAVEQAMGRHAVALVALLETACRNAADLAVAAEEAFNAHPDAAVIGSFPGVGTLTGARLLAEIGDDHRRFADPRGLKAYAGSAPITRASGRSRSVTTRRIKNQRLAAAGYAWAFSALTASPGARRHYDRRRAAGDSHTAAQRHLLNRLLGCLHHCLTTGKPYREDIAFPTGEYADQTAAA

SEQ ID NO: 179700 - protein, 351 aa, unidentified
MPRTSSVHAVTTIGMDMGKNTLHMIGLDSRGAIVLREKVSRGRITSRLANLPCCLIGIEAGLATHYVARELAALGHNVKQVPPTYAKPFRQGHKNDFRDAHSVAEAVQRPTTRFVPAKTDEQLDLQALHRVRSRLVSERTAIINQIRGFLLERGIIIRQGLRFLRQALPDILAKRTDVLSPRMVRIVADLASDWRQLDERIEPVTDEIETLAKSDDGCRRVMTVPGIGPIISSAMVAAIGNGAAFARGRDFSAWIGLVPKQMSTGDRTILGRITKRGNGYLRTLFVQAARVILLRPASWPKHSFGVWLARAAQRLHRNVLAAALANKLARIAWTVLAQERNYEARVTKAAV

SEQ ID NO: 179701 - protein, 369 aa, unidentified
MDKDTTYVALDDSKRKIVAGILRPRDAEPELREIVNDPRQIRRLLERLKREGPVAACYEAGVSGYDLHRQLTALGVECAVIAPALTPRRPGQRIKTDRRDAAKLVRLFRAGELTAIHVLAESEEAVRDLVRCRDDLRRDVLRWRHRVLKLLARHGRAYLSGKNWSQGHWRWIREQRFDLPPLQRAFEATVFALEQALARQAELDKELEAVAGTAPYREPVRWLRCFRGIDTLSAIILLAEIVDFQRFRRPRELMAYLGLVPSEYSSGESQRRGALTKAGNSHARRVLVEDAWHYRHRPTIGRALASRSQGQPDEIVGQAWRAQQRLHRRYRHLVGHGKRPPIAVAAIARELVGFIWAAMTRPENRRQAA

SEQ ID NO: 179702 - protein, 406 aa, unidentified
MSAPGQVTVWVGLDVGKESHFADVLADDGERLFSRAVANDQADIEKLLDRAAGHGTPGLVIDQPGSIAQLVLAVAARRGTPVAYVPGLVMRRAADLYPGEAKADRRGAYIIADTGRTRRKQVHWLGLSSDELLAQLRVLNGYDIGLAVGVTRLSSRLRDALTSIAPGLERALGDRLHQAGVRDLLAKYPALTALRAAGRAKIAKVTGKRSPRLAGKAADAVMAAVAAQDVTVPAEAATGRVIAGLAAGLGRLHARRDALTAEIEEAFLARPFGEILASMPGIGPRAGARILAEIGNGSGFATGSKLAAYAGLAPAGRQSGTSLNAATRSRRGNHRLKNAMFLAAFAALRDPESKAYYDRKRAEGKKHNAALICLARRRCNAILAMLRDRKPYQPRTTATPGLADAA

SEQ ID NO: 179703 - protein, 354 aa, unidentified
MNDIKYIGIDVHQATSVFAVRNGHGKLIAEGIVETQPTPIIDFLKGQRGTVWVTFEEGTYANWLYDVLQPQVAKVVVCDPRKNILTGNKSDKIDAKRLSELLRLNALTAVYHGQNSTRTLKELARSYVSLQQDSTRVMNRIKALFRGRGIPCRGTSVYQPKHRKEWLETLKDQGPRHRAERLLKQLDLMRELCLEAQKDLVRESRKHKSYKILREVPGLGPIRVALILAFVMTPHRFRNKRQFWTYTGFSVVRRASAEYEISQGELRRTQRKPLPRGLNHSYNHVLKNVFKGAALTAAYRGPFKELFDQRVANGTAPNIVLLILARKIASITLALWKKGESFDIERHRVSEQTT

SEQ ID NO: 179704 - protein, 361 aa, unidentified
MKIMTGIDLHSNNALCGLMDESGQRLVHKQLPCELPAILQLLEPYKDRIATVAIESTYNWYWLADGLQDHGYHVVLANPARMKPYDGLKHTDDVSDAFFLTELLRLKILPTGHLYDRKTRPVRDLLRRRLMLVHQRTTLILSFKSLNERTLGRRIALSRVKTMPVAEARALFADPADQLLSGTEIELVGRFTQAIEQLEAHVLGVAGKWDTYQRLQTLPGIGKILGLTIALETGDPKRFATAGNFASYCRCVKSRRESNGKKKGENNRKCGNTYLAWAFVEAAHFARRYNAACRRFYDRKKQPTHPVIATKALACKLAKAAWHVMAEDAPYDAERVFGPGQKTDFGETGREPAKGSGHPSQ

SEQ ID NO: 179705 - protein, 455 aa, unidentified
MPKPKRIRNARTSPVPRILEPDAAGIDIAATEVYVAVPTDRDPEPIRCFSTFTDDLHRLADWLRACNVQSVAMESTGVFWIPLFQILEDHGFRVCLVNARHVKNVPGRKTDVSDCQWLQYLHSVGLLRASHRPAQTICAVRSIWRHRESLVQMAAVHIQHMQKALDQMNLQLHHVISDISGTTGLAIIDAILDGERNPETLAALRDPRIVASRKTIARALVGDYRTEHLFTLQQSLRAYRQYQQWIAACDVEIERQLRVLPNNLADDQKPLSKSKDHHKPRRNEPSFDLRSQLYRIFGVDLTEVPGVSSLTAHALLTEVGPDLRRFPNAAAFASWLGLCPDNRISGGRVLSVVTRKVKNRLTMALRMAAQSLHRSQSHLGQYFRRMRVRLGTPAAITAAAHKLARILYHLITTRQPYQESTFAAMEERSRHRQLLRLKKQAASFGFQLVPGSSVP

SEQ ID NO: 179706 - protein, 355 aa, unidentified
MDNTKYIGMDVHTETISIAVLNSAGKLVMESVIETKALTIIQFVQGLRGDLHVTLEEGTWAAWLYDLLRPHVNQVLVCDPRRNALLKVGNKSDRMDARKLAELLYMDKLNAVYHGEHGVRTLKELSRSYLAISGDLARVMTRLKAVYRSWAIPCAGKQVYAPRYRAEWLGKLSEAGVRRRAEIYYEQFDALRSLRQQVRRELLAESAKHKASKLLCQIPSIGPIRAAQLIAILQTPYRFRGKRQLWAYGGLAIETHSSADHRYVKGQLQPSKRQVSLRGLNRNHNHELKNIFKGAAIIAATKPGPLQEFYNALVAKGMRPEMARLTLARKIAAIILIVWKKGVSFDAEHLKPQTA

SEQ ID NO: 179707 - protein, 505 aa, unidentified
MIQRILAGYGAIDIGQEKIFIACSGEEAVRSFGTFSAELELAADHLVQRGIRRVAMEATGVYWIPLHDLLEKKGIEVTVFNGAHARNMPGRKSDVQDCQWHAMLHSHGLLVSCFIPSEEIRQLRCYYRLREDHLSIATEHIQHMQRALDLMNVRLHVVLSQLHGVSGLRVIKAILAGERDPVALSALCDCQILKRKRAEVIQSLQGHWQEHHLFALGQALESYEFCLRQMVACDRQIEALLQRITKDQPPQTPAPGQKVKVVRHNAPQIEGLHRFLITMTGGCDATQLPGISPLGFMKLIAEIGTDLRKWQTAKHFTSWLGLSPGSSQSGKRRKRLARKKTVAGQIFREAVLSLAKSKHLALGAAYRRYQGEKGQSRRHGRHCPQAGRPLLQPLHQGLELCGRRRPPLRRKIPSANTPLLGKDRKSLRLPPRSGTCFPLRFFGSEAGAGGRWKLTADAGVFSTLRYKKEWPEPASISKLRAIRKRREDLHRMVAVPVIRRRVFGD

SEQ ID NO: 179708 - protein, 340 aa, unidentified
MSLYAGMDLHGNSNYVAIMDSKGKRIAQKKLPNDRRLILETLQPHRTKISGIAVESTYNWYWVVDTLREAGYRVHLANPSAIQRYSGLKYTDDQHDAFWLAEMLRLGILPEGYIYPKEERPIRDLLRKRGHLVKLRTSLIISLQNIISRNCGVRLNVNKVKELKKNQVSPLLEANDDLALAGDVSKEAIDFLTRKIRKIEGVIVEKVEVKDSYRYLLTLPGVGKILALTIMLETGPISRFAKVGNYVSYCRKVSSQWISNEKAKGKGNKKNGNKYLAWAFSEAAELGRRYHSGARAYYTRKMQRTNFMVAHSALAHKLARAAYYIMRDQVPFSSEKLFAG

SEQ ID NO: 179709 - protein, 345 aa, unidentified
MELHTIGIDLGKTVFHLVGLNLGGEVVVRKKCSRKQLLHFTANLKVERIGMEACGGSHFLGRALREQGHEVRLIPAQYVKPYVKTNKSDYIDAEAIAEAVGRPRMRFVPIKTDDQLDLQSLHRVRERWVMRRTAVINQIRGLLLEHGITLRKGRCHVDAALPGILEDADAKLSGALRVLLAQLKLELDHLEMRIDEADAVIKKTAGENEACQRLVAIPGIGPVTATAVIAAIGSGAAFRKGREFAAWLGVVPGEHTTGGKQKLLGISKRGNSYLRRLFVHGARAVLQQSAKQSSGLSAWLAQLTSRTHRNVAAVALANKLARMAWAVLASNEPYRPPMLAGAATT

SEQ ID NO: 179710 - protein, 391 aa, unidentified
MISVGIDVSKDKHDCFIVNSEGEVLADVFTIPNTMDGFNSLLQRVRECTTPQDKIKVGLEATGHYSYNLLGFLLDNGLTTYVMNPLRTNIYRKSLSLRKTKTDRVDARTIASMLLSDAGLKPYTDTAYHNEELKSLTRYRFDKVKERAKLKSSISRLICILFPELEKLVSSLHTASVYTLLEEFPGAKQVAGAHLTRLRSLLETASKGHYKRDMALEIRDAARNSIGSWMPAKSLELQHTIRLIRELDTEIAEIEEQIRSIMDELHSPITTIPGLGFRMAAMILAEVGDFTRFDSPDKLLAYAGMSPSTYQSGQLKNCYPHMEKRGSRYLRYALFNATKYVCHWDPAFAAYLAKKRAEGKHYNIALSHATKKLVRLIFALEKSGTPYRSVV

SEQ ID NO: 179711 - protein, 407 aa, unidentified
MNHKVIFGIDVSSKSSSVCVLVDRHQQGDVFSISNDMIGYQKLYEQLNFYLITPLVVFESTGVYSLSLQAFLEQKRIQYLKLNPLKAKKLMDNNLRHNKTDKVDAYRLALIQFNAPQKLTQSQPPEYHEMQNASRYYEELTKSIIVAKTQLHRNLQTTFPQIESIMTNPTGRVYWAIVGLFPHVQYVLDTDVKHIHDELRNIPGMGNNRAGYLSQRLISLAKLTCAYDDKNSIVIRAIQRNIAELFSLDQERKNVVNYLDKLAHEVNARAVTIYLSIPGIAQVTALRLLAEIGDLRRFDNSGQIDAFVGIDPGRYQSDETDSHLGITKHGNAIARKILYRIIGQMESVKVTHPCHITDYYDRKKSSQSRGFKKIAIASVHKLIRTLYALVTKDQLYDYNVATQTQRL

SEQ ID NO: 179712 - protein, 346 aa, unidentified
MNNNDPRYKLYLGVDTHLELHVATLINELGQVVKNKAFSANISGYRELFSWCNSYGFLQKAGIEGTGSDGAELTKFLLKNHIDVYEVMRPNRMERRLKGKTDVIDSENAARSVLSGEAKVIPKSHTGPVESLRSLLLTRNSAVKARTQAMNQIRALLVSGPDELKQSLYLSKPEACAAACLARCSSSSEPLLISLELLAQRWRFLNDQVKKLDKVLKKLTMSTAQSLVSRFGVGSNVAATLLVAAGDNASRLRKESSFAALCGVNPIPASSGKTTRHRLNRGGCRSANNALWTVAMVRMRSDPRTKDYVARRTAEGLSTKEISRNLKRYIARELFPLILKDLATLA

SEQ ID NO: 179713 - protein, 326 aa, unidentified
MSELPTETAVPVHVGIDVSKARLDVCLLPGGQALSVDNTDDGVAQLVATLKQHPAAVALVLLEATGRYERRVASEMLEAGFNVAVVNPRQARDFARALGKLAKTDRIDARTLAEFARLGHARTCEKQPENRVLLDDLVTRRRQVTQMLASEKVRAQVPQDKATRAMIAKVIRLLEQQREDLDRRIAELIESDDDWRNKRDLMSSVPGVGDNTASQLIADLPELGKLNRQRIAALAGVAPVNRDSGTMRGRRMIFGGRATVRRALYMAAFSAMRCNDVIRGFAERLRAAGKAFKVIVVACMRKLLAILNVMIRENQPWTPRPALQNA

SEQ ID NO: 179714 - protein, 410 aa, unidentified
MEVILRCCAGLDVHKDSVEACIRGMSAGGKIEHEVRHWGTTTRDLEALADWLLSMGVKHVAMESTGVYWKPIFNILETKFEILLANAHHLKNVPGRKTDIRDCQWIAQLLQHGLLKGSFIPPRSQRELRDLTRQRTQLVDEASRISNRIQKVLEDANLKLGSVASNVVGTSGRLMLEAIVSGQDDPVQLADLAQRKLRSKIPQLEQALYGKLTEHHRWMLRLLLDQLKTTEQFIARLDERIAELTRPLQPVLEKLDAIPGVDRRVAEVLIAEIGPDMTPFPSDAHLASWAGISPGNNESAGKKRSGKTTKGSRWLRQALVQAAWAASHKKDSYFQAHARNLMHRRGRKRGLVAVAHSMLTVIYHMLKEGTAYRDLGSHFLDQLRTTHLIRFHVRRLQHLGLEVAITPATA

SEQ ID NO: 179715 - protein, 350 aa, unidentified
MIIIGCDYHPGFQQIAFMDTDTGELQERRLEHREDAEKFYRDLETQGAKVRIGMEASGHARWFERMLSELQFELCIGDAAAIRAKRVRKQKTDRQDAQLILRLLLKDDFPQVWVPSGENRDLRQLLWHRHRMVQARTRIMNQLQAVALNEGVRSKKRLWRDAGREQLELFKLAPWASRRRRDLLELLDRLTPTIAELTQAIEQEMEKCPEVQRLQTHPGVGALTALAFVLIIGQPDRFQCGKQIASYLGLVPLEDSSGQRRRLGHITKQGNSLLRFLLVEAAQVTVRSDQEWRSKYFHLALRRGRKIAKVAMARRLAVRLYWMWRKGWDYEQLKKFGSHAGQPGNRHGVK

SEQ ID NO: 179716 - protein, 422 aa, unidentified
MNTIAKFVTSAMEVIYRCCAGLDVHKQTVECAVRRMQPDGRAQVEIGQFGTMTDDLLEMVEWLKAQGVTHVAMESTGVFWKPIYNILQGHFTVLLVNARHVKQVPGRKTDVRDCQWLAQLLQYGLLKGSFIPPRWQRDLRDLTRERTQLADEQTRVANRIHKILEDANIKLGSVATDILGVSGRDIVERLIAGEEDTQKLAERARGRLRSKIPELRRALRGHVSEHHRFALRLQLDHLQRLEQLIERLKQQIAELCMPYDEQIEQLDQVPGIDRAGAESIVAEVGVDMQVFPSDGHLCSWAGICSGNNESAGKQRSGRIPKGNRWLRRTLVLAAQAAGHAKDTYLASRFRRLAARRGNKRACVAVAHSILRIVYHLLKDGCPYRDLGGSYFDRLDPVRLTRYLIRRLERLGHKVTLEPVSTA

SEQ ID NO: 179717 - protein, 402 aa, unidentified
MHYLGIDVSKASHQCVILDAEGEALGKSFTIQSSKDDFANLVKKLSDLNIPQTDITAGLEATGSLWENLYVYLKERGFNIVLLNPFQTSKFHQAMLKKAKTDSIDALVIAGLLRSGCAASSYIPDEEIQSLRDLVRLKDGYLKDTKNYKRKAYSLLNLVFPEFLNLIKDPFNISCTEILSKYQTASDFKNIRPKDLLKIARGHQGNNYDEAWAGKVIQAAKDSIYSGKASKARSIVLKSLVLNIKNLKEQMSELDNEIQNILKTDGGSSNNDIDNLLTIPGVGPKTIAVFIAEVGDITRFTSCKDFIGFVGLYPKIEQSGSSLNRAKLTTKGSRILKHALYMASVASLIHNPYLKSVYNDKLSQGKYAKQALIVVARKIACIMYSMLKNNAVYNPGRVAIAV

SEQ ID NO: 179718 - protein, 398 aa, unidentified
MTESSDYESVQVFIGVDVGKDTHHAVAINRSGKRLFDKALPNDENKLRSLISDLKQHGQILLVVDQPATIGALPVAVARSEGVLVGYLPGLAMRRIADLHAGEAKTDARDAAIIAEAARTLPHALRTLKLADEQIAELSMLCGFDDDLAAQTTQASNRLRGLLTQIHPALERVLGPRLEYPAVLDLLQRYPSPEKLASLGEKKLAAQLCKLAPRLGKRLAADIAQALAEQTVVVPGTNAAAVVLPRLALQLITLRKQRDEVALEVEQRVLAHPLYPVLTSMPGVGVRTAARLLTEVACRAFASAAHLAAYAGLAPVTRRSGSSIRGEHPSRRGNKALKRALFLSAFAALRDPLSRAYYTRKMSQGKRHNQALIALARRRCDVLFAMMRDGTFYTPQGS

SEQ ID NO: 179719 - protein, 321 aa, unidentified
MFHFYLGIDVAKAKLDCALRLPNGKFRAKAVPNSLEGFATLLTWLTAHKAESIHVCMEATGIYWEEVAQHLAITGLTVSVVNPAQIKAYGASRLTRSKTDTIDAKLIADFCAERQPPVWQPRSEAEVTLRALVLRLDALQTMRTQESNRLQVAREAVREDIQQHLDWLDTAIRQLIDAINEHIDHHPDLKQQRELLDSIPGIGERTSAIILAFYADTSRFANSRQAAAFAGLDPRQYESGSSIKGKPKLSKIGHSFLRKAMYMPAMVTLYKTNWGKQFRNRLASAGKPNKLIIGAMMRKLIHVAFGVLKSAKPFDSAIHLA

SEQ ID NO: 179720 - protein, 461 aa, unidentified
MKKPKRRATGKVDQGSKLSVIQSDVAGIDIGSREMFVCGPADQEGRREIRVFATTTQQIQQCVGWLKQQKVRSVAMESTGVYWIPVLEIMESSALEVLLVDTRPLSRVPGRKTDVEDCQWLQTLHSHGLLRGAYRPSEQISELRTIVRQKAVLVRQQADWIRRIHKCLDQMNVRVHHAVKDTQGVTGMAMLRAIVGGERDPRNLAKLREPGCQKSETEMIELLTGNWRSDHLFNLKQHMTMYDSAARQIAVYEEEIQRRMQAVTPAGRKDIQAPPLANIEKRKTMKKRDQEGKRQALYGVMGVDLTTIDGIGVETVEVIMSEYGTEMSKFPTEGEFVKHVGLAPHRPVSGGKVLKNKPKKQKGTRTAEVLRNAATSLKHSRSALGAYYRRMARRKDSGVAVFATARKLGALIYRMLRYGEQYVDVGQAAYEKQYEEKRIRALRNTANQMGYNLLKQEAVSA

SEQ ID NO: 179721 - protein, 396 aa, unidentified
MLRWDEKANPHAVPFVRMVCKISSASKAQEVRRLAMENHNSGTSRMTIGLDLGDKYSHLRVLDREGNLLEKERIRTCPEDFRRRFEGIEPALVALEAGTHSPWAFRIIEECGHEVLVANPRQIPLISQNTQKSDDHDPELLARLARVDPKLLKPIQPRDLKDQIALAELRARDRLMTARTKLVNHVRGVVKSFGGKTTGVNVNTFHEAVEERIPTEIRETLRPVLKVIAEITEQIGRYDKKIEKLSKKEYPQTEVLRQIGGVGPLTALAFMLVLGDPKRFKESRDVGPYLGLAPGKDDSGEYQAELGITKAGDGFLRRLLVCSAHYILGPFGPDTDLRRHGEKIAQTGKKKAKKRAVVAVARKLAVLLHRLWTTGEEYEPLRNTIRKQKRLTKRNS

SEQ ID NO: 179722 - protein, 391 aa, unidentified
MVCVGIDVAKDKHDCCILDSDGTIRADCITIPNNMDGFKQLLQTIRDCTKKSDKIKVGLEATGHYSYNILGFLLDNDLAVYVMNPLHTNLYRKSLSLRKTKTDRVDARTIATMLLSDVDLKSYTDIAYHNEELKSLTRYRFDKVQECAKLKQSVSRLATILFPELEGLVSSIHGTSIYALLSEYPGAKQISEVHLTKLTNLLTTASKGRYGKEKAIQIREAARASIGSVMPAKSLELKHTIKLIQELASEIDEIEDSIQKIIDELNPPILSIPGMGVNSAAVILAEIGDFSNFSSPDKILAYAGCSPSTYQSGKLTNCYAHMEKRGSRYLRHALYNATKYVCYWNPVFAEYLAKKRAEGKHYNVALSHAMKKLVRLIYALQKSGKAYLAAA

SEQ ID NO: 179723 - protein, 353 aa, unidentified
MTMTIVDVPRLVTGGVDTHLDVHVAAALDQVGGLLGVREFAATAGGHASLLGWLRSFGPVAVAGVEGTGSYGAGLARYLTAAGVRVVEVNRPDRQDRRRQGKSDPLDAVSAARAALSGRASAVPKSQDGPAEALRALMVAKRSASRARTQAITQARALLVTGPADLRDRLAGHSPAELIEAIAVLRPRAGDVPGDAARAALRALGRRARFLDAQIGHLDELIVPLVTVRAPGLLALHGVGPDTAARLLVAAGDNPGRLRSESSWAHLCGVAPVPASSGKVRRYRLNRGGNRDANSALWRIVLVRMASHPPTRAYVERRSNQGLTKKEIIRCLKRYVAREVYRHLRAAMPGPPG

SEQ ID NO: 179724 - protein, 325 aa, unidentified
MEAKKLCCGIDVSHTKLDVCYQNNLGELFHLQVGNNNQGFAKILEHTGVDYHFVMEATGVYYIRLAFYLHSQGCELSVVNAIAIKRYIQMHLERNKTDKKDAGWICRYAIEQRPAYWQMPDNAYFESKQLYNAIREYTEQIKRFNNQLHSLRLLPVPSKDTIKSLEKIIVQMEKEIKQLEQKLQLLLEQWQPDQLKNVSSIKGIGKRAAAMLIVFTQGFKHTQNHRQLISFAGLAPTQYSSGSSIQGKPRIYKRGGKNLRDVLYMCSMNAMKTNTACKALYERLRANGKTGKQALIAVCNKLLKQVFAVVKNNSLYQPNYCSAKP

SEQ ID NO: 179725 - protein, 429 aa, unidentified
MNVLPVAGIDVGKEFSEMAILSPTNKVCARMKIFHDSFKKVDKAIELLKKAEKDFANRPIVVMESTGHYHKILFHAFAEAGFEVVITNPLQTDSIKNLGIRKVKSDKVDARKVALLYRFQELKTTSIPNDTINCLKSLCRQYYKMTDQLTAYKNKLIGIVDQVMLNFTDVFKDVTSKTALALLERYPTPSHMLKGNREEIISLISETSRKGIKRATSKYELLIQKAKDFEPLSISSPANISLIQVNINMVRTLEKSISDIEDAILKLIKDDKEQDMPVLTLTLELLCSIPGIGLMTAATILAEVGDFSAFQKSNKLVAYFGIDPSVKQSGKFKGTQNKMSKRGSRFLRKVIYTSALACIRKKRNGELNNPVLYEYYQKKCISKPKKVALGAVMHKLVSIIFAVLRDKKPFELKTPEQHARSLVAKNKAA

SEQ ID NO: 179726 - protein, 389 aa, unidentified
MKKNSIAKLQVTKRQLKGQIRQLAAKQRLTVGLDLGDRASRYCILDEAGQKVSEEQVPTTKADLDLAFAKMAPCRIALEVGTHSPWISRHLSGLGHEVIVANPRKVRLITQSVKKNDRMDAEQLARLARVDPALLSPIRHRGPEAQADLAVIRARAELVDCRTSLINTARGLAKPMGDRLKRCDADYVKESLAEGLSEATQKVIRPLLKSVEEITRQIGVYDKKIQEIEKRYPETKVLKQVNGVGTLVALTFILTLEDAERFIHSRDVGPYLGLTRQRRDSGDSQPELGISKAGDILMRRLLVQAAHCILRDGAPDSDLKVWGLTKVEAGAKTGNGKKGSKRRKKRAVVAVARKLAVLLHKLWVTGEVYDPHYNRKAVEAAKGKKSAVA

SEQ ID NO: 179727 - protein, 416 aa, unidentified
MDAHSKKIVLCLTHWQHGSDPVVIKTLATTLDAFENTYANNIPSGATTVLEATTSAFSIVRRLKAAGYANIKVLAADTLAGFARRDRVNDPIDAKNLALAYARGGTREVFVPCEKHRHLRDLFYGYNTAVTTATRASNRLWGFCSKHGLDIPPATRKEKTVAIGRHLQQHAWSDDERFHIDRLLADYAHAAENRALYLRRIERTVATTPDMLRIMQVLGIGVLCAFALVTFMEDIHRFANPKKLAAYFGFNPVVNTSGEANGPRRLSRFGQRKVKAMVVEASHSAYRFGEAPMHRWARRKVAGGKNRNVILCALARKMLVTAWHVLMGHGAPEREAPPAYRCKLLKLARLVSKHPDNVLGDERPAAFNPFSGDTQNFTLDSPTYVTFELHGNQFSSLLFWGMWVSFGMCERSKNEN

SEQ ID NO: 179728 - protein, 327 aa, unidentified
MHYLGIDVAKAKLDCALLDTTTDKRKTKSIPNNASGFALMADWLGKYGITLTDLHAVLEATGVYHEAVALWLADAGVTVSIANPAQVKDFARGLAVRTKTDGVDSVVLARYGALVKPQPWTPPPPEVRELKALLARLEALETDVRRELNRQEKATLSSVPALVQQSLDAHLAVLKHEIARLHTAIDDHIDRHPGLKADQAYLLSIPAVGEKTANRMVALLHSRTFKSAEQVAAFLGLVPVEHQSGSSVLKRPHLSKNGDAKTRAVLYMAAIVATRYNPDIKAMYERLCARGKPKMVALGAAMRKLVHQCFGVIKHQQPYRQNGAVSA

SEQ ID NO: 179729 - protein, 355 aa, unidentified
MNSEKYIGLDVHQATISVAVMDSMGKLIMESILETKAATILEFVAGLRGTLSVTFEEGTWAAWLYDLLKPHVDELVVCNPRKNALLKDGNKSDRIDARKLADRLRLNDLKPVYHGETGVRMLRELARSYLNLVKDQTRVMNRLKAMYRSWAIPCAGRDVYYARHRAEWLGKIREAGVRRRAEHLYQQLDMLQHLRQQARRELLAESRQHPITAKLRQIPSLGPIRSALAVALIRTPHRFRTRRQLWAYSGLALETRTSGEYRCVEGQIRRSKKQISIRGLNKDHNHDLKGLFKGAATRASIQPGPFQDFYQRSLAKGIKPTMARLTLARKIAAITLTLWKKGENFDAEKLKSQAA

SEQ ID NO: 179730 - protein, 319 aa, unidentified
MKDILDCCCGLDIHKDTIVACLLKGPVNMKPSSETRTFTTLIHDIEGLKTWLEGHGCKHVAMESTGIYWQPVYEVLELAYDGDISLVVVNARHMKNVPGKKTDMKDAEWIATLLRAGLLSSSFVPAKDIRELRHLTRYRKSIISDITSQKNRVEKFLQSSGFRLSTFLSDIFGTSGRGIIDHLATHGSVTMYDLDGYLKTKTRHKINDIMMAMNGKLSSHQKLFLKMLVRHLDQLQANLLEVESEIAAEAHKYEHQLELVDSIPGIDNTAASSIIAEIGIDMSHFKTAEHICSWAGLSPGNNESAGKKKEQSLTRVIRT

SEQ ID NO: 179731 - protein, 410 aa, unidentified
MKYVGIDIAKHSHVVAVREADGAPRGKAVSFSNDEAGFRALVDRLAELEVEPGDCVVAMESTGHYWIALWSFLSDCGWPVAVVNPVLTDAFRKVDSLRKTKTDSIDAFLIASFARFKGLGPESVSPEVTDGVKQLTRYRSHLVRERTALKNRATACADRVFPELAGVVGGMGSATARALLRDYGTPERISKTDIRTLERAVRRASNGHFGRAKAEEVKAAAKRSVGAAFAAGSVAFELRKLVELIGYLDGQIGELEAEAARVMDQEVRALLTSIPGIGDVTAATIAAEMGAPERFDDPKKLVAFAGIDATRSDSGQFESSDNHMSKRGSSYLRCALMNAAEVARIHDPYFGDYYDSLVARGKHHFVALSGVARKLCGVILAVLKERRPYEPRPSVQSRQGAQERGRQRQG

SEQ ID NO: 179732 - protein, 306 aa, unidentified
MEAMIERCAGLDVHQETVVACVLFGPLDKKAKTSIETFSTTTTGLLALSDRLATLQVSDVVMESTGVYWKPIWNILEGSFHLVLANARHVKNVPGRKTDVKDAEWLAKLLRCGLIENNFVPPEDIRDLRDLTRYRKKLIHHRTSEQNRIHKILQDANIKLTSVLSDIFGLSGRRILEAILNGEKIETDGLRKMVDWRTKASITDIASAINGRIRRHHRDMLRYHWDHMGYLEQTIEELEKQIDQLLSPYRKEVELLDGIPGVNKAAAATFIAEMGVDMSVFKSAKHLASWAGVSPGNYESAGKKNE

SEQ ID NO: 179733 - protein, 346 aa, unidentified
MSKRSKTSAVTASHSEVGIDVSKGWLDVSHQRAGTGVKSGRFDNEAQGHRSLIRWLRKASRGTSVRIIVEATGTYHLDVSQALHEAGMAVMVINPRVARNFSQTLMQRTRTDLTAATSLREYCARMEFTPWEPPRAQVRELRAVGRRLQALTEERTAERNRLHAVKVSREHSEIVRRDLELNIRHLTERMAALLEQAEVPIAADPELRRRYEQLQSVKGFGRKSAVCLLGELAMLPADMGTKQWVAHSGLDPSEQSSGSSVQRRPRISKQGNRHLRAALYMPALVAKQWDPNVRAFSQKLLAKKKAPLQITVAVMRKLLHAIHGMFASGTNFDGEKFYRIPPQQAA

SEQ ID NO: 179734 - protein, 371 aa, unidentified
MKTNTTPSVVSNSLTPATVIPGGFTLGLDLGDRHHHVCVLDAAGQIIHEGALVNTRPALAKLLADFPRATVAIEAGTHSPWISRFLQEHGATVLVANPRKLHAISRNERKCDQRDAQMLARLARVDPALLHPIPHGSAQAQHDLLGLKLRDALVRTRVNLINTVRFTLKSLGHSVRNPSSESFHKTVLADVPADCLPVVQPLLTVLAHVTEQIKGMERDLVQRSRTDYPVTQRLQQIAGVGPLTALCFVLKIGDPARFGRSRDVGAYLGLCPRRDQSGGTDKQLRISKCGDGLLRRLLVSAAHYVLGPFGPPCALREHGLRLAGTGSAREKKRAVIAVARKLAVLLLSLWKHGTDYEPRVTVAPALVLTPA

SEQ ID NO: 179735 - protein, 389 aa, unidentified
MKIFVGIDIAKLNHFAAAISSDGEILLEPFKFTNDADGFQLLVSKLESFDKNSIIIGLESTAHYGDNLVRYLVAEFYQVCVLNPIKTCQMRKNNVRKTKTDKVDTFVIAKTLMMQDDLRFITFFDLDMIDLKALGRFRQKTIKQRTRLKIQLTTYVDQVFPEIQYFFKSGLHQHAVYALLKEAPSPKEIASMHMTHLANLLKVNSHGHFTKELAKELRVLAQKSVGANDSAISIQITQTIQQIELLDSQLEKTEAEMTDIMKFNDSVIMTIPGIGYINGGMILGEIGDIHRFSNPNKLLAFAGLDPSVYQSGNFQAKTTRMSKRGSRVLRYALVNAAWNVVRNNATFKAYYDAKRAEGRSHYNALGHCAGKLVRVIWKMLTDEVEFNLE

SEQ ID NO: 179736 - protein, 405 aa, unidentified
MLVGIDWADAEHTYCLMDDTGATLATGTIDHTAEGLERFMTLVRARAQDPQDILVALETSQGPLVGALLDQQFTVYAINPKAVDRHRDRFRVAGAKSDLRDAWVLANLLRTDRMLYRPLLPDSEVAQELRALTRDRAELVQTRTMLSNQLTSCLKAYFPEFLTLFADPDRPVALALLQAFPTREALQAVSPTRLEAFLRRRHCPHSHDRAVEIHTQMQARGFHIAPPLVRAKARLAGTLVSQLQTLAEHLEAYDREIQRVLRLHPDGELYHSLPGAGDFLAARMVGELGDNRDRYRDASSAQCEAGTAPVTRKSATVRTVHVRRACSHPLRSTMWQFAFASKRHCEWAQAYYLRARKRGKKHAEAVRMLGNVWLRIIIAMRRNRRPYDEALFLSRSSHPSLALCP

SEQ ID NO: 179737 - protein, 295 aa, unidentified
MQTVTTIGLDIAKSVFQVHGVDAAGQVVVRRQLKRRYVLAFFEKLPPCLIGIEACASSHHWSRELQALGHKVRLMPAAYVRPYVKRQKNDAADAEAICEAVTRANMRFVETKTPEQQSCLMLHRTRHLFIRQQTAVINAIRAHLAEFGIVAPVGRNGVEELLGVVADASDKRLPEIARACLAALGAQLRMLKAQILEFDRMINAWHRSNETSKRLDEIPGVGPALATALVASVADPRAFRSGRDFSAWIGLVPKQHSSGGKDQPSAARVYLAGRSAKRKYSPQLGRHLGNRGLRL

SEQ ID NO: 179738 - protein, 352 aa, unidentified
MPRTTRFHSVTTTIGIDMGKNTLHMIGLDSNGAIVLREKVSRGRIASRLANLPPCLIGIEAGMATHYVARELAALGHNVKQVPPTYAKPFRQGHKNDFRDAHAVAEAVQRPTTRFVPAKTAEQLDLQALHRVRSRLVSERTAVINEIRGFLLERGIIVRQGLRFLRQSLPDFLAKRTDVLSLRMVRIVADLADDWRRLDQRIETVTDEIETVVKSDDNCRRVMTVPGIGPIISSAMVAAIGNGVAFARGRDFSAWLGLVPKQMSTGDRTILGRISKRGNGYLRMLFVQAARVILRRSTNWSKHNFGGWLVCAAQRLHPNVLAAALANKLARIAWTVLAQQRCYEARVTKAAA

SEQ ID NO: 179739 - protein, 344 aa, unidentified
MSIKVVGIDIAKNLFQVCVLSSDGQILSNRKVKRDKLLDTVRQLPEKTAIAMESCATSHHWGRIFQELGHSVALIPAQHVKPFVGRQKNDANDARAICEAFSRPDIHFVPVKSVEQQDLKAIRSVRKRLVENRTALSNQIRGLAAEYGVVFPLSIKALRSHLPIALEDAENDLSPVMRNLLQTLYCDFVSLSEEIDEMTQSVTMLSQQNPRYEAIRNIPGFGPILTAALISEVGVGHQFQNGRQFSAWCGLVPKQNSTGGKSCLGSLSKNGNRELRALLIHGARAVVRCGANKADSMGAWLRGLIARRGKAKAIVALANKLGRVAWHILAKNSEYDINQAFKPV

SEQ ID NO: 179740 - protein, 334 aa, unidentified
MENIALIGIDLGKNSFHIHCQDRRGKAVYRKKFTRSKLIEFLATCPATTIAMEACGGSHFMARKLEELGHFPKLISPQFVRPFVKSNKNDFVDAEAICEAASRPSMRFVQPRTESQQAMRALHRVRESLVQDKVKTTNQMHAFLLEFGISVPRGSAVISRLSTILEDNNLPLYLSQLLLKLQQHYHYLVEQIKELESQLKRKLDEDEVGQRLLSIPCVGTLTASTISTEIGDGKQYASSRDFAAATGLVPRQYSTRGRTTLLGISKRGNKKIRTLLVQCARVFIQKLEHQSGRLADWVRELLCRKSNFVVTCALANKLARIAWALTTRQQTYEA

SEQ ID NO: 179741 - protein, 393 aa, unidentified
MRFAGIDVAAERHVAAMVDEAGRVLSKPSTFGEDVEGYGHLFQLLGAPEECLVALEATGHYWRNLFVSLVTKGYAVAVLNPLRTRRFAEEELERTKTDAIDALGIARFAAQKRPAPTMLPEPAAEELRELVRLRERLRGDLGDRLRQLHRAVDLGFPEFTNHVRTLESDLAIAILSRYPTATAYRGVPPKKLARLCYDGRHEVGEQLARALVNSAKNSVGQHHSDTCRREIAYACEDIVALRGRLRELARDIKQKLEQHDLGKLLTTINGVGAQTAAYLIAELGDPARFRSAAALASYVGVAPRLRQSGKRRFSGTAVIRLGNARLRKALWMPVLTAVRFNPWLRAYYDRLVSSGKPRKVALVAAMRKLLAAIWSVATKRRAFVSQLASTSLA

SEQ ID NO: 179742 - protein, 415 aa, unidentified
MIPAMIECCAGIDVGKKWVVVCVLKGPANGDAQAQTRKFDTINARLTELRQWLLACGCTHVVMESTGEYWRPIFNVLEETKDLQIVLANSQQVKGLRGHKTDPEDAHWLAHLLRHGMVRPSYIPPPEIRQLRDLTRRRKQLVRNGAQERNRVQKILEGANVKLGNVLTDVFGMSGQLILEALLEGKATAEQMAQLAQRSAKKKIPQIRAALEGHRMDAQQRRLIGFSLDHMAFLEDQITELDVEIATHIEASKLQQACENLQTVPGVKRDAASSLLAEFGPDMKVFGSRAKCSSWAGVAPGNNESAGRKKRAPALRGNPWVRSTLVECAWSASRKKDCEFRRQYERLKPRLGHKRAIVAVAHSLLFAVFDVLATGQPYTKPGANPMPGTDAARLIRHHTRRIKTLRTQMKTKTSQ

SEQ ID NO: 179743 - protein, 350 aa, unidentified
MLIIGCDFHPGFQQVAIFDNRTGEVEEKRLQHRAEAEQFYRSLAGQEVRVEACGHYPWFERLLQERGIELWFGDAARVRASVVRKQKTDRRDAEHLMHLLIEGRFPKIWVPSLEVRDVRQLLVHRHKQVQARTRTKNQLQAMALSCGVQKKRKLWTKAGREELEQLPLLPYASERRKRLLEALDSLEAEIGELDRRVSEEARQRPEAVRLMTHPGVGPVTGLAMVLTLGPAERFGSGKQVGSYFGLIPREESSGGKQRLGKISKQGSSFLRFLLVEAGQTAARLDPQLKRFYRRLAARKNRSIAKVAVARKLATRLYLMLREDWTYAQLCQAVMQVSPSHSVAGESEPSV

SEQ ID NO: 179744 - protein, 448 aa, unidentified
MANGRRAASRGVARRNAKLAALRQVVSVDRAVLAVDLASRDQAAVVCDHDSVVLGRRMFTGSAWCIEQVLEWAGPVAAKAGFTGLLVACEPTGHRWKPLAVTAAARQVPMVCVQPLLVRRAREGEDFTRSRSDFGDAVIIARLVSELRCYLPYLPQGPWARLRHLGARRDGLLVRATAARGQLRDLLECGWPTVLGTAAEPLESLTWRAALAVSADPAVIAAMSEQQFLAALRDQLATVGGQKAWRKIALAVHAAAAAPGGIAAERAAICERAAFARQDWMNALAALADIDTRMITVLGELGLTSLVTTIPGLSAAGAAVILAETGDPARYDCPRAWVKHAGLAPQANQSGRYHGRTRNSGRGRPLLRTAAWRAIWGALRCNPVYAARFAYLTSRSKNRLTRGQAHAALAAALLRQLFVVVTRRVPWDPAIASGARLPAAAKVVMNAA

SEQ ID NO: 179745 - protein, 320 aa, unidentified
MQTQNAVVYAGVDVAKATLQLHLQGRQSELANTPEGRRQLFNQLQNVPGVHVICEATGGYEQAMVKVLHEAKIPVSVTNPAQVRAAAQARGQRAKTDPIDAEQLTDYGQRYQPKATPPTSATQDQLVALTQWLKQLIHGQAMAKTQAEHHQQPFVRRQHAKLMAHLQSQIKSVEKQIEALLNQDAPLQQRVNCLDAIQGVGPRTAWMVLAHMPELGQLNRQQVAALAGLAPWTRDSGTMKGMRCIGGGRPEVRLALYMAALSAARSNPVLRTLYKRLRAKGKLGKVALTAVMRRLLTYMNHQLNFLHDTTATEKTEDAKA

SEQ ID NO: 179746 - protein, 349 aa, unidentified
MSQNLNSAVAVIGIDIGKNSFHVVGLDNHGAIVLRQKWSRGQIEARLANLPPCLIGMEACVGAHHLSRKLQALGHDARLMPAKYVRPYSKGQKNDFRDAEAIAEAVQRPTMKYVATKTVEQLDLQALHRVRERLVSQRTGIINQIRAFLLERGVAVRQGLRFLRAELPRILATPPDVLSPRIVRVISDLAEDWRRLDDRIDQLSSEIAVLARQDAGCERLMSVPGIGPIISSAMVAAIGTGDAFSKGRDFAAWLGLVPKQMSTGDRTILGKISKRGNRYLRVLFVQAAWVVLIKPMSWDRHGLKRWIEAAKKRLHRNVLAIALANKLARIAWGVLAGGRTFEANKLQAA

SEQ ID NO: 179747 - protein, 377 aa, unidentified
MTQFPQSACNEPSIHAALELSKNNWLLAIQVPDRDNPSLHRLKGGDAEGLMAKLDAASDRVAKVMGERPKVTLCYEAGYDGFWLARLLERRGIACLVMEPASLQVNRRARRVKTDRIDVESILHTLIAWCRGERQVCSMVVIPSVEEEDLRRSHRERDRLIRERTAHINRIKGLLFGQGIRGIDIKSRTKSLKPAMLVTADGRPLGQRLGREITREIARLGQLQAQIVEVEGERDKTPTPCVETERKRRDLLRLKGLGPTLSATLTREVYYRRFANRRQVASYIGIAPSPYDSGDGRRSQGISKAGNRLARVAMVEAAWLWLRHQPDSALTRWFHQRTAGQSKRVRCIMIVALARKLAIALWRYLETGLIPEGAVVE

SEQ ID NO: 179748 - protein, 344 aa, unidentified
MSVYVGMDVHRKRSQVALVDEHGVQLANRNLPNDSAELVAVLGRLAPGTPVAFEAAYGWGWLAELLDELSLEPHLVHPSRCKAIAAARLKDDRVDARTLAQLLRAELLPEAWIAPQAVRDQRGLLRHRAALVRVATALKCRVHAVLADRGVGVQESLWGPAGRAFLAELALPAVQRAIVTDCLALIDAISPLVARLERDLVTRARPDPRVQALQSLPGIGPITAMTLVAEIGDIGRFPTARKLCAWAGLTPAVRNSDRKVRHGHITKMGSPWVRFVLQEAAQRAKTRPPFAAFYAKTAARRGTHIATVAVARKLLARCFHVLTELQATTGEGQPAGCARPITCA

SEQ ID NO: 179749 - protein, 353 aa, unidentified
MNSLTDLREVVDVVIGVDTHVHTHSAAVIDAATGGVLDEITVEATAQGYAELVEFANNHPMLRAWAIEGTGGHGAGLSRHLLEMSEIVIELDRPKRAARRNGAKSDPLDAIRAAREAMARPRLGTPRTGGERQALSVLLAARRSAINASTEAQQQVFSLVIAAPEPIRVRFRGQKLAAMLNTAANLRVHASWDTETTSTVVALRTLARRAHAMLKEARELQKAIVAIIRSWRPDLLEEFGVGPIVAATVLCAWSHPGRIHSEAAFAMLAGVAPIPANSGQVTTRYRLNRYGDRQLNNALHTVVQSRIQYQPATRDYVARRTAEGKTGREIKRCLARYVARDLYRLLENTATAA

SEQ ID NO: 179750 - protein, 346 aa, unidentified
MKDITVLGIDLAKNVFQLHGADSHGRKLFSKQVTRQGLFKFVGNLKPCVIAMEACGGSHHFARLFRHYGHEVRLMSPQFVKPYVKGNKNDSADAEAIAEAVTRPTMRYVGIKEVEDQDIQGLHRYRERLVKNRTQLMNQIRGLLQEYGIVVRQGKSHLLKTLVALRENEVNKELTPMNKELFWDAYEELMDLDQRIEKYTVKLEILSKKDERSQDLLTIPGIGPITATAILAAVGDPHVFKSGRELSAYFGLTPKHQGSGQKTRILGISKRGDRYVRSLLIHGARSLVKVVGEKTDPRSQWIKQLIDRCGINKAVVAVANKNVRIVWALLTKQMCYQENYGLNEVA

SEQ ID NO: 179751 - protein, 345 aa, unidentified
MKYVGVDLHKQVISVCVVMHQDGHRKIVQRQRLACQDVAGITAFFQSLGPFEVVVEATSSYEWFFELLEPWAMRLVLAHPRKLRVIAESTRKTDKIDAHVLAEFLALDMIPQAHRPSPRVRQHRALVRQRHFLQRRITAAKCKVRHVLARYNADIQSLFTREGRTYLTQQPLSGADRFVVEQLLATLDHHTQLLAAITRQLREFARSAPIAEREAREVLAKIPGVGAVTADIVLAELGDLRRFKNQRQVAAYAGLVPRVRESAGRVKGGGITKEGSGLLRWVLVQTAWRFVTKTRRWALAYERLKRRAGAKRAIVAIARRILCMMFGLLRRGEKYSLAREALAEI

SEQ ID NO: 179752 - protein, 348 aa, unidentified
MVADSLDVVIGVDTHRDAHALALAAAPSGALLLEAVVEASTVGYRDALALAQAHAPGRRAWAIEGSGCYGAGLACFLLARGERVLEVDRPRREQRPGRGKSDALDALRAARSLLASEPLASPRRAGRREALRVLLATRESAVGARRCALNQLRALIVTCPEPLRAELRPLTRARLLGRLRGTRPRRHADSQLRGSLLAMRLLAVRIEALTLEERTLKREIRALVRELAPRLLAEPGVGPIAAAHVLLAWSHKGRLRSEAAFARLAGAPPIPASSGKVVRHRLDRGGDRKLNRALHAIILTRRRTDPETIAYIQRRVSEGKSDREAVRCLKRYLARSLFRQPEAMPQAA

SEQ ID NO: 179753 - protein, 328 aa, unidentified
MKLQHIIGADLSKESIDLFSHEFQAHLKIENSFKGFRQMLKWLRDQKISCSNVMIVMEHTGLYSYHMEAFLHKHQISFTKVSALAIKRSLGLVRGKNDKIDVRRIARYGFEKKDVLVVTSKPDKAIERLRMLHSTRNRLVRHRASLICAIKEYKNILKQSDLIIKSQLSLVKSFTGQIKKIEAEISQLITKEQLVNQNFQLLKTIKGVGKVVATAAIIKTRNFTQFSNARKFACYCGTAPFEHSSGKTIRRKTRISHLADKEMKTLLDQSAKSAIQYDKELKSFYQRRIAIGKSKKSTINIVRNKILYRMFAVIKRQTPFIENYLKTA

SEQ ID NO: 179754 - protein, 410 aa, unidentified
MTASVAGIDVHKRVLMVVVLTPDQAGVEAGSLPSRRFRTTIQELRHLVAWLQQLGVQEAVMESTAQYWKPVWLVLEQHFRLYLAQAWSNRAPRGKKADFKDAQRLVRRHLAGELTLSFVPDGEQRLARTLTRRRTQLTRDRVRIQNQVESLLEETQVKLSSLVSDLFGASGVRILQAISDGVADPVKLAQLGDARLQHTPEELAEALTGNVSPWHRQLLKQHLEQLRLVDKQLQELSELTASALKIHAEAIERLVQVPGIRVVAAQQIVAEAGPEASAFATAGRFSSWIGVCPGSQQSAGENHSSRCAKGNIYLRRVLCLAAQAAVRTKNSSFQQRFRRLLPRLGYTKAIWATAHRLAIVIWKILHDRVAYKEYGLETTPQARKRRIQRVQRELRALGYDDQLKLLAPQP

SEQ ID NO: 179755 - protein, 409 aa, unidentified
MSKGCIRSSFLLFFLINKIFFMIKYSLGIDISMKMFHVCLSVIDNQQQIKVKACRKFTNNVAGFKELCDWIKKHYKQQDIPLHIIMEATGVYYEQCAMYLYKKGFTVIVVLPNKAKKYLQATGLKSKNDKIDAKGLAQMGAEKKLNPWQPMDDFYYTLRSLTRHHESLQNIKTNINNQLHADNAGMYANKQVGKQLKNLIETIDKQIAEIEKSIEDHIASDSAVQQKVDGIIKIKGVGLMTVATLLAETNGFLLFENIPQIVSYSGYDVVEDQSGKHIGKTKISKKGNSHIRRILHMPAFNVVRYKVSPFLQLFNRTLQKHNIKMKSYVAVQKKILIIIYSLWKRDHAFNEEYYKGTTTRDEELVQPSRLSFTEAVQVAQKNSPETNQGYTRCTTVEVSLFAPSRLLQK

SEQ ID NO: 179756 - protein, 322 aa, unidentified
MSQPNPLCVGIDVSKATLDIAASSDIAQFTVSNDSDGFDAIITGLRRHSVALVLMEATGGLEVAVACSLQAEGFEVAVANPRQARDFARAMGYLAKTDRIDARVLAQMAEVINHHPERKRFIRALPDAERQALAAMVVRRRQLIAMLVAERNRLHPSHPQNKKSINTIIKALEDELARLEKEMDSHIRNHFKEIAERLSSIKGVGTMTVSALLAEIPELETLSRREISALIGVAPVNRDSGTMRGRRTIFGGRAGVRSALYMAALVATRFNPVMKTFYVRLLAAGKAKKVALVACMRKLLTILNAMLRKNEEWDESYHHVAP

SEQ ID NO: 179757 - protein, 416 aa, unidentified
MMEGLRPTYTVGIDWASDKHDVCVLEAAGETRFAFAIPHTADGLAELVQRLHRYGAPADLPIAIERPSGLLVDTLVEAGFPVVPIHPNALKASRPRYAAAPGKSDPGDAYILADLLRTDGHRFRPLRAPSDPTKALRAAVRTRDDLVATRVQLANQLRALLDSFWPGAAVIFAAVDTPIALDFLDTYPTPDSAARLGEQRLTRFLQRAAYCGRRPAAELLGRLRAAPRGQAGPLERETKGQLVRALVAVLRPLVTQLRELEGLIAAQLAQHPDGALLQSFPRSGTVNAAQLLAELGEDRRRFPTAEQLAAEAGVAPVTHTSGKHRAVACRFACNKRLRQAATTWADNSRHGHAWAAAVYRQARVRGCDHPHAVRILARAWLRVLWRCWQDRTLYDPAQHGRALPFLTPQPPSSAAA

SEQ ID NO: 179758 - protein, 441 aa, unidentified
MPDMALTTPEPVWAAFVAMDWGSQKHAWILQPAAGGKPESGFVDNTPEAIAIWAAELNWRFGGQPVAVALEQKRGSVVNLLLPYPHLVLFPVPASMSAGYRKTFVPSGAKDDPADASWILDLLVRHRDRLRRLQPDDANTRLLLMMVEDRRQLVDDKTRLLLRLQDCLKQYFPQLPQWFDVDTPLVDDLLRRWPDLQHLQRCHDGTLRAFFRQHHYGQERTRERIAAIRAALAATNDPAVLEAGAQKARHLSQSIALLRDQITELERRRDELVASHPDSYIFASFPGAGRATVPRLIAAFGTRRERYQSAFEVECDSGIAPVHIRSGKLDRVCIRRACQGFTRQTFHEFAGQTIPRCQWAKDFYQAHCHKPEQHHAAVRALAYKWVRILYRCWKDRKPYDEQLYLTSLRRRKHLLGHDLASVTSVEWKTVAGFNKLSEKSS

SEQ ID NO: 179759 - protein, 378 aa, unidentified
MDVHSTNYTLCAMEPTIGSEDRIFGEVQIAPDYKEVICFIETLKIKLGLYDDYSIECGYEAGCLGYTLYHQLTNAGLKCVILAPTTMLTQQGQRVKTDKRDARLIAQCLCYGGYHPVYIPTGEDDAVKEYLRMRDDHKLALKKLKQQINAFVLRHGHQYVGTKWTIKHITWLNKLELEPMYRETLNEYMATYEEQEAKIERYDKRIEEIASEARYQEKAKKLGCFLGVRTHTALSLIVETGDFKRFAKGNTYAAFLGLAPGEHSSSTNVNRLGISKAGNTHLRCLLIEAAKGICKGAIGHKSKELRSRQSEQAAEVIAYADKANTRLRSKYYKLIRHGKKKNVAVAAVARELACFIWGMMTGNITSGTGTSAPAVSQG

SEQ ID NO: 179760 - protein, 407 aa, unidentified
MGALVGIDWGCGAHAVCVIDAKGEALERFEVGHDREGLATLIARLSKHGPARALPIAVERPSGLLVDTLVEAGFVVTPIHPNVVKACRPRYRAVAAKSDPGDAFIVADILRTDGHRLRPLQPQSDAIKALRGLVRGRDDLVQARVALVNQLTALLANFWPGAALIFADLASPIALAFLERYPTPESAARLGPKRLAGFLAQHHYCGRRSPEVLLERLRNAPQGWAGEAEGEAKGDLVRALARTLQALVVELAKLTSRIEHAIAALPDGRIVMSFPRAGRICAAQILAELGDVRARFPTEHQLAAEAGVAPVTYQSGKSKAVGWRWACNKRLRAALTCMADNSRHQSPWAADVYTRARARGCDHPHAIRILARAWARVLWRAWTNREPYNPAKHAAAQPFLKLASVNG

SEQ ID NO: 179761 - protein, 403 aa, unidentified
MDVIAGIDWASEQHRLCLVDSEGRRLLERRVSHDEEGLSGLCRLLGERGVCRVAIERPDGLLVERLLEAGLAVVPVHPNALAAARARYQVGGGKSDGFDAYVLAELARTDMHRLRVIEPDCDETKALRALTRARQELVRARVSLANQLRAELERFWPGAARIFADVDSPIGLAFCERYPSPEDARGLGEKRLQRFLARQRYSGRRSPVELLERLRRAPHGCSGELELEARRTVVLRLVCSLRPLVEGIGRLDSEIAHAVRAHPDGAIFLSLFRDPKTSLTAAELVAEIGDSRARYPGSAALEADAGMCAVAVESGKRRSASFRRACDHRLRDAVATLADASRHHHPWAADVYRRARARGCDHPHAIRILGRAWLRVIWRMWQDHTPYDPARHGGLQRLVAQGG

SEQ ID NO: 179762 - protein, 387 aa, unidentified
MSEMFNPHASATAYDHNTTIVAVLELSGKNWLLGVVAPGLSVRMKRSFEARNVEAVVRALEQAKEKSAKAGFEVARIVVGFESGRDGFWIARALQQCGLEVYVMHAASIAVEQRGKRAKTDRLDVDLLLTTLMGWLRGEPGRCTMAPVPSEEEEDLREAGRRRETLVNARLKVENQIASLLIRQGIAGFKPRLKNAETKLGELRTFDGRPLPVNMMNSLRLLLAQHRLLSAQLKAIEEARQRVVNIADPDRLQRMIQALARVVGVGVETATVLVHEVFSRSFKDRRAVGAFVGLTGTPYNSGGSRTEQGISKNGNARVRRMLSQLAWRWLGHQPDSALAQWFKARLGGAKGRMKKVLIVALMRKLVIALWRLAETGEVPAGARLAAR

SEQ ID NO: 179763 - protein, 522 aa, unidentified
MVAKVRSRPSLGRKKFLVQKPRGQFTSRVQAVGPEHFGIITVDCAKACSKFMLADFFGNVYVPPTVVAHTQGGLQAAAERIRGALAEHDLRDFLVAIERTGEYHRPVQRAFRQLGWDVRIVHSFATYQYRQPADPGNKTDDTDLAALHRATVNGFGLIDTPWPDDYQQWQLLIRHRRDLVQKASGLRCQIREYLHAAMPGYAELFKDPWITAVVLPLARHFGSAAALRQAGRQGLQRFLHQAQLRCQQTTLARILAWAETAAPGYPHVDLLRSIVSTLDDDRLEKTRQILALERTAASFLARTPYVLLLMIPGINVVSAADLAGEMGPPSLYANANAITGRAGLVPTRYQSDRIDRANGPLRRCANRRLRTALLQIAENLVVCNHYFGARSVLWQQADKDPRWIRVKVAKIFSRLAFAIVVGRREFRHPCCQPRHYLLDKLLAFHREHATPMDQVLRDLQAATDQLPRSAYAEEAQPLAERLRAAQASRRGPQLLANILPLVLARLGVPHVESPLSEARDLS

SEQ ID NO: 179764 - protein, 404 aa, unidentified
MKYGVGIDISKGKSTVAIISCAGEVIAEPFEINHDQNGMSQLEEKIKEIPKEDLKIVMEETGTYHLPVLGYLLDKEYFVVAENALKIKKYLDRGIRKAKTDKKDAYKLAEYACDNWYKLNKVRESDEIYTNLRFLSRRYLSNISIQINQKVNFSNLCDLLFPGYYQLLDENIFILGLEIFKKYYHPELVSNKKQSQFINEIDKLAKKLGHKGAGITLAKKIYNLATQTISPYPNNKYSQLSAISCADELILTIKTSNEIISNMDELARELPEYYVISEIPGVGRKLTSRVIAEVGDIRRLKNAGSLIAYAGLDAPPYQSGQFEAINRHISKRGNKYLRKTGYEVMKAIKSSCKSDNELKSYIIKKENEGKLKKVAKIAGLNKFLRMYYGIVKKKYKELNVWQIV

SEQ ID NO: 179765 - protein, 371 aa, unidentified
MNHGTTRYVGLDVHKATITVAICEAAQPPTVFGTIANDPTAIGKLVKQLGRAHQLRLAYEAGATGYALYRQLHALGTACDVVAPALIPRPSGPRVKTDRRDALQLARLLRSGDLTPVWVPSPAQALRDLVRARYDAKADLLRAKNRLTKFLLRQGLTPPPGTRPWRARFEQWLTHLTFEHGPAQVVFADYRTAVRLEQDRVRHLEAALGRSALDAPQAGLIAALQALRGIGLLSAVTIVAEAGDFRRFARARGFMGFTGLTSSEHSSGPTQRRGGITRAGNAYLRHVLVQAAHNARHVPHRAAALQQRQAGLPIDLVDLAWRAQHRLHRRYLHLGPARSAESRGGGGARTRRLRLGGRPADATGATRLNAR

SEQ ID NO: 179766 - protein, 370 aa, unidentified
MIHNIQPGDKTKGDFHFFDFKPLIGMKKILKQVVGIDVAQKELVVSLGRMYEDLSTQIYACKTFPNQSNGFIALVGWVNQLTDQQVLPGYVMEATGVYHESLAYFLAEKGHLVSIVLPNKISNYFRTLEVKTITDKTSSQAITLFGLERKLDTWKKPAGIFKKLRQLTRERDQLIQHRTMTKNQLHAEQAEAEPNKSSVTRFKKQIIFFNKQEQQIRAELEALLKQDKQVSSSVKLICSLSGIGVLTATTILAETNGFELIRNKRQLVSYAGFDVREKQSGTSVKGKARISKKGNKYLRKAMHMPALSAIRSDERFKAVFARLVSKHGIKMKAVVAVQRKLLELIYTIYKTNTPYDKDFLKKLESSITAP

SEQ ID NO: 179767 - protein, 376 aa, unidentified
MNKVRFVGLDVHADTIAVAVAEPDGEVRALGTIPNRPDSIRRLVKRLGPPDRLRMCYEAGPTGYVLYWQLTGLGVPSDVIAPTLVPTKAGDRVKTDRRDAMKLARSYRAGDLTPVWVPDATHEALRDLVRAREAAKKDQLRARHRLGKFLLRTGRRPPLTMKAWTQQHLRWVKTVQYDHAAQEATLQDYLQEIEHVADRIARLEQAIDEAVKSVPDRMRAVIAALQALRGVAQVSAVTMVAELGELSRFASARQLMSYTGIVSSEDSSGTRTRRGAITKTGNAHLRRIVVEAAWAYRHRPGLGAALHKRQATVSPEIKAIAWKAQHRLHTRYRWLMAKGKHKQQVVTAIGRELLGFIWAIAVKVEAQRSDGQATAA

SEQ ID NO: 179768 - protein, 389 aa, unidentified
MIYVGIDVAAEKHACCILTESGKVLKQFTFSNDMPGFEKFHKALLTPSETKIGLESTGVYGNNLAEFLRRNGYETHIFNPLLVKKSIQATTLRKTKTDKSDAKHIAQYTKEHSQPNLEPSYHISELKSLSRGRFSLVRERSKVKAQAKGLLVQLFPEFSQAFSDVFGAAASAVLKQLPSARMIAQCPVGVLTDLLRTASHGRLGKVKAELLIDLAEHSVGIQSMALELQMQMLLQQIDLFTLQINRYEAAIKSEMETIQSPITTIPGIGCVLGAAILSEIGDIHRFTTPAKLQAYAGVDPSVGESGTSVSTPGRMVKHGSHYLRWALCQAARCVSLYDPIFAAYMKAKRDEGKHYCVACSHVAKKLTRVIYSILKNNTAYSLTYSQIGA

SEQ ID NO: 179769 - protein, 519 aa, unidentified
MSEPITYVGIDAHKVELHVALLAPDASAPVIWKVQNEARAVERLRRKLEKAAPGPVACCYEAGPCGYVLQRQLERGRVQCQVIAPALVPRKPGERIKTDRRDARKLAELHRAGLLTEVRPPTPAEEAVRDLCRARDDARADRQRCRHRLGKLLLRRGLHYPGRAWTQAHRRWVNGLTWPHPADRVVLDDYLLAIDQLDARLAELDAQLATVATTDPYREPVGWLRCFRGIDTLTAMLLLAELHDVQRFPTARALMAYLGLVPGEHSSGERHRRGPITKTGNTLARRLVVEAAWHYRHRPGVSRTLAQRRSGQPPRVIALADKAQQRRSFCLVVIGARAGTPGLAQCPATRSDFACAASMRVPPGVRRPNAPPTAGLAHWSTTGSPRPSAASNQRAVRRRQPHRRPRRRKLLRGSPGVRPRDGTVARRGPSVAAVRRLSTAAVVGGRPGPSLAAGGAFVPPGRAGDRCPGRRGCTAPGLAGRRAASATAAEFTPAQADAITNAVNLAAERRRRPGRVKGG

SEQ ID NO: 179770 - protein, 372 aa, unidentified
MGHHSEAFIGIDTSKSYNAVAIAEAGRGGEVRYIGELAATEAAMRKLVAKLAPKYRRLTFCYEAGPTGYGLYRLIKSLGQEVIVVAPTLIPKKPGDRVKTNRRDAVELAKLLRAGELTAVWVPDERHEAMRDLSRARLAAKKDLQGKRQQVSSLMLRLGRIYPGKKTWGPTHMDWLMSQKLERREQRIVLEELLEGVRQESERVERLEQAIREAVPEWSLAEVVTALQAMRGIDLIAAVTVLAEIGDLSRFPNPRELMGYLGLVPSESSTGDKVKRGGITKTGNHRARRILVEAAWAYRYPPRVSREKQPKIAAAPRRVREIAWKAQTRLCGRFRSLVRKNKPPTVAITAIARELSGFIWAINCEIMRARQA

SEQ ID NO: 179771 - protein, 346 aa, unidentified
MLHVGLDLSRKRVDVCLISSDGEVVDRLRAPTDRDGLHGLARRLQVYGQPVRGVVESMNGARFVHDELVGHGWEVLVADAQKVKGLAPLACKTDRIDARVLAELSFRDLVPAIWLPTPELRAERELVRYRLHLVKHRSTLKNRIHAALIAFGYHCPVADLFGVAGRRLLDSLEFPEPWKGNVKASLALIDDLDQRIDEIARRLRRSGADHRYVPLLMTAPGIGWINGYSIASEIGDITRFASPTKLVGYTGLAPRVKQSGQTDGRGPLPKHGPRYLRWGLMEAAMNAHDHPIFAERYQATKRRLGRQRGAKVAQIDLGRRLTEAIWYMLTRNQPFAPAGATFRLAA

SEQ ID NO: 179772 - protein, 343 aa, unidentified
MQTITTIGLDIAKSVFQVHGVDAPGQVVIRRQLKRRHVLSFFEKLPPCLVGIEACASSHYWSRELQALGHTVRLMPPAYVKPYVKRQKNDMADAEAICEAVTRANMRFVPTKTPEQQSCLMLHRTRHLFIRQQTAVINSIRAHLAEFGIVAPVGRKGVTELLHVVADPSDKRLPEVARACLAALGTQLLRLKDQILEFDRMIIAWHRSNQTSKRLHCIPGVGPMLATALVASVADPKTFRSGRNFSAWIGLVPKQHSSGGKDRLGSISKQGDRYLRSLFVAGALAVIRYAKIHGTKHRPWLTALLARRPTKVVAIALANKIARMAWAMMAKGERYKQPVALAA

SEQ ID NO: 179773 - protein, 424 aa, unidentified
MKPQINHIYAAYIGIDWADQKHDICLQAAGADTPEFAVLAHRPDSIEAWALSLKQRFHGQPIAVCLELAKGPIVYALQKYDFLVLFPVNPSTLAKYRQAFTPSNAKDDPSDARLQLELLMQHRDKLKPLQPEGVEMRTLQYLVEQRRGLVNDRVRLTNQLTYALKQYFPQVLEWFKDKDTLVFCDFLSRWSTLKQAQQARKTTLEAFFHAHHVRYPKVIEARVSAIKAAMPLTSDVSVILPHQLLVQALAQQLRVLLASIEHFDTKIAAISQALPDYPLFQALPGAGPIYAPRLLAAFGEQRARYQSAAELQKYAGIAPVTERSGKKCWVHWRLQCPKFLRQTFVEWAAETIPRSFWAGAYYRQKREKGCSHQAALRALAFKWVRILYRCWQTRTPYDESSYLNALKRRGSSLLNSIREDTKMA

SEQ ID NO: 179774 - protein, 440 aa, unidentified
MQILYSRCCGIDVHKNSVTACVLVYASDKEPEVRQKEFLTHFKALGYLRLWLLSQKVTHVALESTGVYWKPVWQALEGHFELILANPFQVKTMPGKKTDAADSHWLAELLAHGLIKPSFVPPRATRELRDLTRYRVKLTEERNRVPNRIHKVLEDACLKLDAVASDILGASGRAIIKAIITGPEDPDWLADHAKGTLRGKRPELRLALRGRITDHHRLMLGELMDDLEFVERKIQRLDREIASRIDVEKLTRLATIPGIDLITAWTLLAELGPEMSAFASPRHAAAWAGLCPGNHESGGKHLSHRTRKGNRWLRRALCQAAWAATRKKNCFLAAFFYRKAGKHGIRKAIVATAHRMLLIAFCILRDGTEYIELGGDYFDRLHPERTCNRMIRRFQRLGLDVIVKPRTDSTSDQSTLPPVLKKRGRPCKCVERAIPCKHRL

SEQ ID NO: 179775 - protein, 363 aa, unidentified
MHSVTTIGLDIAKSVFQVHGVDAHGKVVVRRQLKRRYVLPFFKKLPSCLVGVEACATSHHWSRELQALGHTVRLMPPAYVKPYLKRQKNDAADAEAICEAVLRPSMRFVETKTPAQQSCLMLHRTRHLFIRQQTAVINAIRAHLAEFGIVAPVGRNGVEELLDVVADPNDKRVPEIARECLAALGAQLRMLKTQVLQFDRRILAWHRSNETSKRLDEIPGVGPALATALVASIANPRAFRSGRDFSAWVGLVPKQNSSGGKERLGSITKRGDRYLRSLFTAGALAVIRYAKIHGAKHRPWLTRLLARRPTKVAAIALANKIARMAWAMMAKGERYREPVALAALTRIAPVSRRDVKVGRTNST

SEQ ID NO: 179776 - protein, 360 aa, unidentified
MDRLPSPLETTVKHYAGIDASLGSCSLSVVGESGKIFREGKVASEPVAVIAWFLSLGVAVERIGLEAGPLSQWLYAALREAGLPVELIETRHVRAALATMYVKTDRKDARGIAELMRVGWFRPVHCKSLAAQEVRAILTSRKLVQKKLHDVAMHLRGILRNFGLKVGRATQSSFAGRIRELVAGHATLEEIAAALLSVHEALLREFAKLEKRVRAMARADKLVRRFMTTPGVGPIVGLTYAAAIDDPLRFASSKKVGAHFGMTPRKYQSGETDINGRISKVGDVSVRTALYEAAHIILTHPVKGSALKSWAMRLARRAGMKKAKVALARKLAVILHRMWIDGTDFDFARGAASAQPAKAA

SEQ ID NO: 179777 - protein, 350 aa, unidentified
MSHRNLPRPAAVYGIDIGKNIFHVVGLGSDGTVIQKIRFRRDTLLQFFGRATPAVVGMESCAGSQWIARKIQTLGHKVRLIPAQFVKPYVKSNKSDIIDAEAIAEAATRPTMRFAAIKSEEQADLQALHRVRDQMIGTRTRLINQMRAFCLEYGIALRQGAGLFKLDLPQTLEDLSNDLSGAMRKLLTDLFNDLRQLEQRIADVTREIEAIAGREDVARRLMTIPGIGALGATALLAAVGNGRQFQKARDLAAWLGLVPKEYSTGGKQKLLGISKRGNRYVRKLLVHGARSCFRHLDRTKDRLGRWLDGLQARMHPNKAVVALAAKMARIIWVVLTKPGALYERRDPAFA

SEQ ID NO: 179778 - protein, 320 aa, unidentified
MQTPTLVLNIGADVAKDEIVVACSEGSFPTRPLANQRTALRAFLKSLPEGSCIGMESTGIYHELFANLAHKLGFVVFVLNPKDARYYAKGVGLHGKTDRVDAEMLARMIAHEHTNLHIWIPPTPEQREIDRLIKRRAKLSSLRQALGMSLKGLDGFKTDLKTLRVRFDQVIAHIDQRVKTLIEASPDRKEHVMHLSTIYGVGQVVSAALVNTLERVPLKNADAFVAFTGLDPRPDDSGQHRGKRRLSKRGPSELRRLLYLAALLAIKTKTWRPLYEHYRGKGLSSTAVIVILARRIARAAWSMYTYKTEFDSGRLTKGLT

SEQ ID NO: 179779 - protein, 355 aa, unidentified
MRSTAIQYVGIDVHQATLVCVVKDEAGQTTIESKVATRREAIESFVRGLSGRVHIAFEEGSQAQWLYELLRPISERVIVCDPRKIATKGNKDDQRDAERICELLRLNALQPVYHDHADQKLKELVRCYEALVDDSLRVMLRIRAIYRSRAISVKARSVYHPARRAEWLEQITDGGGRFRAEQLYVQLDQLLELRRRARTMVLRQACNYRAYRLLRTIPGIGPLRAAEIIAIIGDPHRFRTKRQLWAYAGLGVITRSSGEWIPDSRTGRIRRNSRPPMTRGLNRNFNRPLKKIFKMAAHDVTGRPGELDQSYERMIDRGMRPEMAYLTLARKIAAVVLAVWKKGVSFDPRLIAQSV

SEQ ID NO: 179780 - protein, 354 aa, unidentified
MRFYTKQHKFYCGVDLHAKTMYLCILDQEGEIKLQRDIKTDPEIFLRTISRYREDIVVGVECIFTWYWLADLCAREKITFVLGHALYMKAIHGGKAKNDKIDAHKIAALLRGGMMPMAYVYPPEMRSTRDLMRRRMHLVNKRAELLAHVQNTNHQYNLPEIGKNIARKCHREGVAERFPDVGVQKSVELDLALIDQYDQLLHRVEHEISLIAKKHDADSYFRLRSIPGIGRILSLVILYEIHDISRFERVQDFVSYCRLVKSARESGGKRLGSSGKKIGNVHLKWAFSEAAVLLLRRSPEVVKYREKLAKKHGKGKSLTILAHKIARAVYYILKRKEVFKRLLHKPQDYRYMIK

SEQ ID NO: 179781 - protein, 392 aa, unidentified
MVVSVGIDVSKDKHGCFIVSSEGEVLADAFIIPNTMDGFHYLLQRIRHCTAPQDKIKVGLEATGHYSYNLLGFLLDNGLTTYVLNPLRTNLYRKSLSLRKTKTDRVDARTIASMLLSDAGLKPYTDTAYHNEELKSLTRYRFDKVKERAKLKSSIARLVCILFPELEKLVPSLHIASVYALLEEFPGAKQVANTHLTRLKALLETASNGHYKRDMALEIRNAAKNSIGSQMPAKSLELQHTIRLIRKLDREIDEIEEQIQSIMDELHSPITTIPGLGFRMAAMILAEVGDFTRFDSPDKLLAYAGMSPSTYQSGQLKNCYPHMEKRGSRYLRYALYNATKYVCHWDPTFADYLAKKRAEGKHYNIAISHAAKKLVRLIFAMEKSRQPYCSAA

SEQ ID NO: 179782 - protein, 357 aa, unidentified
MTMSSRIINHKEVSMESMHYIGLDIHKKIIAYCIKTFNGKIVDQGTITATRKALNWWMEKLPQPWTVAMEATLFTGWIYDFLKPHAFKVMVAHPEMLKAITAAKKKNDRADAEKIADLLRVNLIPECYMAPAELRELRRILRYRNYIVRTAVKEKNKISGLLMEVGATYAKKRLHGKKYFDDFLGDIEDVPESVINMVKLSRSNLETFNEIQKKLIQTLKGDTLIRDRVKRLMSIPGVGEITALTWVLETGEAQRFGSIKQAISYCGLCSAQHESAGKEYRGPISKKRNKHIQTILIEAAKLAPIWNPQLAQVHKKEADRGNKNKATLAVARKLVAFMLSVEKSGKEFIAMEEKMAA

SEQ ID NO: 179783 - protein, 359 aa, unidentified
MMSMNHDQSPCRVVIGVDTHKYVHVAVALDELGTVRGDTAVPADRSGYERLLAWAGGMGKIAAFGIEGTGSYGAGLASLVRRRGHKVIEVARMDRRDRRLRGKNDLLDAHNAARVVLAGTATAIPKGADGVVEMLRQVKVAKDTAVKARTAAMITLRALIVNVAPELRESLQGLPKMALIERCAGLRPGQVDTPLAASKHALRSLARRWRELSAEVKEHEALLERLTRGVAPQLVDAFGIGPDTAAEVLIVAGDNPQRIRSEAAWAKLCGVAPLPASSGTTTRHRLNRGGHRQANAALYRTVIVRMQHHEATLAYVARRTTEGRTKAEIIRCLKRFLAREIWALMRPLREGSTALSEAA

SEQ ID NO: 179784 - protein, 412 aa, unidentified
MKDLLEISCGLDVHKEKIVACILTGPLGKPTRSEIREFSTLIPDMIALRNWIVSKNCHHVAMESTGIYWMPIYEILEDAFSGDITLLVVNARHMKNVPGKKTDMRDSEWISTLLRAGLLNGSFIPEKRIREFRALNRYRKSVIRDITSQKNRIEKFLQSSGFRLSSFISDIFGASGRNIILHLIEHGQIDKTALDSCLKTKTRNRIDEILMSVNGTLSEHQKAFLRILMTHYDSLKKHLAEIETSLEEDMAPFALQVEQLNSIYGISTTASCAIIAEIGIDMKPFKTAEHICSWAGLCPGNNESAGKRKSTSVTKGNPYIKSMLCEIAWVIAGKRNTYLSAWYWRIKQKKGAKKAIVALARKLLVIIYTMLKQGTLFDESCFETRRKRCEQKQLSRYIRELEKHGYHVEAQS

SEQ ID NO: 179785 - protein, 409 aa, unidentified
MQVVHEVCCGLDVHKKSVTACVVWAAGRRRQTRAFGTFTRDLLELGDWLRSCGATHVALESTGVYWKPVRNLLEGQFEVLLVNAQHIKAVPGRKTDQKDSEWIADLLQHGLLRPSFVPPTPTRELRDLTRYRASLAQEINRIANRIQKVLEDGNIKLASVATDTLGASGRAMLEAMVNGEQDSQRLAEMARGKLRNRIPELGRALEGRITAHHRFLLRELLDHLYFVESKMLRIEQEIEERLGPFQSEVARLCTIPGVDRVTAWGLLAEIGLNMSQFADARHLASWAGLCPGSHESAGKRKSGKIRKGSLWLRRCLCQAAWAVSTKKNNYLSALFRRLAARRGVKRATIAVAHNLLVIAYYILRDQTCYQDLGPDYFDRLNPDGLRRRLTKRLAGLGFKVTVEPLAQVA

SEQ ID NO: 179786 - protein, 343 aa, unidentified
MQITTVGLDLAKHIFQVHAVDGSGYVVARKRLRRTEMLSFFAGLSPCLIGMEACATAHHWARELTRLGHTVKLMPPAYVKAYVKRGKTDAADAEAICEAVQRPTMRFVPVKSGEQQSVLMLHRVRALLIRQRTMLVNALRGHLAEFGIIVAQGISRIRELIAILTDESADAVLPPLARRALAPLVDQLIDLQPRIRGLEAELLAWHRQSQESRRLETIPGVGFITATAIAATVPDPSLFRSGREFAAWLGLTPRPNSSGGKERLGRISKMGDGYLRTLLVVGATAVIRYARTKTAADAAWINSLLSKKPVRLVSVALANKMARIAWALLARGEVYRSVVVAAA

SEQ ID NO: 179787 - protein, 412 aa, unidentified
MEVIHSRCAGMDIAKRDAKVCIRLAGSGRRRTVETVTTWGATTRQILALRAHLVAERVTCIVMEATSDYWKPFYYLLEDLVGVEVMLVNARHVKNLPGRKTDVADATWLAQLGAHGLVRGSFVPPAAVRQLRDLTRTRTAVTRERGREIQRLEKVLEDAGIKLSSVASDITGVSGRAMLEALIAGNSDPTAMADLARRRLREKIPALTEALTGRFTGHHAFLTRTHLNLIDQHTAAIDELTARIEVVIEPFRRFRDLICTIPGIGGNTADVIVAETGADMSRFPSAEHLASWAGTTPGNNESAGKVKSSRTRPGNPYLQGALGIAAISVSHTKHTYLAAKYRRIASRRGPLKANVAVQRAMLIAIWNMATTDTAYLDPGADYFTRLNPEKARTKAIRQLEAMGYHVTLEQAS

SEQ ID NO: 179788 - protein, 351 aa, unidentified
MVIIGCDYHPGFEQIAKLDTETGQVEERRLSHKEEAQQFYASLADQEVLVGIEACGYTQWFEQMLGEVGHRYLIGDAAAIRASYVRRQKTDRRDARHILQLLVEGRFAALWTPTAAERDVRQLIVHRHKRVGQRTRVKNQLHALALNQGLRLRRRLWSEEGLDELRSLPLLPYADARRRDLLQQLQEMDAEIGRLDKMVRKEAERRPAAVRLMSHPGVGPVTALAFVLTIGDASRFSRSRQVASYLGLIPAERSSGGKQRLGHISKQGSPLLRFLLVEAGQSAVRGDAELRRFYGRVQHRHSTGVAKVAVARKLALRLYWMLREGCDSAQIRGPYAGKPVSFCGGKTGPAA

SEQ ID NO: 179789 - protein, 366 aa, unidentified
MVYKKLNSTGALIQRTTWRLLDKDMYYIGLDVHKKTISYCVKDVSGQIQRQGTIAATRAELDSWIKALPQPWTVAMEATIFTGWIYDHLLPHAAQVKVAHPLMLRAIAAAKKKNDRIDAGKIADCLRCDFLPECHMVSTEIRDRRRTLRYRHLLVRQMVQMKNRVSGLLLETGVTHNKQRLHKVKYFRELLESNKEVDESIRPLLRLSRETIVRLQKADYALVSSLERDPLLSERLKNLRTVPGVGPIPALTWALEIGDVSRFRSVKQAISYCGLCGDEKSSADKVLRTPLSKQRNKHMQRVLIEAAKLGPKLSHELASVYEKEKQKGHSNRATLAVARKMVTYLLAVDREHRAFVPAEDHNTAAA

SEQ ID NO: 179790 - protein, 340 aa, unidentified
MQVIRFGVDLAKGVIQVHGVDASGQVVVQRQLRRSQVLAFFAKQPKALIGMEACGSAHFWARELAGLGHEVRLMPAAYVKAYVRRNKNDARDAEACCEAVSRPTMRFVPVKTVEQQCARAIHKARDLLVRQRSQLTNCIRGLLYEMGVISAKGAGGIKALLERIEARDESLPAALLATLQPLARQWRGLEAELRGLDGEILAQTRRSEAARRLMAIPGVGPITAHAVIAAVGDGRQFASARDFAAWTGLTRKNHDTGGKHSLTGAISKAGDRSLRRLFVLGASSWLRHVRTRPEKGSAWVKGVLARRPVRVAVVAQAAKTARIVWAVLTSGQEYRDPATA

SEQ ID NO: 179791 - protein, 358 aa, unidentified
MVRESGTEKKDLQWVGVDVAKQTFQAALARPGQRFGLTKLGELPTESFPRTREGVERFVDWLALLLPAKREALNTRVVMETTGKYSIELAALMDAVGCGLRPAIVHARQTNAFIKSMNVRGKTDALEARALAFYGIERSPVAYEPLTEEQSTLRELVRHRRTLVEQKCNADNRGGEGSTSDYVRKARVREHNFLNKEIARVDKEIRECIAKSEALKKDYALLTTIHGVAFVTASVILAELGDLRRFERARQLSAFVGLSPREVQSGTSVFKKAHMCKQGNASVRQALYLAALTAVRDGGYLQENYRRACAQGKPKMVALGMIMRKLIVLMRTMLINNQEYDRNRRPNVQQNDIQEARA

SEQ ID NO: 179792 - protein, 344 aa, unidentified
MTKQTSPATISTIGIDIGKNSFHLIGFDERGAIVLRQKLSRGQIAVRFANLPSCLIGMEACVGSHHLSRRLQALGHEVRIMPALYVKPYLKGQKNDFRDAEAIAEAVERPTMRFVPTKTMEQLDLQALHRLRTRVVRQRTAVINQIRAFLLERGFAVRQGLNPLRQALPDILANPGDELSSRMVQMIEGLCEDWHHFDRRIDDLTGEIDVLVKGDEACQRLMTIPGVGPLTASAMVAAVGDGAAFRRGRDFGAWLGLVPRQMSTGDRTILGGISKRGNKHLRTLFIQGAWAVLMRSKNWSKYSFGSWLEAASKRLHRCVLVVALANKLARIAWSVLSHRQAYQA

SEQ ID NO: 179793 - protein, 411 aa, unidentified
MSASEYQFFVGVDWGSETHVVCVLDCDRRPIAERSVPHTGMGLNDLADELMSLAPSEPGRVAVAIEVPRGAIVDTLLARGIHVFSINPKPLDRFRDRHTVAGAKDDRRDAFVLADSLRTDRPAFRRVQPDHPRVVELRELSRIDDDLGQELRRLSNRLREQLHRFFPQALTLCPAADEPWFWALLDRVPTPAHAQRLPVKTVAAVLKVYRVRRVTAETIRDTLQTSALHVAPGTVEAASAHIALLLPRLRLLQEQRTAVAGRIEALLEELGKEEVPGEHRDVTILRSLPGVGRVVAATVLAEAARPLAERDYQTLRAHGGIAPVTRQSGKRVSISMRYGCNPRLRNAFYHWARTSVQNDPHCRAHYDRLRQHGHGHARALRGVADRSLGVLVAMLTSRTLYDSERRREIAS

SEQ ID NO: 179794 - protein, 339 aa, unidentified
MEYIAMDVHKKYTWARVENEKGDKLYECKLSHSHGTIENFVKRWTGGSAVAVETVGNWYWVVDEIEAGGGKPQLVNARLAKLMMGMVNKSDKLDAKGMNRLQRTGTLPTVWIPPSSVRDARELPRTRMVLSKQRTQLKNRVHATLGKYGFVVEGASDAFGKRGREILTELMAKLPPHTEQALGRVLDQLDHVCENLQWIEEKMIEVFAPCPQTLWLKSLPGVGDILAVVIWTEIGTIERFSRAEQLASYCGLVARENSSGGKFRFGPVRRDVNVYLKWAFVEAANSSVLNHISRLYERIKARRGHGKAKVAVARHLSEASFWMLKKGEPYREPMSSTQR

SEQ ID NO: 179795 - protein, 341 aa, unidentified
MLYAGIDIHKSVFQAVVLDPDSGELSECRFEPSRERLGEWASEWQGKLAAVAVESTTGWRWVARVLEQRGFEVHLVDPGRASALRGRRRRPKTDKLDARWLALVLARQLLSECEAWMPPAQIQLLRDQTRLRKSLVDSRTAWAQRLHALLAHEGWPCSRGRLLTPEGRRWVIALELDPCVRAQVDVMLTLILALDQQLKVVETELRRFARSDARCRALETIFGVGPIFACHLLAEIGDARRFKRSRQVVRASGLDPAVIESADSKRRGRLAKQGSPYLRWALVEAATHSSRSTSPDHDLYTSTAQRCGRGRARLTVARKIARRAYHLLAAVEATTLETHTA

SEQ ID NO: 179796 - protein, 353 aa, unidentified
MNSTILAIDLGKFNSVLCWFDPDARAERFRTTPTTPDDLRRELTRLPVARVVFEACSQAGWVHDLCVQLGLTAVVASTTGSAWQWKHVKRKTDRDDARKLARLAAVGEIEGVPVPPRAVRQWKSLIGLRRRLVSERVRGQNRIRGLLVCQGLPAPMGAKAWTETGLDGLARQARPLAECGPDELWRGELHLLLERHRFLDTRVRAVEARLDVIAASDTRMSLLESVPGVGVRTAEVIAVHLGDAARFRSADEVGAYAGLVPCQYQSGETDRRGRITRRGPRLLRAALVECAWCSLRYNGWARATWLRLQANGLSKKKAVVALARKLLVRCWAILRTGQPWHEPTRPAAVAAAG

SEQ ID NO: 179797 - protein, 346 aa, unidentified
MNQIIRIGMDTSKHIFQLHGVDAAERPVLRRKLRRNEVLAFFAKLAPTVIGMEACGAAHHWARELRKLGHEVKLMAPQHVKAYVKRNKNDGRDAEGLCEAMSRPTMQFVPVKTKEQQAALMLAGVRQQLITRRTQLSNAIRGYAAEFGLTTAKGLDKIEPLLARIALDESLPALARELLAMQGQDYARLQAELKAIEARLMAWHRANADSRRLAEIPGIGLIGATTLVMKTPDPCAFPSGRHFAAWLGLTPKDHSTAGKTRLGKITRAGDEMLRSLLVAGATAVIQQVRRGRGHASPWLIALLKRKPPKLAAVALANKIARIAWKLMVTGESYDGARMPGVSAFAA

SEQ ID NO: 179798 - protein, 386 aa, unidentified
MKRNDLSRSPVAFDQNTTLVAVIELSQKSWLIAGLAAGLAREPLKKQSADEETLLKLLHRWRDEAIKAGGTIKRIVVAFEAGRDGFWLARWLQAHEIEAYVIHPTSVPVSRDHRRPKSDRLDTALLMRAVLGWLRGEPKHCSMVAIPTLAQEDAKRPSREHEHLVGQRTSIVCRMKATMARHGIRNFKLRLAKAAEQIKKLRTPEGGTLPLNTLAELRRDVGRLQLVGDQIKQIEKQRLQRLRQAPQEGPHPMMRLLAKVMSIGIETADMLVNEVLSRNLRDERAVGRYGGMTGSPDESGSKRREKGLAKAGNARVRRGMIQLAWRWLMFQKESELAKWFANRTAGAGRDVRKKMIVALARKLLIALWRYVTTGEVPAGAKLRPAT

SEQ ID NO: 179799 - protein, 364 aa, unidentified
MVVVGTDAHKYSHTFVATDEVGRQLGEKTVKATTAGHATAIMWAREQFGLELIWGIEDCRNMSARLERDLLAAGQQVVRVPTKLMAQTRKSARSRGKSDPIDALAVARAVLRETDLPLATHDETSRELKLLTDRRDVLVAQRTSAINRLRWLVHELDPERAPAARSLDAAKHQQALRTWLDTQPGLVAELARAELTDIIRLTGEINTLAQRISARVHQVAPALLEIPGCAELTAAKIVGEAAGVTRFKSEAAFACHAAVAPIPVWSGNTAGQMRLSRLGNRQLNAALHRIALTQIRMTDSRGQAYYQRLQDAGKTKRAALRCLKRRLARTVFQALRTVHQPSSEHTQPAAACHRSYCSRSCLSG

SEQ ID NO: 179800 - protein, 340 aa, unidentified
MRIVGGLDVHRAQITFDYVDVDTGEVETGRIEPATRSEFRGWLARFDGVEAVFATEGCTGWRFVVEELERAGIGAHVAEPADTASLRGRKKRAKTDRADARHLRQLLIDDRLPESWIPPLEVLEIRVKVRTYMALMDQRRAFQQRIQAQLFHQGVEKRSGLLTRQGRGFLDDADLSVAGRQQIDVSLRVIDTLGVEADMLRDELEAFGRHHYGPRALTKHLYGVGALTGVIIWAEMGDTRRFSSSDKAVRHCGLDITVWSSDTKRSPGHLARQGPPALRWALFEAALSSAKKTSPDHGYYLDVKERLGAKRAYLSVSRKLARKAHHILRELGDTAYGQAA

SEQ ID NO: 179801 - protein, 412 aa, unidentified
MKLFVGIDVSSEKLDVCFLTDDNQLSILSEISVANDIEGASFIRETILEFNDSYHFDQIVIGMESTSMYSFHPSMFFHEDEKLKKLNTLVTIENPFRVKQFSRMFDENKTDRNDALRIADFLRIQRFTTSPIKEEKYMALQRLTRTRYQLIKQLIRTKQHFLENLTYKCNTLAREMRDESTSLFSATLISLMTEDFTLDELAELPLEAFCDLLQEKGKGRFKQPEKIAKAIQRAITMSYRLGALAQESINVVLSVLVREIRALEKNIKELDKAIEQVIVVIPEYQCLTSIPGVGKVYAAGLIAEIGQIERFEDQTKLAKYAGLSWKVNQSGNYQSQNTPLTKQGNRYFRYYLVEAANSVKNYLPEYKAFYQSKYKEVPKHQHKRALVLTARKFTRLVDTLLRKHQLDRKSVV

SEQ ID NO: 179802 - protein, 372 aa, unidentified
MKKIRFIGLDVHAETIAIAVAEPDGEVRSLGIIPNREESVRKLVKKLGPAEQLQACYEAGPTGYVLYWQLTALGVKCEVVAPSLVPVKAGDRVKTDRRDATKLARSYRAGDLTAVWVPNEEHEALRDLVRAREAAKQDQLRARHRLSKFLLRHGRRAPAGIKVWTQKHQQWIKEQVHFEQPAQEYTLLDYLHEVEHMADRIRRLEQAIEEAVKLAPPRMQEVIQALQALRGVAQISAVTIVAELGEISRFDGARQLMGYSGAVPSEHSSGKRIQRGPITKTGNTHLRRIAIEAAWAYRHRPTVGPALRKRQEGLSEEVKGIAWKAQHRLHKRYRNLVAAGKEKQKVVTAVGRELLGFIWAIGVQVERNSRVA

SEQ ID NO: 179803 - protein, 413 aa, unidentified
MEGLQPIYRRVAGIDVHRMLHVVTVVIEHPDGSIEQISKEFGGFKRDCRALAAWLVEWNVELVVMESTGIYWKSIYAHIERAGIQAWVVNAHFIKHVPGRKTDMNDSQWLAVLARFGLVRGSFIPPQDLRELRLLSRYRRKLNAMRASEVNRLHKILDDGGIKLGGVVSDINGVSARAMVAGLINGVGIEQLLDMARGALKGKREDLQAALDGDLTLRHMFVLKHLHEHIDTLQRELAELDAYILGAMAPYQWAHRLLQTIPGIDQIASALILIEIGDDMTRFGCADRLAAWAALCPGNNESAGKRKSGRTRKGNGVIRYILCECANAARMTKSSLAAKYKSLMVRKTHKKSIVSIAHKMIRLIYVLLSRKEAYHDPKIDYNAMSARKNAPRWIKQLKLIGKWPDNKSATASA

SEQ ID NO: 179804 - protein, 356 aa, unidentified
MSYDVKYIGMDVHKEAIVIAVLNEGGKLVMESVIETKASSILQFIHGLRGELHVTWEEGAWAAWLYDLLQPQVQHIVVCNPRRNALLKEGSKSDKVDARKLADLLRTGMLRPVYHGENGLRTLRELGRSYQTISKDLTRVMNRLKALYRGWGIPCAGTQVYGPRYREQWLNKIPQAGVRRRAELLYQQLDGLQALRRHLRPEFLAESRKHKASKLLRQIPCIGPIRAARLIALMQTPHRFRSKRQLWTYSGLGIETHDSAQFRFVSGQLQRSRKPQQIRGLNRNHNHEMKEIFKSAATRASWGRGPFHDFYVGLLAKGMKPEMARLTLARKIAAITLTLWKKEERFDAEQLKPQAG

SEQ ID NO: 179805 - protein, 367 aa, unidentified
MKKVSTAVVRQSRNICPPKLTIGLDLGDRNSWYCVLNEAGQIQLEQGVRTNAKALREVFGKMPRSRIALETGTHSPWISRLLSELGHEVIVAHARKVRLIGESRKKDDRLDAQTLARLARIDPELLSPVKHRSAQAQADLTVVRARAGLVRARTALVNTARSLAKSYGGRLRGCNVRNMNPEKAEGLSPELQSALEPLLAEIESLSERISEYNDRIEALAQHSYPQVALLKQIKGVGTLIALTFLLTLEDPHRFRKSRDVGCYLGLQPGRRNSGQSEPQMHISKEGDPYLRTLLVQGAQHILGPFGVDCDLRRWGLKLAERGGKSGKKRAIIATARKLAVLLHHLWVSGEVYEPLHNSSRTTFAAAA

SEQ ID NO: 179806 - protein, 334 aa, unidentified
MPCQSSYIGVDASSDYLDFDGLPGQSRRRLSNTPESHAAVAALLIASCRDDRDAVVVLEASGGCERGLHRVLVEAGVPAAIVNPQQVREFARSQGLRAKTDRVDAHAIRKFGEVRRPRPTALPDPVRAELIELLNYRDQIVAEIAARTLQRGHLTSAFVIKQAEAALERLRRDAEMLERVIEATVASDPELTRRAGLLTSFPGAGPLVAAVLVADMPELGTLNERQVASLAGVAPFACDSGKMRGVREIAGGRPKVRRALFHVARVGLRWNPVLKALYERLTARGKPSKVALVACMRKAVVILNAILKSGQPWDSDCGIKKKVAGQAAGNALAH

SEQ ID NO: 179807 - protein, 370 aa, unidentified
MKKRITFVGLDTHKNSIEVALADEGANSEVRLYGSIGGDLDSLDKMIRKLRIPGAELRFVYEAGPCGYEIYRHLRAQGLHCDVVAPSMVPRRSGDRIKNDRRDACNLARLYRAGELTAVYVPHEDDEAMRDLVRGRQDAINAQRKARQQLGGFLLRHGVRYPGKCLWSLAHGRWLAGIKMPHPAQQIMMQEYIHTVEECTQRVIRLNEQIQQLLPDWRMHPLVTALQALRGVAPVVATTVVVEIGPMGRFKNPRQLMAYLGLVPSERSSGGSVRRGAITKTGNGHARRALIEAAHSYRHPARISRTILKRQETLTEPVRQIAWKAQLRLCARFRRLIARGKSRNRAVAAVARELSGFMWAIAKQVPVPQG

SEQ ID NO: 179808 - protein, 343 aa, unidentified
MQIHSVGIDLGKTTFHLVALGAAGKVLVRKKFTQHQLLTYTANMQTSLIGLEACSGAHFLGRALRKQGHDVRLIAAQFVKPFVKSNKNDFVDAEAIAEAVDRKNMRFVPIKTDDQLDLQAIHRVRDRLISRRTAVINQLRAFLLERGLVFAKTPAKLRAAMPDILENAEADLTPQMRNLIDLLWGEWKTVEQQIEVLSLELERISAADAGCTRIRQIPGIGPIVATAIVAAIGNGAAFRKGREFAAWLGVVPGQYSTGGKAKLLGISKRGNVYLRKILIHGARAAVLRIKRDRSSIGVWMDALDARAPKNVVVVATANKLARIAWAVLSSGEDYRPIANALAA

SEQ ID NO: 179809 - protein, 342 aa, unidentified
MPPSAFKFDPVKFSQICGLNSNNKTLFNRKTTRTKLLIDVLNAKPDMIFMESCYSANYWGRLFESHGFTVKLIPAQHVKPFVKGNKNDKHDALAIAEASMRPNIHFVPIKTVEQQDIQCLHRVRQRLISYRTGLTNQIRGLLSDYGIIFLKGHHTILHSLPLLIEDMANNLSFDMRELLNDLLEELKNRNTQIKKTEERIKTISKTRKGFANLMDMPGIGLINSSAIVSAIGDAKQFSSARGFAAFLGLVPKHKQSGTTLRSMGISKNGNRYLRTLLIHGARTIVSRYKNMDDPLKQFAMKIKDKRGKHKAYVAVAHKMSRIIWAMLTKDQAYNPDYILTKK

SEQ ID NO: 179810 - protein, 316 aa, unidentified
MHAIGIDMSKDTFHAAFSDTAVKKFANTQDGIEQFMTSIEDLGFSVTDTRIGVEATGVYHLLLAVTLKDHKWNIAVINPLESHRMITQGLRTVKTDRLDAIKIRTMAMIGKGYRFTDTTDTLALKALMVERAALVDMRKMTKQRMEVHRRKEEATGVALHDSGSALLETLTDEIGAIEDAMSNYEEETQALLRSIPGVGKVSACALVAFIGDINRFSTPEKLVAFIGLDSRVFQSGTSVHGKGYISKRGNKYLRHMLFNAAFIARQHNPELGRYHAQKLAEGKHYFSALCAVERKLVHLIYAVWKRGTPYQKRENA

SEQ ID NO: 179811 - protein, 325 aa, unidentified
METKNLCCGIDVSHSTLDVCYQNNQGDVFHLKVGNNIAGFKRILEHTGTGYHFVMEATGVYYIRLAFFLHEQGCVLSVINALAIKRYIQMHLERNKTDKKDAAWICRYAVEQKPPYWQMPNDAYFESKQLYNTIREYTEQIKRFNNQLHSLRLLPIPSKDTITSLEKMKKQLAAEIKKLEEKLEALLQKWQPEQLKNISSIKGIGKRASAMLIVFTQGFKYTKNHRQLISFAGLSPTEYSSGTSIHGKTRIYKRGGKNLRDVLYMCAMNAIKTNTACKVLYERLRAKGKTGKQGLIAVCNKLLKQVFAVAKNGTLYQPNYCSARP

SEQ ID NO: 179812 - protein, 338 aa, unidentified
MTYYAGIDVSLESASVCVIDAAGKTIREGKVASEPEALTDWLMSLGVSLERVGLEAGPLSQWLHAGLRRMGIAAELLETRHVRRAFEIMTVKTDRKDARGIADLMRMGWFRPVHCKSLDAQETRAMLTARKLVQKQVFEVESSLRGILRGFGLKVGKTTPTRFEARVQELVAGHANLERIASSLLATRAVLRREFNGFERQLRSMARNDTRARLLMSTPGVGTIVALTYASAIDDPSRFTSSKTVGAHFGLTPKRYQSGETDYTGRISKLGDASVRAALYEAAHVILTKPLKGCTALKSWAMRIARRAGMSKAKVALARKLAVIMHRMLADGTTFKAA

SEQ ID NO: 179813 - protein, 399 aa, unidentified
MAEGVVAGIDWASEVHVACVLGGDGGVAGRFSFTHDAAAIRAMVRRLRSAGVAGVAIERGDGPVVEELLAAGLAVFVVPSRQIKGLRTRYGSAGNKDDRFDAYVLADTLRTDGHRWKPLRPDTEATRALRALCRSRKDLVETRVQVLAQLRANLDLAFPGAIGLFTKPASAISLAFLRRFPTAVKAAWLSPARLASWLRSAGYTGGVSATVLHARLIAAAPGLAGAEGEARGQITLAFAGMTAALNEQIRVLDAEIGRLFAVHPDQHIFASLPRSGTIRAATLLAEIGDCRQRFPTDDALAALAGACPSTRQSGKRSQAVFRWSCSKKLRAAVMDFANGSRMSDPWAAAIYAAATARGCRHPHAIRILARAWLRIIWRCWQDGTAFDPALHRGRHTAAA

SEQ ID NO: 179814 - protein, 343 aa, unidentified
MKNVKKHVTGIDVSKDELVVCQGHLYEDLSIELFAHKNFPNTTRGFESLVKWVEKSGSANRYVMEATGVYFESLAYYLSDNGYQVSVVLPNKISNYFRTLEIKTITDQTAAEAITQFGLERMLDNWQAPKGIYRKLRQLTRERYQVVETRTVAKNQLHAESSEAYPNKTSLARIKKHIAFLDKQEAEIKAELSELLKEDSEMKKIIVILCSIPGVGLLTAAAVLAETNGFNLIRNKRQLTSYAGLDVREKQSGISIKGKPKISKKGNKYLRRAMHLPALAAIRHDERFKTIFVRLVSKHGIKMKAAVAVQRKLLELIFTLFKTQTKYDKDFFKTTAVAIPIKG

SEQ ID NO: 179815 - protein, 388 aa, unidentified
METRTVNSLPLADHDGAVRCLLAIELSKKSWIVAVNAPLSDKVGRHTLRAGDWKGLLDLITRIRTRVVEALNRPVEIISCYEAGYDGFWLHRVLAAHGVRNYVIDPASLQVDRRARRVKTDKIDLGRLLRSLMAYLRGEPKVWSVVRVPSVAEEDDRRLHRERNRLINERVQHVNRIKGLCAVHGIYDYEPLRPNRLARLEQLRAADGCELPPRFKAEIMRELQRLELVLNMIKTLEAERDAIASTGKSSTHANAKKIQDLIRLKSVGPEIGTTLVGEVFYRQFNNRQQLGSYVGLTPSHLQSGSSSRDQGISNAGNPKARTIMIELAWLWLRHQPNSPLSLWFRERVGTGKGRIRRIAIVAVARKLLISLWRYLETGVVPTGAVLKG

SEQ ID NO: 179816 - protein, 341 aa, unidentified
MEAMRECCCGLDIHQATIVACLLKGPLDRKPQKEIREFGATTSELLKLRDWLEAEGCVDVAFESTGIYWRPVYNVLFGACDMTLGNACDIKNKPGRKTDRKDAEWIAELHRCGMISKSFIAPPEIQELRDVTRYRKKLIGHATAERNRISKLLESANIKISSVLSDLFGVSGRNLLESLIGGEVITPDRLSGLVHGKIRKKIPELVDALNGQVTGHLREMIDYSYEHLKYLETQIEKLEHKLDEKLKPLFKEVELLDTIPGVGRTVAASILAELGSDMSVFPTPAQAASWAGVSPGNNESAGKKKDLKPLMVTSGFGEHSSKQLGLLNTPEPTWAQNSGVW

SEQ ID NO: 179817 - protein, 342 aa, unidentified
MNKVAIAAIDLGKNSFHLHAQDERGHELYRKKFTRVALVQHLANLEPCTVVMEACGGAHFMAQQAAKFGHTAKLIAPHLVRPYVKSNKNDFADAEAICEAATRPTMRFVPAKTQAQQALAMLNSTRDSFIKDRTATVNRIHAALLEVGISLAPGFKSINELTALLEASSLPDPIKKLLIRMHDHFDYLHEQIKSLDKELECQAAEDDLAARLMTIPCVGPITSSALAAELGDGKQFKCGRGYSASIGLVPKQHSTGGKTVLLGISKRGDRNQRRLLIQCARVYLMHLDRQKGVLAEWVRHLIATHHHSNHVVCALANKLARIAWAIAAHHTVFDAGPSAMNA

SEQ ID NO: 179818 - protein, 464 aa, unidentified
MLITRGSSHLTQPGINSLLQVPQIPIGKDGDTMLKINFMSTLFVGIDVSSKSNVVYAMDFYKNKYISSSFANNQPGAEELAGMILDCLHKHPDLTTVVAALESTSVYSVHIANYLSTCERLMSYKPYVFCLNPKMTANYRKSFIGLSKTDPLDAFVIADFARAGRIECEPWRGSQYLALKRLTRHRLHLAGCISREKTYMVSNLYLKFSELQLLQDDDRPFSNLYGAASSAVLTEFMSVQDIIDAPEEELLQFLAQKSRNRIQDLSKTSALLKKAARDSYRLDKCMYEPINISLASSFNCIETYQKEIKAIDKAIEKTIRGMTPNALTILQSIPGIGPVWAAGMIAEIGSISAFHSSDALAKYAGLTWRRNDSGDFEAEDTPVTKAGNSYLRYYFGEAANSVRRHIPEYQAYYAKKYAEVPKHQHKRALALTSRKLVRLVFGLLAKNQLYTGEQLDAEPNKESN

SEQ ID NO: 179819 - protein, 340 aa, unidentified
MTFEKITVVGLDLAKNVFQVHAIDEVGNVIVRRQLRRNQLLHFFEQLPRCLVGMEACSTSHYWARELGALGFDVKLMPPVYVKPYVKRGKNDAADAEAICEAVTRPTMRFVPVKTCERQALLMQHKTRDLFVRQRTAIINALRGHLAEFGIITPQGKFGLKGALEALHVVKDHLPEPSWQPFKHIQMQLEELSNKIAELDRTIMQWCRGQAAARRLMTIPGIGFLTAAAIAASVGNADEFKSARQFAAWLGLTPRQNSSGGKERLGRISKQGDRTIRRLLVVGATAVIRRARIDAPSFPWIAKLLQRKPARMVSIAIANKTARVAWALLRREETYRHATG

SEQ ID NO: 179820 - protein, 397 aa, unidentified
MYCGIDVSKNKSNVCILDKDRKKISEFEIEHTKEGLEKLKQNLTKETKIALEVTGNYSKVVYNNLKDDYDIMYVDGVQMSNIAKYHSPTIKNDKVDAELLAKALSFPDLIKVNPLRANELRDLSKLYQKIKKQIIMYKSMFRDQMDIIFPELESVMPNGNNEGVAKLLLQHPTPKRIAQLSHEEIISAMKKDMKKGSGNFKIERAIKLKELASNSIGDSSYPVACFIYTIETMLYFLKLKKALKKSLDDVLSKTPYYKLMENYGFKVVSLSTIVGEIGDVRRFDNYKKFVSYCGFGIYENRSGTSVNKSSRLSKRGNKLLRFAFYTLTLTQIRKGEEIANYFNKLKERGKHPKKCLIACARKLAVKTYFDMMKCHDGGVIFQKLDLNNKSHLEKHGL

SEQ ID NO: 179821 - protein, 365 aa, unidentified
MSKLAKVDRFFKNVNLTSDDEVFVGVDVHKKSYHVALCLNDTPAIDFRMNAEPKQLNKKLGAMAGSIKDIVYESGPTGYGLARDLRKNKLPANVVATSRIPCPAGAADKTDRLDSIKLAQYAAKGLLSPIVIPTPKQEADRQLYRMRHRQALQFAKVKVQIKSFLLMHGIDEPDGLANWSVASVGGLRDMKLLKTLRLSLDELLSDYDYFDNRVKVLNKVLADNLDKGVLGRRIDLLKTHPGVGPVIACQFVTELYHYDDFNSTRQLYKYLGLSPRISQSGERSSSGPINKAANGRLRNNLIQGAWSWVRTDIEAKKCFWRIYENCGSIKQKAIVAMARKMSGHLWAMLMNDQPYDKNKAKCRHN

SEQ ID NO: 179822 - protein, 347 aa, unidentified
MKAPQYYVGIDIASASFTCSVGKMEGRWQIVVRPASFANEYDSFSAYLNWLHDHGVKPDNSVICMEATGVYNEVLAHFLWANGYTVAIEPPLKVKRAFKPEGHKSDPVDSTQIAEYAYRFWDELSQWTPRKEILEQIKTLLTTREQFVVERSGHQNALQALKRKQVRTPMAEKMHERAIEELKRHAQEIEAEIQRLIDQDPDLRNLAALLISIPGVGALLAAHMLLLFKSAPEPYNPKSLAAFIGICPYESSSGTSVRGPSTSRHYGPPALRKLLHLAAMSIATHQQQFRLYYLRKVKEGKPKQLVINNLANKLIKIMVAVARTRTKFIPNYCSVNPALLKMTLTKS

SEQ ID NO: 179823 - protein, 412 aa, unidentified
MDEVVEFCAGLDVHRDTVVATARFPQGRQRGSETKTFGTDTAELVALGDWLISHRVTRVGLESTGVYWKPVFYLLEDRIEQLWLLNAQHLKNVPGRKTDVVDSAWIAQLVEHGLVRPSFVPSPPIRELRDFTRHRRALSEERTRMVQRLEKVLQDAGIKLTSVASTVLSKSARAMLEAMLAGESDPVVLAELAKGRMRSKIPALTDALRGSFRVCHHGVLVRQILAHVDFLDAQLAEIDEQITTRVATFEPIIERVQTIPGVARKCAIGMIAEIGVDMSVFATPAHLASWAGICPGNNASGGKARSGRTRHGPVALKTVLTEAAQAAARTKNTYLGARYHAIRGRRGTFKAVGAIRHDILIAYWHIVTADVGYQDLGVDWVARRHSREHQIARLAKQIEKLGAAVEITMPAA

SEQ ID NO: 179824 - protein, 347 aa, unidentified
MGETITTRLTIGVDLAKNVFQVHGVDAAGEVVFRRQLRRGQVLPFFRKQGPCLVGMEACATAHHWAREIASLGHEVRLMPPRYVKPYVKRNKNDAADAEAICEAVTRPTMRFVAIKSPEQQSVLMLHRTRELMVRQRTMLVNAIRAHMAEFGIVVRVGLPQVEALLATIDNEADDRLPPLARTCLSGLAAQFMSLQAEIGVAEKRIHAWHRASEVSRRLETVPGIGPIIASALAASITDPSVFKSGRELAAWIGLVPRQNSTGGKDRLGRISKQGDHYLRWLLVAGAMAVIRQARRRDTANPWLARLIANKPTKVVAVALANKIARVAWVLMRDGGTYQRPIAAAAA

SEQ ID NO: 179825 - protein, 332 aa, unidentified
MTNANATDCIFAGIDVSKCKLDLARTGIQQVATFTNDPAGIAQLVEVLRQTPPKLVVVEATGGLERPLLDALLEANLPVHLANPKHVRYYALSLGILAKTDPIDAHVIERYAAQLSPRLLQKRSEKQTELEAMVTRRRQLLNLRTQQGNQLEATRSKLARKSIQAVLKVLEKQISSMNRQIRKLIESDDDMDDIDKLLRSVPGIGNVASATLLCEMSELGTLDRRRAAALVGVAPFNHDSGKNKGKRVIRGGRASVRNVLYMSALTAIRCNPIIQTFAGRLAKAGKLPKVIIAAAMRKLVCIINAMVRDGLSWDQLDIVKKFNSLKSVPSTI

SEQ ID NO: 179826 - protein, 321 aa, unidentified
MTYIGIDVSKNDFVVAYSPDKSCRTRTFKNTTKGIHEFIRTICKGEHHCVMEATGNYSALLVYLLSEAGITTSLENPLKVKNFARAMLSTVKTDEIDARLIALYGEKMQPAPYKLRSDAILTLKQKRTVIRQLKKQLFATRNLKGSMEVLPFFDAKCKRSIDKTIAFLEKQVKDLEEDLASLAKSEYKKQIDLLTSVKGIGITLAAALIMVTGGFTYFDNAKQLTRYLGLSPTYQQSGTSVNFKGHINRNGDSSLRSQLYVAAFSSIRCNTECRACYDRLRSKGKPGKVAVIAVANKLIRQAFAVVTQEKPYVDGYISSQK

SEQ ID NO: 179827 - protein, 325 aa, unidentified
MEPKKLCCGIDVSHTTLDVCYQNNLGELFHLKVGNNNKGFATILEHTGSDYHFVMEATGVYYIRLAFYLHERSCKLSVVNALSIKRYIQMQLERNKSDKKDAAWICRYAMDQRPSYWEMPDSAYFESKQLYNTIREYAEQIKRFNNQLHSLKLLPVPSKDTIKSLEKIKQQLEKEITNLEGKLETLLQSWQPDQLKSISSIKGIGKRATAMLIVFTQGFKNTHSHRQLISFAGLSPTEYSSGSSIQGKPRIYKRGGKNLRDVLYMCSMNAIKTNTACKALYDRLRTNGKTGKQALIAVCNKLLKQVFAVVKNNTLYQPNYCSAKP

SEQ ID NO: 179828 - protein, 339 aa, unidentified
MKLTPVGIDIAKNVFQVHHIDEETGEIVNKPIKRAKFLEYFVNRAPCLIGMEACGGAHHWARQLTRMGHQVKLMPGEYVKAFNIRNKKDAADARAIWLAVQQPSKPVAIKTEMQQAMLALHRTREQLVKFRTMQINALRGLLTEYGEVMAKGRAPRDRAMPDVLARVADRLPAALIDTLREQWNGLTGLDEQIATIERRMREWKKENKEVKAISEIPGVGLLTATAAVATIGDAKAFRSGREFAACIGLVPKQTGSGGKVKLHGISKRGDTYLRTLLIHGARSVITNAKQPDPWIEQMKKRRPPNVVVVALANKMARTIWAVLAHDRPYQRGYVSTKPA

SEQ ID NO: 179829 - protein, 347 aa, unidentified
MHYVGMDCHITTLDFAVVDDAGRLVKSCKVDTSAKNFMEFVKSVAPPRIVYMEESALAAWALETCIRFGEKLVITDPKQNHWIGSSTQKDDPLDALKLAQLGRGDFIKEIRHPVGDRRRFRELMDSYHDTVKRTTRIKNKIKSQFRQNGIQCTGMTVYSETYREEWRQKLPQDQTLLLIVEGLWNQLRESEQTEKNLLKAARNFAKHYPEIKLFEDIPGIGFISAATISAILETPHRFANKRKVWMYAGLGITTRSSGGKTYSEKLSKDYNRLLKYTLKQVAETAVQAKDNPFRQKYMAMTTLRGIAPHRAKLTISRDLLATMWAMWKKGEEYNPEIRTNPGYKQVS

SEQ ID NO: 179830 - protein, 316 aa, unidentified
MTDALYVGLDVAKDSFDVASDPAGLKLSLPNDPKGRQKLLDALQTHRVALIVLEATGGYERRLAAELIQAGHNVVVANPRQVRDFARGMGQLAKTDALDAAVLAEFARVVQPKPRPRPSGQMEALSELVTRRRQLTDLLTQESNRLPMARHAPVRKSLQKIVRALEQQIIDLDKLIHDNIQSDDGLRRKNEIVRSFKGVGPGTSSMLLSHLPELGRLNRQEIAALVGVAPWACTSGTWIGKFKIWGGRREVRNMLYMAALAALRSNPVIANFYQRLISKGKLFKVAITACMRKMLVILNTLVRNDCLWSPEFPKND

SEQ ID NO: 179831 - protein, 344 aa, unidentified
MNIATIGVDLAKSVFQVHGIDEAGEVVVSKAPRRSQMMPFFTRLEPSLVDMEACGTSHYWARELCHLGRRVKLMPPAYVKPYVKRGKTDAGDAEAICEAVTRPTMRFVAIKSPEQQSVLALHRAQRLLVHQRTQLVNMIRGQLAEFGIVFVQGIQPAHRLANQLAEGAAPDIPPLAIKVIATLAEQLRALQVRIKGLEKDLKICSRDNKAVKRLKTIPGIGAITASALDATVTNPHQYSSGRQFAASLGLTPRANFSGGKERMGHISKMGDQYLRRLLVSGMTSQLQSVRRNPDDHPWVMGLLQRKPAKLVAVAMANKAARIAWAVMTRDEDYRTCQPNVEPGA

SEQ ID NO: 179832 - protein, 319 aa, unidentified
MAQNDVVVVGTDVAKDKVDACIRSLGARQSFPSTTQGHRKLVAWLRKHQVGKAVMEASGGYERVWAKVLREAGIEVRIVDPKRVRSFALSAGRLAKNDAIDAEMIAWFAETFSDAPSQTYDAAREGLQALVKARLDLIDSRIRLVGQSEHAAPGLAQKTHARILKSLASEIAKLEAAIYAKIRSTPDFAERAEIIESVPGFAETSAANLVAGMPELGQVSNEIAAALIGVAPYDDDSGKRRGERHIKGGRRWVRNAIYMPCVGAATLNNPVLKAYYRRLLTKGKEPKVAVIACMRKLIVILNTMIARRQKWDPSRYTLN

SEQ ID NO: 179833 - protein, 427 aa, unidentified
MHDATYQPTLCVGADVHLDEIVLRAVDKALGHEVLEGFRVTNNLPGAQLAAATIAQAATEGGYRRIEIGWEATGMLWIPFHRHLSTNPLLQAFDLQLACFNPKLVAKFKDGLVLRSPKNDNRDAFDIAARLRFGELPVSYVPNDFWQGLRRLTRYRYRLSRALSQEKMRFQSQTFLKCSDWKRANAFSDIFGATSVALLTEFTSAELHHMSQDQLVDLIAQRGRSRFDDPAATARAVRQSLHTSYPIDPPMDEMVTSALAASWDHIHYLNRAMKRLDHLISRYIDPVPNPLITVKGLGPIITAGILAEIVDVFRFPEHKHLAQFMGLTWHTRSTGSFVSQDTRLTKVGNVYLRYFFILGANSLRQHNLEYKAYYWRKYQEVSKYQHKRALVLTARKLVRLVHALLTKNEPYVRPQMSVLNQEDDRLQ

SEQ ID NO: 179834 - protein, 410 aa, unidentified
MLCRVGRSPLDGCGVRDAGGGRLTKMWRDFRTISAGLTELAAWLVEQGVTHVAMEATGVYWMPVYAALERAGGFDLTVVNPHQAKAFRKRKTDIKDAEWLAYLVRHDLVNKSFVPAKPFRDLRDLTRYRRTLMETQASERRRLIKLLEAVGVKLAEVLSDVFGVSGRRILGALIAGGQSPLEMAEFAIGQLRRKRTPIIDALSVEIEEHRRRLLAIQLARVEEAEANIDAVDKMIKDRMAPYDEHLGLFVGVPGIDWVTAATVIAEVGIDLSCFPTVNHFAAWRGVCPGNNESAGKKTPIGARKGNPYLVTALCNAATSAARTRGSFFKGAYHRIKRKRGGGRATLAVAHRLAIAIYHMITKKTAFHDLGEHHNRTRDKRRAAKQCVRRLKKLGFAVILQPIQDAAAQGA

SEQ ID NO: 179835 - protein, 363 aa, unidentified
MDGPTATSSCQDEVVDRDIPSRSRPWSKLSRSGWDLAKNVFQVHGIDAADKVLVRRQLRRGDVLRFFGRLPRCLVGMEACATAHHWARELTKLGHTVRLMPPAYVKPYVKRGKTDIADAEAIAEAVTRPTMRFVAIKTADQQAALMLHKVRELLVRQRTMLINALRGHLAEFGIVAARGPGGVTAAIIALHEAQDRLPELARVALHGLIDQLRIVRGEIARVEKRIVAWHRASNASRRLATIPGIGPITASAIAAAVPDATLFQSGRQFAAWLGLTPRARNSGGKERLVGISKQGDGYIRRLLVTGATAVIRLARQGNASKTWAAKLLERKSARLVSVALANKTARIAWTVLARNQSYVAPAM

SEQ ID NO: 179836 - protein, 313 aa, unidentified
MKHIPSNVFIGVDVSKDRLDVAVAPSGESMRFANSEDGIALLADFLKPRNPELVLFEATGGWEMNAVNHLVAQRLPLVVLNPRQVRDFAKATGQLAKTDAIDARILARFGQAVRPEVRSLKPLELRKLDALNTRRRQIVEMLTAEQNRLVSAPEWIRPDIEDLIAILKKRLAAINRDLNKLIRKSPLWREKDKILQSFPGVGPITASTIIAALPELGTLTRRQIAALVGVAPLNCDSGTHKGKRKIWGGRADIRSVLYMCAMTAARCNPVIRPFYQKLLRAGKPNKVARTACMRRVLVILNAMMRSNTCWQPT

SEQ ID NO: 179837 - protein, 344 aa, unidentified
MDHFAGLDVSVKETSVCIVDETGKVVREVKVASEPEALLAVLKNPAYHFARIGLEAGPLSQWLFSALAEAELPVVCVETRHMQAVLKAQINKTDRNDARGIAQMMRVGLYRPVHVKTLRSQKLRMLLTHRKLLQSKAIAIENDLRGTLRNFGLKVGMVGKVKFETRIKELLENLPDLAELVEPLLIVRRTLSEQIVILHRRLLAIVRDDEVCRRLMTIPGVGPVVALTYRATVDVPARFRKSKSVGAVFGLTCSKYQSGEIDRSGRISRCGDEMMRVMLYEAAQSMLRSKKWCWLKAWAMQIARRRGMKKAIVALARRLAVIMHRIWVDGTEFRWTREQAAAAA

SEQ ID NO: 179838 - protein, 339 aa, unidentified
MYYSGIDQHKRNSFITTYDSKGTVVKQMRVSNNPLLIQNYFAQFPGPHKAVVESTGSWYWLADLLQQHDVELTLAHATRLKAISTAKVKTDKVDSNIMALLLRADLIPEAHMINSDKRGPRDIMRTRLRLISKCAGCKNSIERLLEKFNVTTITELDDLYQLQARAHEDQIALMEQQIHKIECTLHPSLIPNEDIQRLLWIPGIGKVNAFTIYTEIDDIERFPSVNQFFSYCRLVPGADNSAGKNRHRSGSKAGNCYLKLAFSHAGVRAVQYYPEIKAFYKAKLRRKPERIARTLVSLEIARIVYQVLKTRKDFNGRFKNQQLSRTKQSQWPRLASPAA

SEQ ID NO: 179839 - protein, 315 aa, unidentified
MTTPGRFLGIDVSKRQLDIAERPSGERWSAANDVAGIAGAVERLRASGPLALIVLEATGGYEIPLVAALSAAALPVVVVNARQIRDFARAVGKLAKTDALDAAILAHFAEAVRPELRTLPDELTQTLQGWLARRRQLLEMLLAEEQRLALAVRGVRPQIEQHVEWLRSQLRNVDTELKTLIRESPVWREHENLLRTVPGVGPVLATTLLADLPELGRLNRKQIAALVGVAPLNRDSGLQRGARHVWGGRAPVRAALYMATVSAVRCNVVIRTFFERLCAAGKPKKLALTACMRKLLTILNAMMHARTGWQPALAA

SEQ ID NO: 179840 - protein, 340 aa, unidentified
MKKVFIGIDFSKLKFDAAIYLLDTKEFVSNDEFENNTEGYQAFMAWVNEKVVCKKSALLFCGEHTGYYSYNLPIALFEKGYDIWLTSGLDIKLSLGIKREKTDKLDAQAIALYSCRHVDKFIAFQPVSEAIVAIKDLLAYRNRLVEIRKMLSTASGELNRVRKTDSSQFICQESKDQIKDLDKKILACEKRIKAVIKQDTVLSVNYKLMTSIKGIGLVNSVLIIVATGNFTLFDDPRKFGCYAGVVPFKHKSGTSVNGKTRVSRLANKAIKASLTLAARNSIRFDPQMREYYIRKKAEGKNDWLILNNVKNKLVHRVFAVVRTGKEYDLNYSNQLKSKAA

SEQ ID NO: 179841 - protein, 339 aa, unidentified
MSKLTQPRQAMVFCGIDVSAATLAVAVQQENQRFEERVFDNTASGHKALIGWLRKDKAPARVSLEATGIYSLDLALALDQAEGIEVAVLNPKLMHRFAQTLRRSKTDSADAQVLAEYSCRMPFTPWSAPELSGLRLRTISRHIQSLVVEQTRQNNRLHNAEKSATTPRCVVNDLKRSMASLKLRIVRLRREALELVRSDEAMRKRFDLLILIPGIAAISALQLLGELAPLSPEMSVRQWVAHSGLDPSHQVSGTSVHKPSRISRAGNRHLRHALYMPALVAVRRDPHLKAFYETLLNRHKAKLQALIAVARKLLHAIYGILRTQTAYDGSKLFPLMETT

SEQ ID NO: 179842 - protein, 365 aa, unidentified
MQKISTMQTSGENIFQGQLTIGLDLGDRSSAYCVLNEAGEIVLEHKLASTPEAMKQVFGSMPQCRIAMETGTHSPWVSRLLTALGHEVIVGHAQKVRLISKSRRKDDRLDARTLARLARIDPELLSPVKHRSAQAQLHLTEIRARAVLVSARTALVNAARGLVKSYGERLRKCGTQQFSRETTSGLSTGLREALEPLLREVESLNERIQEYDRRIEKMAKQTYPETALLKQLKGVGDLIATTYVLTIEDPYRFRKSRDAGSFVGLQPGRRNSGESEPQMRISKEGDEYLRTLLVQGAHYILGPFGKDSDLRRWGLKLSARGGKNAKKRAVVAVARKLAVLLHRLWVSGEVYEPLRNSQKAMSAAA

SEQ ID NO: 179843 - protein, 521 aa, unidentified
MATRTASRRHRRSHEIQKPTGTLHPRVQAVGPERFGIVCIDCAKARSKFLLADFYGTVLLPPTVINHDRGGFEAAIQAVHAAAQRLRLGVVIVVVERTGRFHLPVQAAFQAAGFEVRIVHPFATKQFRQPADPGNKTDDTDLSAIHRAAVNGFGLLEHEPDPLYADLQLLARHRRDLVTKNVTLRNQIHDHFQLIMPGFSAVIDPFDSPLPLWIVKNLQSADAILEVGVLGLLRRLREAGFHPHLKTVEKIVAWSKAAPAQHSQSPSHLRLLMSLDGDRMTKLEAIRTVEGDLAGFLARTPYVLLLGIPGINVATAAEFAGEMGPIGRYPKARSITGRAGLFPSRYQSDTVDRSNGALVRRGNHSLREVILRIADNLITCNDYFRIQAAKWRLSGKDPRDIHVKVGGRFCRIAYQMVAGQSVYRHPSCQHRHYVLEKLIKFLNEHNVDCARTMLILDSAVCQLPRSEHRSEAVPLTEELSRPRSKRGTGPQLLGEILPAVLAKLGVNLLPSSVSGEPDPTE

SEQ ID NO: 179844 - protein, 458 aa, unidentified
MNTRILGIDLAVTAAHKAIVLDQASNAYVSRLLTFHTDPADLDYVLDTARAGASGPVRLQAVLEATAMSWYTVGQYLDRHNVEVYRVNGQQVADLRRVYQRHAKSDRIDARVLARLPLVMPDSLHRCFFPSGPLITLQRACREVKRLKDLVTASKNRILATDQLTWLGLKGIVSPYSDLAFWLRENWYDPWRVQAAGVEQLAQAWQTAAPEEPVGVSWIPALIEQAERVIALYNNPDLLDYAQFQASLQREQARLRQADEQAHHLRLKTVRPLYRQLHPSLDLETLRGVGQDSAAIYLAFIGDIQRFPSLRDFLGWSGLIPFSRQSGEAQARGLRVTKAGPNLVKATAFLNAGIARLWDPQISAIYYRQMMQHGKHHLQATCACATHLLTRIYAVLRDDRPYELRDVDGTPVDKHTARRICQERYHVPDEVRQRNNRRVRKARQEARLEKHRKRKRRR

SEQ ID NO: 179845 - protein, 312 aa, unidentified
MDAIYVGIDVSKDRLDVAVRPNGESFFVSRNGAGIDELIGRLKTVSPRLAAIEATGGFETVVAAGLAGAGLPVVVVNPAQVRAFAQALGRRAKTDPIDAAVIAHFAEATKPQVRQLPDETTQMLADLVSRRRQIVEMIASESQRARRITSARLKKSIARLHKALEKELSDLDGEIGDHVRGTPAWAEKEDLLASVPGIGPTIARSLIAELPELGSLDRRQIAALAGLAPWTRQSGQWRGKSFIGGGRANVRRVLFMGAMVAARFNPELKRFRDRLVAAGKPKLVAIIAVARKLLTILNAILRDKTPWQLKNA

SEQ ID NO: 179846 - protein, 342 aa, unidentified
MNHYAGIDVSLECSSVCVVDASGKIVREAKVTSEPEALIAWLRSQSFGLERVGLEAGPLSQWLFAAMKAAGLAVELLETRHVRDAFKAMPVKSDRNDARGIAQLMRLGWFRPVHCKSLSAQETRSLLTARKLVQSKLRDVENSLRGILRGFGLKVGKTTERGFAGRIQELVAGHAHLAMIADALLAVREALRKEFKAFEKQTRKMVRSDTRARLLTTVPAVGPIVALTYASAIDDPGRFASSKRVGAHFGLTPKKYQSGETDYTGRISKIGDGSVRTALYEAAHIMLTKAVKGCSQLKSWAMRIARRAGMNKAKVALARRLAVIMHRMLADGTPFNAAASAA

SEQ ID NO: 179847 - protein, 375 aa, unidentified
MKTLHRRCAGLDVHSDSVVACARVIVRTKVTHEVRRFSTATRDLLEMADWLAAQGITHVAMEATGVYWKPIWHILEGRFELILANAAHIRNVPGRKSDVNDAVWISDLLAHGLIRASFVPPAQIQDVRDLTRTRTQLAREIAQHIQRIQKTLEDANIKLTSVISDIVGMSGRRILKAMIAGETNAAKLAKLGSTRLKCTRAELTAALDGRVTAHHRFLIAHHLSLIEDMERHIAAFDARIEELLVPLRDALAQLITIPGVSRVSAQVILAEIGADMTPFSTSGHLLSWAGLVPRLDESAGKRRSTRIRKGAPWLKPVLVQCAWGAARTKGTYYQAQFLRLKARRGPKKAAIAVAASLLTAVYHMLKNGTFHQLTE

SEQ ID NO: 179848 - protein, 341 aa, unidentified
MSNANSYIGVDLHKKTCFITVMNEMGKIKRQTEIKNEKETICEFFKRYNDASVAVESTMNWMPFYENLENMGFNVVLSNPLQTKAIAAARIKNDKVDSRVLADLLRTNFLPTAYLQPREVRDLKELVRQRMNYVDMRTQIKNQIHSVLFKSGISHSFSNLYGKAGMEFLKKLELREVYRRQLDWHLTALGNISVQIKEMSEVIEKTAKADFDCRLLATIPGIGYFNALLIKSEIGDIARFANANKLCSYAGLIPSTYASADKVRHGRITKRGSKWLRKALVDSITSGCRHEGRLAYVYRKLKKSKGTGKARVATARKLCHIIFAILTDKQPFREFAPVKQR

SEQ ID NO: 179849 - protein, 339 aa, unidentified
MEKRHMGIDLHRNRFTCCVRLENGRNYLSTWKLEALPQFVKKLRPGDEVAVEVTGNTRLFYEAVAPRVVAVDPHQFRVISHSVKKTDPNDARNLALYLAKGLLPEVRMKEKTQAQIASLTQTRDTLVKLRTALKNKVNNILSAHGINLEKEALSSEKKLREVLAMRFDPMIRIELKVIVEQIRSLNESIAELEKTITEEGQKLPGHKNLTSIKGIGPLTGSILLSVIGDIHDFADEGKLAAYFGIVPRVSNSNETERSGRITKRGSKLGRTALVQCALIAQRYSPYLKRFYEKTKARRGTGKAIIALARKLLGIVYRTLKNNWVFEDFPNFVLAEEAAA

SEQ ID NO: 179850 - protein, 339 aa, unidentified
MRLYAAFDLHSSNSYLGIVEESGKRTFKRRLRNQPELIRETIEPFKDDIVGIVVESTYNWYWLVDFLMEEGYRVHLANPSQIKQYSGLKHSDDKNDAFWLAEMLRLKILPEGYIYPKEHRPLRDLLRKRGHLVKLRTSLIVSLQNILARNVGSKMNTNALKALKEDKVTPLLAGNDDISLAGRVSKEAIDSLTRQIWAIEAVVEKKIDLRKPYDLLLSMPGVGRVLALTIMMETGPINRFNKVGNYVSYCRKVPSGRFSNEKKKGSGNRKNGNKYLSWAYAEAAGLARRLDTEARAYHDRKRRRTNTPIAYGALAHKLARAAFYIMRDGVPFMHEKAFA

SEQ ID NO: 179851 - protein, 360 aa, unidentified
MAKAKTLVGLDVHATKIVAVVLDAETGQLQTFSMDGDAAGAAGFCAGLPRPVRVAYEAGPTGYGLARELVRRGIECVVAAPSKIPRASGDRVKTDRRDAEHLVRLLLAGKLHAVRIPGDEEEALRDLVRAREAVRVDLMRSRHRLSKLLLRHGIRFDDGQAWTERHRRWLETVKLDWAAAQATLLDARGAIDALVHRREQLEREIVGLLPACPWTVQVARLRCLRGVDTLTAVGLCSEIGDFARFARAEQLMSYVGLVPSEFTTGQQRRLGSITKTGSEHARRLLVEAAWHYRKRPAVGTALTDRQQDQPPEVIAVAWSAQRRLHRTWTRLEQRAKRRTIIAVAAARELAGFAWAICQIE

SEQ ID NO: 179852 - protein, 341 aa, unidentified
MSEVTTIGLDIAKQVFHVHGADGRGAPLFSRKLSRSKLLSFFAGQPRCVVAMEACGSAHHWAREIKALGHDARLIAPGYVKPFVKRQKNDARDAEAICEAAQRPTMRFVAVKSEEQQASASVFRVRDLLVRQRTQLINALRGLAGEYGWVTAKGHYHVTALMGQIEDPSCALPAAARDALLVLVKNVRELNQQIDDLDAQIARRARQDEDARRLMTIPCVGQVVATAILALAPPPQTFGCGRDFAAWMGLTPEQESTGGKEKLGKITRMGDRTLRRLLIIGAASVVRQALIHGAPEGSWLARMLARKPRMLVIVALANKTARIIWALLAKGGVYKAPAVAA

SEQ ID NO: 179853 - protein, 354 aa, unidentified
MKRTTKYVALDVHQATTFASVREDSGRVIARSVLPTDGPALTEFFRGMRGAIHVAVEDGTQAQWLHDLLAPRVDRVIVCDRRGHPRPGSKDDRRDADELSEQLRCGGLRVVYHGGGAGAGLKELTRCYQNLVEDTTRVMLRLKALFRARAIRTPGKGVYHPARRAEWLAQLPDGGARVRAEALWAELDALQALRPKAKAAMLAAAARAPGWSVLRTIPFFGPVRVAMLLATLQTPWRFRTKRHLWAYAGLAVVTRSSADYQIVDGQAVRRWRAPLTRGLNRNHNRVLKHVFKSAATAVKARPGPLQDWHRALVARGLREELADVTLARKLAAITLRLWKKGERYDPTQLTRQAR

SEQ ID NO: 179854 - protein, 427 aa, unidentified
MNYTQNEKIMSITKSTLVIGIDIAKQFQYARAFDYRGIELSKVKSFENTSAGFKTFQEWLKLVAKENKKDNIIVGLEPTGHYWFTLGNFLKELGIKLVLVNPFHVKRSKELDDNSQTKNDLKDPKTIAKLVIDGRYSQPYIPEGIYSELRIAMGMRESLTRNLNIIKNKVDHWLDKYFPEFNDVFAKWEGKAALMSLTEFSTPEQVLSTGVQQIVSIWKKEVKRAVGIQRAVRLVEAAKISIGIKEGLKMAKKELEANLEQYELYMKQNEQLEIEIEELAFQVPGVKEMVSIKGVGIMTAAGFIAEVGDIKRFTHPSQIQKLAGLNLIENSSGKHKGKTSISKRGRSRLRAILFRVIMPLVSKNNEFKMLHEFYTNRKENPLKKKQSLILLCCKLIRIFFAVITKKVEYNPQKLLSDTGFNLQFKVA

SEQ ID NO: 179855 - protein, 365 aa, unidentified
MTETVYCGVDFHARMQTIAYCDSANGEIHLAQLDHRKDDVRGFYSQFTGPVIVGLESGGYSSWFETMLEELGHTVWIGHATEIRRRANWRQKNDRRDAELVLEIMLRGDFPRIHCHSRESVEVLRMLRYRARLIKMRTMICNNLQAIAISCGLTERSRMLSRAGQERLKSARMTPVIKQQSEELLTLLVPINERIGRVERWLKQQASTDERVKLLMTHPGVGVLTALGVVHTLEPFNRFSKQRSVVAYVGLEPMERSSAERKRYIGISKAGSRLLRFLLGEAAHVAVRLDPELKQFHERIGKRRGKAKATVAVARKLLIRCWIMLRENIDYAEFRGRGVEARLARLGHRPSMPEVVIERPASSDR

SEQ ID NO: 179856 - protein, 347 aa, unidentified
MMRILALDLGKYKTVACEYEAESGRHRFATVLTTPKALHDLIVDREPQRVVIEICSIAGWVGDLVRSLGIELQVANTSDERWQWRKVKQKNDRRDALKAAQLSAVNQLCPVHVPELTMRQWRALIAYRSKLVQRRTKVKNHIRDLLLREGQLLPRGRTAWTQAGLATLAAMAQPFAVLESEQLWRGELGIELAQLTELQQQIMTVHAKLDELAAADARVQLLRTIPGVGPRLAEAIVTMFDEVTRFSTAGQVGAYIGMVPKQFDSGETQRSGRITRHGNRLVRSLLVEIAWASLRHNPWARQTFQRISGGKKSRRKIAIVAVGRKLLVRCWGMLRHQTPWHWQPGVA

SEQ ID NO: 179857 - protein, 360 aa, unidentified
MDVQINKLDFKGQNIYVGIDVHLKSWSVAVLSEHSVLKKFSQNPDAESLYKFLANNYPGANYCSVYEAGFCGFWIHRKLLRLGINNIVVNPADVPTMSKEKLRKTDAVDCGKLARELRSGTLIGIYVPDEAVLEMRSLIRLRRSIVKDTTREKNRIKSLLRFHGVAIPEQFTKHSAGNWSKHFLKWLQEVELSTEYGRETLDLHTEQLLRLRGMLLQETKAIRIISRKSPFDETIHLLISVPGIGITTAISLLVEIDDIGRFANSDQLASFIGLTPMCHSSGEKEGAGNLTLRKHATLRGLLVEAAWVAIRKDPAMTLAFEGFRKKMIAQKAIVKIARKLVNRIFFVLKRRQEYAPCMVK

SEQ ID NO: 179858 - protein, 467 aa, unidentified
MRKAKRKVKSAAAVGKKPLTLLEQINFNAAGIDVGSREHWVAVPGERDPRPVRCFGTFTSDLHALADWLLQCGVQSVAMESTGVYWLPVFQILESRGLEVLLVNARQVKNVSGRKSDVSDCQWLQQLHSYGLLAGSFRPEAQVCVLRSYLRHRGHLVEQASTQIQLMQKALTQMNVQLHHVLSDVTGVTGMAILDAILGGEREPLKLAQLKDPRVRSSVETIAKALTGDYRPEHLFVLQQARESYRFLQAQIADCDVEVDKVLSGWEVKVDLEQQPLAPTRKKNRSKSKHKPLPFNLREQLYRVTGVDLTEVDGLDVLSVQALLSEIGLNMHRWPSEKHFASWLGLCPDHRISGGQVLHNRTRPVLNRAADVLRMAAQSLKDSQSALGAFFRRLKARLGPAKAITATAHKLARIVYLLLKYGHNYVDPGAQYYEQRYRENILKSLKKRAASLGYTLVENSALNLQVS

SEQ ID NO: 179859 - protein, 402 aa, unidentified
MNAVGIDVSKSKSVVAIMRPFGEIVSTPFEIKHTASDIHSLIELINSVEGESRIVMEHTGRYYEVLAHQLLEANLFVSAINPKLIKDFDNDSLRKVKSDKADAVKIARYALDKWQNLKQYNVMNELRNQLKTMNRQFGFYMKHKTAMKNNLIGILDQTYPGVNTYFDSPARSDGSQKWVDFASTYWHVDCVRKMSLNAFIDHYQNWCKRKKYNFSQSKAEEIYGKAKELVPVLSKDAITKLIIKQAVDQLNSASTTVESLRTLMNETASKLPEYPVVMAMKGVGTSLGPQLMAEIGNVSRFTHKSAITAFAGVDPGVNESGTYEQKSVPTSKRGSADLRKTLFQVMDVLIKTHPQDDPVYQFLDKKRAQGKPYYVYMTAGANKFLRIYYGRVKEYLASLPES

SEQ ID NO: 179860 - protein, 387 aa, unidentified
MAEPPFEVILGVDTHAQVHVAAVLDHLGRLQATLTIPATPAGYRQLLTWAAQHGHLTRAGVEGTGTYGAGLTRCLTRAGVKVIEVDRPNRQRRRRRGKSDPTDAEAAARAVLAGEATATPKTRSGIVESIRVLRVARSSAVKARTQTANQLRDLLVTAPDTLRAQLYPLPTAKRVAQLAAQHPGHGADPAVATRRALWYLARRYQTFTAELDALNADLAVLTRRAAPRLLARYGVGVETAGSLLVTAGDNPDRLGSDAALAALCGASPVEASSGKTVRHRLNRGGDRQANNALWVIALTRLRDDPRTLVYAERRTKQGKTTKEIMRCLKRSIARELFPLLKADLHDACQLSLTQELRSVALVPARPRDEAAVLSARVIGSTPAKLRG

SEQ ID NO: 179861 - protein, 371 aa, unidentified
MNEFSKYVGLDVHKETIAVSVADAQGGEARFQGEIANTPEDVVKLVRRLKKEQGGLTFCYEAGPCGYELHRQLRELRQECQVVAPSMIPKKPGDRVKTDRRDSLSLARLFRAGELTPVWVPDQAQEALRDLTRAREDMKHLQRVAKQRLLAFLLRRRRRYSGKKNWTQAHFRWLETLKFDQPVQQIVFQEYVDTILAMTRRVAAFDAQIETAGAESAFSRQIEGYMALRGIDRLTATTIVAEIGDLRRFPDAPQLMKYLGVVPSEHSSGSTRSQGGITKTGNGHVRRVLVEAAWTYRHPARKSALLQRRAEKAPETVQDIAWAAQKRLCARYRMFEAKGKPRGQICTAIARELTGYIWAIGQVLSPPQAKA

SEQ ID NO: 179862 - protein, 405 aa, unidentified
MPYFAGLDWGGAGHAVAVVDQTGTLVLSLEVTHDAAGLAELHRKLGRLAPAGEIPIAIERPSGLIVDALVGAGHPVVPIHPNVVKACRPRYRAAGGKSDPGDAYMLADILRTDGHRFRPLRPCSDEIKALRALVRGRDDLVAERVCLANRLRSLLDSFWPGAATVFADIASPIALAFVQRYPTPEAAARLGEKRMKAFLAGQSYCGRRSPADLLARLRAAPTGLAGEAEAEAKGEMVRALAAVLERLVAEIARIAARIEYAVAELPEGKIVMSFPRTGRICAAQILAELGDIRERFPTADQLAAEAGVSPVTHASGKSRGVVFRWACNHRLRAAITCFADNSRHASPWAADVYKRARGRGCDHPHAVRILARAWIRVLWRAWMDGTPYNQAEHTAAITHNQALAA

SEQ ID NO: 179863 - protein, 466 aa, unidentified
MTPHKDYCLDPPPPATPTFPQSPVLSEALQVCHPHAAGIDIGEAEHWVAVPPGGDPQPVRRFGTFTADLDALADWLIDCGVTTVAMESTGVYWIPLFELLETRGIQVLLIDPRQAKRAPGRPKTDRLDCQWLQRLHAYGLLAGAFRPEDQVCVLRSYLRHRQMLLTYAAHHIQHMHKALQQMNLKLPQVVSDLTGVTGMGIIKAIVAGERDPVTLAQLRNPHCQHDEDEIAKALQGTWRAEHLFALQQAVELYAFYHQQITQCDQQINAHLETFGDKSAGQPLPPKAHRHKKTNEPRFDARTPLYRMAGVDLTTIEGIEENTALIILSEIGTDMHRWPSVKHFCSWLGLCPQHQISGGKVLSRRVRPGAHRVTVALRLAARSLHHSQSALGAFFRRMKARLGTPKAITATAHRLARLVYTLLQHGSAYVQQGLEAYEAQYRERKVTTMAKQAKALGYTLVPLPAQG

SEQ ID NO: 179864 - protein, 311 aa, unidentified
MKTFVGIDVAKAHVDLYDTVSQTHCQFENHSEGIIKCTDYLATLDPQLIVMESTGGYESSLAVALQSTGLPVAVVNPRWVRDFGRAAGQLAKTDRIDAILLANYASAMKPPQRSLGDRKNRHMKALVARRYQLLQMRTAEYNRREHSLDKAIVRSLAAVIKTFDREIEKIEQQLQKLISASKELSQRVQALISVPGIGETTATMLVTEVPELGQLNRRQIAALIGVAPINRDSGSFRGKRMTGGGRRRVRARLFMPVLVACQYNPVLTAFYKRLQEQGKSKMTALVAAMRKMLTILNTMLAKNETWNPKLT

SEQ ID NO: 179865 - protein, 406 aa, unidentified
MFYGGIDVAKYRHEICIVDESGNVILQIFVDNTRNGLDKLIHNLKRLEIEVSNVEFCLEATGHYWLSLYYHLTELGYKIHVINPIQSDALRNFYVRKTKTDRKDAHLLADIVRFGHISETKLASETVLKLQNLSRLRFEFVRQVGGLKNRVLGILDRIFPEYPQCFSNVFINTSRELLKSFTAPEDLAEADLSELTDFLNKHSRGRLGVDRAKQIQALAKGTFGINIALDAFTLELRLLVEQIEFIEEQISVIEEAIDQVMEEMRPSKDTAYRHVLETIPGIGPVLAASIIGEIGDINRFPNAKALVAYAGLDATVRSSGQFEGTRDRISKRGSPVLRHSIWLAAVSARRFNPEMKEFFEKKRSEGKHTLVATGAVARRMVHLIYSLWKDNRPFDPNYQWSPTNSR

SEQ ID NO: 179866 - protein, 343 aa, unidentified
MKITTVGMDLAKNVFQVHGVDERGKAVLKKPLKREQVAPFFANLPPCLIGMEACGSSHHWARKLEAFGHTVKLMAPQFVKPYVKTNKNDAADAEAICEAVGRPNMRFVPIKNGEQQAVLAMHRARQGFVKARTAQANQIRGLLAEYGIIIPQGIGHIAKRLPDILEDGENGLPGAFRQLLHRLGDHLKELDRQVGELEVQIQIWHRENEASKKLAQIPGIGPITASALVASIGDAKSFENGRQLAAWLGLVPKQHSSGGKQLLLGISKHGDTYLRTLLIHGARAVIRVAERKASYAQSWLAQLIGRRNKNVAVVALANKNARIVWALLAHERDYQPGYEPSAA

SEQ ID NO: 179867 - protein, 327 aa, unidentified
MSIAMIGLDTAKTTFQVHGVDETEKVEIKRKLRRNEVVGFFATQPACTVVLEACAAAHHWGRVLETLGHTVKLVAPKAVRPFVKRGRKNDAADASALCEVARRPEVKFVPVKSVEQQATLALQAARALLVKQQTMLSNALRGLAAEFGLIVPQGFVKLEQLMGMVEAENQAILPEPARQSLKALYRRFCAMVEEATMLEKAIGAHAREDATARRLATIPGVGPITASLIAPTVTDIGLFRSARHFAAWLGLVPRQHSTGGKARLGRITKAGSSAIRTSLLLGATAMVHRASQWNSAAGPGYAVCWDAAPFGWPPWPWRARSRALPGR

SEQ ID NO: 179868 - protein, 416 aa, unidentified
MNYNPCITIDVSQGKSHIQGFIGYNNKNRKPDNITQPKVMRHSKQGFNKIIELISIIKSKTNLIPLVIFEFTGVYHKTLEKFLQKNNIKYHIVAPLRAAKSRQNDIRSVKTDKRDCLSLAGMFYDIKNDSLGKFDSESEFYESMKQLNRFYENIKLRQQELKVNFRECLAIIYPNYEITKSNLDGAFKNVYSKESLGFLKEFPHPELVVKKTVQEIEETIIKYLGKIHSKYSLSIASRLLDYCKDLVSGCSINQPLVDNLQFYISQIELYENTLNDTLDKLITLAENTSLYHLLLTIPCVKENLASRFVAEIGDINRFNSYKAIISFVGNDPKIYQSGDDLGLHKKITKKGNKHLRTIIYLIAQQMTKAKNIESSVKNFYKKKTQQGLPKLAALIACSNKLIRIIYYMNKTGCAFV

SEQ ID NO: 179869 - protein, 392 aa, unidentified
MRGQRNEISFRGQKIYIGIDVHLKSWSVTVLSETSVLKKFSQHPSPEALHGFLARSYPGAEYHSVYEAGFCGFWIHERLTALGIDNIVVNPGDVPTKSSEKLRKSDAVDSSKLARSLRANELKGIYTPDSASLEMRSLIRLKNSITKDTTRQKNRIKSQLRYLGIGIPQEFLEPFSNWSKRFIAWLKEVETLTPSGRQAFDIQIRHLEELRRQKLEMTRALRTLAKTDRFREPLRLIMTVPPLRLIMIVPGFGQATGMAFLSEICDIARFRNAEQLAAYIGMIPMCHSSGEKDGTGDITVRRNAVMRCNLIEAAWVAVRQDPAMNLFFTEQCKRMPKSKAIVKVARNWSTDYTSHSSTRLIMSIVSCHRETLPVNGFSQREYYMMFAALTSA

SEQ ID NO: 179870 - protein, 350 aa, unidentified
MVIIGCDYHPSFQQIALVNTEGGELDERRLVHPEQAQQFYQELKQRNVAARVGMEASGHARWFERLLRELGFELWIGDAAKIRSKRVRKQKTDRQDAQLLLQLLMENRFPRIWVPDAENRDLRQLLWHRHRLVRMRTQVMNQLHVVALNEGLRRKKALWRPAGRKELESFTLAPWASRRRQDLLELLDQLTPKIQALTQALEAEVEKRPVTRLLMTHPGVGPLTALAFELVIGTPQRFHCGKQIASYVGLVPTEESSGERRRLGHISKQGNVLLRFLLVEAAQVTVRSQAQWRGKFFHLAMRRGRKIAKVAMARKLAVHMYWMWRQGCDYGQLEKFGSYAGEPGNLDDGQ

SEQ ID NO: 179871 - protein, 414 aa, unidentified
MSYKIAGIDVHKKVLMVVVMDASTPDLKPERRRFATMPSDLRQLSTWLRERGVEEAVMESTAQYWRSVWLELEPYMRLELAQAFSNRAPRGRKHDFKDAERLVRRLIANELILSFVPDGEQRTWRSMTRMKLQLTRDRVRLQSQMECLLEEMRIKLSHVVSDLLGSSGLRILRALAQGETEPKRLALLGDDRLKCSEEQLVDALTGRPQPMHRQMLGLQLERLQLLDGQIAKLNGLIAQAMKPHQDAVIRLAEVPGLGVDSAQQVIAEVGVKAGTFPSAAEFTSWVGTCPGKDESAEENHSTRSAKGNKYLRRVLNQAAHAAVKKNGSHFQAVFRRLLPRLGYQSAIWAIAHRLCRVVWKILHEGVRFIEQGTEPDPKAKKQRARMLARALRKLGYEVAITPISLATSQNETRI

SEQ ID NO: 179872 - protein, 347 aa, unidentified
MDQQCHYVGLDVSLETTSICVIDDAGAIIWRGKCCSDPDTITAILRQHAPGAVRVGLETGQLSNWLTLSLRRRGVPVVCLDARHAKAALSLQINKTDANDAFGLAQVVRTGWYREVAVKSMDARTLRMLLVARSRLVSQRQATANTIRGLLKIFGLVVARGSKGLFSVRVREQIAGNPALIAIIEPLLAVWYAIRDQVTMLDQQMLARARNDQVARRLMTIPGVGVVIALAYAAVIDDPARFRRSVSVGAYLGLTPRRYQSGEVDTTGYISKCGDSLLRGYLYEAAAVLLYRDGRASVLKSWSLGLAKRIGMRRAKVAVARKLAVIMHRIWSDHSEYRRTATPPTTA

SEQ ID NO: 179873 - protein, 344 aa, unidentified
MDYYAGIDVSLEYSSVCVVDASGKVVREAKVVSEPEALIGWFGSLGLELARIGLEAGPLSQWLYAAMKQAGLAVELLETRHVSDAFKAMPVKSDRNDARKIAQLMRLGWFRPVHCKSITAQEIRAMLTARKLVQSKLLDLENSLRGILRGFGLKVGKTTRTNFARRIEELVKGQANLQTIGQALLRARAVLLAEFNGFEKRVRAMSRLHDKARLLMSTPAVGPIVSLTFACAIDDPSRFTSSKQAGPHFGLTPKKYQSGETDYTGRISKHGDASVREALYEAAHLMLTKPIKGCSELKSWAMRIARRAGTNKAKVALARKLAVIMLRMLKDNVPFNPAAKPATA

SEQ ID NO: 179874 - protein, 366 aa, unidentified
MKKISTMQAFSNEILKEQKLTIGLDLGDRWSFYCVLDEAGKIILEQKVATVPEAMKQTFGKIPRSLIALETGTHSPWVSRLLTELGHEVIVAHAQKVELITKSNRKDDRHDARTLARLARIDPELLGPVRHRSAKAQIHLTVIRARAELVSARTALVNAARGLVKPFGERLPKCGTQQVSRGLAGGLSAELREVLEPLLQEVESLNQRIQEYDERMEKIAKEAYPEVSLLKQVKGVGTQIALTYVLTIEDPYRFPKSRAVGCFLGLKPGRRNSGESEPQKGISKEGDRYLRTMMVQGAHYILGPFGEDSDLRRWGLKLAERGGKNAKKRAVVAVARKLAVLLHRLWVSGEVYEPLRNSQKAMNAAA

SEQ ID NO: 179875 - protein, 315 aa, unidentified
MMNNIHIAVDLAKNVFQIAECNASDKIISRKRLNRTQFQCYLAEPRENAIIIMEACGTAHHWGRIAQAAGHRVALLHAHYVKPYRRRNKTDRNDSEAILNAFRAEGLTPVPVKTVAQQQIQQLHCLREMWKSNRNQRINLLRGILREHGFDNAAKTDDFLRQCNEAIDSAELKALAPQMHIVLAEIQHLSEWMATCEQQLHQLLQQDEIIDRIDAVSGVGLLTASAFVAAIGAPERFKSGRMVSAWLGMTPQRIQQWQSAKTRGNQSRRQCVRANAIDSRCEIGPAGGKTLRGANAGEINTLAAMGNSSLRSHRL

SEQ ID NO: 179876 - protein, 310 aa, unidentified
MEIKVFIGVDVSKDSLDVAIGPQKEIITFSNDQKGVDALVKKLRRIDAQLIVFESTGGYELLATSCLAEAGLAVVIVNPRQVRSFAKATGILAKTDAIDARVIARFAEAVKPEVRPLKDHQTSELTALVTRRRQIIEMVVAERNRLKLANKRNKKDITDHIRWLQKRLDTIETDIGKMIQSSPIWRCKDDILQSVPGIGPITSATLICDLPELGVLSPKKIAMLAGLAPLNCDSGKFKGRRRIWGGRASVRSGLYMATMAAIRCNPAIKGFYQRLTAAGKCHKVAATACMRKLLIIVNAMLRDQTLWQQN

SEQ ID NO: 179877 - protein, 381 aa, unidentified
MMTPDDIDVWVGLDVGKSAHHAHALDHDGNTLYDKPLKQDEKAIRTMLGKLSKHGRVLLVVDQPNTIGSLPLTVARNMGIAVAYLPGTAMRRTAQLLPGDAKTDRRDAHVIAWAALKLPETLRDAGPDDEPLAALKLLAGHDEDLAHESTRHVNRLRSLLLQTHPAFERALKGERITRDATLALLERYGGPMGVKRAGIEDVKDWAKSNGLRAGRIIDDMFKAIGEQTVTVPGTLMAETIIPSIAHDIKTIRDRRREVGRQVEKLLEDHPLLTVPASMPGIGVRTASNILLGIGGDIANFKSSAHLAAYAGISPVTGQSGTSIKGERPSRRGNKRLKNALWQTAFVASTKHPPSWPITSANANRANTTTPPSSASRVGAAT

SEQ ID NO: 179878 - protein, 332 aa, unidentified
MNYVGIDHHRQYSHLTLMDQEGQVLRSGRIPNIQAEIEKFLEGFEAVEAVIETGRSSYTMMDILDEMGVTVKIAHPNEVKAIARAKIKTDKRDSEVLAHLLRMNMIPEVYRRSMENRQAQRVLRQRAFFVSAMTALKNRVYAFLAQQKEEVREDVARETNIFSAKGQKVLKELDLARGEKRLLEALLKTYRHLETRIEESTALVEKLYEESREAQLIRTIPGFGKYLSVLVVVEIADLARFADAAHLYAYAGVIPSTHSSGDRTHHGKIIRAGNRWLRWAAVEAVWPGIRADFDLRCFYERLARGKGANKAKVATARRLLTIIGFPYRHREQ

SEQ ID NO: 179879 - protein, 345 aa, unidentified
MDQISRIGMDTSKHVFQLHGVNAAEAVVLRKKLRRKEMVAFFEKLAPTVIAIEACGASHHWARLLQSFGHTVKLIPPQLVKPYVKRGKNDAADAEALCEAMSRPTMRFVPVKSPEQQAALMLVSVRDRLIRNRTQLGNAIRGHAAEFGLTAAKGMAHLVPLLDRIQADESLPALARELFATQAKEYEEMQTQIDEVDAQLMARHRADECSRRLAKIPGVGPVGAMLLRMKTPAPELFRSGRQFAAWIGLTPKDHSTAGKVRLGVITRAGDEGLRNVLVVGATAVIQQAQRHGRASPWLAALLKRKSPKLAAVALANKTARIAWKLMLTGEDYSAIPAPAAVAGAA

SEQ ID NO: 179880 - protein, 352 aa, unidentified
MSRSSSSSAIATLGIDLGKNSFHLVGQDQRGAIVLRIKLSRSQLPQRLAHIPPCLIGMEACAGAHHIGRQLRALGHDVRLIPAQYVKPFLKGHKNDYRDAEAIAEAVQRPTMSFVAIKTPEHMDLLALHRVRSRLVSQRTGVTNQIRGFLLERGITVRQGLAPLRQALPSILGSSSDALSRRIVHLIADLTEDWRQLDARIADVCAEIEALAAQDEHCQRLMSVPGVGPIISSAVVAAIGTGAGFRQWRDFGAWLGLVPKQESTGDRTILGKISKRGNKYLRMLFVQAAHIVLVRRPHGARLGLWLWIETAGRRLHRNMLVIALANKLARIAWAVLARGHGYQPRSASHAAA

SEQ ID NO: 179881 - protein, 347 aa, unidentified
MRFYTKQHKFYCGIDLHAKKMYVCVLDSAGEIVLHRNINTEREIFLAVIEPFREDVVVAVECMFTWYWIADLCAKEALPFVLGHALYMKAIHGGKAKNDKIDSRKIAVLLRGGMIPQAYIYPQKMRATRDLLRRRNHLMRKRAELYAHIQNTRSQYNLADSFGRIAKPQNREGIAERFEDPAVQNMIATDFAVITAYDPIIAKMERDIISMANHHDPVAYALLKSIPGIGKILGLVILYEIENIHRFPAVQDFVSYCRLVKSAKESNGKKYGSSGKKIGNAHLKWAFSEAAALFLKGNEPGKRYLDRLTNKHGKGKALSILAHKLGRAAYFMLKNKKPFDQNKFLGL

SEQ ID NO: 179882 - protein, 349 aa, unidentified
MKKIFIGIDFSKEKFDATLIQAEGLKECAPSVHEVFDNKTPGYRRLVKWVKAHAEGFTPEAWLFCGENTGGYSIGLSNYLYALGYDMWLECAYKIKHSTGIQRVKNDKADSRAIAEYAMRNYDKMILHKPQSTSLTCLREVFLYRHSLVRQKVALQVRRNEKRLTQEKSDARAFMSFTSKHLITEVNKAIAKCDEKIKEIIASDDELREVFDIITSMPGIGVQNATCLIVYTDNFQKFDLDSRKIACYYGIAPFGRQSGTSVNSRPQVSPFANRMIKSLLSQAALAAIKFDINVHSYYQRLIERGKHPLLVHNNIKNKMLHILVAMVRDRVKYNPDNVYRTSNKVSLAP

SEQ ID NO: 179883 - protein, 459 aa, unidentified
MSTRVSPRRPRRMRQVHPDAAGIDCGSAEHFVAVPVDRDPHPVQAFKTFTGELQRLIGWLQACGVTTVAMEATGVYWIPLYDLLEAAGIEAVLVNARHVKNVPGRKSDVSDCEWLQELHSVGLLRGSFRPAPAITSLRAYVRHRDTLIRSAGMYTQRMQKALIQMNVQLPLVVTDITGVTGLKIIRAILRGETDPTVLAQHRDRRCNASAETIAAALTGHFRAEYLFIVQQNLALYEMCQQQVTACDTAIEGVLQTLATQMPTPQAPPPPARPRQKHNGNEPHFDVRTPLYQVTGVDLSQLDAIGPYAALRLVSEVGTDMRRWPTEKHFTSWLTLAPRNRISGGRLLSSRTQPSANRAAALLRMAAMSLGRTQTALGAYYRRLAARVGKAKAITATARKLAILVYRTLKHGLVYQDPGAAAYDLHHKTRVLRRLRQRAAALGYGLIDLTTSPASDGVVS

SEQ ID NO: 179884 - protein, 388 aa, unidentified
MQTVADRPEAPTAIRTDLGAIFVSLELSRSTWLITSLSPGGGEKMSKQVVRGGDVAGLLERFARLREKARARMGKVFPFVVIQEAGLDGFWIDRALQNEGIESHVVDPASIATSRRRRRAKTDGIDGEALVRALLAFKRGEPRVCAMVKAPTPEEEDRRRLCRERKVLIVERVRHVNRVKGLLFSQGISGYEPLRRDRRQRLDTLQTGDGRLLPDHLKAQVRRELDRLELLLKQIKAVEAERDVLLAAQRVAASAPAAMLLDIKGIGPEFAAILWSEGLFRHFDNRRQVASYAGLAPTPWQSGSVDREQGVSKAGNPRLRTTLIQLAWLWLRHQPHSALALWFEERVRRNGGRLKKTTIVALARKLLVALWKYVTAGVVIEGAVMKRT

SEQ ID NO: 179885 - protein, 430 aa, unidentified
MSYRIAGIDVHKKMLAVVVSDVEVDGEYHFEQRQFGSNPEELRSLAAWLLEQEAEEVVMESTAQYWQPVWGALERYWKPIREKREGASRRSGTLHLAQAQSNRGRRGRKRDFPDAERLVKRLVARELTLSFVPDAEQRLWRTVTRRKYQLTRDKVRLQNQLESLLEEAHIKLSSLVSDLLGASARRMLKALADGETDPVALAALADQNLRATPEQLCDALGACTDLKLVYRRLLKMVLQQLQFLEQQIGQLDQEMASLLSQHQDAVQRLAEVPGLGVDSAQQIIAEVGPTAATFPSEKCLSSWVGACPGDDESAGVNYSHRSPQGNRHLRRLLNQSANAAARTKGSIFEIVYRRSVPRLGHNQAIGAIAHRQCRLIWLILHRGVRYEERGPAVTKRSKQKRTARMIRQLRSFGYSVELINSQQVAPGQAQ

SEQ ID NO: 179886 - protein, 398 aa, unidentified
MKPCIAIDISKGKSYYQGFISLNEPYTKAKPIHHDKVGYDELMSVGMTMKEKYGDIDYVFESTGIYHKGLQNRLEMEEQKYIILNPLEAAKIRKSKLRSTKTDKKDCQSIALAYYTREHEPHNKKDKLHETLQIMNREYKFLIQILRQMKVRFRNLLDIVYPKWDEIYNNPYTEVPMALLKKYPHPEEIKNKREETIAKYLEKSTTHHHAFSLNEARKVKLYADKTASGCHRDGYEVQVLSSLAKRLETHQQAVNQCLDRMKGLVNDNRFYDQLQSIPGIGSILAIRLFAELGDLSRFSHSRKLVAYAGIDPIVYQSGQRTGEHLSITKKGNKNLRCLLYLAVNANIRSKKPNSIIDFYNKKRQQANPLAYRAAVIACANKLLRIIYAMHKSGNYFKY

SEQ ID NO: 179887 - protein, 444 aa, unidentified
MVSKRAYRRIGVNEIDRNQLVEAALAYGSTGTVMGLDIAKKEIVACVRWGQGRFERPWKIVNTGEIGLLIELCLLLKSKCDGFSVGLESTGTYGDAVRFALTGAALSVQRVSGKAVSDYMEIFDGVPSQHDGKDAAMVAELVAMGKGTLWPYSTLSENMQVIKHHVRRIDTFRNLQTQWLGRLEALVARHWPELTSQLKLNSVTLLTMLEAYGSPANAIADPDLSKKMTRWGKGYLAKEKTANIVASANSTMGLPMNESEVLWVKEIAGEALKAHREHDKCERVLRVQIARDPVMERYGDAIGPPTLAVIWTEIGDPILYSSAGAFIKAIGMNLKERSSGKRKGELAISKRGPALARRWIFFWAMRAVQRDELKGWYAKFIQVGNTSSSSEHRKMKGLIALMRKLSKSLWHARVNNKDFDYSRVIQSKPIHARRRRRKAATAPA

SEQ ID NO: 179888 - protein, 367 aa, unidentified
MTHSDYKVGCDAHKHYSFFSVFDGQGRAVQRTRVDHQRGAIRDFLSRFPPGTPVALETVGNWYWIVDEIEAAQCMPLLAHALLAKKRMGYVHKTDKLDADGLATLLHMGTLPAVWIPPGDLRDERELPRTRMAFSKVRTMLKNRIHSTLAKFALSLDTDSDIFTAKWRPDLLALLRQLPAETRRCVDQELELLELLQDHIQRLEARILERVRITPTIQRVMSIPGPAEILSIVIERELGSIDRFPSPKHFASYAGVVPRVQASGGKVHYGRMIKQANNYLKWAFIEAANVVARQRRHPNWRRKYVVRLFEHTRQRKGHAVAVGATARYLAEATYWVLKKGEPYREPVSRHPAGLKSSVSPKQGQARA

SEQ ID NO: 179889 - protein, 430 aa, unidentified
MTEHDHAAPLPPFAALVGIDWADRKHDVCLLDLDTGRREHLVLAHTPEAIDDWACQLRSRFGGRPVAVCLEQSKGALVYALLKYDFLVLFPLNPARLKSYRQAVSSSGAKDDPTDAQFLLEYLECHRAHLVAWRPDDARTRQLGLIGEERRKAVDLRTRLGNRLRTCLKNYFPQALDLLGEGLHTRMACDFLLKWPTLAAAQKATPKALRRFYHSHNSRQAGLIDRRIEALRAARPLTTDTALVQSYRLTATLLARQLLELAGAIEAYDKELARLMAEHPDAALFERLPGAGAALAPRLLVAFGSDRQRFSGPGDVQTYSGIAPVTRRSGRSSSVHRRTACPRFLRQTFHEFAGHSVPRSAWAGAYYRQQRARGRGHHAAVRSLAFKWIRIIYRCWKERTPYDEETYLASLRRRGSPLLTYLPAPSPAKG

SEQ ID NO: 179890 - protein, 382 aa, unidentified
MQGSTVVTPTTGRCSTVFVAIELSQKTWLVTLHSPDRDRISRHKLTGGDHGGLLALIEQVRARAAGKLGAVPAVTSCYEAGYDGFWLHRLLEAAGIRNLVFDAASIAVEQRARRAKTDRIDGELLLRTLMAYLRGEPRVVRIVRVPSMAEEDARRASRERDRLITEQTAHTNRIKALLRLHGMAVGNPRRQDWLAWLQQQRDRQGQSLSPQLLAEVTREHARLMLVRQQLAALEQAQVARTLPLPAPMAERQDRLLRIKAIGPTFGATLVNELFYKNFRNRREVASYCGLTPSPWKSGGIDREQGISKAGNHRARHKAIELAWLWLRHQPDSALSQWFRTRTANAGKRARRIAIVALARKLIVGLWRYLATGLVPEHAMMKA

SEQ ID NO: 179891 - protein, 344 aa, unidentified
MKKIFIGIDFSKEKFDVTLIHAEGVKECAPSAHEVFDNKLSGFRRLLRWVKSQAGEEADTWLFCGENTGGYSIALSNFIYACGHDMWLECAYKIKHSSGIQRVKSDRADSRVIAEYAMRHYDRMVLYKPLSPSLSDLRELFLYRHSLVKYKVALTVRREEKRLTQEKSKPRALMSKTSKHLIAEVNKSIAVIEKEIEETIDADEELREIFGIITSMPGIGTQNAVCLMVYTDNFRRFGLNSRKIACYYGIAPFGRQSGSSIHSRPQVSPFANRMIKSLLSQAALAAIKSDASFRSYYQRLIAHGKQPLLAQNNIKNKMLHIIVAMIRNKVKYNPDNVYPAKEIA

SEQ ID NO: 179892 - protein, 398 aa, unidentified
MDLPVYYELETNNGNRDYRIQIGGHYMNYNTVYVGMDVHKESFTLCSCKYEDEKASHYQRTPASYKNVLRYLAFLRTIYGEDTRFVCGYEAGCLGYSLYHQLENFNVECVILAPTTMLEQRSKRRIKTDKRDAEIIARSLAQHNYSPVHIPTETDNQTKEFIRMRDDHKAELKKIKQQILSFCLRQGYQYDGSGNWTAKHVKWLRSLKPAGLYKEILDEYLLTYTILTDKLNRLDQRIEELAFKEEYKESVSKLTCFLGIKTHTALSVIVEVGDFQRFVSARKFAGYLGLVPGQHSSGDDRNGLGITKAGNTHVRRLLVESAQSYTRGKIGYKSRVLRSRQAGNSPQVINYADRANERLRRRYYKMVLKDGKKYNIAKTAIARELACFIWGMMTDNIY

SEQ ID NO: 179893 - protein, 346 aa, unidentified
MENDTLAAVDIAKEIFEVGVSGRPGRVALRKRLPRDRFLEFFAQLPPATVVMEACGSAHYWGRRIEELGHVVVLLPPQYVRPYVMRNKTDRTDVDGLLEAFRNERIRPVPIKTVTQQVIATLHRLRSGWLADRVRSINSLRGLLRELGFFIPEGRRHVLPEAWEIIHDHRRGLPDALKPSLAALCEEIASLSTRIEDVEAQLEALARQIPLVARLRSVPGIGLLSATALYAFIGDPSRFPSGRHMASFIGLTPREHSSGLRRHLGRISKRGDSYLRMLLIHGARSVLWHAKRMKNPDRLRSWALRLERKVKHNKAAAALANKLARICWAVWKNDRDFEVVPEPQAA

SEQ ID NO: 179894 - protein, 311 aa, unidentified
MTAYAGIDVSKATLQIALLPHADELQVPNTAEGLAQLADWLGRKQVERVLVEATGGYEKLSVRLLVKAGFKVQRINPVRARQFAQALGKRAKTDPIDARMLATFASALEEKDLVVSDDAREKLAELVKQRDVFIQQRDDNRRRIQQAQETEVLDAYKELNAKLKEMITAVEKRITAQSAQVDAELMERLRSIKGLGPVTISSLFCYLPELGDLSRGQVAALAGVAPYNNDSGAKQGIRRIYGGRSRLRRAVYMTVLVMIRYNEDFKARYARLRANGKCAKVALVACMRVLLVRLNAMVRTGEPWKEQPAGR

SEQ ID NO: 179895 - protein, 343 aa, unidentified
MQAVTTIGLDIAKSVFQIHGVDAAGNVIVRRQLKRRYVLPFFQKLAPCLIGIEACASSHHWSRELKALGHTVRLMPAAYVKPYVKRQKNDAADAEAICEAVTRANMRFVATKTLEQQSCLMLHRTRHLFIRQQTAVINAIRAHLAEFGIVAPVGRNGVEQLLDVVADPDDKRLPDVARACIAALGAQLRMLKARILEFDRLIIAWHRSSEASKRLDEIPGVGPALATALVASVADPKAFRSGRDFSAWIGLVPKQHSSGGKDKLGSISKQGNRYLRSLFTAGALAVIRYAKIHGTKHRPWLTALLARRPTKVAAIALANKIARMAWAMMARGDGYKEPVALAA

SEQ ID NO: 179896 - protein, 356 aa, unidentified
MSIVAHTRPFVIGVDAHARTHALAVLACPTGEVLDEAQFPATTAGLARAVAWVARRTGADLDALWVIEGVGTYGARLARAAADAGYAVAEAPRMNARANRGVGKSDPLDARRIAQAALPLDHTQLRLPRTDEGARAALRILIASRDHITNERTAAINALIALLRVVDLGIDARGTLNTGRISEIAAWRARAEELSIGVARAEAVRLAKRVRTADRELGDLTRQMTALLNESPAAGLLDQPGIGPVTAAIAYAAWSHPGRIRSEAAFASLAGVNPIPASSGNTVRHRINRGGDRRLNRALHMAVVTRMRMDPETRAYVDKRTAQGRTPREIRRSLKRYLARQIYRQLIATITPAAAA

SEQ ID NO: 179897 - protein, 436 aa, unidentified
MSKSENPTKEVIPIMKKRIYRRMPVNDFQPDSISHADLGGKLVFAIDVAKVDMVAALAAADGRVLHTICWKAPEQNPAVLSILRGFRTAGITVETVMEPSGTYGDVLRHQLEQDTFPVFMVSGKRTHDAKEIFDGVPSLHDAKAAAIIARLHADGLSTRLSVEVPERRQLRAALAIMDLHQERYLQLVHRLESWLARHWPELPTLLDLTSSSLMALLARIGGPADVAAAPDQAIKLLRGISHRLIAEDDVAAIVASASTSVGVPMVGLERDALMAIADEAYDAHRAFTTAKTKVDQLAATTPAAALAPVVGHTTAAAVFAEVGDARSYPCTRAFLKAMGLNLKEKSSGTVHGQIKITKRGPSRVRQLLWLAVFRWIQKDPIANAWYQRKKQRDGGRASRAAVALMRKLAKGLYHVGRGGTFDSSKLFDTRRLQVVT

SEQ ID NO: 179898 - protein, 343 aa, unidentified
MVHYVGLDVSLKQTSICVVNHLGSIVREGVVDSEPEAIAAFVRLNAPGAVRIGLETGPTATWLWTELKQLGLPVICIDARHAKAVLKMQINKSDRNDAAGIARIMQTGWFKEVRVQDLDSHSVRALLASRALLVKIKRDLENQIRGLLKNVGLVIGRAKFNVFAVRAEELIEDRPELIAVVRPLLKARKAIEQQTDDLDRQVLKLARHDAQVRKFMTVPGVGPITALCFKATIDDPTRFKRSRSVGAYVGLTTRRYASGEIDWTGRISKCGDAMLRSYLFEAAGVLLTRVPKWSALKAWGMRLAKRNGLRKAKVAVARKLAVILHRMWIDGTEFNWSKKEVAA

SEQ ID NO: 179899 - protein, 386 aa, unidentified
MAHSTNILQHSIDYDQTLILAIELSNKSWVLAAQVPGLSQTKAKRTIEPDKKDLLAAIDGYRIRAAAAGRTVKRVITSYEAGWCGFWLARWLMAHGIEVHIVQPSSVPVDRRMRRGKSDGIDAELLLRTLLAWLRGEPRVCSMVPIPNEADEDARRCVRERGELVSERVGLVNRIGAVLATLGADDYNPLLQSRRRRLTELRTGLGDPIPPNALAKIARLLTRLELVLAQITELELERDAVARTDAPDHAAKMIQQLVSLRGIGVQSATVLVREAFVRRFANGKALGSYAGLTSTPYSSGGIDREQGIGKAGNRRLRTVMVELAWLWQRYQPGASQVVWFRERVGSTSRRVRKVMVVALARKLLIALWRFVIDGVIPEGAVTKPSI

SEQ ID NO: 179900 - protein, 358 aa, unidentified
MSSKAFVPRDYDVFAGLDVDKKSISVTFTNHQGFIRSLRVPYSAEHLVNHVRKHFPDQKVAFAYEAGPTGYGLYDGIVAQDYPCLIASPSMIPKAPGQRVKTNRLDSRGISENLRGGQLKSIHVPAVLYRELRHLTQLRDTFVSAMVAMKQRIKSLLLMEGLEFPPAPAGSQWSFMVKAKLRKLPCSSTVRFELDQLLDSLEFNEKQIVKTTQQIRRLCQNDAELSQCIKYVMSVSGIGQIVASQLLARIGDWRELRNVRQLGAFLGLVPTENSTGERTDRGSITHSGDPRLRSKLIQAAWSAIRKDGELREFFRAVCQSHARPVASRVAIVAVARKLTVLISVVLMEQRPYVVRKKV

SEQ ID NO: 179901 - protein, 323 aa, unidentified
MARQPIFVGIDVGKDWLDVAHHTSEEVRRFHNNEAGILELVTHLQTLRPHLVVLEATGGFEFPAAAALAAATIPVVIANPRQTRDFAKSTGRLAKTDTIDALGLALFAARVRPSVRELPTEEARALDAIVARRRQIIDMITAEKNRLGFALKPVQKGIEKHIRWLERQLHDMDHDLDSMIRSSPLWAAKSDLLQSVPGVGPNLSRTLIAELPELGRLSHKQVAALVGVAPISRDSGKMRGKRMIWGGRAPVRSALFLSVWSAAKWNPVIRLFYDRLRANGKPPKVAQVACMRKLLTILNAMARDGHSWDPSIPLDQLRLQHSC

SEQ ID NO: 179902 - protein, 393 aa, unidentified
MRKPKQQQKPLNDLSRSLTPFDPNQTLIVVIEMGKKSWLVAGIIPGVERQPLKKIEPDEDGLLKLLERWRAEAEKVGHQINRIAVAFETGRDGFWLARWLRAGGIEAHVIHAASIAVSREHRRAKTDRLDTEQLKRAFLGWLRGERNHCKMAAIPTFAEEDAKRPHRERETLVGEHTTIINRIKATLTRLGIRNFNPKLKKAPDRLEHVRTPEGEPIPPNTLAELRRDMDRKHLVAEQIRQIEKARLEQLNRAPKARPNLMVLLLMRVIGIGIETADMLVKEVLSRNMRDRRAVARYGGLTGSPDESGTKRREKGLARAGNGRVRKGMIQLAWRFLDFQEHSALAKWFRARTENNRGLRKKMIVALARKLLIALWRFVRDGVVPEGVVLRPAH

SEQ ID NO: 179903 - protein, 415 aa, unidentified
MTDERRWYAGVDWASESHHVLLTDGDGRKIGEKIFKHSGEGLAEMVAWLMATSGVAEPSQIHIAIEVPHGPVVETLIERGFKVHVINPKQMDRFRDRFTLAGAKDDSRDAEVMASALRTDPRCFRLLAVADPVVIELREWSRIAEDLGVDRNRLTNRLREQLWRYFPAILDLESDLGAEWLLDLWEAVPTPDKAVRIREATIAKVLKRNRIRRLNAAHVLDVLRKPPVRVAAGTTEAASAHITTLIARIRLLNQQLKEAHRQLDALTARLIPSEEAGPGQTKQHDVEILASLPGVGRIVLATLLAEAFDALQRRDYAALRSLTGVAPVTKRSGKSCVVVRRQACHDRLANAMYHWARVAVQHDPSSRSKYAALRSRGHSHGRALRSVADRLLNVACAMLKTGTTFNPSLATGKSP

SEQ ID NO: 179904 - protein, 338 aa, unidentified
MNSSLPDSVLGIDIAKVKVDVQLRRVHSPQKPTHLIYDNSEQGHRKLLDWLAAQQVGQLHVCLEATGTYGDALALCLHQAGYTVSIVNPLRVKKYGESELSRVKTDKTDAGLLARFCLTQHPDPWTPPPVERRQLQDLVRSLQDLQHLRQQQLTRQQSGPHVESVATATTAVLTCLQTQIATLHTQIEQHVLAHENLKGEYELLLSICGIGKATAAVLLGELGDLRRFANVRDLVAYVGLCPHLSRSGTSVHHPSPLSKRGHAPVRKALYFPAMSAVRFNPAIKALYQRLLARGKPKMVALAAAMRKLVHVIYGVLRSGQPFDPAHVSVRPIRPAASH

SEQ ID NO: 179905 - protein, 327 aa, unidentified
MNQLYCGIDIHKDSYSGCIMEQDGSLVRQHSFPSTKEGIENFICGIPSSQITIAIEACGIWRGAYNIMKEMGYKVKLGNPLKTHQIACKKKTDKVDAKILADLLRTNYLPEVYIPNERILQLRDLVRHKSNVTRLKVTVQNKIKGYLLREGIKYPKRLWNKKALDQLASLEKHELNDFIQTYWHFKEKENEVLGRVRKISQNTRLTKILMTHPGIGDFGSLMMVAEIADVNRFQSYKELIAYAGLCPGVYQSGDKSHSVANHAVNKWLKWIVTECAGRAAMLDKNYMELYAKVKNKKGFKIARREVSRKMLRTVYHMLRNEEPYHAS

SEQ ID NO: 179906 - protein, 360 aa, unidentified
MIRQRTSVGLDVHARSVIGCALDGDTGEVFERQLTPDPGEILEWLRSLPGRIAVTYEAGPTGFGLARVLIAAGIVCLVAAPSKLIRPAGDRVKTDARDAAHLARLLHLGQIVEVKVPTVAQEAARDLVRAREDCRGDLMTARHRVSKLLLRQGIVYSGGRAWTGRHELWLRKHHFDLPGLALAYDSAFDAMLACRDRRNRLDEAIEAMAADSEFTGVVTRLACLRGVSTLTAFGLAVEIGDWDRLTGRSIGAYLGLVPSEYSSGASRSQGGITKTGNGHARRLLVEAAWHHCSRYRPSAVMRHRWNAASPVARARGHAGNQRLHARWARFDDRKKRSVVANAAIARELAGWCWSLAVLTD

SEQ ID NO: 179907 - protein, 315 aa, unidentified
MTNRKMSKSVVNVGVDVGKALLDVYLYEKSLHFQEDNNPAGIQRILKRLSHYQVERLVMEATGRYEFNLAEAAYSKGLPVCIVKPLSVRRYAGAINQLAKTDRIDAQVIAEFAAIVQPEPTPQKSKNLIAIKNLIARRRQLVSLRTQEMNRQQIMGKAFEVSCRRIIRCLDAEIERIEKRLAKHVEQQAEWTDKQAILKSAPGVGDTLVYTLLADLPELGSLNNKEIGALVGVAPINRDSGKLRGKRRVQGGRANVRTVLYMATLSATLCNPVIKAFYKKLTSQGKHKKVAITACMRKFITMLNAMVRDKCVWAY

SEQ ID NO: 179908 - protein, 336 aa, unidentified
MKKNFNYYVGIDVSKLTLDVTVLYEFGDTTKTDYYKIENKEKSVVQFVKKKLSHYPVEQILFCFEDTGIYSLPLACYLSENKLCYWQVPSIEIKRSKGITRGKSDKIDSKDIAFYAYTHTHKFRPSVMSAKSIQQLRLLFTEREKVLKALALFENTSENKDFVSKEVFNVVASANKSVIKKLNQALKSLEEKMLAVISSQDKLKQQYELITSIPGIGKQTAIYIMIATKGFEAFDNWRQLACYAGVAPFPYQSGTSIKGRTKVHPLADKKLKSLLNMCAIVAVRYDKELKTYYERKVKEGKPKMLVINNVRCKLLSRVFAVINRKTIFVNTFKFAS

SEQ ID NO: 179909 - protein, 419 aa, unidentified
MKYIKTKKVKVINEKTMIAALDIGKGAHYAYFRAPNGKDIKPFSFSSFRKGFDKFWVKLCQFKREHKLEEIVVGFESSGPYAEPFFHYMRKKPVKLVQINPMHSKRVKELTGNSPNKTDKKDPRVIADVISLGHALTLVVPEGPAAQLRRLTQARERALKRRTAATNQLQDLIFVIFPEFLAIMKKISTKTAFYLIKRYPTPESIVVLGLESLAEVVKKVSRGKLGRQRAEKLFNAAQGSIGVSEGKRSILLEVEYLIFQIEADNRFVVSLEKQMGDYLEEIPYSHNLLSIKGIGRVTVAGLIGEVGDFKKFNTISEIMKLAGLDLFEVSSGKHKGQRRISKRGRSLMRKLLFFAAINAVKSNGIMHEPYQQMLARGMPKMKALVAISRKLLGLIFALARDNTVYVENYSNIHYFKLAA

SEQ ID NO: 179910 - protein, 368 aa, unidentified
MNEYKLKAAPTAVSKEESSQKEPKANRIVIGVDVHLKSYQAARKIDNGAVGVVQTFRSKEALMLYVEKQREQAKEVAVVYEAGPLGYTLYRELKASEIECLVCAPRSGEQKRKRRKNNAIDARTLTSDLFNYLNGNEQALQEVRVPTEAQEQARVESRQHDALVEQRKRIGAMGNSLLLSQGYGSWSNWWRPKAFERLSKGVAAWIVKHLRRWVGILRELDQQIQQAKAELSTQCQGPRPKGMGAPSLAQLNAEVLDWNLYSSGRKIGCLAGMVPSEWSTGEGQRLGSITKVGVPAIRRIITEMVWRMILFQPEYKPVQKWREVLEGSNRGLKKKAVVAIGRQLMVDIWRLQTGRISTQELGLIMIEA

SEQ ID NO: 179911 - protein, 449 aa, unidentified
MSKGSGLTRGDVRRNARKAALRALVPASGAVIGVDLGDKKQALVVAGEDNRVLARRSPRVSVHGLGEWLDWARDKAGAAGYGGVTVACEPTGSRWMVVQELCRARGLPLVCVQPLVSHVAREQQDLTGDKADEPDAELIARLARELHCYVPEELEAGWAELRAAGRDRAAQITRATAAKQLIRDQLGLVAPGLLGAHCEPGDSPTWLACLETVLDGAAAGSLAGCCAGGYEAFAAAAAARLAGWGGKRLGPTAVKVYALLGEPAAVPRMVRAVRRRLAGALEDLKYARSRRTRLETEMIAMLGELGVDWERVCAIPGLSPASLAAIVAEAGDLRRYASSSSLVKHAGMSPARNESAAFRGKTAISRRGRPALRLAAWRATWAVLRHCDVLAARHAALTSRGDGRLHDAQARAACAASLLRWIYSLIVHRTCWDPKIAAGELGHHHAVAG

SEQ ID NO: 179912 - protein, 345 aa, unidentified
MQAVTIGIDLAKHVFQVHGVSAGDKVVFSKPLRRAQMLPFFARLKPCLIGMEACASAHYWARELKKIGHEVRLMPAKDVKAYVKRNKNDAIDAAACCEAVRRPVVRTVPVKTPEQQARLMQHRVRDLLIRQRTQAINALRSHLAELGIVAAQGYDGLKTLLSIVADESDARLPEDGRASLSALVNQIAACQAEISAIEKRLLAQHRKNEDSKRLETIPGIGIIGASAIVATVPDASVFKTGRDFAAWIGIVSREDSTGGKQRLGPISKQGNRYLRRILILGALSVVKRARCRPENYPWLTKLLARKPAKVAAVALANKMARIAWAVLTKKDTYHVPQITAALIPA

SEQ ID NO: 179913 - protein, 304 aa, unidentified
MNGIGIDVSKRQLDVGTTDGEILQVSNSASGFAELDLWLRKHPASQIVLEATGGYEQSVLNFLHNAGHPVVRANALRARRLAQGLGQLAKTDRLDAYALAQMAALVKLPTYQPLEPWQQKMREFVRARRQTMEALAVARQQQEMVTDRELRRLLQANISRLQGIVGRLGKQIAEQVAQQPQLAVLKSMKGVGPGLQAVLASYLPELGRISGKRIASLVGVAPMSHDSGTMRGKRSIHGGRVEIRQVLYMASMSAMRHEPRLRDFYQSLRARGKEGKVAIVAVMRKMLVILNARVRDAQGGSIPA

SEQ ID NO: 179914 - protein, 474 aa, unidentified
MRKQAKQRPDLQAVPLLKHEPLYIGIDVGKMKHVAGFVSTTLLERHQRFEACPALAFENSREGFRALIERIQSLAPLEHCFILMEKTGHYHLALQQYLQECDLPVYTMHVQTRPAGMLKTEKRDALGLANTLYNQLQLGIQVADKTHLVRRAEPPTAAAAQLKGLIRHRYELVRESTQRKNKLTAICDEIFPELTSVLKDPNLPTALTLREKFPTPHAIATASLTALQEVRGYTRTLPDSKLLELQRLAASSIGTKDVTRQRSLVLEQGQLIKELRLLQEHIGQLESEIKTIVDQAREGKILLSMGIGPIQAATIIATIGSILNFPNAGTLKSYCGWAPMREQTGTTFDRSHLTARGSRTMRQMMVLIVANLTRQETEWSYLYKRLVQAKCPYDEHTGERKGKLRIMGRVAGQMIETMYALLKKDVEILSKITPGQEPPPPILYDPALHRRHREGHYQPLKSSSPPSIIMLQPK

SEQ ID NO: 179915 - protein, 347 aa, unidentified
MNFYTRQHKHYCGIDLHARAMYVCILDQHGTKLVHKNLPTTPDAFLRVIAPYRDDLVVGVECMFTWYWLADLCAKEGIAFVLGHALYMKAIHGGKAKNDKIDAHKIAVLLRGGMLPQAYVYPAEMRATRDLLRRRCHLVRKRAELLAHIQNTNSQYNLPEIGKKLAYKANREGVEEHFPDPSVRKTIEVDIALIDHYDQLLGEVELYFTRTAKAHDVQTFSRLQSVPGIGKILALVILYEIQDIARFPRVQDFVSYCRLVKCAKESGGKRLGTSGKKIGNVHLRWAFAEAAVLFLRQNQPGKEYFAKLEHKHGKAKALTVLAHKLARAVYYMLSRAQAFDLNRFVTA

SEQ ID NO: 179916 - protein, 323 aa, unidentified
MQNSIVSVGVDIAKDKFDAAFLYEGNQSSVDTFENNTVGIKKFVRRLQKQKTAEAVPCVLESTGLYHLNMALRVHQAGYKVSVINPLITKKYQQSSIRNAKTDTIDALRLAEIGVKEAKLPVFSGNIQSIEAKKLTCYMGKLEEIKRQLRASRHFVKMTQDVTGLDIDLDHTEEAICELDEQIEVLKEKICKLAPKKAQELSDNIYGLGREKMAVILAMLGDKEFKNRDQLVAFVGLDVMPRQSGTWRGKGRLSKRGNPYLRKVLYQVAWGLKQNNPVYQAEYERLRTKGTNYVTTLIILSRKFLRFLYAYYWKKTACPQLTH

SEQ ID NO: 179917 - protein, 344 aa, unidentified
MSNLDTCGIEVSAKELVVRLRRQEDLEPLRNFTNTPEGHTMVLRYLRRAGRVVRVCMESTGLYGLDLALALSAQEGIEVMVANPRAVRHFAHALMKRSKDDQIDAAVLEQFAMHMPFKPWQRPSVAMLALHALARRLRELVEMQTAEKNRQHAAGLSRAIPAVVRHDLARSLGAQERAIERLTRQARKLIAQDPQLTERFELLDSVPGIGETSAVQLLGELGVLAPDLEARQWVAYAGLDPRHYTSGTSVHKKPRISKAGNKHLRHALFMPALVAVQHDPHLRAFYQHLRAKGKFKMQALVAVMRKLLHALHAMFKTHQPYDGSKLFPLNAAPAQEVTHALVAS

SEQ ID NO: 179918 - protein, 472 aa, unidentified
MAVGKVNRKQRKELARQLWSANPSLEVVHPRAAGIDVGNTAHYVAVRPELDAEPVRRFECFTADLHRLADWLEACGVETVAMQSTGVYWIPLYEILEERGLEVYLVNARHTKNLPGRKSDVQESQWLLKLHTHGLLNNSFQPPAEIRVVRTYWRQRGEHVRGASTCVQRMQKVLTQMNVQLANVISDLSGLTGQAIVRAILAGERDPRNLAELSHPQIRATREEIVKSLEGNWRPELLFVLKQEMEMYDTYQRKIAECDRELQSHLKQFADKVGRSAPKVTSTEQPKASQAKKAKRSQGNAPAFNLSAELNRISGVDLTRIDGVNVMVAQTVISEVGLDMSRWKTEAHFASWLGLCPDNRVSGDKVLKRGTRHVINRAATALRLAATTLIRSRSYLGAQYRRLRTKLGAPKAITAMAHRLARLVYRMLKYGQEYVDKGTQFYEQRLREQQLQLLKKKAASLGLRLIEAEEVA

SEQ ID NO: 179919 - protein, 454 aa, unidentified
MRIKQQSSSTLEPIHSRAAGIDIGSQTHWVCVPTDCDANNVRSFGCFTADLHALADWLQTCGIKTVAMESTGVYWIPLFQILETRGFEVKLVNAYHVKSLPGRKSDVLDCQWLQQLHSYGLLAGSFRPADSVCVLRSYIRQRDNLIKSACVHIQRMQKALTQMNVQLHQVVSDLTGTTGMAIIRAIVAGEHNPQTLAALRHHRSQRSEAEIAQALQGDYRREHLFVLQQELQLYDAYQTQIAACDQQIEQCLSEFDAKVDLVEQPLSSSKHKRHKPQDNQPAFDLHTHLYRMSGIDFTQIDGMGVLTVQTILSEVGLDPSRFPTVKHFTSWLGLCPGSHITGGKVKSSATRQVVNRAANAFRMAAQAAGKSHSALGAFYRRLRTRLGAPKAITATAHKLARIFYHLWSSGQDYVDLGENYYEQRYRERMVNSLQKKAQALGMELVAQPVVETIS

SEQ ID NO: 179920 - protein, 347 aa, unidentified
MRFYTQQHKYYCGVDLHARSIYVCILNQEGAVLVHKNLRAKPDAFLAVIAPYREDLVVAVECMFTWYWIADLCAREGLTFVLGHALYMKAIHGGKAKNDRIDSHKIAHLLRGGNVPFSYVYPQAMRATRDLLRRRNFLMRKRAELLSHIQNTNSQYNLPEFDGALRYPANREDLSDRFTDDSVKKSIETDLGLIDVYDKHLKEVELYLTRHARVDNPNSYHILKTVPGVGQILGLVLLYEIHDIARFPSVQDFVSYCRLIRCSKESAGKKLGTGGRKIGNAHLKWAFSEATCLFLRGNGAAQKYLARLESKHGKGKALGILSRKLGTAVYYMLKRQEAFDMNKFFEK

SEQ ID NO: 179921 - protein, 366 aa, unidentified
MDKRTTVGIDLAKEIFAICVLDAQGAVLERKALRRAAFERWAESLAAPCTVAMEACGSAHHWGRVFAARGHAVRLMAAEFVVPLRQGGKNDGNDALAIAIAARQPTMRFVPVKTVEQQAILAWHRMRQGWIEERTALLNRVRGLLAEFGLVPGRSPAVLIAAMARLVDEGTAPAPLRAIVQQAREQLHQLDARLGACDVQIQAHARQSPQAERLRALLGVGPITASAVVATVPDARLFRHGRLFGAWLGLTPSQHSTGGKTRLGASSKRGDAYLRGLLVNGARSALQAALRAAPDKATRLQQWMVGLAGRCGYQKALVAIANKHARMIWAMLARDEAYDPQAWQRHPRARTTAVTTMPSATALGNA

SEQ ID NO: 179922 - protein, 354 aa, unidentified
MNTTQNSTKSKIVKVIGVDLAKDHCDVIGYDENGIICLRLDGCSYAKLQEILANLPQAVVLMEACKGSMFHARSIADLGHEVRLVKGTDVKALRNVNHKNDLRDAAYIANLYFVPGIKYVYIKSQQQQSLQFLQNEYKSLQELRIQVGNQIHAGLEEFGCPVRKSSKFIKTRMVAHLEKHAELIPEDVVASFKRRREIWLNLLQQEEEAKRRLEQVAATDANAKRLMTVPCVGPQTAVGLLVHVGVDFGRFKNSRQFAASLGLVPKQNSTGGNNTLNHITKCGPKSLRSNLVQCAQLVLMYAEKWKGNFGDWVRKMRDSGKKHGVIVCAIAAKLARIIYRLMKDKVDYTPILSC

SEQ ID NO: 179923 - protein, 356 aa, unidentified
MSTITIGVDLAKSVFSACEVDGLGHVLRRQDLRRDTFGLWLAQQPAGTVVAMEACSGAHHWARRCLEHGLQPRIIAAQFVTPFRKGRKTKNDRADAEAVATAARQGNMRFVPVKAIDQQVRLSWHRVREGYKTESLAIGNRIRGLLAEFGVIVAPSDRALRRLLADLDAPRGLPAEFKVLLRDLADHWQELRMHFDACDARIEAHAREDARCVRLRAIVGIGAITADAAVATVGNAREFKQGRQMAAWLGLVPTQHSSGGHARLGEISCRGDAYLRTLLIQGARSSLQRAKAVATEKATPEQRWIRILDGRLPFGKVIVAIANKHARQIWAMLARDVDYDPHACLNHPMHRHSRVA

SEQ ID NO: 179924 - protein, 388 aa, unidentified
MLLDHPSDGPTAIRTQFGAIFVSLELSRSTWLVTSLSPGTGEKMSRQSVTAGDTTKLMKLFAELKRKAAARTGQTYPMITIQEAGLDGFWLHRVLQQEGIESHVVDPASIATPRRRRRAKTDRLDGETLLRSLLAYKRGEPRVCAMVVAPSPEEEDRRRLCRERRTLIAERIVHVNRIKGLLFAQGIFDYVPMRRNRRAALDVLRTGDGRVLPAHLKVQIGRELDRLELLLEQIAAVEREQDALLAASRPAGGTDKSDPVAMLLGLKSMGPNFAAVLWTEAFWRQFANRRQVASYAGLAATPWRSGGIEHEQGVSKAGNPRLRTTMIQLAWLWIRHQPRSALTQWFNANSPRGRKRTIVALARKLLVALWKYVTAGVVIEGAVMKSAA

SEQ ID NO: 179925 - protein, 361 aa, unidentified
MKCVQSNKLDFSGQNIYVGIDVHLKSWSVAILSDHSVLKRFSQSPEPEALHKYLVINYPGANYFSVYEAGFCGFWIHERLTDLGITNIVVNPADVPTMSKEKLRKTDAVDCNKLARELRSGSLVGIYVPGVETLEVRSLIRMRNLIVKDSTRAKNRIKSLLRFHGIEIPEEFTRCSIGCWSKRFLSWLQSLELSTEYGKKTLELHLEQFLRLRMMLLQETRAIREISRKSPFEKPIRLLTSVPGIGVTTAATLMVELDDIVRFKNADHLASFIGLIPMCHSSGESNGTGDITVRRHFMLRSLLVEAAWIAIRKDPAMTVAYTEYRKRMNPQKSIIKIARRLVNRIYYVLKHEKEYVPCVVQ

SEQ ID NO: 179926 - protein, 350 aa, unidentified
MQYLGIDWGTRKAAWCASGERGKMVEGTISADEEGLAKLVHTLGPDVRGCVEMMSGAVWVRDRLTACGWDIQIAEPRKVKALAPLACKTDRVDARVLAELVRRDLVPEVWVPALSDRELRERLRRRAHLVRLRTSATNRAFGLLTQWGLRVSLTTLRKPGALEQLSERGVPAVWLESTRTLLSVIDDLDRQIAPIERELRPLAHDNEQVRLLMTIPGVAELLGLTLLAEIADISRFPTARRLVGYSGLAPTIKQSGQSSRTGPISKAGPSTLRWAAIEAAQGAWRPTNPWHRLYTDTKQRHGKSNPAKAAVARKVLIACWHVLARNEPFKRSASSATNDVPASSSIRLAA

SEQ ID NO: 179927 - protein, 357 aa, unidentified
MDRHKYVGMDVDQATCVIAIEDKAGNFVMETYLPTKASVLGPFFKGLDGRTHVAFEEGTQAAWLYELIEPLVEEVVVCDRRGDKIRGNKGDRVDARKLARELRQGDLRPVYQGERGHRELKELVRGYDYLVQDVVRTKSRLKAAFRSRGISCGGQAVYRKTDHKDWLRKIDVDALRARVSSLYEQLDCLTRLRKEAKDAMITGAKKHASYKLLVKQPGLGPVRSAQILGIVGTPHRFRTKRQFWPYCGLAVVVHDSAEYEIVDGQRRRRKRPVRTRGLNKNFNRTLKVVFKGAAKTVISRDPFKQYYQRLIDKNIRPEMAKLTVARKISAITLAILKSREEFDPNRVNQAVSDSGDQ

SEQ ID NO: 179928 - protein, 310 aa, unidentified
MEKVIEYPQIVEIGCGLDVHKDIIVGTISRGNQSFETREFGADTSSLTSLRDWCKQSGVTHIAMESTGIYWKPVFNILEEDFEILLVNARHVKNVPGHKTDKKDSAWLSKLLLSGLLKGSFIPPQDIRELRDLVRYKKKLIGQVSSEKNRIIKVLEDCNIKLSSVLSNVDGITGTKIINAIISGERNVEVLMSFYRGKIKASREDFSKALTGRITPHHVRMLQLHKRRITETEFFIDEIEKEIEKAAAAYRVEIDLLQTIDGIGKDSAIAIISEIGVDMSKFPSEHHLASWAGVSPGNNESGGKKKVPEA

SEQ ID NO: 179929 - protein, 424 aa, unidentified
MKVTYQTCCGVDVHKSFLVATIVKTTGGIEPSYQKKRFSTFNNSILEFKQWLLNNNCHDVCMESTGKYWIPVFNLLEDQINVTIANPKWVKAVKGNKDDTKDSKWIGDLFRLGLVKGSYIPCKAIRILREYTRYRYKLVSCRSSEKNRYQNALTVCNVALDSVVSDIFGKSSTSIIDYLLEQSGTSINHEEIASKLLRSLKSKEDAVIESVEGYQMTDAQKYRMRLVRAHMDYITAEINDVDKMIENMISSNPDFENAIQFLCTIPGVKRDSAITIISEIGTDMSQFSSSKRLCCWAGLTPGSNESAGKKKSVQITHAGVYLKPALVQCAHAAVKSDKSPYYKKKYEALVKRRGKKRAIIAIARMILTAIYQMLSTGEQWNPSDLYKIDMPVALVEKQKAKAIRQAKKLLQREGTLPPDKPLAS

SEQ ID NO: 179930 - protein, 412 aa, unidentified
MDVIHPRCAGLDISKKDAKVCVRIVAPAHRRATETVTTWGSTTNQILALREHLAAERVTCAVMEATGDYWKPFYYLLEDLDGLEVMLVNAREAKNLPGRKTDVADATWLAQLGAHGLVRASFVPPAPIRELRDLTRTRTAITRERSREVQRLEKLLEDAGIKLSSVATDIVGVSGRAMLQALTDGERDPRVLADLAQKRLRTKTPQLVEALTGRFTDHHAFLVRMHLGLIDQHTAAIEELSERIEVVIEPFRGFCDLIGSIPGIGATTAQVIIAETGADMTRFPTAGHLASWAGVCPGHHESAGRTKSTHTRPGNPYLKAVLGTAAMNAARNKDSYLGARYRRLATRRGKSKAVVATQHSILIAIWHMAHTGALYDDLGADHYTRIQPSRTKRRAIRQLQELGYTVTLQPAS

SEQ ID NO: 179931 - protein, 340 aa, unidentified
MRQLYVASDLHGNNNLLGIIDGEGKRIFKKKLPNDPLVIRDVLKPFKEEIVGIVVESTYNWYWLVDGLMEEGYKVHLANPAAIQQYSGLKHADDKHDAFWLAEMLRLGILPEGYIYPKEERPVRDLLRKRGHLVKLRTSLIISLENIISRNFGRKLPVNDVKGLRKDYVTPLFEGKEDLALAGRVSKETIDFLTHQIRQIEGAVEKRVTLKEQYRNLLTLHGVGKILGLTIMLETGPIGRFETVGDYTSYCRKVPSQWISNGKRKGSGNRKNGNKYLSWAYAEASDFARRFHPESRAYYNRKMQQSNPAVAHSALSHKLARAAYYIMRDQVAFCPEKLFG

SEQ ID NO: 179932 - protein, 360 aa, unidentified
MKKDSTQSPEGQVIYVGIDVHKNSWRVTELSDGVVRKTYSAPPSAAALGARLRREYPGAEYRSVYEAGFCGFHIHRELEAQGIANIVINAADVPTSWKERAGKNDTVDSRKLGRELANGSLNPIYAPPPENLRLRDVVRAESQSVKEVTRELNRLKGHLALRGEELPGDSGRALKLRLRQAWRDGDRGTSIRIVKVLNRRAERAAVIREERAVLDELGLWPLLLRVTSVPGVGFRTAVVVLSEVWDMSRFPTESRLASFAGLAPRLTGSGEHERLGGIGKRKHRLLQGILVEAAWVAVRKDAELHGKYRELAFRKTQQKAIVAIARRLLMRIRAVWLREEDYAPRPDAGDGVVAEGAAEE

SEQ ID NO: 179933 - protein, 416 aa, unidentified
MKKHSKSCQRSEATLKRTKSRGPVQREAKEVMAEVLGKLTGRGALDVGAVSVSGKKDRRENTVGPNRDRLTVGVDLGDRWSQYCILGLEGETLAEGQLRTTQEDIGEFFQALTAARVVIEVGTHSARVQDVITEWGHEVLVANPRLMEGSKRRKRKSDRIDANKLARLGRVDPQSLYPIRHRSREVRQDLVVLRARDALVSVRTELINTARGLVKSMGTRLPRCSSPSFAQKVKDAIPIEVREALLPLVQLVETVNDCIARYDENIEELGRKKYGHTTLLRQVKGVGPITSLAYVLTLENPQRFASSREVGPYLGLVPKQEDSGDSQPQLGISKAGDRMLRRLLVGSSQYMLGAFGPDTDLRRYGLRLCERGGKNAKKRAVVAVARKLAVLLHRLWVTGDVYEPLRQAGTAQTVAA

SEQ ID NO: 179934 - protein, 345 aa, unidentified
MTTMNYIGLDVHKKTISYCVKDVSGRIQQEGKVGSTRRELDYWMKTLPQPWTVAMEATIFSGWIYDHLLPHATQIKVAHPLMLRAIAAAKKKNDQIDASKLADCLRCDFLPECHMMPRAIRDRRRTLRYRHLLVRQMVQMKNRVSGLLMETGVEYNKQRLHKVSYFRELLSANEEVPPSLRPLLKLSRETIERCQKTEYALVSSLQRDPVLAERIKRLRTVPGVGPITALTWALEIGDVSRFGSIKKAISYCGLCGDERSSADKAMRMPLSKQRNKHIQRALVEAAKLAPRQNHEMAVIYDQERQKGNSNRATLAVARKMVAYLLAVDRQQRDFVPAEERRTTAA

SEQ ID NO: 179935 - protein, 427 aa, unidentified
MKEAPVAGFDISKSSSDICVLAPGNEVVWRSKMAHTSQSMAQVARRLTDIGVQYGAAPVIIMEATGHYHRIVLQFMKNEGFDVVVVNPIQSGALKNISIRKVKNDRVDAYRIALLYRLKAAKRTNLPTDLIADLRSLCRQHYDLTQDLIAYRSRLHAQLDQCFPGFAGVFSSLVNLSALSVLERFPLPSLILSASDQDIEGAILSVVTRKSAYLQKKIHALRQAARNALPIAISTPSCAVIMKNLVSMLQILKKSIREVDLQIRALIRSDAGLRTDAELLKSIPGIADYAAAVILSEIGSVSSFQSAKQLVAFCGLDPTERQSGQFTGTRSKISKRGSKYLRCILNMSAHISIQPGCKGTYANPVLAEYFQRKRQSKPYKSALCAVMHKIVNIIFAVLQDQKPFELRSPELHCQIMRDRAAKLSLAA

SEQ ID NO: 179936 - protein, 402 aa, unidentified
MSKSSVEGMEVVETASALRRVERVEAGRYGVYVGLDVHKDSIAVAVAECGRGEPRYEGEIAHTPKAVAKLMDRLSRRYGGEALMFFYEAGCCGYGLYRQICESGHGCEVVAPSLIPRKAGDRVKTDRRDALMLARLGRAGELTAVWVPDAEQEAMRDLTRAREDMKAIELKARQRLGAFLLRHSRVYVEGKARWTQRHFTWLRQQRFDNPVQQLVFEEYLVAVCEAQARVAGLEQQMRLALGAWSLAPVAEALMALRGVSVIAAMTLLAELGDLSRFDNPRQLMAYLGLVPSEHSSGNRRRPGGITKTGNAHARRVLVEAAWAYRFPARQTRTIAERAARTSPGVQAIAWKAQKRLCARYRRLLEAGKNTQQTITAVARELAGFLWAIACEVGIPPRSQASA

SEQ ID NO: 179937 - protein, 340 aa, unidentified
MDEYDGRQFVGMDLHRRRSVIVRMTPEGERIGATVRIENDPGALAELVASWGESPEVVLEATYGWYWAADVLAEAGANVHLAHPLGVKGFAYRRVKNDEFDACDLADLLRMGRLPEAWIAPPQVRGLRELVRHRSKMVALRSGLKAQVHAVLAKQGVRVPMSDLFGVDGTKLLDGLALDPPFHTRVVSLRYLIDAFDGEIDAVTKDLRAQLKKHPGYQAIQAIPGVGPVLAAVFVAEIGDVTRFPTPQKLCSWAGMTPRHRESDTKIHRGRITKQGNHLVRWAAVEAVQKLYGGGIGAARTRLAETRGKNIAKVAAARKLLTLVYYGLRDGHIRCLARPA

SEQ ID NO: 179938 - protein, 319 aa, unidentified
MSAETIIGIDVSRDWLDGFCLPGKQRFRLQNSPDGYARLLETLQSMPDGLKVGFEATGGQEWALWRVLISMGINAVQLPPAQIKAFAFSMGKRAKTDQIDAELIARFMVVRPEAGRALPDEKRQLLRALTVRRAQMADARKRLSAQISARRKQGVSAEPEDMDSSLKAFPESQISELEQRIEGVIAQGKELSAKAELLRSIPGIGPVSAAMLLAEMPEPGRMTATEAAAMTGLAPMSHDSGAMRGKRVISGGRRSLRHVLFQAGLAASCHNPVLKAVAKRMKQRGKPHKLVIIAIARRLVTIANAVLKTGLPWRISPVV

SEQ ID NO: 179939 - protein, 347 aa, unidentified
MKYIGIDYHKRYLVATVMDEKGKIIRKDKVRTEGSTIQRYFREVTNGEEAKAVMEACWNWAYLYDMIEPIIGDVVLAHPYKTRAIAEARIKTDSIDSETLTHLLRADLIAEAYAPSSETRQVKDILRYRAALKQLSTSIKNRVHIILDRNEIEEEEFKALSDKFGKKGKEIMKRMKLKGRDGSILRDYLEILELIEKKIKKIDGWIKEIGKEDKVVQLLKTIPGIGDFIALLLRYEIDDIGRFLSSKKLCSYGGMVPSTYSSGGKTYHGRITKQGNRWIRWALVQSAHTAKRTDESLGAYYRKIKYRAGANAATMALARKLLEIVYKVWKEERPYYSKPVAVALTCL

SEQ ID NO: 179940 - protein, 427 aa, unidentified
MNCTQNHKIDQVKDETLVVGMDIAKRKHYACFVDARGRVLQKSFPVIQSKQGFEQLDQRIRQAMNEFGKTKVIVAIEPTGHYWLNLAYFLEEKGIPLVMVNPAHVRRSKELDDNLPTKHDAKDARVIARLAKDGRFSFPRLLRDIEADLRVGSTLREKFMKEHTAVRNAMIRWTDRYVPEFSAVFSSLGNMALAVLELTPFPEEITGRTVEELVEIYQQSEGLKAPQKPKIRKLLEAASHSIGVTEGQQMARFEIAALVRRYRQLEEEIAALDAELTALAQTTVEYQWLKTVDGLGDATIVDLLAEIGSFAHYRDPRQLIKFAGLTLKENSSGQHKGQKRISKRGRKRLRSVLFRTMIPLIRHNEAFRELHKYYTTRAVNPLSKKQSIVVLCGKLLKVLFTICTKKQAFDGERMRQDVFAHVQVRAA

SEQ ID NO: 179941 - protein, 354 aa, unidentified
MENYTIGCDAHKRYSQFSVMDWKAGVRERRRVEHTPGALKEYLSKFPEGTPVALECVGNWYWIVDEIEEAGCIPLLTNAGKAKLMMGNVNKTDKLDADGLALLLHNGTLPTVWIPGGDLRDLRELPRTRMALTKQRTAIKNRIHATLAKYGIRVEESSDIFVGKGLAALEQEIVHLPEETRRCVKQELELLDQLREHIRYLEKRIRERISQTTSMQLLKSLPGVGDILSIVIDNEMGSVERFPDAEHFASYAGTTPKVKSSGGKTYYGHLRKESNQYLKWAFIEAANVIVSCRSRPGWRKKHVVRLYERIRQRKGHGIAAGAVARHLAEASYWMLRKGETYQAPAHRKTLPRQG

SEQ ID NO: 179942 - protein, 349 aa, unidentified
MNFYNRQHQFYCGIDLHARLLAICVLDQAGQVVCQTQIPADKQRLLDTLAPFRTDVVVCVECLFAWYWVADLCTEHQIPFVLGHALYMKAIHGGKTKDDDLDADKIGRLLRGGNIPTAYVYPKGMRETRDLLRRRHYLIRQRAALITHIQITNAQYNLPPFTKKLIYAKNRAELEVAARFPAGPVRKSMEINLTLVDALDVQLADVELYLERTVKVEDPQTYHLLRTIPGVGKILALVLLYEIHDIRRFADAGDFLSYARLVRCVHKSAGKTLGHGGHKIGNAYLKWAFSEAVCLLVRCCPAVKSWQQRREKKHGKKKTLGILAAKLGRVVYLMLRRREAFDLQKFLGQ

SEQ ID NO: 179943 - protein, 452 aa, unidentified
MRREKEFRELSLECIEPNAAGIDVGAREIYVAVGRDRDPEPVRCFSTFTEELQAIAAWLKQCGVASVAMESTGVYWIPLYEVLEEAGLRVCLVNSRHVKHVPGRKSDVSDCQWLQYLHSVGLLRGSFRPEAAICALRALSRHRSNLVEAAAVHVQHMQKALTQMNLQIHHVLSDITGKSGLAIVDAILAGKRDPEQLARLADGRIRAERETVIKSLVGNYRSEHLFTLRQSLEAYRHYQKMLLDCDREIEQRMGQLPNQPNGGQPLESHKRGKRRKNQFHFDMGKELYRVLGTDLTVVPGLSALTVHTLVTEIGTDFGRFPNVAAFTSWLTLCPGSKKSGGKVLSSKTRKSNSRLAAALRLAAQTLHKSHSYLGAYYRRMRARLGAPQAITAAAHKLARIVYHLITTRTAYDESIFALEEQKLALRNQHRLHKQARALGFQLVPLPQPEVVH

SEQ ID NO: 179944 - protein, 350 aa, unidentified
MKKDSSGKRRMHGETVGIDLGDKVSRYCVVDQDGTVVAEGSFRNQASSIEKHFAGEPRRIALEAGGQSAWISRELQRLGHEVIVANARQAKWITASDNKNDAVDARKLALLARADARLLAPVEHRSAGQQAELSVIRARDALVRARTLLVNAARGLAKGFGQRLPATVTATFGQRALALVPPLLEAALAGLLAQIDALGGEIREYDKRIDQAAAAHPESKRLTSIPGVGTLTALTFVLTLGRAERFAHSRDVAGYLGLRPKQRQSGGQNPQLGISKSGDKYLRKLLVQCAHHTLGHWGRDSALRKWGLDKGGGAKGATKRAIVAVARKLAVLLHRLWVSGEFYKPFPRMA

SEQ ID NO: 179945 - protein, 427 aa, unidentified
MNSTVSTIAVQPNIECNYIGLDVHSDNVVACVRRNDLKASGELRGKTIKMKKIFIRQSLEPLESFLSAYADGKQHIMTAESTFNWYWLADIAERHGWNFCLADPCTVSQAGIKASNDETDAECLAERMRTGSLKSTKVLPRKLRGVRDLMRHRMRIMQEVADKKVRLSNLYHNHCAHPMRGKALHELLDAYGEMNVDAVLESGICSNGSELIISDLLTGLKDAQARLARIEAAVYERIDEIGAYKDDRSLLKISMKGCGDVLSAIIVTEIGDISRFRTMGDFVSYCRLAPTSKLSNGKSKGQGNAKNGNAYLSWAMTELATLMARYNKPVQCYLDRKLEKTGLRVVAIRALAAKLARCVYQVLRKKEAFQLELAFGITPPAQRKIMHPNGARLTVDGGRETAAPEASKGAEAQSASAPRKPFCAARD

SEQ ID NO: 179946 - protein, 341 aa, unidentified
MQITTIGLDIAKSVFQVHGIDAAGEILLRRRLTRARVLPFFAKLGPCLIGIEACATSHYWARELRELGHDVRLMPPSYVKPYVKRQKNDTADAEAICEAVTRPTMRFVEVKTTEQQSVLVLHRTRLMLMRQRIQLSNAIRGHMAEFGIVVPIGRQGLQALIDTIYDESDDRVPAEARCCLQMLASQLRLVNEQILENDRRIRTSARATDVGRRLMGIPGVGPVLASAFVASVPDPAAFKSGRNLAAWIGLVPRQNSSGGKERLGSITKQGNRYLRQMLVVGALAVIRYAERHGTRRPWLVKLMARRTTKIAAVALANKTARMVWAMMISGEAYREPELRAG

SEQ ID NO: 179947 - protein, 317 aa, unidentified
MTRTICGVDVAFKSLEARIGQQGAAGSFANNPEGIAALGAFCQAHQADLVAMEATGGYEQQAFAQLSEQGLPVTILNPRAVRQFAQSMGSLEKTDRIDAGMIAWYAEVKKSRPVCLAPESQQHLRALVTRLRQLTEMRAVQLNQQRLVTDRAVQASFKKVLAVLTRQIRELEQRIAALLEKDPLWRQFNEAFRTIKGVADRTVARLMAEMPEIGTLSNKTISKLAGVAPLANDSGKHQGKRAVRGGRAAVREILFIVASVVGRYEPDFIAFQQRLRAAGKPPKVVRIALAHKLLVRLNAKAREVRQRLANPQPEAAV

SEQ ID NO: 179948 - protein, 349 aa, unidentified
MKITRAGIDIAKSVFHVYAVDRHDRPQWQAKLKRGEWLRELCERLAPGAEVGMEACASAHHWSRELQKRGFHVKLIAAQFVKPYVKSNKNDRVDAEAICEAMGRPGMRFVATKTVAQQDRQAAHRIREELIGQRTAKANQIRGLVGEYGLIASVGIAHLRRALPRWLEDAENGLTGPFRVLLSDLAEDLRELDDRIAGLDEWIAETVREDPVAQRLVMLRGIGPLTASALSGALGDGRAFSRGRDFAVSLGLTPRQHSTGGKDRLLGISKRGDAYLRKLLVHGARAVIHHASGRDDELSVWIKELAKRKHANVVAVALANKTARVAWAIVHNGTDYDPTLVAARQGNPA

SEQ ID NO: 179949 - protein, 370 aa, unidentified
MSVRRILAKTINTDLEYEAIGIDLAKNCVSAALLTTDGEVVCIDRLDYSELEKSAQALSPTTFAMEPCTEMNYLVQKLEAWGHRCLVIGGKNVQNYVENHYSGQKTDLNDAQALAFLAQDTQLRTIKAKDVEQQKYASLTTLREQYIKQYRQTIVSLKGICQAWGLNISKGISGKARLKDLIENHAAFPEELRESLVDMVTHAQTTQKVLNKITKTLEVLAKNDKVCQLIQTIPGLGTICSCRLRATIGDIKRFKNPKDFPAYYGLVPRSIATGHNEKKGKITHRGDRTMRSLMVQGAGSVINMATKGKLKSKQLTKWILKKQKEKMPWGKLVCAVAAKLLRIVRAVLISSKPYNPKIAGVAKCSLPKGT

SEQ ID NO: 179950 - protein, 359 aa, unidentified
MDLLPFHTDEETLVILGVDTHADVHVAVALDGLGRRLGHKSVLTTEAGYAALVTWAEEFGTLERAGIEGSGSFGVGLARFLRARGVEVVEVNRPNRQHRRRFGKHDTADAEAAARALQANIATGEPKSADGPAEMVRTLHVVRRSALKARTQAANQLRALLVTAPEELRAKLHGLSTAKLVATAARFRQGDPKDLRAMTKLAMRSVARRHRRLSEEILELDEQIARLVSEAVPTLTSLRGVGTDTAASLLVAVGDNPERLKSEASFARLCGVAPVPASSGKTVRYRLNRGGNRDANRALHVLALGRMSWDERTREYVLRRTAEGKSKREILRCLKRYLAREVYQILRAPGTLPSSVSVP

SEQ ID NO: 179951 - protein, 315 aa, unidentified
MKTQKLVGVDTHKDTIACYCDGNFKEFKTNTNGFNQAIKWAGKAHWAIEGAYCFGRAFTAHLIKNGCEVYEINPLLTKSWRGALKVASPKNDYGDAKVISIFAHTSNLEKISLETVKLKEKLSARKALVKQKTKTTNFIKMLFFTRGEQLPFKELDTKKAINYLINSDDIIIKTNGKILKEVLDGIKIIEKEIEKETPEKAKKLMQLKGISFITASTIYAETKGKITTSAKLASYCGLSPIDCSSGKTTRMRNNKGGNRVLNSVFYSLSIAQKRYNPVATAYYEKKISEGKTPRHARKCLARQLVNIVFKILKED

SEQ ID NO: 179952 - protein, 459 aa, unidentified
MTKHRQKKMKAGKVDALDQINHNAAGIDIGAGEVYVAVPPDRDEDNVRSFPTFTADLQCLADWLNACRIDTVAMESTGVYWIPLYEILEARGFQVCLVNARHLKNVSGRKTDVLDCQWIQQLHTYGLLSPSFRPSEQIVAIRSLVRHREMLVQYRSAHIQHMQKALTLMNLRLCNVLSDITGVTGLKIIRAIVAGERNPQVLAGFRKAGCKKSAEEIAKSLEGHYKREHLFALKQALELYDFYDLELHECDAELEALYQQFDPPDDPGTPPPTPRRSKPRKNQAHFDLASALYRMSGVDLTQIDGLDALTVQKVLSETGTDMSKWPTEKHFASWLRLCPNNQITGGKVKQTGVQPTTNRASTALRLAASSLTHSDSALGAFYRRMRTRHGAPSAITSTAHKLARIIYFMLKENKPYHDIGVDYYEQQYRTRVLRNLTRQASRFGFRLLPLDQLPVQEVS

SEQ ID NO: 179953 - protein, 362 aa, unidentified
MNRNTGMNAGQIIGTMGGKQVFGLDIAKHVFQLHTVDMSTGEIANVQIKRAKVLEHFVNKPKSLIAMEACGGAHHWARELTALGHTVRLLHAKIVRPFVSGNKTDATDARAIWLAVQQPGVKFVGIKTAAQQATLTLHRQRELLMKMRTMQTNALRGLLYEFGATFAQGRKAMFKDVEQTLEDLSAQLPQMVRDSLREQVARIKAMSDDILTIEKRLGLQLKADPHMQRIAQIPGVGLLTATAAIATMGEASAFKSGREFCAWLGLVPKQTGTGGKVRLGGISKRGDTYLRTLLIHGARSVLAHAKEPGPWLAQIQARRPANVVIVAQAAKMARTIWAVTAKEQSYQRGFQSVRPNVSVQAA

SEQ ID NO: 179954 - protein, 402 aa, unidentified
MELVPIHKRVIGLDIHQAQVTACAIIEESGGETRLEQRQFGAFKRDRWELAVWAAALDPDEVVMESTGIYWKSPCAALEAVGIRATVVNARHVKQVPGRKTDVGDAQWLATLARAGLLRGSFVPPAQLRELRLIARQRQKLVGLLSSEKNRMHKVLTDAGIRLGVVVSDIHGQSARAMIKGILRGQAPHEVLQLASRRLKASREELHDALQGELTASHVFVLDELLRHIEELEARIARFDARLLAELASEHNALALLQTLPGVDAIGAAMLLVEVGSDMSAFGNPDRLASWVGICPGNHESAGKRKSGCVRKGNPYVRRLLCEFAHAASRTKSAFQAKFQSLIVRRGHKRAIVALAPKKQKRNSLFLRERLARVRGWEAHKMLRTIFFMLKRGGLPGFRHQL

SEQ ID NO: 179955 - protein, 374 aa, unidentified
MLSRVRSTGVQKAELNGNVDSENNHGGSSWRVCNYIGLDVHKRTISYCVKDASGQVLQEGKIGATRGELDSWMKTLPQPWSVAMEATIFTGWIYDHLLPHAVQTKVAHPLMLRAIAAAKKKNDRIDAGKIADGLRCDFLPECHMAATEIRDRRRTLRYRHLLVRQMVQLKNRVSGLLMETGVSYSKQRLHKVGYFCELLSSNEEIHSNIRPLLKLSRDAIVRLQKTEYALVSSLQRDPLLADRIKRLRTVPGVGPITALTWALEMGEVSRFPSIKQAISYCGLCGDEKSSAEKVIRTPLSKQRNKHIQRVLVEAAKLAPRENPELALVYETEKQKGNANRATLAVARKMVAYLLAVDRGKRNFVPAEDHRGVAA

SEQ ID NO: 179956 - protein, 365 aa, unidentified
MVNHIFVGIDLGDKNSVARIALNREKTERIGFVNNRRGRVRLFEELRRRAEKVDEAQIVLAYEASSCGFILCDEAEAQGMKCWVLAPTKMEKSVEQRKHKNDDRDADDVVEKLRGHILAGNRLPTVWIPDTHMRDDRELVRSRMDVVEKQTQLKTQIQMLIKRHGLEKPSGSGVGWTIRYRRWLEALSESDRLGNGTRTALRSLLRQLSFLEAEIERMEEPIRELAQQPRHKPIIEELTQEHGVGLITAMVYRTEIGYAGRFRRGRRVGKFVGLTPTSHESGQQQDRKGHISRQGPPRLRKILCQASWVHVQRDPQAKRFYQQLVSRNPKKKKIAIVAVMRRLAVRLWHRMRAAELGMMAVTEMN

SEQ ID NO: 179957 - protein, 444 aa, unidentified
MLRFVGCDVHKRTAVFTILLQDGTVFAAYTVPVTREALAAFAERQLTAEDRLAMEATTNTWAVAGVLRPFVKEIVIGNPLKVRAIAEAKIKTDKVDSRVLAELLRSNYLPVVWQPDGETQRLRRLTHRRAALVSDRTRLKNRLHSILHHTLVPLPGYELFSKKGIAWLRQVPLAQEEALARESDLRLLELTELEIAELDQLLVREAWQDEKVRLVMSIPGIDYTVAQTCLAAIGEISRFPNAKKLSAYLGLNPSTRQSGPHCYHGPITKQGNAHARWLLVQAAQHLAQYRGPLGQTMRRIVKRKNRNVAVVACARKLAVLLWHVLSSGEPFRYAEPRTLQAKYSRLRVRATGQRRRGGVAKGTPRSPRYGHGRTRAVPSLPQVLAENGLPEVAPLSKGERVMLDRKRLDTFYRELQTPSRLEANTPTPQVKEPEEDFKSELTQS

SEQ ID NO: 179958 - protein, 454 aa, unidentified
MAKKGRDGGSLPILKASAAGIDIGSAEHWVAVPIDCADEHVRSFSALTHGLHEVADWLQACGIQTVAMEATGVYWVPLYEILEERGIEVCLVNAHHVHNVPGRKSDVLDCQWLQQLHSYGLLRASFRPSADFVALRTYLRHRESLLRSNARFIQQMQKSMTLMNIKLDRVVTDVAGDTSMRIIRDIVAGQRDPVLLARHRDPRCKASEAELADSLRGEYRADLLFTLRHGLELYDAHQQRLVECDVEIQNLVDAIAVNMPAVEPPRTATKVRRDRRRDPKLNVHASLHRIAGGVDLYQVAGIAEITAVQLIAEIGTDMTAWPTAKHFASWTTLAPGCRITGGKRYRPKRPHSAHRVAQILRMAAVSAGRTQSAIGAFYRRLSARIGKAKAIVATAAKLARIIYALLKNGTRFEETGADAYEQHYRDRVLRNLKRKAHALGFDLVEKPALAESVS

SEQ ID NO: 179959 - protein, 344 aa, unidentified
MKITTIGIDLAKNMFQIHAVDERGKTVLKKQLKRDQVAAFFVNLPPCLVGMEACGSAHHWARKLEGFGNTVKLMAPQFVKPYVKTNKNDAADAEAICEAVARPNMGFVPIKNIEQQSVLALHRVRQGFVKARTAQANQIRGLLGEFDLIIPQGIAHIAKRVPELIEDASNELTGSFRLLVQRLMDHLKELDKQVGELEVQIKIWHRASEASCKLEMIPGIGPITASALVASVGNAKNFDDGRQLAAWLGLVPKQHSSGGKSTLLGISKRGDSYLRTLLIHGARSVIFRAQQKADKSSWLHKLLERRNPNVAAVALANKNARIVWALLANDRNFQADYARPLATA

SEQ ID NO: 179960 - protein, 335 aa, unidentified
MKKIYVGIDISKEKCNLCFRSGLEIVREEECSNDVKTLRKAFKSAMKAIGASLEEVLACAEYTGRYIYPLTVACQELEIFLWMDDPTRIKNSMGLTRGKNDVIDAARIAEYAYRYSDKAVRYCIPDAALVSMKNLLADREFLIIDRKRYQSQLTDQKKYMAPGDFKQKNSRWKKVIKSIDEQIAAIDAEIEALIAADPVLTRQKELLVSIDGIGPRIAINMIAITGGFTRFQNARQFCSFAGLTPYKYDSGTSVRSKAKISKRANQTMKALLHLSAVNVATRMKSGEYRAYYERKLKEGKHVMCILNVLRAKFVHRMFSVIKRDTEYTKEYKPTC

SEQ ID NO: 179961 - protein, 474 aa, unidentified
MSKRNQPPATAGKSGPKIAKSKRASQRKETKHPVFQPNAAGIDIGAREIYVAVPADRDEHPVRKCETFTGDLHQMAEWLVHCGITTAAMESTGVYWIPVYEVLEQYGIKSCLTNPRNMKNVPGKRTDFHECQWIQYLHSMGLLHSAFRPDGEVCAVRSLMRHRNDLVEMASQHVQHMQKALTQMNVQFHHAISDITGLTGLAILDAIVAGERDPAVLAKLRDPHIKASEETLRKSLEGNWRPEHILALKQRLLLYRAYRDQINDCDQEIEKRVAAFEAKVDPAEKPMPEDRKQKQRKRKKKSGSPDFDMRTEAYKLFGVDLTQIPGLMMLVLMLFSEVGRDMSRWPTAAHFVSWLGLCPDNDISGGKVLWRGARRTKSRAGTLFRLAAHSLHRDQTPMGDYLRRMKAKLGPAAATTATAHKIAIIFYTMVSKQVEYDASLWAQRDAMREKRIEASLQRRAAQHGYKLVPLGAAA

SEQ ID NO: 179962 - protein, 338 aa, unidentified
MNIVFLGIALAKNVFQLCGLNQAGKPVYTKRTGRKELLQTLANIPACLIGIEASTGAFYWQREFEKLGHKVKVISPQYVKPFVRGQKNDGNDAQAIAVALMQPTMQFVPPKSPEQQDIQALHRARQRIVNHRTATVCQIRGLLLDRGIPIGSAVSRSRRAIPLILEDAENGLSSRMRRIIAELYDLFNDLGRRIHFFDKEIETVFRQSEACQRIAKVKGIGPKTATAVVAAIGKGTEFKNGRHFAAWLGLVPRQHSSGDRQVLMNMTKKGDKHLRTLFIHGARAVVRVATNINDGHMNQWVNQLKERRGFNKTTVAVANKNARIIWSMLRNDTGYQVV

SEQ ID NO: 179963 - protein, 319 aa, unidentified
MREVKVATKPEAILAVLTEEGLAIERIGLEAGPLSQWLYSALAGAGLPVICVETRHMKAALSAQINKSDRNDARGIAQMMRVGLYRPVHVKTLASQKRRMLLTSRQLLQAKALDIENDLRGTLRNFGLKVGMVGTVKFEARIRELVADHPDLAAIVEPLLIARRVLREQLGVLHRQLLEIVRHDEVCRRLMTTPGVGPVVALTFRATVDVPSRFASSKAVGAAFGLTPRRQQSGEIDRMGGISKCGDGMMREMLFEAALVLMTHSRKWSWLKAWGMKIARHRGMKRAIVAVARRLAVIMHRMWVDGTEFRWTRVEAAAT

SEQ ID NO: 179964 - protein, 357 aa, unidentified
MRKVTCFVGLDYHQHSVQVCVLDRQGRQLLNRACPNDWQSIAQTVAPLGRVKGAAIEACCGAADLGEELATHAHWPLELAHPGYVAKQKRSPDKTNFSDGQLLADLTRVGYLPKVYLPPAYERDLRQLVNHRQHLANDRRAVKLRIGAILRQQRVKFPQQISRWSKAWIAWAATAPEHSQQTRWILEDLLDQLQHLNYKVAVADARLREATAQDPLVDRLMEEPGIGEVTAWVLRAYVGSFKRFQTGKQLSRYCGLSPCNASTGEKQADAGLINGCNKLLRATLIQAAHRLVRTNPRWSRLHDSLRRRGKPACVAVAAVANRWMRGLYHRMMEWTTSGTGKKKQKTTLSKEGSQELP

SEQ ID NO: 179965 - protein, 377 aa, unidentified
MKRIKFVGLDVHAETISVAVAEQGGEIRSLGVIPNREESIRKLVKKLGPVEELRFCYEAGPTGYALYWQLTRMGAQCEVVAPTLVPVKAGDRVKTDRRDALKLARNYRAGELTAVWVPDAAHEALRDLVRAREAAKKDELRARHRLSKFLLRHGRRPPLGVKAWTMKYLEWVKREVHFEQLAQEATLLDYLHEVEHGAARIARLDGAITEAVKSAPPQMRAVIEALQALRGIAHVSAVTVVAELGELSRFSRAKQLMAYGGIVPSEDSSGERTRRGNITKTGNAHLRRVVVEAAWAYRHRPSVGATLRKRQEHVSEEVKEIAWKAQQRLHERYRKLLAKGKNKGVVVTAVGRELLGFIWAIGIQVETAQKESLQRAA

SEQ ID NO: 179966 - protein, 331 aa, unidentified
MLFVGDDWAEGHHDIEIVDDEGKVLVRRRLPEGLEGVTRLHALVAEQLPDDWIDRDPEQAAALVKVGIETDRGSWVGSLVAAGYEVFAINPLSVARYRERHSTSGAKSDAADAHLLAEIVRLDRAHHRPVAEDTDLGEAIKLTARTHQSLIWDRSRHVARLRSTLREYFPAALLAFEDLDAPDALELLARAPDPDQAARLSAAAIAASLNHAHRRRVEDRTKRLRSILHAPELQQPPVLQNAYAAVVTSEVAIITALNAQIDRLGAVVGEHFGRHRDAEIYASLPGLGVILAARILGEFGDAPGQYADAKARKNYAGTSPVTRASGTKKSS

SEQ ID NO: 179967 - protein, 313 aa, unidentified
MEDNQFVGIDVSGASLDVHVYPAGYTCRVANDRSGMTEMLKSLSEYQIALIVVEATGGLQRECAAFLASVGYEVTVANPRQVRDFARALGLLAKTDRIDAYVIARFGEAAKPESRIVVETQRDSLSELLVRRRQVIRMMTMEQSRLKRLKAGKMVRRIKAHMTWLRKECTVIDEALDSAIEKHPVWQKISRLLKSVPGVGPVVTRTLIAGLPELGKLSRRRIASLVGVAPINRDSGMMKGKRTTWGGRADIRSVLYMAALVASKSNPVIRPYYQGLIARGKLPKVALTACMRKLLVMLNAMVRDNQSWNTSNA

SEQ ID NO: 179968 - protein, 329 aa, unidentified
MRFYTKQHKYYCGIDLHTKKMYVCILDGEGQIRLHQNIKTEPESLLRILTPFREDIVVAVECMFTWYWIADLCIQENISFVLGHALYMKAIHGGKAKNDKIDSHKIATLLRGGMLPQAYVYPVKMRATRDLLRRRNHFMRKRAELFAHIQNTRSQYNLPDPLGCIAKPQNREGIVERFDDPSVQKSMAANLEMIKAYDHTLTQLEHDIIASAKEHDLRSYALLQTIPGVGRILALVILYEIESIERFPSVQDFVSYSRLVKCIKESNGKSYGPSGKKIGNAHLKWAFSEAAVLFLKGNEPGKRYLEKLAHKHGKAKALSILAHKLGRAV

SEQ ID NO: 179969 - protein, 418 aa, unidentified
MEAIIEKCCGLDVHQATVVACLLTGKPSQRPRKEVRTFRTVTRELQAMSDWLRAEGCTHVAMESTGVYWKPVYAVLEGGFELVVGNAHHIKNVPGRKTDVKDSEWLADLMRHGLIRKSFVPPKPLRELRDLLRYRRKLVESGASERNRLLAVLETANIKLASVASDVFGVSGRLMLDALIEGGATPAEMAKLAKGKLRDKLVELQLALEGSVGEHHRFLLAMQLRRLKSVEDELEVLDKRIEEKLEPYRAQHALLMTIPGVNWCIAAVLIAEIGVDMTVFLSAYHLAAWAGVCPGNNESAGKHRAGKARRGNVHLKTALVGAATSAARTKGTYLKDKYHRLRARRGNLRAAVAIGHKILVSAYHMLTRQIPYQDLGGSYLDKLDETRTASNLVRRLERLGYVVELKDAKSLQTAEVFS

SEQ ID NO: 179970 - protein, 344 aa, unidentified
MEFQFIVGVDMSKEWFDFCLLDRRFNSLSQGRVENTKQAILQFIAQILAQLGQSGMDKVVLCMEHTGVYVKHLAKTWMQQGGRLSLVHARKVSQQMAGQAGWVEKTDQLDAQRLAHYGIRFSDQLELWQAKGITLERLQAYQRQRERIIKVIKLLEAPLKESRVFDEDEVYQDLLKNQAQSIKVLKEDLKSLERNLNRLIEQDEQLAPLFKLVCSVEGIGPVTARELLIATQCFTRFESNQAKAFARYAGVIPLKRQSGKRLRKKERIPSQANKTIKSLLTMGATALIGTQSELGHYYRRKLQEGKDHLCVINAIRNKIILRVFAVVRNQVMYQKDLNLCLHKP

SEQ ID NO: 179971 - protein, 369 aa, unidentified
MEKYREAFVGIDVAKMRNAIAIAEAGREGEVRFFGEIDATPANMRRFIDRFAAKYDRLHFCYEAGPTGYGLYRLVRSLGHNCTVVAPSLIPRKPGDRVKTNRRDAVALARLLRAGELTAVWVPDEGHEAMRDLVRARAAAVETLRIHRQQVSAFMLKHGRIYPRKKGWTMRYLCWLQEQQFDHPAHQIALQEMVEAVRIAKERVERLEHVIEEFVPAWSLVAVVRALQALRGVDLIVAVTFATEIGDVSRFENPRQLMGYLGLVPGERSTGETVKRGGITKAGNSRVRSMLVESAWTYRHPPRIGRVKLYRLEKTSPSVREIAWKAQVRLTGRYRKLAARGKRTTVICTAIARELAGFMWAVAREAQIA

SEQ ID NO: 179972 - protein, 342 aa, unidentified
MAIIGAFDVHRRQVTYDVLDTVSGQVRRGQVRPACRATLRQFLARYAGETDVSFAVEGCTGWRFIVEELERAGFAVHLADPAATAAARGRKRQAKTDRTDTRQLRQQLVEGRLPESWIPPTLIREVRAKLECYHDLREEHTAWVQRIHATLFHHGVPVIEGALSTVAGRARLEAGEGLSPAARQTMGVALRVADGLQTELDALYRELSRFARRQPGCRALAAQYGVGPITAVAIWAFMGDTRRFSSSAQAVRHTGLDVTVYSSDGKRSPGHLSRQGPPVLRWALYEAACSAARATSPDLDYYHDTKERIDHKRAAISVARKIARRSHHILRNLGDTAWQDAA

SEQ ID NO: 179973 - protein, 407 aa, unidentified
MSRYYIGVDWADAEHAIWVGDEAGAQVAALTVKHTAEGLSEFGRWLYERRAQGIELWAAIEKPEGRVVDFLLDHGVVVYPVNPKALDRARDRFRMSGAKSDPFDARVLAEFLRTDHPHLRPLVPNSEPAQELKLLTRDYQRQVRLQTRLLNQLTATLKEYYPRPLEVFEDLTAGLARDFLRAYPTPQAVAALTLTQWKKFARAHGRSEARTAALWTVLQQPQLPVPPHVVRAKARLVRVLVAQLGPTVGAVEEYREAVEDFFATLPAAEWARTLPAGKSGTTVPTLWAELGDAPGRWQSFQHLQAHAGAVPVTVRSGKQQVVHFRFACNTHLRYAVHQLAFLSLRQGDWAQAYYAQYRKRGHGHHQALRALGAKWLKIIFVMWQRQVPYDENYHLATMARQQLRQVA

SEQ ID NO: 179974 - protein, 439 aa, unidentified
MPVRKRDEVFPNCAAVDVGASRHWVAVAEERDAKPVRSFGPMTADLHALADWLLGCGIDTVVLESTGVYWIPLFEILEQRRLRVFLVDARQIKYVPGRKSDVQDCQWLQRVMAWGLLRPAFRPPDAICVVRAIVRQQQILVAEQSHWVQRMQKVLLEMNIQLTEVLSDVVGATGQAIIRAIVAGERDPCALASHRRGGVKASAEQIAAALTGNWRDEHLFVLRQALAMYDHLAGQCSECEGKLQELLSQRATKPVDLGRPPRSGSKARAQFDLRQMLAGWAGVDLTRIPGIAATTALTILAEIGPDLSRFANVKHFCSWLTLSPATKISGGKVLSARSKRSANRVRQALKMAAQSLARSQSALGAFYRRLCTRMDAPRANTAAAHKLARTVYFMLTRGEAFVEQGQQEYEDKQRQRSIAALKRRATGLGFTLQPAASSA

SEQ ID NO: 179975 - protein, 326 aa, unidentified
MQGKVLSEQATRMQSSAGIDVGKSWLDAHILPAGQRRRVANNPEGIRQLKRWLLGFDCTIVVVEATGKWHRPLYRSLHADGLPVAVSDPYRVRMFAKAHGVAAKTDRLDARVLAQFGAVMNPAIRPPAPEAFEELGELLAARRSAVDTQTALKNQAGITTSKFLVRQIKRRLSALAKDIDALECEIQRHIAAEEPLAKRYAILISIPSFGFVVAATLLASLAELGICSAKQIGMLAGLAPIADDSGQRQGIRFIGRGRSAVRNVLYLAALAATRFNPDMKAFYRRLIANGKPPKLAIIAVARKLAVLANTLITEGRNWLPQHPKHA

SEQ ID NO: 179976 - protein, 308 aa, unidentified
MSYVGIDVSKDRLDVHVAPAGEVWQVSRDAAGLDELVAKLAGLTPECIGVEATGGYETVVAATLAAAGLPVVVLNPAQVRHFANALGKRAKTDPIDAAVIAQFIKATTPAIRPLPDEATRMLADLVTRRRQIIAMIVAERLRLKRASNRRLIKSITRLLTALQKELSDLESGIDEAIKASPVWKAKEDLLASIPGIGPATARTLIAELPELGTLDRRQIAALVGLAPWTRQSGKWRGKSVIGGGRAQVRSALYMAALVASRYNTVLKAVYQRLLSAGKAKKVALIAIAPKLLIACNAIIRTQKTWQSA

SEQ ID NO: 179977 - protein, 347 aa, unidentified
MIIIGCDFHTRFEQIALLDTETGELAEKRLDHESGEAQRFYEELKEPALVGIESTGYAIWFGEMLGELGHELVVGEAGKIRAKETRKQKHDRRDAEHILNLLVRGDFPKIWLPSAGERDVRVLLEHRHQLVQLRTRAKNGLQALALSYGLRRRFRLWSARGQAELQNLPLREGMARRREDLVRLVAQLDVWIKELDQRLEQEVLRRPDAQRLMTHPGVGPLTALGAVLVLGPVERFPDDRHLTSYLGLIPREDSSGGRQRFGHLTKQGNRLMRFLLVEAAGIASRFDPALQRAYRRLAFRKGAAVAKVAIARKLAIRLYIMRRDRIDYQEFCRRGSHAGMLVNEPLV

SEQ ID NO: 179978 - protein, 309 aa, unidentified
MIAVGIDISKKKVDIWMNNKLTILSNIEKDFRKFFGVIDRKDTRIVMEATGRHHRLAHEVLDSMGFGVMVINPYQSRHFAQAMNIFCKTDKVDAKILSEYAQRMDFVKTSVPSDNEKSLQNKVRYLEDLKGMLIQCENRLEYANGMELKSIKRLIQSFKNEIEKVSKAIKDVVKSDEKMKNRFDILTSINGVGETTAAALLGLMRELGSVTNKQATALAGLAPMNNDSGNSIGKRHIQKGRHDIRRFLYIPIIGAATQHNTVLKEFYKKLIDAGKPARVALIACMRKLIVYANTLLRKNEKWQENMIKV

SEQ ID NO: 179979 - protein, 374 aa, unidentified
MKDTIKYVGLDVSKEKIAVAIAEEGREAPRYYGMIPHSLEAIRKLVKKLGDKKQIKVCYEAGPTGYPLYRFFLSLGIECFVIAPSLIPSKPGERIKTDRRDAVRLAQLFRAGELTSIYVPTEDDEALRDLVRAREDAKEDELRAKHRLTKFLLRHNIKPPTGVRKWTLKYRDWLNKLKFTRSTSRIVFQEYYYQLQEIEQRIKRLEKEIDIQATEGLHAPVIQALQSLRGVATITATSLVAEIGSFKRFTSAKQFMSYVGLIPSEYSSGESRRQGKITKTGNKHVRRLLIEAAWSYRYQPAVKGELKRRQEGQSAVVQAISWKAQNRLHKKYFRLLSRGKESGKAVTAVARELAGFIWAVTQEIDTNSRALIES

SEQ ID NO: 179980 - protein, 349 aa, unidentified
MTKVTIGVDLGDQYSQLYVVDAAGTCVETGRVRTTRAGLERWFARQAPARVVLEAGTHSPWASRALQALGHEVLVANPRKLRGLYENDSKDDRVDAEYLARVGRLDPALLKPITHRGAAAQADLAVLHARDALVRTRTQLISHTRGVVKALGGRLPRCSAEAFARRASGDVPAELQPALAPVLAQVQQVTAAIRAFDRELERRCAEQYPATARLRQVSGVGPVTALAYVLVLEDPRRFARSRAVGAYLGLRPRRSQSGERDPQLGITKGGNPFLRRLLVQGAQYILGPRGPDCDLRRHGERIAARGGKNAKKRAVIAVARKLAVLLHRLWISGAVYEPLRHSTALAQAS

SEQ ID NO: 179981 - protein, 342 aa, unidentified
MQITTIGLDIAKNVFQVHGIDAKEKVVVRKQLRRGKLMAFFEALAPCLIGIEACATAHHWARELTKLGHEVRLMPAKDVKAYVKRNKNDAADAEAICEAVRRPTMRFVRIKSPEQQGQLMQHRTRDLLMRQRTQVINALRAHLAELGIVAAQGDSGVKELLAIVADQEDTRLSIDARASVIVLAAQLEAMQTLIGSIEKRIKMQHRSNEASQRVETIPGIGVLGATAIVASVPDPTIFRSGRDFAAWIGVVPRQDSTGGKQKLGPISKQGDRYVRRILIVGAISVLRRAQQNPEKYPWLTKLLARRPFKVVAVALANKMARTAWALLAHGGTYRAPELAEAA

SEQ ID NO: 179982 - protein, 342 aa, unidentified
MSKITVGLDVGDRFSQVCAVNIDGVIIQEGRVATTREALRDRLPARPSCRVILETGPHAGWISRELSAAGHEVLVANGRKLRWLYANEHKTDRVDAQYLARVGRWDPTLLSPIRVRSASADGALRLLRARASLVRARTRLINHVRGAVKSVGCQLPAADATSFARRMASRLPAELHDALQPLLTQIAALTQLIANYDRHVEQLATRYPETARLRQVTGVGALTALAFVLTIDDPARFRNGRAVGAYFGLTPRRADSGAQRPQLGITKCGDGLVRQLLVQAAHYILGPFGPDCRLRRWGMALSERGGKNAKKRAIIAVARKLAALLFSLWIHQSDYEPEPLEQ

SEQ ID NO: 179983 - protein, 353 aa, unidentified
MSHLPEEREVILGVDTHLDMHVAVLIDVVGRIVATTSVPTTALGYEQLIEWACGFGRLTRAGIEGTGTYGAALARRVQELGVAVLEINSPDRSRRRLRGKNDPTDAENAARAVLAGEANAIPKAQSGVVEAMRAVSMARRSAVKAKTQAINQLRALLVTAPESIRATLWKVKPEQCVARCARLQSLGDTPLLKALTSTLRLLARRWMSLAKELHQLDAALEELTKRAGRRLLARFGVGPQTAATLLVTAGDNPNRLRSEAALAALCGASPLEASSGKTTRHRLNRGGDRAAHNALWTISMVRMRSDPRTRAYVTRRTAEGLSTKEIQRCLKRYIVRELYPLILADLAESIRKT

SEQ ID NO: 179984 - protein, 335 aa, unidentified
MEFKNVIGIDVSKLTLDLCLLTDDGECVFYQCANDVKGITSLLNNIFSGHNLTREHTLLCAENTGHYGNRLAETALLKGYHFWLENPAQIKNSQGVQRGKDDRKDAERIACYARRFADRAILLRPSEPIYTRLSYLCAERELLLIDAAKYKAQLKDEPGFIKQDLFKAKQRRYKGLIRQLEKAIKEIEEEIDGAINSDAGCKAQYNLLTSIDGIGRQVAVYTIIETKGFTRFKEARKFACHAGVAPFKYWSGSSIRSAHKVSHRANKNLKRLLHMAALSAIRMKGELQIYYKRKVAEGKNKMAVINAVRAKLIARMFAIVKRNQGYQKNYSTMLV

SEQ ID NO: 179985 - protein, 387 aa, unidentified
MPQSNDLSRSLAALDQDSTLIAVIEMSQSSWLVGAIVPGISRQPLKKLVVEERELLRLLHRWRDEATKAGRMINRITVAYEAGRDGFWLARWLQGQGIEAHVIHPTSVAVSREHRRAKTDRLDTELLKRAFLGWLRGERGHCSMAMIPTPQEEDAKRPNREREGLVGERTRIVNRMKSTLARLGIRSFKRTLRKAPERLTGLLTPEGVPLPPNTLAELRRDMARLRFVMGQIREIEAARLQQLEQHPEQGPHAMVRLLAQVIGVGIETADMLVHEILSRTLRDRKAVARYAGLTGAPDESGARHREKGLARAGNARVRRGMIQLAWRFLMFQKDSALAQWYRARTADARGTTRKTMIVALARKLLIALWQLVTTGEIPQGVVLRAAA

SEQ ID NO: 179986 - protein, 402 aa, unidentified
MNAVGIDVSKGKSMVAALRPMGEVALLPQEFLHTEVGLEQMAYAIIALGEDTRVIMEATGRYHEPIAAALHEYGIYVCVLNPLFIKQSGGGSIRKVKTDKADAMKIAKYGLDNWVELREYTPMDTVRQQLKLCSRQYNLYMKTVVSLQNNLISLTDKTFPGVNELFSSPERADGHQKWVDFVMTFWHCDCICRVSEKAFTDRYQKWCKRKGYHFSTEKALDLYAGSCGHFTTLPKNDNTKLLITTAAQQLLAGKTTLAALRTEMTRLAKQLPEYDTVRAMYGVGETTAAQLMAEIGDVRRFPRRSSIVGFAGVDPAVDQSGKHSAKSVPTTKRGSPHLRKTLYQIVCTYLKRSPADEPVYQFLDKKRAEGKPYFVYMTAAQNKFLRIYYGRVKEYLAQLENS

SEQ ID NO: 179987 - protein, 418 aa, unidentified
MKRVEDTSGQEKRYIGLDVHKHYITVGGMNARQELVLRLRNVEMERFKRWAEENLRQTDEVVLETTTNTWDIYDTVAPLVERVVVANPAEVKQIANARVKTDNQDVVRLLRLLIAGMIPEVWVPPMEVRELRALISYRWRLVKMATAIQNRMHSLLHRHNIQAPEGKIDTGENREWWEQVQLSGLERLRLNQELKTLRLVREHIEEVEKELGRLSTSERWAKQAVHIMQLPGVGIVVTMTILSAIGEIQRFPSAKKLVGYAGFGAGVEDSGEKHYEKGITKSGRKELRWALVEAAWQAIRSNARLRAEYDQLCKRKHPNQAIVAIARKLLVILWCLLNRQESYNPATDEDLAYKMLTWAWHMDQSAKRGMTNQQFAKYGLLQLGRGEHLTRIVKGGRPRRIAPKEEVLALMPELSSKE

SEQ ID NO: 179988 - protein, 356 aa, unidentified
MLTTIQPKAYDIFVGIDTSKKSYSITHMDQNQNKHSIKSPADPQAVHNYFQKRFPDKRLLYVYEAGCTGYGLHDYLTSHNQNCIIVHPASVKLAPKDRVKNDRIDSGKLSEQALGGQLRVIRVPDEIYRKLRHLATTRQSYAQDSRRAKQRIKSLLLFENIQLPHEMESGKHWTKRYRESLKMVPIANEVVRFRLNILLEDLEHAHKRLLLIHRQLRLFCQREESLHKNLGVLRSVPGFGFVVSTYFLSRIGDPVNLRNARELGSFAGVVPSEHSSGDKVQKGAITHMGDKELRRLLVEAAWIAIRKDKELGQFYDRIKAKNPKHIGSQIAIVAVARKLTARAHKVLKEQRAYIVR

SEQ ID NO: 179989 - protein, 382 aa, unidentified
MRTVALDLGARRVDFCEITDGGVIQRGVLAGLSQLERRLGSETPPARVAFEACREGWYVAERLTGWGHEPVMVDTTRVKQLGIGQHGRKNDRIDAEVLATALLSGRIPQAHILSPARQRLRLVLAVRRSLVESRAQYVTSIRGIVRARGGHVPSCNTRDFLGKLREVALDEQAQQLIEPLRASVEVLAQQIAEVDLRIEELCEEEPVIRRLMTVPCIGSVVAGAFVSVIDEAGRFRNAHQVESYLGLVPSEDTTGGRRRLGGISKAGNSYVRSLLVEVSWTLLRKKDGDPLARWARQLARRRGLHIATVALARRLAGVLWAIWRDGTVYDPQLVGLKSAEGVSRHAQEREFQAQALRAAAGKSALRIRSARRALEAGSKDSQ

SEQ ID NO: 179990 - protein, 353 aa, unidentified
MTDIAMHNDRIATIGMDLGKRSFHLIGMDARGKVIMRQQLSRGRFERDMANLQPCLVGVEACAGAHHIGRRLSAFGHNVRLIPAQYVKPFRKGQKNDYRDAEAIAEAVQRPTMRFVPIKSAEQLDLQALHRIRSRLVGHRTAVINQLRGFLLECGVIVPQGPAMLRKILPSVLAQRTDVLSPRMIRLIEELADDWRRLDDRVDAVTSEVQALARQDEGCRRLMSVPGIGALTASAVVATIGNGAAFTKGRDFGAWLGLVPKQLSTGDRTILGRLSKRGNKYMRTLFIIGARAVLAKPGSWAKFGLEGWLVAAAKRLHHNVLAAALANKLARIAWSVLYHGRSFARDFEPQSVS

SEQ ID NO: 179991 - protein, 338 aa, unidentified
MSFQADEIMHQVSKGVMMIAIGIDISKKKFDIAVCCNNGKVLHKVFDNTPTGHQALLPWLEKRDVCVDQIHACMEATSTYYEALAEYLHQSGCRVSVINPLQIKAFGQAQLDRQKTDRADALRIAQYCAQQQPPAWQPPAPEIRYLQRLLARLEAVNQMQVQEKNRQYEANGEIEASIERVLTKLNEEEKALEKQIDTHIDRHPDLRDKQTLLKTIDGVGPKLSAYFLAWVPMDRLTTVREAVAFIGLSPAQRESGSSVRGRPRTCKMGHGRLRKMLYMPALSAMRCNLAAEQVATRLRQSGKTGKVVVVAIMRKMVHWMFAVLKSSQPFNVQLALAK

SEQ ID NO: 179992 - protein, 415 aa, unidentified
MQALYRCIAGMDVHRMLYVVTILVELADGTEEKHQRSFGGFKRDRRALVAWLVELGVELVVMESTGIYWKSIYSTLEKAGIPAHVVNARHVKNVPGRKTDMSDSEWLARLGRYGLVKPSFIPPEDLRELRVVSRYRDKVAQTLAGEKNRLHKVLDDAGIKLGAVVSDIHGVSAQAMIDGLIDGTPIEQLPDLAKGTLREKHELLELSLDGELTPRHLFVLKNIREHIRYLESELASLDAYLIDAMAPYADYWRFLQTLPGLDQISAAMILVEIGTDLKAFDNVQHFASWAALCPGNHESAGKRKTGRIRKGNHMIRHLLCEAANAARRTNSVFRSFYQSLVPRKGHKKAIVAVAHKLLRTIYMLFTRRQAYRDPGIDYQAMVVNRNAPRWIRALKKYGFWPKISTLNAPIAAPVH

SEQ ID NO: 179993 - protein, 345 aa, unidentified
MPVAEVDTFAGIDVSAHELSVALRRGQGHDKPAMAKFPNHPSGHKALVAYLLRGGGRVRVCLEASGNYSLDLALTLQAHRQVEISVINPRRARRFAESLGERSKTDPVDARVLCEYAARMPWVRWQPPSPVALHLRALTRAIADLGVIHTQQNNRAYAAAASQALPVLVVKEMQRHKKYLEQRMTRLRREAVRLIACDPELGRRFRLMLTTIGIAETSALQILGELAVLPDMLDARQWVAFSGLDPRLFKSGKSVEKRPRISRSGSRHLRRALYMPALVALRRDPYLRVFYQNLLARGKARLQAVVAVMRKLLHALFAMFRSNQPYDGSKLCAVDLAVHAIAACA

SEQ ID NO: 179994 - protein, 355 aa, unidentified
MITIGIDPHKRTHTAVAVSGVGQLLSEITTPADDDGHRSLLAWAQELEGGEERRFALEDCRHVNGRLERFLLAAGERVLRVPPRLMADARQSARTRGKSDPIDALAIARAALREEGKLHLASHDPRARELKLLVDHREGLVRERTVLASRLRWHLHDLEPDLEPAGRTLDRAGVRRGLSGRLARREQSAQVRICRDLLARIGDLTRRERQLAAEIGELAKGYAPELLEVPGVAWLTAGKLIGEIAGAGRFKTDAQLAHFAGCAPIPASSGNTQRWRFDRHGNRQLNAAFYRIALTQARVHPGARAYLAKKRAEGKSSAEALRCLKRLLVRVVWTTLRASSEPRVSLSQSDFQDLS

SEQ ID NO: 179995 - protein, 454 aa, unidentified
MCLEDRPVLEPNAAGIDIGAREIFVAVPPGRDENPVRVCTTFTEDLERMADWLVACGITTVAMESTGVYWIPLYDILESHGLKACLVNARHMKNVPGRRTDWHECQWLQYLHSVGLLRGAFRPQSDITALRTIMRYRQELVQMSSQHVLHIHKALTQMNLQIHHVIDDITGLTGLAIVDAILAGQRDAGQLAKLRNWRIKADEETIRKSLVGNWREEHLFTLQQSRELYRTYQQQIVKCDEKIEALVSGFEPRVDPEEKPLPPDQKRYRSDKKRAKKSGRVETDFNLRTEAYKLFGVDITQIPGLETMALSLFGEVGRDMSKWPTADHFASWQGLCPDNDISGGRVLWKGTRRVQNRAGQMFRHAAYSLHHNLTPLGDYLRRMKSRLGPAAAITATAHKIAVIFYTIVKNQVEYDETIWATRDIKRKNRIEGKLKRQARQLGYQLVPFETQPAA

SEQ ID NO: 179996 - protein, 430 aa, unidentified
MAFVHCKLILGVLSMNAAGIDVSSRKSTVAVLRPFGEVVRAPFEVSHSAEGLASLVRQLKAIDGETRVVMEHTGRYYEAVANALHEAGLFVSAVNPLLIKEYGGNSLRRVKTDKADAVKIARYALDNWAELLDYTPMDRIRYDLKTLNRQFHLASKQKTATSNNLIALLEQSFPGVRKCFDSPVRRDGTQKWVDFAHDFWHADCVRKHSLVSFTERYHKWCKRHGYNFKQSTAQQVYDLAKSVVVLVPKSNLTKVLVQEAANQLTIISKSVETYRTEMDRLASQLPEYPVVMGMYGVGDSLGPQLMAEIGDVRRFERKQSLVAFAGVDPMPNQSGDKNVRSNKSSKRGSPYLRKALFNVMTCYLQKAPTDEPVFQFLDRKRAEGKPYYVYMTAGANKFLRRYYGKVTEYLSTLEDLPPVDMDSTGLPKRQ

SEQ ID NO: 179997 - protein, 428 aa, unidentified
MNKVDSIRLGQFRQLKKEIRGSKEHLIVGIDVAKDKHNAFFGTATGKTLFKRLVFENTIEGFKRLLIQADAVTIQHNLTKTVFGLEPTANYHKPLAEFLIKSDHMVVLVSGVAVKRNRELLDGRWDKHDTKDSANVADLISQGKCLFYEYPSMALRELRSLLSLKRRLKKQEHGLRVRIRNHLLAAYFPEFDRYYRQSDSQGLAIVRWCLDPSVIADLKYDEFVRLVAPRTRTIGQRDRLKAIWKMAADSIGCDAGESLEFEAKVMVEGLKHVQEAISEVSDKIEYICCAFPEYSYLLTIPGFGPDVSSKVFGAIGDPFRFKTGKQVLKMAGLDLSAERSGKGSDAARPVLSKKGKAHLRYALYQAAHIASTRNQYFIMYFTNKLRGREREKGIKTKMRVKLAAKLLIVAWTLMKKEESFNPDYLNRA

SEQ ID NO: 179998 - protein, 446 aa, unidentified
MRAVTRRCFGLDVHRDFAQVAIWQDGLVRQAGQIAMTAEALRVFADSLAPTDEVALEATGNTNAIVRALRGRVARIVVGNPQKTRAIAEAEVKTDKVDAAILAQLLAADYLPAVWVADEATQARRRQVARRAHIVRRRTRLKNQVQAVLHRNLIARCPAADLFGHKGRAWLAEQPLPADERQAVSALLRQLDFHGEELRLIDRELARVALGCQDTKRLMTIPGVDVTVAMSITAAVGDFERFCSPNKLVSYLGLNPRVKQSGGQPASHGRITKQGRAHARGMLVEAAWVAVKTPGPLRAFYERVRARRGMQIAVVAAARKLTVLCWHMIARGEDYAFARPSLTAKKLRALELQAGMPARRGQKGHAAGYSLKDVRARERQMAEHAERAYRQLVADWQAKAPQPRVGVAAANGARLSRPSDGATAARQASAPEPALRSGVDHARRRG

SEQ ID NO: 179999 - protein, 448 aa, unidentified
MRQGRRPASRGVARRNAKLKALRELVGKDRAIVAVDLASSRQAAVVCDHDSVVLARKMFRGSAWCISEILAWAEPVATKAGFAGVMLACEPTGHRWKPLVVTARARKIPAVCVQPLLVRRAREGEDFTRSRSDFGDAVIIARLTAELRCYVPYLPEGPWARLRHLGARREGLVRRAVASREQVRDLLECAWPAVLEAAADPLESLTWRAALGVSADPAVIAAMSEQQFLAALRERLVALGGKKVWRRIAVAVHAAAADPGGIAAERDAILERATFAYQDWMAALAAQADADARMLAVLDELGLTGLVTTIPGLSAVGAAVILAQTGDPARYDSPRTWVKHAGLAPQANESGKYRGRTRSSGRGRPELRTAAWRVMFGAVRCNPVYAARLTFLTTREGNRLSTGQAHAALAAALLRQLHVVVTRRVPWDAAIASGTAMPSDAQVVMAVA

SEQ ID NO: 180000 - protein, 398 aa, unidentified
MDVHKEVIYICALIGTGSSFRKFKFKFGTFHHQLIEMRQKLVELGVTHVLMESTGVYWMPIYDVLEGFVEIVVGNAQHIMNVPGRKTDESDAEWLAKLLRHGLVRPSFVPERQFRELRQLTRYRRAVVQTQASEQNRVEKHLQIAGVKLSSVASCVFGVSGTKMLNSIAEGKTDPEYLAELALGRLRKKIPQLKEAFSGSISQHTQELIATQMDQMNRLECTISEVELKIDEKVKPHSKILDRLDQIPGIDLRCATDILAEIGTDMSPWATHRQIAAMAGLCPGNYISAGKRLKNRSRQGNPYLKSILVQAATSAINKDGSYYQSKFRQLKQRRGHKRALVAIAHAMLVTIYHMIKKGEPYRELGANYVTDYENGRKKDDLIKQLKKLGYTVSLTETA

SEQ ID NO: 180001 - protein, 400 aa, unidentified
MHLTANISVPQKNFIAIDLHSDNAVICVRRNALNKAGELVGKNIWCGLVSIRDGLDSFVKALLPYCQDFDHVAVVESTYNWYCLADVFEERGWLLRIADPSTVSQANLKSSEDRTDAQYLAERLRVGSLKHYLPLSYSSRALWDLCRYRMAMVQDCASLKIKLINLYRNQLSKNLLVADLLDQCRNHMQSNYRFDPDILEEFKDPNIRLRVAFEVSRIAMLEEMIEECNAEIQKQCKDQELVKLCKTIPGCGPVLSAVICTEIGTMQRFKSAGDFVSYCRLCSTSKLSNGKSKGLGNAKNGNAYLSWAFTEVAQYASRNPVIREILQRLLRKYGGLRVKAIRTLAAKIARVTFYVLKNKQPFYAAKCFGIELTKSIKKKLTHKTLREDAAVVLPTVAGQA

SEQ ID NO: 180002 - protein, 360 aa, unidentified
MDVVVSRCAGIDIGKAEVVVCLRVPGSRGERVSEVRTFSAVAGEIKRLADWLAEHQVSHVVMEATGQYWKPVWDVLAERGFELMLVNARHVKMVPGRKSDVADATWLAELLEHGLLRGSFVPPRVIRELRDLTRYRKRLVQAHTSEGQRIAKILEDAGIKLDSVVSHLLGVSGRAMLRALIAGQRDPEQLAELARGRLRTKIPALVAALEGRFAEHHAIMIGLALDHFEYLERSVVRLDERIDGLIAEHSAARDRLDTIPGVGKRAAEIIIAEIGADMSVFPTAGHLASWARMCPGNNITGGKRNSGTTGGGNRCCAKHSWNAHGPPPASVIATWLPSSGASPDASARKKPPWRSGTPSW

SEQ ID NO: 180003 - protein, 387 aa, unidentified
MGHVVIGMDPHKRSATIEIIDDRQKVLSGGRFGTDRDGYREMLAAGRKFKDRIWAVEGCNGIGRHIAQRLVADGEPVVDVPAKLSARARVFSTGQGRKTDPVDAHSVAMAGLHSPGLRVITADDAMVALRLLADRRDELGVARSQTVNRLHRLLLELLPGGAKKFLSATQAKDLLATVRPRDIAGNTRRRLAAEMVTELARIDKRIKAADAELKELVAATGSSLLQVHGIGPSGAARLLGDVGDIARFADKGRFASWNGTAPLDASSGDQNRHRLSRAGNRRINRVLHIMAIVALRSDTEGRAYYRRKLAAGKTTMEALRCLKRRLSDVVFQQMRTDAKRLAAGPGGHTGASLHSSAADSHPGIGTSDKSLPGPATSKLRTGLPAAS

SEQ ID NO: 180004 - protein, 344 aa, unidentified
MEHYAGLDVSLEQTSVCVVDAQGQVVREVKVASEPEALIGFLRTQDLEIARVGLEAGPLSQWLHAGLVAAGYEVVLLETRHVKAALSAMTVKTDRRDARGIAQLLRLGWYRPVHAKSASAQEVRSLLTARKLIQGKLLDMESGIRGVLRGFGLKVGTISRGRFEARIRDLVEGHTMLETVVGSMLAARAALQAEFTRLHRALLVLVRADPVCRQLMSVPGVGAVVAITFKSGVDDPTRFRRSRDIGPHFGLTPRKYQSGEIDVTGSISKVGDRMVRTALYEAASVMLTRTVRMSPLKSWAMGVARRRGSKKARVALARKLGVVLHRMWVDGTSFRWTSEATAMA

SEQ ID NO: 180005 - protein, 377 aa, unidentified
MDKDSRFVGLDVHAETIAVGVAEPGGEVRSLGTIPNTPEAVRRLVKKLGPPETLRVCYEAGPTGYVLYRQLSALGVPCAVIAPTLVPVKAGDRVKTDRRDAEKLARSYRSGDLTPIWVPDPGHEALRDLVRAREAAKKDQLRARHRLGKFLLRQGRRAPTGSKAWGVKHRAWLQTIRFAHAAQDATLLDYRTEIDHAADRIARLERAIATAADLTPAPVRAVIAGLQALRGIAKLSAVSVVTEVGALSRFAKPRQLMGYSGAVASEHSSGPHRRRGGITKTGNAHLRRIVIEAAWAYRHRPAIGGTLRTRQAGLSEEVKALAWKAQHRLHGRYARLLAKGKAPTQVVTAIARELLGFIWAIGVHIEQHTAGGAPAAA

SEQ ID NO: 180006 - protein, 339 aa, unidentified
MKNTKYYIGLDVHKERTSYCIRDKLGNILIEAEAATLYSELEHRLKPYLAASMIGLEASTSYYTLYQNFLRNNYHIKVANTIQLRQLIAKNDKLDAQRLSEMLRLGTFPCSYIPEEKIQHLRSLIQMRHALMQKKVRCNNRIQAFLDRNGVMMPLCKAFSKKWKHALMQHLGSGNISTELRYEYNHYVYLEKTNEQADQEIIGYTKTYWNQEYQLLRSITGFGVLLPCYIIAFVHPIERFLSNRKLRRYAGVIPVAKESGNTTSRGRIPKTSSKALLRWALVQAANTIGKTNTTLGRYYRRKKSQKKNTGIAKIAVASTLVDIIYKVLTTKKPYISTAC

SEQ ID NO: 180007 - protein, 371 aa, unidentified
MKSILSVGMDVHKNSFSLCAYDGYTGEIVSESTFASDVKLVIKFIETLKSRYENDVEIKCGYEAGCLGYSLYKSLTARGVDCVILAPTTMQVSAKNKMVKNDRMDALNIAKNLASGSYKSVYVSDEEDVEIKEYIRMIHDFKKELKRVKQEICAFVLRHGYQYDGKSKWTIRYMNWIRELEMSEIQRETLNEYIAEMENLNDKINRFMNRIDEMYQSERYHEKVSKLRCFKGIETFAAMTIQVETADFERFPSAKAYASYTGLTTGEHSSGDKNNRIGITKQGNTVIRKTLVECAQSLVKGNVYAKKSQGLKSRQKGMDVNIIAYADKATERLKKKYQKLIERNVPRNKAIVAVARELACFIWGMETGNIH

SEQ ID NO: 180008 - protein, 315 aa, unidentified
MPQSGELFVGIDVSKRQLDVALGAGGELWREANEPFAHAALSARLASLQPALVVVEATGGYETALVAELAGAGLSVAVVNPRQVREFARAAGQLAKTDALDARMLALFGERMRPQLRRLSNEQERELKALVARRRQLVEMLVAEQNRLGTTPKLLHHALRSHIDFLRKELRRINRELDQFLRGSPLWHEKQILLRSVPGVGPVLCATLLGAVPELGSLSRRAIAKLVGVAPLDRQSGRWQGRSMIGGGRATVRAALYMGALTAIRRNPALRDFYDRLCQLGKPKKVALTAVMRKLLTILNAMLKQRTAWRPPCVV

SEQ ID NO: 180009 - protein, 444 aa, unidentified
MNRNTKNKQNATKIDNSQNAKIRAITETTMIVGIDVGSDKHDARAFTYRGIEISDGPLEFSNSEEGFETLYAWMENLRSRNGLDAVMPGMEPTGHYWFNLGAYLQDHGMKPVLVNPYHVKQSKELDDNNPLKTDQKDPKVIAGLVKDGRYIIPYIPKDVYAEVRNLTNLRYQASEALTIVKNRLARWISLYFPELKDVYKQPGAVTAMMILHEAPLPADIVKLGVDGILKIWRGHKAHGAGEKRARKLVEAAEHSIGSKNSPEAAKIELHELLEDYEKYETRVNELIELIDKKIAEIPNVDKILDIPGIGKRTAYGFVAEVGDIGRFDDPKQLQKLAGFAIVEDSSGKHKGESHISYRGRKRLRYVLYEGAVSLVARNAQFKELYNYYRTRKVNPLKKMQALIAVACKLIRVFYKILTDGVDYDGTKMLGDIRRPDEDRLALTA

SEQ ID NO: 180010 - protein, 324 aa, unidentified
MQSSTEAVLGLDVAKLKVDVCLRLPGGKVRSKVIANSKAGFEELLAWLAKHQAGPVHVCLEATGAYWEELAEFLSDAGHPVSVVNPARVKAYGTALGARSKTDAADARLIAEFCATQRPDLWQPAPPAVRVLRALVARRQALIDLRTEEGNRLQVAHASVKASIQAVLGALEEQIRAIEQQIRQHIDDDPTLKSQRDLLDSVPGLGEASIPTLLGHYGGPARFGSSKQAVAYAGVDVRHYESGSSVHGRPRLSKRGNSKLRRALYMPAVVSMRLTGWGKAFAARLAAAGKPKMVIIGALMRKLVEMAYAILKSGQPFDPNRHSA

SEQ ID NO: 180011 - protein, 423 aa, unidentified
MDTHRDTHVAAVLSPLGAVFGTEEFPASAAGYRGLLAWAGALGTVRRAGVEGTGSFGAALSRYLLTQGVEVFEVNRPDRTDRRLRGKSDPLDAQNAARAVLSGRARARAKSGDGPVQIARMYKLTKGSAVKARTQAINQLKAVLITADPALREELVGLNNPDLFRACARFADESKNEEGEEETVLQATRTTLRLLAHRIEQLTEQIQDVEHRLARLAERHVPQLLAVVGIGPDTAVTLLITMGDNPERLSSEASFAALCGVSPVERSSGTRQYRRLNRGGDRQANAALHRIVQTRLRVEPRTRDYFERRLKQGKTRREIVRCLKRYAAREVFHLVRRLVGRDEIRSAMAAYYERQVRGDRSPNLEKSGYVLHTTSDPDVFIAEIDTVFDGDGDDVVVSLVQIFRIRDGKIARLRDYFTPELMN

SEQ ID NO: 180012 - protein, 343 aa, unidentified
MDCYVGLDASLKKTSVCVVDGTGKVLCEGVVDSQPSAIAKFLKSRALDAVRIGIETGPTSIWLTTELRTHGLPVICIDARHARAVLKMQINKSDRNDAAGIARIMQTGWFKEVRLKGFDSHAVRALLTSRATLVKMKRDLENQIRGLLKIAGLLVGTARGNAFSQRVLELAEQSPELAVSVIPLLTTREAIGKQLYDLDRKVLRLARGDRQAQSFMTAPGVGPVTALCFRATIDDPARFSRSRSVGAYVGLTTRRYSSGEVDWTGRISKCGDPMLRSYLYEAAGVLLTRVQKWSALKAWGMRLAKRIGMRKARVAVARKLAVILHRMWVDGTDFRWSAKEATA

SEQ ID NO: 180013 - protein, 403 aa, unidentified
MKHVIAFDISMGKSYMVIYNAQKQCVFESEIKHSKPDFKKLQEKIHKLTDETGESPEIVFEATGIYSRQLERFMQNNQYTYCLLNPLEAKIQCDSLRIHKTDRSDAHRLALTHFTVTRRVSTGTDNLFYQLKSLSRLYSELDDELSIIRGRMHKVIQLTFPELERIFTSKSDLFLNFVQLFPHPDCVLGLSKTIIKNRIRANTNKKISNITAEKKAIQILEIAKICYPAVSQNDVLCDQLKLYARRYQELLHQKEICISKMVYVAEQRAEYDIIRSLPGIGPNTAVRLMAEIGDITRFNNNKQLNAFAGIDIRRFQSGKTFFKDKINKRGNKHLRKLLFLIIQNMIKQRRYGQNHIVEYYDKLKTQPYNKCHKVASIACVNKLLKLLFYLITHNMHYDYRLAA

SEQ ID NO: 180014 - protein, 429 aa, unidentified
MKSLAPQQFTAYVGIDWADTKHDICVQVSGSEAREFDCIAHRMPDIDKWARSLHQRFKGPIAVALELARGPIVYALQRYDFFVFFPINPLTLAKYREAFQPSRAKDDPTDAELAVDILVRHPQRFSPLQPQSAAMRTLLSLTEHRRELVDDKTRCTNRLTNALKQYYPQALDWFGQHDTLLFCDFLARWPTLSQAKRARRSSLQAFFHAHNSHRAGVINARLDAIKGAMPLTEDKGVITPCRLQVLALVEQLRATLQAIDCFDREIAQLAPTLPDYGLFQDLPGAGPHLAPRLLAAFGEQRERFGSADQIQKYAGIAPVTERSGKKNWVHWRWQCPKFLRQTFVEWAGQTVNKSFWAGAYYRQQRDKGSSHPAAVRALAFKWIRILYRCWETRTPYDESRYLNALRERGSPLLKNLEINKQSKEVAPLV

SEQ ID NO: 180015 - protein, 431 aa, unidentified
MTRSDTTPMIAVLVAIDVAKSRNEVLIEMPDSRRRRRLTVANTRIEHDRFVAELQALAPRPVIVGFEPTGHYHRPLAWRLVQAGFDTRLISSVALARTREALHNGWDKNDPKDAQVILHMLQIGATKPYHDPLANRINDVQELSVTHEVISRAKTEVQHRILTHYLPLYFPEIERFRGNTRSDWFFALLEQFPVPASITALGKDAFVAAAWDVVGRKVSKSRLLGDIWETAQTSIALPIAPDAPAIEMFRLVLGEARRLIAQRDDIEVAAIELLGEHADFRRLQQVPGIGPIHALTILAEAGDLRRFRHHRQFLKFCGLDLSTYQSGQYRGKTKLSKRGNARLRRRLWMAAQVAIRQRENSFRDKFDRYVARDRHDPDLRRKAFTAITAKMGRVVHAIIKRGDDYRPFVEGPVPGGGTPLTQCREGASATL

SEQ ID NO: 180016 - protein, 430 aa, unidentified
MNCNTQNAKIKSITEKTLIVGIDVGSETHYARAFDWRNIEFSKKPFAFSNDEAGFASFKAWLEDIKEKFGKTIVLPGMEPTGHYWFNLGAFLQDNGMKPVHVNPHHVHKSKELDDNNPSKDPKTIAALVNEGRFNYPYIPTGVYAEIRSLYGLQVMTQEALIRVKNRIARWLSIYFPEYKDVYRSGDAISGVMVLKVCPLPADIVMLGADGVNKIWRDAKLRAAGMKRARPLVEAAKHSVGSTESPEAAKYEMELLLGDYEVYTKRLEELTEKIEVKLEEIPYVDKLLEIKGVGKKTVSGLIAEIGDISRFDNPKQIQKLAGYAIVACSSGKHKGESHISYRGRKRLRYVLYEAAISLIGQNAEFKEIHRYYLTRQNNPLKKMESVIAVACKALRVFYAILTKGVSYDGKFMLESIRYPENQVLGNRIAA

SEQ ID NO: 180017 - protein, 384 aa, unidentified
MFVFRESGMPWFGWPPEPGRGQIDRLAIGRKARRHLGRLPAFLAMLDELKGPLRWLNERPQTIKSSQRIAQMPISTPALRCIGCDVGKANIVVFDSLTQKITTIENQPQALASFAARLDASCFVVCEATGCYESGLLAALVTAQIPAHRADARKVKAFIRSFGTLGKTDAIDARALAQYGHERADRLLRWQSPDKIREKLQRLVLARRDLVAEHQAYTNRLAAPGADSAKPFLGPVQSCLAEQIVAIEVAITALVSADESLKADTKSLSGVGGIGQITAVSLLALMPELGHLSGKQAAALASLAPHPRQSGASDAYRRTKGGRPLIKAVLFMAALSASRHNKTLKAFYDRLVAAGKKPIVAITAVMRKLIVICNALLRDAHATI

SEQ ID NO: 180018 - protein, 333 aa, unidentified
MEDKMCLGIDVSKKTLDCCLYDGNDYKHKIFNSNNASIVSKIIKNYKLTKACKVVMEATGVYHTSIFKSFYEKGFNVVVENPLKIKSYSKMKLCRVKTDKADAKLIAEYGYMQVTERTIPHEPYQDELAALLKLIDGYQCDVTRCKNRLEALNNYSINTSIHIASLNRQIISLNKEIQTLKVSIREIIASTCEEQYQLYLSVTGVGPVTASSIIANFGNFSRFEQSKQVANFIGICPSPFSSGTSVKSSGSISKKGNPLLRMTLYMSALTASRKNRACHDLYTRLVAKGKNKKLARIAAGHKLLRQLFAIAKSGEPYDPDYEIKMCENRKNVK

SEQ ID NO: 180019 - protein, 452 aa, unidentified
MKKQVGKGKAMTLECLELNAAGIDVGATEIYVAVPPDRDTQPVRCFQTFTDDLLQMAAWLVQCGVTTVAMESTGVYWIPPCEILESSGLRVCLVNSKHVKHVPGRKSDVSDCQWLQYLHSVGLLKSSFRPESEICAIRSLSRHRASMVENAAVHIQHMHKALTQMNLQIHHVLSDITGQSGMAILEAIVKGKRDPHQLAELCDQRVRSSQETVVKSLVGNYRSEHLFTLGQSLQAYKYYQQLIADCDQEIERLVRALDGKIDPPQNGPGSSPDPRFLKRLKNQFHFAMAPELNRIFGVDLTAIPGISALTAHTLLSEIGPDLSRFPNVAAFASWLALCPGNKKSGGKVLSSKTRQTNSRASHALRIAAQTLARSQSHLGSFYRRMKARLGAPQAITATAHKLARIVYHLLTTGQAYDESVFLNEDRKQTQRHEKYLRKQAKTLGYELVPIAA

SEQ ID NO: 180020 - protein, 338 aa, unidentified
MKVIKQNVGIDVSKKELAVCLSFLQEDLCVKIKGTKKFGNNESGFKAIMEWLDRKKDTAMPLHFTMEPTGVYHENLSYFLNDREQLVHIVLGNKAKKYAESLSVNSKTDTLDSKALSRMGVERKLELWNPGSPIYRKLKVLTRERSASLKIRVMIKNQLEAMLHSAFLNKKTVNRLNRTIKELNSQVEKIEKDIEMVVENNKELKSKILKIISIPGIGFLTAVIIIAETDGFALIKSIKQIVAYAGLDIKIKESGKWKGKSKISKTGNVHIRKALYWPAYSSVTHTQTYSVFYERLFNRKEISMVAAVAVQRKLLGLMYTLWKNDTVYIDNYESKKVA

SEQ ID NO: 180021 - protein, 338 aa, unidentified
MEFKRIAVDTSKAVFTLHGVDLAERLVLRRDLRRAGFEAFFAKLPPTEVALEACGASHHWGRRLTALGHRVRLIPPQYVKPFVKRGKNDRNDAQAISEAAARPDMQTVPVKSAEQQAEAMVLSARELLVRQRTQLVNAIRGHAAEFGVVAAQGIARLEGLLAAVHSDDAIPQAARDMLAFLAAQVTQLDSQIAQLEKQMKRLHKANPLSRMLAAVPGVGPIGALSLALTVDATRFTSGRHFAAWLGLTPKDRSSGGKQRLGKISKAGNERLRQLLVVGAIAVIKVAKPGSRIASAWLLKLLERKPRKLAAVALANKMARIVWAMMTSGEAYRRQPVAG

SEQ ID NO: 180022 - protein, 326 aa, unidentified
MSSVGIDLHRNRSHIAVIDEHGELTLSKRIINGRETFLELLGSLEGESQIAVEATYGWEWLAELLEDAGYDIHLAHPLRTRAIAAARVKTDAVDARTLAHLLRADLLPEAYVAPRELRDLRELLRHRIALTAMRSALKNRVHAILAKHGITREHSDLFGKGGRQFLAALELREAPRRRLDSLIALICDFDREIEATTKEIDQRAKTDDRVDVLTQLRGVGPYTAMLIIAEVGEIARFPDARHLCAWAGLTPTVRSSDGKARLGHISRQGSPALRWALVEAARRSRSEMHDRRRAAARAVRTDHQAPRPQGRESRRRPPDPDPQLLR

SEQ ID NO: 180023 - protein, 338 aa, unidentified
MNKFSGIDLHSNNSVVVVSDEADRVLYQRRLPNDPVQIRAALAPHREDLVGVVIEATYNWYWLVDQLMNDGYRVHLANPAAIRQYEGLKYSGDFTDAGHLAQLLRLGLLPEGYIYPAEERPVRDLSRKRMQLVQCRTAQILAIENLFSRNTGGQIRGERVKCLDQTQVGAFGFAPDVELAMQANLAVMQTLQEQIGILEKRLMERVKLKPDYVLLNSVPGIGPVLATTIMLETGTISRFTEVGNFSSYCRCVDSRRESNSRKKGEGNTKNGNKYLAWAFVEAANFAMRSCPEARRFYERKKRARNGIVAIKALAHKLARACYHMLREHKPFDVTRCFG

SEQ ID NO: 180024 - protein, 346 aa, unidentified
MKDVQIIGVDLGKNGCSLVGLDHAGQVVLRRRVRRDGLTALLAKLPSAVVAMEACCGAHHLGRLLVAQGREVRLMSPEYVRPYVKAQKNDDRDAEAIAEAATRPTMRFVALKSEAQLDVQVLHRVRDRLVGQRTSLMNQTRSILLERGLVVAQGRRALLDALQAVEEQGEASKLSGRVRLLLADLLDQWHALDSRIAALDEEFTEMARNDPAARRLATIPGVGVMNATALVAAVGDGRTFSRGRDLAAWLGLVPRQATTGGKPKLLGITKRGSKYLRKLIIQGARAALPSLARSPTPLGAWLRGLLARAHGNKVVVALAAKLIRVAWALLRHGTSWSWAPSQLATA

SEQ ID NO: 180025 - protein, 339 aa, unidentified
MCILYVGIDLAKNVFAVHGVDEHGKAVLVRPSVARAKLHELIATLPACTIGMEACSGAHHWARLFLQHGHTVRLMAPKFVAPYRLSGKQGKNDAADAMAICEAVQRPNMRFVPVKSQDEQARLCVHRVRQGLVEQRTATINRIRGLLAEFGIVLPQRAATVRREATVHLEDLPGWANTAIGDSLSDVHRLDERIAQYDHHVLQMARDDQRSRALMQLSGIGNTTASALVSTIGNAHDFKNGRQLAAWLGLVPGQYSSGGKTRLGSITKAGDRYLRTLLVLGARAVLAAARTKVDRLSRWALALEERRGYWKAVVAIAAKNARMAWAVLSKGENFKLLEA

SEQ ID NO: 180026 - protein, 347 aa, unidentified
MGIVVALDVHRNQITFKALDRDTGEVRRGRVAPAARVDVRTWLAQFAGHEVEFALEGTTGWRFVVEEIERAGYRAHLADPAETAAKRGRKRRAKTDNADCDLQLRLLLAGELPESWIPPAHILELRARVRMRKTLIDQRTAWLQRVQAQLFQQGVPAGLRLRSEVGRQALAAADLSPAGRELVELGLRMIDALDQELVPLTRELGVFARRQAGCRALIASLYGVGPVSATAILAELGDARRFSSSDDAVRHAGLDVTVHQSDSKRAPGHLSHQGPEVLRWALFEAALSGARVGSPDHGYYLQVAERIDHTRACLSLARKLCRRAYHVLRELGDEALAPVEEAIAAAA

SEQ ID NO: 180027 - protein, 365 aa, unidentified
MTIVDAVRPVTGGVDARLDLNVAPCPVTGGVDTHLDVNVAAALDPVGGLLGVAEFPTTLAGHRELLGWLSGFGPVARVGVEGTGSYGAGVARFLRASGVEIVEVDRPNRQARRRSGKSDPLDAVEAARAALSGRASGAAKSRDGNVEAIRALVVAKRSARSAKIQALNQIRHLSFTAPEQLRQRLAGVSRHHLAAHAAGLRPATGAGADPVITATKTALRILGRRVLALDEEKAGIDALLSALVTQTAPQLLAVFGVGVDTAAALLVTAGDNPGRLRSEAAWAHLCGTAPIPASSGKVTRYRLNRGGDRQANCALWGIVITRLGNDPRTRAYMTRRLAEGRSKPEVIRVLKRYVAREVYHRLPRT

SEQ ID NO: 180028 - protein, 354 aa, unidentified
MSQTPNTAIAVIGIDIGKNSFHVVGHDARGAIVLRQKWSRGQVEARLANIPPCRIGMEACVGAHHLSRKLASLGHDARLMPAKYVRPYSKGQKNDFNDAEAIAEAVQRPTMKFVATKTAEQLDLQALHRVRERLVSQRTGIINQIRAFMLERGIAVRQGIGFLRTELPTILATRTDALSPRMLRVIEELAGDWRRLDQRIDGLSGEIEALARQDQACSRLMTVPGIGPIISSAMVAAIGTGDVFSKGRDFGAWLGLVPKQISTGDRTILGKISRRGNRYLRVLFVQAAWVVLVRIKNWERYGLKSWIEAAKRRLHHNVLAIALANKLARIAWAVLAKGRAFELTRTDDAGVRPA

SEQ ID NO: 180029 - protein, 340 aa, unidentified
MKTLYAGIDLHSSNQVIVVTDSEDTVVYRKRLRNELDVTLGALSPFSDGLRGVVVESTYNWYWLVDGLMDHGYRVHLANTGAIQQYSGLKYANDASDAHWLANLLRLDILPEGYIYPKEERPVRDLARKRGGLVRQRTANVLSIKNLLARNTGRSMSASGVKRLTDEDVDGMFAGEDLGLAVKSTLAVLRCIEEQIAILEKTILKRVRLRDGFRNLLSVSGIGPVLALTIMLETGDIHRFETVGDFASYARCVGSAHFSNGKKKGKGNTKNGNRYLGWAFIEAANFAIRYNETIQRYYQRKSAEGKHMLVAKKSVAHKLARACYYILRDQTVFDVTRAFA

SEQ ID NO: 180030 - protein, 383 aa, unidentified
MRTIGAETPNTEVAVILGVDTHLDFHVAVALDHLGRRLGESSVPTTPKGYERLLRWAEGFGPVRCFGVEGTSSYGAGLTRHLRAVGIEVLEVERPEHHRRSSRRNLQKSDPSDAEAAARAVLAGEASGVPKSADGRVEMIRTLRAARRSAVKARTQAANQLQGLRLTAPEQLRNRLRGLSTKELVRVAARFRLAGDPSDVPAATKFALRSVARRYETLSAEIAELEAHLGRLVAQAAPELLSLPGIGTDNAATLLIVAGDNPERLGSEASFASLCGVAPIEASSGKVVRHRLNRGGNREANRALYMICLARMRRDLRTKEYVERRTAEGKSKREIIRCLKRYIAREAYRVLISCGARSSPTGTKDEAHSHRERCRLTIGASLG

SEQ ID NO: 180031 - protein, 413 aa, unidentified
MTATNQFAAYVGLDWADKKHDVCVQFKNGERVFHVIEHTAEALDVWLTELHQKVKGRIAIAVELKKGPVVYALQKYPFITVFPVHALSLARYWQAFSPSGAKDDPQDAELALELMLRYPQKIKAIEPANADIRLLQQLVEQRRQLVEDKRRFVNRIINTLKQYYPQPLEWFSHRGSLLLCELIIRWPSLQQLKRARRETIRNFLNAKGGRAIVALTEQRVASIDNAISLTTDPSVIEANALMATALATQIKVVSEITKTYDERIEALFDTLPDAGLFKSLPGIGPCMGPRMLAALGDNRDRFNSAEEIQNYAGIAPVTERSGQKSWVHWRWQCAKFVRQTFVEWAAKTVTSSYWARLYYQGLREKGKSHQSAIRALAFKWIRIIYRCWKTRTRYDEAKYLLALEARHSPLLKP

SEQ ID NO: 180032 - protein, 401 aa, unidentified
MPEGADERPVREFSTFTDDLERLAEWLTSCGVTTVAMESTGIYWIPVFEFLARHGLEVKLVNARHIKNVPGRNSDVLDCQGLQQLHTSGLLRGALRPADQVCTLRAYGRHLMRSASSSIQRMQKALAQMNLQLHNVVTDITGVTGMGIIKALLAGERNPQKLAALQDKRGKNSQETIARSLHGHYRPEPLFSLQQAVELYAFHQQKIGDCDQRVRAQLNQFDASDGQDSAGKPPCRLEDALPRMAGGDLSSMDGISTNTALKIVAEIGIDMSRWQTVKQFTSWLGLCPGSKISGGEILSSATKLVANRAAAALRMAAMTLFNSKSALGAYLRRQRSRLGAPKAITATAHKLARLIYSMLKHGMVYVDAGQLQYEERYRSRLIQNLKRKAQERRYKLVSAQR

SEQ ID NO: 180033 - protein, 343 aa, unidentified
MQSITTIGLDIAKSVFQVHGVDANGLVVIRRQLKRRYILAFFEKLPPCLVGVEACASSHHWSRELQALGHTVRLMPPAYVKPYVKRQKNDMADAEAIREAVTRANMRFVPTKTPEQQSGLVLHRTRHLFIRQQTSVINAIRAHLAEFGVTAPVGRKGIEDLLGVIADPSDKRVPDVVRACLAALGSQLLGLKKRILDFDRMILAWHRSNQTSKRLNCIPGVGPLLATALVESVADPKAFRSGRNFSAWIGPVPKQHSSGGRPRLGSISKKGDRYLRGLFVAGALAVIRYAKLHGTKYRPWVAALLARRPTKVAAIALANKLARMAWAMMAGGERYNYPAALRV

SEQ ID NO: 180034 - protein, 455 aa, unidentified
MPIIFSEAGLMKKPNKRKTVKLPKHLQNLNPYAAGIDIGSKSHFVAVPEGTDEQSVREFSSFTDDLERLAQWLTACGVTTVAMESTGIYWIPVFEILESYGLEVMLVNARHVKNVPGRKSDVIDCQWLQQLHTYGLLRGAFRPADQVCALRAYVRQRSTLVRSSASHIQRMQKALAQMNLQLHNVVSDITGVTGTRIIKAILAGERDTKALSSMRDPRCKNSEETIARSLQGNYRQEHLFSLRQSVELYEFYQAKISDCDQQVLEQLKIFDGTDNNDPGYKPPGSVGEALQRMSGVNLADINGIDTNTALKIIAEIGIDMSRWKTAKHFASWLGLCPGTKVSGGKVLNSATKQVANKAAAALRMAAFSLINSKSALGAYIRRQRSRLGASKAITATAHKLARLVYSMLKSGTAFIDAGQEDYEERYRTRVVKNLKRKAQEMGFDLVAIQGTAIIT

SEQ ID NO: 180035 - protein, 379 aa, unidentified
MPSDNIVYVSIELSVSSWLVAARLPNTEKLRLHRLEGGDTVGLLGVLAELRSRASAKLGSCANVACCFEAGRDGFWLHRLLTANGVAAYVLEPTSILVNRRARRAKTDRLDAEGMLRVLAAWLGGDRQVCSMVRVPSPEEEDAKRPHREREHLVQDKLRIENRIEALLFTQGIRGRPSLRSWERDIAELRTGDGRALPQLLRTELDRLRRRLILVLELIRELEADRAEALEEAEGANTEVSKIVALQRIRGIGENFAAVLVREVFYRSFGNRRQLASYVGITPMPYQSGGMDRDRNISRAGNPRARTTMIQLAWLWLRYQPDSALARWFRERVGTLQGRTRRIAIVAMARKLLVALWRYVETGVVPDGSVIRADTAVTA

SEQ ID NO: 180036 - protein, 410 aa, unidentified
MRYYLGVDWADQTHAVWVVDESGMKVTAGAVSHTAEGLGAWGRELDEWRAQGIELWAAIERPDGRVVDLLLDHGVVVYPVNPKALDRARDRFRQSGAKSDPFDARVLADFLRTDHAHLRALQPSSEAAQELKLLTEDCQRHIRQQTRLVNQLTATLKAYYPRALEVAELTSALAREFLPAYPTPEALTALTERQWQRWARAHRLTEARTGELWTVLRQPQLPVPAHVVRAKARLMRALVEQLMPVMAAVAQYRRAIDDFFASMPAAQWARTLPIGKHGITAPTLWARLGDAPGRWESFRHLQAHAGTVPVTKRSGKQQRVVHFRFACDKALRYVVDQVAFLSLLSSAWARAYYDQQRARGHSHRQALRALGAKWLKIIFVMWERHVPYDEQYHLATMTRQQLRPRQKQIA

SEQ ID NO: 180037 - protein, 335 aa, unidentified
MALYCGIDLHSNNHVIVINDENDKTVFSKRIANDISLCLKYLTPFKEQLVGVAVESTFNWYWLVDGLAEQGFKMLLVNTAAVKQYEGLKYSGDFKDAFHLAHLMRLGILPTGYIYPKEQRAVRDMLRRRMQLVQLASKQLLSIQNQIWRSSGIRVSSSQIKKKSFEVTLLRHHLKTAADTNLRIYRSIQSEIKLLEEEVEKAIEAPKQLALLQTMTGIGPILGLTILLETGTTTRFETVGDYASYCRCVQSLRESNNKKKGEGNAKSGNKYLSWAFSQAAHMAVRYEPKVKVFYDRKYQKKNGIVAIRAVAHKLARAAYYMMKNNEPFDVNKAFG

SEQ ID NO: 180038 - protein, 396 aa, unidentified
MYYVGIDISKNTFDYFIRTDDVDRIDSGKLKQNKEGYSFLLSSLKDIDPKDILIGFESTSTYHINLFNFLVSNGLFPSIINSYAVHNFAKHFNLRGAKTDKIDAKIIARFLLTFSPTPSKGNLDEIKLISREMVKVTKYITKLKNETKRLINLVFPELDSTNSDVRFDSRYKGWWIILKHYPSAKKISKASVEDLYNILPNRSKRSFTVEKLEKLILMAKDSVGSNKSSLEKLLVMYVNRLISSMDEKEELEQVVLDLMDEDNLTNIELLKTIPGIDSLSISIVSEIIDISRFHSAKSLVAFAGIDPVPKQSGDKDGYRRISKRGSKYLRRAIGMAANSARMNNDYFKYFYNKLVNSGKPHWVALMALANKLLRIIYSLLKNKTEYDPLYHYKLMS

SEQ ID NO: 180039 - protein, 433 aa, unidentified
MNSNHPFDLVIGLDRSDRKADLLRIDPRTGEQCRQTWATSPEALQEWLAQLRQQYPQARIALCLEQPAANLILFLETYSWITLYAINPITLQKFRETFVTSRAKDDARDAQYLAELLLTHHGKLKAWQPDDSQTRQLQQLVSHRRAVVDERTGLSNRLKALLKQYFPQALELCGEDLWRPLATAFLLQWPTLQALQKARKESIKQFYYLHGSRSQKLIAHRVELIEKAVPLTDEPAVLESHTLRVQLICRELQLLRQALEQFDQQIAEVFGQHPDREIFAALPGAGPVLAPRLLASMGSERERYGRAASLSCFSGIAPVTKQSGGKRHVHRRYRCPKFCKQSFHEYAKESILHSRWAAAYYGQQRAKGCSHHTAVRALAYKWQRIIWKCWQSRATYKEEVYEAALRRSGSPLVALLDQIQLGKSPVKTAAKKS

SEQ ID NO: 180040 - protein, 345 aa, unidentified
MQLHTIGIDLGKTVFHLVGLNQRGEVVVRKKFSRKQLLHFTANLQVELIGMEACGGSHFLGRALREQGHEVRLMPAQYVKPYVKTNKSDYIDAEAIAEAVERPKMRFVPIKSDDQPDLQSLHRVRERWVMRRTAVINQIRGLLLERGITLRQGRRHVDAALPGILEDACAKLSGAVRVLLMQLKLELDHLQIRIDEADAMINKAAAENDACRRLVAIPGIGPVTATAIIAAIGNGAAFKKGRGFSAWLGIVPGEYTTGGKQKLLGISKRGNSYLRRLLVQGARAVLQQRAKQSSGLSAWLAQLTTRTHSNVAAVALANKLARMAWAVLAKNETYRPPLLVGAVTP

SEQ ID NO: 180041 - protein, 387 aa, unidentified
MEKNRGRVVGLDVHPDSFAGAVVQGRDPASAVVLSTSMRVELGRLEQWALRHTSTEDTLVLEASGNAIAVAARLRAIGRKAQILDSHRAGKVGKAYCANDRVDAVKIARIYLSALSPIVWQPDEKTLERREIFSAYQGVVKESTRAKQQLRSMLNEHCVRLEKGFRLCHPKAITCLLKLREWTPARRMLLQQLHATLLAARARRTLLRRHMAQEIVAEETLMRLTRLCGINLITLYGVVAAVGDVRRFPHSKKLVAYLGLNPSVSQSGNFEGSGALKRHGRGALRALLIQSGKKLLEVNNPLQKWGLAVASRRGRNKAAVAVARKLCVALWHVLMGHVIGALERLDTLETKLSKFATEIGPAALRAFGYNNKADFVEKKLYVLRSYP

SEQ ID NO: 180042 - protein, 332 aa, unidentified
MRIRKLTESEPKVKLYQREGYNYYVAVDWSERTMAIAIMAADEALPRTWEGRSDVGRLQAMVEELSGRVILTLEETTAAHWLYSKLLPYVERLVVCNPGYNRLLCHGPKNDTIDATKLCLLLRQGSLKEVYHSTSKLYELRQLVSAYDDTVRAGVVAQNQLKACQRGRRMTGRSGSMITEQLTARIKHYRQEKRQFEEAFARWVRRVPVLRQLKRLPGIGLRGAVKILGYVIDARRFPNRGHYWSYCGLVWHHKMSGGRRYGRRRPQYNHHLKAVYKTAALAAIKGSNPVSDYYHKLVAAGRAEHNARHAVARYLARLSYGILKQGVQHNNS

SEQ ID NO: 180043 - protein, 467 aa, unidentified
MSKLGNPNRHEAEIRPFAGMSRIQPHAAGVDIGAHEIVACVPGSDDTQIVRTFGTYTADLHTLAVWLKEHHIETVAMESTGVYWIPLFETLEDRGMHCCLISANAISRFPGRKSDVLDGQWIQTLHSYGLLAASFRPEADLVALRTLLRHRAQIIEHRSPHILHMQKALLQMNIQLTQVLSDITGETGLCIIRAIVAGERDPHRLAALRNSRCQKSEAEIALALTGTWRKEHLFVLAQSLAFFDFYTAQLQVCDAEIQRTYSLIRPHGGIQQESADPPLPPAKRGSHSKNAPQDRQLRAHLKRICGVDLVAVHGISVSLAQTIVAETGTDMSKFPNEKHFCSWLGLAPHNDISGGKVLKSRTLKTRNRAGQALRLAAAAVVRADCATGAFYRRVKSRLGPAQAIVATAHMIARIVYRMLKDQVEYETIRAAEYEQHYREREIKYLQRKAAKLGLTLIVPPPIVQAVS

SEQ ID NO: 180044 - protein, 446 aa, unidentified
MEAKGQVHVDSMDEEIVARVAAIDVAKDSGMVCTRVPHSTHPGKRTTTVWSVSARTSAIIAVADRLAEEHVERVVLEATSDYWRPFYYLLEARGLLVWVVNARDVKNVPGRPKTDKLDAVWLAKLNERGMLRASFIPPVEIRQLRDYTRLRVDLTAERSRHIQRLEKLLEDALIKLSSVATNMMGVSGRAMIEALIAGERDPRILAELAKGRMRIKRTALIEALTGRFDEHHAELATVLLSQIDGLSAQIEHLEARIEELIADMPTAQAPPASPDPDDAGEPAYLAAVDRLDEITGVGRHAAQAIIAEVGLNMAIFPTAAHLVSWAKISPRANQSGAKTRSGKTGKGNPYLKSVLGEAAASAGRTNTFLGARYRRLARRIGKLKALVAVARSILVIVWHLLANPTSRYRDLGPEFFNNRIRPERRKINHIRQLEALGYTVTLTPAA

SEQ ID NO: 180045 - protein, 394 aa, unidentified
MICVGIDVASDKHDCAIVNSETGEVCEIFVFPNNRVGYDTLLSKLALYSKKKDFSDIEIGLESTGHYSNNIVNFLHEKRLSVKVFNPLTVQRLRKAQTLRRTKTDKSDAKFLACMLIGDDSKSYEKSLPQIEELKTLTRHRFRLVKEKTKHKLHISRLIAIVFPELASVFCTTSLVTVRELLFQFPSAKAIAAVDIRKLTNLLWVASKHRFGRDKAEELRNLAKTSVGTSNRGTDFELKHHLQSVSFLNQQIKEVDAQIRAVMIELDSPILSIPGISFALGAMILAEIGDIKNFRNPAKLLAYAGLDPSCHQSGKFTADRTPMVKHGSSYLRYAIMQAASCVKRYAPEFRAYHDTKIAQNKHYYVALSHVAKKLVRVMFSLLKYNESYVTQTSV

SEQ ID NO: 180046 - protein, 343 aa, unidentified
MWIIGCDYHPRFQQIAFVNTEGGECGNRRLEHTAEAEQFYRGLAGQRVRVGMEAGGHARWFERLLAELNLELWIGDPRKIRAAEPRKQKTDARDAAHLLELLLNGEFERKMRIWVPKPEERDVRQLVLHRHRLVGMRTRVKNQLRTVALNEGLLGSKPGLWSKQGQAQFRTLALPAWSERRRQDNLELLAELVRRTEPLDQAVLQEAQRRPEVVRLMTHPGVGPITALTYVLTIGDPLRFASSRKLTSYLGLIPAEDSSGGRQRLGHITKQGNALLRSLLVEAAHSAVRREPELGRCYRRLAMRKNRSIAAVAVARKLAVRLWWMWRRGQSYSQFRTSGSHAG

SEQ ID NO: 180047 - protein, 342 aa, unidentified
MTCYVGLDVSMKETAICVVDETGDRIWDGKSRTDPDAIAAVLARRAAGAVRIGIETGPMTVWLWHALTERELPVVCLHARHAAAALKLQMNKTDRNDAFGLARLVRSGWYRPVDVRSMDTHRLRALLITRDQLVGMSTALINKIRGLAKTFGILVGPGKGGTFERQVRATLPDDPVVAALFESLLAMLSTLREQQLAIAKQLARVARQSGACRLMMTMPGVGPLTAVSFMTTIEDPHRFRRSQDVGAYLGLTPRRYQSGEVDINGRISKCGDRLTRKLLFEAANVMLSRTSQASALKDWAAAIGRRSGFWKARVALARKLAVILHRMWIDGRGFDPKVTAMA

SEQ ID NO: 180048 - protein, 355 aa, unidentified
MNEIKYIGMDVHQTSTSIVVLNAAGRVLTSAVVQTQGQALVAFIQGQSGTLHLTFEEGTYSAWLYDLLWRHVSRRVVCDPRRNALLKSGSKNDPIDAHKLADLLRLNALRPVYHGQNSLGTLKELSRSYLTLVQDSTRVMNRLKALYRSRAIACAGTKVYSPSHRASWVDQLKEAGVHQRAELLYQHLDLLSLLRREARRALLAESRKHTVSRILRAVPGLGPVRVAVLLAMVQTPFRFRSKRLFWAYVGLGLVTRISAQFALVNGQLQRSAKAPALRGLNPNHQRELKEIFKSAATAAVQRPGPWQQFYRQRVDAGRKPELVRLTVARKLAAITLHLWKKGEPYDVHSLRSTTV

SEQ ID NO: 180049 - protein, 318 aa, unidentified
MICGVDVSLKSLEVRIGRDGLTASFPNTVEGIASLADFCQAHDVDLVAMEATGGYEKKSFLLLWARGIPVAILNPRSVRHFAEAMGLLEKTDGIDCGVIAWFAETKRCVGCPPASAQQQRLKALVNRLRQLTDLRAMQTNQRALVTDTVVLASFTKMFRVLNAQIRLLEVTIARLIDADPLWRQLDTAFRTIKGVADRTVARLMAELPEIGTLSNKAIAKLVGLAPLAHDSGNTQGKRPVRGGRRSIRDILYWVAGGVARHHPDFLAFRQRLAAAGKPKKVIRVALAHKLLVRLNAKAREVRSQFVSVPDAGGQKAMG

SEQ ID NO: 180050 - protein, 382 aa, unidentified
MNLSVNQTIKSIVSISPHSLSKVTKDQIEFQFKPNKGFSHRNHFNNYKYKSMEILDTVGIDMSKLTFDVRIHSTQAYAQFENSNEGFKQLLNWAYKNSSFSRENIFFIFEHTGLYSHKISVYLTEKKVAFALVPGLEIKRSLGLARGKDDKVDATNIAKYAYRLRDEIEPYEMPSEQVQALKRLLSLRDRLVRQRAGFKASLKEQKRVLLKKENQILFTSQEKMINYLTKQIRTIEEEMMGIINSNEQLIEQFKSMTGIKGVGKQTALFMIAYTHGFTKFKNWRKFASYCGIAPFPRLSGTSVRGKTKVSNLANKKIKSLLDLCAKSSIQHNLEMKTYYNKRVDEGKNKMSTINIIRNKLLSRIFAVVKRKTHYVDLMKYAA

SEQ ID NO: 180051 - protein, 404 aa, unidentified
MFYCGIDWSKDHHNLCIMNATGARVSQIQFKHTLKGFEQIEIERRKLNVPASECLVAIETTHNLLVDFLLEYAYEVYIVPPQATNAYRNRQRSSGAHTDESDAALLASIMCTDRDSHRRLSPNTPLTQQMLVQIRLIETLRRSIQRQENQLRDVLSRVYPQALGLFSELTAQISLQFLITYPTVQQAQALSLKTFKAFCREQHYSRPDLISRRYAHLIEPAPAANSAVVEAYRDHVSILAQLLLPQVSQRNKAKTRLCQLFKQHPDAFIFDSLPGAGDLLAPGLLVKFGDHRDRFPTPSSVQALAGTCPVTEWSGKRRIIKFRRGCDKEFRRISQQFARSSVRKSGWANAYWGEIRPRCASNSHAYRCLANRWLAIIWRLWQDRKPYDEEYHLQQRARRRRPKL

SEQ ID NO: 180052 - protein, 393 aa, unidentified
MVSDFRKGRYNLMKIYVGIDIAKLNHFAAAISSDGEIILEPFKFTNDADGFQLLVSKLESFDKNSIIIGLESTAHYGDNLVRYLVAEFYQVCVLNPIKTCQMRKNNVRKTKTDKVDTFVIAKTLMMQDDLRFITFFDLDMMDLKALGRFRQKTIKQRTRLKIQLTTYVDQVFPEIQYFFKSGLHQNAVYALLKEAPSPKEIASMHMTHLANLLKVNSHGHFTKEQAKELRVLAQKSVGANDSAISIQITQTIQQIELLDSQLEKIEAEMTDIMKFNDSVIMTIPGIGYINGGMILGEIGDIHRFSNPNKLLAFAGLDPSVYQSGNFQAKTTRMSKRGSRVLRYALVNAAWNVVRNNATFKAYYDAKRAEGRSHYNAPWSLCRQACQSHLEDAH

SEQ ID NO: 180053 - protein, 291 aa, unidentified
MEKKIAYVGIDYHLNSLSIAVMVEGEKDLYQTIRIRNEDKVILKYMKKLAKDFEIMACYEASCNGYSFQRKMLQWGYHCDVIAPSLVPKKKGDRRKNDFRDARNLAQSYAHGMLTVVHPPTEYEESVRSLIRCRLAFKEDEKRVKLRINSLLLSQGLDWPKKKWTHQHRMWLAKLRFDNPQLQQVLDEYLEHLQYLQIRIKNLDSQIEQIAHSDIYASSVKRLRAFKGIGTLAAMILIAEITDFRRFPNPRALMAFLGLIPSEDSSGDRQKGGSITKAGNRPACCRQALQD

SEQ ID NO: 180054 - protein, 453 aa, unidentified
MCLEDRPVLEPNAAGIDVGAREMFVAVPPGRDENPVRVFATFTEDLERLTDWLEQCGVTTVALESTGVYWIPLFETLEQRGIRPCLVNARYMKNVPGRRTDWHECQWLQFLHSVGLLRAAFRPGQDVCAVRTLLRHRNELVAAASQHVQHMHKALTQMNLQIHHVISDITGSTGRAIVDAILAGQRDGAELAKLRDPRIKADTETIRKSLEGNWRPEHLFTLGQSRDLYRIYQQQIVNCDLEIEKMLQEFTPRIDPGERPLPPDRKRNRAGSKRRRKNGHPHPEFDLRTEAYKLFGVDVSQIPGLEENALPLFSEVGRDMSRWPSAAHFVSWLALCPDNDISGGKLLWRGARRVKNRAGHLFRMAAYALHRSLTPLGNYLRRMKAKLGPQAATMATAHKIAVIFYTMIKNQVEYDETIWDARDAQREKKLQAKLKRQAKQLGYELVPIEPQAA

SEQ ID NO: 180055 - protein, 365 aa, unidentified
MDAIYIGVDFHARQQTICYLKTEDGEIITRELKHADKAEVRAFYAQFSGRVIVGLEASGYSPWFEAMLEQLGHEVWLGHATEIRRRARWRQKNDRRDAELILDLMLHDEFPRLHRPTLESREVLRMLRYRHKLVKMRTMGKNSVQALALQCGLAKGKQLFTQAGKQTLLAAVRSPVMQWQSEHWFQLLEALDQQLLETMHWCTAQSKSDTRVARLRTHPGIGLLTGLCLVHTLQPIGRFPNSRKVAAYVGFDPIERSSAERTRFLGISKAGSRLLRYLLVEAGHTAVRKDEDLKRFYQRVSERRGRPKAKVAAARKLLIRAYIMLRDEIDYAEFRRRAVAARLARRSQRPNVPEVLIGQPASPGR

SEQ ID NO: 180056 - protein, 369 aa, unidentified
MKSIAYVGMDVHKMSISIAVLPVNGADYLYEVKFANTEANVEKHLKKLSAKYDLRCCYEAGGCGYVIRRQLVKIGVACEIIAPSKIPITPGKTVKTDKLDARKLARYYRAGELTTIHIPTEAEESDRALVRLRETFSIDIRRDKQHILKYLTIRGFIYPGKSHWTLRHWEWMRGLQLAKEDQFILDSYIAHLQVNETMLQNIEERIHALAASPRYKQSVGKLCCFRGIDVLTAMCLLVEVIDFKRFGSSRKLSSYLGLVPSERSSGESHHRGGITKAGNSRCRRVLIDAAWNNIRRPNISAALKRRQEGQSALVIAHAYKAQVRLYKRFGQLTYRISRQKAVVAITRELCGFIWAVMNDKYESNRAVTA

SEQ ID NO: 180057 - protein, 315 aa, unidentified
MEEDTLGNDRASLARLTARYRGVLAVMEAGAHSPWISRYLERLGWEVIVSNPRKVRAIYQHERKSDRRDALMLARIGRMDGALLYPVRHGSEEAQQDLLRIKLRDSLVRARVALINSVRFSLKSLGYAVSNPSSERFHKVAMETLPEVVREMIAPSVQALAELQWAHCRARARDQPPGPDQYPQTLWLQQVPGVGAITALYFVLKIEDPKRFKKVRDVGAYTGLCPRRDQSGASDPQLRISKRGDAYLRRLLVSAAQYILGPFGPQSALREYGLRLAADGTTRAKKRAVVAVARKLCVLLLSLWKNQTPYQPYPA

SEQ ID NO: 180058 - protein, 360 aa, unidentified
MSNVTHVGLDVHRDSTAVAVLRPGVSEPDEWVIPSTAEAYRKLMRRFDAGTVVCYEAGPCGYAPFRLFTSLGVRCEVIAPSLIPRRPGDRVKTDRLDARRLARLHRSGELVAIRVPTPEQEAARDLVRVREDLKEDRRRTIQRIKAFVLRHGYRFPNPKGFSGRHESFARGLRFDQPHAQEAFDQLLGAYDTRTTQLRSLDQQLTELATQPPLAELVVRLKTLKGIDTLSAVIIAAEVCDLRQFRDARAFMAYCGLVPSEHSSGERTRRGSITKTGNAHLRRVLVEAAWAYRHRPHIGAPLARRQQGQPPELVAYSWKAQTRLNQRYRRISKVKNRNVAVVAVARELAGFVWGIGTNHLD

SEQ ID NO: 180059 - protein, 339 aa, unidentified
MQQIIGLDVHKSFIYACVMEEDGKIVFERKFNNNPDAFDKFLLNVSKEDKIVLESCSYWQYVYDYLEDAGYNNLTLANPVQVRLIATSRKKTDRHDAKILADLLRTNMLPTSYAPPRCVREQRQITRHKASLTTLRSEVINKIHAILFRHGMINANAISSQKGISWLYSLDLPYPDRYELDNYIKMVEHITKLIKDTKERIDETADTDPRARLLTTMYGIDNYSALTIVGEIGDIRRFSSSEKLISYAGLNPSVHQSGNTLRTGHISKQGNKNLRWILVQCSHVAVQGDTTLGRFYNRIKKRRGHNIAIVATARKMLKYAYAMLINNIPYHALQVHKAT

SEQ ID NO: 180060 - protein, 347 aa, unidentified
MRKIIVGIDISKEKLNVCLLEEMNIVHEDEIENTVASLRKWFSRMRKSLKFRMDEVLLCAEFTGRYIYPLAVVCHEEEAFLWMEDPSRIKNSFGLVRGKSDSVDARRIAEYAFRHQDKAVAYHMPPKELASIKILMTDRELVLSDRKKYEAQLTDQKRFMDKEDYAMQSKMWKSIVKELQKQLDFIDEKIDKLVSDSESLSHQVELLKSVDGIGQRIAVAMVVVTDAFTRFDNARQFNCYAGLAPFTYTSGKSIYSKAKVSQRANKQIKALLHMAAVCAATHMKSGDYKEYYDRRIAEGKHPLCVLNVIRAKLVGRMFAVIKRDELYIKNYDRSSSEKKLSTPVQIS

SEQ ID NO: 180061 - protein, 344 aa, unidentified
MKNSNVFGIDLAKHVIQICKIDKHGELISNKAISPNKLKELLGKSSPSIVAMEGCGSSHYWARLAQKYGHDVRMISPKKVKAFLQGHKTDANDALAIAIASVQTGIRFSQIKKEDQQWLQTLETSRKFLDKERTALGNHIRAYLYEYGIIMNRGYKSLREAMFLVLDDNDKRLPDCLKNTLRLLWDRYQLTIEQFKEAVNYKSELVKRLEPCQRLIKLEGVGVVCASLLYASIGNGREFKNGRQASAYIGLTPKQHSSGGKTYLKGIDKQGGDKALRSALYQGTLSYISKLPIEPRTQKEVWLGNLVKRVGVKRACIALANKTTRTAWALLNTGSCYKSTVLTN

SEQ ID NO: 180062 - protein, 409 aa, unidentified
MEQLIERVGGLDVHKPTVAACVRMPGVKGTREQHVRTFGTTAAELLALRDWLEALGVTQVAMEITGVYRKPIYYVREERVTCLLVNPAPMKQVPGRKTNVQDCAWIAQLLEHGLLRGSFVPPAPIRELRDLTRYRKVLIQDRTREATRLHKFLEDAGIKLASVATDVLGASGRAMLEALVHGTTDPDVLAELARGKLRAKLPALRQALAGRFRPHHAFLVSQLLAHVDYLDETIATVSERIEVTMAPFAEELARLDTIHGVARRTAEVLIAELGVDMRQFPSERHVASWVGLCPGNNDSAGKHKSGKTRRGNRWLRAALTEAALAAIRTSNSAFAARYRRVMRHRGHNKAVTAVAHAMLVTAYHLLARQTTYQELGADYFDPRHAERLTRRAVQALERQGYRVTLARAA

SEQ ID NO: 180063 - protein, 418 aa, unidentified
MNTTKGTSSQEETTIKYVCGIDIGSQSCAGCITRPYKSVVVKPITFANAREGWQVWEEKLSQLDAPPNQILIGMEATSRYGENLYHELQERGYVLRLLHPRQTHQFHERQGLRAKTDRLDAMTIAKVLLSGEARAGYVPSERVTVYRELVRLHMQLSDEAAAYQNEIHALVIVLFPEFTQVFADPCLPGALRVLKAYPSAQDIVAAGVEAIVQVLRTPAQPPTRYGRPSAQTLVELARRTASSGRAVSGRSVSLRILCDQLEHTRANLAHLEAEIERLLTDDPQVKGLQQIPEFGSKTVAVLRAELGDVQRFARTDEVIAYGGMDVEIKESGQWKGRAKLSKRGSGLLRRMLYLAALRSIRLESSAFGAYDHRLVERGLKKGSALMAVMRKMLAVAAHLLKTGEEYDPQKVSVGATPR

SEQ ID NO: 180064 - protein, 316 aa, unidentified
METSKPFVGIDVSSQRLDVDTVPVSQPFSEPNNEHGIASLTAHLKTLNPQIVLLEATGGYEIPVAYALYEAGLPVVITDPKAVRFFAKAIGRLAKTDKLDAQVLALYAQKVHPPVQPLRDQDQLELANLMTRRRQLQGMIVMEENRRRTCTPKVRGNIDLSLAHLRQLLKDLDREIHDSIRRTPLWHEKADILQSFTGVGPKVSASLIADLPELGTLPGPKASALAGLAPMNRDSGKHRGKRMIQGGRPAVRRALYMAALVASRHNPVIRECYQRLRLAGKPAKVALTACMRKLLVILNAMLKNRTYWNPQLPLAA

SEQ ID NO: 180065 - protein, 383 aa, unidentified
MKKNTTVKNSLKALAKSGKKRIGQAEEKQRLTVGLDLGDRTSRYCILDEAGEIVSEDQVPTTKTGLSGLLARMPPSRVALEVGTHSPWVSRHVAVLGHEVIVANSHKVKLITQSVRKNDQIDARQLARLARVDPQLLSPIRHRGEEAQADLAVIRARAELVEARTGLINCARGLAKPMGERLRKCDADQVTEALGKGCSAAVQMVIGPLLKSVEQLSEQIGVYEDRIEEIAKRYPETELLMQVYGVGTLIALTYVLTLEDAERFVHSRDAGAFVGLQPKQRDSGQSQPQLGISKTGDRLLRSLLVQGAHCILRKGAPDSDLRAWGLAKMGSGGKKAKRRAIVAVARKLAVLLHRLWATGEVYDPLYNRKAAQAAANGRRQAAA

SEQ ID NO: 180066 - protein, 355 aa, unidentified
MIGEKYIGLDVHQATISVAVMDSKGKVVMESILETQAATILEFFAGLRGTLWVTFEEGTWAAWLYDLLKPHVAKLVVCNPRKNALLKHGNKSDKIDARKLADLLRLNDLEPVYHGETGVRMLRELARSYLTIVKDLSRVMNRLKALYRSWAIPCAGRDVYYTRHRSEWLGKIPEAGTRRRAEQLYQQLDMLQHLRQQARRELLAESRKHTITAKLRQIPSLGPIRSALAVALIQTPHRFRTKRQLWTYSGLGLETRDSGEYHYVQGQLRRRKKQGSIRGLNKDHNHDLKGLFKAAATRASVQPGPFQDFYQRSLAKGIKPTMARLTLARKIAAITLTLWKKGENFDVAKLKSQAA

SEQ ID NO: 180067 - protein, 338 aa, unidentified
MKVYVGMDLHATNTYVGIVDEENEVLHKQRFRNELPLILSGLDPFRKDIQGVVVESTFNWYWLVDGLMAEGYRVHLANVSAIKQYEGLKQIDDKRSAFWLANLLRLGILPTGYIYPKEERPTRDLLRKRLHLVRHRTSHILSVKNILARNLGLRMKSEDVKKLEDPEVKRFFPDKEMQTAVLASVGLIRHLEVEISEIERMITKKLKIRKEFAKLMTVPGIGKILTLTIMLEVGNIRRFPTVGDYSSYCRCVKSTRTSAGKIIGYGNRKNGNKYLSWAYIEAAQAARRFHETVRSYYEKKMAKTNRIVAIKALSHKLTRASYYVMRDQVDYDPARLFR

SEQ ID NO: 180068 - protein, 373 aa, unidentified
MKYFVGLDVGLEETNVCVIDSEGLTVREVKVSTEPAAIRSAVEGYADRLDRVGVEASSLGIWLYRELQPAGVPIIVVEARHMRVSLSTMRNKTDRNDARGIAQMMRLGWYRAVRVKNIDVPKMRSLLANRKLLKRKLIDIENHIRGTLRACGLLIGAVGRGGHEARVRELLEHGDPIFSVMIEAMLDVRRSIFEGYERLHRVLLQVVQHDAVCCRLMTVPGVGPVAALSFKVGVDDPRRFAQSRTVGAHFGLTPRRHQSGTSIDYEGRISKQGDVAVREALCEAAASLLLRVRKRSALRAWGLRIAKRSSMLCAITAVARKLASILHWMWVSETDFHVGFGAATAMEACTVIAAGSRRMSAGVASSMLRRSKD

SEQ ID NO: 180069 - protein, 350 aa, unidentified
MNHVAIDLGGRESQICVRSGDEKILQEERRPTLGLQKYLAKLEPAKVVVETCAEAFMVADWARSAGHHVTVVPASLVRALGVGSRGLKNDVRDARNLSEASCRMQQLPSVHIPCTASRELKSLCTLRDSLVTSRTKLINSARGWLRGQATGRVKRGSADSFTQRLRALWREKAGGDLPPALQRQALSIDVLSEQMLAAEQELQDFANADATCRRLMTVPGVGPLVAVRFFCSVDDVSRFSSAHALQSYIGLTPGEDSSSDKKRPTGITKAGAPRVRWLLQQAAWVAWRFHKNDPIVQWAEGVAQRRGRKIAATALARKLAGIMFAIWRDGTDYRRTPATHDTTEAATAAA

SEQ ID NO: 180070 - protein, 400 aa, unidentified
MRVVFGIDVSKVSSEVAILVNGEKVHNYTMSNDAIGFSRLLGDLRTVHKPEIIFEATGVYSRRLQTFLEDNGYAYTRLNPLEAKKQLDSLRVRKTDQIDAEKLAQSQFVLNRKPTYVQEEVYQNLRDLSRFYQNLTEDIVRAKNRLHKALQVTFPELENILSTPSGEQYWNLVIAFPCKDFVLDLSKDELSESIRQSTSKRISDKRVAYLAEKLIALANQSYCAVKKTSPMLEEVRYYAKELFRLSEQRQTILDEMVELAQPLPEYDILLSIPGIAETTATSIIGELGDIRRFQSANQINAFIGIDLKHYESGNFLAKEHITKHGNPYARKILFKCIHNIASASHTNPCHIADFYEKRKKQSQTTSTKPHTIASIHRLIRTMYYLIMHNKLYDYASTQNR

SEQ ID NO: 180071 - protein, 342 aa, unidentified
MSKQVVRGGDVAGLLERFARLREKARARTGKVFPFVVIQEAGLDGFWIDRALQNEGIESHVVDPASIATSRRRRRAKTDGIDGEALVRALLAYKRGEPRVCAMVKAPTPEEEDRRRLCRERKVLIVERVRHVNRVKGLLFSQGISGYEPLRRDRRRRLDTLQTGDGRRLPDHLKAQVCRELDRLELLLEQIKAVEAERDVLLAAQRVAAPAAMLLDIKGIGPEFAAILWSEGLFRHFDNRRQVASYAGLAPTPWQSGSINREQGVSKAGNPRLRTTLIQLAWLWLRHQPQSALALWFEERVKRNGGRLKKTTIVALARKLLVALWKYVTAGVVIEGAVMKRA

SEQ ID NO: 180072 - protein, 353 aa, unidentified
MAIVAQTHPFVIGVDAHAKTHTLAILAAPLGELVDTAQFPTTHAGLQRAIDWAGRRTGADLDVLWVIEGIGSYGARLAQTVAQTGYQVAEAPRMNARTNRGVGKSDPLDARRIAAAALPLEITHLRNPRDDDGERAALRVLVTAREHMTTERTGTINALTALLRTVNLGIDARRPLTSTQVTEITRWRARAETVAAATARAEAIRLAKRVTALNDELAENRLRMEALVHATPAATLLDEPGIGVVTAAITMTAWSHVGRLRSEAAFASLAGVNPIPASSGNTARHRLNRGGDRRLNRALHMAVVTRMRCDPATRAYVERRRTEGRTNKEIRRCLKRYLARRIYRQLNRAVTPT

SEQ ID NO: 180073 - protein, 344 aa, unidentified
MYHYAGIDVSLESSTICVVDGAGKILRETKVASEPEALIAWFRSSGPALERIGLEAGPLSQWLYAALREAGFAVELLETRHVRDAFKSMPVKSDRNDARGIAQLMRLGWFRPVHCKSIEAQETRAVLTARKLLQSKLRDIENSLRGVLRGFGLKVGKTTECTFAERIRELVAGHPRLELVAKALLEAHAVLRREFNGLDKHTQKLARAHPPARLLMTTPSVGPIVALTYASAIDDPNRFRSSKATGAHFGLTPKKHQSGQTDYTGRISKIGDASVREALYQAAHVMLTKPVKGCSALKGWAMRISKRAGMRKAKVALARKLAVILHRMLADAKPFNPTAKAATT

SEQ ID NO: 180074 - protein, 344 aa, unidentified
MENMYYIGLDVHKKTISYCVKDGSGRIYAEAEIPATRLDLDMWMKTLPQPWTAAMEATIFTAWIYDHLKPHAAAVKVAHPLMLRAIAAAKKKNDRIDAHKIADCLRCNFLPECNMASTEIRERRRTLRYRNLLVRQAVQMKNKIAVLLMEAGVRNKQKLHKVGYFRELLATNQDINEGLKPLLRLCRETVVRLGKTESALVRSLQRDSLLMERVERLMTIPAVGPITALTWALEVGDVQRFSSIKKAISYCGLCGAENSSATIIKRTPLSKQRNKHLQTVLIEAAKMAPRNSVDLAMIYDREKQKDNANRATLAVARKLVAYLVAVDRRQKDFLVVKSENRTAA

SEQ ID NO: 180075 - protein, 347 aa, unidentified
MRYVGVDIGKWKCRAAVMNPEGVLIDEFAFNNDHQGIEDLASRLTTEDRVVMESTGSVWETLYNHLDERHIPVVLANPLKTKAIASARIKTDKVDARILAHLLRGDLVAECYVPPRELREIRALVRHRAGLVRMRSTVKNRVHAIVDQHGLRCGYSDLFGKRSLEWLRSLDLGALDRLMLDNHLQHVESLNGQIRRVDEMIRSRASLDEDVRLLLSLTGVDVYTALLIRSEIGSISRFPDYKRLVSWAGLAPSLHQSGTVEYSGGITRQGSRMLRWAMVESARTAVRHDERMRVFYERVKRRRGDGKAVVAVACKMLKVIWFMLSRREVYQSRNEGRYGVKLKSLVR

SEQ ID NO: 180076 - protein, 322 aa, unidentified
MIVEERVATSPEAMKKTFGKMPRSRIALETGTHSPWVSRLLSDLGHEAIVAHARNVRLIGQSRRKDDRLDAQALARLARIDPQLLSPIQHRSAQAQADLSVIRSRYALVRTRTALICSARGLTKSFGERIHSRYVRGFKPAMGETLSPQLQVALAPMLSALEAITARIREYDAQIEKLAEESYPDVALLKQVKGVGTLTYILTLEDPRRFRKSRDAGCYIGLQPGRRNSGQSEPQLHITREGDSYLRMVLVQGAQHILGPFGEDSDLRRWGLKLAERGGKRGKRRAIIAVARKLAVLLHHLWISCEAYEPLHNVQKRRLAAA

SEQ ID NO: 180077 - protein, 287 aa, unidentified
MTYYAALDVGLRSVALCIIDETGAVRLERSLPSEVKDIVDCLGGFGEEIACVGLEAGSLTQWLTYGLRAAGFKPVVLEARHVQAALAAMRNKTDRNDARGIAQILRAGWYRPVHVKSIESHYTRTLLAARKALLRKCIDLENEVRGLLKVFGIKLMVGLRHGAFDQAVREPIQANAGLRHALVPLLDVRLELYKAFLEMDRRVKALAQSDQICRLLMTAPGVGYIAALTFKSAVDDPSRFRRSKTVAAHFGLTPRRYQSGERDNPAASRRPATPRFARPSMRRPISS

SEQ ID NO: 180078 - protein, 347 aa, unidentified
MLYAGLDLSRQRLDVHLLDEDGRTVEVTAVRPDADALRTLVARTGRYGQPVSAAIESMNGARFVHDVLELAGWEVEIADALKVKGLAPLAAKTDRIDAWVLAELGRRELVPAIWLPDPANRAERERARFRLHLVRHRTALKNRIHATLIAFGHPVPVSDLFGVSGRELLAGLAIPEPWGTTLATSLRFVDELDAEIDACERELRAMGADHPYVELLRTVPGIAWVLGYTIAAEIGDIGRFSSAKKLTGYTGLCPIVRQSGGRDDRGPLAKNGPKYLRWALIEAATHAARHPMYKDRYERNKKRLGRQRGSKVARVDIARELATAIWHMLSKNEPFAPGRSPATPLVA

SEQ ID NO: 180079 - protein, 309 aa, unidentified
MNKAVVYIGVDVAKASLDVAWAERSRRFANNKSGLSALTKWVKQSPFAVHLICEASGGYERGLLDAAEQNAIKVSLVQANRVRQYARAAGILAKTDKVDARVLCAFGSAMQPEPTPPLSGQQKRLRELETQRQHLTRMMVAEQNRLAQLNDKELQRLTRSLLATLKKQMAAIDMRMGGLIAEDQTLKQKAQKLTAIAGVGTRTAMLLLARMPELGTLNRAQAAALAGLAPFNRDSGTLRGKRTIFGGRRALRCGLYMAALVAARHNLILRNFYQRLRSNGKPHKVALTAVMRKLLLALNHTLKPAASFA

SEQ ID NO: 180080 - protein, 347 aa, unidentified
MEVYVGMDVHRKRSQVAVLDARGTQLLNRNLPNDPAELVTVLGGLTSGTPVAFEAAYGWGWLVELLEDLGLEPHLVHPTRCKAIASAKLKNDKVDARTLAHLLRADLLPEAWIAPQHIRDQRALLRHRVALVQLATMARNRVHAVLADRGLRLEQRLWSANGRAWLAALDLPPVQRALVEDWLALIDALDPMVARLERDLRVRAKPDPRVSALMALPGIGPITAMTLVAEIGDISRFPTARKLCAWAGLIPAVRNSDRTVRHGHITKQGSSAVRWVLCEAAQRAKTQPPFARFYAQCARRRGRHIATVAVARKLLARCFHILKEVDATAISIGEGHSAGRARESACA

SEQ ID NO: 180081 - protein, 342 aa, unidentified
MSVIIGVDPHKATHTAVAIDRSEAELARARVRATRKQVPQLLRWAEPLGERTWAVESAGGLGYLLSQRLVAAGETVLDVPSTLAARIRVLGSGRSDKNDPNDALSVAVAALRTPALREVVPADHSEVLRLLAKRNIDIGNHRTRVVCRLHNLLMELAPGGIAKELNASDAVALLDLLAPATPAEAARRDQAVELLTDVQRLDEQLKASHRRIRTAVAASETTLTELFGVGPIIACYLIGFTGDISRFPNRDGYAAYNGTAPLERSSGGRVVHRVSQRGNRRLNHALHLAAICQIRQPSSEGRVYFERKLAEGKTKKDAVRSLKRHISNAVYRQLLIDAGAKK

SEQ ID NO: 180082 - protein, 387 aa, unidentified
MFYIGIDIAKNTHWASIMSSDGEIICEPFSFPNNNSGFQIFISKLESLDKEKILIGLESTAHYGENIISYLFKLDYKIGLINPIQTANLRKSNIRKTKNDKVDTYIIIKALTLGNYTLITSRDINNLKLKGLCRSRRNLVTMRSKAKIQLVSYLDQIFPELVQFFKGNPHLNVSYQLLKEYSSPKQISSLHLTKLSNILHDNSRGKYGKQDAIRLREIAKSSVGINNPSLSLQIKHAILQIELYNEQIAEVEALYKEILDEIKSPILTIPGMSYNQVAVIIGCIGDINRFTHSCQLLAYAGLDPSVIQSGNFQAKSTRMSKRGSGMLRYSLVYSAHNVVLNNKTFKEYYDLKRSQGKSHYCALGHVAHKLVRIIFKILKDNVAFNLD

SEQ ID NO: 180083 - protein, 464 aa, unidentified
MSRKAQNQQERRSARPKVDWKALEVVHPDAAGIDIGGSEHWVAISPDRDEQPVRCFDCFTADLEQMADWLKARGVRSVAMQSTGVYWIPVFEILQQRGMEVYLVNARHTKNLPGRKSDIAECQWLLKLHTFGLLQNSFQPSDEIRAVRTLWRYRSGLVAQASSTIQRMQKALIEMNIQLTNVLSDLSGVSGMAIVQAVLDGKRNPEELASLADPQVKASKEVIAKSLRGNWRPELLFVLGQEMDSYRTYRKRIADCDREVQQQLQRMESKVDLSTQPIGPRPKGKRARGNAPQVFDLRSELYRLTGVDWSQVDGIDVQVAQTVIAEVGADLKAFPSEKHFANWLGLCPTNETSGGRVLKRRTPKVVNRAKAAFRQAASTLIRSNSYLGAQYRRLRTRLGAPKAITAMARKLSCLFYRLLTKGQKYVDRGAQYYESRYREQQIRSLIKRAQRLGLQVLSPEVKPA

SEQ ID NO: 180084 - protein, 357 aa, unidentified
MESQEVKYVGVDCGKKSIEVVRINSENSLERRQFSTTESGINNLLQWLTLNDIVGLEAGSQSFRIAKSILNKGVQVIVLNPGNLATIYQSLKKTDKEDSLKIARLIQRHPIEELPTVPIPNDEEEDNRRLCSEHENWTKQLTQGKNRLHSLFTQAGLTQITKKHLRTKVSREASVTLLSDRYKKEAERILKVLDLVELNLKLIEKEIQEALKKNKAYVQTIMSMPGIGMITSLAIMSYMGDCKRFSSAKQAAYYAGLVPRVDISGDTVRYGRIINRGCHSIRRVIVQAAWSLVRCQHGGKVKEFYQRLYLKKGAKKSIIATSRKMIEVLYVMIRTGKLFDSMPENILNRKLAQYGLM

SEQ ID NO: 180085 - protein, 365 aa, unidentified
MKKIAHLGIDYHLSFLMIGMMVEGNKEPDEMIRLRNDDKAIRKYMSKLSEKYEIRACYEASTNGYAFQRKMASWGYHCDVIAPSLIPKKPSDRRKNDFRDARDLVQNYAAGRLSIVHLPSEQEESVRSLVRCRYAFKEAAKRVKHQINSFLLGQGQCWKRAKWTQQHRQWLLKLEMPYAYLQEVLSEHLAHLEYLETRLDHLDEEIGKLAESDLYAPSVKKLRALKGIQTWAAMVLIAEITDFRRFSNPRALMAFLGLIPSEDTSGDKRKGGPITKAGNSRCRTILIEAAQHYANSPRISARMKEDLSQVDGPTNVIALKCVARLHKRFWALSRKGKLRPVAITAIARELVGFIWAIMQPQPAIA

SEQ ID NO: 180086 - protein, 454 aa, unidentified
MARPSVKAVRRSAVLEPDAAGIDIGAQEIYVAVPPDRDQQATRVFTSFTCDLQALADWLHMCRIRTVAMESTGVYWIPLYQILEQRGFEVCLVNAHSLKSVPGRKSDVSDCQWIQYLHSVGLLSASFRPPDAICAVRSLWRHRSSLLQMAAEHTLHMQKALSQMNLQIHHVLSDITGFSGQAILDAVLAGERDPMRLAKLCHILVKTPHETVAKALVGDYRPEHLFTLKQSLEGYRFYKRLIADLDEEIARLMQALPSANEKETKLPPRTKHGVYQRNSNDPRFDLRGELYRIAGVDLTDVPGVSAITAQVILTEIGPDVSRFRNASAFASWLGLCPDKRVSGGKVLSSKTRKIKSRTAIALRIGANSLCRAKGYFGEFFRRMRGRLGTAQAITATAHKIARILYHVLRTKEPYSESVFHQCDEQAQLRAEVRLRKHAARLGFQLLPVPARSGV

SEQ ID NO: 180087 - protein, 398 aa, unidentified
MITTDIDIFLGLDVGKTDHWACAVTKDGTKIWNKTLPNDEAKLVSVYQNLSAKGTVLVVVDQPATIGALAVAVAQNLGIPVAYLPGLSMRRIADMYPGTAKTDEKDAFIIADAARTMPHTLRSIQVSDEDEATLGMLTGFDLDLARQITQTSNRIRGLFTQIHPPLERILGPWLEHDAVLEVLAAWPTPAALRHAGKARIDAKLKKYGARRHTAWASTVIDALDEQSVIVVGTDAAGLVIPHLARQMISLHAQRADVAAHLETMVEAHPLYPVLTSMPGVAVRTAAIIIAEISGKTFTSAAALSSYAGLAPTTRQSGTSIKSERVSHSGNKRLKRALFLSAFASIRFDPASREYYDRKRAQGKRHNQALIALAHRRLTVLFAMIRDGSLYDVPELKIA

SEQ ID NO: 180088 - protein, 428 aa, unidentified
MNNNPDPATSASSPSFVAWLGWDWGDKEHAFCLALAESSKLEKGKIIHSAESLHGWLKQLEERLGGRPVAVALESNRGALLHVFAQYAWLSIYPVNPATSARYRKAFMVSGAKDDQPDADLLLELLRLHADRLTLWEREDEQTRQLDALTRARRDAVDRRTQCLNQLTAVLKSYYPQALELIGENLSAGVALDLLRRWPDLIALKAARPATVRAFYYKHNVRRPEAVEHRLARIAQAVALTTDAVVVSTATREMKLLIEQIKTFNKHIAEFEKEIDRDFKQHPEAGLFRELPGAGPALAPRLLAAFGTDRSRYPEPGSMQKYMGVAPVREKSGRQLWTHWRWQSPKFLRQTFVEWAGQTVVWCDWAKYYYERMKARGKKHHVILRALAFKWIRILWKCWQSRVPYREATYLESLKKRQSPNLPVAAAT

SEQ ID NO: 180089 - protein, 332 aa, unidentified
MNMHPQGGVANRNQRPNAGIDVCKQHLDVCLGTLEQRVANEASGWNELIAKCKAAEVDLVVLEATGGYERGLVCALQDAGITVARVNPRQARDFAKSMGVLAKTDQVDARTLRDFADVLARHKDRAKYITPMIEGHRRQLAELMTRRRQLVDMRVAENNHLEHAGKRSVRSITSVLKTLDKQLAAIDREIDDHIDRHFTDQRTLLDSVKGVGPVTILTLTAALPELGRLGRRQISKLVGVAPLADDSGPRKGKRRIWGGRADVRAVVYMSAVVAMKHNPVIRDFHSRLIAAGKPKKVAIVACMRKLLTILNAMLRDQKLWDAAKHIHSPIAA

SEQ ID NO: 180090 - protein, 343 aa, unidentified
MEESQGLVVGVDTHKESHSAALVDELGAVLGSTDVEANQRGYVQLLQWARGRSSHRTWVVEGTGSYGAGLASFLVRCGEVVYEGDRPQRRKRGAGGKSDQLDAIKVAREALAREHHAIPRRRGNREAIRVLLSTREGAVSASRQALNQLYALVVTAPEPIHERLVRLKGEQLVAACVRLRCTSAVIETSVTTRALRQVARRIRTLQAEAADYEAQLERLVAQTVPALLAEPGVGTITAAQLLVSWSHAGRIRNENAFAAMAGVAPVPASSVRVVRHRLNRQGDRRLNRALHVVAICRSSFHAKTKDYIARRTAEGKSSREIRRCLKRYLARRFFRLLQGLDNT

SEQ ID NO: 180091 - protein, 508 aa, unidentified
MAINNKRKQRKHIRSGGSYSSEELSSLTMNDGTTVVYSVNGDIKRPICGSIDVHKKILMAAVCKTDPETLKATFYVRKFTTMNSDIRTMAIWMKEHGVEDVCMESTGKYWIPVFNILEQNGLRPILTHPKYVKQAKGQKTDFRDAIHMASMFRMDLVVASFIPPADIRDLRELCRYRLKLTYMRTSEKNRFQNSMTISKVRLDSVFSDPFGKSASAIMGYLISTDPEQVSDDEILALICHCRNVKASDEEILESIHGYEFIGVQRDKLKIIGMHIAQIEECIAMIDHKLEYYRQKYDGIIRHLTTMIGITPMSALYILGEIGTDMSVWRDDASLASWAGLSPANNASAGKKRSTKIGNGGHYLKPLLVQCALAAVKSTKTEPYFHNKYETLKKRRGHKKAIIAIARKMLVAIYHMIKKEEDFHPIDQEEIIQNSRKTKGMNLTNVIAFLKEQGADENTIRLVEEQCSANAVEESAKEKQPTSGSADASQPIQGSVKGSFGSTSNRVMP

SEQ ID NO: 180092 - protein, 417 aa, unidentified
MNSPPETIPIQRYIGIDIHKHYMMIGGQNRHQEWILRPRQVQTVHFRSWAEKNLKEGDVVVVEATGSVWDIYDIVDPLVTRTVVANAHKVRQIAEARVKTDKEDIKRLITLLIADIVPEVWVPPVHVRELRSLISFRWRLTKQITMSKNRLHSVVQRFNLNAPKGGLLTDKNKSWWEKQDFTDLTGFQVERDLEIVENLESQKAAIDKKLAELSNTEPWASDMAFLMQIPGFGLIFSMVVLSAIGDISRFSDPRKLVGYAGLGAGVHASGEKYQEKSITKAGRKELRWALVEAAWVAVRFDPYWKDQFIRLKKRMHVNKAIVAVARRLLVSIWYILSKRESYRHFDEETIAYKMLIWAQAIGEEGRQGLTRQQFAKYGLLRLGIGQDLERIVKGGGPRRIAPTEEVLALKPELAPPR

SEQ ID NO: 180093 - protein, 338 aa, unidentified
MVLIGVDPHKGSHTAVVVDGDEHEVARFTVRADRRQLQRMLSFAEPFGERTWAIESAGGLGFLLAQQLVAAGEDVVDVPPTLAARVRLLGSGRGSKNDPNDALSTAIAALRDPHMRVVVAEDHAAVLRMLADRYQDLTRLRTQAICRLHALLRMLVPGGARKDLSANAAAALLRRVHPMTAVEVERKNLALELVADIRRLDCAAKTVKARTKVAVAASGSTLTDINGVGPIVAAIIIGHVGDISRFPTSGHFASYNGTAPIEASSGPRVRHRLNPRGNRQLNHALHVIAIVQTRYASPGREYFQRKLEEGKGPKEARRALKRRISDTVYRKLREDQHT

SEQ ID NO: 180094 - protein, 362 aa, unidentified
MRIIGCDLHARQQTLAMLDTTTGEIVNTTLLHEGDGVREFYSKLPRPVRVGVEATGSMHWFLNLTGELGIECQVGHPAQIRAAEPRKQKHDRRDADLILKLMVENRFPAIWMPSPELRDLRALLLHRHQWVRMRTRIQNALQAIALANGLRRGSSLWSRDGQNAIASLPLAPHTAYRRSALQAMYVKIGAEIEELNRQVAEQADHRSGARLLMTHPGVGPVTALATDVFLGDPKRFVDSKALASYVGMIPREYSSGERQRLGGLTKQGSPLLRFLWGEAGAHAARRDPELQRFYRRKLVQKGLGKASVAVARKLGIRLWIMLRDEIDYHEFCRRGQKQQKSGEACAGMPETRYGANRHRPVD

SEQ ID NO: 180095 - protein, 373 aa, unidentified
MTDYSAFVGLDVHKDTIAVSVADAGRAGEVRFWGEIANTPDAVANMLRKLSGRYRRIHFVYEAGPCGYGLYRQIMATDHHCEVVSPAQTPRKPGDRIKTDRRDAIILARLSRAGELTSVWVPDETHEAMRDLIRLRQAMVKDLRAARQRTKSFLLRHGRVFKGTAWKRSHRVWLGNQSFAHPAQQIAFQSYLNAVDQAQARRDEVDVQIRLFTADWSMAPVVEALQALRGVAFITAVTIVCEVGDIRRFAKPRQLMAFLGLVPGERSSGETRRQGGITKAGNVLARAVLIEAAWSYRTPAKIGAQMMLRQEGIPQAAKDIGWKAQVRLCGRYRRLMARGKKSALAVTAVARELVGFIWAIAHITEPTGADGAA

SEQ ID NO: 180096 - protein, 413 aa, unidentified
MSEEAFAWFVGVDWGSEKHQVCIVDPQGTIVGERSFPHSGAGLAELGDWLLSITGAANTVAVAIEVPHGPVVDSLIDRGFAAYTINPKQLDRLRDRFSIAGAKDDRRDGYTLADGVRTDRRLFRRLHVADPRLVELRAWSRLTQELTEERVRLSNRVHHELWRYMPQLAKLTDDLAAPWFLELWTLAPTPAKARQLRKSTIEQLLKEHRIRRVDAETVFSTLREPAIKVADGVAEAASVHMRSLIARLRLVNRELREAERQLDKICTMIGETDAASGDCLQRQDIMILKSMPGIGRINLATLLSEGSGPLSRRDYPALRTLCGAAPVTKRSGKSCIVIMRYAAHVRLRQTAYHWARNATQHDPISKARYIALRRRGHSHGRALRSVADRLLGLACVLLQKQTPFDPQYGHPAA

SEQ ID NO: 180097 - protein, 334 aa, unidentified
MTSATARPMPCAIGIDVSKRHLDFAIHQQGTPQRLANDADSITTLGAQLRPLAPQLIVLEATGGYEAACALALQEAGLPVLVVTPRQARDYAKSQGILAKTDRVDARVLAQFAAPTTLAPRPLPTGPLRELSALVTRRRQVQDQLTAERQRRPFAEGLVAESLTAALTAYPRQLNQLTAAIGRLITATPALQVQAERLQSVPGGGPVVAATLVAELPELGPLSRRQIAALAGVAPLARDSGRQRGRRHVWGGRASVRRVLYMAALVASQCHPLIQAFYQRLLAAGKPKKLALVACMRKLLVILNALVKHATTWNAHQPTPHGTPPHRTPQGARA

SEQ ID NO: 180098 - protein, 352 aa, unidentified
MATTAQSAIAVIGIDIGKNSFHVVGLDGRGAIVLRQKWSRGQVEARFANMSPCLIGMEACVGAHHLSRKLKALGHDARLMPARYVRPYSKGQKNDFRDAEAIAEAVQRPTMKFVVTKTADQLDLQALHRVRERLVSQRTGIINQIRAFLLERGIAVRQGQRFLRVELPRILATPPDVLSPRMVRVIEGLASDWHRLDERIEVLSSEIEELAKPDAGCERLMSIPGIGPIISSAMVAAIGTGDSFSKGRDFAAWLGLVPRQISTGDRTILGKISKRGNRYLRVLFVQAAWVVLVKVKPTRWQGHGLRPWIEAAKKRLHHNVLAIALANKLARIAWSVLAHGRAFETNKLLAAA

SEQ ID NO: 180099 - protein, 429 aa, unidentified
MNSHSHSRETSRDLKPAVELEREFAAFVGIDWADEEHAVCVLDGQRLRREVLPHTPEAIAAWAAGLARDFNNQPVAVMVEQSRGPLLQALMQYPQLVLFPINPKQAARYREALVHSGKKDDPTDAECLARFVREHHRQLRVWKPQDAVTRQLAQLVELRRKAVESRKQTTQQCQARLKQYFPLALDLGEALCFAVVERWPTQQALARANPATLRKFFAQHGRRNEDQVNELIARIRAAKPLTTDRAIIDPNALAVKFLLKELRVLEAAVTEFDAAIADCFAAHPDAPLFRSPPGAGATLAPRLLVAFGADRDRFASADEVQAYSGIAPVTKRSGKSCHVTKRYFCNKFLRQTFHEFADHARKWSTWSKAFYEHLRARGHRHHAALRSLAFKWVRILFRCWKDRQPYDEARYLQQLQSKGVPYLSKLQPT

SEQ ID NO: 180100 - protein, 431 aa, unidentified
MKPIVEQNTEPDPAPDFAAFLALDWGDEKHAFCLQVVGQSKIESGTLEQKPDVLGPWLAKLRERFGGRPIAVGLEQSRGALIHALMAYDFLVLYPIHPTTVAKYREAFKSSGTKNDPLDAGQILEILTKHLDRLHRLNPDTVETRLLGRLVEDRRKAVELRTTHIQALGANLKEYYPQALELTNDNLKSRLACDLLLKWPTFEDFQQAKPSTIKRFYYGHNVRSPEVIERVLTLAQKSQALTTDPAIVESGRRLTQMYAQLLQALSPAIADYDQRIQRVFDAHPEAKLFSGLPGAGPVMAPRLLAFFGTDRARYASACNVQSFTGIAPVTKSSGKSKVVHARAACPKFDRQTFHEFSRLSVAYCQWARNYVQYYTDKGKKFHTIIRALAYKWIRILFKCWQERTPYNDDKYMETLKLRGSIFATWHLKKTS

SEQ ID NO: 180101 - protein, 367 aa, unidentified
MSLQERKLLMAMELSNTNWKLCFGDGSTHRERTIPARAVETLLKEVQRAKEKFALPAEAPVVSCYEAGRDGFWVDRMLTEHGITNYIMDPSSIEVPRQARQRKTDRLDSRKLLKLLVRYELWGERDSFAKVQVPNEEQEAQLRTHRERERLTKERTAHRARIKSLCVLHGVDASKALRVEVSALRDWKARELPTPWLNELRRERNRLKLVDEQLAAVEETQKEALASPQSKAVGQARKLQQLKSIGVQSSWVLCHECFGWREFANRKRLGSFSGLTGTPFDSGDTLREQGISKAGNRRVRTTMIELAWLWLRWQPDSALTHWYLERYAGTKRSRRKGIVALARKLLIALWKYLEQDIVPEGAILKAA

SEQ ID NO: 180102 - protein, 409 aa, unidentified
MLFAGIDWSEKLLDFHLRTAEGKVLAQGQIKPSVEGMADLFAELESHGPVSEIGIAIETAHGAWVQALLDRGYQVYPLNPKTVECFREALSANGVKTDKIDSKVLAMFLITFHQENKPLRPDAPEIIQLRILCQDRLRLVEERSAKVNELGAILKCYYPAFMGFFGDLDSGIALDFLQQYPTQKQFQKLSERRLLNWLSRHRYSYPKRIDEMVGLLKQPALPVAEHLQQAKKTLICYLARSIKTLNAEMAQRDKQINDHLDSLAESDWIRSLPRAGKVLAPALLACLGRDPERFSSVGEARALMGTAPVTKASGKSRVVVFRRGCWKFARRTLQLFADQSRHQCHWAQAFYEKQRNSGHKHHEALRALAHRWLKILLAMRQSGSLYDEGIFLNSQRRYQLKTPILKTFK

SEQ ID NO: 180103 - protein, 477 aa, unidentified
MTMNNSIMKNTGTNLRELLNEYEPHELLYVSIDVAKYNHSFMVANFFGDVIIPKTDIPYDKNGIDSLSKKVDLAQQQTRAKKIFFGLESTGHYHENLTAALMELGYDMAVINPSDSKNERDNIHAKTDNIDLAAIARVIMTNKGKRSYIPNTIYYNLRRASRTHRQLTEQETSIKNVITMLVDKTFGGLWNPENHIFSEKWSKGSLLFVDNYPTPQQAMRLGVKRLTEFFRKHNTKLTVETAQKIIQLAKITPARSPEMMESDIKALKANLGVLNTLSSAITEQRKQMVKYLVCTPGVYLVSIPGIGVIYASDFTAEVGDVQRFTYAGQVISLAGTAPRKHQSGQLDKNNLSTSRRGRNLLRMTVNQIALSLDNHCPEYHNYYFSKLSQYQDTPGKAKTATANRFIKLAFSMMRKETLYCPKAYKSLFSQKEHQDYYQTIWDKMKGALTPYLCHDIPPDNYLVKIQNQMEETYGINP

SEQ ID NO: 180104 - protein, 402 aa, unidentified
MFFVGIDIGKRHHEAAIIDEVGHPVGKSIRFSNSKAGSEKLLEFINKHELLPDNTLIGLEATGHYWLSVFSFLLDLEFNVVPFNPIQSDSLRNFYIRKTKTDTIDAVLIAQVIRMDLPDQTYVPSENIVRLKQLTRFRYSIVDQISDIKRKVIASLDQVFPEYETLFSDMFGKSSTQLLLQSPLPEDLLEIDSQKLVELLNQASNGRLSLEKSTGKVLKLKELAEDSFGIKVASDVYKLQIQLLLQQILLLENQLEMVEAEIAALIAMNDNHLTTIIGVGPITAAVIIAEVGDIHRFERPNQLLAFAGLDASVHQSGDFLGTRNKLSKRGSPYLRRAIWQAAFVASNKDPALSLYYQSLRKRGKHHGTAIGAVCRKLVNIIFAVWTNDKPYEPHINRDLLDQ

SEQ ID NO: 180105 - protein, 343 aa, unidentified
MKLKRIGVDLAKNVFQVHGVDQREKAVWRKRLPRDRWLQAISEVAESGCEIGMEACGGAHHWARQLEARGFRVKMMAPQYVKPYVPRNKNDAKDAQGICEAMSRPSMTFVPIKTVEQQDMQAVHRIRTGLVEQRTAKANQIRGLVAEYGLVAPRELSSLRCAIPRWLEDADNGLTTRFRHLLDGLWHDLIFLDERVVELEREIAVMAQTDAAAVRLQQLRGVGPMIATALVAAMGDARQYTNGRQLAASLGLTPAQHSSGGKEQLLGISKRGNAYVRSLLVHGARAMLRTAATKDDALSRWVTRLAERSHPNVACVALANKTARMAWAMLRHGSNYQPALATA

SEQ ID NO: 180106 - protein, 363 aa, unidentified
MEHIGIDLGSSKSAICIACETGVLLLETTVRTLELESFLAKRPASRVVLESCAESRRVAQRALELGHEARIIPTSFVRSLGIGSRNIKNDKRDARNIVMASIRLGDELPHVHIRSDEMVAIQDVVRARSSLVSQRTMAINFVRAQLRKELLGRGPRATPLTFSKQVRELVGDNHGVEIGAHLAIIDALNKQIAALDKRIKEMAKTSEPAARLQKITGVGPIIALAFLAAVDDPKRFASGRHLASYVGLSPGENTTGGNIRRTSIIAAGQKQLRGLLVQSAHTMLNARKTREPMAEWALEIERRRGRKVAVCALARRLSVVMWAMLRDETRYDPTQTRSRIRPAPQASSPETTFGDVFASTSVT

SEQ ID NO: 180107 - protein, 345 aa, unidentified
MGVIIGVDPHKASCTAAVLDERGELVDQQRFASTRTGSRALGRWAKRWPERRWAVEGASGLGRRLAQQLVGDGEPVVDVPAKLAARVRLLSAGHGRKSDTHDAVSVAVAALGTTRLGQVRLEDHAAVLRLLSDRRDDLVRQRTRTLNRLHVLLCDLLPGGAKRSLDADTAAALLRRLRPATAPARTRRQLAVDLVADLRALDRRITAVEERLRHAVTQSATTLIELFGVGPILAAKLLGEVGDVRRFATKHRFAAHNGTAPIEASSGEVVRHRLSRAGNRKLNHALHLIAIVQIRHPTAGQAYYRRKLAEGKSRKEALRCLKRRLSDAVYRQHLADQHQPVQAQA

SEQ ID NO: 180108 - protein, 364 aa, unidentified
MPTEAVTRLYAGLDLHKSNVFCGIKDQEGRPIYRRRLPAELPAILQALAPYRGQLNAVAVESTFNWYWLVDGLQAAGLPVRLANPAQMEQYSGLKQTDDESDALWLAEMLRLGILPEGYIYPKAQRPVRDLLRRRLLLVRQATQTLLSLQSMVVRHTGQPVSATKLQDWSLAQVHATFADPYSQQAAAALLELLREQRRIQHGLEKQVLAAVVNQHGPFVRLQSIPGIGRILGLTIALETGPIQRFGSAGQYASYCRTVNSRCVSNGKTKGQNNRKNGNEYLAWAYVEAANFAQRYSPRAQAWFARKTAQTKRVVAVKALACKLAKAAYYLMRDDVDFDEARMFGASRGGGRQPVKGVGLQPLD

SEQ ID NO: 180109 - protein, 361 aa, unidentified
MKKHTQDLIAEVPRGCSQVGITIGIDLGDVWSHYCTLNEDGEVVDRGRFRTNPSSVDKWFTDLPRVRIAMEAGTHSIWISEQLQELGHEVIVANVRELRAISHSDRKSDQVDAEKLARFARLDPKILRSIAHRTVAQQEALTLIRARNLIVRLRTAAVNAVRGLAKPCGYRLPASSTLCFAKRCMAVLPPGLVQALGPVLEQIADMTLKIKAYDRAIKKLTETEYPETMALTKVYGVGQLTALTYVLTLGSKERFQRSRDVGCYLGLRPRRSQSGERDPQLGITKAGNVYLRSLLVECANHVLGRHGKDSSLRDWGLHLAARGGKQSRNRAIVAVARKLAVLLHRIWVTQEPYVPFYAAAA

SEQ ID NO: 180110 - protein, 409 aa, unidentified
MEVIYPRCAGLDVHKQTVVACVRIAGDGPPLQEVRTFETTTSGLLALADWLDSFGVEHVGMEATGVYWKPVWHVLEGHFELVLANAAHVKNVPGRKTDVNDSMWLADLLAHGLIRASFVPPTAVQELRSLTRTRTRKQFVRERGSHAQRIEKILEDANLKLSVVISDILGKGGRAVLQALIDGHSDPERLASCITTRVKASRAELLEALRGNVSAHHRFMLKLHLGHIDALDQAIATIEKEVGLGLEPFRAAAKLLSTMPGLSAVSSHVIVAEIGIDMSRFATPGHLLSWACICPRNDESAGKRRSTRLRRGGKWLKTTLVQAAWAAVKVKGGYLQAQFHRIRARRGAKKAIIAVAATMLTAAWHMLRDGTEWHDLGAAHFDRADATKTANRLIRRLQQIGYTVQATPA

SEQ ID NO: 180111 - protein, 346 aa, unidentified
MKVKTIGIDLAKETFGLHGVDGRGRVVVHKRVTRKHLVGFLVKVEPCLVGMEACGAAHYWAREIEKLGHTVKLMSPQFVVPYRKGNKNDPNDAAAICEAVTRPSMRFVPIKCEEQQDLQALHRVRKQLIKNRTALANQIRGLLRERGIVVAQAIGRLRTALPVILEDQSNRLSALMRELLGEMAERLRMLDDCLRPYDRRIERLCQQDERCRRLVKVEGVGPLVATALVAAIGNARQFKSGRELSAWLGLVPRQHSSGQRTVLLGISKRGDRYLRTLLIHGARAAARVAERKRDARSIWLSRLKLRGGPNVAAVALANKNARVMWALLARGDSYRVQTSMHSEAAA

SEQ ID NO: 180112 - protein, 448 aa, unidentified
MADGRRAASRGVARRNAKLAALRQVVSVDRAVLAVDLASRDQAAVVCDHDSVVLGRRMFTGSAWCIEQVLEWAGPVAAKAGFTGLLVACEPTGHRWKPLAVTAAARQVPMVCVQPLLVRRAREGEDFTRSRSDFGDAVIIARLVSELRCYLPYLPQGPWARLRHLGARRDGLLVRATAARGQLRDLLECGWPTVLGTAAEPLESLTWRAALAVSADPAVIAAMSEQQFLAALRDQLATVGGQKAWRKIALAVHAAAAAPGGIAAERAAICERAAFARQDWMNALAALADIDTRMITVLGELGLTSLVTTIPGLSAAGAAVILAETGDPARYDCPRAWVKHAGLAPQANQSGRYHGRTRNSGRGRPLLRTAAWRAIWGALRCNPVYAARFAYLTSRSKNRLTRGQAHAALAAALLRQLFVVVTRRVPWDPAIASGARLPAAAKVVMNAA

SEQ ID NO: 180113 - protein, 320 aa, unidentified
MKQAIYVGVDVSKKQLDVAIRPLGQVFGVSNDRRGIAQLVKRLKKLQPVCIAIDATGGLEKELAYALAAENLPVAVVNPRQVSNFAKSTGQRAKTDAIDAAVLAHFAEVMKAEVRPLPDAASRELSALVTRHRQLVEMMTAESNRRDLASKAVRKLINSLLRSLKDQLAVVDREIRKAISASETWRRKAELLRSVPGVGKVTTATLLAGLPELGELDRRQIAALVGVAPFNRESGTWKGKRMIAGGRGWIRSVLYMSTVVAVRRNPIRKEFYERLRARGKPAKQALTACMRKLLVILNAMLRRQTHWSAPNPLLSLRVAG

SEQ ID NO: 180114 - protein, 317 aa, unidentified
MEETSTVVAGIDTAKDKLDVAICGRALRLQVANSMRGWKQLRAELAKAGVGRVGIEATGGYERGVVRHLQAAGFVVLVLQPIQVRAFARLHRQRAKNDALDAALIAACAAAIEPHEIGPDQRLAGLADSLTFVEQIEEDIARFKTRLEHIGEPRLRRMVLADIARLKIRRLAQLRLIAKQLRAHPDLAVRLDLVMSVPGIGERTALALIIRMPELGRISREQASALAGLAPFDDDSGKYRGQRHIAGGRARLRRSLYAAALPAAFRWNKALIGLYRRLTTAGKAHSLALVACARKLLIYANTVVARGAPWRENAVPT

SEQ ID NO: 180115 - protein, 350 aa, unidentified
MVTIGADLHKRTHTVVAVDDNGRKLAERTVPATPAGHLELLAWAKERFPERRWALEDCRHLSRRLERDLVTAGEAVVRVPPKLMAGARRSGREPGKSDPIDALAVARAALREPDLPVARLDGPEREVRLLLDHRDDLVAERTRAQNRLRWHLHELTPGEEPVARSLDRRVVLDRLSADLEDRTGTVARIAAELVARIRELTTVIDRLEREIADRVASLAPTLLALPGCGALTAAKLVGETAGIGRFRSSSAFARHNGSAPVPVWSANSGRHRLSRTGNRQLNLALHRIAITQMRLEGRGRDYIAKRRAAGDTKTEAIRALRRHISDEVYRRMRHDEGLRAASQAPLAMAA

SEQ ID NO: 180116 - protein, 338 aa, unidentified
MGDEEHVVCVLGSGGEVVKRDRVPCTRGDVERFFGEMPRCVVAMETGTHSRWVSQLLSGMGFEVLVGNARKMRSIWDSDEKDDDRDAEQVARLARFDRKLLHPVQHRKEEAHQDLEMLRGRDMLVSCRSKLVNHVRGVVKAAGYRVPKGSTEAFHKRAAAAMPKELAVVMGPVLESLADLNKRIREYEQKAEVLCEEKYPETKPLRAIKGVGPVISLAFVLTLEDPKRYRDSRTVGAFLGMTPRRCQSGGTDPQLKITKAGNGFMRKLLVVGANYIMGPFGEDCDLRRFGERLQSRGGKNAKKRARVAVARKLAVLMHSMWLNGTVYQPLGYNHKNVG

SEQ ID NO: 180117 - protein, 382 aa, unidentified
MENIQAKQCEAVTESRDVTGINFASFIGVDLHKTTVTLRAVDSNESIISSLTIDTKCVNKIEDWINDLPKPRWMAVETVSFVEWFIDRYKDCVEQIDIADATELASRRGKRRKTDRNDALDIAVRLVRGDCPLGFIADEPLMQLRKLGRHWKQLSRTLSRAKHCMQSIFHAANIRGPKLEGATAQKWLLAHGDLLKDVQQESFSNFIDIISLIERQRESLRRKIIHANRSDEFSARITILKSIPGIAEIWSCIIAAEIGPFDRFPNADALEFWAGLTPDNKESAGRTQSGSITKAGSATLRWALCKAAVTLCKSDARQESVRQRLIKRTGKAKANVAMGRRLLRIIYAMMRDGTLYECAEPTNHLKNANKARTKKRKQQEAA

SEQ ID NO: 180118 - protein, 314 aa, unidentified
MNIIGSDISKDTIDATLHKTNGSIHYIKFKNNDDGLKQFRLWIKGNRIRKVYIGMEATGIYYEKAADMLSSYYTVYVINPLKIKDYGKSRFNRTKTDKADSNLIADYIKRHQDTLIPYQIPKNKALQKLINLKNQLQQQQKQIKNRLHSTEEDFIRNIHQDLIDTIQDKMEQVKIAISEQIKKQTDNNHYRNLQTIPSIGKDTASVLYAQLTEKHFKTANQFVSYAGLSPAIIQSGTSVRGRGRLSRYGNRRLKSMLYMPALCAYRFNAFPKLINNLKKAGKPKMVIIVAIMRKLAKPAYYIVKTGQPYDAERH

SEQ ID NO: 180119 - protein, 408 aa, unidentified
MYNAVGIDASKLKSTITIIQPAGVVIRKPFDVLHTSDELNTLVTYLKSLVGETRAVIECTGRYHEPVVKSLSEAGIFISAVNPKLIKGQKQNTLRNVKSDPADARKIAKYALDNWAELREYSSMDTTREQLKTLNSQFTFFMKQKVAAKTNLISLLDNTYPGVNKLFDSPTRDDGSEKWVDYTYSFWHVDCVRKIGLKAFTERYEAFCKKHHYNYQKNKPALLFEESKQLVAVFPKEKSYKLLIQQSIQQLRLASEHIEIIRKEMNELASTLPEYETVMSMYGVGETYGPQLIAEIGDVSRFTHREAITAFAGVDPGVNESGQFKQRSNRASKNGSTRLRKTLFQVMSTYLQNKPVNEPVYQFLDRKRAEGKPYLVYMTAGANKFLRIYYGKVKECLRNLEQSQIEES

SEQ ID NO: 180120 - protein, 386 aa, unidentified
MQTLNELSQSRIVLKQDGTLIAVIEMSLSSWLVAGIVPGVERQPLKKLTIDQSALLKLLNRWREEAEKAGRKIERIAVAFEAGRDGFWLARWLRARGIEGHIIHASSVAVSREHRRAKTDRLDTQLLKRAFLGWLRGERDHCKMVAIPTIEDEDAKRPNRERESLVGEQTRIVNRMKAALSRLGIRGFNPKLKKAAERLGDLRTPEDEPIPPNTLAELRRDMERRRLISDQIRQIEDARLERIEHAPSDGPHAMVRLLARVIGVGIETADMLVQEVLSRNMRDRRAVARYAGLTGSPDESGTKRREKGLARSGNARVRRGMIQLAWRFLMFQKDSALAQWFRARTENARGTRKTMIVALARKLLIALWRLVREGVVPDGIVLRPAQ

SEQ ID NO: 180121 - protein, 349 aa, unidentified
MANLTIGVDLGDRYSELYVVDAAGACVETGRIRTTVAGLEQWFGGRAPARVVLEAGTHSPWASRVLQRLGHEVLVANPRKLRAIYENDSKDDRVDAEYLARVGRLDPALLKPITHRGEAAQADLAVLSSRDVLVRTRTLLINHTRGVVKAMGGRLPRCSAESFARRVGPHVPPALRPALAPVLAQLQQLTAAIRGVDREVERRCAEQYPATAQLRQVSGVGPVTALAYVLVLEDPRRFPRSRAVGAYLGLRPRRSQSGEQDPQLRITKAGHPFLRRLVVQAAHYILGPHGPDCDLRRHGERIAARGGKNAKKRAVIAVARKLAVLLHVLWIRGEVYEPLRQRLVLAQAS

SEQ ID NO: 180122 - protein, 467 aa, unidentified
MSVRPDQSPRPRRCPEPLRVTHPHAAGIDIHAAIHWVAVPPGDAPPAPDHAPHLLAHVRSFGTCTADLIALADWLTRCGVTTVAMESTGIYWIPLFELLEARGFEVFLVDPRQSRHAPGRPKTDVRDCQWLQRLHSYGLLTASFRPAEQIVVLRSYLRQRQMLLRYAGQHIQHMQKALEEMNVKLPEVVSNITGVTGLAIIRAILAGQRDPLELAKLRNDKCRRTQAQIARALYGNWRAEHLFALQQALALYEFYHRQLRACDVQLQAHFKTLPDQSRGQARPRRQRRPCPNVNDPAFDVGQALYQMAGVDLTVLEGINASTALVLLSEIGPDVSRFPTVKQFTSWLGLSPQHQESAGKIRRRRVRRGFNRAGRALRLAVQGCCHAKHVLGAFYRRVKARAGAPKAIVATARKLAERVYRLLKYGTAYVCQEIDVYEAKYRERLVKGLTRKAAELGYRLEPVSPVGT

SEQ ID NO: 180123 - protein, 414 aa, unidentified
MKLFVGIDVSSEELEACFMDPEGDTLETLKVENNLHGASHLRDRIVAAADKLPASEIHIGLEATSVYSWHPAMYLHEDASLQERKTKVFTINPKLINKFREAYADMDKTDRIDAWIIAERLRFGRLTTTIVMQEQYIALQRLTRMRYHLVHNLTREKQYFLQNLFYKCNAFRSEVDSSVFGHAIMEMLSEKFSLDEIADMEVADLADYLKEKGKNRFPDPEHVARCIQKAARASYRLSKVVEDSIDLVLGTSIQAIRSIQSQLKELDKAIERILAGIPGAQCLRSIPGIDRVYAAGILAEIGDIERFSDQAAVAKYAGLTWRKHQSGGFEAENTKRIRSGNRFLRYYLVEAANSVKNRDPEFGEYYRKKYNEVPKHQHKRALVLTARKLVRLVDVLLRNGQLYTPGRKVKPAEH

SEQ ID NO: 180124 - protein, 368 aa, unidentified
MDSMTQVEGPIHLGLDVAKNAIVVGVLLPGRESVDVDRIAHDEASVRRLVDRFADNRSALRSCYEAGPTGFGLYRLLRSMGVACDVVAPSLIPRSPGDRVKTDKRDARRLARLHRAGELVAIAVPTAEQEAVRDLCRARSALVRDRRRARQRLDKFLLRHDRVYRAGTAWTARYELWLGGQRFDDPALRATYGHYRGVVQARDAELTAIEAALAPWLDRGPFAAATHRLACYRGIAYLGGLTLAAEVFDWRRFGSAVQFMGFTGLVPGEYSSGESVRRGHITKAGNGYVRTQLIESAWSYQHHAAVGVDLKRRQRHADPSTIARSWTAQQRLCGRFRRLAVRKTDKKTVVTAIARELAGFVWAEMTAG

SEQ ID NO: 180125 - protein, 376 aa, unidentified
MEHDSTVYVGLDVHKESITIAYAVGIGDVELLGRIGTAKGDIDRLCKRLHSKGRRVHVVYEAGPCGYGLYRQLVAEGFECMVCAPSLIPKKPGERIKTDRRDSIKLARALRAGDLSAVHVPGIEDEAFRDLARAWVSAKDDLKQARQRLKSFLLSHGVRYPGKADWGSSYRRWVSQHSFSNEWQQLAFEEHRRTLGDRMAQCERLEAALRDSVVNWRFYPAVLGLQAMRGVQFTTAVGMLAEVGDLSRFEHPRQLMAWLGVTPSEHSSGGKRRQGGITKTGNSYARKLLIEAAWSYRHQARVSENIGRRHPGLPKPIIDRAWDAQLRLCRRYRKLAARGKNANTAVVAVARELAGFIWDITRLSMSLAIPRTGLSA

SEQ ID NO: 180126 - protein, 410 aa, unidentified
MKLCVGIDVSSKDLVTSMISEETCEVVFQGNFVNDLKGATELKTIIINTANSNHLDQVVIGMEATSIYSFHPAMFFQEDQDLKKFDTQSVVIDPKKTKRYHDVFAEDKNDQIDAFYIADFLRVGRYSTGIVRQENYIALQRLTRSRYELVQSLVRAKQHFIENLYYKLNKLVISDELNTSVFGSTMMSLLTEDMTTDDLLNTSINDLADYLNEHGRGRFANPEALAKTIQKAVRASYRLDKVIANSVDTVLSVYAEEIKAFQKMIKGLDKAIEEVMKVIGKEEEVLRSIPGIGPVYAAGILAEIGQIDRFDNEAKLAKYAGLSWKEKQSGNYASDNTPLKRTGNAYLRYYFVEAANRVRIQDPVFGKYYQRKYKEVKRTPSKRALVLTARKLIRVIFFLLKNHQIYQEKR

SEQ ID NO: 180127 - protein, 346 aa, unidentified
MENIALDVHKHYTWARVENTEGQQLYASRLAHNRGCIKNFVQRWTPGSPVAVETVGNWYWVVDEIEAGGGKPQLVNARLAKLMIGNANKSDKLDAKGLNLLQRTGTLPTVWIASSPVRDARELPRSRMVLSRQRTQLKNRVHATLSKYGYVVDEVSDAFGKRGREIVNELLTKLPPHTQQALQHVLDQLDAVMANLKAIEADMSDAFAPCPQATWLESLPGVGQILAAVIWTEIGSIERFGRAEQLASYSGLVARENSSGGKFRYGATRRDVNVYLKWAFVEAANSSIQNRERCGYKHISQLYQRIKARRGHNRAKVAVARHLSEASFWMLKKGEPYREPVLSTQR

SEQ ID NO: 180128 - protein, 391 aa, unidentified
MVYVGIDVAKDKHDCFILNSEGTVLADVFTIANNRIGFETLLSRIQSCSQGESKIKVGLEATGHYSYNLLGFLLDSGLATYVINPLHTNLYRKSLSLRRTKTDRIDARTIAMMLMSDVDLKSYSNTAYHNEELKSLTRYRFDKVKERAKLKSSVARLVNILFPELEKLVSSLHIAVVYALLSNYPGASYIANANTEELAETLCTASKGRYTKSKTAEIQVAAGVSIGSKMPAKSMELKHTIALIRELDKEISEVESAIDKITSQMDSPIFTIPGIGRHMGAMILAEVGDFSNFASADKLLAYAGLSPSTYQSGQLQNCYAHMEKRGSRYLRYALFNAAKYVCLWCPTFSAYLEKKRSEGKHYNVAISHAAKKLVRLIFAMQRSGKAFLADY

SEQ ID NO: 180129 - protein, 345 aa, unidentified
MKITTVGIDLAKNVIQIHGVDERGKTVLRKQLKRAQVAAFFATLEPCLIGMEACGSAHHWARKLQGFGHKVRLMAPQFVKPYVKTNKNDVADAEAICEAVGRPNMRFVPLKTTEQQGVLALHRARQGFVKARTAQANAVRGLLGEFGIVIPQGMSPLAKRIPEILEDGENGLTGSFRQLLQRLMEHLKELDRQVGELEREIQVWHRENEASCKLAKVPGIGPITASALVASVGDAKNFANGRQMAAWLGLVPRQHSSGGKSTLLGISKRGDSYLRTLLVHGARSVVRYAEGKTNPAADWLKSLLTRRHTNVAVVALANKNARIAWALLAHDREFRSDYAPARAKA

SEQ ID NO: 180130 - protein, 456 aa, unidentified
MKIPQSTIRLLTGRLVKILLNREVSTMKSNTQNAKIEAITEKTLVLGIDVGSETHYARAFDYRGVEYSKKPFKFSNTEAGFVTFKAWVLDIKEKHGKDKVIPGMEPTGHYGFNLGKFLQDNEMKPVLVNPHHVKKSKELDDNHPTKNDRKDPKVIAGLVREGRYMIPYLPDGVYADLRTASNIRFQLQAELTRIQNRINRWFNIYFPEYKTVYGKPDAKSGILILKEAPLPEDILTLGIDGVNQIWRDAKLRAVGKARAKTLIEAAEHSVGSKEGAVSARMEIRMLLEDYESRNIRLQEVMGLIEGLVNQIPMAEKLLEIKGVGIKTVSGFLAEVGDIRRFNDPKELQKLAGLALVENSSGKHKGKTTISRRGRKRLRYLLFEVAMSLVAKNPEFRELHNYYTTRRLNPLKKMQSLMAIAAKLLRVFYAILTKGVGYDPKKMVNDIRRPAAYAQAA

SEQ ID NO: 180131 - protein, 449 aa, unidentified
MPKPRGKLSGLPVINDRAAAIDIGSRFHVVAVPPELCDQPVQTFQAFTGDLQRMADWLVSLGIKTVAMESTGVYWIAAYEVLEARGLKVIVANARESRAVPGRKSDVSDAQWLQRLHACGLLRPSFRPSGDIAALRAYLRLRERHLDYAAAHIQHMQKALTFMNLQLHHVVTDVTGATGMRIIRAIVAGERDPGVLAAMRDRNCRSSVETIRAALVGNYQNEHVFALQQALALYDFYQARVDECDAEIKRTLTIIAAQNPVPQQPLGKMRSRPQQPNALSFDVRILMYQLAGVDLTQIHGIGPYLAVRLVAECGADLSRWPTAKHFTSWLTLSPGCKVSGGKVLSSHTRKTTNRVAALLRLAAVTVGKTSTALGAFYRRLAARIGKAKAVTATARKIAVLFYNAMRFGMQYADPGADHYEQRYKERVIKQLHRRAAEFGFSLQPAKGVS

SEQ ID NO: 180132 - protein, 346 aa, unidentified
MKITTIGIDLAKNIFQIHGVDQHGKTIVRKKLKRAEMSPYFANLPPCLIGMEACGSAHHWARKLESYGHTVKLMAPQFVKPYVKTNKNDMADAEAICEAVARPNMRFVPIKNVEQQAVLSVHRARQGFVKARTAQANQIRGLLSEFGIVIPQGIHSVMKQIPEILEDGENELPGTFRHLIARLTDNLKEMDKQVDELEKEINLWHRQNEASSKLGDIPGIGPITASAIVATVGKAQEFKNGRQLAAWMGLVPRQSSSGGKQNLLGISKRGDTYLRTLMIHGARSVIYHAENKAAPDSWLRKLMSRRNKNIAAVGLANKNARIIWALLAHDRLFHPDYTPTAIAVGV

SEQ ID NO: 180133 - protein, 338 aa, unidentified
MFLIGIDPHKGSHTAAVIDGDELVVDELSVRADRRQRERLLHWATPFEPRLWAVEGATGIGSLLAQQLVRAGETVVDVPAALSARVRLLDAGRNDKTDTQDARSAAIVALRHRNLRVVELEDHRQVMRLLARRHHQLVAGRTRAVCRLHAVLCEMIEGGVSKNLSAKRASIELRRLRPTEAIGIERKQIATEFLDDVRRHDRALVELHQRIITAVKAADTTVIDVFGVGPVVACYLIGYSGDVRRFPSAGHYARYNATAPIEASSGPKVRHRLNPNGNRHLNHAIHIAALGQISHETSGRAYYLAKQTEGKSRKEAMRCLKRRISDAVYRQLRADTDR

SEQ ID NO: 180134 - protein, 345 aa, unidentified
MEPMYYIGLDVHKRKISYCVKDSGGKVYAEGSLPATRIDLDHWMKTLPQPWSAAMEATMFTGWIYDHLKPHAAALKVAHPLMLRAIAAAKKKNDRIDANKMCDCLRCDFLPECYMASTAIRERRRTLRYRNLLVRQMVQMKIKISSLLMEAGVSYNKQRLHKAGYFRELLASNPDIDEGLRSLRRLCRETVVRLGKTESALVRSLEGDPLLVERVERLMTIPAVGPITALTWALEVGDVQRFSSIKKAVSYCGLCGDEQSSANRVQRTPLSKQRNKHLQTTLIEAAKMAPRYSPALALVYDREKQKGNANRATLAVARKLVAYLMAVDRGQRNFLVIENQARTAA

SEQ ID NO: 180135 - protein, 384 aa, unidentified
MEHGITYVGLDVHKASISVALLVPGASKPVQWDVPNVASEVKKLVRKLRRDGGGEVVCAYEAGPCGYGLQRQLQRQGLSCQVVAPSLIPRKPGERIKTDRRDARKLAELLRAGLLTEVRPPSEEEEALRDLCRCRDDARTDLMRARHRLGKMLLRRDLRYPGRAWTQQHRRWLWDLTFEHEAERVVLADYLLAIEQIEARLAELEAQLLALAEQEPYRERVGHLRCFRGIDTLSAMILLAELHGFERFAQPRKLMSYLGLVPGESSSGASVHRLGITKTGNRHLRRLLIEAAHHYRHRPGVGVKLRLRRAGQPAAVIALADRAQQRLHRRYSRMVHGRGQPVSKAVVACARELTGFVWAVLSGTVLRPTEPQVATATTGNRSSR

SEQ ID NO: 180136 - protein, 356 aa, unidentified
MSIVAHTRPYVVGVDTHARTHSFAILVAGTGELVATEQFPATTSGMGRAIDWAGRRTGGDLATLWVIEGVASYGARLAAAVTQAGYEVVEAARMDARAHRGAGKSDPLDARRIAAEVLSLEPADLRRPRSDDGVRAALRILVTAREHMTTERTATINALIALVRVVDLGIDARKPLTAAQVSQIVRWRARVEELATGTARAEAVRLAKRVTDLDADLRANLNQLTGLIRGSKAATLLDKTGIGPVTAAVVLAAWSHSGRVRSEAAFAALAGVNPIPASSGNTVRHRLNRGGDRQLNRALHMAVITRMTHDPDTRAYVQRRRAEGRTTKEIRRCLKRYLARHLYRTLNALHTTLEST

SEQ ID NO: 180137 - protein, 341 aa, unidentified
MKQDISVIGIDIAKRVFHLVGLDERGKIVLRKRCSRGEVLPFMANLGPATIGMEACGGAHYWARHIRAQGHEVKLMAPQFVKPYVKSNKNDMRDAEAIAEAVTRPSMRFVPVKDVAQQDIQALHRVRERLVTARTALVNEIRGLLAEYGIVVPQGVAQFRQTLVRTLEAEQTQLTPLGQELFHKLFEEFGRLDKEVAYYQEKLEALAHTHPVCQRLQTIPGLGPLTATALLAAVSDARVFKNGRQFAAWLGLVPKQYSTGGQTRLLGISKRGDSYLRKLLIHGARATLRWARTKADRRSQWIRGLLERRGWNRTAVAVANKNARIVWALLSRGGVYGAQAS

SEQ ID NO: 180138 - protein, 434 aa, unidentified
MRRRAYRATEVKNVSLEEVLRTAPEGRATVGLDIGKYEVRAVVRWKDGSFERPWKAENPSEIEAVVGLLRKVADHRALIVAMESTGTYGDALRAKLDQAGLEVHRVGGKAAHDYAEVFDGVPSQHDGKDAAVIAELAAFGKSTLWPYRAKSKPDAEMAYWADWLDAQQNIQRLWTGRLESLLARHWPEATRLLELSSVTLLRALGQYGGPADLAKDPTAPARLASWGRHVLDTEKIEKFIASAAQTAGVRQGAQDVQRMQQYATMALAAYRETQKARLKLERLAQGNAVIQRQAKAVGVATACVLWVALGDPRDYPCGEAYRKAMGLNLKERSSGKYQGMLKITKRGPSIVRRWMYFAAMRTAQSVFVKPWFEAKKAKDKDRGNGALIAVARKLALALHAVGAQGNPFEPWRLFSQKVLVGKAQQAKRRAARSH

SEQ ID NO: 180139 - protein, 344 aa, unidentified
MKHYVGLDVSLKETAICVVDENGVVIREGKALSEPEAIVAWLNESGLPIVKIGIEIGGLARWLYSELRAAGLHAVCIDPRRLRGVTKTMPIKTDRNDARAIAQVMRVGWYTVVHIKGDVSQELRMLLNNRKTLLIKQIDIENEIRGVLRVFGLKLSGRISQATFEQQTNELTDGHPRLAAMLRPMLVARAALREQYGVLHKMVLEIVRREPTCQRLMTIPGVGALTAITFLTTIDDPDRFQRSRDVGAHLGLTPRKYASGETDRNGAISRCGDVMLRTILYQAALALLTRTKRWSALKAWGVRVAKRRGLRRAVVAVARKLAIVMHRIWADGSEFRWTREEATA

SEQ ID NO: 180140 - protein, 481 aa, unidentified
MSRRKMSTFERLQRGEKLSRRERKQIGRQLQGEEPGLEIVHRNVAGIDVGDKSHFVSVDRQRGQPSVREFGSWTAALQEMVQWLKSCAVERVVMQTTGVYWVPLQDVLERAGFAVVVVNARATKNLPGRKSDVQECQWLRKLDIYGLLRPCFQVPETIRSIRTLWRLRGRWVEEAGRAIQQMQKALTTMNVQLANAISDISGKTGMAIIRALVEGERNPWVLAKLRDERIRASEEEVAHSLQGNWREDVLFELKQVVKAYEFQQQQIAACDQELEKYMKAQPPHRRAAEVAVEESKAKAKKCRKQAGKARKNQPAFDLEGELKRVLGVDLTAIDGVKLMTIQTLYAEVGADLSAFPTEQHFTSWLMLAPKREVSGGKVIKHTSLHGRSRLANALRMAAESLKESDSYLGARYRSLRGRLGGVKAVKAMARYLGCLIYRMLTKGQAWVDRGAAFYEQRRRERELSHLQRRASAMGLQLVPTK

SEQ ID NO: 180141 - protein, 321 aa, unidentified
MTYVGIDVSKVTFVVAYSSVKTNKTRTFKNTVNGVHEFVQTISASEHNCVLEATGNYSALLVYLLSEAGITISLENPLKIKNFARVMLTVTKTDEIDARLIALYGEKMQPAPYKLRSDAILVLKQKRTVLCQLKKQLVATRNLKGSMEVLPFFDPKCKKTIEKTITFLEKQIKEMEEELASLAQGEYKKQMDLLTSIKGIGVTLAAALIVATGRFSYFDNAKQLTRYLGLSPTYQQSGTSVNVKGHINRNGDSSLRSQLYVAAFSSLRCNTECKACFDRLRSNGKPGKVVVIAVANKLVRQAFAVVTQGKPYVDGFKSEKP

SEQ ID NO: 180142 - protein, 420 aa, unidentified
MKTGANETLASVGLDCHRNFSSVTGRDHSMRVIWRRRLSHRDRQEIRAEFSSWPAGTPVILEGTFGWGWMSDELRQAGQDPHLSSSTKVAAWRKARGLPKSNKRDADLLGELWGQQPRWWEVWCAPPEVRDLRELLRQRSSLVQMQTGLKNRIHATLHRHGLICEASDLFGRGGRLWLKEMMADSATPLRETGRGTLENYLALLDEVRLRVAGATRQFRRIVRRNAAARRLMTLPGVSTILGYTILAEVGQIDRFKDGRHLSSYSLLAPIADDSGDDHPDQTPIGRRVGKIGRRTLKWAWIEAARNAVRKSPRMRGLFERYTHGGTHDRNRGYIAVAHQLCLIGYVLWKKEQDYQETRPPRPGSERRWDRGRAGGTRASMQKESDERRIKVAEQPIETDSRPGTGQPHPAMATKVRSRSS

SEQ ID NO: 180143 - protein, 407 aa, unidentified
MFFLGIDIAKLNHVASLVSDNGNIVFSNFMFKNTLEGFLSLIDKVKSIPKDDIVIALEFTGHYSDNFVNFFFNRKFNVTLVNPANVANFRKSYGRDSKNDRIDSINIAKMLLSREYSLVTQSDIEYLSLKKLNRIRDSLVKQKSKCKILLTRNLDSIFPELQYLLPSGIHSKAVYALLKKYPSSEEIAALGIDVLTNILKTNSRGHFCEKTACIIKSQAKSSVGFEDISLSFHISQLISSIELLEEQIRNTEKQINAIIEKLKPVILSIPGISNVACACILGEIGNISRFRSPSKLLAFAGLDPKVRQSGQFRALSCRMSKRGSKYLRYSLIYTAWNAVRNNEVFSNYYALKRSQGKNHYKALGHVAHKLVRVIYRLMKDNIPFDAEQLIKKNYTKYLRKSIFNRLI

SEQ ID NO: 180144 - protein, 416 aa, unidentified
MEVLYPRCAGLDIHKDTVVACVRLAAEGTVQTEVRTFDTTTPGLLALADWLTDCGCTHVGMEATGVYWKPVWHILSDGDMTLILANAAHVKNVPGRKTDVADATWLADLLAHGLIRASFVPEPATQEMRALLRTRKQLVREQAGHVQRIQKTLEDANLKLASVLTNIMGVSGRAILEALIDGETDPNHLLMLIDRRVKAPRDKVHAALQGRVTDRHRFLWRLHLRQIDTLDAAVAEIDQEVDRDLAPFRDAVRLLSSIPGVSDLTAQVIVSEIGVDMSRFPTAGHLISWAGLCPRNDESAGKRRSNKMRKGAPWLKTTLVQCAWAAVKKKTSYLQAQFQRLRHRRGPKKAICAVAASILTAAYHMLRDGTFYHDLGPDHFHRASPKAQAQRLVSQIEKLGFVCTLTDADPEVVVSV

SEQ ID NO: 180145 - protein, 387 aa, unidentified
MQKPHDNSKASPAAFMQDNTLIAVIELSLSNWLVAGLIPGVSREPLKKLEPNPEDLLKLLHGWRDEAIKAGRSITRIAVAYETGRDSFWLARWLRERGIDAHVIHATSVTVSREHRRAKTDRLDTAMLKRGFLGWLRGERGHCTVAIVPTMEEEDAKRPHREREGLVHEQTRAVNRMKSALIQFGVRNFNPKLRKASVKLETVRTPEGKSLPPNTIAALRRDMERLKIIKEQIKAIEQARLQQFEQKPEALANRMVYLLVRIYGLGLETADLLAHELLSRTLRDRKAVARYAGLTGSPDESGSKRREKGLSRSGNARVRKIMIQLAWRMVKFQPDSALVQWFKQRTENAKGSRKPMIVALARKLIIALWRYANDGVIPEGFRLHSAA

SEQ ID NO: 180146 - protein, 354 aa, unidentified
MTDPSMPDPDRLVTLGVDTHLDTHVAAVLDERGVLLDSMTLPTTPAGYQALLDWAAEFGTIDRVGVEGTGCYGAGLARWLRGAGLVVLEVDRPDRRARRQHGKSDPLDAEAAARAVQSGRATGLPKGGTGAVEAIRALRIARNSAMDARSRVTNQLHALRVTAPDALRDELRALSLSGLLRRASGFRLPAVIEEPYAATRMALRSLARRHQALSAEIAALDGHLRRLVSAAAPRLVARPGIGVHSAGQFLVTAGDNPARLRSDAAFGMLTGTSPVPASSGKTVRHRLNRAGDRQANCSLHMVVLSRMGHDERTKAYVRRRTSEGKTTKEIMRCLKRYVAREVYGLLLQSPGLTS

SEQ ID NO: 180147 - protein, 353 aa, unidentified
MNSLTDLREVVDVVIGVDTHVHTHSAAVVDAATGGVLDEVTVDATAQGYAELVEFANNHAVLRAWAIEGTGGHGAGLSRHLLEMTEIVIELDRPKRAARRNGAKSDPLDAIRAAREAMARPRLGTPRTGGERQALSVLLAARRSAINASTEAQQQVFSLVIAAPEPIRVRFRGQKLAAMLNTAANLRVHASWDTETTSTVVALRTLARRAHAMLKEARELQKAIVAIIRSWRPDLLEEFGVGPIVAATVLCAWSHPGRIHSEAAFAMLAGVAPIPANSGQVTTRYRLNRYGDRQLNNALHTVVQSRIQYQPATRDYVARRTAEGKTGREIKRCLARYVARDLYRLLENRATDA

SEQ ID NO: 180148 - protein, 425 aa, unidentified
MSEKIVVGIDVSKAFSDICILSPNNDIIKRLKISNDINGMKSLIYVLEKVEDEYEDRAVIIMEATAHYHQILANFFRKHNYEVIVINPIQSGALKNINIRKIKSDRTDAYNIALLYRIKNYNETITHSDTVNSIKKLCRQHKELTDEIVEHINRLIAFLDISFPDFKKVFADLQGKTPLSLLEKYPTIQEVLSPENKQDIIQLIKENSHKSSSYAEVKYEKLLKAAEKSIEVCIVSLSSAVLIQTTVRVIFSLQEALKAIDNEIKRLSLLDEKFHKEIVLLQSIPGVGEYTACVVLSELGDISNFSKPKELVAFFGLDPGVTQSGTYNRKNNKISKRGSPHVRSILHMLAKSNVYPNRNREYLNPVMRAYFEKKIAEKPYKVVMCAIMRKMVQIIFAVLRNQKSFELRTPEEHQKLIREKSKLVA

SEQ ID NO: 180149 - protein, 388 aa, unidentified
MEAQTVDTLPPVAADHDPVRCLLAIELSKKSWIVAITTALADKISRYTLEGCDWKGLLELMERVRTRVAREVGRPVEMISCYEAGYDGFWLHRLLERHGVRSHVIDPASVQVDRRARRAKTDHIDAKRLLRSLMAYLRGEPKVWSVLRVPSVAEEDDRRLHRERDRLIAERGQHVNRIKGLCAIHGIYDYEPMRRDRMLRLEQLHTGDGRELPPRLKAEIARELQRLELILEMLKEIEAERDAIALTEKVSAHTNTKTIQNLVKLKAIGAEIATVLTGEVFYRPFNNRHQVASYVGLTPSPFQSGSKCRDQGISKAGNPKARSTMIELAWLWLRHQPDSPLSIWFQERVGTRKGRIRRITIVAVARKLLIALWRYLETGVVPTGAVLN

SEQ ID NO: 180150 - protein, 370 aa, unidentified
MKKNNTCRQSSKRRGSTRTGRLTIGMDLGDKTSRYCALDRNGEVVREGCVGTTKKAMTQVFGAMPRCLVAMEVGTHSPWVSRLLGRLGHEVIVANARQVKLISASSRKDDRMDAQTLARLARVDRQLLRPIRHRSEKAQGHLMTIRVRAGLVDARTSLVNAARGMAKAVGERLPACDTDQMGVEKMQSLPPELQETLQPLLQSVESLTEKIKACDVKIEQIARSEYPETELLRQVSGVGTLIALTFILTVEDRERFQKSRDVGCYVGLRPKRSESGKSQPQLRITKEGDIYLRKMLVQGAHYIMGYRGPDTDLKRWGVKLSERGGKNAKKRAIVAVARKLGILLHRLWVTGEVYEPLRNSKQGQPLGTAA

SEQ ID NO: 180151 - protein, 338 aa, unidentified
MKLYAGIDLHSNNSMVVIIDEQDRVMFEKRLPNELERILFALASFKQWLVGVVVESTYNWYWLVDGLMQSGYSVHLAHPAALVQYQGLKYSADEHDARWLAHLLRLGILHEGYIYPREARAVRDLMRRRMQLVQTRSAQVICMQTQFTRSTAKSPPSNALKRMLPDEIEALLEERNVASGVRANLEVVRTLNREIARLEREVSEQVKLAAQYEPLLSIAGIGRILALAIMLETGAIERFAGVGNFSSYARCVASKRLSNDKKKGEGNSKCGNKYLAWAFVEAAHFAVRYNPRIKRFYERKAAKTNKVVATKAVAHKLARAAYHVMRERVPFDEARAFA

SEQ ID NO: 180152 - protein, 422 aa, unidentified
MLEPTRDTEQIIERIAALDIGKAEVACCVRVPDPKGSGTRMQEVRTYTTMTRSLLLMCDRLRQLGVTRVIMEATSDYWKSPFYLLEAAGFETWLVNAKDVKHLPGRPKSDKIDSVWLCKVGERQMLRPSFVPPPSIRMLRDLTRYRADLVGVRTAEKQRVEKLLEDAQIKVSVVASDIFGVSGREMMAALIAGERDPHVLAQLARGSMRGKISDLQEAFHGRFGDHHAFLLAKMLARVDAINADIADIERQIEDQIAPSAEAVARLDTVPGIGITAARAIIAEIGLDMSRFPTAAHLASWAKFSPIISESAGKKKGKNATGKGNRYLARTLGEVAASVARTNTFLGERYRRIARRRGKKRAIVAVGRSILTIVWHLLSDPAAEFIDLGPDFYDTRGGTQRAIRNHVRGLQSLGYTAMPGSLV

SEQ ID NO: 180153 - protein, 433 aa, unidentified
MDSSPPYDLIIGLDRSDRKADLHLIEISNGKRRSETVDTSPESLWEWLLQLRQQHPQARVALCLEQPAAHLIAFLEAYEWITLYAINPITLQKYREAFVTSRAKDDAKDALYLAELLFSHHDKLKPWAPEDSQTRAVQQLVFHRRAVVDERTGLTNRLQALLKQYFPQALVLCGDDLWRPLATRFLLKWSSLQAVQKTKPATLKEFYYLNGSRSEKLMQQRLELMKKAVPVSDDRALIESFALRVQFICRQLQLLHQTLHAFNERIVLAFKEHEDHEIFASLPGAGPVLAPRLLASMGSQRERYDKAANLQRYTGVAPVTKQSGGKRHVHRRYLCPKFHRQSFHEYAKESVLWSRWAAAYYLQQRTKGSPHHTAVRALAFKWQRIIWRCWQSRKPYEEKIYEAALAKAKSPLVLLLDKIDLGKSPYKNPMKKS

SEQ ID NO: 180154 - protein, 408 aa, unidentified
MRVVGLDIHRVFAEAVMLDGADIVRLGRVGMTREHLVAFARTLTHDDHIVIEATGNAAAVAAAVAPHVGRVIIANPRQVRLIAEARVKTDVIDATVLARLYASGFLPEVWVPDAPTQALRRQVTRRMQVVRQRARLKTIMQSILHTHLVPPCPHADLLGPKGRTWLLAQTLPPDEADAVQRHLREHERLTDDLHVIEREIARDALANPDAQRLMTVPGIDMVVAVGLLAAIGPVTRFEAPDKLVSYLGLNPTVHQSGESRPRHGRISKQGRTHARTMLVEAAWQAVRGPGPLRAFYERVARRRGVHIAAVAVARKLAVIVWHLLRRGEDYAWVRPALHAKKLRDLELRSGQPARRGQRGAAYAYNLTRTRLEERRRGEQAETAYRRQVEGWTRRGPKVPTGAAKEERH

SEQ ID NO: 180155 - protein, 416 aa, unidentified
MPEGEGPVRYYLGVDWADQTHAVWVVDERGTKITARTVPHTAEGLSEWGRELDEWRAHGLELWAAIERPEGRVVDFLLDHGVLVYPVNPKALDRARDRFRQSAAKSDPFDARVLADFLRTDHPRLRPLQPSSDAAQELKLLTEDCQRQIRQQTRLVNQLTATLKAYYPRGLEVAELTTALAREFLQAYPTPAAVATLTERQWQRWGRAHRRSAARTQELWAVLQRPQLPVPAHVVRAKARLMQALVTELGTVVAVVGEYRQAVEDFFAAMPAAQWIRTLPIGEHGVTAPTLWARLGDAPGRWESFQHLQAQAGSVPVTVKSGKQKVVHFRFACDKALRYVVDQVAFLSLRSSEWARAYYDAQRARGHSHREALRPLGAKWLKIIFVLWERQVPYDESYHLATMARQQLRQRSKKIA

SEQ ID NO: 180156 - protein, 319 aa, unidentified
METKVVVGIDISKDSFDVALPNKEKAGYQHLKFSNTLAGFKKLCTQVPAASHCVMEASGVYYLPLAVYLHQQGMQVSVVNPLTIKRFSQMRLMRAKTDKKDAAIIADYGKLEKPVAWQPRAEHMLQMQQLQALQDNLTSQLTRLKNQQKTFKSSGIENKFAHHLLVLEINHIKKQIALLQAELVRLTQAFHQDLFTRLQTIKGIGKRAAMTLILITDGFTRFENSKQLCAYVGLSPRIFESGTSVKGKAKICKMGMSRMRKLLYLCAMRARSCNKACKEMFERLKERGKNGKLALIAIANKLLRQAFAIGKSQMSYTEN

SEQ ID NO: 180157 - protein, 350 aa, unidentified
MEYYKTTTEYNCGIDLHSRQMYVCVMDKEGNILLHMNIKGNDFSYFLKRIEPYIHDLTVVCESTFNWYWLSDACFDADIEFVLAHALYLRHIHGGKNKNDRIASEKLAHLLRVNLIPPAYVYPVKNRPMRALMRQRMKYVWARASLIGHLSMDQHAEGEVPVATGVNRDEWEQRILGQYTDPLRRLAVQSDMEVIRTYDKQVGRLEKELEQQARKSFRRDFILLKTVPGIGRILGLVLLLEIDAIKRFPTVKNFLSYSRLVKGSVASAGKVKGLTGGKMGNAYLRWAFGQIAIMAKQHDPLIKIHADRLIAKHGKFKGNAILGNKMARCVYFMLQNKTVFDLEKLICTSI

SEQ ID NO: 180158 - protein, 331 aa, unidentified
MNTLMMPAAAARFNHVIAFDVAKATLSLHILPTGESLCLENDGAAIRRLLKREQKRNRKQGLGPMLVICEATGGYEDAVLKAASELGLECHLAHGSSVRAYAKFRGRHAKSDPIDAFLIAEYGRDKPDLRLYKPPRPEESALRALMGRRAELKEMILAETSRLEHASLKAVRLSLESHLAALKEQLALIEKEIRALTRRDEAFTHKSRLMQTLAGIGAIAAQTLLAFLPELGQIPSSAAVALVGLAPYDRDSGKERGKRRIFAGRSQIRRCLYMAALAAIRSHAVFRDFAERLSRRGKPFKVAVTAVMRKLIVILSAMLRHNQPWKHAQTA

SEQ ID NO: 180159 - protein, 343 aa, unidentified
MNIASIGIDLGKTTFHLVALDDHGNIIIRKKFSRKQLLAYTANLPSSLVGIEACSGAHFIGARLRDQDHQVRLIPAQFVKPFVKSNKNDFIDAEAIAEAVSRQNMRFVPIKTDDQLDLQALHRVRDRLVHRRTAVINQIRGFLLERGITFAKGPANLRNRMPDIVEDADANLTPRMRTLLDRLWQEWKQLESGIETASNEIEQIASQDEACQRLRQIPGVGPLVSTATVAAIGNGAAFRKGREFAAWLGLVPRQYSTGGKTRLYGISKRGNTYLRRMFIHGARAVLMRVKYDTAGLGQWVHQLEARTTRNKVIVALANKLARIAWAVLFKGEAYRHAAVCAQA

SEQ ID NO: 180160 - protein, 340 aa, unidentified
MNATTYGLDVAKRVFQMYWVDGDTGEIVNHRFGRDQLIQYLSRRPPGRVALEACGSAHWWARKIKALGHDVVLMHARFIRPFVQTNKTDAADARAIWTAVQQPGMRTVAAKTEEQQAMLSLHRIRCLLVKFRTMQVNQLRGLLYEFGASFRAGRVAGLAEIRARMAELEEALPGTMMCCLLDQLRRIDELQAEIDQLERRIGAWQKQDAACSAIAAVPGIGKLTATALVATMGDAGTFKSGREFAAFLGLVPRQSGTGGKVRLGCISKRGDPYLRTLLIHGARSVLWHTKVPTAWQSAIQARRPANVAAVAVASKMARTAWAILAHGQVYQRDHVGVRPA

SEQ ID NO: 180161 - protein, 340 aa, unidentified
MKKQIFKQSVGIDISKDSFNTCFSQQEAGQPFRVLSSKKFDSNAKGFRQMHQWIQKYRCESVELHLLMEATGVYYEDLAYFLHKNNYRLTVILPNKTHAFAKSLDYKSKTDKIDAKMLAQLSLERNLRQWEPPSDTMLVLKRLCRERAELKVASGEFKNRLHAKNHSYAPHTTGTTRTKATIKHFEKQVKEIEALIRQTVAKDPEVARKVDQVCTIPGVGFITAVTVIAETNGFELFKNKAQLVSYAGLDVVHFESGSSVHAPGRISKRGNSTLRRSMFFPAITAVKHNPKMADIYNKLLERTQIKMKAYVAVQRKILVLIYTLYKNDSIFDANFISQKN

SEQ ID NO: 180162 - protein, 403 aa, unidentified
MNAVGIDVSKGKSMVTILRPFGEIVSSPFEIKHTSSDIHSLIKLIHSIEGESRVVMEHTGRYYEALAHQLSAADLFVSAVNPKLVKDFNNDSLRKIKSDKADSVKIARYALDKWQSLEPYSITDELRAQLKVMNRQFHFYVKQKTAMKNNLIGLIDQTYPNANTYFNSPTRSDGSQKWVDFVSTYWHVDCIRKMSLNAFVEHYQNWCKRKKYAFNKSKAEEIYTKTKELVPVFPKNEITKHIIRQAVDQLNSTSVTVETIRTLMNETASKLPEYSIVMQFKGIGPSLGPQLMAEVGDVTRFTHKGALTAFAGVDPGVNESGSYAQKSVPTSKRGSSNLRKTLFQVMDVLIKTMPQDDPVYQFMDRKRTQGKPYYVYMTAGANKFLRIYYGRVKEYLSVLPDPS

SEQ ID NO: 180163 - protein, 369 aa, unidentified
MKKTVKYIGLDVHKNSISIAVANQGRDAEVRYYGKIGHNMDQLTKIFRKFISQGADLRCVYEAGCCGYHLYRFLTNNGIDCTVVAPSKIPRKSGERLKTDKRDCITLARLHRAGELTPIYVPNEEDEALRDLVRARNDAQNAHKRAKQQLAALLLRYHIVFPGKSKWSKAYFNWLADISMPHPAQQITLQEYIDTVQTCSDRVARLTEQIRHFSGQSRLNGLIKALQAMRGISLIVAATLVAEIGDFSRFEHPEEIMAYLGLIPSEFSSGEKQCKGSITKSGNGHVRKSLIEAAQAYRLPARKSRAIQKRQEGLPAEICELAWKAQLRLCNRYRYLTSKGKNANIAKTAVARELAGFVWAIAMELPLAA

SEQ ID NO: 180164 - protein, 339 aa, unidentified
MFYSGIDQHKRDSFITTYGDGGAIVNQERVPNTPLRIQRYFAQFPGPHKAVVESTGSWYWLADLLQHLNVELSLAHATRLKAISAAKVKTDKVDSDILALLLRANLIPEAHMICPEQRAPRDLMRTRLRLVDKGASCKNSIERLLEKFNVRSVRELDDLYRFQADCHEAQSTLVQEQIHTLESTLHPYLLPNPHVQRLLWIPGIGKINAFTIYTEIDGIDRFPTAKQFFSYCRLVPGAANSAGRTKHRSGSKAGNRYLKIAFSHAAIRAVQYYPEIRTFFKAKARRKPIKIARTLVALEIARIVYQVLKTGNDFNQHFKNKPLSRTKQSQWPRLASPPV

SEQ ID NO: 180165 - protein, 342 aa, unidentified
MQITTIGLDIAKNVFQVHGIDAAEKVVVRKQLRRSKVIAFFEALPPCLVGMEACASAHYWARELRKLGHKVRLMPAKDVKAYVKRNKNDAADAEAICEAVRRPTMRFVQVKSAEQQGGLMLHRTRDLLMRQRTQVINALRAHLAELGIIAAQGREGLKELLAIIAEETDDSLPLDARASLMVLAAQLQAIQTLIGSIEKRIVTQHRLNQASKRLETIPGIGIIGATAITATVTDPIVFRSGRHFAAWIGLVPREDSTGGKRKLGPISKRGDRYVRRILVVGAHAVLRRAKQNPQKYPWLTELLARRPFKVVAVALANKMARIAWALLAKGGTYRVPEIAVAA

SEQ ID NO: 180166 - protein, 345 aa, unidentified
MYRTKVGVDLAKKVIQVCIYRDKKVLSNEEMTPDEFLCWLINAKPATIIFEACGTSNYWLQRAIDAGHDARLISAKLVSIVRQNQKTDKNDALAIIQAALLPDITFISGKSVEQQQLQSIQRLRELAIKQRDASRKQIIALLLELNFRSPNNGAGMIRKIEDIVEDAENGLSMEFRQAINAAKNQFELVVVTIATYDMSLEKSIQIHPDCKKLLKLEGVGPINAVNLYISLGCAELGTFNKGKNASACIGLTPIQHSTGGKVKLGTIGKKCKNSMLRSQLISGAMSVVRQVVKREAKTKKEMWLKALAERRGNKCAAVALANKTVRTAFAMLTQGTEYKAELLAA

SEQ ID NO: 180167 - protein, 338 aa, unidentified
MKLYAGIDLHSNNSVLVVLDENDKVIYSKRLPNDAQVILEVLAMYKEQIEAVAVESTYNWYWLVDALQDDGYTVRLVNTAAVVVYDGLKYSGDIADARHLAHLLRMNLLPCGYIYPKEPRALRDLARKRAQLVRQRTTQLLSIKNLLVRNCGQDIPSTTIKKWTSEHITDLPLLPEQRLAIQANCAVMHTLEQQIEVVEKELLRQLKPCKAFNLLKTMAGVGDILSMTIFLETGDISRFDSCGNFASYARMVNSKRESNGKKKGEGNRKCGNRYLCWAFMEAAHFAVGSNELIRRFYQRKCAKSLKVVAMKAVAHKLARACYNMLKDGVEFDVKRAFS

SEQ ID NO: 180168 - protein, 352 aa, unidentified
MNATTTAATIYAVDTAKNVMQVHWVDPDSGEIRRKKLTRAKFCDFFAQRQRARIAMEACGGSHHWARTLGSLGHQAELLPAAQVRAFVHGNKDDAADARAIWLAAQHGDIRRVSIKSGDQQTALSLHRARKHWVDVRTASVNMLRGLLYEFGIVLPKGREAGLKALAERRAAIDAQLPAPMVRLIDSQLQAIRDCEQHARDLEAEIAQLHQSDEVARRLRQVPGIGPLGCTALSAVLGDGSAWHNGRQFSGFLGLVPRHSGTGGKVSIGRMSKRGDPYVRNLLISGARSVLSGAHPPEWATQMRQRRPFNVVVVALAHKMARTAWALVAHQRSYAPQWVSVPPDRAVALATS

SEQ ID NO: 180169 - protein, 418 aa, unidentified
MEVVYERVAAIDVGKKIIAVAVRTPGEKAGKRRQQVRKYNTFHQTLTEMVSWLVSEGVTHVTMEATGVYWRPVFHALCAAEEPVEVLLVNARHVKNVPGRKSDALDAVWLAQLTECGLLRGSFIPPPAIAAIRELTRYRKKLIEQRTSELQRLGKVLEDSGIKIDSVASKLTTLSARAMVEALIAGERDPAVLAALARGRMRSKIPELTLACTGRFGNQHALMCTLHLEHIDHLADMIARLNTRIDEASLPFVAQTELLVTIPGIGERAAQVIISEIGVDMTRFPTAAHLASWAGLCPGNNESAGKHRSGTTRKGNKELCAILTECAWAAARTDTYLGAQFRRFHRRFGKTGGGKAAIATAHTLIVIIWHVLAETTAYRELGADYFTRRIDTPEARKRRLIRELEALGHKVTIEPDAA

SEQ ID NO: 180170 - protein, 354 aa, unidentified
MKRTTKYVALDVHQATTVASVREESGRVIARTVLPTEGGALTEFVRGMRGTRHVTFEEGTQAQWLYDLLAPLVDRVVVCDRRGEPQSGNKGDQGDADQLSEQLRRGNLRAVYHASAERATLKELTRSYTNLVEDTTRVMLRLKALFRARGLQTRGQRVYHPRERAAWLAQLGERGARLRAEVLYAELDVLRQLRPPAKAVMMAEARRDPAWAVLQTIPFLGPVRVALLLATMQTPWRFRTKRNLWAYAGLAVVTRSSAEYAILAGRPVRRQRAPLTRGLNRNHNRVLKDVFKGAATAATARPGPLQDWYQERLAGGMRAELARVTLTRKLAALTLRLWKKRERFDPTQLTRQAR

SEQ ID NO: 180171 - protein, 320 aa, unidentified
MMAQNDQIVVGIDVAKDKVDACIRMLSQRHAFPNTAQGHRKMIAWLHKHKVSKAVMEASGGYERDWARVLRRAGIEVRIVDPKRVRSFALSAGRLAKNDAIDAEMIAWFAETFSAAPSQIHDAAHEELVALVKARKHLLDLQTRLKTQNEHAAPEAIQKAHARVLKSLATEITRLEAAISAKVKATPEFADRAEIIESVPGFAETTSATLIAGMPELGTVSKRIAAALLGAAPYDDDSGKRRGERHIKGGRRWVRNAIYMPCLGAATQNNPVLKAFYQRLIAKGKEPKVALVACMRKLIIILNTMIARRQKWDPSRYALN

SEQ ID NO: 180172 - protein, 436 aa, unidentified
MTLINFVAANQKNYAFNLLSVFIMVFWSVQYLLQHLLVQTQVSHQLLQPLILILQLPQTPQFRHARPGKFFLPVNGMDYFLPLRLTVRNVLTRRITMNIVFLGIDLAKNVFQLCGLNQAGKPVYTKRTGRKELLQTLANIPACLIGIEASTGAFYWQREFEKLGHKVKVISPQYVRPFVRGQKNDGNDAQAIAVALMQPTMQFVPPKSPEQQDIQALHRARQRIVNHRTATVCQIRGLLLDRGIPIGSAVSRARRAIPLILEDAENGLSSRMRRTIAELYDLFNDLGRRIHFFDKEIETVFRQSEACPRIAKVKGIGPKTATAVVAAIGKGTEFKNGRHFAAWLGLVPRQHSSGDRQVLMNMTKKGDKHLRTLFIHGARAVVRVATNNNDGHMNQWVNQLKERRGFNKTTVAVANKNARIIWSMLRNDTGYQVVCN

SEQ ID NO: 180173 - protein, 415 aa, unidentified
MDVLYPRCAGLDVHKDTVVACLRVVSAGAAKTEVRTFDTTTPGLLALSAWLAEAGCTHVAMEATGVYWKPVWHILADGDVMLILANAAHVKNVPGRKTDVTDAVWLADLLAHGLIRASFVPEAPVQEMRALLRTRKQLVREQASHVQRIQKTLEDANLKLGSVLSQIMGVSGRAILQALIEGESDPDTLLGLVQRGVKAPPEKLRAAFQGRITERHRFLLRLHLRQIDALDAAIAEIDAEVDRDLDPFRQAVHQLRTIPGVSDLSGQVIVSEIGTDMSRFPTAGHLISWAGLCPRNDESAGKRRSTRLRKGAPWLKTTLVQCAWAASRKKASYFQAQYQRLRHRRGPKKAICAVAASILTAVYHMLRDGTFYHDLGADHFNRASPHVQANRLARKIEKLGFNCILTPSAPEAVSV

SEQ ID NO: 180174 - protein, 347 aa, unidentified
MLIIGCDFHPGFQQVAIFDNRTGEIQEKRLQHRAEAEQFYRSLAGQEVLVGMEACGHYPWFERLLAELGFELWFGDAAKVRASVVRKQKTDRRDADHLLDLLRQDRFPRIWVPSLEVRDVRQLLVHRDKQVQARTRTKNQLQAMALSSGVQKKRKLWTKAGREELEQLPLLPYAAERRKRLLEALDGLEAEIVELNRRVEEEARQRPEAVRLMTHPGVGPVTALAMVLTLGPAERFGSGKQVGSYFGLIPSEESSGGKQRLGRISKQGNSFLRFLLVEAGQTAARLDPQLKRFYRRLAVRKNRSVAKVAVARKLATRLYLMLREDWTYAQLCQAVMQVSPSHSVAGE

SEQ ID NO: 180175 - protein, 345 aa, unidentified
MYYCGIDIAMKSSYIYITDSMGRKKTSGEIPTKAGVLRQRLRPYLRGGLGVAIEAGNQTAWIYDLLVDLGAEVTVVNPTKVKLIAESRRKTDKIDAKILCELLRIDALPHPVHVPDKQTRSLRGLLVARRQLVSAWTRLCNVVRGMLRQEGIALPARSLMSFVAWERLMGRTYTHEHLPIVLDAYYQSFVSLRRSIQALDKQLAKRQRADERAARLETMPKVGRIASLTFLAAVDRVDRFETSRKVVSYSGLCPTVRSSGERTEYGSISRQGRSELRAVWVQIAHLVVRDKSRSTARLRRWYSKVASHRGKRTAIVALARKLLTIAYRILKDQTVYCSSLVSKAG

SEQ ID NO: 180176 - protein, 356 aa, unidentified
MSGLKHRRESAAMEHYAGLDVSVKETSVCVIDGAGKTIREVKVATEPAAILAVLLDDAFAVERIGLEAGPLSQWLYSGLAERGLPMICVETRHMKAALSAQLNKSDRNDARGIAHMMRVGLYRPVHVKTLTSQKRRMLLTSRQLLQAKAIDIENDLRGTLRNFGLKVGIVGTAKFEARIRELVAEEADLAAIAEPLLIARRVLREQLGVLHRRLLAIVREDEVCRRLMTVPGIGPVVALTFRATVDVPARFKNSKAVGAVFGLTPRRHQSGEIDRTGGISRCGDAMMRTMLFGAAQVMLTRTIRWSWLKAWGMKIARQRGMKRAIVAVARRMAVIMHRMWADGTEFRWTNSNAATA

SEQ ID NO: 180177 - protein, 400 aa, unidentified
MSKRYSLFCGIDIGKRKHAAAILDADGTFLARSQSFANDAAGFAQLQQRIRQVCGNKPVLLGMEATGHYWYALHDHLHRWGYDTAVLNPLQTAQRAKAAVRKCKTDKVDARHICKLLRSGEHRPALVPGELAMTCRQLARLWHALGRQQARIKQLIQAKLECAWPEYETYFANAFCATSRKLLAAAPTPQDLLKMTPAALAELLEKASRKKLGTDLAARIRASAQESVGMRRGLEGTRLAVRTLLNQLDALRPVRKQLQADIQSLSSRLPGYILTLPGIDAIRAVSLFGETDPISAFKSPDQLVAFAGLDVSVFQTGQYNAPVRHISKRGSPHLRRTLWMMAAIAARREGELRNYYLRRRREGLHYLSAVTATAIKLCRVVWRILTDKRDYIPEGRPTQS

SEQ ID NO: 180178 - protein, 395 aa, unidentified
MKKQAKVTQIGLDVHRKFSIAAGRDASHKVLWRERLDHVDRNALSKQLSRWPGQTPVILEGTFGWGWMSDELSAAGLDPHLASSRKVAGWRDTRGLAKSNKIDADLLSELWDQKPRWWEVWLAPQDVRDRRELLRHRMSLVRMQTGVKNRIHALLHRHGIVNEFSDLFGVAGRRFLSLLVSDQQRLRETARRVLKDQLIVLDALRRSIARATRQFRATVRQCEPAKRLMSLPGVSTVLAYTMVAEIGRIERFRDARHLLSYSLLAPRADDSGEEREGKAIGRKIGHAGRTTLQWAWIEAAHGAVRKDQRLAAIFNRRTENGQKDRGRGYITVANAMCKIGHAMWKKQTDYQEAPPRRPGDSRSDSTSDDSRSDKSADLSRPGTGQPCHPMAACVG

SEQ ID NO: 180179 - protein, 422 aa, unidentified
MLAESQDEEQIIARVAALDIGKAELVCCVRVPAEGSSGKRLQEVSTHSTMTRSLTELANHLVELGVERVVMEATSDYWKPVFYLLEAHGLGPWLVNARDVKHLPGRPKTDVLDAVWLCKVAERQMLRPSFVPPWPIRRLRDLTRYRIDLVGVRTAEKNRVEKLLEDSCIKLSVVASDIFGVSGRAMMAALIAGERDPKVLAQLARSRMRTKIGRLEEAFNGHFDDHHRFLLARMLNRIDGIDVDIAAVDAQIEAHLAPFVAAAARLDEIPGIGPVAAAIIIAEIGVDMSRFPTAGHLCSWAKFSPGINSSAGKIKGNGSTGHGDRYLARVLGEAAVVTGRTDTFLGERYRRIARRRGKKRAIVAIGRSILVIIWHLLADDDARFTDLGADHFGRHTDPDAKKRTHIRQLETLGYTVTLTPAA

SEQ ID NO: 180180 - protein, 308 aa, unidentified
MPATTYGLDVAKRVFQMYWVDGDTGEIVSRRFGRNDLIQYLSRRPPGRVALEACGSAHWWARKIKSLGHEVVLLHAKFIRPFVQTNKTDAADARAIWTAVQQPGMRTVAAKTEEQQAMLSLHRIRSLLVKFRTMQVNQLRGLLYEFGASFRAGRVAGLTEIRSRMVELEEALPGTLMCGLQDQLKRIEGLQAEIDQLEHRIGAWQKQDAACRAISEVPGIGRLTATALVATMGDAATFRSGREFAAFLGLVPRQSGTGGRVRLGSISKRGDPYLRISRHRGQPFHGIADSVSRQGGHRFTLIADSVSA

SEQ ID NO: 180181 - protein, 350 aa, unidentified
MTLYVALDVSLEKTAVCVMDAEGTPIVERVVTSDAAALAELLGTLPERPERIGLEAGPLSEWLVRGLADAGYEAVLMETRQVRAALSSMTVKSDRNDARGMAHLLRMGWFRPVHVKSMDAREQRVLLSARTTLVRRLRDIENSVRGLLRGFGFRFPRVLRARWAQSVREVLTGNAMLLAVIDPLLAAGAALRDQLAVLEKRVRDVARQDPVCHRLMTMPGVGAVVALTFRAAVDRPERFSSSKPIGPCFGLTPRRYQSGETDRTGTISRAGDPTVRVALFEAAHVLMTRVAKWSKLRAWAVAVAKRRGSKRAKVALARKIGVVLHRMWIDGTDFRFTDKNQRADPMIATA

SEQ ID NO: 180182 - protein, 317 aa, unidentified
MTYTSRFIGIDISKSSFDICVLPDMHSASFSNDAGGIARFIAFLAQLDGIERLVVEPTGGYERSVVHTLLAARLPVAKVNARQIRQFARACGQLSKTDRIDAFVLADYARRMETKDLAPSSPAQVVLIDLVSRYRQLSHMIVQEKNRLEKLGARADATARAWIEETLSFLLQQRQSVVDAMEACLQSDEDLAVKAKVLMSLKGIGLRTACLLIAGLPELGLLNKGQIAKLVGVAPINRDSGLMRGKRMIAGGRKPVRDALYIAALPAIRFDPAMKAVFERLKAKGKPGKVALVAVMRRIIIILNAKMRDYRATVIDA

SEQ ID NO: 180183 - protein, 343 aa, unidentified
MNRRVKRGSDDSHRMFVGLDLHKNYLRTAVMDEQGRLLSQERIPNRDENIEEFASKRLRDSHTEIVIESSSTWYHVYELLSKNQNCHVVLSNPVKTKAIASAKVKTDKVDALTLANLLRTGYIPESYIPPRHIMDLREMVRYRTSLVRMRVEAKNKIHAILLQNGTRIKEKPFTIAFVEELRRLGDYRIDGYLNIIQSLSQQILTVSSTIKREAREDESTRLLMTIPGVGYFSALLILSEIGDINRFPDSHHLCSYAGLTPSTHSSGGVTYHGSITRTGSRYLRWILTECAKAHIRTRRDSQLTRFYTRLAKRRGGSKATVAAASKLLRIVYWVLKEKRPYHG

SEQ ID NO: 180184 - protein, 445 aa, unidentified
MSGLLQKALPIETLVVAIDPGKISNRVWLASGDRGLVAEPVSLPTLYAGVDELERLVERSGVPGQPVIAIEATGSLHRAWTAELERRFPGCVRLLAPSETQAARTQLGARRFKTDDRDCAALVWLARQGLGRRPDEPALEALLGSVRHRRALVSELKVLRQRLHDQLNVLCPGLSAPARHGRALDLLRPSGRAVLSCAVAFGGRAPSARSLLARAPGRLTRAMAEYWAARWRACLPPPADAELRVERLRFDLKRLELLGAALAATDAQSERLLAGTEGQVLTTLPGVKVVRAAAFACHSLPIERFPSAERLYSATGLAPASYQSASVTRRGRISRQGLADHRDALMAIAWGLSQHSPAFRRRAREYAARGFAPIQARVALARHACRLCHALLRTQQPYDEERYCQARSGGDGEQRYAARRRNLACRPPALAASDGDHESLPHDGA

SEQ ID NO: 180185 - protein, 318 aa, unidentified
MTKIVIGVDIAKKKFDVASFNDSKYKHKTFTNDEPGYADFIIWIIHLFANNKPLICMEATGAYSIPLADFMVSQGYPVSVVNPAKINAFAKSELSRAKTDKADAKLIARYASIIQPPLWIPPPHNIRMLQALVRRVEHLLEMIQMERNRLETSDITIVDSINTVLTTLENELEATRKAIREHINNDSELKRRRDLLITIPGIADASIAHLLVVLSEHHGFINAKQVVAFAGLAPALRQSGQWSGNTHIAKSGDSALRKALYMPALSAWQFNPAIREFCKRLKANGKNGKAIVCAAMRKLIHLSFAILKSGQPFDPNFA

SEQ ID NO: 180186 - protein, 407 aa, unidentified
MEVVYRCCCGIDVHKKMIVACLIKGGKRELREFGTTTGEIRDLADWLDKSGCEMIAMESTGVYWKPLYNMFEITGLEAIIVNAAHMKALPGRKTDIKDAEWIADLLRHGLLKASYIVDREKRELREASRYRKSLIEERSRELNRLQKILEGANIKLASVVGDINGKSARNLIGKIIADKVPDDADEVAELLYGKTRQKLDEIMLAIDGIVTPMQRRMLANVVDHIDDMTRRIDNMDTLIEEYTKQYERAINLLEEIPGIARRSAEVILAEIGIDMSRFPTHSHLCSWAGVCPGNRQSAGKRGSGKSNKGNRTLKTTLVQCARSACRGKDSYFSAQYHRIAAHRGDKRAVLAVAHSMLIAIYHMLSDGTVYKDLGADYYDNFNRDHKIRGYLKRLKSLGWTPENALLA

SEQ ID NO: 180187 - protein, 383 aa, unidentified
MMQTMTRGNESSAATGYLLVAFELSQRWWKVGFTTGMGHRVRTRRIAAGALESVAGAIADAKKMFGLAADARVISCYEAGREGFWLHRYLTGRGATNHVVDSASIEVDRRARRTKTDAVDLRGLLALLARYVVGDRRCWRVVRVPSVADEDARQLHRTWETLQGDRTRVINRLKAVLATHGVRLAITADFLEHVAATRIWDGSEIPSGARERLAHDWAQLQSIEEQLAAVKAARARLRIDPATATGRAVQALQGVRAIGAGGAWVLATEVFGWREIRNGRQLGALVGLVPALYQSGATQRDRGITRAGNAHVRRLMVQLAWGWLRWQSDSALAQWYRRRFATGGSRQRRIGIVALARKLLIALWRYVDQAIVPEGARLKVTVA

SEQ ID NO: 180188 - protein, 425 aa, unidentified
MKSNLIKSQNQRVERISTSTLVIGIDIAKEKHAAQAINFRGIVLTKRPILFSNDLAGFEHLEQSIRKLQKMHGMNDVVVGMESTGHYWFNIANWLVGQGIDVALVNPMTTKRNKENRDNSPSKSDPKDALVIADAVSRGFYTPFAPKDEAFRRIRVMVTNREHWVVKSVRIKNRIHRWLDIRFPEYRQAFDDIFSDRSLATLRRFPAPSDILQLTSEQMVQIWSEYMTRPGGERGKNKALELQSLARHSVGDTSALEEDKWELRHLIEEYERIRRIIDEADQMIEKALPEIPCSDLIRSVGASVPATAAILAFGGDLRKLSHGKQLLRKAGLNLAERSSGKYKGQIKLTKRGNSLLRKHLYFTVFHLLSFNGAFQAMHVHNTEVKRMTKMQSMMKLIGKLARILVALAREGQAFSPDKAQPPLAA

SEQ ID NO: 180189 - protein, 387 aa, unidentified
MIYLGIDVAKTSHVATAITSDGEVVLKPFLFANSCSGFAKLKSRLDEFPCDSMLIGLESTAHYGENLIAYLVQNAYHVALLNPLQTAALRKSAIRKTKTDKADSFLIAKSMMVDGYRLLEPNDIHLLKLRGLCKTRQNLILLRTRCKIRLGAFVDQLFPELNDFFRAGLHINVSYTLLKLHPRPSEVQSLHLTYLSNLLQKASRGKYTKADAVHLRELARQSIGTDHPSLALQINQTIAQIELFSEQLNQVEHEISGIMDNLNSPIMTIPGIGHINGAMILSVIGDVTRFSSPAKLLAFAGLDPSVIQSGNFTARSTRMSKRGNSMLRYALINAAHNVVRNNHTFAQYYASKVAQGKSHYCALGHTAHKLVRVLFTLLTKDIRFDLP

SEQ ID NO: 180190 - protein, 378 aa, unidentified
MTTSSTQTCYVALELSRTKWLVGALLPGRPKVVTMLVAGGDTAALLDVLTRLTARATRESGAAVSLKVCYEAGYDGFWLARFLINHGIETHVLDPASFLVSRRGRRAKTDRIDVEAMVLTLKAYLLGDRSVCRGVAIPSPEQEDAKRLSRERTQLAAEKTRHTNRIRGLLALHGIREVKGLWGGPWAQALAELRTGDGRELGGYLRAELTREFERLHLVLQHLRALDEDRRAALTEEASAFPQRQKAGVLIQLAGIGPVTATALVAEVFHRRFQSRRHLASYLGLAPTPYASGGSERDQGISKAGNQPARSLLVELAWGWLRHQPGSRLAAWYRQTFAERGQRGRKVGIVALARKLAIALWRYVESGMVPEGAVLRAR

SEQ ID NO: 180191 - protein, 338 aa, unidentified
MGSYVGIDLHRHRSVVVVLNEDGDRVWWSRIDNTPANLACEITAAGPDAEVAMEATWGWYWAADVIAECGVRLHLAHPLGIAGYANRRVKNDVADATLLADLLRMGRLPEAWVAPPAVRELREEVRYRAKLCRLRSGLKAQVHQVLGKEGVIPETKGIWWSGGQRWLDELQLTDVYTNRIESLRDLIELYDREIVQSDTRIHRRLKGDPGYEAIQQIAGVGRVLAAVFVAEIGDVHRFPDARRLCSWAGLTPRLRESDAHTRRGHITKQGSRLLRWAAIEAVSGAARDPRANAVKVRVGQRRGHNIGRVAAARHLLTLVYYGLRDGHIRCLAATADAA

SEQ ID NO: 180192 - protein, 412 aa, unidentified
MSHGHVMWASREAAFRSTDDWKDTTMPSAISPPKAVLGIDVGKSSHWACLVTREGEVALNRRVRNSEGDLDGLFSQVACDTIVVVDQCRNIGLLAISRARLAGLGVAYLPGLAAHQAARLFAGDAKTDERDALVIAKTALGIPDALLPVPEPDEALEAARSLAAQRSHMVTCATRDKNRLRSILLESCPAFEALADLGDRHWLNMLEKLGGPWGCIDAGKPAFGAVTKGANRARMDAAWNAAMASTRPSKRRVDAENPQVRMLARRIREALEEADRIDREITALLAGDGTYECLVTIPGIGPRTASELVIGINIEDFPDHDHLASYCGIAPRNRQSGTSISSVSASRQGNRRLKNLLIFSCNSLVRSENRFGEYYRACRGRGMCHGEALKAVARKRLKVIYAIMRDKVPYSA

SEQ ID NO: 180193 - protein, 325 aa, unidentified
MENIIIGIDISSKTLDLCVKQQQQVTHFKIDNLQKSILKFFKKFKNKQVTVAMENTGRYNWNLYEVLQKFNFRVYVINPLHLSKSLGLVRGKDDKTDAHRICLFTQKNKEDLSLWKPTSKAIKKLKVLITERTSRVKMKRRLLKQQHDYKLMKDIGLDKELTKLNKQFIRQIDKQIEKIEQKIEEIINDDPVLKQQAKLMRTVPGVGKVLTWLMIAKTEGFTKITDPRKMACYAGVVPFEHQSGTSIYRKPKVSFFADKSVKSVLHLGAMSAIRLNNDLRVYYQRKVNEGKNKMVVLNAVRNKIIHRIFAVIKNQEVYKNPLVLS

SEQ ID NO: 180194 - protein, 341 aa, unidentified
MDYFAAMDVSLEQSSVCVADGAGKIIREAKVASEPEALVAWFAESGLKFTRIGLEAGPLSRWLHAGLTAAGFAAILIETRHLRAALGAMKVKTDRNDARGMAQLIRMGWFRPVHVKTVPAQEIRALLTGRKLLQIKLRDIELGIRGLLRGFGLKVGKVSEGKYDARIRELATGHPMLEPVAAAMLQARASLRAEYAKLHRMLLRIVRADAVCRRFMTAPGIGAVVAVSYRTAVDDPTRFHKSRDLGPYFGLTPSKYQSGEVDRTGRITKVGDVMVRTALFEAAHVILTRVTRFSTLKAWALRIAKQRGFKRAKVALARKLAVVLHRMWVDGTDFRWRKAAA

SEQ ID NO: 180195 - protein, 336 aa, unidentified
MNGSTGRWVGIDVAKSKLDVALLDERGKVKSHVFANDAKGHAALIAWLHQRGGSPELVRVCMEATGCYSEAVAIALVDAGWSVSVVNPARIKGFAQGELMRNKTDQADAALLARFGLALQPEPWVAPPLELRQLRALVDRLQSLKEMHQQEANRLEAAMNQAGMRESIEGHMQWLQDSIRKLERQINDHIDGHPGLREDAKLITSIPGVGNATAAKVMAYLGDVRRFRNAKALAAFIGVTPRLKLSGSSVRGRSMISRSGHAAIRHSLYMPALVALKHNPIIKTFGARLKATGLAPKAVVAASMHKLVHLIYGILKSGTPFNPNFMAARLDIQDGI

SEQ ID NO: 180196 - protein, 354 aa, unidentified
MTSTKYIGMDVHKESISIAVMNAAGKTVMECVIETKASTILQCIDGLRGDLHVTFEEGTSATWLYDLLKPHVSELIVCDPRKNASMREDDQNDKIDARRLAELLRIDHLSPVYHGEHGLRTLKELVRSYLTVTKDLARVKTRVKAIFRSWAIPCNGKEVYAARHRAEWLEKIKEPGVRRRAEFYYQQLDALRVLRQGVRRELVAESKKQKAWKRLCQIPAIGPIRAAVLLGILQTPHRFRAKRPLWKYSGLAIETCSSADHRSINGQLQRSKKNSVRGLNHNCNHDLKNLFKGAAVVASSKPGPFQEFYTALVAKGMRPEMARLTLARKIATIVLIVWKKGVCFDANHLKPQTA

SEQ ID NO: 180197 - protein, 441 aa, unidentified
MFEPNAAGIDIGAREIYVAVPVDRDEHPVRKCGTFTGDLHQMAEWLVRCRVTTAAMESTGVYWIPVYDVLEQHGIQVCLVNPRNMKNVPGKRTDFHECQWIQHLHAMGLLHAAFRPDGEVCAVRSLMRHRNDLVMMAGEHIQQMQKALTQMNVQFQHVISDLTGLTGLAILDAILAGERDPAVLAKLRDPRIKAPEETIRKSLEGNWQAEHLLALKQRLSLYRSHRELIHACDQEIEKLVAAFEPRVNPAERPLPEDRKQKQRRRRKKSGSPDFNMRTEAYKLFGVDLTQIPGLMLLVFMLFSEVGRDMSRWPTAAHFVSWLGLCPDNDISGGRVLWRGARRTKNRAGTLFRLAAHSLHRDQTPMGDYLRRMKAKLGPAAATTATAHKIAIIFYTMVKNQVEYDASLWAKRDAMREKRIEARLQKQAAQRGYKLVPIQPAA

SEQ ID NO: 180198 - protein, 475 aa, unidentified
MNVNGKRKKNQVVTANIFEQQELLKKAEVIRANLTASTWRELETNGKFDKNEKLSFISDDMLILGCDVGSETHYLRAIDTRGRELSKSAFPFSNDSEGFQSAKEWAVTIAAENNKNQIVLGLEPTGHYWFCLATWMISNGISVVQVNPYAVKQTKEVEDNSQLKDDAKDPKLIANLVKDGNFGMPYLPEKLYAELRRLSMFRDQLNEDRIRSINRMHREMKIYFPEYKDALGKVDGTFSLELLKQAPFPEDLTALGEDGIRQIWHDAKLRGRGYSRAGEILQYAKVSVGIKDGAAAGKTAVQWFVRKIMELDAELAVIEEQINQKCQEIPHTGNILEISGIGENTLSGILAEMGDISRFDDVKEIQKLSGLGLVACSSGKHKGETKISHRGRKRLRYWLFQAAKSAVAHAEEFKELHVYYTTRADNPLKKMQSLIVIACKLLRIIYTILKKGTVYDPKKMLLDIRRPEKKEAIAA

SEQ ID NO: 180199 - protein, 310 aa, unidentified
MDSIVVGIDVSKDRLDVAVRPSNESFSVGRNAAGLEQLIARLRELSPRVVALEATGGFETVVAAALSAAGLPVAIVNPAQIRAFAKAIGQRAKTDPIDAGVIAHFAEATNLEPRPLPDEQTRLLADLVGRRRQIIEMIGAERQREQRLSAPRLKKSIARLVKALEKELASLDTDIGDAVRGSPAWRAKEELLVSVPGVGPVISRTLIAELPELGQLGGKEIAALVGLAPFTRQSGKWRGKSFIGGGRTAVRAVLFMGALVAKQHNPILKAFFDRLIAAGKPKMVALIAVARKLLTILNAILRDNRPWQTA

SEQ ID NO: 180200 - protein, 315 aa, unidentified
MKESVEKSVVYYVGIDVAKARLDVATSQLNAVFTRNLTGLDRLVQWLHQLGGPVHVVLEASGGYEREVVAALQGRDFAVSVVNAGWVRNFARSQGRLAKTDRIDARVLVDFSAANAPRLSVPVCPEQQKLTDLVRARQQLVAVRTLLQNQLEHTRERLARRSQEELVELTDTRIRRLEKALAQLIADTPALAAKVQKLTAVRGIGPTTAALLLAELPELGTLNKAEAAALAGLAPRNHDSGTFRGQRHIAGGRPAVRTGLWMPTLVATQHNPILKAFYQRLRAKGKPAKVALVATARKLLIHLNGLLKTPPLPSC

SEQ ID NO: 180201 - protein, 346 aa, unidentified
MKFYTGQHKYYCGVDLHARTMFLCVLDERGYPLLERNIKTEPELFLKSIAPYREDLVVAVECMFTWYWLSDLCSREKIPFILGHALYMKAIHGGKAKNDRIDANKIAVLLRGGMFPVAYVYPPKMRSTRDLLRRRMFLNRKRSALITHIKCTFAQYNLPEPEQNVSRVSQREGVAEQIPDPGASRNVQLDLDLLAFYDQTLTKLEQELTVIAKDHDPDSYFRLRTVPGIGKILSLVILYEIHDINRFPSVQDFASYCRLVKPAKESGGKRLGSGGAKIGNVHLKWAFSEAAVLFLRKNEPAKIYRARLVKRHGMAKSLTILAHKIARAVFFILKRRTVFEAETFFA

SEQ ID NO: 180202 - protein, 397 aa, unidentified
MIAVGIDISKAKSTVAVIDSDGTVLASPFTMAHTQPEMEAFVTYLKGLGEPTTILMEYTGHYHYPVLKKLQDEGFPVCIVNPYQMKKYGDVEIHKAKTDKKDALRIAAYALEKSYKLVPYSSMEQKYEDLKFLSRQYSQRITYVAKLKVQLIALLDQTMPGITRILPLNSRNPEKCALLLFIKRFKSFDEIQRIGKARFLASYDVLAKKASERSASSKGLSIYELAVDSITTRGENPYIWLSQNQCVDLLSATQNAADEIISQMRNIAETIPEYKVLRAMHGVGDRLGPIILAEIGDVHRFHSGKALNSYAGNDAPPYQSGQFESRNRHISKRGSSALRKACYEVMQALKLTKPQDDPVYLFMLKKEQEGKPFNVAKMAGVNKFLRIYYARAMELYK

SEQ ID NO: 180203 - protein, 369 aa, unidentified
MKQLITYIGLDVHKETIAVALAEAGKRNEVREYGKIANTPAAVKALVAKLARNGHELRFCYEAGPCGYGIQRQLTASKHDCIVVAPSLIPRRPGERIKTDRRDAINLAKLHRAGELTPVWVPDEAHEAIRDLVRARLAAVRTLRQARQQLSSFLLRHGHHYNRPAWTLMHRRWLAGLRFEHAVHHVVLEDCIAAVEAATARRDRLEAHIAGALPDWSLAMVVHALQALRGMALVAAATLVAELGDITRFANPRQLMGYLGLVPSEHSSGGTRRQGGITKAGNGAARRMLIEAAWSYRFPARISREQLLRQEGLAKPIRDTAWKAQERLCRRYRKLARAGKPPTVVTAAIARELAGFVWAIARQAQPTDA

SEQ ID NO: 180204 - protein, 392 aa, unidentified
MRISVGIDIAKEMHWVTAIDSNGAVLIDHKLANTASEIAELIEELARLGRAMRVGLDVLGGIADLAEAMLAAAGFTLVHVPGMAVNRARQGTVGGENKSDPRDARTIADQVRTRSDLRQIEPATELDLEVRLLVGRRRDIVQAQTQRLSRMRDRLVGIFPGLEACLDLKTKGPLHLLIKFVTSAELRAAGKKRLVRHLQAAGGLPKVEDLTNRVLTVAAEQTIAAPAERMAARLIRELAVEALASRTRLIELDRELEAMLRRHPDAALIRSLPGMGAVLTAELIAEAGNISPFRSADALASAAGMAPILRQSGRTRLLRRPSGGNKGLKRVFYQSAFCSLNHPDSRAFHNRKRREGKRHLRAIIALARRRVDVLWAIVRNRTPFQTGFKIAA

SEQ ID NO: 180205 - protein, 420 aa, unidentified
MERMVERCAGLDVHQATVVACVLINERGRRPRKELRTFGTMTHELEALRDWLVAERVTHVAMESTGVYWRPIHAVLEEHFTVIVGNARHIRNVPGRKTDVKDAEWIAELVCCGLIRPSFVPAKPLRELRELLRYRRKLTEAQAAERNRLQKQLEIANIKLGSVATDVFGASGRAILRALIEGASSPVEMAGLARGRLRRKRDELAHALKGRLDDTQRFLLSMQLRRVEDIEILIKELDQHITGKLGPYQTELALLMQIPGVDWVVAAALIAEIGVDMSVFVSVHHLAAWAGLCPGSHESAGKRKNTTARKGNVHLRTMLVGAARPAARTKGSYFKDKYYRLKARRGSMRAALAIAHKILVAAYHMLARRVDYRELGEAYLDRIDQTRTAINLKRRLERLGYVVSILPQTTPSDAQATRPA

SEQ ID NO: 180206 - protein, 355 aa, unidentified
MTSTKYIGLDVHKESISIAVLNFAGKVVMECVIETKASTLLQFIHGLRGDLHVTFEEGTWAGWLYDLLKPHVTELVVCNPRKIALLKDGSKSDRIDAHKLADLLYMNKIKPVYHGEHGLRMLKELSRSYLTITKDLGRVMNRLKALYRSWAIPCAGTQVYAPRFRSEWLSKITEAGVRRRAELYYQQLDALRLVRQQARKELLAEARKRRATKLLRQIPGIGPLRAAHLVALMQTPHRFRTKRQLWTYSGLGLETHDSAQYRVVEQQLQRSKKPVTLRGLNTNHNHDLKDIFKGAAMRASTAAGPLHDFYEALLAKGRKLTMARLTLARKIAAITLIVWKKEVRFDANYLKQQAA

SEQ ID NO: 180207 - protein, 355 aa, unidentified
MTSVKYIGMDVHTESTSIAVRNSLGKIVMECVIETKASTILQFIDGLRGDLRVVFEEGTWATWLYDLLKSRVTEVLVCNTRKNAVRKGSKSDRIDARKLAEQLYMNNVKSVYHGEHGLRMMKELARSYLTITKDLVRVMNRLKALYRSWGIPCAGTEVYALRYRAEWLAKISEAGVRRRAEHYYQQLDALWPLRQEARRDLLVESRKHKIWKLLRRIPAIGPIRAAILIAVMQTPHRFRTKRHLWTYSGLGLETYDSAEYRSVRGQLERSRKQATVRGLNKDYNHDLKDIFKGAAMRASTAAGPLRDFYDNLLAKGRKPTMARLTLARKIAAITLIVWKKEVSFDANYLKPQQAA

SEQ ID NO: 180208 - protein, 329 aa, unidentified
MVFLGIDIAKASMDCAILAGPGGKPLGRRSFPNSAEGVDRAVRWAARVSGAEVAETHVVVEATAAYHELAAHRLAAAGMRVSIVNPARVRSFARALGILGKTDRIDAQLLARYGQLVGPKLWSPPAKALLDLRSLIARLDDLEADSRREENRLEQARTRGCPELVQRSLLASITALEAQAGDLRRGIAAHVAADAALQADLERLMTIPAVGPKTATRMLLMLRSRSFDTARQAAAFLGLVPVERTSGTSVRGRPTLSRAGNPRLRAALYMAAVVGIRKNPDLRAQYGRLLARGKCKMAALGAAMRKLVHLCFGVLKSEGGYRPAAAIKA

SEQ ID NO: 180209 - protein, 366 aa, unidentified
MKKVSTVRVNGNMIFKGHKLTIGLDLGDRWSCYCVLDEAGEILLEQKVATTPEAMKQTFSKIPQGLIALETGTHSPWVSRLLTELGHKVIVAHAQKVQLITKSNRKDDRHDARTLARLARIDPELLGPVRHRSAQAQIHLTVIRARAELVSARTALVNAARGLVKSYGQRLPKCGTQQVNRELAAGLHAELREVLEPLLQEIESLNERIQEYEVRMEKIAKESYPQVELLKQVKGVGTQIALTYILTLEDPHRFPKSREVGCFLGLRPGRRDSGESQPEMHISKEGDPYLRTMLVQGAHYILGPFGADSDLRRWGLKLAARGGKSAKKRAVVAVARKLAILLHRLWVSGEVYEPLRNSDKALRAVA

SEQ ID NO: 180210 - protein, 357 aa, unidentified
MNRHKYVGMDVDQSTCVIEIQDKAGNFVMETYLPTRASELRAFFKGLDGRIHVAFEEGTQAAWLYELIEPLVEDVVVCDRRGEKVRGNKGDRLDARMLARQLRQGELRRVYQGERGHRELKELIRGYDYLVEDVVRTKSRLKAAFRSRGLKCSGRAVYRKGDREDWLKKIDVDALRARVSSLYEQLDCLMRLHKEAKDAMITGAKKHPSYKLLVKQPGLGPVRSAQILGIVGTPHRFRTKRQFWPYCGLAVVVHESSEYEIVDGQRRRRKRPLRTRGLNKNFNRTLKMVFKGAARTVIAREPFKQYYQRLIDKQIRPEMAKLTVARKISAITLSILKSGEEFDPNRVNQAVSDSGDQ

SEQ ID NO: 180211 - protein, 360 aa, unidentified
MGKRLSKKESWFKENILTAQDEIYVGIDVHKDQYHVAIWHSGRIGCIYSMSSDNNKLLQDLHRIRNCLKNVVYEAGPTGYGLVRLLRSAGLPAKVVATSKTPRSADSSAKTDRLDCQQLAEYAAKGLLTFVAIPTEQQEADRQVVRLRDQLISKRKRVMQQIKGFLLQHSIAWPGRCWGKAVVGKLRAMDLASELRFTLDQYLDEYEFLSVKIAQTNSRLRRIFGSKRHSAAIKIFKSHPGVGNIVAWQFRAEMFDITRFKQPKQISKYIGLCPKISQSGKTCRQGPITKTGRRQLRAILVQAAWAWYRKDPHARQIYNRLLHNTGNGKKAIVGLAKRIAIHLWRMRCDGCLYDAGVVKT

SEQ ID NO: 180212 - protein, 446 aa, unidentified
MRIVYKRCCGMDVHKNSVTACVLRIDEDGEFEKQTRYFSTMTRDLKEMSGWLASLGVEATAMEATGVYWKPVWNILETEKKLQLLLVNAHHVKHVPGRKTDQKDSEWIAELLQHGLLKGSFVPPQIIRRLRDLTRTRAKIAQNVATFANRIQKVLEDANVKLGSVATDPLGLSGRRMLRALIEGQRDPQQLSQLACGRLRKKISQLQLALEGHFTKHHGFQLKAMLELVEFGEKQLCQLEAEIHRLLLLPEPEPHRSHGSAIAEVDTEVDTSSTPPTSPLQRAVELLDTIPGVDHITAWTLIAEMGANMDQFGSASRLAKWAGICPGNKDSAGKRLSGKTAKGNIWLRRALCEAAWAASRTKDTYLAAQYKHLILRKGKKKTIVAVGHSILRIAYYLLTRQCPYAELGGDFFDRSNQEAVRSRLVKKLVRMGYQVTLTPISSGAEA

SEQ ID NO: 180213 - protein, 391 aa, unidentified
MSMYFVGIDISKYKHDCCIISAADQQIVSKFTVKNDKDGFEHLLTTLNSLSNPEDIKIGFESTAHYALNLELFLENAHHSFMEVNPVLIKEYKKSTILRRTKTDSVDCESIARWLMTVEYKPHSKGFYHSYSLKSLTRLRDRLIRQRSFYLVKITNVLDHTFPEFKPFFNERLSKTAIYLLENYGSAEKMAHMNSASYDKLRCASRGKFSIQQFLRLKELAANTVGVNNSIFDIELNSLLTLYNSLCKEIKTLEAEITKLIEEVHPHYMSIPGIGPISAAVIYAEYGDISNFSNPGQMLAFAGIEPGINDSGTESHGGRMVKHGSSQLRYVLLNACLPLIRFDITFATYYAKKRAEGKKHRVAITHVAKKLIRVIYALERQDVDFNVQKLR

SEQ ID NO: 180214 - protein, 408 aa, unidentified
MEVLHPRCAGLDVHKDSVVAAVRCVSPPTHHEVRSFATTTQGLLALVDWLTSHRCTHVAMEATGVYWKPVWHVLEGHVELVLANAQHIRNVPGRKTDVADAAWIADLLAHGLIRSSFVPPAAIQELRDLTRTRKQLVREISQHSLRIQKVLEDANLKLGSVLSDVLGQSGRAMLAAIIAGEEDPERLAALALGTARRKQAALVEALRGRITPHHRAMLQLHLGLVDALDAALAEIDGRVGKALEPIRASARLLTTMPGVSDLVANVIVAEIGIDMSRFPTSGHLISWAGLCPRNDESAGKRRSTRVRKGAPWLKTTLVTSAWAGVRVKDSYLHAQFLRIKARRGAKKAILAVAASMLTAAYFMLRDGVEYKDLGVDHFDRRDRSKVIHRLVRRLRDLGCQVAITPEAA

SEQ ID NO: 180215 - protein, 335 aa, unidentified
MNYVGLDVHCRTSSICILNRNGRKIKQQTIRGGWSKLLEQLQDAPRPFAICFEATCGYGHLYDRLTKLARRVVMAHPGKLRLIFRSARKNDRVDAEKLAKLLYLDEVPAAHVPAIDVRQWRELIEFRRRRVDRQTACKNQLRCLVRSYGLKAPRGLWTRKGRTWLAEQQWPTLSSQVRCEMLLDDYGINATRIRKVTRLLDQIGQKHPGVSLLRTIPGVGARSAETVMAYIDDPQRFARSNQAACYFGLVPRQDASGGMNRLGHITKQGPPTARKYLVEAAWQAVRRSPTVRARYERILDGQRRRRKIALVAVARWLVRCMQAMLRTGEAWHEAA

SEQ ID NO: 180216 - protein, 451 aa, unidentified
MSPKPEVPAEALGLVHPHAAGLDIGAAEIWAAVPPECDQPSVRAFGTFTPDLQALAAWLAACGVTSVAMESTGIYWIPIFELLEARGLEVYLVNARHIKNVPGRKSDVADCQWIQRLHSYGLLSASFRPEAEMVVLRAYLRQRTMLIEHRAAHIQHMQKALHLMNLQLTQVLSDVTGVSGMAIIRAIVGGERRPAKLAALRNARCQRSEAEIVKALTGSYRPEHLFALKQALTLYDAYSTQLAECDREIESHYAAIKPRFDPDDPDTPLGPDPKTNTHSKNAPDFDVRRQLFQLVGVDLTEVHGLHVSSVQQLLAEIGTDMRKFPTVKHFCSWLGLAPHNDITGGKVKRSRTIKNHNRAGQVLRLAAQSVGRGQSALGAYYRAMKGRIGVAQATVATAHKLARIIYFMLRDRQPYQPISPEEYHQRQHTRQIAALKRKAAKLGFTLQPQAV

SEQ ID NO: 180217 - protein, 404 aa, unidentified
MEGPVITVDVSKGNCHYQPFIENGHPMRKPKVLDDTIDGFSRISRLIEDLEKKTGAKELPVVFEATGVYHRPLQKYLQDNGIPYYIISPLLSATYRKTTLNGNKTDSLDCTHIAKAYYSEKLCPYYEQSPEYLRLMRLNRYYEGELVYLRKRKVALRSYLDIIYPRIDKKFSGNQNIYDPLPMEVFKQYPHPSLLLKHREDVIVKRICKPSGHKPGYAEKIVHKIYEAAKECYSGCGPYDIEVIELPEMIKKMQEQEQLCQSILSDITALAKAVPYYACLTSIPGIGDNLASRIIAELGDIDRFHNRSALVAYAGLNPKILQSGDIDGIHLKISKKGNKHLRCLLYLAASCNYRAKKYDPVYEFNKKKRQQFGSHKSKAATVATAHKLLAVIYAMCKNGTLYSF

SEQ ID NO: 180218 - protein, 347 aa, unidentified
MRFYNGQHRHYCGIDLHVKTMYVCILDAAGQVLLHRNVKASPEAFLEAIAPYREDLVVAAECMFTWYWLADLCAAEGLAFMLGHALAMKAIHGGKTKNDKLDSHKIAVLLRGGMLPQSYVYPATMRATRDLLRRRLHLVRKRGQLLAHIQNTRHQYQLPAFERRLAYPANRDGLTERFPDPSVRKSIEVDVALLDQYDTLISDLEATLVRDAKRHDADAFHRLRSVPGIGKILALTILYEIHDITRFDRVQEFAFYARLVKGQKQSGGKTLGTSGAKMGNVHLKWAFSEAAVLFLCHNAEGKHLLAQIQKKHGKGKALSILAHKIGRAVYYMLARRTVFSMERFLHA

SEQ ID NO: 180219 - protein, 346 aa, unidentified
MGKSIIDLSSVATVGLDLAKHVFQVHGVDASGRVVVAKAIRRNKLLEFFASLPRCLVGLEACGSAHHWARELVKLGHDARMMPPAYVKPYIRRQKNDASDAAAICEAVARPSMRFVGVRSLENQAALMRHKAREMLVSQRTQLLNALRGHLTEVGVIAPQGLRCARELAELIEACDEKIPFEVCEALAPLVVQLRNLGEAIARLDRIIARLAQKDETARRLMSIPGFGPITASAMAATIQDTSSFAGPREFSAFLGLTPKQNSSGGKQKLGRISKMGNRNLRKLLVVGAHAVLFHRKPHTDPLRMWAKKLIEKKPFKLVAVALANKMARIAFAILRGKTVYREIRA

SEQ ID NO: 180220 - protein, 340 aa, unidentified
MKLYSAIDLHSSSNHLAIMNEEMKRVLVKKLANNTQLILDTLAPHREEITGIVVESTYNWYWLVDSLMEAGYRVHLANPSALKRYEGLKYSDDTHDACWLARLLSLGILPEGYIYPKQDRPVRDLLRKRGHLVRLRTSLLLSLQNIITRSCNVKVAAKDLKKLTEDRVSAHMHGHEALELCGTVSKETIDVLTRQIQRIESSVLKTLKPTVSYRDLITMPGVGPVLALTIALETGPISRFATVGSYASYCRKVASIWLSNDKRKGTGNRKNGNRYLAWAFSEAAEHARQHHRASRNFYDRKRSQSNLWVAHNALAHKLSRAAYYIMRDNVPFAEHKLYCS

SEQ ID NO: 180221 - protein, 326 aa, unidentified
MDVLGIDLAKLTFDVTLLTSAGCSHHHQFPNTATGFTQLQHWLGKLGVSQLHACMEATNVYWEALAQFLYDQGYTVSVVNPARIKGYAISQMQRNKTDKPDSATIAAFCATHTLQAWTPPTAAQRKLRALVRHRDDLIATRIQQTNRLQDTTDPDVRASLEAVLVTIKAQLKTTQRQITAHLKANAELRDLHCLIDSVPGIGAVTAQKLLAEFYDLAAYPSAKAAGADAGLTPANYESGSSVRKRPDLSKMGKASIRAALYWPAISVMTHSMEFKQFAQRLAARGKSYGVILGAVMRKLIHIIYGVVKHKTAYDPAKVLGPAAPLT

SEQ ID NO: 180222 - protein, 387 aa, unidentified
MIYIGIDIAKSSHFASAVNSDNEVIVNPFKFTNDDKGFNLFINTFKDFDLSNCLVGLESTGIYGDNLTTFLFSKGFKIGRINPIQTDSLRSSNIRKTKNDKIDTLLIAKCLMLGNYTLVTEKDIEIIKLKTLCRFKFDVKKSQSKAKVQLVTCLDIAFPELANFFKGNLHIKSSYTLLSKYPTAKVIANTRIDALTNLLYSASKGHFKSDKAIALKDLAKRSIAMDNPAIGKQIQMLIEQIQMLQKQIDLLDIDITNIMEKLNSPILSIPGIGVWLGAIIISEIGDITRFSSATKLLAFAGLDPSVRQSGNFNATNTKISKRGSKHLRYAINYAAELIIWNDDTFYQYYTTKLAQGKSYLNAIGHVAHKLTRVIFKLLTTNTTFNKS

SEQ ID NO: 180223 - protein, 334 aa, unidentified
MWHVGIDLHRKTIVLAAVNDTGDAMKPITIPCADTDAIINAMRAWGPFRAVVEATGTYRWLYDLLRPYGTVLLAHPFRLRAMIQRRTKTDKLDAQLLANLLRINQIPLAYIPPESYQRLRDLMRCRTRLGREMAEAKIRLRALLARQNREAPFRVPFGVRGLAWFRRQDFGPIENLVRDELLERMRHFERQMTLLDRHLAEMATSFPQTEALLDIHGIALFSALLIVAELGEVERFRTAKQVGAYSGLTSRVHQSGGHCYQGSITRQGSPWLRWILVQAAMKATREDVALKNFYARVRKRSGAKIARVAVAMKLAEICWKRLRYWQCTHVEQMS

SEQ ID NO: 180224 - protein, 341 aa, unidentified
MTISVLAIDLAKHIFQLHGVDRSEAVVLRKRLKRNQLLAFVRSLPPCTIAMEACSSAHFWGRAFARLGHTVKLLPPQYVKPYVKTNKHDAADAEAIAEAATRPSMRPVAVKSQEQQDLQTLHRGRERVIKTKTMLLNSLRGLCAEYGIITPKGSSWLTRDLARTRQQLEAVNSPVLSLLFERSLAEFHRIEEDEQFYTAQLERIATTHPVAVRLMQIPGVGLLSATAALAVVPAPQEFKNGRHFAAFLGLVPRQHSSGGKAKLLGISKRGNSYLRRILVSGAQSILRWSPRRTDAIGRWVTALRQKKPWNVVAVALANKNARVIWHLLRYDVDYCPQATVA

SEQ ID NO: 180225 - protein, 366 aa, unidentified
MHEGTTVVGLDVHKRSIAVAIRRPGAREAQEERLPNEAAAVARWAKRWKRRSGGQLVCAYEAGACGYALQRQLEGLGIACHVVAPSLVPRKPGERIKTDRRDARKLAEYLAGGHLTAVHPPTPAQEAARDLCRAREDAKQDRMRSRHRLSKFLLRRGIAYTAGRKAWTQAHRAWLQRLSFDDPTEQAVFDDYRLAVAQIDARIESLARQIEALAHEPAYRRAVGALRCFRGIETHTALGLVTELHGIERFGRPRALMAFVGLVPSEASSGERQRRGAITKAGNGHARRLLIEAAWHARHKPGLPVALRKRREGQPPEIIALADVAQQRLHRRYWRLVQRGKPTTVAATAVARELAGFVWAALRTEA

SEQ ID NO: 180226 - protein, 299 aa, unidentified
MKQVITIGLDLAKQIFQAHGADAEGSPLFTRRLRRAEVLRFFEKQPPCLVGIEACSGSHYWAREIGALGHEVRLIPPAYVKPFVKRGKTDAADAEAISEAVTRKTMRFVPVKSPEQQAAAMVLKTRALLVRQQTQTINALRAHLSELGIIAGIGTAKIASLIAIVRDETDARLPNAARFALTAIADQIDALALQINKLERELVAEVKHDEDMRRLATIPGVGAITSASIKALVPDPGGFKSGRHFAAWLGLTPRSHSSGGKERLGKISKMGNPELRTLLVAGATSVLRHARATTKPHGG

SEQ ID NO: 180227 - protein, 411 aa, unidentified
MATMFCGIDWGESRHDVAIIDQSGNVLGRAKITDDAAGFTELLTLLAEAGDCEDEQIPVAIEKDHGLLVSALRGSGRAIFPLNPLAASRYRARHQVSGAKSDATDAVLLANILRTDMAAHRPLPADTELAQAIRVLARAQQDMAWTRQRIGNQIRSLLKEFYPAALDAFAPLARGGLAHPEARTILAVAPTPAKAAKLTRARLRTLLAKAGRQRRINTEADRLFEALRGNYLRHPSVVEDAMGIQLTALLTHFDAVCQASDDLEAAAREHFEQHPAAAVINSFPGMGTLLGARVLAEIGDDRARFAGARGLKAFAGSAPVTRASGKKTVVTYRRIKNNRLAAVGTIWALSALSVSPGAKRHYDTRRERGDWNRQAQRHLFNKFLGQLHHCLQTGVTYDETHAFPPPLDLAA

SEQ ID NO: 180228 - protein, 386 aa, unidentified
MSQPSNTLLRAINYDHTLVLAIELSNKSWVLAAQVPGLPQTKAQRTIEPNKNALLAAIDGYRARAAAVGHSVDRVIVTYEAGWSGFWLARWLMPQGVEVHVVQPSSVPVDRRLRRAKSDGIDAELLLRTLLAWLRGEPRVCSMAPIPDEADEDARRSVRERTELLSERVGLTNRIGAVLATLGVNDYNPLLQSRRRRLAELRTGLDEPIPPNALAKIERLLARLELVLAQIAELERDRDKVPAADAPDRAGQMIQQLTSLRGIGVQSATVLVREGFVRHFSNGKALGSYAGLTSTPYSSGGIDREQGIGKAGNRRLRMVMVELAWLWQRYQPGAAQVAWFRNRVGSTGRRIRKVMVVALARKLLIALWRFVMDGVVPQGAVMKPSI

SEQ ID NO: 180229 - protein, 465 aa, unidentified
MSKLSKRNRARSSQGETRPFEGMRQVNPHAAGVDIGAHEIVACVPDGDDQQIVRTFGTYTVDLQTLADGFVDRGIQTVAMASTGVYWIPLCEALEARGLQCCLISAQSIKRVPGRKSDVLDCQWIQTLHSYGLLAASFRPAADLVALRTLLRHRAQLLEHRAPHVLHMQQALLQMNIQVSQALRDITGDTGQRLIRALVAGERDPQHLAALRNERCKKDAHEIAMALTGTWREEHLFVLTQALALFDFYTTQLSACDAQVEHAFAVIKPHFESTAEASVPASAAVPPRRKPHSHSKHAPEGNTRAHILRITGVDLVAVHGMSDSLAQTILAEIGTDMSKGPDDKHFCSWLGLAPKNDLSGGKVLKSRTMKNRNRAAQAFRMAAQSVIRSHCAFGAFYRRLKGRLGPAQALVATAHKIARTVYHMLKHRVPYYDIGAAEYNKRFREREMHYLQKKAAKLGYKLSPV

SEQ ID NO: 180230 - protein, 411 aa, unidentified
MQSMTDVIGTVHAGEPAWTVGIDLGRRAAHEAIVRAPDGSERRSRFAHSREEIDGFVRELSGLGRVLVIIEPTATRWQALAEELSGQGIEVRQVNAATVAKLRGARDITGAKSDRVDARTLAGALDYSHLVRPNSPALACAHALCLERLRLRRERRRLRTAVKACLDTIWPEFLQTFRGGERGVTARAVIAVTGGDPARARRLGSQELERRVRAAAPGRHIGRTKIKQLAEKTSRPVGYQAARAAYASRLQRLMRRRALVEGQLDALEEELLHLYPRLPGAQRLCSLPGLRPLDRALLLAAAGDVRRLRSPRALGKLGGCAPIARDSGKSTPQRKISERCRYQLRDAAFNAARHIIKACPAFRALYRALRERLTATQAVIACANRLLRVIWRMITSDIDYNPAKVAPALKR

SEQ ID NO: 180231 - protein, 296 aa, unidentified
MLIIGCDFHPRYQQIAMMDTETGELVERRLEHENGEARAFYASLPKAVLVGMEAPGYAQWFERMLAEFGHELWIGHASEIRAGVVRKQKTDARDAQHLLRLLLEKRFPRIWIPSPAERDARQLLRHRYKLVCFRVSVKNQLHGLAMSQGVCRKKKLFTAQGREELEKLSLGPWGSRRRQELLGMLDQLNPVIDELDRAVRQEAESRADAARLMIHPGVGPVTALAFVLTLGPVARFRRSKQVVSYLGLNPKERSSGDKQHTYAISKQGRRNAVELARGRAVNFSESRREPHKFGQR

SEQ ID NO: 180232 - protein, 366 aa, unidentified
MTGAESSWLNPRRDRKPAAASDVRPRMSLVLQSLLPYPNSCQGTSPHQQGWDTKMEKLSYGGIDVSKDRLDVVVLPEGWFFSVSNDTAGWTELVARLRPLAVCAIGLEPSGGYERGIIRALLAARLSVRRINPNKLRQFARARGVLAKNDRLDARLMAEYVAIMPTRAVQRDDAVDRLAEVVTMRRQLCDEHVTVENQTAHLEDAMLRRLSKRRLVRLEADIRLLDKRLAEMVATNAAFARLYELLTSMPGVGPVLAFTLIALLPELGKMGRKQIAALVGLAPYDFDSGKLRGHRSIYGGRMPIRNVLYMAALSASRYNPALKTFSNRLAHANKKSKVIIVAVMRKMITTLNAMLRDNAVWQPQSN

SEQ ID NO: 180233 - protein, 354 aa, unidentified
MAKTFETTVAVIGIDIGKNSFHIVGLDRRGAIVLRQKWSRGHVETRLANMPPCLIGMEACVGAHHLSRRLKALGHDARLMPAKYVRPYSKGQKNDFRDAEAIAEAVQRPTMKFVATKTVEQLDLQALHRVRERLVSQRTGIINQIRAFLLERGIAVRQGRLSLRMALPQILAAPPDVLSPRMLHIIEDLAGDWRRLDERIRALSDGIGAIARQDIGCERLMSVPGIGPIISSAMVAAIGTGDAFSKGRDFAAWLGLVPKQVSTGDRTILGKISKRGNRYLRVLFVQAAWVVLVKRKSRECLGLDRWIEAAKKRLHHNVLAIALANKLARIAWSVLAHGRTFAVGNIAEATAQTF

SEQ ID NO: 180234 - protein, 401 aa, unidentified
MQEFNAATDRMETASALAAVRAVGEAKEHAAYIGLDVHKETIAVAVAEPGRDEPIYRGEIANTPKKVEKLIAKLSDAYDGGLLLFCYEAGPCGYGLYRQLIASGHDCEVVAPSKIPKAPGDRIKTDRRDALKLARLLRSGDLTAVWVPDREQERMRDLSRARDDLKSQERKARQQLNAFLLRHGHHWPKGKTRWTPAHENWLAELKMDDPWEQVVLQTYIDAERAAGERVAQLTDQLMRALPEWSLAPVVDSLVALRGIDKLAAIVLLAELGDLSRFDSPKQLMAFLGLVPSEHSSGGRRRQGAITLTGNSHARRMLVESAWSYRFPARQTKHLKAKASNASAEAKRIAWKAQVRLCGRYRTMTRAGKNTKLVCVAIARELAGFLWDIARREMPQPLQRGA

SEQ ID NO: 180235 - protein, 380 aa, unidentified
MKKIRFVGLDVHAETITVAVAEPERNGEVRSLGSIPNRPESVQKLIKKLGPVDQLRACYEAGPTGYVLYWQLTELGVKCEVVAPTLVPVKAGDRVKTDRRDAEKLARSYRAGDLTAVWVPDAAHEALRDLVRARLAAKRDQLRARHRLSKFLLRHGRRPASGVRAWTAAYLNWVKKGVQFDQPAQNATLTDYLHEVEHAQERIVRLEQAIDDAIKTIPERMRAVVEALQSLRGIAKISAVTVMAELGEVSRFETPRQLMGYSGAVSSEYSSGERTRRGGITKTGNTHLRRIVIEAAWAYRHRPCIGATLKARQKTASQKVKDIAWKAQHRLHRRYVHLTAKGKIKQKVVTAVARELLGFIWAIAVEVEQGYNAREPKRAA

SEQ ID NO: 180236 - protein, 388 aa, unidentified
MVYVGIDIAKLNHYASAIDSDGVLLFEPFEFLNDNAGFFTLLSKLNSFEPDDIIIGLESTAHYGNNLVSFLVSKGFHVCVINPIQTANLRKNNIRKTKTDKVDTLVIAKAVALMDHPRFVTLYDIALMQLKNLGRFRMKLVKQRSRTKIQLTACLDQVFPELQYFFKSGIHQKTVYAILKEAPSASRIASMHLTHLKNLLVSNSQGHFKKETALELRVLAQKSVGTVDRSLSIQITQSIAQIELLDRQINTVDNEIKDIVESLDSVIMTIPGIGPINGGMILGEIGDINRFSKSRKLLAFAGLDPSVYQSGNFIAKKTKMSKRGSSALRYALMNAAHNVVKYNQTFKKYYDSKRSEGRGHYNALGHCAGKLVRIIFKMLKDNVEFKLD

SEQ ID NO: 180237 - protein, 458 aa, unidentified
MARIPRRGKSSTKALVPIHPNAAGLDVGATFHVVAVAPDRDDEPVRTFRSFTGDLHRLADWLKSVGVTTIAMESTGVYWVLLVEILEARGFEVLLVNARDVKNVPGRKTDVNDAQWLQQLHQHGLLRGSFRPRDGVARLRALLRHRERVVDYAASHIQHMQKALMLMNVQLHHVVTDITGVTGMKIIRAIVDGIRDPKVLAEHRDWRCKASPHEIRKGLDGNYRTEHVFAVRQALELYEFHHAKVAKCDLEIEAALHELNDDREAPSLPIPKVRHSRGRNEPKFDVRAALYTFLGADLSQIHGFGPYTVLRLVAECGDDMTKWPTVKHVTSWLCLAPGNKISGGRVLSSKTRRSSNRAAAILRMAAVNIGKTHTALGAFYRRLGARAGKAKAVTATARKLAVLFYNALRFGMAYADPGADHYEQDYRRRVVHQLHRRARQMGFQLLPNAAEAFTVGVS

SEQ ID NO: 180238 - protein, 344 aa, unidentified
MTNSNVYIYGIDLGKNCFHIIAMDKQGHILSRQKLTRSQMKKFVINTPPTTVCFEACPGSQYWGRMFADAGFEVKIIPAQFVKPYLKSNKNDFNDAAAIAEAGSRGSMRCVPLKTDEQLALQATHRVRQRFITERTAVVNQMRALLLEYGITVPVGRKVFERALPSILEDADNGLPDFMRALVFRLRERWQYLDVQIDEMSELLKQAAIASEQCKLISTVPGIGPIVSTALIAAVGSGNQFKRARDMSAWLGLVPKQYSTGGKSNLGSISKRGNTYLRTLVIQGAKALKIHMNREQSSLGKWIGRLEASHHHHVVLIALANKLIRICWKVLTSGREYQAYPSAV

SEQ ID NO: 180239 - protein, 344 aa, unidentified
MDHFAGLDVSVKDTSVCVVDDTGRIVREVKVASEPEALLAALRNPAYHFKRIGLEAGPLSQWLFSAMAEAELPVICVETRHMRAVLKAQINKTDRNDARGIAQMIRVGLYRPVHVKTLRSQKLRMLLTHRKLLQSKAIAIENDLRATLRNFGLKVGMMGAARFEARIRELVEGLPDLAVLVEPLLVVRQVLRQQLAVLHRRLLAVVRDDEVCRRLMTAPGVGPVVALTYRTTVDVPARFRKSKSVGAAFGLTCARDQSGERDRAGAISRCGDKMMRAMLYEAAQSMLVRSTRWSWLKAWAMQIARRRGKKKAVVALARRLAVILHRIWVDGTEFKWTREAVPAA

SEQ ID NO: 180240 - protein, 352 aa, unidentified
MMVFGVDPHKQSHTAVAADGLGRRQAHKTVRARREGHRELIAWARELAPDGRRWAVEDVRHVASGLVRELLAAGEEVVFVPTRLMAGMRSGGRERGKSDPIDALANARAALREDVFLPAARLNGQVLDVRRLSDHRDDLVTARTRTINRLRWLVHDLDPALAPAPRTLSRTRKARRQLETGLRALPASAGRRIALSLLAAVTALTGEIAGLDEDLTALITRLCPELLAVCGIGVVSAARILGETGDIRRFRSPAAYARHNGTAPIPASSGTRDTHRLNRGGNRQVNAAIYRAALVQARCHDGARALLDRRAATIRETRKAALRVLKRHLSDVIYRALQADAWRLDHPQQHAA

SEQ ID NO: 180241 - protein, 439 aa, unidentified
MIDKILPGYAAIDIGQEKIFIACGGDCQVRSFCTFSGDLQLAAAHLKQHGVSKVAMEATGVYWIPIHDLLQSQGLEVTVFNGAHARNMPGRKSDVLDCQWHAMLHSHGLLTPCFIPTDEIRQLRCFYRLRDDHLAIGASHIQHMQRALDLMNVRLHTVISQIHGVSGLRVIKALLAGQRDPVALSELCDMMILKHKRQEVIKSLEGDWREHHLFALRQALEGYEFCLGQAAACDKEIEALLKRINQGKPPASRDPKVKVKPIRHNAPEISDLHGLLLTMTDGRDATRLPGFTALGFMKLLGETGTDLSRWPTFKHFTSWARLAPGSNQSGKKRKRTRRGKTVVGQIFREAVLSLARSKYVALGAVYRRIKARRGPAVAVTAIARKLAELYYKLMTKGLDYVEQGIETYETQYKEQTLRYLKKTAEKLGFSLTPATQNPE

SEQ ID NO: 180242 - protein, 394 aa, unidentified
MILVGIDIGKNKHTFSIIDKNSGEILLSPSDFSNNLKGFLFLIPKLSSYTKSKLLIGMEDTGHYHFALLKYLLDRRYTVALINPTTTDLTRKLQGGITKNDPLDSLTICDVISSNHRNKPYRVTTLNRFDLYEQKQLTRHHHNLKEELNTYKNRLQKCIDIVFPEFNSLFHSKYGIVYMNILKAFSSAKAIANADIRSIRKCFEFKGQGKRISLSSEQLKLTAKSSIGIPSVAEEIQIRHLVSQIELLEKQLSEIDKRIEEFSLKNNSPILTIPGISHFSGTSIISELGDICNYTKASQIIKFAGVAPYHYESSQFTAQHTAITKKGSKYLRKTLYQIILPVISNNEVFYAYYTKKLNEGKGHRCAQGHCIRKLLRVIYHLLCTRQPFNPKLLL

SEQ ID NO: 180243 - protein, 320 aa, unidentified
MTPTPCYAGVDIAKDHLDLACQPAGPAGRFANDEAGIAALLAALRPHAPALVVLEATGGYQAALAAALGVAGVPTAVVNPRQVRDFAKALGRLAKTDALDADTLALFAERVRPEPRPLPDADATALGALLGRRRQLLEMRVAEQNRLAQAATAAVRRDVQRHIDWLTRQGEGLEQQLRAAVAASPLWRAADELLQSVPGIGPTVSLTLVAELPELGRLNRQQIAALAGLAPRNRDSGRQRGRRTIGGGRATVRSALYMASLSAARANPVLCAFYRRLRAAGKLAKVALIAVARKLLTIVNAMVRDGRPWAATPAVAAPNT

SEQ ID NO: 180244 - protein, 403 aa, unidentified
MNAVGIDVSKGRSMVAILRPGGEMIARPYEVSHTEDGLAQLVTRLKGLPGETKVVMEHTGHYFEPIARSLHEAGIFVSVVNALLIHQYGNNSIRKVKTDRKDAVKLAKYALDRWAELPAYTAEDENRRMLRIYNRQYNQYTKIKVMLKNNLIALLDQTFPGVNTLFSSPAREDGHEKWVDFAAKFWHCQEVTKLSERAFKERYAKWCKRNGYRYADDAAGRIYAAAQSQVGVLPANAATKYLVTQAIKQLNAVAGTLAAVGREMRRLASLLPEAAVVEQMYGVGPTLGPQLIAEIGDVRRFHSKKALVAFAGIDAPPYQSGNFDAKKRAISKRGSPALRKVLFQTICGILRLGSPDSEVYQYLAKKRAEGKHFYVYIMAGANKFLRIYYARVTEYLRGLDSPA

SEQ ID NO: 180245 - protein, 338 aa, unidentified
MKIVTVGLDIAKQIFQAHGVDGKGKVVLRKRLKRVEVASFFSAVEPCVIGLEASGGAHYWFRVLSQLGHTVRLIAPQFVKPYVKSQKNDANDAEAICEAVSRPSMRFVPAKRVEQQDLQCMHRVRSRLIGCRTQLVNQIRGLLAEYGIVLPQHIAQLRRHLPALLEDDGNELTMSTRHLFHSLYEELVELETKITSADQRIERAFRENAECQRIAAVEGIGPVTATAVVAAISDGHAFRNGRQFAAWLGLVPRQHSSGSKTKLLGISKRGDPYLRTLLVHGARSVVYRAKTKVDCRSRWINDKQQRLGTARACVAVANKNARILWSLIAKQQVYRPAV

SEQ ID NO: 180246 - protein, 335 aa, unidentified
MLSQSACPAPVYVGIDVSKRKFDVSQYQQNKTAVKGALGGSYPNQASGFEQLLKGLPSGAHCVLEASGAYYLPLAHYLYEHQIAVSVVNPLVIHRFAQMRLLRAKTDKADAKLIADYGHSQQPPLWQPLPLHLSQSQQLQTLLEGYTKQRTMLKNQREAFQHSGIDNPDVYASLERSLEQLEQEIAQLEQKLAQLAHQHQGPLLKGLLSIPGIGKKTALMLLLITRGFSRFESAKQLAAFVGLAPRVFESGSSVKGKGHICKLGNGRIRQLLYLCSWSAIRANPACKLLYERLLLKGKPKMVALVAVAHKLLRQAFAIATHNTRFDKNYHISLAP

SEQ ID NO: 180247 - protein, 432 aa, unidentified
MLLFLFQREGVIWMKLMYPVCCGVDVHKNSIVATIAITDRNNVTHYIMETFSTINRDLMGFREWLIMHNCFYVCMESTGKYWIPVFNILEEAGIRVLLTHPKYVRAIKGKKTDKKDSKWIADLFKFDLVRASFIPPKDIRALREIGRYRYKLVAMRSSEKNRYQNCMTVSNIGLASVLTDPFGKTATDIMQHVLTSHVIDEEKCKSLIQKSAKKKTDLILDSIRDSKIESDQRFKMLEAKAHMDYLEDAILRTEIQLYNRIQPYMPIVQHLANQLPGITELSASLIISEIGADMSVFESAKHLTSWAGLAPANNESAGKKKSVRISKAGHFLKPLLVQCALAAIKSKKQPYFAVKYQKIKKRRGHKKAIIAIARMMLTCMFHMIQTGESFNPSDYENFEKPAPRKVVLTDENAIAFLKAQGYDVSSLTKASA

SEQ ID NO: 180248 - protein, 411 aa, unidentified
MHNRQNYLYVGVDLHKEHHTAVMINCWQEKLGEIQFDNKPSAFSKFLLEVETYVSDGITVVFGLEDVGGYGRALAKYLADHERVVKEVNPALSFLERKSEVMIKKNDSWDAECVARILVNKFNQLPDAKPNDLFWSIQQLVSRRNALVKAQAALKNQLHIQLNHHYPSYKKFFSEVDGKTALAFWKQYPSPSCLEGANIKRLTAFLLDVSNNTCSVKKASDILKLVKEDGQTMKEYQETRDFLVRSIVRDIEFKKKEMKYIERELKRLVNMLDYQLETMPGIELVTASALIAEIGDVRRFPNANKLARFAGIAPVYFGSGGKGKTHKSKQGNRALHALFYNLAVQQVQVAKGSKLPRNPVFHAYYQKKLKEGKTKGQALVCIMRRLVNIVYSMMKYKTAYELLVVEEKEVV

SEQ ID NO: 180249 - protein, 393 aa, unidentified
MILNFPNEGRTMSKVIMIGCDLHDRSMLLRYSVGEGAPVQASFSNDLSGRARMIRRMLALAKKVQSERIVFAYEASGQGYGLSDLLDAHGIECYVLSPTHLPKTPKSAKQKTDVKDAQMLLEQLRGFVLAGNPLPVVWTPPQRLRDDRELVRARVDAADEITRIKLQVLSMLKRRGIVKPTWYTARWSKRFMKWLRADIVANLDSVVAVVLENLVDRYEFYHREQLKFDKAIQALATTDRYQVSHQELRKLAGVGLLSAMTFLTEMGDVNRFHNRREVAAYLGLCPSSFESGNANNRKGRITRQGPSRLRKMLCQAAWVSLSHCKESSQTYQRIKQGQSKRTKKALVAVMRLLSIKMWHRAVSCGVSDELWGRGGPHASEATEHPLQRDIAFV

SEQ ID NO: 180250 - protein, 348 aa, unidentified
MSMVFGLDLHRQQITFDGLDVESGEVWKGRVWQPDRERFRRWLERDVAGRANGQPVALAVEGCTGWRYVVEEITAAGFEAHLAEPADTQAARGPKRRAKTDRSDAALLRELLQRGDLPESWIPPTAVLEWRERVRLYKSLVDQRSVWTQRIHAELFQHGVSIPEGRIRSATTRAELANHAGLSPAAHQRIRVGYAMIDAADAEAEPLNTDLTRFGTRQPACRALVDAHYGIGGLLSVAIWSELGDCRRFTRSEQAVRHSGLDVTVDASDLRRAHGHLSRQGPSTLRWALFEAAHNASRPRSPDHDYYTKVKQRHNGKIAAISVARQFARRCYHILRNLDPDIVYAMPA

SEQ ID NO: 180251 - protein, 391 aa, unidentified
MERPVPQLNDLSRSLMTLVQDQTLIAVIELSESSWLVGGAIPGVERQPLKKLAPDEEELLRLLHRWRDEAVKSGHTITRIAVAYEAGRDGFWLARWLRMHEIETHVIHSSSVAVSREHKRAKTDRLDNAMLLRVFMGWLRGERGHCGMVAVPTTQEEDAKRPHREREGLVGERTRIINQMKGALARLGIRGFKPELRKAPQRLGGLRTPEDLPIPSNSLDEFRRDLARLAMLREQIAAIEQARLERLKQVPATGPHAMVRLLARILGLGLETADMLMQEVLSRNLRDRRAVARYAGLTGSPDESGSKRREKGLAKSGNARVRRGLIQLAWRFLLFQKESVLAQWFRARTEGVKGTRKKTMIVALARKLLIALWRMVTTGEVPQGVVLRPAA

SEQ ID NO: 180252 - protein, 459 aa, unidentified
MSNRSSRRLSRGDRRRNEKLARLRAVVTRDSAVLAFDLAADKQVCALADQDSQVIARRTVMVKAWQLGEAVAWGLARAAEAGYGSVVVACEPTGHRWRVLDQIAADAGVPLVCVQPLLVHRAREAEDFTRNKNDDSDAMIIARLVTELRCYLPERADPIWARLRHLGARRAQLVRDAGAARQQIRDLLECAWPAALSAAAKPLDAASWLAALTVTLERVDTDGDLTVIRRWGWTRFAAAVRRELPAHGTTRWYSAIVRAVFDAATDSGQAGIGVLAQRAGALERVRFALADLAHARTEIAVVEARMLTILDCLGLTGLVTSIPGLSAVGAATILAETGDPHRFSSARALVKHAGLCPRDNASGTYQGKTGISGRGRPELRLAAWRAVWGALHHNPVLGARHAHLVGRPERRLTDTQARVAVAGSLLRQLHAVITTATPWDPAIAAGADHTHHEEVATAA

SEQ ID NO: 180253 - protein, 444 aa, unidentified
MPQAESSKRLRQFRRSSPVRKRTTYRAVQIKDVKVEKLKEVVEGQAVTLAVDGAKEVPLAAVMKSPDDVILTMKWNQPSEMEEVVELLGRLGARELQVAMEATGTYGDALRAHLWAAGIEVYRVSSKRVHDLAEVHDGVPSRHDAKSAAIIGKLHMEGRSERWPMRSALQRDAVAAVKLMGMYEEQLQRGKGQLEALLARHWPELGSLLKLGSTTQLGLLKTYGSAQAIAANAKAAGALIRKLGRGKHSQEKVAAVLEAAKQSKHVEPTEIERLLIKEHCAEMDRTRRLEALARARVHKILGHEPAVRRMAQVVGKTTAAVLYALMGDPSAYENLPQYIKSLGLNLKETSSGKKKGAVHITKRGPSTPRQYLYLAAMRAVKDCEVVRAWFERKQGRDGGKGKGGKALVAIMRKLAAALWHVARGAAFDVRKLYNVQALGLADGP

SEQ ID NO: 180254 - protein, 409 aa, unidentified
MRVVYKRCAGLDVHKDTVVACVRVQEDDRVSHEVATFGTTTAGLLRLADWLVARRCKHVGLEATGVYWKPVWHMLEEHCELVLANPQEVRNVPGRKSDVNDAAWLSDLLAHGLVRASLVPPRPIQELRDLTRTRKQLTREVSKHTLRIEKVLEDANLKITGVVSNLLGVSGRAILRALISGESDPERLLAVTTGRLRAPRQRLLEGLQGMITEHHRFLLRLHLEHIETLEKAIASLEGRMGELVEPFREQIARLMTIPGVNLLTAQVIVAEIGREMGRFATEANLVSWARLCPRLDESAGKRRSTRLRPGATWLKTALVQSAWGATKVKGSDLRARFLRIKARRGPKKAIMAVAAAILRAAYFILRDDGVTYRDLGATYLDRKHAARAVRRLRQRIEALGYHVEIRPAA

SEQ ID NO: 180255 - protein, 342 aa, unidentified
MSTIQTIGVDLAKNVFSIHGVDAYGKCVLRKTVKRNKLLDTFAKLPPCLIGMEACSGAHHWARELLKLGHNPKIMASKFVIPYRQNEKNDANDAEAICEAVSRPKTRFVSIKSEEQQAVLCLHRIRQGLIKTRTATINQLRGLLSEFGIVMPQGRYSAQNTIGSVLEDAGNGLPILARELLQDLSNKIQNLNLEVLHYDRRVSALIREMASAKTLMDIPGVGEHSASAIVATVNDAKQFGSSRQFAAWIGLVPRQYSTGGHVHLGRISKRGEKHIRTLLIHGARAVIARCKEKTDRNSIWLNQLVERRGYKRAAVALAAKNARIIWALLTTGKEYKINYVNG

SEQ ID NO: 180256 - protein, 351 aa, unidentified
MQSQMIATPKLFIGLDVHKKSWQAHLRTDISDHKGFSLSPDPEILANYVFKHFPDHQVQLSYEAGCCGFSAAREFLNLGWSVTVVNPADIPHMDKQLYQKTDKIDCRNLAKQLQLGQLKPIYIPTEDQEQLRSLLRQRNQLVKQHRKVKSNIKGLLLFHGIVIPPEFDNPNWSKNFQQWLFQIPWSHVTGLQCLHSKLRIYKLLDQEILLTSNELRAYCRKVHTTDYYLLKSIPGIGGILSAAILAELGDIRRFNNERQFANCIGLVPGIHQSSETNNYMGVTPRCKALLRSYLIESAWIAIRLDPGIQAFYRKHVGKNPKSVIVKVAHKMCRRILSVIKSGKPYQLGFSA

SEQ ID NO: 180257 - protein, 345 aa, unidentified
MKQYAGIDVSLEYSSVCVVDADGRIVREAKVHSEPDALIAWFGEQGAAMERIGLEAGPLSQWLYAEMAKADLAVELIETRHVRAAFKTMPVKTDKKDARGIAQLMRLGWFRPVHCKSLPAQEVRALLTARKLIQGKLHDIEMSLRGILRGFGLKVGPTTRRTYAARIRELIEGHPTLEAITVSLLKVRDALMDEFAGFERKLRVMARQDDNARRLMTTPGVGVLVALTFVSAVDAPERFRSSRAVGPHFGLTPKKYQSGETDYSGRISKIGDAGVRTALYEAANVILTRPVKGSDLKSWALAVARRAGPRKARVALARKLAVVLHHMLRDKTNFIPHKAASAMTA

SEQ ID NO: 180258 - protein, 362 aa, unidentified
MKDYTGKTVFIGIDVHKKTYSITCVCDKVIVKRDTLKASPTGLVEYLNKYFANAKIKTVYEAGFSGFVLHRYLLEQGIDSIVVHAASVEISARDRVKTDKRDSLKLAIQLSDGRLREIHVPSPQREAYREVSRTRAKIANDKRRVGNRLKSLLYRQGLIGPDDDKKVNKKWLEKIIQYKYNESIKYCVQICIDEWLFLRKKLKEIDDELAKQAQADEKLEKVYQSVPGIGVVHSRVLSNELEDMKHFANENKLFSYTGLTPSEYSSGEHKRQGHISRQGRSVLRKTLIQASWKAIHKDASLKIIYERISRTAGKKRAIVSIARRLIGQIRSCFRSNELYRFRETEVIEFCPKTGEILLAASN

SEQ ID NO: 180259 - protein, 447 aa, unidentified
MKSRKLPSALTPPGGPDPETIGTRRRREKRERAAAFLAGNPLLAGVDLGKDRHAVWLAGRATDLALIERLMVENSLAGLEKLEHRAEQHRQQRGFDRLIVFMEATSYFWQNVANVLESRGIAYRIVSPLAVDRQREIEHLTYAKGDYRDAELIVALGAKGQWVECVLGHEPLWITLDVFAREHEVLLKAEVRERQRVRSFLELALPEFLECFEDPLRKTARALLRKLTRRPEEIPSTVALFLERAAAIEGVRLLRGRLRALAARLELRQSYGVERALAPLLARIGLAVERYELLHEQREGLRARLVALYRTTPYCAVLDTIPGVSPESHALLLGLIGDPKRFDRATCLVKLAGTEPRENHSGRTEGAHAISRRGRSALRHLLHRIVLGFPRGNAEFAVYLERLRKREENRLSWQQAAVAAGNKFLRLVHHLCVSGEPYDASKLTFKP

SEQ ID NO: 180260 - protein, 395 aa, unidentified
MFIVGIDIAKRSHEAIIIAEDGQVVRKAFSFRNNCTGYNLLLEQVRRLTLVKSQIVFAMESTAHYWLALYARLLKDGYAVMVLNPIQSHSLRELYIRKAKTDARDSLIIADLVRFGRCKASNVPQDKILALRELCRSRAYLVDMAADLKRKLIALLDRIFPEYESLFDSVFSKASIAVLSKYSTPQKVKNANLRKLTDILMESSNGHFGEWKAHQLKEAACSSFGIDDSGGVYSTLLGMFLEQILSLTAQADSLEKQISVFFQEFNNPLTSIPGVGTVLAATILSEIGDITRFSSADKLLANAGLDPSVKQSGEFKSNQNRMSKRGSPYLRRAIWLASTVAVHRDPMFQTYYEKKISEGLHYMNVIGHVSRKMTAVIFAVLRDGQPYQPILQSAG

SEQ ID NO: 180261 - protein, 438 aa, unidentified
MRLPKHLVHLNACAAGIDVGSRSHFVAVPEGADPQPVREFSTFTDDLEGMADWLISCGVTTVAMESTGIYWIPVFEILESRGIEVKLVNARHAKNVPGRKSDVLDCQWLQQLHTYGLLRGAFRPADQVCALRAYVRQRATLVRVSGSHIQHMQKAMAQMNLQLHNVVSDITGVTGMRIIKAILAGERDPNKLADFRDKRCKNDAKTIARSLQGNFRPEHLFSLQQAVELYEFYLAKIAECDRQILAQLSAFDAKDTEGGAGGGKPPATVEEALMRMSGVDLTEINGIDTASAVKIISEIGVDMSRWRTDKHFTAWMSLSPGTKITGGKVLSSATKKNANRAAQAFRIAAFSLARSKSYLGGYFRRMKARLGAPKAITATARKLATIVYAMLKNGTSYTDLGQDYYEERYQSRLLQNLKRKAKHLGFELVPTAGQIAAL

SEQ ID NO: 180262 - protein, 380 aa, unidentified
MRQVCGLDVHKDSVFVCILNENGIVFQEKFGVLTPELEQMLSVMLQYHVEEVCMESTSIYWMPVWRVLENYVSLKLVNPYFIKQLPGKKSDVKDAEWIATCLLKDLIKGSYVPEDLIQQLRQYDRRISDLNAEIVRKLGKLDAALQRCNIRISNYVSSTDGKSYKEVVRLISEGIRDPSELTKVIHGRTVNRVGRDVVLASLTGVISDTDIDVMRQLREEVELVEKHKDECQSKMDAICRQYFPDQLKNLQTIPGIKGRSATAIITEVGTDMSSFEDAAHLVSWCGLKPRNEESAGKIKARGITHGNRYLRKTLIECAWAASKTQDCYFSKFSYHQVVVRRKSKMKVQVAIARKVLTAVWYVMHDNVAYRDFTPDIVPTE

SEQ ID NO: 180263 - protein, 453 aa, unidentified
MDQPKYRPRGNRETLTTVNPDAAGIDVGSQFHVVAVAPQRDAEPVRTFQSFTGDLHCLADWLVACGVKSVAMESTGIYWIPLFEVLEARGLEVFVVNARDVKHVPGRKTDVNDAQWLQQLHAYGLLRGSFHPPADIAALRAYLRQRERLSDYAAAHIQHMQKALMQMNLQLHHVVSDITGQTGLRIIRAIVAGEHDPATLARYRDLRCKASAETLRQALEGHYRPEHLFALQQSVALYDSYQQHIAECDRAIEAVLANLRRPAATAAPPTARRRSRQPNALRFDARTALYAVTGVDLTQIHGFGPYLALKLVSECGTDLSRWPTAQHFTSWLCLAPSNKVSGGKLLSSHTRRTKNRASALLRLAAVNVGKTATALGAFYRRLAARIGKAKAVTATARKLAVLFYNAMRHGMSYHDLGATYYEERYRERVLHNLERRAQQLGYTLAPTAVVRVS

SEQ ID NO: 180264 - protein, 410 aa, unidentified
MSQMLVGIDVSLRSHHVHFMHGEGHTLADFSVSNDVEGADTLIQKVSRTAEKNQLHELKIGMESTDQYSWHLAHYLKKQLHRVLPHVQTAIYMLNARKVARFKKGYDTLPKNDRVDAWVIADHLRFGRLPHEMQETLIYDALRRLTRTRFHLTHEIARNKTYMLNQLYLKFSGLRQDNPFSDTFGATSVAVIEELDPEIIAEMPLEELVEFLQEKGKNRFAEPEEIAKYLKKLARNSYRLDKVMADPVNLSLSVILSTIQHMESQVKRLDKEIERMMKGIPQTLTSVKGIGPVYAAGLIAEIGDIHRFDDHHALAKYAGLVWTQYQSGEYEAQDTSRERTGNKYLRYYLVQASDAIRKHDTEYKAFYQKKFKEVTKHQHKRALVLTARKLVRLVHSLLRTKQLYIPKEER

SEQ ID NO: 180265 - protein, 372 aa, unidentified
MGHHTEVFVGIDTSKSRNAIAIADGGRGGEVRYLGEFPATEAAIRKLVAKLAAKCCHLTFCYEAGPTGYGLYRLLKSLGHDCLVVAPSLVPKKAGDRVKTNRRDAVSLAKLLRAGELTAVWVPDERHEAMRDLSRARQAVKKDLQGKRQQISSLMLRLGRIYPGKTTWGPAHMRWLMSQKLEHREQRIAFEELLEGIRQESERMERLEDAIREVVPEWSLAEVVAALQAMRGIDLIAAVGVLAEIGDLSRFQNPRELMGYLGLVPTENSTGDKVKRGGITKAGNGRARRILVEAAWSYRYPPRVSRDKQPKVEAAPRGAREIAWKAQTRLCGRFRSLERKGKRRTVIVTAIARELSAFIWAINRELMPPRQA

SEQ ID NO: 180266 - protein, 310 aa, unidentified
MIIHPDYVGIDISKAHLDIFDASRGRQQRCANTAKDIASLIRSWKRQPPFILFEATGHYDALLRRRLAKAQIPFARVNPARARDFARAAGYLAKTDSIDAKMLAAMAQCLHPEPAQPVDIDRERLARLHKRRDQLVAMRQQERTRASECACPDTNADISRHLTWLDREIDTIEARIETLIAASTNLAAAADLMRSVPGVGPVTAAALPALLPELGARSPKTIAALAGLAPFNVDSGQCRGLRRISGGRKRVRDALYMAAVAASRSKSRFATFYKTLRNAGKPPKLAFIALARKILTTLNAILRDQIAFQP

SEQ ID NO: 180267 - protein, 315 aa, unidentified
MSKKTLDTSYAQGQRKQARIFENSSDGWKQMLSWLKAKGSQPAHVGMEATGRYSLGAALMRHDAGHTVSIINPAQIRDFARSKLGRNKTDKADAALIREYTTLFRPQPWTPPSPAMRRLCELQTVRAGLVANRTEWKNRLGSGLGDSTAIQVAKAVIDALSSQLKVIDQAIAETIEQDGDLRGRRDLLLSVIGVGDTLAALLLAEMPEPGVLRHSAEMIAYAGLNPSHHRSGTSIDRPTRISKIGNATLRSALYMPALSAMRFNPVVAALAARLKSAGRLKPKQIVVAAMRKLLVLCFGVLKTGTPFDPAIAMPT

SEQ ID NO: 180268 - protein, 417 aa, unidentified
MVIHMYFAGIDIAKKQHEACIIDDQGTTVLTMPVPNTQPGAARFLAAVRKRIGDDPHAVAFCLEATGHYWLSLYCFLTQQGYPVHVINPIQSDAIRNLYIRKSKTDRKDAFILADLLRMNQTEETCMASEVVLKLQTLSRTRFAFVNQVSALKQRAIGVLDRIFPEYASCFSDVFIKTSRELLKNHSTPDEIAALDLHELTRFLESHSRGRLGQGRAERIQELARGTFGIGLAVDAFALELRLILSQIEFIEAQISDLESAIKLAMEELQSQHAPGSLEGEQHHVIETIPGIGTILAAAIIGEIGDIHRFSDARKLVAYAGIDATVRQSGEFTGSRNRMSKRGSPELRRAIWLAAVSARRFNAELSAFYEAKKQQGKHPMVATGAVARRLVHLIHSVWSREQPFDPDYRWSPSGSAD

SEQ ID NO: 180269 - protein, 312 aa, unidentified
MADMVRLAGIDVSKEKLDVHVTPSGESRTVDYDRRGLAGLRRWLVGLGVALVAVEASGGYEREVSEVLEEAGLVVHRLNPLRVRRFAQLKGRLAKTDRLDARTIAEFARAHPQERQLRRDPRRERLAEHLLVRRHTQDAILDCINQLEHLRDGRLRRLVAARKASMERTLAKLDRCLVELIAEHDDLAELSERLRSVPAVGPVLATTLIALLPELGSLTRRQVASLVGVAPFDRSSGRKIGAKSIQAGRVFVRNTLYMATLTASQHNPAIAAFAKRLAGKPGKVRLVACMRKLIVTLNAMVRDGSQWQPRTT

SEQ ID NO: 180270 - protein, 343 aa, unidentified
MLTNNVIAIDLAKNVFQVCHISIHGEMLSNRPLSRQKMKEFLAKAKPSIVAMEGCCGCHYWGQLAEKFGHEVRIINPKKVKGYLEGHKTDHNDALAIANAAIQIGIKFSRPKSLEQQSMQSLESSRRFLSRTVASLGLHIRSTILGYGVANPRGEKGLKASVQAALDGETQIPPTVVSVLSMLWEQYKELKAQLISFEKEKNAMTRQIEPCQRLMKIEGVGEATAAMLYNTLGDGKQFKNGRQASAFVGLTPKQHSSGGKVIMIGIDKCGGVKELRSLLYLGAMSYVGRLPEKPKTQKDKWLRSIIDRIGFKRACIALANKVVRTAWAMLRYDTEYKPELLTE

SEQ ID NO: 180271 - protein, 423 aa, unidentified
MKNSAAEKRKQVPAGYLVVGVDPHKKKHAAVFMTQDFMVHSKLKFDNSREGFEKVLERVRTEMLKTGCRGVIFAIETGAHHWRNLAYFLDEKGIPLRLINQFTLKRRREGKDLNHRKNDYRDSEVAAQLLCTGEFNAARLSQGVYAELRAAYGSYRRLVKERTRIVNLIKSLLDGLFPEFTQVFKNPCGQTAASVLCTCAVPQAIAGMTESEFVGAIKAACQGRVMKGKLRALHHVALTSIGIGAGAQSVSSEIAFLIEKLRLIEQQLRQIKEALTRLVHETMEGKYLLSIIGLSYVSVAGIIAELGSFSSYQNAKQLIKMAGSNPTESESGGKRHSHTPISKQGRPVLRHCAWTAVIPMLRFNPDFRDWAKKLRERPAGANPLSGREVMVAAVNKLLRLAFALVKNQALYQIPEPQPVEIAI

SEQ ID NO: 180272 - protein, 403 aa, unidentified
MFCLGIDVSKKSCRYLILNEEGQKLKSFSLDNTHEAFQNLLERLKGLSVPKEKLLIGLEASGGFWENLYSHLKENGFSIVLLNPYHTNKFREALAKKAKTDDIDALVIAQLLRTGEYVQSQVAEELTQSLRELTKLRYELVKERKNYQRQVFSLLSIIFPEHEKTALKNPFSVASLAIFQVFPTAKELAQAKAKQIEKIVRSIKGNNFDLKEIESLLRTAQNSIYSGRAKDARGTSLRILLRHIDTLSSSIEELETEIKQLLSPQEPKDSFPGENLLTIPGVGEKTLAAVLSYLGADGSNFSDSTKAIGYVGFFPKIYQSGQSLWENKICKRGPKLLRWALYMAAVACLRHNPEMRNLYHKKLSQGKTEKQALICIAKKLLEIMLAMLKSGEAYDPLRVYINC

SEQ ID NO: 180273 - protein, 386 aa, unidentified
MIIIGVDPHKRMHVASAIDPATNRQVTALQVEASLAGYRRLLRWAGGFGERSWAVENAHGLGRHLAQWLLARGEAVEDVASTATARVRELSRGGRRKNDVIDAAAAASVAALRGDANPVLAEDITTVLGLLDERRSNVTTQRTRLVNQLHAVFRDLVPGGAPKGLTAAAASRLLAGIRPAGPVEAARKQLARDLVAEIRDADRRLKLLKAQIAETVAETGSHLIEVDGVGPIVSGRLLARTHKMSRFPTAAAFASYAGVAPVEVSSADRVRHRLSRGGDRQLNLALHIVAVNQIRMPSSAGRAYYDTKIAAGKTEKEARRCLKRRLADHIWRLMIRDEAGEAAGPGGHQGTTLQSSAAGSTPTTSSSDKSLPEPADSDSTTRQPAA

SEQ ID NO: 180274 - protein, 320 aa, unidentified
MSDSLDIGVDVDSKEFVPAVADRKAGDRFANTRAGIAKWLRTLPQRCQIGMEATGRYYELLARMAGQAGHVVYVIDPRLIKNYARATGSRGKTDAMDAQAIARYVKKESDRLREYVPRTDEQQQMHDLLRKRRALVETRARLEQSFGVSKSDPGELSDLFCALAGTLLELESQLQRLGRDGEHGALYKRLLTIPGIGPAVASHLIYYMTRWPLANANAWIACTGLDPRPNESGGRTGRRRLSKQGAPMLRQMLYMAAMGLKRCRRGQPLYDELSKRGHPSTAVFNILARKLARIAWGVFKSGRDFDPAMLKVGQACFQQA

SEQ ID NO: 180275 - protein, 345 aa, unidentified
MPIVGGLDIHRKQITFDYLDTVTGQVQRGQVSPADREHLRAWLARFAGREDVAFAVEGCAGWRYVAGELAAAGIEAHLAEPADTAARRGRKRHAKTDKTDARHLRMLLAEGRLPECWIPPGHILECRALLETYHDLRREHTAWVQRIHAVLFHQGAPALGVGTLRTGQGVAALRAAADDCLSPAGQLQVATALEVIEALEARMHVVRHQLTDAARHLTGARVLAARLYGVGPFAALALTCWLAGAGRFSSSRKAVRFAGLDVTVWSSDRKGPPGKLSRQGPPVLRWALYEAGKTHARASAPDHAYYAQVKDRKNSKRAALSEARKILRQAHHILAELGDDALAAA

SEQ ID NO: 180276 - protein, 315 aa, unidentified
MQKQASFVGIDISKNSLDVHILPEDTRHSYPYEPQKVKALIKKLKQLKPVLIVMEATGGYELVVASKLAEAKLPVAVVNPRQVRDYARAIGKLAKTDAIDAYVIARFAQDVRPEAREQLTLKEQQLKELIMRRQQLIDMRTAEKNRLSRAFSKQIVKGIEQIIQALDEQIQALDDQLKREIQDNPTWDRKIEVITSAPGIGITTANMLLFCLPELGRLNRRQIAALVGTAPMNRDSGMMRGKRTIVGGRAVVRKSLHMPTLAAATRWNKKLKVFYEQLLARGKKHKVALTACMRKIIIMLNAMLKNNRVYDPKFC

SEQ ID NO: 180277 - protein, 458 aa, unidentified
MVRDGKSRGEFARWSASTGATFVTVVEITEETKPLTNDLDFYVGIDLAAEKHQACVVNHTGRVVGELAFEHSGTGLTAFTRWLDKLAGGATVDHVAIAAETPRGPIIESIMERGYPVFSINPKQLDRFRDRHTVAGAKDDRRDAFVLADSLRTDQPLFRRLARESADIIRLRELSRLEDDLIQDHGRLINQLREQLHRYFPQLLQLSTAAEDPWLWDLIEIAPVPAAARKLTRGRIERLLKQHRIRRLTADEVMTALRVPALNLAPGTTEAASEHALLLLPRLRLIRKQRLDTATRIEVVLDELAATDLERNDTGPEWPSDVAVLRSLPGVGRIVAATLLSEASQAIADRDYAALRCYAGAAPVTRQSGNKKTVVMRRGCNNRLRNAIYHWSRVATVSDERSRNYYAKLRARGHSHGRALRALADRWLSALVAMLKTRERFDLARWNSCLVSQQASTS

SEQ ID NO: 180278 - protein, 369 aa, unidentified
MGEYSEAFVAFDVAKKKHAVAIAAGGRTGEVRFLGEVENRPAAIERTIKKLGKRYDRLHVCFEAGPTGYGLCRQVRDLGHDCMVVAPALIPKRSGERIKTNRREAVTLARLHRAGELTGVWVPDVVHEAVRDLVRARESGADDLRRKRQQLLSFLLRHGRIYEGGGHWTLAHRRWLARQSFEHPAQQIVFQEKIDAIEDAVQRLRRLDEQLSAVVPTWSMARVVEAYQAMRGASFLVAVIFAAEIGDVRRFDTPPQLMAFLGLVPGERSTGDTVRRSSLTLAGNRRARRALVEAAWTYRYPARVSEALRLRLEGLPKAVRDIAWKAQVRLCARYRRLNAAGKKPPVVVAAIAREMAAFLWAIGQEVEPS

SEQ ID NO: 180279 - protein, 395 aa, unidentified
MEVKYERCCGLDVHKKTVVACVIVPGADGQAAKETRTFETMTEDLEALSRWLEACGVTHVAMESTGVYWKPVYNLLDGRFEVLVVNPEHVKALSGRKTDVADAEWIADLLRHGLLKGSFIPSALLRELRDLTRYRTRLGDERKSEVNRLQKVLEDANIKLASVASDVMGVSGRAILNELVQGNTDPALLAELAKGRLRDKQDLLEKALRGALKPHHRFMLAQHLSHIDFLDEAIERLDRQIGEQMRPFEAALQRWDSLPGINRRIAEIIIAEVGADLGPFEEAAHLASWTGMCPGNNESAGKRFSGKTRKGSKWLRRALIEAAHGAARTKDKYFQAQYRRLAARRGKQRAAVAVGHSLLVTGYYLITGKKPIKTWELTTSMSATAKPSNAGRCVA

SEQ ID NO: 180280 - protein, 346 aa, unidentified
MQSKKPKQYVGLDVHKKTVYGYVMDVEGNKLFEKEFRTEPHELDMFLLNVKKDDSIVAIESCSCWQYVYDYLSDAGYNVVLAHPAGVEALKKLRRHTDKDDAMLLADLLRTNSLLLSYAPPYDVRVKRQITRHRLSLTQVENELMNKVHAILLRHGYNNLPYSDAFCKKGIQYLRSIDLPICDRFELDDYLELIQMFESKINDTTEYIETFAPNDPAVRLVTTMTGMAYYNATAFIGEVGDIQRFASGDKLASFAGLTPRVHQSGERTKFGRITKRGSSRLRWVMIQAANVAIQRDKTLKKMYMRLAPRIGHQKTVVAVARRMVTLLYVMLKHNIKYQDLQIHKAP

SEQ ID NO: 180281 - protein, 436 aa, unidentified
MKKNKIAAAAFDQPADDQENKPEADPVISMILGVDLANKFIQGCFRDPDTEKLVNRQYTRDRFRKFLQEAKYGSMTVVMEACGTSTYWGNLCRKYGHVPVIVPAQIVHAHNTGNKDDANDARCIWQVGFMPEVKQVRLRSTANQDMMSIMLLLDSIIETKTQLGNRIKSFLSERGVLCNKGAEAAMSTLKKFCEDAIAEEKDKNSQRSAVLSVVSSSFCGLMKAIISSEQTITDFIISWAASNEKCRLLMTIPFIGPITAAAIVIYMEDPSYFRNGRAFAAFCRMVPYHTGTGGKVEILGIHNKGNRWIKRLLYEISQGMYHRVMMMLKKGKDAADEKMPEPLSEWIANMAARKQMKKVACAIANKLCRVSWAVLSSGTPYVQEKSSLIKPSVADPDGKVKRSRSVRKNAVKGVMDAIESLELFWAERKEESQQAA

SEQ ID NO: 180282 - protein, 341 aa, unidentified
MELFVGLDVSVRTTSVCVMDASGKLIRESKVESEPAAIADLLHTVGGPYKRVGLEAGPLSQWLYSGLASAGFPVICVETRHMKAALSAQINKTDRNDARGIAQMMRVGLYKPVHVKTVRSQEIRMLLTARKFVQAKIIDAENNLRGLLRNFGLKVGTVTRLQFERRIIGLLEQSPHLRLIIDPLLEVRRVLREQFQHLHKAMGRLAESDEICKLLMTAPGVGPMVALSFRAGVDEPTRFSRSRSVPAHFGLTPSRYQSGEIDRDRGISKCGDAGIRWVLVEAAGILLRISQKSSPLKTWGLAVARRRGMAKATIAVARRLAVILHRMWVDNTPFRWEANAA

SEQ ID NO: 180283 - protein, 342 aa, unidentified
MKDTMIGVDLAKNVFQLHGATMTGHLSFRKKLTRSRFRQFMAAQPPAVVVMEACGSASYWAREMVKFGHEVKLIAPQYVRPFVKRQKNDAADAEAIVVAAQRPEMRFVQPKSEEQQACAVLFRARERLLHQRTELVNALRSVLYEYGHIIPKGIAHIKRIESILDEPNSDLPALVREECFDLLEQIAEKTARIDVKTAKAKALSLATDTARRLQTMPGVGPQTALAISGFAPPMESFKRGRDFAAWLGLVPRQYTSGGKERLGRVSKAGQTDIRSLLIIGAMSRLTVLARKSIVEGSWLARMLRRKPLMLVAIALANKMARAIWAMMTKKEDYRNPARVVAA

SEQ ID NO: 180284 - protein, 356 aa, unidentified
MKSTIKYIGMDVHQSTISVAVLDAEGKLVMQSILATHAAAILDFVHGVRGTLQVTFEEGTQSAWLYDLLVQHVAKVVVCNPRKNALLKAGNKSDQIDARKLAELLRADLLSPVYHGENSCRILKELVRSYTTLTEDTTRIMARLKALYRSHAISCAGKKPYGKRHRQEWLQQVRQPGLAARAQRLYDQLDAVQTLRRAAKREMLAESHKYGAYRLLGSIPYLGPVRASILMARAQVPNRFRTKRQFWAYCGLALETRTSAEYRIVQGQVQRSRKPVFIRGLNLNHNHDLKNVFKGAATAASIHDGPLRQFYDRLLAKGMKPELARVTLARKIAAMALILWKKGESFDPKYLMLQAA

SEQ ID NO: 180285 - protein, 358 aa, unidentified
MRIIGCDFHPSYQQMAMVDTETGDLWEGRLEHEQGEARRFYQALQGQRVRVGMEAVGNSQWFEQMLAEMGHELWIGDAARIRRLVVREQKTDRRDAKHILDLLLDGRFPRLWVPSTQMRDVRQLLRHRQKLVEIRTQVKNQLQHLALNQGVRRKSRLWSRQGRTVLEQLPLQGWTARRRSDLLAMLDRLQEQVGELDGAVRAEAEQRPEVRLLMTHPGVGPVVGLAYALTIGPITRFPRGKHVASYLGLIPKEHSSGGRQKLGSISKQGNPMMRTLLVEAAQTAARLDEQLRRDYGRLKAKKHSGPAKVMVARKLAVRMYWMLRENKSYTQLYAQRPVAGMQGSSGHSVVAGGDRSLE

SEQ ID NO: 180286 - protein, 338 aa, unidentified
MTEITTIGLDLAKHTFHVVGCNRHGKELKRRMLKRGQVMGYFANLPKCLIGMEACASAHFWARRLEEHGHEVRLIPPQHVKAYVRGNKNDYNDARAIAEAARRPDMRFVAVKTVEQQDVQALHRLREARVVERTALCNQIRGLLAEYGIVLAQGVSVVRKRVPELLEDADNGLSDFFRPLLADCYHQLQQIDAHIEFYTQALQAHAQHHEAIQRLQTIPGFGPIVASVFHAFVGNGQGFHKGRDVSAALGLVPKQHSSGGKTVLLGISKRGDRYLRSLLVHGARSVVRFAANKDDRLSRWINKLKARRGANKAAVALANKLARIGWAILSQNSVYRAA

SEQ ID NO: 180287 - protein, 307 aa, unidentified
MNGIGIDVCKAMLDVAVHRGPFARFHNTPAGHRKLLSWLARQEAGQVVLEASGGYEQRVLDALFDAGHQVVRANAHRCHAFATAIGLPAKTDRLDAINLACMAATLELRAYQPMESWRRKLREFVRARQQLVDPATSAQNQLEQVTDTTLRRVLQANIAQMKKTCVILEKHISEQVGQQPQLEAMRAFKGVGAILQAVIASYLPELGRLDGKAIAKLVGLAPIAHDSGKMRGLRQIRGGRIEVRNVLYMACLSAIQHEPRIREFYRSLLARGKPGKVAVVAAMRKMRVILNARARDALAGESQAIPA

SEQ ID NO: 180288 - protein, 315 aa, unidentified
MYLGIDVSKLTIDCCLISDGLFFERKFKNSKVGFQELKDWLKENGATERLHCCCEATGKYYEAAAEYLSRYYRMSVENPRKIKGFGTAVLQRSKTDRQDAKTIAQYCKALEPRPWQKPTEAQTKLQELTRYQHRLKRQKAAEQTKLQTAPTYLLPLIQSTITHLQQQIKAVQNQLNQFHKDNPDYKTQKERLKTITGIGEAAANSLLSVLIQKDRFKSAAQFVAYIGLDPKENQSGTSLKGRPRISKLGNTHLRTTLFIPAMHAYRSSTFAKYVSRLQKNGKRPKVIIVALMRKLAVIAYHLIKTGQYFDNSRYE

SEQ ID NO: 180289 - protein, 339 aa, unidentified
MTMVTLGLDLGKNWIHMVGLDADGRIVLRRRVRRDRLLAQTVNLSSCLIGMEACCGAHHLGRALEAQGHTVRLMPPQYVKPFVKSNKNDYRDAEATAEAVQRPTMRFVPLKSEAQLDLQTIHRVRQRLVSRRTALINQLRAILLERGITVPQRRRVLEVRLASILADEPSGLSARIRQLIEDLLAEWHDLDGRIEAFDAELTETAKREDTCRRLCEIPGIGVLNATALVAAVGNGATFDKGRDMAAWLGLVPRQFSTGGKQRLLGISKRGNKYLRTLLIHGARAALPHLAARDNTLGVWLRELLARAHRNVAVVALANKLARIAWAVLTGERRYAAVAA

SEQ ID NO: 180290 - protein, 418 aa, unidentified
MRAVALDVHRDFCEVAIVAEGRLRSAGRIQTRPETLELFAQSLDASDWVALEVTGNAWAISRILEPHVSRVIVVSPNDTGIRQARAKTDRLDARTLAKLLWAGELDGVWAPDERVRVMRRRLARRAQLVRARSRAKNEIHAVLMRCLKDRPPASDLFGVKGRQWLAEQQLAVCERETVDAGLRQVDFLDTEIAAVDQLIAADALGWPEVKRLMTVPGVNVIVAATFMAAVGDIRRFGDRRKLTAYLGLDPRVRQSGTGPANHGHISKQGSGSARHALVEACWSTVRQPGPIAAFYARIKAKRGHSIAIVASARKLACLFWCLLSRGEDYAFAQPSLTAKKMRRLELAAGAPRRQGRPRRLVDQTAMRTAERELALQAQRAYERTVADWQANKAGASATPGRASQQPSKGKAARQITSP

SEQ ID NO: 180291 - protein, 346 aa, unidentified
MILIGCDYHPSWQQICWLDTVTGETGEKKLEHGSGEAERFYRQLPAPALIGMESTGNCQWFVEMATTQGHDVWIGDAAKIRASEVRAQKHDRRDAALILKLLMEGRFPRIWTPSGQEKDLRQLLIHRYKLVRIRAQVKTELQHLAMNQGVTRKRKLWSKAGEKVLRELPLKPWASRRREDLFKVRGMLDEQIAPLDQAAAEAAEKNEKARLLMTQPGVGPITSLAFVLTMGDVSRFQRGKQVASYLGLIPREYSSGGKQRLGPISKQGNRFLRMLLVEAAQGAVRCDPGFRNEYLHRCHTKAKGVAKVAAARKLAIRLYWMLRTNTGYPEVVRVESSSRVPLVSAS

SEQ ID NO: 180292 - protein, 461 aa, unidentified
MKKEKCYLGIDVSKGYSDFTLLDEEKNPLEKVFRLDDTRKGHDALKKIVQDKIKEHQMDCLYCGLESTGGFENNWFNSLTAWSKTMPVKVARLNPSGVKNNIAAGLNRNVTDSLSSHYIAEYLIGHESKVSYDVPDNEYSEFRGLYAYIQLENKQKTQLINELKMLLYSGFPEMVRYCKKGIPVWVLEVLKRYPTAEKAARLKSSQLIKIKNVTAEKAAAIISKAKETVSSRHSSTQGFLIQSLAQQIMDKQKIIEKAKKFLAENCKGPEVDLVKSVIGIGEYSASCIMIEIENIGRFASPKKLASYFGIHPELKESGDKIKKYRMSKKGRSSMRSVLYMCAMSAVLHDPHFKQIYHNHRSKGKNHRQAIVVIMHKLIRLIWGILTYKKPYEAAIDKANQNKNVIAIKDENKRKENKVKRRYQEADLEAPISNHQTKIRKVQSDSQVDIVEQMRDVPIARM

SEQ ID NO: 180293 - protein, 396 aa, unidentified
MLYLAIDQHKAQLTVNLRNEKGDVILKEQIRTDHAEIDDFFDKLTRQAGRHRGYMAILEVCGFNHWLIEKLKEFKCTEIVIVQPGGSTNNKTDKNDANTLGELLWNNRKRLQGGQRPNGIRRIVPADENDTEVRQLSNFRQYLIGQRTRLINKIKGILNKHNMLQDAPTERCKTNKFRKWLETVSLSVVDRMEVDAHLESWKIYDKQIIEVELELVKRTEGNKNVTKIAAISGISAMGAITLLSRIGDIKRFKTPDSLANYFGLTPGCHNTGGKQRIGGITKTGSSIARQVLNFAVNHTIRKDPEMKTWHKKIRNRRGSKIARVAVMRKLATIIWHMLRWDKPYQFRYETVLPQKKTKAKGKAKKGFLRHDNSNPQRKKAKTPLKNRGKTAVRSRA

SEQ ID NO: 180294 - protein, 347 aa, unidentified
MVYVGIDLHRNRSQVAVLDREGNELLSRRIVNAPETFLSLLQGLGDGVRVALEATYGWEWLADLLEDAGYELHLAHPLRTKAIAAARVKTDAVDARTLAHLLRADLLPEAYIAPRGLRDLRDLLRHRVALTRMRSALKQRVGAILAKHGIARPYSNLFGPGGSRFLAELELREGPRRRLDSLLALIADFDREINTTTTEIEQRAQADPYVDVLCQIRGVGRYIAMLVIAEVGDITRFPSARHLCAWAGLTPTVRSSDGKARLGHISGQGSPALRWAVVEAAQHTPTGGGPLRAAYERIAKRRGKQVAKVAVARKILTLCYYGLRDGEIRCLAPRAKTRTIRSTAVAT

SEQ ID NO: 180295 - protein, 403 aa, unidentified
MHKKMLAVVITDAAQAGEFRLERRKFGAGAVDLVQLKDWLAEQGVKEAVMESTAQYWKPVWQALEGEFGLHLAQAHSNKAPKGRKRDFTDAERLVRRYIACELILSFVPDGEQRLWRTITRTKQQLTRDRVRLQNQLEGFLEEARIKLSSHVSDLPGLSARRMLQALAEGETDAANIAALATNGLKATQEQRQDALSAAATLSVLQRQVLKLFPERLTLLDRQIETLDRCAAEALMKHQDAVRRLAEVPGLGADSAQQIIAEVGPEAATFDSPEQMASWVGCCPGREESAEVSASDRSPKGNRPVRRILSQAANAAVKAKGSTYELLYRRLAPRIGHHKAIRAVAHRLCRIAWKILHDGVSYEERGQRTNPQAARYRANRLIRDLRRPGYQVQVTLVSTGVNE

SEQ ID NO: 180296 - protein, 412 aa, unidentified
MKLFIGIDVSSKDLQVAITDSENYQKPIINQSFSNDLIGASEVKELILQLAKKNKYDKIIIGMEATSIYSFHPAYFFANDEDLQKLNLETDVVNPRDTKKFHDAFEENKNDPIDAYYIAEYLRFGRYRVTIARQEEYLALQRLTRTRYEVIASLTRAKQHFIEALYYRLNKLVSVDKDSVKTSIFGATMMSIITDSKTIDEIANMPIEDLIDYLQNKGHGRFSDPKSLAKAIKQAVRGSYRLGKVMKDSIDAVISVYYTEIKTNQKLVKDLDKSIARIVETLTETKILQSIPGIGPVYSAGIIAEIGSIDRFDNEAKLAKYAGLAWRQKQSGTFDSEHTPMTKNGNHYLRYYLVEAANLIRLRDPVFAKYYQKKYSEASFSPHKRACVLCARKLARTIFTLLKNGQIYQTPR

SEQ ID NO: 180297 - protein, 385 aa, unidentified
MRSVGLDLGARHIAWCEVVDGVVRRRGSVDRLSGLEAILGPDTAPAQVAFEASREGWHVHDVLLAWGKKPWMLDTTRIRRIGVGHHGRKNDTIDAEAIAMALDAGRFPVAHVLSPERRALRAKLSVRSELVDTRARQVTLLRGLARAAGVLIGTSSTDGFVQKLEGTPLDDATRALMAPLVATLTVVQEQLAAMDVEIGQIAKTDDIIKLLATAPGVALIVAATFVSVIDEAKRFRNAHAVSAYLGLVPGENTTGGKQRLGSITKHGNTHARKMLVQSAWQILRAGKPEDPLHRWASDLVKTRGKKIAAVALARKLAGVLWAMWRDGTFYDPGSHAQESARGLRASAQSQTLRAEAMKRVAKKIKRRESTPSRATRAKTSRALPV

SEQ ID NO: 180298 - protein, 454 aa, unidentified
MADAKRPRPRQALPPIHPHAAAIDVGATIHVAAVGPDHDPEPVRTFGTFTDEIRRMADWLAACGIETIVMESTGIYWIPAYEILDERGFDVQLVNARDAKHVPGRKTDVSDAQWLQRLHEHGLLRASFLPKGEIKALRAYLRQRERLLDYAASHIQHMQKALMQMNLQLQHVVADITGETGMRIVRAIAAGERDPRILASHRNYRCRASAETIRQALVGNYREEHVFALTQALELYDLYQAKVAACDARVEAVLERLRAAVPPPAEPLPPARARTRQANAPSFDVRAALHALLGVDLTRIHGLGPCLALKLVGECGTDLSAWPSAKHFTSWLCLSPSNKISGGKVLSSRTRRSGSRAASLLRLAARTVGRTPTALGAFYRRLSARIGKAKAITATARKIAVLFYNTLRHGMHYADPGASYYEERYRQRVLASLKRRARALGYALQELPAEAGVS

SEQ ID NO: 180299 - protein, 337 aa, unidentified
MEKKWFVGIDVSKKTIDVVYYDRKRQKVCEEIHRQFPNEQSGFKLMRKWFKECGMKSKELVIGLENTGIYSFDLCLSLESSGIDYCCFNPLHLKRSFGLTRGKDDKVDAWRIAYYCYLHREELVYCKMSSSTIIRLQGLSAERKRHIKHIAEYKAYLTDRKTRAINSTQRRTAKMLEYEEVLVDEIEKEMENIIKNDTNLNKNYELLLSVKGIGSVNAIAMIIHTNNFESFENARKYACYVGVAPFSNTSGTSIKGKPHVCSIGARMLKSDLSMAARSARIHDPQMKEYFERKTAQGKEFGVVLNAIKYKLIQRMFAVVKRGTPFVQLQTYKSSTVN

SEQ ID NO: 180300 - protein, 434 aa, unidentified
MLPVLHADAAGVDIGAEEIFVAVPADRAADPVRSFGTFTRELHELADWLQECGVRTVAMESTGVYWIPLYQILETRGFQVFLVNAQHVKNVPGRKSDVSDCQWIQYLHSVGLLKASFRPPDEICVIRSLWRHRESLVQMAAEHTMHMQKALSEMNLQLHHVLSEITGMSGLKILDAILAGERNPMNLASLCNWRVRSPRETVAKSLEGDYRSEHLFALRQSLVGYRFYQTLISEVDQELEVKMRELPRATTGPEQMPPRTKVRIYQRAGNEPAFDLKAELFRIAGVDLTDVPGISTITAHTILMEVGPDVSRFRNASAFASWLGLCPEKQVSGGKVLYTRSRKVKNRAATALRLGAHSLHHAKNYLGEFHRRMKWRLGGPEAITATAHKLARIAYHMLATKEPYSAEVLINAIASPISELRSDFASKLQTLVTS

SEQ ID NO: 180301 - protein, 436 aa, unidentified
MPTRFLRLQPNLNHILILKNIPSPIPYRATVGVDWADQKHDVFVRFANGDSYRRKIDSRPEAIQEWLLELRSLCAEGKIAIALEQRRGALFFQLCTHSGWIDLYAINPHSLASFRQTFFSSRAKDDPVDSQLLEELLRTHPERLRSYQPEPTTERKLDQYCRQRRSLRDLATKTELKLISTLKQYFPLAVNLFAELGMKSDIALNFLSRWPTLDQLHRAKTQTVRSFFYAHNSRSQSLIEKRLQLIAQVHPVTDDLALIEPLVLTTKCLVAQLRQFNQAISHFDQKIRELFKSHPDHFLFKSLPGAGEQLAPRLFAVFGSNRARWAEAADIQKYSGIAPVVERSGKSLWVHRRLARPIFVCQTFHEFAQQSSHRCSWANQFYRRQRDKGKSHHSAIRALAFKWIRIIFACWKANKPYDESLYLNAVAKRISASSST

SEQ ID NO: 180302 - protein, 391 aa, unidentified
MTKCKTETVNDLSRCLDPLDMDATVIAVIEMSQSSWLVAGIVPGVERQPLKKIAIDEHALLKLLSRWREEAEKKGHKITRVTVAFEAGHDGFWLARRLAALGIEVHVIHASSVAVTREHRRAKTDRLDTELLKRGFLGWLRGERGHCKMVVVPTLAEEDAKRPSRERETLVGEASRIITRLKAAFVRLGIRSFNPKLKAAAERLGTLRTPEGEPIPPNTLAALKRDLERHQIIKRQIREIEQTRLDRLAQAPAKGPHAMVLLLARVVGIGVETADMLVQEVLSRNMRDRRAVARYAGLTGSPDESGAKRREKGLARSGNARVRRGMIQLAWRFLMFQKDSALAEWYRQRTANALSMRKTFVVALARKLLIALWRLARDGVVPEGVRLRPAA

SEQ ID NO: 180303 - protein, 408 aa, unidentified
MKRYYIGVDWGDRLHQVYVGDHEGKKIREMKVPETVEGLAEIGRWLDEQRADGFELWAAIEKPAGRIVDFLLDHGVEVYPVNPKAVDRVRDRYRMSGSKSDAFDAYVLAEFLRTDQAHLKALRPSSENAQELKMLCRDQHRVVRLKSRLLNQLTTTLKEYYARPLEVFQDIETEVALDFLTRYPTPAHLSALKRKEFSRFATKQHHLSKQRCEELWEKLEKPQLGVPEHVVRAKAQLVEVLIDQLRASIKAVKTYHHKVESFFASSPAAHLAKTLPGGKSGTLVAAIWAELGDAQGRWESSGHLQAEAGAVPVTKASGKSHVVHFRFACNKQLRYSMYWFSFVSLNNSEWAKLYYRGQRDKGHNHPQALRALGAKWLKIIFVMWRDHKPYDENFHLANIALQKMRQAA

SEQ ID NO: 180304 - protein, 412 aa, unidentified
MNAVGIDVSKGKSMVAVLQPLGVVVAKPFEVTHTAAELGKLADFLKSLDGETRVVMEHTGRYYEPVVQVIHDRGLFVSAVNPLLIKEYGGNSLRRVKTDKADAKKIARYGLDNWAELREHTPMDTIRYELKTLNRQFHLASKNRTACSNNLVALLDQSFPGVRGWFDSPVRKDGSQKWVDFAMTFWHMDCVRSVSCSAFTERYRKWCKRNNYNFSAAKAEQIHGESKEMIALASKSATTKLLIQEAASQLLNVSRTVEVLRAEMNRVAALLPEYPVVMSMYGVGESLGPQLMAEIGDVRRFAAKKSLVAFAGVDPMPNQSGIKDSRSNRSSKRGSPFLRKTLFVLMTMLLQLAPPDEPVYQFLDRKRTEGKPYYVYMTAGANKFLRIYFGKVRDHLATLEAPPPKDDTSANP

SEQ ID NO: 180305 - protein, 370 aa, unidentified
MNNYITVVGLDVHKKTIVAAVLPSGSDHVTERVTLENQPKAIEKLVRRLAARGAVDFVYEAGPCGYKLQRQMSEMGQRCVVIAPSLTPRRPGDRIKTDRRDAEKLARYHRAGELTEIPVPTMEQEAARDLVRTREDSLSDQLRAKHRLAKFLLRQGLVYGGTKSWGEKYKVWLQGLSFKWEPQQQTFMAYVRAVEEVEARRETLDQQMTDLAQKEPYQTQVKYLSCLKGVDRLTALTLAVEAREFLRFDNVRGFMSYTGMVPSEYSSGERVLRGSITKAGNAHIRRVLVESAWCYRRPNNAVSMTIDRRREGCPPEVVAIAKKAQTRLHRKFARMAGQNKLPQVTAVAVARELAGFVWAIARHFPVAAKA

SEQ ID NO: 180306 - protein, 374 aa, unidentified
MDASSSQRHRDVPKWKKNDHLTESEESKVNVTTIGLDIAKSVFQAHGCGKGGKAVIRKQLKRTQVLAYFADLPTSLIGLEACGGAYYWARELNKLGHDAHLISPQFVKPYVKGNKNDANDAEAICEAVSRPNMRFMPLKGVEQQDIQMLHRIRSGSVKERTALANRIRGLLGEYGIVVAVGLATLRRQLPEILEDAENNLTMISWPLFADLQEQLVEMDKRVNEYGKKIQTLHEGSEVSRRIAQVPGIGPITATALMAALGDGKAFSSPRQVAAWLGLVPKQCSSGGKPKLLGISKRGDVYLRTLLIHGARAVVKVAANKADDQSRWINDLVKRRNRNIAAVAVANKNARIVWALLTKAEAYVAPSPMRMESVA

SEQ ID NO: 180307 - protein, 420 aa, unidentified
MSYWIAGIDVHKKMLAVVVADVEVEGEYQFERRLFGSNPDHLRLLANWLIEQPVEEVVMESTAQYWKPVWGALEQYWKPTGQGTGPMSGTLHLAQAQSNRGPRGRKKDFPDAERLVKRLVANEWILSFVPDAEQRLWRTGMRRKYQLTRNRVQLQNRLEALLEEAHIKLSSLVSDLLGASARRMLKALAEGATDPAALASLADKNLRATPAQLCDALGACTELNPVYRRLLKMFLEELQLIDQQTAQLDKEMATLLSQDQAAVERLAEVPGLGVDSAQQIIAEVGAKAATFASAKNLSSWVGACPGEDESAGVSKSHRSPKGNRHMRRILNQCANAAAKSKGTIFQIIYGRLVSRRGHNQTIGAIAHRLCRLIWIILHQGVRYEERGPAVNANSRRRRTTRMIRELRSLGYRVEAMGSPA

SEQ ID NO: 180308 - protein, 343 aa, unidentified
MGIVEVTGGVDTHADFHVAAAVDANGGLLGVDSFPVDQAGFEGLSGWLADFGTVVQVGVEGTGSYGVGLARFLTDAGIGVVEVDRQNRQVRRKKGKSDPTDAVTAARAALSGAASVVPKLRNGPVEQMRVLLVARRSARHQRIQNMNQLRHLVYCAPELIRVRFKDRPKIGLVKEAAAMRPKPGSDPVAYTTNLVIRNLARRVLALNIEVKEIDRLLVELIDQTAPELLELYGVGPDGAATLLVTAGDNPERIHSERSWAHLCGVTPIPASSGRTVRYRLNRGGDRHANSALHRIVLTRMSSHSQTQAYVARRRAEGLNSFEIMRCLKRYVARQVFKHLPAPP

SEQ ID NO: 180309 - protein, 344 aa, unidentified
MDHFAGLDVSVKETSICIVDDTGKIVREVKLPSEPEALLAVLKNPAYNFKRIGLEAGPLSQWLFGALAEAELPVVCVETRHMQAVLKAQINKTDRNDARGIAQMMRVGLYRPVHVKTIRSQKLRMLLTHRQLLQSKAIAIENDLRATLRNFGLKVGMVGKVRFEARIKELVEKLPDLAALVEPLLIVRRVLREQIVILHRRLLAVVRDDEVCRRLMTVPGVGPVVSLTYRATVDAPARFRKSKAVGAVFGLTCSKYQSGEIDRSGRISRCGDEMMRVMLYEAAQSMLRSKKWSWLKAWAMQIARRRGMKKAIVALARRLAVIMHRIWVDGTEFRWTREQAPAAA

SEQ ID NO: 180310 - protein, 346 aa, unidentified
MEYYAGIDVSLEYSSVCVVDTSGKIVRESKVASEPAALIAWFGGLGLALARIGLEAGPLSQWLYAAMREAGLAVELLETRHVHKAFEAMPVKSDRNDARGIAQLMRLGWFRPVHCKSMGAQETRTLLTARKLVQSKLRDVENSLRGILRGFGLKVGKTTDRSFSGRIRELAAGHPSLEMIAEALLAVHAVLLREFNGFEKQVRRMARSDAKAKLLMSTPCVGPIVALTYASAIDDPARFKSSKQVGAHFGMTPKKYQSGETDYTGRISRIGDASVRTALYEAAHIMLTKAVKGCSELKSWAMRIARRAGMSKAKVALARRLAVIMHRMLVDGTPFNPAAKQTAAAA

SEQ ID NO: 180311 - protein, 350 aa, unidentified
MTSMTSTRRVVTVGVDTHSDVHHAAVIDEVGRPVADAGFPTTPAGYDQLLSWARSHGQITAVGVEGTGAYGAGLARHLRAAGQQVIEVDRPDRRTRRQRGKSDPIDAYAAAAAVLSGTADGTPKTRDGRVEAIRTLRVARRSAMKARTQAINQLKAVVLTGPAELRQALAGQTTRQLLATCRRLRTDKRPAEATDPVTAAAKLTLRRLARRIGLLTEEIEDLDADLRPLVTQTAPALMAVYGVGTEVAAQLLTTAGDNPHRLRSEAAFAQLCGTAPLPASSGRTTRHRLNRGGDRHANYALHIIALVRLSSHPPTQAYAARRRTEGMSNLEIIRCLKRYIAREIHHVLVT

SEQ ID NO: 180312 - protein, 373 aa, unidentified
MTMIGASEDSSNTVYAAIELSKKTWVLGIARPERDRPSIHRISGGNLRELVARVRAAAKGGGRILVCYEAGYDGFWIARSLARENIECRVLDPASIQVNRRARRVKTDRIDVLALLRALIAIDRGERHVCAVVRVPSTEEEDARRPHRERQRLVRERTGHINRIKGLLFAQGIRGIKPKLRRTKIDFSALMTAEGHPLPDRLRRELEREYARLEVIQNQIREIENERDAADAQEPAVERKRQMLIGLQGIGGAGAAILAREVFARTFGNRRQLGSYLGLTPSAYDSGSTTRCQGISKAGNSWARRVLIEIAWLWRKYQPESPLSRWYAAKTREQSPRIRRTMLIALARKLAITLWRYVETGVVPEGAIMSNAA

SEQ ID NO: 180313 - protein, 405 aa, unidentified
MNAVGIDVSKGKSMVAIMRPFGEVVATPYEVAHTSDGLLCLAASLMKLRGETKVVMECTGSYYQPIAYALHEAGLFVSAVHAKLIHDYGNNSIRKIKTDKADAIKIANYGLSNWMELPKFVPEEDIRIMLKTFSRQYSKYLDLKTMLKNNFIALTDRTFPGVNELFTSPARKSDGHEKWIDFSLKFWHCECVCALTPKAFADRYQKWCLREGYRFSREKADDIYASACGHCSVMPMNDASKLLVTQAIGQITAASENIAVIARMMKQLAESLPEYPVVSKMFGVGDILGPQLIAEIGDVFRYRSKGSLVAFAGLEAPPYQSGKFESSNRSISKKGSPHLRRTLFQTTRVYLQRSPADEPVYQFIDRKRAEGKHFYSYMTAASAKFLRIYYARVKEFLLSNDQGSV

SEQ ID NO: 180314 - protein, 392 aa, unidentified
MSQQHCHFDASRSLTALEQDSTIIAVIEMSQSKWLVAALVPGVERQPLKKLDAQEEELLKLLHRWRNEAGQAGREIKRIVVAYEAGRDGFWLARWLQARDVEVYVIHPTSIAVSREHRRAKTDRLDTELLTRAFLGWLRGEKRHCSMVAIPSIEEEDARRPNRERQNLVTEQTRIVNQMKAIFARLGIRTFRPTLRKAEEKLKGLRTAERTPLPENTRAELRRHLARLHVVREQIRAVEQERLRKLAAAPAAENGSHAMVRLIARVLGIGVETADMLVNEVLSRHWRDRKAVARYAGLTGSPDESGRRRRERCLARAGNARVRCGMIQFAWRFLRFQKDSALAQWFAARTADRRGSTRKTMIVALARKLLIALWRLATTGEASDGIVLRPAS

SEQ ID NO: 180315 - protein, 351 aa, unidentified
MRYYGCDAHKRYCVFSYLDKDGDHGPSLRVSNEREHFINFLETLPPGSCIAIETVGNYYWMVDEMEKAGHDPKLTNAGKAKLMMGQLNKTDKLDAEGLALLLRNGTLPEVWIPPGELRDQRELPRMRMTFVGVRTKLKNRIHSYLSKYAIEIKEVRDIFGSKGRKILGKRIEELPQQTKRSVKAHLELLDQVGAQIKSCEEQIKAVVKETAEINLLKTIPGVGDVLAIVIAMEVGDVSRFPRAQNLASYAGTVPRVKDSGGRRYYGRVRPDVNRYLKWAFIEAANVVVLNQKRWSHQHVTRLYMRIKQRRGHGKAVVAVARHMAEATYWMLKKNEPYKDPQKKEPVSSTRK

SEQ ID NO: 180316 - protein, 351 aa, unidentified
MFYAGLDLGKRHSYLAVVDERGRTVRQGRVESTPEGLLASLSGLGPELRLALEATRAWEWAYDLLSDQGLEVTLVHPYKTKAIASARIKSDRLDAHILAQLLRADLVARAYVADPETRGLRELLRYRAFLVGLQGAVKNRIHALLDRLGVRPPMPTPFSRKGLKWLGGLELPQPYGEELRGLLRLLSALRQEIEAVAGRVREVARRDEQALLLTTVPGLGYYAALLVLAEIGDVSRFPTARHLSSYAGLVPSTYASGGVVRHGAITKRGSRFLRWALVEAALHAVRRPGPLQDFYRRLLVGKGAQKARVAVARKLSKAVFWMLRTGRSYREVEPYLAPQGQAGSGAYMADR

SEQ ID NO: 180317 - protein, 323 aa, unidentified
MSSFVGVDMAKNTFDVATPLDNGKHRTKGKLSNDAKGFAEFESWLRKHATADALIVIEATGNYHEALADFLFQKGYRLHIANPATTAAHAKSELSRNKTDKTDAKLISDFAMQKHRKLRLWVPEPQSRRRLRALVRRLEDLNEIRQMEKNRLEVASPNVVTSIESVIAHVLEEITKTEKAIKQHIDDDPDLRGKSELMTSIDGLGEKTAALILAELGDPLDYEGPKKLSAFAGLSPRQDRSGGYVGPTRISRTGSSRLRGGLYMPAIVGIQHNVVLREFAKRLKANGKAPRQIICAVMRKMLHLVYGVLKSNKPFEPEIALAH

SEQ ID NO: 180318 - protein, 497 aa, unidentified
MAREDSVSVRLGVWSGHRPRAGGRWLVFVPVEPRILCGACEPVGQHGAEGSHGNRGLLPSSTSVRLPIFSALPGTDIRPCVGRERVVMEVIHPRCAGIDVSKRDAKVCVRIAGGGRRGATSTVTTWGAFTNQVLALRDHLIEAQVTLVVMEATGDYWKPFYFLLEDSLNVMLVNARHVKNMPGRKSDVSDAAWLADLGAHGLVRGSFVPPAPIRHLRDLTRTRTAITRERGREVQRLEKLLEDAGIKLSSVASDINGVSGRAMLEAMIAGQSDPKVLADLAKRGLRSKIPALTEALTGRFSEHHAFLARLHLDLIDRHTTAIKELTDRIEVVVEPFRGFRELICTIPGISTLVADVITAETGADMSRFPTASHLASWAGTCPGSNESAGRVKSTKTRPGNPYLKGALGVAAMSAARSKNTYLSVKYRRIASRRGPMKAIVAIEHAMLTAIWNMATTGALYDDPGSDFYTRRNPDKAKRRAIEQLRVMGYTVTLEPTG

SEQ ID NO: 180319 - protein, 387 aa, unidentified
MQIADRSEAPTAIRTDLGAIFVSLELSRSTWLITSLSPGSGEKMSKHSVRGGDIAALLKRFTQLQEKTQARTGKSFEIIVIQEAGLDGFWIHRVLQSKGIDSHIVDPASIATSRRRRRAKTDRIDGEALVRALLAYKRGEPRVCAMVKVPTPEEEDRRRLCRERKVLIAEQIEHVNRLKGLLFSQGISGYEPLRRNRWTRLEELQTGDGRPLPKHLTAQIRRELNRLELLLEQIKAVEVERDALLAAEETSAPAPAAILLNIRGIGPEFAAVLWSEGLFRHFDNRRQVAAYAGLAPTPWQSGAVDREQGVSKSGNPRLRTTLIQLAWLWVRHQPRSALTLWFEARVKRNGGRLKKTTIVALARKLLVALWKYVTAGVLIEGAAMKVA

SEQ ID NO: 180320 - protein, 344 aa, unidentified
MKITRVGLDIAKQVFQVHGVDERGDTRVRKQLPRAKVLEFFAQLPSCLIGMEACASAHYWGRELTKLGHTVKLIAAQFVIPYRKRGKNDANDAEAICEAVGRPNMHFVAIKTEEQQSVLMVHRARTLVVANRTAQVNQIRGLLGEFGLVVPKGVARLRRELPGILEDAENGLPDLAREVLAGLREQFHELDARVATYDRQIRALAAASEPAQRLMRVTAIGPQTATALVASMGDPHVFKNGRSYAASLGITPRQNSTGGKQRLGQITHQGDRYLRTLLVHGARAYLRVVDKKTDAKSAWARRLKERRHVNVAAVALAAKHARIAWAILAHGTEYRPAGPEVVTA

SEQ ID NO: 180321 - protein, 357 aa, unidentified
MEHTTLSWLGQHIYIGLDVHKLSWVVAIVTEACSFKIFTQPPTPIVLVEYLKRHFPGATYHAVYEAGYCGFWICEELRRLGVDCIVINPADVPTTDKEQKQKNNRVDARKLARALRNGDLVALYVPDREALEHRTLVRSRHSFVAKQTRTKNQIKSLVAQFGILLPEEIVARHWSARYVAWLERLQLTTPQGTAALKLLLEELAHQRTTILRLNRQIRALARTERYGRRVGCLTSISGISTLVAMILLTELVAITRFKDLDHLASFVGLIPGEASSGEERTMTEITERKNPYLRWVLTEAAWVAVRYDESLALAFNTLCRRMPKNRAIVRIARKLLNRVRFVLRTEQPCVVLLPAAA

SEQ ID NO: 180322 - protein, 300 aa, unidentified
MDNHTQYSGFAGVDLAKKVMQIHFVAGDGEITDKQVKRAEFLDFFRNRSKCLIGMEACGASQDWARKLEAMGHEVHLMSPKAVKPFVSGQKNDYNDAIGIYKAMFNGVRRVPVKSTEIRDLQTLRRIRSQVTKDRVKEINHVRGLLAEYGIVMGKSITAFNKGISSALESLKERGDVSPLVAEELRTTVESIKTKIERQKKLDREIEQLARGCKNYENFLKTPGVGPFTAAMLCVLLCDPDIFANGRKFAAYIGLAPRSRGSGGKYFVTSIPLKFNCDSESRAVFVECAQAIARYKNKSP

SEQ ID NO: 180323 - protein, 410 aa, unidentified
MKKHNYRTKKVNEINWPELGQQLGGEAVTFAVDVAKAQQYALLTNDTQSLSIIVKWELLETKGLIHELKQLNCPVTVVMESTGTYGDAMRHQFRQAGFILYQASAKRVHDAKEIFDGVPSLHDAKAACLIAKLHKEGLTKPWHELDEAGRELNAVRREYDMHQSQYERNQNRLEAYLSRHWPEVLGLFDPDSVTLEKLLITYGSPQAIAADAEQAAKDMKSWGRHFLSAEKIACVIDSAVGTIGQPCINAERLYLQALATEMQHSRCQRQAAKQLLEASVEADAGLKEMAALIGKLTTAILIGLHLDPRNFSSAHSFLKALGLNLTEKSSGQYHGQLKLSKRGSATARKYLYLAALRLIQKDPVIGEWYRAKADPKVKMKTVIACLRKLAKALWHVARGERFDARKLVTI

SEQ ID NO: 180324 - protein, 352 aa, unidentified
MVIVIGADVHKATHTFVAVDDVGRHLGEKTVKATTSGHEAALRWARTRFGVELRWGIEDCRHLSARLERDMLAAGQQVVRVPPKLMAQARASSRERGKSDPIDALAVARAVLREPDLPAAAHDESTRELKLLVDRREDLVGERTRQINRLRWHLHELDPEFTVPVKALRTRAQRERVSAWLDGRPGLVAELARDVLTDITAGTVKIDDLEKRITTLVVERYPHLLAIPGCGPLAAAKIAGETANISRFRSEACFAMNAGVAPVPVWSGNTRGRVRMSRTGNRQLNAALHRIAVTQIRLDGLGRAYYRKRLHQGDSNVEALRCLKRRLCRTVFNALHADQQPTTIAASLPLAA

SEQ ID NO: 180325 - protein, 410 aa, unidentified
MVKENFIYVGIDLHKETHTAVMIDCYNQKLGEITFPNRPADFPKLVAKVKKCNTDGKTIVFGLENAYGYGRALAVWLIDKGYLVKDVNTAISHRQAKHRGAMYRKSDSDDAEAIALATLNMLDKLPDAYPNDAYWSLGQLVHRRDNIMKQRTRLVNQLHEQLCIAYPSYKQFFNDISRPTALYFWEHYPSRKYLKGKSVEDLRAELVPVSHNKCSTKTCEKILDAVASDKVKNIDYQDARDMVTLSIVSDLQHYDSQLAEVDKMLEQMYKMLGYTLTTIPGVNVITAVKILAEIGDIKRFSNANKLAQFAGIAPLHLSSSGKGKDLATKQGNRRLQATIYFLAIQMVQVSSKGTPRNSVVRAYYEKRKAEGKTSQQALICISRRLISIIYGMLKHGTEYRMPVVESAGEK

SEQ ID NO: 180326 - protein, 400 aa, unidentified
MLSIGIDVSKGKSTVCGMKPGGEIVYTPFEIQHTREGMSELVSLLHNSCEEVRVVLESTGSYHCPVVAALLENGIFVSVVNSLRMKRFCSQSIRKVKTDRIDAMQIALYGLAYWQELQPTRLPEDTYRELQLLARQYYQMTSLLIKAKVDFNALCDQVLPGMQELMNDHAGRHKLSDFVLRYRHTAHILEMGETRFRKDYCKWAEKKGYRNRERMAALIFATAQNGIPVLPNAPSTQIVITEAIRVLHTVEASRDAILTQMQALAKTLPEYSLVREMPCIGDTLAPRLIAEIGDVRRFHSKRALIAYAGIDAPPYQSGKFCANNRHISKRGNRYLRKTGYEVMQSYVMHKPANDPIFTFIEKKRGEGKSGKLAMVAGLNKFLRVYYGKVTELYRSLPAIE

SEQ ID NO: 180327 - protein, 407 aa, unidentified
MLWGGGVDIASIVRCEPMELPMQTLNNLSRSLIALEPASTLIAVIEMSLSSWLVAGIVPGIERQPLKKLAVDESALLRLLHRWREEAEKAGCRIERIVVAFEAGRDGFWLARWLKARSIEAHVIHAASVAVSREHRRAKTDRLDAELLKRAFLGWLRGERNHCKVVAIPTLKDEDAKRPSRERESLVGEQSRIVNRMKAALIRLGIRGFNPKLKRAAGRLDGLRTPEGEPIPPNTLAELRRDMERRRLISNQIRQIEEARLKHFEQAPNDGPHAMVRLLARVIGVGIETADMLVHEVLSRNMHDRRAIARYAGLTGSPDESGRKRREKGLARSGNGRVRRGMVQLAWRFLTYQKESALAQWYRARTENARGARKPMIVALARKLLIALWRFAWQGVVPDGVVLRPAQ

SEQ ID NO: 180328 - protein, 360 aa, unidentified
MRIIGCDLHARQQSVATLDTDTGEVVNRTLQHEGHEVREFYSGLPRPVLVGIEAIGPMQWFLNLLEELEIECQVGDATKIRAAEPRKQKHDRRDAELILKLLVEKRFPAIWRPSQEQLDLRALLLHRHQWVRLRTQIQNALQAIALANGLRRGPSLWSYDGQAKIAFLPLPPHTSLRRSALQALYRHMDEEIEKLTVQVAEQAERRSGAQLLMTHPGVGPVTALATDVFLGDPQRFADGKALASYVGLIPREYSSGARKRLGALTKQGSPFLRFLWNEAGAHAARHDPELQRFYRRKLVQKGLGKARVAVARKLGIRLWIMLRDQIDYQEFCRRGQKHSGAACAGMPETGFGAYRHRPVD

SEQ ID NO: 180329 - protein, 347 aa, unidentified
MTYFAGLDVSLEETTICVVDETGRLTKELRTASEPEPLVAALAGLGLPLERIGLEACSLTAWLHDELRAVGLPAVCIETRLANAAMKTMPNKTDRNDARALAQIMRTGWYRQVHVKSRQSRLWRSLLVARRTVLNEMRAIENVVRAILREGGIKLGTPARAAFAGRVREMAADEPLILPLVTPLLAILATMLEQLDRLTRQVLTIVRGEAVCRRLISVPGVGPITALAFRATMMSRSGSDSPGTSGRISRLTPSRYQSGETDIQGKVSRCGDELARTALYEAAHSLLTRSRKWSSLRAWGMQVARHRGMARARVAVARKLAVILHRMWSDGTEFRFGKEPAAAVAAA

SEQ ID NO: 180330 - protein, 315 aa, unidentified
MSHNAYKFYVGIDVSKGTLDIAISNSASFFQFSNNEDGLRNLIKVLPAKKNSLIVLEATGGYEKLAANYLQRKKFNVAVVNAKRVRDFAKASGKLAKTDSIDAQIIMLFGRAFHPSPQVPPSAEEELRQENINRRNQIVRMITMEKQHREHTSPAIKKSINKHIRLMEKELELIENILKELFNQDAILKDKLERLDEIKGVGEVTAMTILIHLPELGKLSHKEVSALSGVAPFNKDSGQSKGKREICGGRAPVRAALYMAVLSARKFNPALKRFYERLIAKGKLKKVALVACMRKLIIIMNAMLRDKTRWEAMYV

SEQ ID NO: 180331 - protein, 349 aa, unidentified
MTEQRRSYAGECVYVGVDVHKETYTVTCVCHKQIVKPATVQAEPGGLAVSLPRGFPGATLYSVYEAGFSAFVLHRVLTKAGITTMIVNPASIAVAANDKVKTDRRDSKKLAIDLADGRLRGIYVPTEAAELARLLPRTRAQIVEHRATIARQINAKLHQFGLIAPSSRRMISNRYLREMATWTLPPELSVSLTLLAEQWRFATRQLIEMRRLLRDQAKAQEEIEKVYRSVPGIGEVVARTFATELGDMTRFANERALFSYTGLTPSEHSSGTAVRRGSIRRQGSSRVRHLLVETAWRAIPRDKALKEIFDRIAATRGKKRAIVAIARRLTGRIRACFRQGTTYAVGTAA

SEQ ID NO: 180332 - protein, 352 aa, unidentified
MAPRELVVVGGVDCHSEFHHAVALDERGRWLGELRFAATRAGYGRAVRWFAAWGHVEAVGVESSGSYGAGLARALTEGGIRVVEVNRPHPHLRHLRGKSDAIDAEAAARKVLAGEATAVPKDTTGVVEAIRELKTARESAVKARAAALVQLRDLIFTAPAALREALGGKSLRAQAALCRRLRPDRGRIQEPAEAAKFALRSLARRIASLDAEVAELDGELEVLVHRAAPRTVALLGLGVIHTAQLLVTAGQNIGRVRAEASFAHLCGVDPIPASSGKTTRHRLNPGGDRAANSALDMIAVVRMRHCDRTRAYVARRIHEGRGKREIVRCLKRYIAREVYRSLQADLGASLAP

SEQ ID NO: 180333 - protein, 368 aa, unidentified
MIERVHGIDRHKSFWTISVLNRAGEEVRFEGTCREFREYVGELGPSDAVALEASNGSFWWADQIEAKGAKCFVVDPRKFRIIKDSWNKTDRQDARNLAKALWVHVVTGEFGIPTVYKPSGVIRELRKLFAQYCALNRQITRLKNGLQAIFVENGVELKREGKARLFPAESGLELVKELEVSAASRVCLEVSLQVLWSVEEAKERVAAEILLAGEPLKSQVELLITVKGVTPLIALAFLADVADIRRFRTLRKMNAYLGLVPRARNSGGKERSGHITRESRKLTRTILTQCVHHVAASSVSLDRYYQELRVKRGTGRARVAVIRRLCGMMRRMLLSGEQYRWMDRRLCEKKLRQYERVLKRMKEERTAA

SEQ ID NO: 180334 - protein, 462 aa, unidentified
MGCISLTKTQMRSRRGLSYKAFAEIQPACSGCRECIGWGDHTMTDDAGYAALVGIDWADTQHDLCLRATGADQEAYGVIGPMPEAIDQWARELAARFPGGKIAVCLEPSKGSLIYALLQYDHLALYPVNPRMLARFREAFAPSGKKDDPTDAQLLLELVSKHREKLQPWRPADEHTRTLQYLVEHRRKLVNDKTRLTNRLTSVLKGYFPQVLCWFAALDTPLLWAFLTRWPTLEAVQKADDATLRTFFQAHHAHNRVINQRRMDGIRQALPATTDQAVIRASALLVHALVEQVGCVTEAIARFEKEIDALTRSHEDFPIVASLPGAGPVHASRLISALGPDRSRYEHVEDLLTFAGIAPVIERSGHMTVTHFRWFCPTFLRQSFHEFAGQSIQHSQWAKAFYHQQRRRGKDHQAAVRSLACKWVRIIFQLWKKRMPYHEQIYVAALQRRGSPLWQLMAAQQV

SEQ ID NO: 180335 - protein, 315 aa, unidentified
MTGRPVVGVDVAKDRLDVAVRPSGETWSAPNDEAGITAVVTRLRPLDPALIVCEATGGFERAAIAALAAAGLPVVVANPRQVRDFARATGQLAKTDQLDAGILALFAERVRPTPRPLPDAAAQLLDAVLTRRRQLLEMLVAEKNRLGFAPKALHRGIQAHIRWLERQLDDVTTELATLIEGSPVWRAKDDLLQSVPGVGPIVSYTLLGELPELGTLSHKQIAALVGVAPLARDSGTLRGKRMIWGGRASVRTVLFMAALCGRRWNPALKVFYERLKAAGKPTKVALIACARKLLTILNALVRDQSRWTSHVQYSC

SEQ ID NO: 180336 - protein, 343 aa, unidentified
MRTVTTIGLDIAKSVFQVHAVDAAGKVIIRRHLKRRYVLAFFEKLPPCLIGIEACASSHHWSRELQALGHSVRLMPPAYVKPYVKRQKNDATDAEAICEAVTRANMRFVETKTADQQSGLVLHRTRHLCMRQQTSVINAIRAHLAEFGVVAPVGRNGVEELLRVVADPDDKRVPEVARACLVALGAQLRRLKDQVLEFDRMITALHRSNKMSIRLDECPGVGPVLATALVATVADPKIFRSGRDFSAWIGLVPKQHSSGGKDRLGSISKQGDRYLRSLFVIGALAVIRYAKVHGIRHRPWLTALLARRPAKVAAIALANKIARMVWAMMAKGERYKEPVALAA

SEQ ID NO: 180337 - protein, 426 aa, unidentified
MKKESIRIKEFRQLRKEIRGSKEYLIAGIDVAKEKHNAFFGTATGKTLFKRLVFENSKEGFERLVRQTEAIKVQNNLKKVIFGMEPTSNYHKPLGEYLIKSEHNVVLVSGVAVKRNRELLDGRWDKHDMKDSANVADLVSQGKCQYYEYPSIEVRDLRCLLSLKRHLKKQEQRLKVRIRNSLLAQYFPEMDRYYGSFEPENLAIVRHLLVPSTIAGLEYSKFFKTVATRHKGLRQHKHLYRIWQQAGQSIGCEAGEAAACEAAVLVEQLKQMREEIGYLEQEIESVCYLFSEYEYLLSMPGFGRDVSSKVLAYIGDPFRFENRRQVLRTSGYDLSANRSGKRSHLAIPVISKRGKADLRYALYQAALIASTRNRHFIDYYTETIRGREREKGIKTKMRVKLAAKMLVIAWTLMKKKEPFNPDYLKR

SEQ ID NO: 180338 - protein, 370 aa, unidentified
MKHGTTYVGLDVHKDSIAVAGLFPGHREVREMRVANEGQALRRLARQLRRQGKSEVICCYEAGMCGYAVQRALQTTGVTCKVVAPSLVPRKPGERIKTDRRDARKLAELLRAGLLTEVHPPTPEEEAVRDLCRAREDAQQDLVRSRHRLDKMLVRKGITYPAKRKWTHLYGAWLRRLQFEVEAERIVFQSYLLTVEQREQHVRHLDAVLEQMTQRPPYRQAAGWLRCLRGVNTVTAMTVLAELHGFRRFESPRQLMAYLGLVPSEHSSGASRHRGRITRSGNSHVRRLLVESGWQYQHRPSVSRGMRQRREGQPPWVLALADRAQQRLHRRYWRLTLQGKPKGKAVIAVARELVGFIWALLYRDAAERAA

SEQ ID NO: 180339 - protein, 338 aa, unidentified
MDHYVGIDLHSTNNYIAIIDHDNKRVFKKKTKNDLRLVVETLKPYQEQITGVVVESTYNWYWLVDGLIDEGYRMHLANPSAIKQYAGLKHSDDVTDAFHLANLLRLGILPTGYIYPKEERPIRDLLRKRTQLVHQRTLQIQSFQNLVSRNLGKSMKGTAVKKLSEDDVEHLFHDKHLVVAGKVSIATILFLAEKIKQLEKTLHKVAKLKDEYRLLMTVPGIQKILALTIMYETGPIERFAKVGNYASYCRCVGSRRLSNEKVKGKGNRKNGNKHLCWAYVEAAHHALWHYEYVERYYQKKMAKTNLIVARKTIAHKLARACYYIIRDQTEFDPARVFV

SEQ ID NO: 180340 - protein, 319 aa, unidentified
MDRTHVFVGIDVSKAQLDVGFVPKSESLSVANAEEGMALIIERLAKLDVALVVLEATGGLETRITAALSAAGIPVVVVNPRQVRDFARATGRLAKTDAIDARILAEFAMAVRPKIRALPDEATSELKALSARRRQLTEMIVAEKNRLGSASKSVRPNIEAHIRWLKDELDRIDDDILQLIKNNSSFKGKDTLLRSAPGIGPVISATLLCQLPELGSLNRKQIAALVGVAPFNRDSGKFKGKRVVWGGRTHVRRALYMGTLVASRFNPVIKEFYNRLLEAGKSPKVALVACMRKLLTILNAMIKHQRAWQASSSMSVVCC

SEQ ID NO: 180341 - protein, 419 aa, unidentified
MSIERRKVCGIDVHKSFLVATILDREGNYETKKIHQDLDSLLGLRDWIISQACDSVAFESTADYWRPLYTVLQDKVPVAVANANHIKHVPGRKTDITDSRWIAQLELNNLITPSRIFSGESYDLRSLTRSRELLVQNRTELKNKIHHLLDSASIRLSSVLSDLFGKSGSIILKGIVENKPFEEIVNSLPKRMRNNADAISATLPLSIPPVCLVLLQSYLNLVDNHDEEIKLIEGRIREALQSKSREQQILTSIPGVGFIGASTLIAEIGDIHDFEDADKLAKWAGLTPSVYQSANVTKTGSITKQGSRHIRWILVELAHVAIRSPGRIRTFFERLMPKKGYKKAIVAVARKMLRIVWHLLVNNEVYVDEMPRSKQVKLPKLPAKIQKIGINRLIELLSKASEVIIKDNDQEIFRLGLRD

SEQ ID NO: 180342 - protein, 347 aa, unidentified
MQFYTRQHRHYCGVDLHARTMYVCVLDQAGNVLVSKDIASAPEPFLELIAPYREDLAVAAECMFTWYWLADLCAREGLAFVLGHALYMRAIHGGKAKNDRIDAHKIAALLRGGMMPQAYVYPHQMRATRDLMRRRNYFMRQRAELLSHITNTNHQYNLPALGVRPARPAERSGLAEHFTEVPVRKSVEVDLSLVEHYDRQLLPLERYLESNAQAQDPVALAIVRSVHGMGKVLGLSILYEIHDIGRFSRVQQFLSYCRLVKPTKESGGKILGHSGKKIGNAHLKWAFSEAAVCFLRANKPAQALRARLMAKHGKGKSLAIIAAKLARAVYFMLRRSEAFDPERFFAH

SEQ ID NO: 180343 - protein, 421 aa, unidentified
MPNIEIGVDSMVKENFIYVGIDLHKETHTAVMIDCYNQKLGEITFPNRPADFPKLVTKVKKCNTDGKEVVYGLENAYGYGRALAVWLIDKGYLVKDVNTAISHRQAKHRGAMYRKSDSDDAKAIALATLNMLDKLPDACPNDAYWSLGQLVHRRDNIMKQRTRLVNQLHEQLCIVYPSYKQFFNDISRPTALYFWEHYPSRKYLKGKSVEDLRAELVPVSHNKCSTKTCEKILDAIAGDKVKNNAYQDARDMVTLSIVSDLQHYDKQLAEVDKMLEQMYKMLGCTLTTIPGVNVITAVKILAEIGDIKRFSNANKLAQFAGIAPLHLSSSGKGKDVATKQGNRRLQATIYFLAIQMVQISSKGTPRNPVVRAYYEKRKAEGKTSQQALICISRRLISIIYGMLKSGTEYRMPVMENTGETV

SEQ ID NO: 180344 - protein, 314 aa, unidentified
MNQREQGVFVGIDVAKDSLEVSIRPSGEGETFANNDQGIALMRAFINQFTPVLIVCEATGSFETRAVTDLAVSGLPVVVVNARQVRDFARATGTLAKTDRIDARVIAHFADAVRPDVRPLKDRDAQRLDALITRRRQLVDMLTAEKNRLLTAPEWTRADIEAHIAWLKQCLKKVDKDLATLLKQSPLWRETERILRSTPSVGPVMAYTLVSDLPELGSLNRRQIAALVGVAPMNRDSGTFRGKRCIWGGRSAIRSVLYMSTLNAIQFNPLIKPFYERLRAAGKLHKVAITACMRKLLTILNTMVKNRTCWMEHA

SEQ ID NO: 180345 - protein, 332 aa, unidentified
MSSFVGIDIGATALEVVIRKNDKNGAVKSYQQTPKDHEKLAAQLLKLDPACVVMEATGIYYLNLAVVLFNSGLKVSVINPNSFNHFAKLTLTHSKTDGIDAALLAEYAQRMTPRLWTAPDPKLLSLRDIGRQINRLVGRRTEAKNNLHALQAKDSTYQPLIDDELEGIEYLEFRIERMRNMALEIIANNEKLKQKLENLTAAVGIGTNSAIMIICELELLPEHLKSSQVSRFAGLDVRLTQSGTSINKPGRLSKAGNSYLRTALFMPALSAATHDANVRAFYQSLIQRGKKKMQALCAVMRKMLTGIWACLKLNTPFDSSKLFSEEHKKACA

SEQ ID NO: 180346 - protein, 339 aa, unidentified
MNHTAVGVDIAKSVFQVYWVDPHTGEVVNKAVKRDRFLVSFTNREPCLIGMEACGGAQHWARQLTKMGHQVKLMPPKFVKAFNIRNKNDPADARAIWMATQIPSKPVAVKTEAQQAVLALHRMRHQLVKFRTMQINSLRGLLAEYGEVMARSREALDKAIPEILAKLSDRLPAMLIDTLREQWNGLTGLDRQIAGIEQRLQAWMKDDVACQTIAAIPGVGLLSATAAVATMGDATAFRSGREFAAWLGLVPKQTGSGGKVQLLGISKRGDTYVRTLLIHGARSVLRHPDKAGAWVEQLGKRRPFNVVIVALANKIARTIWALLAHDRQYGREYMSSKSL

SEQ ID NO: 180347 - protein, 349 aa, unidentified
MKQVSMIGLDLAKNVFQVHGIDAAGKVVVRRQLRRPQVEKFLAALPPGVAVGMEACSGAHHWGRVVQKLGHEARIMPAAYVKPYVKRNKNDGRDAEGVCEAMGRPTMRFVPVKSLESQAVLVLHRTRRLLVRQRTMSGNAFRSALAEFGIVAAQGLKGLGSLMELLADPASAVPEAARLPLRVLARQWETLNADICKLETEIVRAAKTDEVARRLMAIPGLGPIGATAILAAVPDIRVFKTARDFAAWLGLTPRQFGTGGKHSSGGISKKGDRTLRTLLTLGATAHLRVERARDAKDPWLQALLARRPFKVAAVAYAAKMARIIWAMLVTGEYYRAPNRRHSGSVQAAA

SEQ ID NO: 180348 - protein, 463 aa, unidentified
MQRSGKKTSTAVREPDVEGLPVVRPNVAAIDLASEIHWVCAPSIDRSGREGEQFGATTPELERMAEWLKERKVESVAMESTGVYWIAPHEVLERHGLEILLVNTRELARVPGRKKSDHVDCKWAQRLHSCGLLVGSFRPNEQICMLRTLVRDRGNLVAASADWLRRMQKALDQMNVRVHRAVKDIDGMTGMAIIRAIVKGERDPVSLAKFRQPHCKKSEKQMADELTGHWREDHLFSLQESLKMYDAVQAGVADYDREILRKLAEMEREDCREQQAPKLKNANKARAIKTRGEEPLRQALYRMSGVDVTAIDAIGAGTVQVVLSEYGPDLSRFPSEKQFVQHATLAPHKPTSGGKALKKKKRNNGSTRVAAALRMAATSLHHSETALGAYFRRIARHKGKDIAVFATARKLATLIYRLLRYGHPYVDEGAEAYEKRYREDRIKSLTAAVKALGFELTPKACDA

SEQ ID NO: 180349 - protein, 430 aa, unidentified
MEGKVSNYQWYVGIDWGAECYEICVLDRQAQVVARKSIAHSGTGIAEFVDWLMKQCEGKPERVAISIETPRGAMVESLVERTFAVFAINPKQLDRFRDRYTVAGAKDDSRDAFVLGDALRTDEHCFHRVGLDQAAILRMRELSRLEEDLQQESNRLSNQLWEQLHRYYPQMLALSKGADEPWLWELLEWAPRPAEAGKLELAKVKQLLRSRRIRRIRAERVIEELKKEPLRLAPGAEEAACEHVLLLLPRLRLAHEQRTQVAKRIQQMLREMSAAEPTEKADKREHSDVKILLSLPGVGRVVPATVLAEASGPLRERDYHSLRNYGGVAPITRRSGKKKVVSMRYGCNMRLRNALYHWARTSTQKDAAAKKHYAALRQAGHSHGRATRGVMDRWLAVLMAMLRTGTLYDPERRGKGQATQANGRGDAKIG

SEQ ID NO: 180350 - protein, 390 aa, unidentified
MHVVAHQPEAPGAIRSDLGAIFVSLELSRSTWLINSLSPCAGEKISKHGVAAGDIGALLARFSEFKQKAFARTGKFFPIIVIQEAGLDGFWIHRVLQSEGIESHVVDPASIATSRRRRRAKTDRIDGEALLRALLAYKRGEPRVCAMVKAPTPEEEDRRRLSRERKTLIGERVEHVNRIKGLLFCQGVSDYEPLRRDRRQRLDELKTGDGRALPEHLKAQISRELDRLELLLEQIKAVEAGQNTLFAAAKAEAPTPAPVTMLLDIKGIGPEFATILWMEAFFRSFANRKQIAAYAGLAPTPWQSGAVNCEQGVSKSGNPRLRTTLIQLAWLWLRHQPQSALALWFKERVTRNGGRFKKTTIVALARKLLAALWKYVTAGIVIEGAVMKAA

SEQ ID NO: 180351 - protein, 438 aa, unidentified
MTVTVAIPFYKVVILMMKLKYSICCGLDVHKNVIVATIVITNRDGVSEYRQKSFSTINSDIQRFHNWLIENNCYHVCMESTGKYWIPIFNYLENDIDVCLTHPKYVKAIKGKKTDKKDSKWIADLYKFDLVRCSFIPPKDFRQLRELARYRFKLVCMKSSEKNRIQNCMTVSNVGIASVLSDPFGKTATEIMSYLLEHTADSIDEKAVRKLIKKGAKAKSDEIIEAIRGYNIETDQAKKLELARGHLEYLDNMITQTEVELYVRIKPYYEFVEFVSTMPGMTELSSTIVLAETGVDMNIFDDAKHLCSWCGLSPSNNESAGKKKSVRIAKAGAYLKPMMVQCALAAIKNKKQPYFAIKYGRIKKRRGHKKAIIAIARMMMVCIYHMVSEKKPFTPTDYEDLMAPQNHVERVVLNENNVFAYLESLGYDSSKLVKRNDN

SEQ ID NO: 180352 - protein, 316 aa, unidentified
MEVVPVFVGIDVSKARLDVYVRPLGSRESLANDEVGIRALVKGLREQQPALIVLEATGGVERQVVRALASEELAVVVVNPRQVRDFAKATGQLAKTDSIDAEVLARFGEAVRPGLRPLLDVGSEELRALITRRRQITEMIVAEKNRASGASKSVRKRIDAHIRWLEAELDRADKDLDQSIRQSPIWVEKEDLLQSVPGIGPVVSRTLLAELPELGRLNRKQIAALVGVAPLNWDSGTLRGRRAIWGGRATVRAALYMAALVASRRNSVIRDFYRRLRNAGKVPKVALVACMRKLLTILNAMIKHKTYWSANTIQAT

SEQ ID NO: 180353 - protein, 341 aa, unidentified
MATSTQKPSYEDFVGIDVAKETIDCWLRPKTEFSQWTNRPEGFERLHQWLNGQSCQQKNTLICIEDTGIYSDRLFATLTNNGWKCAVVKTTAIDKVAPEHHRKEDRFDAKLLAEYGDRYADRISLSDVPERAIKALQQFYAERGRLIKARGATQNRRQQAPHALVESELLAQQWQHQLQFYNQQIQTLESRMRQLIAEHDGLNRYYELLRTIPGVGEVTGWLWLILFYGQTKLNHKQIASRFGFAPHRHTSGSSVRGRTRSSGHGNSQMRSCMTMVARSVSHHYKRFARYKQRKLEEGKPWTIVRNNLINKLIKIIRAISNSGQPYRKDYESRFDRQKNVA

SEQ ID NO: 180354 - protein, 326 aa, unidentified
MQGKVPSQRSAKARVYIGIDVCKDRLDGFIHPVGERLAVANDAGGLKQLKKIIASYDVVLVVMEATGKFHRLAHRNLHDGGFKVAIVNPLRSRRFAEAIGTLAKTDRVDARMLALMGESLKPEALEPPPELMQTLQELARGRETAVALKAAISNQIHASSSKMLVRELNRQLSVVETTIVNLEAELGRQIDADPVLARRFEILTSIPGVGLVAAVALIVELNEIGRLSSKQAAMIVGLAPIACDSGQRTGTREIRGGRKHLRTALYMPANSAKQHNPDLKIFHDRLIKAGKLAKVAITAVMRKLVILANTLVREDRLWEPKAVIAR

SEQ ID NO: 180355 - protein, 317 aa, unidentified
MSEVSFPSQVLRGCGIDVHLKVVVATIKGEGIRKETRSFNTFTSSLTELKEWLLQNGITHVAMESTGVYWKPVYHVLEDAIPNVWIVNARHIKNVPGHKTDKMDSDWICKLLLAGLLKPSYIPPKEQRQLRDLTRYRNKLIQHVSSEKNRIMRILEDCNIKLSSVVSNTSGTTATKLIDWLCEGKFITLKDIESIYHGKLSATPEELLKACTGFVESHHVYMLQMIRRDIDQTTVLIDELGVKIREVLSKYDNAIELLKEIPGFSDKVVEDLVAEIGFDMSKFPSEKHLASWAGICPGNNESAGKKKAEESLTETNK

SEQ ID NO: 180356 - protein, 358 aa, unidentified
MNRNTGMNAGQIIGTMNGQQVVGLDIAKHVFQLHTVDMSTGEIINVQIKRAKALEHLANKAPCLVAMEACGGAHHWARELQALGHGVRLLHAKAVRPFVSGNKTDATDARAIWLAVQQPGVKFVGVKSATQQATLTLHRQRELMMKMRAMQTNALRGLLYEFGAIFAKGTKAMLSEVEQALADLSGQLPQMVADSLREQVARIKALGEDIVRIEKRLGLQLRQDPQMQRIAQIPGVGLLTATAAIATMGEASAFKSGREFCAWLGLVPQQTGTGGKVRLGNISKRGDTYLRTLLIHGARSVLSHAKEPGPWLEGLKGRRPASVVIVAQAAKMARTIWAVAAKQQDYQRGYQSVRPQAA

SEQ ID NO: 180357 - protein, 356 aa, unidentified
MAMLAELVDGVIGVDTHRDTLSAAAVTNLGGVLAQTTTSTDAAGYQQLLDFARVQVPDRRLWAVEGAGSFGAGLAALLQQRGEQVVEVARPKRPTSRSGAKSDALDAVRAARQALGQDHPATPRRRGEREALRVLLTTRRCATLARVAAIGQLKALIVGAPEELRAELRGRRTSTQIHYCASLRERPTRSLEHRATVRALRATAQRIQALQAEADQLQAELTTLVGAVAPWLLEVPGVGPLSAAQLLVSWAHAGRFRSEAAFAALAGTNPIPASSGQVTRYRLNRGGDRQLNRALHTILLVRLRTDPDTRAYVARRTAEGKSRRDAKRCLRRVIARQLYRLLERYDQPGVEVLRAA

SEQ ID NO: 180358 - protein, 386 aa, unidentified
MIQHTHLTASNGLDYDRTLILAVEVSGRSWVVAAQVPGLRQKSAKQQLAPCADALMAAVEGYKRRAAAAGMAVDRVIVAYESGGSGFWLARWLQQRGVEVHVMQPSSVPVDRRMRRAKSDRIDADMLLRTLLAWLRGEPRVCSMVPVPDEATEDARRPIREREELIRARVAIVNRIEAVLTVLGSGEYNPLRRDCRERLGQLRTALDQPLPPHARAQIERLLDRLDLVCQQVAELEAQRDQAVESEAAGQAERMIQRLARVRGIGVQTATVLVHEAFVRRFRNARALGSYAGLTGTPYSSGGTQREQGISKDGNRRLRATLVELAWMWLRYQPGCALSRWFHDRLGGSRGRLRKVMIVALARKLLVALWRYLQDGAVPQGMKLKPA

SEQ ID NO: 180359 - protein, 315 aa, unidentified
MVDVPCFVGIDVAKAQLDIALRPAGERWAVPNDASGIAPLVDRLQALQPTLIVLEATGGLERAATVALAAAGLPVVVINPRQARDFARATGQLAKTDALDARALAHFADVIRPTPRPLPDAQTQELRALLGRRQQLIGMRTAEQNRLAGASERLTKDITAHITWLNADIATLDNDLETLLRASPLWRENDDLLQSAKGIGPVSAHTLLLELPELGTLTRQQIAALVGVAPLNCDSGTLRGKRTIWGGRAHVRTVLYMSTLVATRFNPQIKTFYERLLAAGKVKKVALTACMHKFLTILNAMLKHRTRWQPQEVQS

SEQ ID NO: 180360 - protein, 450 aa, unidentified
MSPLALDVVTKTGKTPVLGRMLSKYVGRKTSSIENDITKARNHSRQRGKIMRVVFGIDVSKASSEVAILVNGEKIHGYTIPNDAIGFNRLLEDLGTVYQPEIVFEATGVYSRRLQAFFEDNSYTYTRLNPLESKKQLDSLRVRKTDKIDAEKLATSQFILNRKPSYVQEALYQELRDLSRFYQNLTEDIVCSKNRLHKVLQVTFPELENILSSPTGKQYWNLVMAFPCNSFVLELDDAALRAIIRQSTSKHISENRVTYLVDKLTKLANHSYCAVKKTSPMMEEVKYYAGELLRLSEYRQSVLEKMITLAQPLPEYEILLSIPGIAETTATSIIGELGDIRRFHSANQINAFIGIDLRHYESGDFLAKEHITKRGNPYARKILFKCIHNIASASHTNPCHIADFYEKRKRQSQVTSTKPHTIASIHRLIRTMYYLITHNKLYDYTSTQNR

SEQ ID NO: 180361 - protein, 344 aa, unidentified
MDHTTFGLDIAKNVMQVHWVDGQTGEIGRRSLKRSQLVPFFARQAPCRIVLEACGGSHYWGRTLSGLGHEVQLIPARQVRPFVRGNKDDAADAQAIWSAAQQPDRRWVPIKSEAQQAVLSLHRVRAQWIKVRTQTVNGLRGLLHEFGVWLPGGRQAGVKALTTGRAQIEAQVPTLMHGMIDGQLQMLRQIEARIEAIETQLQGLEKQLDSARRVRQIPGVGLLGATALASVLGEDARGYRNAREFAACLGLVPCHRGTGGKVVVGHLSKRGDPYLRTLLMHGARSVIFHAKTRSAWLEKLLARRPLNVVVAALANKMARTAWALVAHGRSYRAGGLAKAGPLNP

SEQ ID NO: 180362 - protein, 367 aa, unidentified
MEKDNTARKAAVSRKRACRKLTVGIDLGDRSSRYCILDDEGEVLLEGSVATTKKGFAQVFGSKPRSRLALEVGTHSPWVSRYLAELGHEVVVANARRVRLITDSTRKDDRLDAKTLARLVRIDPELLSPIRHRSAQAQEDLMMIRARAVLVEARTMLVNAARGLTKSYGERLRSCGTGQVSEELARSLSEPLQSALKPLLAEVESVSERIREYDEQIESRAKSRYPETALLKQVHGVGTLTALTYVLTVDDPHRFRRSRDAGAYFGLRPRRRESGDSRPQLRITKEGDAYMRKLLVQCAHHILGPFGADSDLRSWGLELAAHGGKNAKKRALVAVARKLAVLLHKLWLTGEVYEPLHVRKASKTTAA

SEQ ID NO: 180363 - protein, 335 aa, unidentified
MKKYLFYVGIDVSKLKLDVTFLEKPLEKNPYHFVVSNDTNGIKLILRELTKRKINLSDVLISFEDTGVYSLPLGCFFSKHEIDYWMIPAIEIKRSKGLSRVKTDKTDSKDIAFYSMTHLHKLRLSKIAEHSLLELKILFTEREKLIKSLQILDTTKEGVGYIPKEVMSNVLKINCLAVKQLRKSIDKIELEMKRILSENDQLKKQNELIQSIPGVGPQTALYIILVTKSFQSFENWRQLACYAGVAPFEYSSGSSIRGRTKVSHLADKKLKSLLNMCALNAKKYDPELKIYYEKKISEGKSKMLVINNIRCKLLSRIFATVNRGTPYVNTKKFAA

SEQ ID NO: 180364 - protein, 312 aa, unidentified
MIVIGIDPHMKTHTAVAVDAASGRTLAEKTVSADARGHDELLSWARGLGRERCFAIEDCRHVSGRLERHLLPHGERLVRVPPKMMAGARCSARSYGKSDPIDAAAVARAALREPDLPEASLGGPEQDVRLLTDHRDDLVGERQRIQKRLRWNLHDLEVDLVLPPRVLDRYVWLDRVAETLRRLPPSMRCRIAADQTRRCRDLTVEIRALEREIGRLMRKLAPELLTLPGCSTLLAAQLVGQVAGAARFSSEAAFAMHSGTAPLPVSSGKSTRHRLNRTGNRRLNAVIHMIAITQARMHRRRSPSWSARKPRA

SEQ ID NO: 180365 - protein, 345 aa, unidentified
MNQPRVIAVDLAKSVFQVCLFDTSMQVLSNRAMSRAKLQALLVRQQAAHVVMEACGTAHFWARLAQAHGHRVTLLPPKLVSPYRQGQKTDGNDALAIGIASQQPQIKTAAVKTLEQQALQTLKRVQEHLSDQLTASGNALRALAAEFGLMMAKGTASLKRRMPEILEDAENDLPMAARDSLAMLWSSWQQLDAQRQSAERQLQQYGQTLEPCRRLQAIEGIGYKNAVALYLRLGDGQHFKNGREAAACVGVTPRQHSSGGKVRMGGIGRYRGDQRLRSSLIVGCRAMVNALQKRPPRNATEQWLQTLITRRGPGRAAVALANRNVRTAWAMMRHASTYQSQPLTA

SEQ ID NO: 180366 - protein, 406 aa, unidentified
MLVYIGIDWSEQKHDVLWMNPAGAALAKLVIAHTPDGFAQFDKQCRSLGFQPADCQIALETAHNLLIDFLWSHDYQQVYGVPPSQVRANRGRYSASQARTDPRDALLLAEILRTDRSRLQPWHPDSLLTRQLRAKVSLHRHLLSQEQRLANRLRAVLLCYYPAAVTVFSELTAQIALQFVRSYPTPMAARGLSYAAFERFAQAHAYSHPKQLPTCYARLQAQQPTPAPETVLVYQPEAVQLAELLLPTGEAKRANLRELHQLFAQHPDAATFTSLPGTGDYLAPALLAKFGDDRQRFPTAASLQALAGTCPVTEQSGKHRAIYFRTGCDHEFRHIAQQWALASVRESTWAASYWQDCRPHCQSDSHATRCLANRWLAVAWKLWHSHQTYDEAYHMQQRLARRQPRA

SEQ ID NO: 180367 - protein, 428 aa, unidentified
MQTATANSELVAWIGLDWADQRHEIRLRAAGSTRVESCTVEQKPEALHDWVAQLRARFPQGKIAVALEQSRGAVIYALMNYDFLLLYPVPPKGLARYREAFFPSGAKSDRSDADLLLEMVWQHADRLRVWQPDDPLTRQLRLLVEHRRHLVDDRTRLTNRLTALLKTYFPQALDWAGELSKPAAGEFLRQWPSLEALQAAGRSTWRRFYHRHRRLSPQELDQLLNAIAQAQPLTRDRALLEASVLMTGALVEQLRTLLVILERLDKKLQELFDQHPDQGLFESLPGAGKALAPRLAAAFGRDRQHYQNVQELQQFTGIAPVTEASGKMRWVHWRMACPKFLRQTFHEFADASRKKSRWAEAYYQQRRQLGTSHHAAVRALAYKWIRILFRCWKTSTPYDESMYLKALKRRRSPLWLAAISLSTQEAHG

SEQ ID NO: 180368 - protein, 316 aa, unidentified
MLAQAQFVGIDVSKERLDVHLHPAGEAFSVENSPAGLKNLRRQLRQVEVVAVGLEASGGYERPAADDLAATGLRVHVLQPAEVRALARALKKKAKTDPIDAAMIARYLAVAGDALVPHQPDPARERIREIAHYRRRLQDEDKALKSLLDTTRQATVRRLIARRRVAILSEINRLAAEIKAEIAADPGLTRLADKLMRVDGVGPVFAATLIADLKELGRTDAKRLVSLVGLAPHPRQSGKTTLSGKCSGGRKAVRDVAYMATLSALKARMPHLHPFYKRLREAGKPFKVALIATMRKFLTILNAIVRDNAEFRRAAA

SEQ ID NO: 180369 - protein, 404 aa, unidentified
MSTDVFAGLDWATAVHAVCIIEATGRVLERFTVNHDRDGLAELLRRLTRYGARVRIAIERPSGLIVDALVEAGHQVFAIHPNAVKASRPRYRSHGAKSDASDAYLLADLLRTDGHRWAPLSPQSDSIRALRALVRARDDLVDSRIALANQLRSTLDAFWPGAAGIFAAIDSPIGLAFLRHYPSPAKAAGLTEARLGRFCRAQHYSGRRSASQLLARLRTAPQGHTSDITTAAMADVVLALVNVLDPMVTQLATLTRRIEQLVESLPDGRIIMSFPRAGRVCAAQILAEMGDVRERYPSDDRLAAEAGVVPLTYESGKTRCVGFRWACNHRLRRAITCLADNSRHANLWARGIYMSARQRGCDHPHAVRILARAWLRVIWRAWVDHRPYDPQLHLGAIKASAPAG

SEQ ID NO: 180370 - protein, 341 aa, unidentified
MQITTIGLDIAKNVFQVHGIDGAEKVIVRKQLRRGQVMAFFEALVPCVVGMEACATSHYWARELTKLGHEVRLMPAKDVKAYVKRNKNDAADAEAICEAVRRPTMRFVRIKSAEQQGQLMLHRARDLLMRQRTQVINALRAHLAEFGITAAQGREGIKELLAIVAQEEGSRLPSDAHASLTVLAAQLQAVQTMIGSLEKRIVAQHRSNEASKRLETIPGIGVIGATTIAAVVPDPRVFRSGRDFAAWIGIVPRQDSTGGKQKLGPISKQGDQYLRRILIVGAHAVLRRARQQPEKYPWLTQLLARRPFKVVAVALANKMARVAWALLAKGGTYRAPQLVAA

SEQ ID NO: 180371 - protein, 349 aa, unidentified
MLADEVDYVIGVDTHRDQHTLAVVNAPAGAVVAQAVVRATAHGYADALRFAERYACGVRAWAVEGAGHYGAGLTRYLAERGETVLEVGRHARGERRLRGKDDPLDAIRAARTGLAADTPTLPRSGERQEALRVLLLARRSAVDARRHALVQLRSLIVTAPEELREELRRLPVTKLIERCSRFRRSHSRTPDELAIVLALRSLARRIDAATGEADELEREIIGHVRALVPDLLHEPGVGPIVAAQLIVSWSHKDRVRSEAAFARLAGVAPLPASSGQTIRHRLSRGGDRQLNRALHTVILHRRQHDPTTHGYIARRVAEGKSARDATRILKRYLARHLYRVMQNATPMTT

SEQ ID NO: 180372 - protein, 342 aa, unidentified
MTLYCGIDLHSNNSVICVINDKDKRLLETKVDNKAELVIKALSRYKKRLKAVAVESTYNWYWLVDSLKEAGFNVLLVNTAKVVQYSGLKRTDDRYDAFHLAHLMRLDILPTGYIYPKATRGLRDLVRKRIQLVQDRSREIIRMKSFIPLHTGETVKAASVKAKKFSLPVFGDQNTQLSLKSSIIVIRSLTQQIKAIEKAILQQLESSESFANLKTVPGIGDVLAETILLEAGDISRFDGPGNFASYARCVESRRTSNGKSKGQNNRKNGNRYLAWAFIEAANFAIRRSEKAKRFYQQKSKATNVVVAGKRWLTRLRERATGLCEKERLTTKAGFSLKVGGAG

SEQ ID NO: 180373 - protein, 483 aa, unidentified
MAKRKKSTYERLQSGDMNRKQRKELQRRLSSPEPGLEVVHADAAGIDVGNGSHFVAVPPGRDERPVREFGSWTADLRQMATWLKCCGIRTVAMQSTGVYWIAVQEVLEQEGLEVYLVNARGTKNLPGRKSDVQECQWLMKLHTYGLLRNSFRPPEEIRAVRTIWRLRDRWVKDAGRAIQQMQKALTIMHVQLANTISDVSGVTGMAILRAILAGERDPRKLAKLRDKRISASEDEIAHSLEGNWRADVLFELQQVVEAYDFYQTQMAVCDQRLQKHMAALPDRERAQDNAAAEAEVPASRKSRKSRKSRRKNQPKFDLAAELQRTMGVDVTAVDGLDVLTGLVLLSEVGGDLKAFPTENHFASWLELAPRRDISGSKVIRHIKPEGRNRLANALRMAAQSLSRSDSYLGARYRSLRGRLGGPRAIKAMARYLACLLYRLLTKGKAYVDRGAAHYESKRQERERLALQRRAAAHGFTLVPVAQS

SEQ ID NO: 180374 - protein, 346 aa, unidentified
MLYAGLDLSRKRLDVHVLREDGTTALVTAVSPDTDALRTLARRVAAEGEPVRATIESMNGARFIHDRLEFLGWEVLIADAQRVRGLAPLAAKTDKIDARVLAELTRRALVPEIWLPTPEVRAERERARFRLHLVRHRTALKNRIHAILIAFGRACPMSDLFGVAGRELLDHLALPEPWQTNLVESLALVDDLTARIDALEVELKELGADHPSMRLLMTVPGVGWVLAYTIASEIGDIDRFASPKKLAGYTGLCPLVRQSGGKDRRGPLAKNGPTYLRWALIEAATHAARDPRYRERYERTKQRLGRQRGAKVARVDLARQLAEAIWHVLTKNEPFHPAGPAMGLVA

SEQ ID NO: 180375 - protein, 404 aa, unidentified
MHDSTFYFGGVDWAADTHAVCVVDDAGQVIVEFDVAHTAEGLAEMCSRIERAGAGRVAIERPDGPVVDALLEAGLEVVVVSSRSVKALRERYGTSGNKSDRSDAYVLADCLRTDGHRWRNLEPDSPATVTLRAHVRARKDLVRTRVAVANQLRAHLRVVFPGAVGLFAEIDSPISLRFLQRFPSATPAHWLSEKRLAAWLRANAYCGRTSPGELYRRLVAAPAGPTGHPSDARGAITLAYIAVLKSLRAQINALTHRLEVLLDAHPDGAIFRSLPRCATVRAATLLGEIGDCRARFPDAESLSCLAGVAPSTRASGRHRAVTFRFSSDKKLRDALCDFAGDSWRANAWAQARYRQLRADGKSHPHAERILARSWAHIIWRCWQDHTPYDPTRHRGHQRLTQQAA

SEQ ID NO: 180376 - protein, 354 aa, unidentified
MIIIGVDFHPEFQQIAWLDTDSGEFQEKRLMHREEAENFYRGLAAAGQKVRVGMEASGFGRWFERLLAELQLELWIGDAAEIQSKRARKQKTDRQDAEHILKLMLKDDFPRIWVPSWENRDLRQLLWHRHRLVQARTRIMNQLQAVAINEGLRCKKRLWRAGGRQQLESFQLGPWASRRRSDLLELLDGLSPRIAELSQAIEQEAEKRPEAQRLRTHPGVGALTALAYVLIIGDVGRFQCGKQIASYVGLVPLEKSSGNRRRLGHITKRGSSMLRFLLVEAAQVTVRSVPEWRSHYFRLMMRRGRKTAKVAMARRLAIRLYWMWRQGLDYEELVKLGSHAGQPVHRDGVQRIIE

SEQ ID NO: 180377 - protein, 416 aa, unidentified
MRKSRTIYVGLDVHKDSIAVAYAPEDRDAEVRYLGPIGTRQCDIDQLVRKLHSKGGELIFAYEAGPCGYGLFRYLSKKGLRCLVVAPSLIPRKSGDRVKTDRRDAVQLARLLRSGDLTSVAVPEPGDEAIRDLCRAREDSMADLKAAKFRLESFLLRHDIRYTGKADWRPAHLRWLAEVVCPIPAQQIVFQEAVRALTQAFERVERLELLLRDQASSWRLAPVVEALQALRGVQVTVAVTTVAELGDLTRFSRPAQLMSYLGLHPSEHTSGVNRRQGGIAKTGNGHARRVIVEGAWAYRYPAKVSRQIQERQESLPEPIRDIAWRAQVRLCQRFRTLMARGKHPNVAVTAVARELSAFMWSIAKQVPIAHEQGANHDVVLRDREGARPGVRRNPRERYEAARTLVSRQRKAPDGYQ

SEQ ID NO: 180378 - protein, 310 aa, unidentified
MEQVYVGIDVAKAHLDVHVRPSGEAFTVPRDGESVARLADRLTALSPVLVALEATGGFETIVAATLGGAGLPMAVINPRQIRDFARSIGKLAKTDALDAAVIARFAESVKPEPRPLADEQTRILSELVGRRRQLVEMMTAERNRRPHLSSKRLVKALDRHLAMLQKDLSEIEREIDTTIRGTPIWREREELMTSVPGVGPTLARTLLADVPELGTLDRKQIAALIGVAPLNWDSGTYRGRRTTWGGRSKVRAVLYMAALVASRHNPTLKSFYLRLTQAGKAKKLALVAVMRKLLTILNAIVRDHTPWQSA

SEQ ID NO: 180379 - protein, 345 aa, unidentified
MTDIKRVGVDIAKTVFHIHAVDGRDKSVWEGKYNRKAWLQAIIKRVPNGALIGMEACASSHYWARELRGLGFVVKLIAPQFVKPYVKSNKNDRADAAAICEALGRPHMRLVAVKSILQQDIQAAHRIREELVCHRTAKANLIRGLVGEYGIVAPVGIGQLRRALPQWLEDGENGLTSDFRQLMFGMAEDLAALDERIEETTALMTRKVQSDPAAQRLMTIGGVGPIVASALLGALGDGRNFRKGRDFAASLGLTPRQHSTGGKPTLLGISKRGNSYLRKLLVHGARSVFRHAGTKEDKLSLWLMSLAKRKHANVAIVALANKIARIAWAVVHNEDTYNPSLAAGL

SEQ ID NO: 180380 - protein, 389 aa, unidentified
MPQLNDLSRSLVILEQDATLIAVIEMGQSNWLVAGIVPGVERSPLKKLAVDESALLKLLNRWREEAEKAGHRIERIAIAFEAGRDGFWLARWLRARGIEAHVIHASSVAVSREHRRAKTDRLDTELLKRAFLGWLRGERDHCKMVAIPTLAQEDAKRPNRERESLVGEQSRIVNRMKAALARLGIRGFNPKLKKAVERLDGLRTPEGEPIPPNTLAELKHDMERRRLVRSQIRDIEGTRLERLKQAPGDGPHVMVRLLARVIGVGVETADMLVQEVLSRNLRDRRAVARYGGLTGSPDESGKKRREKGLARSGNARVRRGMIQLAWRFLMFQKGSALAHWFYARTKNAPQTRKTMIVALARKLLIALWRLAREGAIPEGIVLRPAFGVT

SEQ ID NO: 180381 - protein, 360 aa, unidentified
MSDGKASVALDAACAALQGAIVAGFDVHRRQITFDAIDTESGEVLRGKLDSTPAAVEQWIARFPGRVVHVAVEACTGWLFVARALERAGAVTHLAEPIETSALRGRKRRAKTDRADARWLRQLLFEGRLPESWMPPEHVRQWRSRARLRNTLAGERTSWVQRIRAVLYHHGIAGAPDDLRTLAGRQFLATLELPVDASERIAVALEIIDLLEIQIATIERELRALARRQTGCRALMDKLYGIGELSSLVTLCELGDVSRLHASRQAVRLAGIDIGVHRSDRTARLGKLTRQGSAELRWALYEAAQSACRPTSPDYQDYHALKDRGLSHTRASLTIARKLARRSYHVLRELGPAGLEPITD

SEQ ID NO: 180382 - protein, 423 aa, unidentified
MRGFGLDVHRDFCEVAIAEGGEIRSAGRIPTRVASLELFADSLLASDVVALEATSGAERIVSVLQARGVRVIVANTRRLRSISQAKAKTDRLDARTLARLLVSGLLAEVWTPDERTRTLRRLTNRRERIVRARSRAKNEAHGVLARNLCERPPVTDAFGKAGRRWFATLQLPVDELLTLDGCLRQVDFLEGEVVALEREIAKRALAWPEVLRLMSVPGVNVNTAATFMAAVGDIRRFSSPRKLVSYLGLDPRVHQSGSTPARHGHISKEGPSETRHMLGEVAWKVTLTAGPLRAFFERIRARRGPQVAATATARKLVVLFWHMLTSEEDYAFARPAMTRNKIRQLELAAGAPSQKGRKGIAGRKSRKLFEAERELSRQAEAAYRRFISDWKATGPAKEGAGATPGRASQKPSKGKAARQAASP

SEQ ID NO: 180383 - protein, 418 aa, unidentified
MKSIKTKKVKKINDKTVIATLDIGKNIQYGYFRAPNGNDVKPFAFYNSKKSYNEFWQKLCQFKNKEGLEEIVIGFESTGPYAEPLFNFLRKKPVTLVQVNPVHTKRVKELTGNSPNKTDKKDPRVIADVISLGHALTLVVPQGPAAELRRLTQARERAIKARTSMINQLQHLIFVNFPEFLKVLKISTKTARHLIKHYTTPEKISVLGLESVGQILKKVSRGKLGQDRAKQLHEAAGNSIGISEGKQSIVFEIKHLIGRIEAEDQFVDRLEKQMHVYLQQIPYSQNILSIKGLAEVTVAGLIGEVADFNKFDTISEVLKLAGLDLYEISSGNHRGQRRISKRGRPLMRKLLFFAAINAVKSKGIMHAKYQQMLDRGKIKMKALVAIARKLLGIIFAIVRDKTKYVENHSDNYHYKLAA

SEQ ID NO: 180384 - protein, 382 aa, unidentified
MQASTVDTPTASHCGTIFVAIELSQKSWLVTLHSPDRDRISRHKLEGGDHCALLALLERVRARAAGKLGSAPKVVSCYEAGYDGFWLQRLLMAAGISTLVFDPASIAVEQRSRRAKTDRIDGELLLRTLMAYLRGEPRVVRIVRVPSVEQEDARRASRERDRLVKEQTGHTNRIKALLRLVGMAVGYPRRRDWLNWLERQRDRQGQPMSPHLLAEVTREHARLMLVRQQLAALEQAQAVQASPVPAAMAERRDLLQRLKALGPAFATTLTNEVFYKDFRNRRQVGAYCGLTSSPWRSGGIDREQGISKAGNPRARLKAIELAWLWLRHQPESELSRWFRTRTANAGKRARRIAIVALARKLIVALWRYLTTGLVPAGATMKA

SEQ ID NO: 180385 - protein, 417 aa, unidentified
MKQNSLYVGLDVSNAKIDVAFLDGDGRPVRSATAYDNEPKGWTALRTAVVAAARLIGPKARVVCGMESTSNMHKRVEQALRSEKRRRLEVHVLNPRAVKNFGKVLLRDAKTDRLDSQLIALFLLRMQPEVRSAMPTGFEELKEATRTRRRLVEERTDHKNRLHKLLRYHLPGYRKVLGIRTFSKRLLIVLAELGSPHLLLDRSVEELAGVRYGRGHRVGVAFAQKLHALAEQAPVRVLSKVTRLLIETTARRILDLDALLSEVDRAIEEQLDEVFPGQVLTSIPGIGKVSAAAILAEVGDIGRFDAKEQFVGYCGLYPIVWESGEAKRRYRMTYKGNRMLKMTLLVASAAARQYNPVISTFYERLRRRDKSTKAAGGAIARKMAELIFTLLVRNEPWSADKATRGMQKAEAMLKKAA

SEQ ID NO: 180386 - protein, 390 aa, unidentified
MDVLYQSCAGIDVHQATVVVCILHGPLTSTRPKREMAQFDTTTKGLKACHDFLSQFHVEAVGMESTGVYWRPVWHELCDDFELILAQPAHMKAIPGQKTDKKDAHWIAQLTRIGLLPRSFVPDETIQELRELTRQRKHYVESRNRETNRIHKILQSGGIKLTTYIEDIMGASGRNLLQLLIDETPLTPRMIHQSVYTSLKRKVPQLLEALDGYFSAHHRFMLGQSLEIYDFYQKQIDCLEERMNGYLNLYERPVEILDSIPGIDLITASVIIAEIGVDMSQFPTAGHLASWAGLCPGNNESAGKKRSTKIRHGNSYLKRCLCQAVFAAKRQKGSPLAERYYQIQSRRGPQKATIALAHQLLKIAYILLKENLTYQEFVLQKKATRDEPVA

SEQ ID NO: 180387 - protein, 348 aa, unidentified
MEHPSMNNDNVISIDLAKNVFQVCLFTEYRKMASNRKVTRAKLLDYVLKLDSRHIVMEACYSSNYWGRLFQKNGFKVGLIPPHQVKPFVVGNKNDHNDALAIAEASVRPKVTFVNVKSLEKQDVQSLDRIRDRLIKNRTALGNQIRGLLAEYGVTAPLTLSHLRKNIPSVLEDAENDLTTVSREFISDMYLELLSIDERILIVDKKVDSLLNTDENYHRLQTIPGFGPAISRTLLCALNNPKQFKNGRQLAAWAGVTPKQYASGDQSRMGGITKRGNQTLRRQLIHGARAVVRHSEGKNDPLNLWVQKLLKTKQSNKVSVAVANKMLRMAWSVMIKEENYNSECLISI

SEQ ID NO: 180388 - protein, 569 aa, unidentified
MKNESLPDRVHVGIGIDTARYAHHVSFLDEQKRTAAPAFHFTETFEGYQKLQRALNRIADKHPGVQLHIRIDAAGQYAENLIQWLHRLDLETSISVGQPARNRAYRKVHFDKRKADPAESLACARFAVVERPRATPHNPPEFQQLRDAVALLEATSKHRTRLVNQLHALLARVFPELAVHVKDISANWVLTVLDKYPTPNKLARARLECLIKIPHLKQEMAQTLQAAAAQSLGSNRGSVAGQLIRQKVREIRWQQTESERLGQLLEQAWKALPDGPYHRLTTIKGIGVQTAAALAAKIVSIDRFQTASALIGYFGIFPEEVDVSGTDRHGNPKQGHQIHMSRKGNDLVRRFLYTAAQCAAKWNPPVKTLFIRLMANGKDYNVAIGHCMAKLLRQVFALWKKDCDFDPEFELQSQAQGDAENDITEETKTAVGHTQAFESPGKVVTTTASTIPPSGSANNVPPLNFSRLREQVSISQVLEQIHWRPQSTSGEQLRGPCPLHEAEQATSRSFAVHTGKNVYCCHRCGSQGNALDLWVALCGKPLLEAAWELIKTLRLQPSLLKEGPPETNP

SEQ ID NO: 180389 - protein, 279 aa, unidentified
MKDSTIWVGIDDHADSCKVSIFGSSGSEALARFEVVPDDRGLGQLARRLKGFGSDVRCVYEAGPCGYELYRYIRGRGLSCEVAAPALTPRRPGEKVKTDRRDADKLGRFYRAGELTLIRVPDGGQEALRDLVRAREDAKEDLLRRRHRLSKFLLRHGHRFRQGQNWTQRHWAFIRSIHFDEAHAQAVLEECVLAVAEQVEQVKRFDQLMEEASQQPQYAEKIGHLKALRGVATTTALTILSETGDLRRYARAGQLMGATGLVPSEHSTGSRREGVLPFV

SEQ ID NO: 180390 - protein, 383 aa, unidentified
MVARQQKPRENRKMLYLAIDQHTRQITVCVRNQEGGTVLSRQVSTRPEKIEAFLQQLTEMDSEFMAILEVCGFNDWLIEELRRWSCREIVLIHPEKPSKRKTDRRDARKLGDLLWLNRERLAAQEPVHGLRRVYMVTQREREDRQLTALRKTLGQRRTRTLNKIHRILNGHNLMWDYPTKSFQTQAGRRWLETVELPEVDRLEMEMLLKEWATWDEQIDRANEKIVERANHREPGEILSAAQILMTAPGVSHYAGLTLSSRIGPIERFPRPRSLANYFGLTPGCRNTGKATDRLGSITKEGSKIARFILGQLVLHFLKQDPRMRAWYRRIKKRRGSKIARVAVMRRITTIFWHMLTYQEAYSIGGPPARLLQPNPPAKRGDAA

SEQ ID NO: 180391 - protein, 340 aa, unidentified
MSEGIIIGVDLAKNVFQLHGARRDGRVLFRKKLTRAQFRVFCEGHPKCLMAMEACSTSHYWARELQAMGHDVRLLPPLYVKPFVKRNKNDAADAEAITEAALRPSMSFVAPKSADQQAATMMMRTRDQLLEQRTATVNALRGHLAEFGIIAPVGIKNVSKLRSILANASDIPTLVTEMAKLHFDRIDSLSCEIEALAAKINNHCRESDTAKRLRSMPGIGPIAAMVIEAFAPDMAHFEKGRDFAAWLGLVPKQHSSGGKIRLGQTSKMGQRDIRRVLITGAMSRIAGYARQNSRAEPWLQDKLDRKPKMVAAIALANKMARQIWAMITKEEKYLPRAVAT

SEQ ID NO: 180392 - protein, 401 aa, unidentified
MKRACGLDVHKDTIFCATFDGKKHGPVSEYSTLTSSIRDMGEKLRSEGVDVIAMESTGMYWIPVWNILEDMDFHLILVNPFLIKQMPGRKSDVKDAQWIATLLYKGLLRSSLVPSKEIRELRTYSRRYIKLQQRQTSVLQDMERTMEMCSIRITSFVSNISSKSVLRVIEQIVQGETAPDVLVESIHGRIVNAHTKQNIKESLTGFITKHHRFTLELSLQEYELLVDQSNKCLLKMEELCNEHYKQEMKLLLTIPGISYISAMIVLAETGADMKAFENSGKFSGWTGLRPRNDESAGKYKSTATTKGNRFLRAVLVQIAWAASRTKETYFKEKFNRLAMRKSRKKALIAIARKMGVLIWNVLYYKQEYSPEKLIVYDPGKLQAKISYHQKEWDRLQLLLQK

SEQ ID NO: 180393 - protein, 405 aa, unidentified
MRYYLGVDWADQTHAVWVVAADATKITARTVPHTAEGLSDWGRELDQWRAQGIELWAAIERREGRVVDFMLDHGVVVYPVNPKALDRARDRFRQSGAKDDPFDARVLADFLRTDHAHLQALLPSSDAAQELKLLTEDYQRQIRQQTRLVNQLTNTLKAYYPRALESAELTTTLAQEFLRAYPTPESLTGLTERKWQRWARAHRLSEARTRELWSVLQQPQLPVPAHVVRAKARLMRSLVEQLTLVVAAVAEYRKAIEDFFASIPTAQWARTLPIGEHGITAPTLWARLGDAPGRWESFRHLQAQAGAVPVTKRSGKQQRVVQFRYACDKALRYVVDHVAFLSLLSSEWARAYYDQQRERGHPHRQALRALGAKWLKIIFVMWERRVPYDEQYHLATMTRQQLRQR

SEQ ID NO: 180394 - protein, 371 aa, unidentified
MKKDSTTKFIGLDVHSKTISVAIADEGREGEVRHYGTIENTFEAIDKVIKKLTATGVELKFIYEAGPCGFALYRYLTGNGFTCIITSPAMIPRRKNVRIKNDRRDAMTLARLYRAGELTGIYVPEPEDEAIRDLGRARDDARVAERKAKQRLNSFLLRHNLIYQGKTKWNRTYFNWLGSVGMKYPAQKVALQEYIEAVKECTGRVARLSEQIGLAVEEWRMGPMVKALQALRGVSLICATITVAELGDLSRFQNPKELMAYLGLVPSEHSSGETIRRGGITKTGNGHARRVLVEGAWTYKHHARVTPPLIKRQRDLPKSICDISWKAQLRLCARYRKMVARKKPNNVVVIAIARELAAFMWAIAQEVRAAA

SEQ ID NO: 180395 - protein, 392 aa, unidentified
MLFVGIDIAKRNHEASVIAQDGSVVRKAMRFANSQAGYNKFMDMVRGLSEPVVFGMEATGHYWLTLYTHLRNDGFTVHVINPIQSDALRGMYIRKTKTDSVDSVIIADVIRFGRYCETSVEPGDLQAMRELCRQRFYIIDMASDLKRKVIALLDQVFPEYEKLFSDTFGASSMEILSQYTTPEEMLSVSSQQLAEILEKASRGRLGAEKAVEIQNAARNSFGIVMASSSFSLIIRQYIEQIRSLEASVDVFDAEIARLLSGFDTQLTTITGVGPTLAAVILSEIGGDIRRFSSPAKLAAYAGVDPTVKQSGDFSGSRMKMSKRGSPYLRRAIWLASTVAAFKDPAIHALYERKRAEGKDHMTVIGHVCRKMISIIFAVLRDNTPYVPAAISD

SEQ ID NO: 180396 - protein, 391 aa, unidentified
MIYVGIDVAKDKHDCFISNSDGEVLFKAFTISNSLDGFNELYSKICSVSDDFTKVKVGLEATGHYSYNLLGYLLDKGLPTFVINPLHTNLYRKSLSLRQTKTDKVDAMTIASMLMSDVNLKSYSDTSYHNEELKSLTRYRFDKVKERAKLKTSVSRLVTILFPELEKLVPTLHMKSIYALLYEMPSAKAVSNSHLTHLTKLLESSSKGRYSKETAILFRNAARNSIGQDMPAKSLELKHTIKLINELTDEINEIESEIKIIMDSLNSPILSIPGINYRMGAMIIAEIGDFSRFDSPDKILAYAGLSPSTYQSGQLDSSYSHMEKRGSRYLRYALFNATIYVCHWNPEFSVYLAKKRAEGKHYYVAVSHAAKKLVRLIYHLEKTGQTFIKAS

SEQ ID NO: 180397 - protein, 317 aa, unidentified
MDVTFKSFVGIDIAKRTFDAHVLPERTSLKQQNDSKGRQQLREKLPPPGECLIVVEATGGYERALVAELVDAGHQVAVVNPRQARDFAKACGKLAKTDRIDAAVLARFGQAVELRTEAKIPEKQLELQDLVARRRQLVELRTAEMNRKENVISKFVRKSLQESVDALNKQIQRFEKRIAALVQSDDEWKQKLAIVQSTPGIGPNTSATLIADVPELGQLNRRKISALVGLAPFNCDSGEFLGRRAIRGGRASVRRSLYMAALSARRFNPVIKAFSDRLAALGKKPKVIITACMRKLLVILNAMVKNKTHWNPEISTT

SEQ ID NO: 180398 - protein, 337 aa, unidentified
MGNITMGLDVGDRFSQRCVVDQDGVVIQEDRIPTTRVALRERLAGPPARVVLEAGTHAGWMSRELTALGHEVLVANSRKLRWLYHNEHKTDQVDATYLARVGRWDPTLLAPIRVRSAGADGALRLVRARASLVRARTRLINHVRGAVKSVGGQLPPCDATSFARRVAAHLPAELHAALEPLLAQIAGLTQTIARYDRLVEHLAAQVYPETARLRQVAGVGALTALAFVLTVDDPRRFGDGRAVGAYFGLCPRRADSGAHRPQLGITKCGDGLVRQLLVQAAHYILGPFGPDCRLRRWGLELARRGGKNAKKRAIIAVARKLAALLYSLWVHDTRYAP

SEQ ID NO: 180399 - protein, 372 aa, unidentified
MNEFTKYVGLDVHKETIAVSIAQDNGGEARYWGEIANTVEAMDKLIRQLKKGDAKLSFCYEAGPCGYGLHRRLTTLGWDCMVVAPSLIPRKAGDRVKTDRRDSLSLARLLRAGELTAVCVPDDEQEALRDLTRAREDLKHLQRQAKQRLLAFLLRHGKRYGGASNWTQAHFRWLETVKFDHPAQQIVMQEYVDTVLSCGKRVAELERQIEQTAQGSRVWPVIEALMALRGVNLLTATTVVAEIGDLKRFANAPQLMAYLGLVPSEYSSGGSTRRGGITKTGNSHVRRVLVEAAWTYRHAARKTALLQRRAERTPEVVQEIAWSAQKRLCQRYRTLEGKGKMKVQVCTAVARELAGFIWAIGHVVPATDVGAR

SEQ ID NO: 180400 - protein, 354 aa, unidentified
MSQTLNAAIAVVGIDIGKNSFHIVGHDERGAIVLRQKWSRGQVEARFANLPPCLIGMEACVGAHHLSRKLRSLGHDARLMPAKYVRPYSKGEKNDYRDAEAIAEAVQRPTMKFVATKTAEQLDLQALHRVRERLVSQRTGIINQIRAFLLERGIAVRQGLHFLRVELPGILAKRTDVLSPRMLRVIEDLAGDWRRLDERIESLSAEITRLVEGDPACQRLMTVPGIGPLTSSAMVAAIGTGDVFSKGRDFGAWLGLVPKQMSTGDRTILGSISRRGNRYLRKLFVQAAWVVLVKVKPQQWERYGLKSWIEAAKKRLHRNVLAIALANKLARIAWAVLHNGRAFECVKTNAPRPA

SEQ ID NO: 180401 - protein, 410 aa, unidentified
MEQVLERCAGGDVHKKTVAVWVRGPGIHGDRAQHVQTFGTTTADLLTLRDWLAAHGVTHVAMESTGVYWRPVFSVLEAAFTCILANAAQIAQVPGRKTDIKDCAWIAQLLEHGLIRASFVPPAPIRELRDLTRYRKVLIQERTRHANRLHKVLEDAGIKLASVTTRLLGASGRAMLDALVSGTTDPAVLADLARGKLRRKLPALRQALTGRFRAHHAFLVSQLLAHLDYLDEAIDTVGGQIDVVMAPCTDELARLDTIPGVNQRTAEVLIAELGVDMTVFPTAEHLASWAGLCPWQNESAGKRRSGKARRGNCWVRSALIEAARAASSRSTKGAFAARYRRIMQHRGHKKAVVAVAHAMLVTVYHLLARRTTFRDPGADYYDRRHAERVRRRAIQALERQGYRVMLEPAA

SEQ ID NO: 180402 - protein, 349 aa, unidentified
MQVITFGIDLAKDSFQIHGVDAAGHAVVKRQLKRNQVLPYFANVAPATIGMEACSSAHYWARKLQAMGHIVKLMAPQFVKPYVKGNKNDANDAEAICEAVTRKSMRFVPIKNVEQQALLSLHCVRQGFVAERTAYANRIRGLMGEFGHVIPQGIHHVSERVHALIEDASNELPGLFRVTVQRLLEHFQELQRQVRELEVQIQTWHRNNEASRKLEAIPGIGPITASALIASIGDAKNFKSGRELSAWLGLVPRQHSSGGKQNLLGISKRGDMYLRMLLVQGAHAVINAQCCRKGAQEQAGWLPGLLKRRNHNVAAVAVANKNARIAWALLARDRQYVKKYSPDAPVALA

SEQ ID NO: 180403 - protein, 333 aa, unidentified
MEKLIHFIGIDVSKLTIDVAIIINNDIGRIIQLVFTNDSKGFKEFKNRLNKEKIPFPETIFCMEHTGYYSKQLSRFIIAQHGNLWMEMSLKIIRSLGVQRGKNDKLDAKRIALFAQRNQQDFVPYNPPRLIVENLKTFLMLREKLINSKIALVVPVNELTCVDKAAGKIALKAISKALQGIKKNINTLDAKIDELIASDKELAEKFKLVSSVPGVARITFCYLVYFTNEFKNYTEAKQLACYCGVVPFEYTSGSSVKGKPKVHNMANKKMKKLLHTAALCAVTHYPEFKQYYERKIKEGKPKMLILNNVRNKIVLRIAAVIKNNQPYKTNIAA

SEQ ID NO: 180404 - protein, 412 aa, unidentified
MMRFAGIDIGAERHMVAVLDEQGEVLCRSSPFGEDASGYARLFELLGPSADCLVALEATGHYWRNLFVALIAKDYAVAVLNPLRTARFAEEELRRTKTDAIDALGIARFAQQKRPRAAQLPDSVTEELRELERLRERVVEDFADRLRQLHRAVDLGFPEFTRYVRTLESQLAATILSRYPTAASFRGVSVKKLARIVYDGSHKIGEELARNLIEAAEKSVGAHHSEPYRRRIKYLCEDLDVLRRRLKDLARDVERKLDDHEVGKLLMTIEGLGPLTAACLIAELGDPARFDSPGAIASYVGVIPRIRQSGKKRFTKGPAIPLGNARLRKSLFMVVLQMVRRNPWLRQYYERLRGDAKIADRSLERGDSSQAFRADNAAAPSPEKRLTDSTISSEANATTDGHRRGDRGEGGA

SEQ ID NO: 180405 - protein, 440 aa, unidentified
MIRYVGLDVHKQFVEVCILDQKGKALYRGRVDCCRAALQHFAQHRLKRSDHVALEATTNTWPVVEILRPFVARVVVSNPLKTKAIAEAKIKTDKVDAEVLAQLLRCDYLPDVWQPDEKTQAQRSLITHRMGLTCRRTRHKNRIQCLLGRLLLSPPCRLLWTEAGLAWLKSLDLAPVDRLILDSELRQLQQVELELAVLDRELVEIARQEPRVKLLMTLPGVNYVVALGLIAALGDIHRFRDGDHAASYLGLVPSTRQSGHKCYHGHVTKAGNSQARWLLTQSAQHVARHPGPLGAFFRRLAKRKNRQVAIIAVARKLVIVAYLMLKNNEPYRYARPDLMAKKFTQLRSKHKVAQPRTAQPSLRPLARTGLPAVYEAVGLPAVTVPEQLPAGERRMLADSKLTDFVQQLYVPCESQLTATTDGEPKRPNKKGKGRPAGRSG

SEQ ID NO: 180406 - protein, 323 aa, unidentified
MKEPIILGVDIAKKKFDVALLVNDKQKHKVFTNNQEGFRELLGWLKKKGVEHVHLCLEASSTYGDELATYMHDAGHTVSIVNPARIKGFAQSELMRTKNDKVDAGLIARFCLAMHPEPWAPAPPEMRQLQALVRRVDALINMRTQELHRLGTTQGTVEYSIREHIAYLDRQIEALKQQIADRIKSDPDLKIKRDLLKSIPGVGEATVAAILAELHMFETCDRVQKVVAFIGLAPREFTSGSSIKGKPRLSKVENARLRKALFMPALVSIQCNPVIQTFYHRLKGNGKNGKVIVCAIMRKLVHLIFGILKSGRPFDPNYRPHCA

SEQ ID NO: 180407 - protein, 368 aa, unidentified
MSRLAKVESFYKNINLTSDDEVFVGVDVHKKSYHVALFLNDTPAIDFRMGAVPKKLNEKLQPMAQSIKNIVYETGPTGYGLARNLIMNKLPASVVATSRIPRSAVGDDKTDKLDSIKLAQYAAKGLLRPVKIPTPKQEADRQLYRMRHRQAQQFAKVKVQIKSFLLMHSIGEPEGLKNWTIAGVQDLRDMRLIDTLRLSLDELLSDYDYFKNRIKVLNKVIADNLDKGLLGQRMDLLKTHPGVGTVVACQFATELFHYRDFSSTRQLYKYLGLSPRVSQSGERSSSGSINKAANGRLRNNLIQAAWMWVRTDIEAKKSFYRICDNCGGIKQKAIVAMARKMSGHLWAMLVNDQPYDKNKAKSRLNNER

SEQ ID NO: 180408 - protein, 321 aa, unidentified
MIMENISQWVGIDVSKATLDVYIRPMGKAMKVANTQAEISNLVELLLSYDLNLIVLEATGGLETQLIIQLQAALLPVALINPRQGRDFAKATGKLAKTDAIDAQILAHFGEAMKPQILAIESEGARQLSELISRSLQLVEMQTAEKNRRARARGRALADIEAHLDYLERRLKQLNQEIEQLTENNQQWIDKVNLLKTTPGIGQVISTTLVSDLPELGKLTAKQISRLVGVAPINHDSGQHKGKRMINGGRGHVRATLYMGAVVAIRHNPVIKAFYDRLVERGKSKKLALTACVRKMLLILNAMVRDNLPWRVCDDLVSLSP

SEQ ID NO: 180409 - protein, 408 aa, unidentified
MELKYARCAGLDVHKDTVVVCLRAEVDRRVTRTVRTFGTATRDLLELQQWLASEQVQNVAMEATGVYWKPVWHVLEAVCALVLANPAHIKNVPGRKTDVKDAEWIAELLAHGLIEASFVPPTPIQELRALTRDRRQFHREAAQHVQRVQKVLQDANIKIDSVISDVMGKSGRAFLDAIVAGESDPEKLADLADYRLRASRETIVEALRGLVTAGHRSALRRHLLMYDAIQVMIEDIDTEVAALLEPFRRQVELLDTIPGVDVTTAEVIIAEIGVDMSRFRTAGHLVSWAGLSPRNDQSAGKRRKIRIGKGGKWLKATLVQAAWSAVRTKDTHLRALYLRLKGKRGPKKAIVAVAAEMLRSAWYMLTRDEEYREPGEAPQCPAQQERAAKRLVIRLQKLGYNVELAKVA

SEQ ID NO: 180410 - protein, 420 aa, unidentified
MRAIGLDVHRDFCEIAIAEAGGVRSAGRIATRPEVLEVFAQSLGADDRVVLEVTGNAWEIARIIEAHVARVVVVSPSDTGIRQARAKTDRLDAQTLAKLLAAGSLDSVWMPDERTRVMRRRLARRSQLVTGRTRAKNEIHAVLVRRLKGRPEASDLFGKKGRAWLAELELPIEERETLDSALRQVDFLDGEVALVDRAIAHDALNWPEARRLMTVPGVNLIVAVTFLAAIGDIRRFPDRRKLVGYLGLDPKVRQSGNAPASHGRISKQGSAPARHALVEASWSAVRSPGPLHAFYQRIRSRRGHQVAIVAASRKLACLFWVLLWREQDYAFGQPSLTAKKLRQLEITAGAPRWRDAGGVWAANRALRDAERDLARQAEHAYAQTLRDRQAAGVKTGASAAPGRASQQPTKGKAARQTTSP

SEQ ID NO: 180411 - protein, 349 aa, unidentified
MTIVGCDLHTRKQQVAVLHPDTGEVVEQELLHAGDAVEQFYRTLPRPVTVGIESTGYALWFHELMQRLGHTLLVGEAAKIRAMVVRKTKTDRRDALHLLDLLKHERFPLVWIPDPATRDLRALVTHRMRLVRMRTMVKNGLHAIAMNRRLTLGPSLWSQRGLAQLRDLALSPPTTQRRDESVQLLTWLTARIEALDDRVAAAAQADPGARLLLSHPGVGPLTALTTVVVLGPVARFPDSKPVVSYTGLAPAVHASADTCRLGQITKQGSPLLRFVLGQAGLIAAHAEVDLKRHYRTLLRRRGRPKAIVAIARKLLVRLYIMLRDQIDYEEFRRRGRTPRGQEVPPPALA

SEQ ID NO: 180412 - protein, 337 aa, unidentified
MKRYLGVDLHRTQFTVCTRLESGRRYLRQWPMHELKLFAAQPRKEDEVAVESTGNTRLFYDAIVEHVARVAVVNPSQFKVISQSVKKTDKNDAELLALYLAKGLLPEVRMKERTQREMSHLAQTRDLLVKQRSALKAKINNLLSAEGINLKREALSSKKALDRVLSLPLSPLLLAEARVLVGQIRSLTESIDELEKMIEEEGPKLAGHKNLMSIKGIGPVGAAVLLSVIGDVRDFADPGKLAAYLGLVPRVQNSNETEHSGRITKQGNKLARTCLVQCALVAKRYSSFLQNFYQRIQRRRGGGKANIALARKFLGVIYHTLKNDWVFEDFPNFVLAS

SEQ ID NO: 180413 - protein, 356 aa, unidentified
MINSTKYIGMDVHKESISIAVRNAAGKIVMETVIETKSSMILEFVEGLHGDVHVTFEEGTWSAWLYDLLKPRVTRLVVCDPRRNALLQEGNQNDRVDARNLAELLQNNQLRSVYHGDHGLRALKELVRSYLTVTKDLSRVMTRVKAIYRGWAIPCSGKQVYSSRLRAEWLGKIQEPGVRRRAEFYYQQLDALRALRQEVRRDLLAESKKHKIWKQLCQIPSIGPIRAAMLLGILQTAHRFRTKRQLWTYSGLGIEVHSSADHHAVKGQLERKKKHIEIRGLNKNCNHDLKNLFKGAAVVASTKPGPFEKFYAALLAKGMRPEMARLTLARKIATIVLIVWKRGVCFDANHLKPQTA

SEQ ID NO: 180414 - protein, 413 aa, unidentified
MRLFAGDDWAEDHHDVELMDADGRRLAKARLPEGVAGIARLHAMIGEQLGEDADEEDAGQVAIGIETDRGPWVAALIAAGYTVFAINPLQASRYRERHGVSGAKSDAADAHVLADMVRTDSHQLRPVAVDSAQAAAVKVVTRTHKTLIWERTRCTQRLRHALRDYFPAALEAFEDLDAADTLELLAKAPDPASAARLTTAQISAALKRARRRDIATKAERIQAVLRAAHLGQPDIVAAAYAASVRALIAVLATLNEQVKTLQGQVEAYFGQHPDAEIIASQPGLGPVLGARVLAESGDDPGRYISAKARKNYAGTSPITRASGKKKTVMARYVHNDRLIDALMSQAFTALRTSPGARAYYDHQRARGAGHNPALRQLANRLTGILHGCLKTRTLYDEATAWPHYAATPEKTAA

SEQ ID NO: 180415 - protein, 357 aa, unidentified
MKQCSTGLTIGMDLGDTESVVCVLDADGSVVRSCTVETDLLAMSRFFKRFDDRESITVAMECGTHSPWISDLLESLSFQVLVGNARKLRVIWDTDNKYDERDAEMLARIARFDPQLLRAIRHRGTRAQMDLATLKARDVLVKSRTSMINALRGIVKSAGDRLPSCSSESFAKKVAPHIPPALRPASRPLLSAISALTKQISAYDRYTEKLCNERYPETERLRAVQGVGPITALAFVLTLDRPERFKRSRGVGPYLGLVPRRDQSGQIDKPLPITKAGNTQVRRLLVGAANYIMGPFGPDCDLRRFGLRLAGRGGTVSRRKAKTAVARKLAVLLHHLWVDPQEQYEPFHREHHAKTSA

SEQ ID NO: 180416 - protein, 372 aa, unidentified
MASIIYVGMDVHTTNFTFCCYTADSDRGFAVAQTEPDYRQVIKYMERVQKQRGEECKFVCGYEAGCLGYSLYHQLTRCGVDCVILAPSTMHQEKGKRIKTDRRDAENIARCLAFSLYSPVYVPTTEDDAVKEYIRMRDDIKADLKRVKQQIIAFTTRHGFAFDGKSYWTQKHLKWLETLVFEHPLYKETLQEYLIIYYMLDEKVAVYDTRIEEMSHLEHYEENVQKLCCFRGVAAHTALSLLVEVGDFQRFRSAKHFAAYLGLVPGEHSSSDKQIRTSITKAGNTHLRRLLVEAAQSYNRGAIGKKSAALKARQGGNPAEVIAYADKANERMQRKYYRIAFKSRHNIAKTAIARELACFVWGMMTGNISNAA

SEQ ID NO: 180417 - protein, 347 aa, unidentified
MDVHQATISVAVRDVHGKLIMECVLETKAATILEFIQGLRGTLALTFEEGTSAAWLHDLLKPHVSRLVVCDPRKNALLKDGNKNDRVDARKLAELLRTNQVKPVYHGKHGTRALKELGRSYLTLTKDVTRVMNRIKAVYRSWAIPCAGTSVYTPCHRAEWLAKLVEPGVRVRAEHLYQQLDSLEPVRLEARRQLLLESRKHAAVKLLRQIPSIGPIRAALLVALLQTPHRFRTKRQLWAYSGFAVEVHDSGEYRWVRGKLQRNRERITVRGLNDNHNQDVKNLFKSAAISASTRPGPLHDFYVARIESGMRPTMARLTLARKIAAITLTMWKKGVSFDPKQLQPQAA

SEQ ID NO: 180418 - protein, 469 aa, unidentified
MRVGKMESGKKAKRKRKRKSIDGYPVLEPNAGGIDVGAREIYVSVAPDRDEESVRIFATFTEDLERMADWLIRVGVTTVAMESTGVYWIPVFEILEQRGIRPCLVDARHLKNVPGRRTDWHECQWLRFLHSVGLLRAAFRPESEICAVRALMRHRSELVQMAAQHVQHMQKALTQMNLQIHHVISDLTGVTGLAIVDAIIAGERDSKELAKLRDFRIKADEETIRKSLVGNWRAEHLFTLKQSRQLYQTYQQQIVDCDEEIQRLTTAFSSRVDPSEKPLPADRKHNKVGRKRNKDIDPKSCFDMRTETYRLFGVDVTQIPGIGNMALSLFTELGRDLSKWPTSSHFASWLALCTDNDISGGRVLWQATRKLKNRAGQLFRLAANSLHHSPTYLGNYLRRMKAKLGAPAGITATAHKIAIVFYTLVTKQIEYDESVWAEREAERQKRFEAKIKRQAKKLGFQLVPIQQNV

SEQ ID NO: 180419 - protein, 422 aa, unidentified
MAIYCGIDWAEGHHDIALIDGEGTLIGKRRIEENQDGVAELTAMLAAAGDSPDEPIPVAIETPRGLLVAVLRAAGRPIYPINPLAVARYRERTSVSGKKSDHLDAMALANILRTDAHLHRMLPDDSPLARSITVLARAYQDAVWRRTKIVQELRARLREYYPGFLAAFAAGSGSGRGLSTTQLASADARAVLAIAPSPAEGLTVSKARIETALRRGGRQRRIARLAATVAAQLRTPQLRQDPVVEQAMRIETVAMLGVLNAVCDSVDQLAAALSDAFAQHPDYEIITSFPGLADISGAVVLAEIGDDRDRFVDDRALQAFAGSAPITRASGKSRTVTRRRTKNNRLAAVGYCWAFTAAARPSPTRNHYLRRRERGDGHAAALRHLFNRMLGQLHHCLATGQTYDPAKAFPHAATTPAGPVAA

SEQ ID NO: 180420 - protein, 360 aa, unidentified
MRIIGCDLHARQQTLAMLDTQTGEVVTRTLMHEGNQVREFYAQLPHPVLVGIEAIGPMHWFLNLLEELGIECQVGDAAKIRAAEPRKQKHDRRDAELILKLLVENRFPAIWMPNKEQLDLRALLLHRHHWVRLRTQIQNGLQAIALANGLRRGPGLWSYDGQAKIAFLPLPPHASYRRSALQTMYRKMEEEIENLTEQVAEQAKQRCGARLLMTHPGVGPVTALATDVFLGDPQRFADGKALASYVGMIPREYSSGERQRFGAITKQGSPLLRFLWNEAGAHAARRDPDLQRFYRRKLVQKGLGKARVAVARKLGIRLWIMLRDQIDYQEFCRRGQKQSSAACAGMPEVGNGASRHRPVD

SEQ ID NO: 180421 - protein, 344 aa, unidentified
MDNHTQYSGFAGVDLAKKVMQIHFVTGDGEITDKQVKRAEFLDFFRNRTKCLIGMEACGASQDWARKLEAMGHEVHLMSPKAVKPFVSGQKNDYNDAIGIYKAMFNGVRRVPVKSTEIRDLQTLRRIRSQVTKDKVKEINHVRGLLAEYGIVMGKSITAFNKGIFSALESLKERGDVSPLVAEELQTTVESIKTKIERQKRSDREIEQLARGCKNYENFLKTPGVGPFTAAMLCVLLCDPAIFANGRQFAAYIGLAPRSRGSGGKNFIIGIPSKFNCDSESRAVFVECAQALARYKNKSPWVDGILRRKPKKVAVIAIANKLARQVWAMANKGESFKQMTILTA

SEQ ID NO: 180422 - protein, 429 aa, unidentified
MNYTQNEKIEQVTDTTLVVGVDIGSQTHYARAFDNRGRELTKRVFSFQNDIEGFNFFQLWTEKLKNENKKTAVLIGCEPTGHYWFAFAKYVQDHQKTLVMVNPFSVKKIKELDDNSPKKTDAKDPKTIAKLVVDGRYSIPYMPEGIYAEIRDLVYSRDRIMKQHNISANRIQRWLAIHFPEYLGLYTRFDAASGLAVLEKAPLPKDVIALGVEGIRKIWHDKKMRGRGVTEDRAKNLVEAAYNSVGLDGGIGTRSELYMLLEEHQLWTSQLEAVNKVLEETIRKVQHVEKLLAIKGVGSVTIAGFIAEVGDIRRFKSPKQIQRYAGLELVENSSGKHKGSSRISKRGRRKLRKILYQVMIPLLARNKEFRTIYDYYVTRVKNPLKRRQAMIAVSCKLIRVFYAVLTKGVDYDRFKMMSDIHHERGVIAA

SEQ ID NO: 180423 - protein, 387 aa, unidentified
MVQVNDLSRSLAAFDPASTLVVVVEMSKASWLVSGVVPGVERQPLKKLEPDATALLRLIERWRNEAVRAGRPISRIALAYEAGRDGFWLARWLIARVIEAHVIHSASVAVSRERKRAKTDRLDAAMLIRVFLGWLRGERGHCGMVAIPTIEEEDARRPNRERESLVNERSRIINRMKSALARLGIRGFKAHLRKAPERLAGLRTPEGTGLPTNMIEEFRRDMARLALIREQISSIEKTRAQRLEQAPDTGPHAMVRLLARVIGIGIETADLLVREILSRNLRDRRALARYAGLTGSPDESGLKSREKGLAKAGNARVRRGLIQLAWRFLMFQKDSALARWYRTRTEGPSGARKTTMIVALARKLLIALWRLVTTGEVPDGVELRSAA

SEQ ID NO: 180424 - protein, 420 aa, unidentified
MVSVKVANVEADLMAALATVTDLADQVVWAVDIVGAPSALILALLARAGSPVFYASGRVVNTMSAAYTGEGKTDAKDAYVIAETVRLRRDLPMVDAVTDLIRELALLTAHRSDLIADRVRMINRLRDVMTSVFPTLEQQFDYSSHKGALILLTEYASPKRLRRLGETRLTQWLRRRQVRDAARVAARALAAARGQDIELPGQQVAEMIIAELAGSLLHLDQRIQGLDQQIAATFRRHHQAITIESMPGFGPILGAQLLVAAGDVRAYPSAGHLAAAAGLVPVPNDSGRRSGNLHKPRRYSRPLRHVFYLSAQTSMMRGGSQPCLLPQETRWRSHPRPSRHHPRPPPHRRPLGPPTRRPHLQHRPAHPRCRGLTTSLRFPVTGHGPVLGLGRSLGNVDHVRDPVLALADLPRRPTDRPTGT

SEQ ID NO: 180425 - protein, 375 aa, unidentified
MNMNAVGIDVSKRKSTVAILRPGGKIVVKPFDVPHLSTDFQSLKELIRKLDGETRIVMECTGRYYEPVARELSQDGFFVSAVNPQIIRNFQGQGNPLRKVKTDKADSVKIARYTLDSWANLKQYSLMDELRSQLKTMNRQFDFYMKHKTAMKNNLIGLIDQTYPGANTYFDSPAREDGSQKWVDFIGTYWHVDCVRKMSLSAFTDHYQKWCSRRKYNFSKSKAEEIYGKAKELIPILPKDNFTKRIIKQAIDQLNAASQTVEQLRALMNETASRLPEYPVVMAMKGVGPSLGPQLMAEIGDVTRFTHKGAITAFAGVDPGVNDSGDYSQKSVHASKHGSPVLRKTLFQIMDILIKTKPDDAVYRFPAFLKMHHSK

SEQ ID NO: 180426 - protein, 413 aa, unidentified
MEWVACVGIDWGDKQHACMIQTREGTKQAMTLASSPEDVHRWVRELRERFPKGTIVVGVEQGQWSLIYELMAYEFLALVPINPRASKAYRTSLRLSGASDDPADAALICDFVLKHFGELRVWRPDDVRTRKMRLLCEQRRSLVDQRTALTHTLSATLKEYFPQVLHWFGETSQHLRAFLTHWPTLEQARQAVIDDLTGVLKASRRRKASAVAEELIEKIRLAVPLTHDTAIIEAHSLYALSLVALIDPLDQQIANYDQAIAAAWAVHPDRKTFGSLPGAGAVMAPRLAVAFGLDRSRYDDAREVQQYSGIAPVIERSGRQFWIHARWGFPTFLHQTFHEFAEASIPQCQWARAFYHQQRERGAGHHQAIRALAFRWIRILFRLWKTGEEYDENRYIEALKKKQSPVVSRLAAA

SEQ ID NO: 180427 - protein, 398 aa, unidentified
MTESSDYESVQVFIGVDVGKDTHHAVAVNRSGKRLFDKALPNDENKLRSLISDLKQHGQILLVVDQPATIGALPVAVARSEGVLVGYLPGLAMRRIADLHAGEAKADARDAAIIAEAARTLPHALRTLKLADEQIAELSMLCGFDDDLAAQTTQVSNRIRGLLTQIHPALERALGPRLDHPAVLDLLQRYPSPDKLASRGEKKLATQLCKLAPRLGKRLAADITRALTEQTVVVPGTNAAVVVLPRLALQLITLRKQRDEVALEVEQRVLAHPLYPVLTSMPGVGVRTAARLLTEVACRAFASAAHLAAYAGLAPVTRRSGSSIRGEHPSRRGNKTLKRALFLSAFAALRDPISRAYYTRKMSQGKRHNQALIALARRRCDVLFAMMRDGTFYTPAAS

SEQ ID NO: 180428 - protein, 395 aa, unidentified
MSAEGEAIRSNDYRKDTTVKAPSTRPAAVLGLDVGKSSHWACLIDRDGEVLASAPVRNREAELDALFASAPGGTLVVVDQFRNIGSLAVRRARAAGLGVAYLPGLAASRAAGLFAGEAKTDERDAAVIARTALGVPDSLSGVPGRGEALEAARALSSQRDHVVACATRDKNRLRAVLLESCPALEAAVDLSDRRWLELLAGFGGAWGIARSGAEGPQAEAAGEAASGSTAPPPALVEAENRQVRFLAARISEALDEAGALEAETAALLEGDETYACLLTVPGIGPRTAAQLAVSVDIARFPDHDHLASYCGIAPRVRSSGTSVRSVRASRRGDARLKSLLIFSCNSLVRSSGRYGEYYRACRARGMGHGRALKAVARKRLRAIYAVMRDRVPYRE

SEQ ID NO: 180429 - protein, 334 aa, unidentified
MKELKSSVGIDISKDSFEVCIKQLVSERVVIKATHSFQNSFKGFDDFLKWTLRKVSSPIFVMETTGVYHEDLTHFLYSNDQKVSVVLANKMKHFAKSLNIKTKTDKADAQMIAQYGLERQLEWWQPMMPQMKNLRDLCRERLSLKKDLVRCKCQVHALKHAHSTLYVVLQLKEQQIEFLEKNIQIIENEIIRITGEDKEFSQRVKNIETIKGLRLLTIVTVLCETNGFAQFNNIRQVVSYAGLDIAERQSGLFKGKTRISKKGNSRIRECLYMPALSATSYNEHIKALYQRVIERNPTIKRKGVIAGMRKLLVLIFVLWKKNEAYNLEYKWNAH

SEQ ID NO: 180430 - protein, 362 aa, unidentified
MRIIGCDFHTRQQTLAMLDTETGELVKMTLLHEGNNVREFYSALPRPVRVGIEATGSMQWFVNLMEELGIECQVGNPAVIRAAEPRKQKHDRRDAGLILKLLMEDRFPAIWLPSKELQDLRALVRHRHQWVRMRTRIQNALQSIALANGLRRGPALWSQAGQHMIASLPLAPHAAYRRSELQAMYEKFEAEIEKLNQRVEEQACERAGARLLMTHPGVGPVTALATEVFLGDPARFADSKALASYVGMIPREYSSGGKQRLGGLSKQGKPLLRFLWGEAGAHAVRRDPALQRFYRRKLVQKGLGKARVAVARKLGIRLWIMLRDQMEYNEFCRRGQKQQNSGAACAGMPGTHNGATSHRPVD

SEQ ID NO: 180431 - protein, 340 aa, unidentified
MRYIGLDVHKEFCQASVLNENGDELENERFDSTLEALNSFLDRFEEAKFVLESTGIWEFIYEGIEARKFEVQLAHPLKVRAIAEASVKTDKVDARTLAKLLRLGMVPRSYVPSRDVRDLRQLVRQRAFLVQRCTSFKNRIHAELTRNGLRRPDGMSKAFTKKHREWMRSLGIWTLSNDLDCLEAIEARVADINVELFAEYQHRPEAQLIATIPGIGYYGALLIWAEIADISRFQDAEHLCSYAGLTPTVSQSASTVHYGGVSKEGSKHLRWILIESVHVHRRYAPESALSMFASRIERRKGKQKATTAAACELLHIIYWMLVRNEPYHGHGSNLEVKPAA

SEQ ID NO: 180432 - protein, 387 aa, unidentified
MTGQTQVSRFIPSNYDIFAGLDVDKRSIAMTFSDHQTLIKSQRLPYSSAQLLNYVSKHFPGQRVAFVYEAGPTGFGLHDDLTANHHTCLVVAPSMVPTAPGQRVKTNRIDSKKLSLGLRGGELRGIHVPSRSYRELRHLVQLRDTHVGQLTATKLRIKALLLCEGIPFPEAPPSSQWSARVVAELRVLPCTTEVRFKLDHLIGTLYFHFNSAAVVQKRIRLFCQNDPELRQSISLLKSLPGIGWIVAAHAVARLGDWREIENVRSIAGFLGLVSSEHSTGDKVNRGSITRSGDSRLRNKLIQSAWVAIGKDPDLRAFYRRIFARHPKKVAARKAIVAVARKLTTRMYAVLKQQRPYVIRPGSSIAPLTTEETVGPRERLDAAQSDQP

SEQ ID NO: 180433 - protein, 334 aa, unidentified
MKNYKNYLGFDVSKNTLDYCLLIPERDTVKRGSVANEKKSLQTLFAAFSKEGLMMEDTLVVFEHTGIYSTILAVFLCGNGWNYAEVPAIEIKRSRGLSRGKSDTIDAQEIAKYAMRNEDKIQLSEVPEIIYQQLNLMNAEREKLIAAIKSFERTSEGEEFLGKEVYRSVKSANRKTVTFLKSQLKTLELAISKLVRSDEDLNAKQELLRSIPGVGEIGTLYLLLTTKGFLRFRNARKYACYCGIAPFGRTSGTSIRGKSRVSPFADKKMKSILHLLSLTAIKYDHELKLYYERKQAEGKPKMLALNNVKFKLVNRIFAVIERGTPYVKTQQFAA

SEQ ID NO: 180434 - protein, 396 aa, unidentified
MVTVGIDIGGRSHAVARCRDGNLKADREVLRVSQSRAGFAALDAWLERQAEPVSLVTMESSGHYWMPLVSHLRRQDVPVAVVNPLAAKYFARSRLARTKSDPADARSLAEMGMRDQPVVRDPLAGAELRQAARFAMALVEEQAKVCQRLIRLVELGFPELGELFDDPTCRTAREVLRIAPTARAATRRRTTTLANANAGPRHRRLGMVKAERLQAAAADSIAVPELDAEVAFEVGLLLDQYDLLERQIEAADRRVASLLDGETARRLRTIPGVGPSIAATLIAEIGDIERFTDFDQLLAFAGVHPAERSSGRKGSNPETAWHMSKAGNSHLRAAAYRMAVVGIQHNPVIRAHYERKRAAGKSKMNALGHCMRKALSLVWGVWRNGQDFDPDWGVEP

SEQ ID NO: 180435 - protein, 400 aa, unidentified
MRTVFGIDVSKASSEVAILVNSEKVYGYTISNDAIGFARLLSDLTTVQHPEIIFEATGVYSRRLQVFLEENGYDYTRLNPLEAKKQLDSLRVRKTDKIDAEKLAESQFVLNRKPTYVQKEVYQNLRDLSRFYQNLTEDIVRTKNRLHKLLQTTFPELETLLSTPTGEQYWNIVMACPSKDFVLNLGKEKLADIIHHSTSKRISDKRIAYLTDKLTQLAKQSYCAVKKTSPMMEEVRYDAQELLRLTERRQVVLDEMVNLAQPLPEYESLLSIPGIAETTATSIIGELGDIRRFQSANQINAFIGIDLKHYESGNFLAKEHITKRGNPYARKILFKCIHNIASASHTNPCHIADFYEKRKKQSQTASTKPHTIASIHRLIRTMYYLITHNKLYDYNSAKSQ

SEQ ID NO: 180436 - protein, 338 aa, unidentified
MTCFAGVDLAKKVMQIHFVSGDGEITDKQVKRAEFLDFFRNRSKCLIGMEACGASQDWARKLETMGHEVHLMSPKAVKPFVSDQKNDYNDAIGIYKAMFNGVRRVPVKSTEIRDLQTLRRIRSQVTKDRVKEINHVRGLLAEYGIVMGKSITAFNKGISSALESLKERGDVSPLVAEELRTTVESIKTKIERQKKLDREIEQLARGCKNYENFLKTPGVGPFTAAMLCVLLCDPDIFANGRKFAAYIGLAPRSRGSGGKYFVTSIPLKFNCDSESRAVFVECAQAIARYKNKSPWVEDILRRKPKKVALIAIANKLARQVWAMANKGENFKQMAILTA

SEQ ID NO: 180437 - protein, 348 aa, unidentified
MSQILSTVAVIGIDIGKNSFHIVGLDGDGALVLRQKWSRGQVEARLANAPPCLIGMEACVGAHHLSRKLKALGHDARLMPAKYVRPYSKGQKNDFRDAEAIAEAVQRPTMKFVATKTADQLDLQALHRVRERLVSQRTGIINQIRAFLLERGVAVRQGLRFLRAELPRLLAAPPEVLSPRMVRVIEGLAEDWRRLDERTDCLSGEITALACQDAGCQRLVSVPGIGPIISSAMVAAIGTGDAFSKGRDFAAWLGLVPKQISTGDRTILGKVSKRGNRYLRVLFVQAAWVVLIKPQSWERHGLKRWIEAAKKRLHHNVLAIALANKLARIAWSVLSRGRAFEASKLQVA

SEQ ID NO: 180438 - protein, 515 aa, unidentified
MLIQGSSDPPQLVRVGIDAAIVAQHEVCIRATDAQGRVRTDRFRVQPTLAGLRSLSNRLAEMPGVVAVAEPTSMTWLGLSVALRDAGCDLSLLGARHAARLRGAITGKHKSDVIDADVLARAGEVFDLHPLRPVEPAQLALRRACVRRGGSVIDGNRHLRRLISLARWAFPDVWNGFRGSLPTAVAVLDRWPHLAQLAAARRSTLTAVVALHTRGVADVPDRVEAIRSAAAAWAAFWAGHLDLDALAFDVTEHLTDMADAKARTERATGQAQRYWRRLYGDDELLLSLPGMGPVTAPVIRGFLADGTGFASGKAAASYVGLNPSTWSSGTVSQPSRTITQEGPAVLRLAFFQAANAARRQDPQLAGFYHQLMTEHGHCHTQACVAVARKLVERTWTVLTRGTPYQIRDLDGQPISRLEAKKMIKQVCTVPDQVRAKARAHSAATNRAKRPAERRRSHPADPPIAAIWSALRRAQRGAPARRTSQMNVAGRTTLTSTNADPSSCSGGTALPPCPQR

SEQ ID NO: 180439 - protein, 433 aa, unidentified
MDHQQGEPKEVRWRDIQLFGGLDWAKDHHDIVAVNAQGRAVVELTIPDTAEGWAGLREKLLAQVGGDLSAVAVAVETNNGPAVERLLALGCRVYPMNPKAAGRYRDRKAPSGGRNDRLDAFSFADGLRTDGHGWRPLKPDDPLTQELRLLCRDEVQLIRQRTALVNQLQAALHEYYPAALEAFDDWVCPGAWSFVERFPTPAALVAAGKRQWEKFLHAHRLYRPETYPRRLVIFARADRFAGPPAVTKAKSRLAVALAGQLRVLEKQIGEYRSAIEALFAQHPDHELFDSLPRAGKKLAPRLLGELGDDRDRFADAQGLQCYGGTAPVTIQSGKSRRVKLRRACNKWLRSTVHLWANLSRAECVWAAAYYDRKRAEGKSHATALRCLGQRWFKILQRMRQDHRPYDEALHLRNMVKRGSWKLALAGDPQPVNK

SEQ ID NO: 180440 - protein, 332 aa, unidentified
MVAGTHGSLNKAGSTKMTQISITAGIDTSKAKLDVAVHGRDQHWQFDNTAVGWRRLAAELSKAGVTHVGIEASGGYESGVVGYLRDKGFTVLVLQPIQVKAYARVHLRRAKNDKLDAVLIAACTATIDQTRIEPDDRLAKLALHLTFVEQIEEDIARFKIRLEHVDNPRLRRLVIADIARLKTRRLAELSRIVTALRAHDDLARRLDLVLSIPGLGERTAVALIVRMPELGRVSREEAAALAGLAPYDDDSGKHKGQRHIAGGRGRLRRSLFAAALPAAFHWNKALIELYTRLIARGKAHNAALIACARKLLIYANTVVYRGTPWVERPAVT

SEQ ID NO: 180441 - protein, 499 aa, unidentified
MGEEVPLYSGAPETMIGESCKDIPYRILKVESFARNSASFFKVESMKTKKQKDFEQMPVVNFRAAGIDVGSKSHFAAIGQGKEDVREFGSYTNNLHELCGWLKAASITTVALESTGSYWRPLFILLQAYDLNPILVNGKYTKNVQGKKTDVLDCQWIQKLHTMGLLEGSFIPDLFTETLRQYCRHRNYLVENASDYINKMQRALRVTNIRLDMAVTDIAGKSGKDIIEAIIAGERDPEKLASLANIQVKKSREEIILALTGDWRDEYVFELRHCYEVYCYFHLKISECDEQIENLLNTRIEANEKADGEARANYTNKFKIKGKNKPKINLPKLSFQLTGGIDLCEIEGVKSGTIMAILSETGIDLKAFPTAKHFVSWLRLAPNNRVSGGKVISHRTPKGKNLLAEALRRAANSVGLAKKGSLSEFFKRINHKKGRLVAITATARKLAVIIYNMLTKKQPYQPQDQTDYLNKIRMNQIRSMQRRINQLNVLPHELLFVTS

SEQ ID NO: 180442 - protein, 334 aa, unidentified
MENIALIGIDLGKNSFHIHCQDRRGKAVYRKKFTRPKLIEFLATCPATTIAMEACGGSHFMARKLEELGHSPKLISPQFVRPFVKSNKNDFVDAEAICEAASRPSMRFVQPRTESQQAMRALHRVRESLVQDKVKTTNQMHAFLLEFGISVPRGAAVISRLSTILEDNSLPLYLSQLLLKLQQHYHYLVEQIKDLESQLKRKLDEDEVGQRLLSIPCVGTLTASTISTEIGDGKQYASSRDFAAATGLVPRQYSTGGRTTLLGISKRGNKKIRTLLVQCARVFIQKLEHQSGKLADWVRDLLCRKSNFVVPCALANKLARIAWALTARQQTYVA

SEQ ID NO: 180443 - protein, 366 aa, unidentified
MFHKLNSAATLIQRTTTEAPRDHMYYIGLDVHKRTISYCVKDAAGHVHQEGKIGSTRCELDAWIKTLPQPRMIAMEATIFTGWIYDHLLPHAEKVKVAHPLMLRAIAAAKKKNDKIDAAKIADCLRCDFLPECHMVSTEIRDRRRILRYRNLVIKQMVQMKNRVSGLLLETGVSYNKQRLHKVGYFADLMSANDEVYESIRPLLRLSREHIVRSQRLDYALVSSLERDPLLAERLELLRTVPGVGPITALTWALEIGDFTRFRSIKQAISYCGLCGDERSSADKVMRTPLSKQRNKHIQRVLIEAAKLAPRYSHELAMVREKELQEGNPNRATLAVARKMVSYMLAVERRKQNFVPAEKFKCTAAA

SEQ ID NO: 180444 - protein, 445 aa, unidentified
MKGVGMEAAELETAEGLVERVAAIDVAKTSGMVCMRLPHPTREGRRVQEVWNVAATTNAVLELGDRLLCQGVTRVVMEATGAYWKVFFFLLEARGLECWLVNARDVKNVPGRPKTDKLDAIWLAKLTERGMLRPSFVPPKPVRQLRDLTRTRTVLTEERTRHKQRVEKLLEDAQVKLSTVATDIFGVSGRAMMEAMIGGERDPRVLAQMAKGKMTAKKDALTQALTGQFEEHHAFLCRTLLDSIDHLTAQIDRLSARITNAIRDLPGPDCPDAGDDGDSSRPGPGLVKRLDAIPGVGPATAQILLAELGPDMRVFPTPDHLASWARLCPRTVQSGAKQSFGRTGKGNPWLKGALGEAAMAASRTDTFLGSRYRRIVKRRGHKKALVAVARSILVIIWHLINNPETEYQELGSDHHQRLIDPARRTRDLVRQLTALGHQVTLAPGL

SEQ ID NO: 180445 - protein, 340 aa, unidentified
MKKLYVGDDLHSSNNYLAIIDEKGKRVFHRKLPNDRATIINTLAPYEGAIAGIVVESTYNWYWLVDTLMDEGYKLHLANPSAIKKYEGMKHANDKDDAFWLAEMLRLHILPEGYIYPKESRPIRDLLRKRRHLVRLRTSLIISLQNIISRNCGHGFKANDVKRIKEDMISPILAYDEDLALAGQVSKDAIDFHTRKIWELEKVIERKIELREPYKLLLTIPGVGKILALTIMLESGPIDRFQKVGNYASYCRKVSSKWTSNNKTKGSGNKKNGNKYLAWAFSEAAELARRYDDRIRAYYNRKMQKTNFMVAHNAIAHKLARAAYYIMRDNVPFMPEKLFT

SEQ ID NO: 180446 - protein, 405 aa, unidentified
MDIGKAELVCCSRVPSPDRAGRRLQEVTTYSTMTRSLQGMADRLLALGVTRVVMEATSDYWKPAFYLLEAAGFEVWLVNAKDVKHLPGRPKTDRLDAVWLCKVAERQMIRPSFVPPKPIRRLRDLTRYRVALVTEASAEKNRVEKLLEDAQIKLSVVASDIFGVSGRDMMAALIGGERDPQVLAQLARARMRLKIPQLEEAFVGHFDEHHAFLLAQMLDRIDAASAGIEKVDARIEAEIAPFADAVTRLDEIPGVGVTTARVIIAEIGADMTRFPTPAHLASWARFAPSIKESAGRHKGSGATGHGNRYLAGALGEAAASAAKTDTFLGERYRRIARRRGKKQAVVAVGRSILVIIWHLLSNPDTTFHDLGADYYENRNGTRAAIVSHVRRLQALGYRVTLEPVA

SEQ ID NO: 180447 - protein, 329 aa, unidentified
MTINILGIDIAKNIFQLHGADNSGKAVHKKRLARRELAAHVANLPTCTIVMEACGGANYWARVFQSSGHSVKLIGAQFVKPFLKTNKNDANDAQAIVEAASRPSMHFVPIKQIEQQDIQSIHRIRTRVVKNRTALINEIRGLCLEYGVVLIPGAARVKSSLCASIADSDNELTPSSRESMQDLYQELIEIEARLEKLDTRIRQLCRQNENCQRILKIPGVGELTATAIVAAVPDPGEFRNGRHMSAWLGLVPPQSSSGDKQVLLGISKRGDRYLCTFLIHGARAVLSHYKDKDNDYTRWVGRKKATLSHNKAAVALGNKNARIYIRAQV

SEQ ID NO: 180448 - protein, 342 aa, unidentified
MNAVGIDVSKGKSMVAALRPMGEVALLPREFLHTEVGLEQMAYAITTLGEDTRVIIEATGRYHEPVAAALHKYGIYVCVLNPLYIKQSGGGSIRKVKTDKADAMKIAKYGLDNWVDLREYTPMDTVRQQLKLCSRQYNLYMKTVVSLQNNLISLTDKTFPGVNELFSSPERADGHQKWVDFVMTFWHCDCICRVSEKAFTERYQKWCKRKGYHFSTEKALDLYAGSCGHFTTLPKNDNTKLLITTAAQQLLAGKMTLAALRAEMTRLAMQLPEYDIVRAMYGVGETTAAQLMAEIGDVRRFPRRSSIVGFAGVDPGVDDSGKHSAKSVPTTKRGSPHLRKTL

SEQ ID NO: 180449 - protein, 403 aa, unidentified
MRHVIAFDISMGKSYMVIYNAQKQCILESEIKHSKPEFEKLQETIKELTNTTGQLPEIVFEATGIYSRQLERFMQNHQYTYCLLNPLEAKLQCDSLRIHKTDRSDAHQLALTHFTVSRRGKVITGPLFDQLKSLSRFYSELDDELSIIRNRMHKVLQLTFPELERIFTTKSDLFLKFIQLFPHPDLIQNLSKTVVKNRIRASTQKNISVRIAEQKAAEILEAAKLSYPAVDSDDVLCEQLQIYAKRYQELMRHKECCINKMVHLAEQRIEYGVFLSIPGIGPNTAVRLMAEIGDITRFANNKQLNVYAGIDIRRFQSGKTFYKDKINKRGNKHLRKLLFLIIQNMIKQRRYGRNHIVDYYDKLKTQPYNKCHKVASIACVNKLLKLLLHLITHNIHYDYRLTT

SEQ ID NO: 180450 - protein, 365 aa, unidentified
MAITHVALDDSKRVIVAGILRADATQPELREIPNEPRQVRRLFERLLHEAPVRACYEAGVSGYDLYRQLTALGVECAVIAPALTPRKPGEHVKTDRRDAAKLVRLFRAGELTAIHVRTEAQEGVRDLTRCRDDIRADVVRWRHRVLKLLARHGRVYQAGKNWSQAHWRWIRTQHFEDPALTHALDASLEALEQALRRRVDLDRAIEAVATQPYRDAVGTLRCFRGINTLSAMILVAEIVDFQRFRRPRALMAYLGLVPSEHSSGARQRRGALTKAGNTHARRVLVEAAWHYRHRPALGERLARRTAEQPPAVVAEAWRAQQRLHRRYRHLVGHGKRPTVAVAAVARELVGFVWAAMTRTPLGVAA

SEQ ID NO: 180451 - protein, 414 aa, unidentified
MTGDIKVSVGLDLHKKFILGTVLWQTGQMIQERFDRTKEGLFSLKAWATGHHADVVACESTSDYWVQIYDLLNGIIPVIVGNAHDIKVLSHKKTDKIDSLIIARLALHEMIQPSRVFAQKHREFRKLVRLRHSLVQKRTDIKNQIHHILDSELLQLSSAMSDIFGVTGMHLLQGLVDGAPLDVLLQKLPPRIRKHEEEIRSVLSDTLSKDALFRLDCCLRLIRCLDEQIDVITESATAYAYEHHSRQMEILLSVPGIGKIGALTLLAEIGDVRDFSSAEKLASWVGVVPNVAQSADKLHTGPITKRGSVHVRWILTEIAHATARSRTSGLKSFFDRKKKVLGTGKAIIALARKIISLVWHLLVHDELYSDPQFPQKHTQNFVSVKVPKSLTLDELLQILVEADVYLKKKDPDIL

SEQ ID NO: 180452 - protein, 354 aa, unidentified
MFHATVINSRTGEISYFKTKPIGSKLVEKLLTYHSCPQDYQICYESTYIGFSLCRFLRKENFHCDVIASGLVPEISGHKVKTDRCDSEKLAKLYMKDMLTTLNVPAEEDEAERDLLRSRSLVSKQVIKTKNHIQSLLRRHGIDYRNEEKQLNLWTERYRKWLYGRASKLNDTLKINFNLLLSQLEFLESSLKTYNKEIENLAKTEKYESKVQALVCYRGIETLTAMKVITELGDIRRFDHPRKLMSFLGFDVIEYSSGGKERKFGITKYGNKIVRTALVEATQRCATPPKVSYNLRIRRGKTPPELIVVADKCMQRLYRKSNHLLSREKNRNKVKVACAREMCGFIWESLMRVS

SEQ ID NO: 180453 - protein, 369 aa, unidentified
MKKNNIYVGLDVHKNSIDVALAEEGRSGEVRHYGSIGGDIDSVEKLLKKLSKPDRELHFVYEAGPCGYEIYRFLNKRGLKCCVISPAHIPKVSADRIKTDRRDAMSLARLHRSGDLKEIYVPDEEDEAIRDLIRAREDAIKAQRVARQQLSAMLLRLGVRYSGKTNWTKQHFKWLSEQKMPSPAQQTVFQEYINAINAASERVDRFDKYLAELCRTWRMLPVVESVQALRGISLVGAMTIISELGDLSRFKNPRQLMAFIGIVPSEHSSGTKTKRGRITKTGNTRVRRTLVEAAHSYRYPARVSNKLLERHANISRNILDIAWKCQMRLCARFKRLKASGKHHNTVVTAIGRELAAFVWAIAREAQVYA

SEQ ID NO: 180454 - protein, 345 aa, unidentified
MYIVGIDIAKRKHEAAVIDGEGAVIIKPFSFTNNCSGYNRLLAMLTKAKLPLDEVSFAMEATGHYWLALFTRLQKEGFRVQVINPVQTNSIRSFYIRQAKTDPRDALLIAEVIRFGHFSESTLHPENIYELRELCRGRHAIVSMQADVKRKVVALLDQVFPEYETAFTNLFGDTSMAILQTCPTPKELSEMPLEELCHLIEVSSHKRFRMAKAQELQALARNSFGFAMAGDVFSTMIRLYAKHLDFLKQQVREMDRKIAEIMDTLDTPITTITGIGPTLGAYILSEIGDISRFSSAAKLAAYAGIDPTMRQSGEWSRRQRQPSAPEVERCQSGSAPGQREEVLRQ

SEQ ID NO: 180455 - protein, 427 aa, unidentified
MAQEKMGLEPEFAAFVGIDWADRKHVWCLQAAGSRKRETGELEHKVEAVEAWVTELCQRFGHRPIAVAVEQVKGALVFLLNKYECLHIFPVPSTMTAKMREALYPSGAKDDPRDADLLLDILGQHRDKLHRLSPDDEATRRVQNLVEERRKLMAERVAQGNRLTSYLKIYFPQMVEWFEKLDIPLVCDLLERWPTLEELQKVSGEDLRRFFRQHHCHRGLRERRILAIGGAIPARGDRAVIEAKSTVVKVIVQLMRSLLQGIAELDRKIEEAAGEHPDFFIFASLPGAGTVMAPRLFAAFGSQRDRYSCADELQTYSGIAPVTESSGKRKWVHFRWACPKFLRQSFHEWAGHSIAQSTWARAHYQQQRDHGSDHHAAVRALAFKWIRIVFRCWKDRVAYDESKYLAALAKRGSPLGKLVVVGVGTSF

SEQ ID NO: 180456 - protein, 344 aa, unidentified
MEVAIGVDPHKGSLAVAAVDPLGKVIDAREFSNDPPGHGALLGWVRERSPDRVIGIECSLSYGASLSRLLLGAGEDVREVPTTLTHRERRRRRSHGKSDLVDSVAIARIVASGEVLPSAHRVEVLSDLRALVDYRDQLVRARTQVANRAHADLLNIRPGYGRAVPNLRAKVHRAKARSLLRGDRSVRAELLRKRLGELSRLDGEIAAMDRRIEATVRETGTSLTDIPGVGPFVAAKILGEVGNPSRVRSKAAFAVLSGTAPLAASSGQTHRHRLNRGGNRQLNWALHYIALVQCRISSEAQAYMARQREAGKSHKEAMRCFKRQLSNVVYRHLLADARGAELAA

SEQ ID NO: 180457 - protein, 506 aa, unidentified
MVTHAWRVGSRLEECFGSPPAPDAWQDVRRGGEEMARAARRSGGSSSRKGRSSRARSAQLEQLNLHAAGIDVGADAHWVAVPKDRDEQPVRCFGAFTADLYALAEWLRQCQIETVVMESTGVYWIALFEVLEERGFDVKLVDAHYARQVPGRKTDVKDCQWLQELHTYGLLRGAFRPEDEVCVLRSYLRQRSMLVAMASRTVQHMQKALEQMNLKLTEVVSDITGKTGMTIIRAILAGERDPQLLATYRDKRCKHDHATIAKALTGHWRAEHLFALQQAVEQYDFLAQQLRACDGHIEGCLQAFVPDVEIDVPQAPSARTWRSSRSNPLSFEVQAYLNAMTGVDLTQIDGIDSLTALKVISEIGLDMTCWPTSKHFASWLGLCPGNKISGGKRYRIRSKPSANRAATALRLAAQGLANSHSALGAYYRRMRGRLGAPKAIIATAHKLARLVYSMLRYGTAYVDEGQQAYEQKYRDRVLTNLQRKAKAFGYQLVHVADIDGEVASTL

SEQ ID NO: 180458 - protein, 350 aa, unidentified
MFIVGCDYHPSFQQVAFVDTETGELKEQRLLHREAAEEFYRALAAAGQRVRVGMEASGHARWFERLLAELQFELWMGDASEIRRKRGRKQKTDRQDAQHILGLLLKDDFPPIWVPSWENRDVRQLLWHRHRMVQARTRIMNQLQAVALNEGLLCKKRLWRERGRQQLEAFPLAPWADRRRHDLLELLDRLNPTIAELSQAIEREVEKCPAAQRLMTHPGVGPLTALAFVLIIGDADRFQCGKQVASYLGLVPLEDSSGNRRRLGHITKQGSSMMRFLLVEAAQVTVRSLPEWRRKYMHLMMRRGRKTAKVAIARKLAIRLYWMMRQGWDYQQWSKFGSHARQLGTGDGVL

SEQ ID NO: 180459 - protein, 413 aa, unidentified
MDVLHPRCCGLDVHKNSISACILVQEAGRVQKHQRRFGAMTQDLQELANWLRQFEATQVAMESSGVYWKPVWNILEGQFTVVLVNAQHIKNVPGRKTDQKDAEWIAQLLQHGLLRPSYVPCEVIRDLRDLTRMRTSLSQEASRISSRVQKVLEDANVKLASVATNTLGKSGRAMLEEIIAGQNDPEYLASLALGHLRAKAPQLRLALDGKIRPHHRFLLRRLLDQLRFVEHEIVLLDERLEDIGRERPELSQAVARWDTIPGIDRVAGWTLLAEVGNTMAQFPTAEQLASWAALCPGNHESAGKRLGGTTRKGSPWLRRMACQCAWAAARTKNTYLSAQFRRVAARRGSKRAIIAVAHSLVIIGYYLQKNQRNYEDLGGDYFDRIESDGLKRYFVRRLEKLGHKVTLAPIKAA

SEQ ID NO: 180460 - protein, 352 aa, unidentified
MELLVGIDAHSRTHTAAALDDQGREIATLRVGADEAAIARLVSWIDGLQNVRLVAVEGANGFGIAVTRRLLAAGFSVVDVASSLTGEGRRRGRRRGKDDEIDAVAVARVALREPDLPSVTAALLDADLKLLVDAREQLVKEAARVRNRLHALLLALAPGHHATTGALISGPALARARRAVMRARGSDPVRARLALRAIVRLTAIEREAYELEEEIVSLVTTTGCEHLLAIRGVGPLVAAKLMGEVRDVRRYANAAAFAAHAGVAPVPASSGNRYRHRLALGGNRQLNRALYTIAMVQARWDPAARAYLARKRGEGKTGREALRCLKRHLANVVYRAMVKDAAARQAAFVQVA

SEQ ID NO: 180461 - protein, 351 aa, unidentified
MRTSQHSLDTVSTIGIDVGKNTFHLVGFDPRGAIVLQQKVTRHQLGRRLSNIPRCLIGMETCSGTHFIARQLTALCHDVRLIPAQYVKPFLKGHKNDYRDAEAIAEAVQRPTMHFVSIKTPEQMDLLALHRVRSRLVRQRTGAANQIRGFLLERGITVRQGFMPLRKALPDILSSKSDALSPRMINLIGELVQDWRRLDERIASVSSEIEALAKQDESCQRLMSIPGVGPIVSSAVVAAIGNGTGFKQGRDFAAWLGLIPKQESTGDRTILGKISKRGNKYVRTLFVQAAHVVLERRPRTARQGLWPWIEQASKRLHRNMLAIALANKLARIAWAVLARGQAYQPRITANA

SEQ ID NO: 180462 - protein, 347 aa, unidentified
MWIIGCDFHPSYQQIAMVDTESGECWEGRLRHEAGEAERFYRSLQGRVRVGMETVGNSLWFERLLAELGHELWIGDAAQIRRLVVRAQKTDRRDAWHILELLLDGRFPRLWVPSPEIRDVRQLLRHRQKLVELRTQVKNQLQHLALNQGVQRKRRLWSREGRAVLEQLPLGGWTARRRADLLEMLDRLDAQVEELDHAVRVEAEQRPAVRLLMTHPGVGPVVGLAFVLTIGPIGRFRRGKHVASYLGLIPREHSSGGHQRLGAISKQGNTMMRTLLVEAAQTASRFDEELRRDYRRLAARKHTALAKVMVARKLAVRLYWMLRENRPYSQLRFAPMQGSPGHSVVAG

SEQ ID NO: 180463 - protein, 341 aa, unidentified
MQIHSIGIDLGKTAFHLVALGAAGKVLVKKKFTQKQLLAYTANLQTSLIGLEACSGAHFLGRALRKQGHDVRLIAAQFVKPFVKSNKNDFVDAEAIAEALDRKNMRFVPIKTDDQLDLQAIHRVRDRLISRRTAVINQIRAFLLERGLVFAQTPAKLKAAMADILENAEADLTPLMRNLIDMLWSEWKQIERQVEELTDKLEEISTADDGCSRIRKIPGIGPVVATAIVAAIGNGAAFGKGREFAAWLGVVPRQYSTGGKPRLLSISKRGNVYLRKLLIHGARAAVGRMKRDGLSVGAWLDRLDASAHKNVVVVAMVNKLARTAWAVLSSGNDYRPKAVPA

SEQ ID NO: 180464 - protein, 338 aa, unidentified
MALKTIGLDTAKHVFQVHGLDEQERAVLRKRLRRTQISDFFGSLPRCVVGLEATQGSHYWARVIGSYGHEVRLIAPQFVKPYLKGQKNDARDAAAICEAVGRPEMRFVPKKSVEQQDLQALHRIRSRLVGSRTQLGNQIRGLLAEYGIILPLHLSQVRQQLPVLFSEEHPLLTFFSRELFASLYEELCALDERIEAMEERIQRVFAGNERCQKIAAIEGVGPVTATAIVAAVADARVFRNGRQLAAWLGLVPRQHSSGDKQRLLGITKRGDPYLRMLLIHGARSVVYRASTKTDSRSRWIAEKQQKLGTTKACVAVANKNARIIWALLAKDESYRAAA

SEQ ID NO: 180465 - protein, 348 aa, unidentified
MRSHFNPKEAHMKFSGIDLHSNNSVVVVSDEEDRIVYQKRLPNNLEQIQAALAPYREELAGVVVESTYNWYFLVDGLMDAGYRVHLANTTAIKKYEGLKYSGDFADAAYLAQLLRLGLLPEGYIYPREERAGRDLGRKRMQLVRCQTMQILAIENILARQTGGRMSGERVKRLTAEQVEELGFAPDVALALQANRAVSATLQQQIEVLEKRLQQRVKLRPEYRLLKTVPGIGETLATTIMLETGTITRFARVGNFSSYCRCVDSRRESNGKKKGEGNAKNGNKYLAWAFVEAANFALRYCPEAKRFYERKKRKTNGIVALKAIAHKLARACYHMLREQKPFDVQRCFM

SEQ ID NO: 180466 - protein, 307 aa, unidentified
MIHVGIDLHSRNMTLAAVNNNGELIAERKISNSPILLEQFFADLPRPVQAVVECTSFWFWLADWCSKHHIPLILAHAKMLKAISYAKVKTDAVDARTLADLLRADLIPKAHQPPLDQRELRERTRARLRMIEHRRLVQSRLWHLAAKYNVIIDEVGWRYLDRVEHLLTNRLPAAVHLESRLLIGQIRQIQQDITTIEHDITAQAPFHPRVDRLKDLPGFGLVCSWTVLAEIGDITRFPSEREFTSYCRLVPGSKDSAGKQRHRRGNKDGNRYLRTVYNQAAVIALTRYGVVREFYNKIKRRSGKQVA

SEQ ID NO: 180467 - protein, 347 aa, unidentified
MRFYTKQHKFYCGIDLHAKKMYLCILDETGEILLHRNIKTDREVFLKVIEPFREDVVVAVECMFTWYWVADLCTEHGIPFVLGHALYMKAIHGGKAKNDKIDSRKISVLLRGGMIPMAYTYPAKMRATRDLLRRRNHLMRKRAELYAHIQNTRSQYNLPETFGCIAKPQNRDGIIERFEDPSVQNMIATDLAVIAAYDPIIAKMERYIIKSAKHHDPVAHALINTIPGVGRILSLVILYEIENINRFPRVQDFASYSRLVKCLKESSGKKYGSSGKKIGNAHLKWAFSEAAALFLKGNEQGQKYREKLANKHGKAKSLSILAHRMGRAVYFILKNKKPFDQDKFLGL

SEQ ID NO: 180468 - protein, 423 aa, unidentified
MDQQTFDQFTHFGGFDWARASHHIVIVDRGGQVVLSLGFDDDAQGWATLREKIGQLPRLAVAIETSCGPAVERLLEMNLPVFPLNPKAAERYRDRKSPAGVKDDERDALSFGDALRTDGHGWRQLRPQDPPTAELRLLCRDEMALIAQRTALVNQLRTALHEYYPAALEAFEDWICKSSWEFVISFPTPAALAAAGKRRWQSFLHSHKLYRPQTAEKRLEIFARAAAFASPSAAVTSAKSLLAVTLARQLKTLEHQLDEYRARITRLFKDHPDKDCFGSLPGAGGKLAPRLLAELGSDRQLFDSPDALRCYAGTAPVTRQSGKRHWVCLRQACNKHLRCTLHLWADLSRKSCVWAEAYYQQKKKQGMSHAAALRCLGQRWLKILWKMWQSGQPYDEALHTRNQIKHGSWVIALTSSSPSPAAS

SEQ ID NO: 180469 - protein, 407 aa, unidentified
MDLLKTVFGIDVSSRKSNVCIMVNGQKVNDYAISNDMVGFNQLLGDLKQVTNPQIIFEATGVYSRRLQAFLDMHELRYVMMNPLEAKRKTKDDLHQNKTDKLDALYLAKLQSEHPQRLAYVQSEEYQELMANNRIYEQASHDLITNRNRLHKAIQLTFPEIEHLMVNPRGKNYWSIVLRFPHPDILLETKEADIIDFLKGLSGIGKKRANDIAQSLIRLAKVACPAVKKNSAHIRGLKMAINNILNAEEECQTALQEMAKLAPKRDLEILTSIPGIGKNTALRIISELGDIRRFNNPSQLNAFVGVDPQVYESGNLTAHLSISKRGTAIGRKVLYLAINQIQSAKKVGNPCHIADYYEKRKRSSETASHKKAAIASIHKLLRTIFALIKNDQLYSYDVAKHNQRLLS

SEQ ID NO: 180470 - protein, 346 aa, unidentified
MLDTTTGEVREVTLQHEGDNVREFYSSLPSPVRVGIEATGSMQWFLNLMEELGIECLVGHPAQIRAAAPRKQKNDRRDADLILKLLAENRFPAIWLPSKELQDLRSLLRHRHQWVRMRTRIQNALQSIALANGLRRGTALWSHDGQSRIASLSLAPHTAYRRSELQAMYEKFEAEIEKLNQRVEQQACQRPGARLLMTHPGVGPITALATEVFLGDPARFADSKALASYVGMIPREYSSGGRQRLGGLSKQGNPLLRFLWGEAGAHAARKDPELQRFYRRKLVHKGLGKASVAVARKLGIRLWIMLRDQIEYNEFCRRGQKQQKSSDACAGMPETRYGAKSHRPID

SEQ ID NO: 180471 - protein, 347 aa, unidentified
MKVTTLGIDLAKSVFRLHGVDARGVAVLRRQLTRQQLLPFLAKLSPCLVGMEAGPGAHFWAREIGKLGHEARLMSPHFVKPYVKSNKNDANDAEAICEAVGRPSMRFVPNKNTAQQDVQALHRIRAQLIKWRTALANEIRGLLAEYGIVVTRGIAPLRRMLPVILDDVENGLSGLFRELLVEMAERLRSLDERIRQYDLRVVRVFGQDERCQRLAQVEGVGPLIATALVAAVGNAHEFKSGRELSAWLGLVPRQRSSGGKTVLLGISKRGDRYLRTLLIHGARSAVRTMEGRRDPRSVSISRLKGRQGPNVAAVALANRNTRVLWALLTKGESYRTTPFSARIPQAG

SEQ ID NO: 180472 - protein, 359 aa, unidentified
MEVSMKEKKIATISRVGVDSSKHYMHVHGVDEHERAILVKALRREEFLAWAANIPGCVFGFEACSASHYWGRELRKLGHEVRLMAAAHVTPYRKSRQGKNDRNDAEAICEAMARPTMRFVTVKSEEQQSLLVLHRLRAGLRDERTAQINRIRGLLAEFGIWVSQSPEKLASWFHQQSETLAGLPPLAKRGIESAREHWKTLDERIEEMDNQIAESTKESQAAIRLQKIIGVGMLTASAVVATIIDGKQFKNGREFAASIGVVPSQHSTGGKTTLGRITKAGDHYLRHLLMQGARSAIGAALRRKPEKLTRLERWMLALNARVGYYKTLVAIANKHARIIWAVLTKGEDYDPAYVTATKA

SEQ ID NO: 180473 - protein, 346 aa, unidentified
MTTPIVGVDLSKSVFQLSVADVKHRVIEPKRLSRAQFHRFLARTTSAHLVMEACGTSHYWARTAHLHGHEVKLLHAKYVKAYVRRTKTDAADADALVLADRDDSLHPIPIKPEELQALQGLHRIREQWKRARVSRICEARVLLAEFGISAPLGARGIGKKLTLATEQTPVLLQPALLDLIQEIGDLEQRLKRVDHTLAAYADTNSDVQALLGIQGIGVTVATAFVARVPSIHMFKRGRSFASWLGLTCREYSSGQTRRLSRITKQGDRYLRMMLIHGARAALMAARRKAANGRRLTRLETWAVNTQARIGHNKATVALANKMARIMWAVWTRHELFNGDDALRFAA

SEQ ID NO: 180474 - protein, 378 aa, unidentified
MHTILHKNSIYKPVEIKNQIPFPRVKCLISKVRLMRIVCGLDVHKDSIYLCILSSTGEILEQVFGVLTTQLEEMRDLMLKYNVQEVGMESTSVYWIPVWRVLESHFELKLINPYFIKQLPGRKSDVKDAQWIAECMMKELVRGSFVPPERIQQLRLYDRRIYDLDDEIIRKLAKLDAVIQRCNIRLSNYVSNTDSVSYKSVIDKICEGVTSPEELVKEVHGRIINRHGKETIIASLKGCITEVDIDIMTQLKAEIDLAELHKQKCLEKMQDICEKEYSEQLSNLQTIPGVKMRAATSLIAEIGTDMSHFETANHLFSWAGLRPRNDQSNKTIKSRRITHGNRYLRRTIIQCAWSASRTKDYFLVVFPIIRHKSEKRIK

SEQ ID NO: 180475 - protein, 368 aa, unidentified
MFEHTFIGLDVHAVSVVGHALNPGTGEISHHTMAADPALVLEWVRRFEPPVKVVYESGPTGFVLARYLRAAGVNCVVAASSKLLRAPGDRVKTDRRDARVLAEMLAVGSVTEVRIPDPDEEALRDLSRLRSGAAKDLAHARQHVNAILLRHGLRYPKDTRWTQEHRLWLHRQRFDEPALQFTYEADVEQAELLAAHLKRIDQQVAATAAACPYTAVINALMCLRGIQLTTAFGLAVEIGDWTRFTGSSIGSYLGLVPSEESSGQSRHQGPITKAGNTYARKLLIEAAWQHRRPYTRPGERLLRQLDQVAPATRIRALEGNHRLHRKWEHFDERHKMSVKANTAIARELAGWCWSLAAPLQKGRAMSAA

SEQ ID NO: 180476 - protein, 345 aa, unidentified
MELHTIGIDLGKTVFHLVGLDPRGEAVVRKKFSRTQLLRFTANVHVGLIGMEACGGSHFLGRALREQRHEVRLIPAQYVKPYVKTNKSDYIDAEAIAEAVARPTMRFVPIKTDDQLDLQSLHRVRERWVMRRTAVINQIRGLLLERGITLRKGRHHVDAALPLILEDADAKLSGAVRLLLAQLKLDLDQLSVRIDEADEVIKKIADENEACRRLVAIPGIGPVTATALIAAIGNGAAFHKGREFAAWMGVVPREHSTGGQQKLLGISKRGNSYLRRLFVQGARAVLQQRTKQSSGLSAWLAQLTSRAHRNVAAVALANKLARIAWAVLAKNEPYRPPVLADVAAA

SEQ ID NO: 180477 - protein, 423 aa, unidentified
MGKTIPICCGVDVHKKFLVATILTGDYLIPQCKQKHFGTSFRNLLAFKQWLLDNNCKDVCMESTGKYWVPVWNVLEGVVNVVIANPKWVSAVKGNKDDKKDSKWIGNLFRMGLVPGSYIPGKDIRILREFTRYRSKLVSMRSSEKNRYQNAFTVCNLTLDAVVSDMFGKSAIAIENYLLDTNVVDPEFCVSLLHWKLKPKSAEIVEAVEGFNMTQEQKERVRIIQGHFADIDKRISQIDEIIGRLTAEYEGTISLLCTIPGIDRRLAITIISEIGTDMSEFSSSRRLCSWAGLVPGNNQSAGKKKSVKITRAGVYLKPALVEAAHAAVKATEKSPYFRIKYEKIMKRRGKKRAIIAIARMILTAIYAMVSTGEVFNPSDLLKYDMPEELQKKRTLADAKEAVKLLVSLGLVAEGSISLEALAG

SEQ ID NO: 180478 - protein, 369 aa, unidentified
MDYHPSDQYIAFVDTETGDYGERQLKHSDREAEKFYRELAARGVSVRVGMEATGYSRWFERLLAELGIEVWIGDAAEIKTKRVRKQKTDREDARLMLRLMRENNFPRIWVPSPENRDLRQLLWHRHRLVQMRTRIMNQLQALAMNEGQRRKKKLWSEQGRAQLEKLPLATWASRRRKDLLELLDRMNPTVEELTRAIDQEVKKWPEVLRLMTHPGVGPLTALAFVLIIGTPKRFKCGKQIGSYVGLIPSEDSSAGHQRLGHITKQGSSLLRFLLGEAAQAAARWDSDWRRRYVHLAMRRQRNIAKVAMARRLAVRMYWMWRNGWEYAEWVKFGSHAGQLGTRQRLQASRGRRRREEQTRKKTKEKNSFR

SEQ ID NO: 180479 - protein, 480 aa, unidentified
MSKLKNPAKKAAAGKLLRSKVRQRRKRKGMCLEDRPLLEPNAAGIDIGAREIFVAVASERDENPVRVFKTFTEDLQQMAQWLVSCGITTVAMESTGVYWIPIYDVLEQSGVKPCLVNARGMKNVPGRRTDWHECQWLQFLHSVGLLRPAFRPESEVCAVRSLTRHRDDLVQMASQHIQHMHKALTQMNVQIHHVISDITGVTGLAIVDAILHGQRDPVELAKLRAPNTKASEETIRQSLVGNWRAEHLFTLKQSRQMYRVYQEQIANCDQEIEKLLVAFTAQVDPLERPLPPDRKKKGRRKATSINPRTGFDMRTESYKLFGVDLTQVPGLMGMPLVLFSELGRDMSRWPSAGHFASWLALCPDNDISGGKVLWRGTRQVHNRAGHLFRLAAHSLHHDHTPIGDYLRRMKSRIGPAAATTATAHKIAIIFYTMVKKQVEYDASIWAQQDAEREKRFEAKLKRQAQHLGYKLVPLGTDVHP

SEQ ID NO: 180480 - protein, 352 aa, unidentified
MSEHSKESVVTVVGIDLAKRSFHVYGADGHGKQVFSKKLTRARLSPFMANLPACTVAMEACGGAHHWARTFRTYGHEVRLIAPQFVKPFVKSNKNDAADAEAICEAAQRPTMRFVAVKTVEQQDIQAIHRMRSLVVERRTAQINQIRGLQLEYGIEIAQSRAAVGRRLPEILEDADNGLSARFRAELHELAEELRHLDARVSHYDAQLEEIARNDPQAQRLMTIPGLGAKGATALVAAVGEDPRLFQNGRGLAAWIGLVPRQHATGGRERLLGISKRGDVYLRQLLIHGGRAVLRWVEHKEDRTSRWATALKARRHTNIACVAMANKIARVAYAVLTTGKPYDPASGALAKG

SEQ ID NO: 180481 - protein, 345 aa, unidentified
METMYYIGLDVHKKTIDYCVKDGSGRIYAAGSIRATRLELDMWMKTLPRPWTAAMEATIFTAWIYDHLQPHAAAVKVAHPLMLRAIAVAKKKNDRIDAKKIADCLRCDFLPECYMASTEIRERRRTLRYRNLLVRQAVQMKNKIAVLLMEAGVSYNKQKLHKVGYFRELLATNPDIDEGLKPLLRLCRETVVRLGKTESALVRSLERDSLLVERVERLMTIPAVGPITALTWALEVGDVQRFSSIKKAISYCGLCGAERSSANITMRTPLSKQRNKHLQTVLIEAAKMAPRNSPELAMVYEQEKQKGNANRATLAVARKMVAYLVAVDRREKGFLVVENKNRTAA

SEQ ID NO: 180482 - protein, 443 aa, unidentified
MTRRCFGLGVHREFAQVAIWQDGRVRQAGQVPATPEGLRVFADSLAPTDEVAIEATCNTHAIAKLLEPRVARVVISNPQKTRAIAEAKVKTDKVDAAVLAQLLAADYLPAVWLADDATHALRRQVARRAHIVRQRTRLKNQVQAILHRNLIARCPAADLFGHKGRSWLAEQALPADERQAVAALLRQLDFHAQELKLIDVELGHVALGSGDVKRLMTIPGVDATVALSIVAAVGDFARFGSPEKLVSYLGLNPRVRQSGGQPAAHGRITKQGRAHARGMLVEAAWAASKTPGPLRAFYERVRSRRGMQVAVVATARKLAVLCWHLITKGEDYAFARPSLTAQKLRRLELRAGMPAKRGRKGQAAGYSLKEVRARENALNEQAEQAYRQVVADWQAKAPKRESGVAAANRARLSRPRNGATAARQDSAPDPTLRSGVDHAHSAA

SEQ ID NO: 180483 - protein, 363 aa, unidentified
MDVHSSNYTLSCYMVENDKCFATVQVEPDYKEILNYLKNVQKNVGEPCEFHCGYEAGCLGYSLYHHLTGHGIDCTILAPSTMPTYRKNEIKTDKRDAMKIARCLAFNTYRAVHIPTKEDSEVKEYIRMRDAHKIALKKVKQQILAFCLRYDFQFTTGKSYWTEKHLAWLRNLKMDALMREVLDEYLLSYQQLTDKLERFDKRIEELAGSPAYTEKVKKLTCLIGIRTHTALSLIVETGDFTRFAKASQYASHLGLVPGERSSGDKQLRTGITKAGNKHLRQLLTESAKCYGRGHIGFKSKTLKARQEGNAPEIIAYADKANERLRRKFYRMVLKNNKKHNVAASAVARELACFIWGLMTGHIA

SEQ ID NO: 180484 - protein, 347 aa, unidentified
MYHYIGIDVSKQSLAIFDGTKEYDVPNERGLKTLKKLFKKNYGKEWNKVKLIYESTGPYSNYLHEFASKNGIRVYVVNPKKSSNFAKALGNRSKTDAIDAKMLYRFNVLLNEEDLKIPVIDKTAEQLGSYISSYKIIQKTRTMLSNHLHSKQYEIIIKDKNTIGTNSSTDLNKSLKKETEKLKQMEETIKKQMKTFCKTNPELRGDFDNLLSIKGVGAISATALLHLFRKYPDANRNEITALSGLDPIRKQSGTSLNKGRKISKAGDSFLRKVLYFACMSAIQHNERIEIFYNRLIDNHKKGNVALTACMKKLLLIAHQIYINKTKYKPLYVKDKDVKNDKNLCYTY

SEQ ID NO: 180485 - protein, 482 aa, unidentified
MKKPNIYQNQSQELLHLFEEAGSSEKVMCVPMDYAKNDHLVMFCNGHGDILRKPFSVKNTPEGIGYIDEQVARFCRRRGIQKKHVFFGGEDANSFAKNFVSTLRSKGFVVANVNAHDAKKQRSNIQASTDRIDLMGIATMLLNCRANCCAAQSGIYRNLRTLVRHRRRLVQMLTEVKNRVHGIVDELFPGFLNQKNSGIIPFTQSSLYLMQDRFSPKQIRRRKRQKLIEILKRLGTSKAEHTAAKLQQYAAKVLHAPVEYVDTMQLSLAQHVNHIRCLKESVAQMEKEIALNLAQTQGAFLTSVRGIGLVLAAGVTAEIGDPDEQKPLNNLASYAGIIPRVKQTGGLDGKTYTGPVAKRCNRILKDYVVKSAYHLGLHGPQDLMADYKRRDASGQHADFGIGRRYLRMAINLMRTSQVYLPANLRKADSTLQKRAGYYLMSWPYLREKWKKVDALEEAFAKNRPLGLWRQIVQELYDIKLKL

SEQ ID NO: 180486 - protein, 371 aa, unidentified
MSGYCTVFGIDSHARTTTVCAVDASTGEVRVRTFRGNPYGEMAEWMAGFPQPSYGVYEAGCTGFVPARELSAEGRRVVPIATSHIPTSPDDRSRKTDRRDAERLARLALSGQAVEVWVPDGQTEGLRDLSRAIEDAAERRERCRMQVDAILLRHGYVWDRKTPQGRPVKRWGALHAQWLKGVRLADPASQAAYQAALEAERWASESYDGLVERAREAASSSALAPAVDAVQWLKGVGFVCALAFCAEVGDFSRFASGRRVTSYFGLAPSERSSGDVRRCGGLTKGGCRTVRRLLVECAWHHCGRANPLCAKRGPSGVAGEVARHAAKGSRRLTERRASMLGRGVCANKANAATAAEMARWMWALGAMAQAA

SEQ ID NO: 180487 - protein, 329 aa, unidentified
MFYLGIDVAKAKIDCCLILEDSAGKKKTKTFPNTPKGFEQLQAWLSHHAAGPAQTIALMEATSVYHERLAGYLFDVGFQVCVANPARARYFAQSMSRLNKTDKADSEVLARFAMTADLHFWQPLPGHIQLLNALLDRRTVLGEDLQREENRLEKAESTFTIKPVLQSIHKNIKQLSRHIQDLDRQIDGHIDQHPDLKNDKELLSSIPAIADRTSLLMLSFLRSHAFERASQAAAFAGLVPIQRQSGSSIHGRSRLSKAGSSKIRAGLYMAAIVATRDNPHIKGMNDRLLANGKTKMMAVGAAMRKLIHLCYGVLKHQRPYQEDYCANSQ

SEQ ID NO: 180488 - protein, 317 aa, unidentified
MDKVYAGVDVGKATLEVGIYGETWVGQYNYDVAGLEQLIEAVQARQVGLVVVEATGDLERRLVAALVVAGVPVSVVNPQRVRYFARADGRLAKTDRLDAQVLAKFGQAMQPALYEAQSAEGEELSALVTRRKQLVEMLAAEKNRLNTATGSVRRQVEAHIRWLEEEVKALDEAISQLIQTDPQWQERDALLHSVPGVGAVTASTLLAELPELGTLSRQKVAALVGVAPINHDSGRRRGERHILGGRATVRRVLYMAALTATRANPVIRSFYQRLLAAGKCKKVALTACMRKLLVILNAMLRDRRRWNPELALMPAPA

SEQ ID NO: 180489 - protein, 359 aa, unidentified
MAIKVERNKINFKGKKVNIGIDMHKKSWRITALVEGDIVMAVTLARPNYDSFKKLLVNFLGNYLRIVYEAGPGGFHLYDRLTDDGIECIVTPPSLIPTTSGSKVKTDKKDSYKLARLLESNMLKQVWVLSPEERAHRQLARTRRQIANHRSDVMRQIKSLLLFHSIEIPFSSRQQWTGPFTKWLHGLDLGDEYLNKSLEALIRLFDYLSIEKKSLTHEVIKLAEEEKYASRVKLLKSVPGIGVLSAMEILVELQDIARFKTADELAAYLGLTPSQHSSGEHTRMGHITHAGNDRLRTTLVECSWILIGKDPEIKKKYDNIKYRSGGKRAIIAVSRTLSARIRRMLLDQIPYKIDLNKPA

SEQ ID NO: 180490 - protein, 337 aa, unidentified
MKFSGIDLHSNNSVVVVSDEEDRIVYQRRLPNDLQQILLALVPHREELAGVVIESTFNWYWLVDGLMAAGYRVHLANTTAIKKYEGLKYSGDFADALYLAQLLRLGLLPEGYIYPREERAARDLSRKRMQLVRCRTAQILSIENIMARETGGRMSSNQIKGLSSAQADALGLPPDVTLALKANLAVCETLRQQIEVLEKRLKERVSLRQEYGLLKSVPGIGQTLATTIMLEMGTVERFAKVGNFSSYCRCVDSLRESNGKKKGEGNTKNGNKYLAWAFIEAANFAVRFCPEAKRFYERKKRKTNAIIAFKALAHKLARACYHMLREEKPFDVKRCFV

SEQ ID NO: 180491 - protein, 402 aa, unidentified
MTYDYVIGMDACKYFHHACVLDIDGTQVLSKRINQNEQSLRALFSAFSAYDHKVLVVVDQPNNIGRLTVAVAQDIGIDVRYLPGLAMRQLSRIHAGNAKTDIRDAYIIAHAAKNLPESLRSVDRVEEAFLQLKVLNGIDEDLARSYTRLINQIRSALVGCYPQFEQALRGQIIHRKWVLHLLARYGGPTKIKRLGKAKAAAFARRYKARNPEPVLDAIFAAISEQTVTIAGAHYAEMGVAMSAKDALLKLEHRQQIEKEVIELINDIPHTQFLLSMPGIGPKTAAQILMTAGDMSDFPSAGHLASYAGLSPRTNQSATSIMSNSLNRAGNKKLKNALWQSSFASIRSHERSRQFYERKRREGKRHNAAVVALARRRLNVLYAMMRNHEHYHDPAPSQEDLAA

SEQ ID NO: 180492 - protein, 344 aa, unidentified
MDHFAGLDVSVKETSVCIVDDTGRIVREVKVASEPEDLLRVLANPIYQFKRIGLEAGPLSQWLFSALAEAGLPVICVETRHMRAVLKAQINKTDRNDARGMAQMMRAGLYRPVHVKTLRSQKLRMLLTHRKLLQSKAIAIDNDLRGTLRNFGLKVGVVRTVKFETRIRELVANFPDIAAMVEPLLVVRRTLREQFCVLHRRLLAIVRDDEVCRRLMTTPGVGPVVSLTYRATVDVPARFRKSKSVGAVFGLTCAKYQSGEVEWSGRISRCGDEMMRVMLYEAAQAMLRSNKWSWLKAWAMQIARRRGMKKAIVALARRLAVIMHRIWVDGTEFRWTREQAAAAA

SEQ ID NO: 180493 - protein, 333 aa, unidentified
MVEGTEGSHHKEGSKKMSKDSTVCAGIDTGKYKLDVVIDASADRLQVDNSPEGYRSLSVWLRQRGVERIGIEASGGYEQAVVSFLRADGFVVIVFQPVQVRAYAKFVLQHAKNDNIDAALIARCTAAATDIHEPPDTRLAPLAQRLTMIEQLTQDVAQLKTRREACRDQRIREFWKQEIDRLKRLLQAELKQLVAAIGEHRDLATRLDLIASVDGVGLRTAVAILVRMPEIGRVTREQAAAIAGLAPYDDESGKRRGLRHIKGGRQRLRQSLYAATLPAVFYWNAQLKALYKRLITAGKTHKLVLVACARKLLIFVNTVVARGTPRTSAPATT

SEQ ID NO: 180494 - protein, 352 aa, unidentified
MAYAYHIGVDFHKAYSHIAVQDGDGKTVRSGRVRNDRASVGSFLAPYSDNAHAVVEACRNWTVMYDWLDEICDDVVLAHPLKVKAIAEAKIKTDKIDATILSHLLRADLVPTAHAPSHQARELRAALRERMFYVRLRTMVKNRVVTAFDRYPEQTAQLKQCSDLFGATGRQQLAALEVSALDRIQIDRSLDFIADINRRIKQAEATIKALSKDNAEVKRLKTIPGIGEFFARLIAAEIDDIGRFRSAKKLAAYAGIVPSTYSSGGKTWHGRIIKQGNKWLRWAFIEAVAPAVASDPQLKELYQRLSAKGSNRAKVAVARRLLTIAFQVLRDGRCYQRCGAAQESGSERSRLS

SEQ ID NO: 180495 - protein, 372 aa, unidentified
MNYNTVYVGMDVHKESFTLCSCKYEDEKASHYQRTPASYKNVLRYLAFLRTIYGEDTRFVCGYEAGCLGYSLYHQLENFNVECVILAPTTMLEQRSKRRIKTDKRDAEIIARSLAQHNYSPVHIPTETDNQTKEFIRMRDDHKAELKKIKQQILSFCLRQGYQYDGSGNWTAKHVKWLRSLKPAGLYKEILDEYLLTYTILTDKLNRLDQRIEELASKEEYTESVSKLTCFLGIKIHTALSVIVEVGDFQRFVSARKFAGYLGLVPGQHSSGDDRNGLGITKAGNTHVRRLLVESAQSYTRGKIGYKSRVLRSRQAGNSPQVINYADRANERLRRRYYKMVLKDGKKYNIAKTAVARELACFIWGMMTDNIY

SEQ ID NO: 180496 - protein, 332 aa, unidentified
MRYIGLDIHKKHTQACVRNEHGNILSSERFRTESEDIAEFFARQEVHGPLSVSMEATGFYFWIHDRIAARGHRVMVVHPARIKPLMKAKAKNDRNDASMLAELLRSGCLQGIYVPPPEIREMRDLTRHRESLVRKKGDLKREIVSSLDQHGVKTPSDYRVNFTKKYIEWLRSLNDFVVSEKLDMLEMTVGKIKNVERLIEERWGEDEDVQIIRSVPGVGLVTATVLKAEIGDVARFPSAENLAAYVGVSPTTFQSGEKEWSGPARHGNNRVKHVLIEAALVHTRSCPDSKISRYHLRKRDSIGRKKANVATGRKLVEAIYFMLVRRQTFHAH

SEQ ID NO: 180497 - protein, 327 aa, unidentified
MTASVSSDNHIFIGIDVGGASFEAAWHRGGSTQYENRPDAIAAFIARLGGEKQIIRIAVEPTGGYERPLVKALRSAGLPVEMVHTSRFDAYRKLVGVKAKSDTSDARLLAAYAAAPEEVRGRKADHVEIPQDAVREHLAELAVRRDQLKRMIHAESCRLATVRSNDVREQIAAHLEALREADRKTHTAMMHLVRERAELRNAKRLLRSIKSIGDKTALTSLALVPELGLISNKAAAALVGVAPFVRRSGTMNAPARIHGGRAAVRNAFYMAAVTASRHNPVLAPFYDRLIAAGKPPKVALVAVMRRLVVYANAVLRSAQPWKGAQTA

SEQ ID NO: 180498 - protein, 376 aa, unidentified
MHDDSTLYVGLDVHKDSIMVAYSVDMGDVELLGKIGTTQIEVDRLCKRLRCKARHICVVYEAGPCGYGLYRRLIDKGFDCMVCAPSLIPRKPGERVKTDRRDAIKLVRSLRAGDLSAVHVPTMEDEAFRDLARAWSSAREDLKQARCRLKSFLLQHGVNYFGRADWGPAHRRWLSTFSFDSGWQQLAFNEHRRTIEDRFAQCERLETALHEAVADWRFYPAVLALQAMRGINFTSAVGLVSELGDLSRFEHPRQLMAWLGVTPSEHSSGGKRRQGSITKTGNSYARKLLVESAWSYRHPARVSIDIQRRHEGIPKAIIDRAWDAQLRLCRRYRKLVARGKIAHVAIVAVARELAAFIWDIGRLGMAMARPQDVHRV

SEQ ID NO: 180499 - protein, 373 aa, unidentified
MSKPSTIFIGMDVHKETTDVAFVSTEDSAVSFYGTIPTNSRSALNIIKKFANKASHLCVVYEAGPCGYWLYRLLKHKGIECWVVAPSLIPKAPGDKVKTDRRDAMTLARLAKADLIQSIHIPDAPDEAIRDLIRCREDCMVDLRQARQRLKSFLLRNGHSYSGRDNWSDAHKRHLADLRFYEPAQNITFQHYRSIVETRYQQLQHTEHELEVVVQQWRWFPLVQFLTVFRGIRFISAVSLVAELGDLRRFANPRSLMNFVGLTPSEHSSGQRQKQGPITKCGNTHARRILIEAAWSYRFPPKVSRELQIRQQEHSPKLLQRSWEAQLRLCNKFRRMKARGKEHNKVVTAVARELLGFIWDVGQRFNPESHSVG

SEQ ID NO: 180500 - protein, 312 aa, unidentified
MPVCANTPSRFIGCDVGKAEIVVFDSRDGTTCSLANRPDALAAFAAGLEPGCLVICEATGGYEDALLAALVTAGCPAHRADARKVKAFIRSFGTLGKSDALDARALARYGTERHASLARWSAPDPARERLQILVRTRGELVAQRVACANRLKAPGAAPVETMLKALLACLAEQIAAIEDAIDQIRRAVPAIAKATQALRSIAGIGPATAAALIALMPELGSIRRRQAAALAGLAPHPNQSGANDAYRRTRGGRAEIKRILFLPALAAARHDPAMRAAYKALINRQKKPIVAIVAIMRRIIVIANARLRDAPN

SEQ ID NO: 180501 - protein, 402 aa, unidentified
MNCVCIDVSKGKSMIAVMRPFGEVVISPFEIRHTTSELSELAKRLKSLDGETRVVMESTGNYHVPVAWLLQDAGLYVSVVNALLVHDYGNNSLRRAKTDKKDAVKLANYGLDHWLTLTRYVPEANTRLLLKNCYRQYQQYSKVHTMLKNNLISLLDAVFPEVNRLFSSPPRADGSEKWVDFVSAFWHCQCISRLTLKSFSAKYLKWCKKYGYKFSQEKALELHTKACSYIGVMPSNDTTKLLVQQTIVQLQATSAALASLKQEMQSLAASLPEYPVVMGMFGIGPILGPQLMAEIGDVRRFHSKKALVAFAGIDAPPYQSGQMDVRSRSISKRGSAALRRTLFLVMGVYLQNAPQDEPVYKFMDKKRSEGKPYRVYMMASANKFLRIYYASVTTYLNTLAQT

SEQ ID NO: 180502 - protein, 438 aa, unidentified
MSNKVIFNLDELFISVGIDVGADFSWMSIALPNQQFVGKPYKILHNSIDSLTTAVSKIKEAEELYSLESRIFLESTGIYHYPLFCYLRDKGFNCSVINPIITKNSTNINIRKVHNDRFDSKKAALVGLKPDLKVSLMPSDLALNCRNLCREYYDLMDNRSAYVNKLQGELRMAFPQYLGIFSKVTINTSLTLLETYTSPSAFLEADKQEIIDIIKSTARFGLTYAQNKYNAIIQAATDANQFGYIIESNIKRIRLYISFIRKYDEEINDILESLHKLVDSNGDTKFVKQVHLIETFKGAGFLSAATIMGEIGDFSAFSKPKQLFAYFGLDPAVKQSGKFEGTKVQMSKRGSSIARRVIHTLSLQSISISRNGKAKNPVLREYYLQKCDSKPKLVAMGAVSHKVCNMIFAILRDNKPFEIITPQEHIKQYNAAKCDIAA

SEQ ID NO: 180503 - protein, 372 aa, unidentified
MAWSSLWRRHLSVHVVYGNELDEGHSITTDGRCPMKVYAGIDLHSTNNYLGVIDQTDRRLFDDKLPNCPKTILAALKPFKKKLIGIAVESTFNWYWLVDVLNENGYKVHLANPAAIKQYEGLKHSDDQRDSFWLAHMLRLGILPEGYIYPKAQRPLRDLLSRRGLLVRHRTAQILSLQSMISRNRGRELTGDDVKALLPGIMEHIFDQKHLILAGETSLATILFLSEQIRILEKEIRASARPRREFKILQTMPGLGTILALTIMLEVGDIARFPSVGDYSSYCRCVKSERFSNGKKKGSGNRKNGNKYLGWAYVELANFAVRYCPHAKRFYQRKKAKTKAVVATKALSNKLARASYYMMKDNVAYDPEKLFS

SEQ ID NO: 180504 - protein, 327 aa, unidentified
MSRMPEKINEPLARVHLGIDVGKSRLDVFVHPVGAKLRVTNDKTGIDKIVKLSEGFDVQLVALEATNKYHQLVHRSLHEAGLNVAVINPYRSRKFADALGQLAKTDAIDAEVLARFAALMQPQPTVPPSDHHKALRDLNVARRQVIDEMSTLSRQLHTTDHPLAARQIRTRIRLCERQQRALEAEIKAVIETQDDIRHRFEILTSIPGIGVVTATTLLTDLDELGRANSREIAALAGLAPMNRDSGAMRGMRMIRGGRQNLRNMLYMCAVGLSRRDGPMGSFYRRLVREGKNRKVALIAVARKLVVIANTLIAEDRHWRPTASGLAD

SEQ ID NO: 180505 - protein, 426 aa, unidentified
MNTTTTFAATIGLDWADQKHDLWIRPAEGGKAQHLRLEQTPEALHEWVARLRERFGNRPIAIGIETSRGPVISALMAYDFIVLFPVNPKAMKDYRAAFSVSGAKDDRTDAQLLEEFVRLHREKLKALKPDTELTRMLAGLVENRRHLVDERTRIVNQLHSLLKTYYPLADTLLGRQMNQPIAADFLARWPDLESLKKAGPQKLRAFCYKHNSRNSVLIEQRLAALEKATALTTDQAIITPARLLVVALANILKPLHQAVARLDREIEQAMNQHPDASIFQSFPAAGPALAPRLLVAFGTNRDRFEDADEVAQFYGLAPVVKQSGNSKTVHHRYRCPKFGRQTFHENASCVAKMEPWAKCYYAQQKRKHDDKHHQACRSLAFKLIRIYFACWKNRTSYDANIYLRALEEQGSPLANEVEIPTPARGE

SEQ ID NO: 180506 - protein, 456 aa, unidentified
MSRKRRSSKKTGTPVLHSLNPNAAGVDIGATEIYIAVPADRDAQPVRHFSTFTEDLHAAADWLKSCNIETVAMESTGVYWIPFFQILEARGLQVFLVNAHHVKNVPGRKSDVSDCQWLQYLHSVGLLRGSFRREQEVCTVRSILRHRDGLVQMASSHVQHIQKALDQMNLQLHHVISDITGMTGLAIIEAILAGERNPQTLAKLRDGRIKATESTIAKSLVGDYRREHLFTLGQSLAAYRHYQKLIGACDKEIEQYLETFESKADPPEDPKWKSQDGQNTRGGKPGFDLQSHLYRIFGVDLTQIPGVHTLTTQTLLAEIGPDLSRFANAAAFTSWLGLCPDNRISGGKILSVKTRKVKNRAATALRMAAQSLYRSQSYLGHYFRRMRAKLGAPKAITAAAHKLARVIYHMLTTRQAYDETICVQNELQNRQRLEARLRKQARDLGLEIIPAKTGAV

SEQ ID NO: 180507 - protein, 425 aa, unidentified
MKEEAQEEREFGVYIGLDWADRTHVISLRRNGSKKMERYVLAHTPEALAEWVSGLQQRFAGQRIAVALEQSRGAVVYALMGYDFLVLYPVNPKTLAKYREAFSPSGAKDDPTDADLLSELVTLHRDKLRAWLPDDEQTRTLSALVEYRRDLVATQTRLTNQLTSLLKLYYPQALAWAGELTTVQACDFLQRWPTLAKVQQAAPAKLRQFYVQHGCRKADVIERRLQEIKLAQPLTRDGAVITASLAMVQASTSQLRPVMEAIAQMEKQIAALFSQHADHDLFSSFPGAGPVLAPRLLAAFGTDRGRFASATEVQQLSGIAPVLERSGKTCWVHRRWACPKFMRQSFHEFAGQSILRSAWARAFYDQQRQRGKGHHAALRSLAYRWIRIIHRCWQLRVPYCEETYCRALERRQSPLARVLSAQTQN

SEQ ID NO: 180508 - protein, 411 aa, unidentified
MSQMLIGIDVSLRSHHVQFMAGDGRKLASFSVTNDRHGADTLIRRMLDTAAEVGCQTLRIGMEATSNLGWHLAHYLKDQLAPYEPNVQAQVYVLNARKVARFKKGYDTLPKTDRIDAWVIADHLRFGRLPHDMNEVVQYQALQRLTRTRFHLIHSIKREKAYFLNQVFLKFSGMRIDNPFSDTFGATSLAVIQELDPERIAEMPMEKLIEFLQEKGKKRFANPQEIAELLKKLARSSYRLDKAMSDPVNISLSVTLSVIKNMEAEVKKLDRQIDKIMKGFQQTLTSVKGIGAVYAAGILAEIGDISRFDDHNALAKFAGLVWNKYQSGDFEAEDTERVMTGNKYLRYYLVEAADKVRKYDSEYEAFYHKKFNEVTKHQHKRALVLTARKLVRLVFMLLKTKKLYTPPERRN

SEQ ID NO: 180509 - protein, 325 aa, unidentified
MDIIGIDISKAKFDAALLLGERVKHAVFSNTEAGFGQLLAWLAKHRPDPAAPLHACMEATGNWGLELADFLHAQGIRVSIVNPARIKAYGESELARNKTDKLDAGLTARFCRAHVPPAWIPPLPCLRELRELVRRCDALKATRVQELNRQKSGFASPAVARSIADHLAWLNEQIEAVTATARQLIAADPALARNLALLRSIAGFGEISATVLLAELPNIADFTPKALAAFTGLSPQEHSSGTSVRRPSKTSRMGSERLRSTLYMCALSAKRSNKALAAFVGRMTAAGKPPKVILVAVARKLLVYAHAVLRTQKAFESSPDAPFSA

SEQ ID NO: 180510 - protein, 426 aa, unidentified
MNEQGGSRQHKKRCWAGLDWGGSGHAVSVVDDRRRVLASFTVGASLEDLENLSRRLRACGAVAGVAVEATRHPVVGHLLSAGFAVYAVNPKQSKNWRGCASVSASKSDARDGLVLAVELAGRHESLRPIRREDPAVAELAGLCEKVRELVDERTALVQRLKATLGQYYPGALGFFSDWTSPVAWRFVKRFPRPKTLAQARKETLCAFLKSNRVGLRPLWLERIEARGDAARWPLPADSEALEAVALATVAQLLALQPHIDKMDRLIAEQSKKVPQTTLMKSLPGAGKRLAPALAAMAALTTTGKKQNLEALRCVSGVAPVEDKSGKRQRVRARRRCNRHWRDVLYLFAHCSINCCDWARAFYDMHREQGDNHAGALRKLADKWLKIIHHMVEANEPYSDVRHVQSLRKHASWFPPEPGGKPGGKLH

SEQ ID NO: 180511 - protein, 368 aa, unidentified
MKARKIKLSNQAIRKEIDFTNQAIYCGLDVHLKNWMVTVIINNIIVERFSMNPNPKELVNHLRRNYPNGVYYTVYEAGFSGVWAHRILEQFGVNSIICNPGDVPTRNKERRKKTDKIDSGKLARELSNGNLDGIYIPTEEQEAIRVLARLRKQFTNDQTRTKNRIKSLLNFLGIRTESEDEAIKHWSGKYIKYLETIEFRQIELKDAMNSSLDRLRSDRKQITDVTRALRKYVRGNEHCRKLIKRLMSVPGIGFITAITLFTEIMDIKRFRKLDNLCSLIGFVPDSEATGEREKVKGISRQHNRYLRNMLIESAWVAIRKDNALMMAYGKLIRKMTSQRAIIRIAKKLLNRIMFVWRNDCDYISGVVS

SEQ ID NO: 180512 - protein, 411 aa, unidentified
MDIVVARCAGLDVHKDTVVACVRTPGPDGRRAEQVRTFGTTTVELLALRDWLVAEEVTLVGMESTGVYWRCVYYVLEDALACWLANARHLRNVPGRKTDVQDAQWICQLVEHGLVRPSFVPPKPIRELRNLTRYRKAQIEERTREAQRLDKVLQDAGVKLSSVAGDILGRSGRDMLAALVRGTRDPEVLAELARGKLRGELPALRQALRGRFGAHHGLLVGQILAKLDFLDEAIAQLSAEIDRVIAPFAVQVALLSTIPGVDKRTAEALIAEVGVDMARFGSAARLASWAGMCPGQHESAGKQRSGKTRKGPKWLGAHLTEAAKAAGRTKDTYLSAQYQRLRGRRGTAKATKAVGHQVLVAADHILDRGVPYHDLGADWFVRRRPATQVRKLISQLNTLGYQVTLNPIQAA

SEQ ID NO: 180513 - protein, 328 aa, unidentified
MTASHSSDNTFIGIDVGKASLDVQWHRGDSAQYANRPDAIASLVQRLQIGPLVRRIVMEPTGGYEKPLVAALRQAKLPVELVHTSRFKAYRMMVGANAKSDSSDARLLAAYAAAPDEVRGRKVDRVELPQDAVREELRELASRRDQLKHMIHAESCRLAITRHAALRHSILAHLETLRAEDKQVLQMMRELVRQRRDLRRDQQLLRTIKGLGTVSVLTLISAVPELGHLDNKQAAALVGVAPFVHRSGTLTAPARIRGGRAAVRRVLYMAAVTASRHNPVLKSFYERLIAKGKPAKLALVALMRRLVVFANAVLRSGQPWKGAVQLDM

SEQ ID NO: 180514 - protein, 436 aa, unidentified
MALKIVRFICCGMDVHKNIIVATVGITDKQTMVTEYFQETFSTLNSDLYRLCDWLSYNHCVDVCMESTGKYWIPIHNILEERHFTICLAHPKYTKAIKGKKTDKKDSKWICDLYKHDLIRGSFIPPKEIRELREISRYYHKLTGMNSSESNRYQNCLTVSNIGIGSIFSNINGKSARKVMDAVLAADDPEKLTDEDLMKLVHKSCRKKDQLLAAIHGCRINSDSRFKMVEIQKHKEELDQHISACVLELVKRAAPFFSQFLHITEMAGISFLSAILIVSEIGVDMTIWKNARQLCSWAGLVPCNNESAGKKKSTRITKAGQYLKPLLVQCALAAIKNPKSYFGIKYNRIKKRRGHKKAIIAIARMMLICIYNMILTGESFKPSDYDELMNPKPKKPKELTIESAIDFLVKSGVKPETVISAFSQTPPSRSPQSVVS

SEQ ID NO: 180515 - protein, 317 aa, unidentified
MNKPLDIGIDASKLTLEVAVDGEHGSRTVANSRLAIKAWLAQLAQPCRIAIESTGQYHQRLVRYAIRAGHTVYVLNPNDLSHYMRSLGRRAKTDRLDAQAIARYVAHEHADLHPYQLPTALQAQLDELTQRRHSAVSMQSALRQSLAATGIKLRAAGRMQRAAQALIDEIDERMARLVAADEHLAEHAKRLKGVTGFGPLLSRVMAHALTRRQFNTGDAFIAYIGYDPRARESGQFKGRRKLSKRGPAYLRQLLFVAAMSASRSKLWRPFYERYRARGLATTQVLVIIARKLAHTAFSMVKHHCDFDPDRLLNKACT

SEQ ID NO: 180516 - protein, 312 aa, unidentified
MSIPSMYVGIDVSSQRLDVAISDDPVESFANDDAGVVALCQRLSVVSCELIVLEATGGYEALAVATLAGAGLPVRVINPRQVRDFAKATGLLAKTDALDARLLRQFAERIRPVVLPHKSQATQELAALVARRRDLVQMLTAEKNRLKLATRVVGRDISAHIRFLEKRIHDSDDELKRRIETDDDFRITDELLRSVPSVGPVSSSTLIALLPELGALSHRRIVALVGLAPLNDDSGKRIGRRRIWGGRAEVRSVLYMATISALRSNPVIRTTYQRLVGAGKPKKVAIVACMRKLLTILNAIVRDQTPWNPAIA

SEQ ID NO: 180517 - protein, 350 aa, unidentified
MTIIGCDYHPGFQQIAFVDTETGDYGEQRLAHSEGTEKFYRDLAAQGKKVRVGMEASGHARWFERLLAEVNFELWIGDATEIARKRERKQKTDRQDAQHILQLLMENRFPKIWVPSGENRDLRQLLWHRHRMVQARTRIMNQLQAVALNEGLRCKKKLWREKGRQQLEAFRLAPWASRRREDLLQLLDRLNPTISDLTQVIEQEVEKCPEARRLRTHPGVGALTALAFVLIIGRTERFQCGKQIAAYLGLVPLEDSSGNRRRLGHITKQGSSILRFLLVEAAQVTARSIPEWRNKYVHLTMRRGRKIAKVAMARRLAIALYWMWRKGWDYEQLRKFGSHAGQPGNRDGVK

SEQ ID NO: 180518 - protein, 425 aa, unidentified
MDFKQNQKINQVTEQTLVVGIDIAKRTHYACIVDDRGRVLQKSFSVPQAGNGFELFYQRVLAAMKEHEKSEVIVGIEPTGHYWLNLAYFLEERGIPLVMVNPMHVKRSKELDDNLPTKHDRKDALVIARLVKDGRFSYPRILKGMEAELRVGSTFRSKLTEELGAVKNMIIRWLDRYFPEFVQVFPSFGKMALAALECTPFPSDLYQKQPDEVLSLFRKVEGLKSPQRPKTVRLIEVAAGSIGVTEGLEMARIEIATLVRRYHQLEQDIESITGQLIELVKISAEYEWLSTVPGLGDTTIVDLLAEIGSFSHYQDPRQLIKLAGLTLRENSSGLHKGQKRISKRGRRKLRALLFRVMMPMIRHNEAFRKLHEYYTNRQVNPLRKKQSIVVLCGKLLKVLHGISTKHKPFDAQRMMRDIPGLAEAE

SEQ ID NO: 180519 - protein, 370 aa, unidentified
MLGKARQPVPTRQGQQDRRGVRGVEPFSSETSNGYLGTSPDVQGRGRKGGNLRRKQGVGGNMFVGIDVSKKTLDIAVRPSGENWSVANDDKDIRQLVQKLQALKPQAVVLEATGGLELPVATALAVGGLPVVVVNARQVRAFAKAVNQLAKTDAIDAALIARFAEAVRPEPRPVPDAASQRLSELLTRRRQLVEMLVSEKNRLAQAMTKPVQQRISYHLHFLREELKGIDLDLDNEIRETPIWREKDELLQSVPGVGPTVSRVLLGGLPELGTLSGKQIAALVGVAPFNRDSGTMRGRRCIWGGRAQVRSMLYMAAVTAARCNPVLQRFYRALRDAGKPARVALTACMRKLVVILNAMLRDRRPWTPEAT

SEQ ID NO: 180520 - protein, 343 aa, unidentified
MEHYAGIDVSLERSSVCVVDATGRIIREAKVASEPEALVDFFRRLGLPLTRVGLEAGPLSQWLHAGLAEAGLEAVLLETRHVKAALSAMVVETDRKDARGIAQLLRMGWYRPVHRKSPPAQEVRALLVGRKLLQAKLRDVELSIRGILRGFGLKVGEVSEGRFAARIKELIAGHEMLEAVVGAMLQARDSLQAEFMRLHRRMLAIVRGDAVCRRLMTAPGVGALVAVTFKTAVDDPGRFRTAKAVGAHFGLTPKRYRSGETDVTGGISKAGDAMVRTALYEAANVMLTRSGRFSALKRWGLEVAKRRGARRAKVALARKLATVLHRLWVDGSEFRFGREAAAA

SEQ ID NO: 180521 - protein, 345 aa, unidentified
MNKVFPASSSTVFCGIDVSARSLSVALIRPDGSVSQREFANSASGHKALLGWLGKLNAMVRVSLEATGVYSLDLALALDAAAGIEVAVLNPKLANRFAQTLCRSVTDAAAAVVLAEYSQRMPFTPWQRPGIEELRLRTISRYIEALVVDLAELKNRLHAAESASTTPRAIIVDLKQAQAAFLRRLAKMRGEAMKLVQAKVALRQRFQLLVSIPGIAEISALPILSELALLSPTMTVRQWVAYSGLDPVHHVSGTSVHKPSRISRAGNRRLRRALYMPTLSAVRHDPHIRAFYQALRQRHKTGLQALMAVARKLLHAIYGIFKSGRPYDGRRLFPQVQLAVESFAR

SEQ ID NO: 180522 - protein, 451 aa, unidentified
MRRKKMEMDIINYNAAGIDIGSRSHFVAVGQALADVKEFGVYAQQLTEICLWLKSYGITTVAMESTGDYWQNLYTELIKHGFEVVLANGKFTKNAKGKKTDVKDCRWIQQLHTLGLLSSSFLPDETTEILRTYCRQRSNWINAASVASRKMQKFLKFLNFRLDVVVKDVCGLTGLAIIGDICKGNLDPYELAKHRHYNCRKPEQEIAMALHGNNRKDFLFCLKQEYESYKYFQKKIKACDMQIETFIKKELRKDPSKKGLKTTNKPYKRINKNAPQIKDLNQVAFKYFGGIDLFAIEGVSHSTVLSIMSEIGLDGFKKFNSAKQFSSWLRLAPNNRISGGKVLSNRIPKGSNRLKIAFRQAANVIGNLKDTHLSDFFKRVAYRKGRQSAVSATARKLAVIVWNMITKQIQYQPPSEYLFLDQKRKLRIVTRMKKTIAKFDISSQELGIVTV

SEQ ID NO: 180523 - protein, 366 aa, unidentified
MQLLLIERLRAPVSLIRACPWACEVNSGELLERPSRPTPGAEPAWPARILQAGVIYHVKEEVVYLGVDVAKAYLDAAMGSEKRRLANDGTGHRQLINWIKQMETNVQVICEPSGGYERMLIQALVGAQIKVSLVQANRVRQFARAAGILAKTDSIDAEVLCAFGQAMRPQTLTASKLQQEQLRELESQRRHLSRLLVMEQNRGARVGDSSVRRLNRSLNKQIQKQIERIDLLINEHIAGSLELSAKAHKLTAISGVGPRTAALLLAQMPELGQLNRREVAALVGVAPFNRDSGKWRGKRTIFGGRRHVRHGLYMAALVAARHNPILRAFYQRLRAAGKPAKLALTATMRKLLIVLNSALKSDPIYA

SEQ ID NO: 180524 - protein, 346 aa, unidentified
MKKIFIGIDFSKEKFDATVIKAVGVEECAERKHEVFDNKVSGFRRLLRWVKSVADEQDTGLWLFCGENTGGYSKALCNYLYGSGYDMWLENALSIKRSSALQRNKSDKADSNIIAEYAMRNYDQMRLYKPLGKNLERLREVFLYRHNLVKLKASMTVRKGEKSLTQNKSDISRFMAMSSKHLISEFNKKIAECDMRIEKIISEDDELRRNFEIITSVPGVGMQNAVCLMVYTDNFNRFDYNSRKIACYYGVAPFGRQSGTSVNTPPHVSPFANKLIKALLSQAALASINFCPHLAMYYHRLIESGKKPPVALNNLKNKMLHIITAMVRKGEKYDPDHDYYAAIKAA

SEQ ID NO: 180525 - protein, 343 aa, unidentified
MQIRSVGIDLGKTTFHLVALGDNGKVLLKKKFTQKQLIAFTANMQTCLIGMEACSGSHFLGRALREQGHDVKLIPAQFVKPFVKSNKNDFIDAEAIAEAVDRENMRFVPIKTDDQLDLQALHRVRDRLMARRTSLINQIRAFLLERGIVFAKSPIRLREALPEVLENANENLTPRMRNLVAMLWSEWKDLELQIVQMNDEVERIASSDAACRRLRQIPGIGPLVATAIVASIGNGAAFRKGREFAAWMGLLPKQHSTGGKARLYGISKRGNSYLRKILIHGARAVVLRSKRDRIAMGAWMTSLETRAPRNVLIVATAHKLARIAWAVLSSGQDYRAVPEALTV

SEQ ID NO: 180526 - protein, 355 aa, unidentified
MPSKADTAIARTIGIDTGKNTLHVIGLDEKGALVLREKVSRTRIAARFVNVPPCLIGIEAGMASHHIARELVALGHEVKQVPPAYSRPFRQAHKNDFRDAHAVAEAVERRSTRCVPIKTDEQLDLQALHRVRSRLIGNRTAVINQIRGFLLEHGIPVRQGHQFLRGQLPQLLARRTDVLSPRMIRIIGDLMADWCYLDERVARVTDEIETLARADECCQQLITVPGIGPIISSAMVAAIGNGAAFCKGRDFAAWLGLVPRQMSTGDRTILGRITKRGNRYLRMLFIQGARSILLRPTSWAKHSFGSWLAAAVRRLHRNVVAVALANKLARIAWTILAQGRRYEARVAPRVEPVTA

SEQ ID NO: 180527 - protein, 385 aa, unidentified
MTEATVPSKTTLHCALELSKSSWLLAVQFPDRPQPSLYRIKGGDAAGLMSQLLIARDRCAKATGEAPSTITLCYEIGYDAFWLARFLIARGIECLVVDPASLKVNRRGRRAKTDRIDVGMLLRALIAWLRGDRHVWSVVRIPSVDEEDVRRSHRERDRLIHERTSHINRIKGLLFAQGIRDINIKTQYKKLKLEELLTGDGRPLPSRLKAEIAREISRLAIVQEQIAAINRERDEAPTPCKATEKKRVLLTQLKSIGPAISAVMSREVYYRQFNNRRQVASFLGLATSPYDSGDMERSQGISRTGRGQVRALMIQAAWLWIKHQPKSTLTRWFLDRTIGQGRRIKRIMIVAVARKLAIALWRYVEHGLVPQGAILVSPAVPKSAR

SEQ ID NO: 180528 - protein, 354 aa, unidentified
MNIKYIGMDVHKETISIAVMNGDGKLVMESIIETKANTILQCIQGLHGDLHVTFEEGTWAAWLYDLLKPHVTELIVCDPRKNALMKEGNKSDKIDARKLADLLRGGYLRSVYHGENGLRTLKELARSYLTISKDLTRVMNRVKALYRSWGILCDGQQVYAPRHRSEWLNKIGEAGVRRRAEFFYQQLDALRALRQAVRRDLLAESRKQSATKLLRQIPSIGPIRAALLIALIQTPHRFRTKRQLWTYSGLAIETRDSAQYRYVAGQLQRSKKPQQLRGLNQNHNHDMKAIFKSAATMASSREGAFQAFYQGLLMKGMAPAMARLTLARKIAAITLILWKKGAHFDAEQLKPQAA

SEQ ID NO: 180529 - protein, 425 aa, unidentified
MNRNMNYKINQVSENTLVVGIDIAKNKHYACAIDDRGRVLQKSFAFMNARHDFDYLHSTIVSLQEKHDKSELIIGFEPTGHYWMNLASYLVNLGIRFVMVNPLHVNRTKELDDNLQTKNDKKDARVIAQLVRDGRFSYPRILEGIEAELRNGASLRSKIQEDLSALRNRIIRWIDRFFPEFHLVFKKLGKTACAVLEKSPLPSDVKGKEIHELVELYRTVDYLKCVPKGKVNELLIVSEESIGLTEGLQMARYEIATLMSQFNLLSQQFDELSERLRELAAQLAEYEYILSVPGIGENTVVELLSEMGSPTHYEHPRQIIKLAGLTLRENSSGQHKGQKKISKRGRKKLRAILFRVILPLIQHNSAFKSMYKYYTTRRINPLRKKEAMVVLCCKLLKIVHALSKKKIYFSHTSMMNDLSCLEGAA

SEQ ID NO: 180530 - protein, 404 aa, unidentified
MNDSMIGYAGVDWAMDGHAVCVVNGHGTAVIEFDVEHSAEGLSEMCRRIAGTGARRVAIERPDGPVVDALLGAGLEVVVVSSRSVKALRERYGTSGNKSDRSDAFVLADCLRTDGHRWRSLEPDSPATVTLRGHVRARKDLVETRVAVANQLRAHLRIVFPGAVGLFSAIDRPIALRFLERFPSATSAAWLSEKRLATWLRANSYSGSKDPAELYTRLSAAPAGVIGVDGDARGAITLAYVNVLKTLRTQIDELNTRLDELLDAHPDAPIFRSLPRCATVRAATLLAEIGDCRARFPDPESLCCLAGVAPSTRASGRHRVVTFRFSSDTKLRAAICDFAGDSWRGNEWAAHRYHELRASGKTHPHAERILARSWTHIIWRCWQDNTTYDPTRHGAHQRLTTQTA

SEQ ID NO: 180531 - protein, 370 aa, unidentified
MNDITYVGMDVHKATISVAVAAGERGGEVRHLGVFANQPEIIDKLINRLGQDGRRLSIVYEAGPCGYGLHRQLVARGHDCQVIAPSLIPVRAGDRVKTDRRDAVMLAKLHRAGELTGVWVPDPAHEAMRDLVRARATAMRVLAKARQHLQGFLLRHGRHYAGKRGWTVAYRRWLTTLRFDHPAQQLVFQDYIHAVQDAEARVKRLTGHIEQQLPTWSLAPVVEAIQAMRGVALIVAVTMVAEVGDFTRFATPRQLMAYLGLVPSEHSSGASVRRGSITKAGNALARRMLVEGAWTYRMTPRISRKLHDRVEALPGPIRDIAWKAQARLCDRYRRMTTAGKAKPVVTTAIAREMVGFIWAIAREVQLPKPV

SEQ ID NO: 180532 - protein, 370 aa, unidentified
MEKKILYVGMDVHKKSIDVAITDERANGQVRSYGKIDGTLEALDKLIQKLKSSGADLHFVYEAGPCGYPIYRHLTSKGHGCSVVAPSLIPRRSGDRIKTDRRDAANLVRLFRAGELTSIYVPTVEDEAMRDLLRCRVDIRQIERKTRQRLLAFLLRHGLYYPGKKNWTKGHMNWLADLKLTHRAQQIVLQEYIDAANECTRRIQRITEQIQGLVPQWSRAPLVRAYQALRGVSLIVATTVVSEIGDMNRFKNPKQLMAYLGLVPSEHSSGNRIRRGSITKTGNSHVRRVLIEAAWTYNLRARKTKLILKRQQGLDDRICEISWKAQLRLCNKYRRLFARGKSKQAITTAIARELSAFIWAIDKQVQKLTA

SEQ ID NO: 180533 - protein, 297 aa, unidentified
MFHSDYTVGCDAHKHFSLFAVLGPNGDLVQRIRVGHVPGAIRTFLEQFPEGTPVALETVGNWYWIVDEIEAAGCTPLLAHAAKAKVMMGNVHKTDKLDAQGLATLLYLGKLPSVWIPPNDVRDARELPRTRMAFSKSRAALKNRMHSTLAKYALSLDTTSDIFTPKWRPPLLKLIDTLPEETGRCMHQELELLQLVQQQIDQLEARIRERIKLSATMQLTQTLPGVGVILAIVITLEIGAIDRFSAPKHFASYCGLVPKVSASGGHVHYGRMVTPSRCPSGSRPTTTSSGPSSKPPM

SEQ ID NO: 180534 - protein, 325 aa, unidentified
MSRMQGKALPKGAQAPNYAGIDVCKDWLDAKLRPSDKAMRVANDASGHKRLSRFMADNGVVLIVMEANGKYHRAAQRSLYANGFAVAVVNPKRARSFAESIGALAKTDEVDASVLAMMGETLRPDATPPASKALGKMQELVRARQAALADRTAMQNRMGESTCDAVRESLNAVIEAINSAVAKLDAEIAKLIAGDGGLSRRMEILVSIPGVGPVTAASLIADLPELGECDDKAIAALVGVAPFAADSGDFRGQRRIRGGRSALRSTVYMAAVAAARSNPDMKRVYERLKTAGKASKVALTAVMRKLVILANALVKTDRKWTPRTA

SEQ ID NO: 180535 - protein, 399 aa, unidentified
MTDAVLGIDVSKNTFDTNLGAGTKARSKSFANSPAGWHHLIAWLGEHKIGQVHACLEATGRHGLGIALALHEAGHVVSIVNPAQIRDFARTKLGRNKTDQVDAVHIREYAELFKPRPWTPPSPAMRRLCELQTIRAGTVAGLTEWKNRRGSGIMDDLALSLAKTTIQHFTSQLEAVDQAIAETIDNDVELSAKRDLLVSINGVGEALAGIVLAELPGPDILGSSAAVTAYAGLNPQQHQSGISVNRPVRISKIGNAVLRTALYMPALSAMRYNPAVAALADRLKAQGRLKGKQIVIAAMRKLLVLCFGVLKTGKEFDPAMAMGKMTRRAPPRPGVDRMVSTSWSGRRWSSPAARQGRALARGLEGHLPLQHHHVSDQNSSSSTLLGSFFSCLQTRYLPR

SEQ ID NO: 180536 - protein, 416 aa, unidentified
MKIVRPICCGMDVHKNIIVATIGITNKKTRITEYIQETFSTLNPDLLNLKQWLINHKCFDACMESTGKYWIPVFNILEDEINIYLTHPKYVKAIKGKKTDKKDSKWICDLFKHDLIKFSFIPPKEIRALREISRYRYKLVGMRSSERNRYQNCMTVSNIGIGSVFSDPFGKSAQAIMKEVLESDIIEDEKILKCIHGSCKNKDKILDSIKHCNIETDQRFKMNESMTHMEELQVHIDNCEIEMMKRAAPMFDQFMHITQLPGISTLSAILIISEIGVDMKQFESDKQLTCWAGLAPANNESANKKKSVRISKAGQYLKPLLVQCALGAIKDKEGYFGIKYSRIKKRRGHKKAIIAIARMMLVSIYHMILTGETFNPSDYESFKNPKPPIKQQVLTEESAIEFLKKSGFDVSKLTKP

SEQ ID NO: 180537 - protein, 375 aa, unidentified
MKEKVRFLGLDVHAETIAVAVAEPDGEVRSLGTIANRAESIRKLVKKLGPVEHLRACYEAGPTGYVLYWQLTELGVECEVIAPTLVPVKAGDRVKTDRRDALKLARSYRSGDLSPVWVPDEGSEALRDLVRAREAAKQDQLRARHRLSKFLLRTGQRPAHGMKAWTQAYMVWVQQIRFAQMAQEATKLDHLHEVEHMGERVVRLEGAIVEAIQLASPQIQEVVKGLQALRGIAQISAVTIAAELGNISRFEGARQLMGYSGAVPSEDSSGKRKQRGSITKTGNSHLRRIAVEAAWSYRLRPGIGPALRKRQQGVAEEIKEIAWKAQHRLYKRYSRLSAAGKDRRKIITAVGRELLGFIWAIGIKAEMAANQFLAA

SEQ ID NO: 180538 - protein, 412 aa, unidentified
MDVVVDRVAGLDISKADVKVCVRIPEDGPGRSRYREQTRTFTTMTGDLLRMRSWLAGQRVELAVMEATGDYWKPVFYLLEEQFTVWLVNARDVKKVPGRKTDVKDAQWLAQLSAHGLVTPSFVPPPPIRRLRNLTRARANLTRERVRALNRLESVLEDAGIKVSVVLSRTLTMSGRLMIEALIAGQRSPTALADLALGKARPKVAALREALAGRFTDHHAFLARHALSHIDRLDIEIAEFDKRIDAELGPLAAKRALLQTLPGVAERISAVIIAETGGDMSQFPTAAALASWAGVAPGNNTSAGRNLSGATTHGNSWLLGALGDAAAAAARTKGTYLGVYHKRIVRRRGTKRALVAVMHKIVIAVWHMLTHNVGYQDLGPDYFNNRPGQLERRRQRLLNELAAIDAGLLETG

SEQ ID NO: 180539 - protein, 417 aa, unidentified
MALKIVYPVCCGIDVHKSFVVACIATTNEKGVTTYKRKRFSTFTGDLRRLACWLAENNCRDVCMESTGKYWIPIYNILESTCKVVLAHPKYVKAIRGKKTDTRDATWIADLFKHDLVAGSFIPPPDIRQLRDLMRYRIKLTNFIVGEKNRAQNCLTVSNIKLDDVFSDVFGKSASAITEQLLAHPDGSFDVTPFIDSRCKASPEKVQAAIDGLMCVQQAEKLKIIRSHMDSLEFCKANLEFEILSFAEQFRPQFELVMTVPGIQLFSAIAIISEIGTDMSVFPTAKHLCSWAGLVPQNAESAGKKKTTRVSRAGSYIKPLLVQCALTVCNSDKHPEIKSRYLALKKRRGHKKAIIAICRMLLTAIYAILKKNEAYNPNIYRKVVSVPSNRSLSVQQALAFVKCHGYLVLDSDGELTS

SEQ ID NO: 180540 - protein, 435 aa, unidentified
MNRSRAYRATSVKNVSLTKVVSGREGQVPAVGCDVSKQEIMVVLRWAAADFERPWKAKNPSELGILVDLLKQVQGEGRLIVALEPTGCYGDPLRQALSDAGLVTHRVSPKTSHDYAEIFDGVPSQHDGKDAAIISELASFGKSKTWEFLAPIETDRAMAYWVDWYDVQRRSLNTWYGRLEGLLARCWPEATETFPVTRSVLLHCLDKYGGPSALASDEQGLENLLRWGRSRLRREKAEQLIGSASKTFGVRQSKFDAFQMQQYAAQALACRQELRQSRKALKTLVRDHSVIQAQAAVVGVVTACVLWVYLGNPAAYDCGAAYRKAMGLNLTEYSSGKWQGRLRISKRGHGQVRRWLYFSALRWIKEEPIKSWYENKKAKKTGQDDDQVMRAIIGVMRKLAMALYRVGAHGATYDPQLLFPGQATKHQRNDVAISR

SEQ ID NO: 180541 - protein, 361 aa, unidentified
MTGMVTYAGLDVHARSTHAAAINPVTGELTRARFGAGVEEPVAWLRGLPGPVRACYEAGPTGFGLYRAAAAAGVSVEVIAPGKTPRGPSDRVKTDRKDAELLARLLLAGSLTAVVVPPVEIEAARELMRAHDACRRDLMTARHRVSKMLLRHGRVYPEPSTWTASHRRWLSAQQFEEAASELVFADLIAAVDGLSARKAAIAERLSRLAEDEQWWATVARLRCFRGVDTLTAFALHLELGGDWQRFERANALSAWLGLVPSLHQSGESSHQGSITKTGSTFARRLLVESAWHYSRQPRIGVTLKNRQLGQPDHVLQIANRAQHRLHRVHHRMRSRGKAHNVTVVACARELACFLWAAATID

SEQ ID NO: 180542 - protein, 349 aa, unidentified
MDHKTPVTTFVGLDISLAETHICVLDQDGTRLYQGAVASDPDALADIIYRKAPNCERIGMETGATTPWLWRALRTRGLPVICIDARHANRALSMRKNKTDKNDAQGLAELMRIGWFKEANVRSPQTQYVRSLLTARYQLRLSRKDVLNQMRGVVKSFGLLAGSTATRKFPAMVQEIIQDNPQFGPLLAPLLAVHEALTRQIAVYEDELKNIAERDPDARRIMTVPGIGYLVALAFMTAVDDPARFSSSNKLGPYLGLAPRVRQSGEASWSAGIGHAPDKMMRSYLYQAATVVLTKTASWSALKAWGLRVYKRSGFKRAAVAVARKLAIIMHAIWINGTEFEYSQKGKAA

SEQ ID NO: 180543 - protein, 354 aa, unidentified
MQQFVGIDWATRRARWCAVTPAGAVIDEGWTPADADGLARLVSHLGLEALACLEMMSGAAWVRERLQAAGWSVQIADARKAKAVGSLAAKTDKLDARVLAELARRDLVPQVYVPTFADRELKERLGRRMHMIRLRTSAMNRAHGVLSQFGVKLAFDRLRKPDALELLAERGVPEVWCRSVGEAVAVVRVLDERLIPIERELRPLARADQRVALLVTIPGVGDLLGLTIASEIGDISRFASARRLVGYSGLTPRVYQSGEKSRTGKLSKAGSTMLRWAAIEAAQQAWRPNNPWHQLYLDVKARCGGKGNPAKAAVARKVLIAAWHVLALQQPFTPSRPRGAAAPVPANSSCVLAG

SEQ ID NO: 180544 - protein, 372 aa, unidentified
MKKVRFLGLDVHADTIAVAVAEPEGEVRWLGIIPNREESVRKLVKKLGPAEQLQACYEAGPTGYVLYWQLTALGVKCEVVAPSLVPVKAGDRVKTDRRDATKLARSYRAGDLTAVWVPNEEHEALRDLVRAREAAKQDQLRARHRLSKFLLRHGRRAPAGIKVWTQKHQQWIKEQVHFEQPAQEYTLLDYLHEVEHMADRIRRLEQAIEEAVKLAPPRMQEVIQALQALRGVAQISAVTIVAELGEISRFDGARQLMGYSGAVPSEHSSGKRIQRGPITKTGNTHLRRIAIEAAWAYRHRPTVGPALRKRQEGLSEEVKGIAWKAQHRLHKRYRNLVAAGKEKQKVVTAVGRELLGFIWAIGVQVERNSRVA

SEQ ID NO: 180545 - protein, 339 aa, unidentified
MKITTIGLDIAKSIFHLYAVNQIGRYVKKKQLKRHQLLQYLARLEPCMIVMEACGGANYWAREIKCLGHEVKLIAPQYVKPYVKGNKNDYNDAEAIAEAAQRPTMRFVPIKSVEQQDIQNLHRQRERIKKARVALVNQVRGLLAEYGIVINKGISAVRKRLPDILEDAENGLTMRSRELFADLLEELRLLDERLKQSEKQIETSNQGNEICQRLDEILGVGPIIASASYAAAGDGKDFVNGRHYSAWIGLVPGQHSTGGKPTLLGISKRGNAYLRTLYIHGARAVLRHCANKTDRFSLWAQALLERRGHNKACVAVANKMARMAWVIMARGETYRPAMS

SEQ ID NO: 180546 - protein, 270 aa, unidentified
MKHMTIAVDIAKNVFEIAVSHCPGRVAETHRLSRSRFLRFLAQREAADVVMEACGMAHYWARQLQQLGHSVVLLPPQYVRPYVRRNKTDRTDAKGLLEAHRNKDIRPVPIKSVEQQTLASLHRFRSAWLATRTARINGVRGILRELGIFIPLGAKQVVPRVRSLIEDADSQIPMPLRKALHQACDEIELLESLMDGADQQLRALGKQMPTVEQLLTIPGIGVLTATALVAFVGDVHRFRSCRHFASYLGLTPRERSSGTTRRLGRISKQG

SEQ ID NO: 180547 - protein, 376 aa, unidentified
MTRVIYTGMDVHKDTYSLCSFDAQENVMFSETTVKAETTAVLLYIKAIEKRYPNDDIMIVCGYEAGPTGFSLCRDLQKKNISCVVMAPSSLPKSPDSKKRKTDKNDARNLALHLAHKTYKAVNVLSPDIEAIKELTRTRATALKAQKRAKQNLLSFLLRKGMVYPYGGRAKYWTQKFYAWLKTLEFTNEIDRYSFEEYLSEVNHQMSRISRLDEKIGQIAEDPLIKDDVKKLCCFSGISTLTAVSLVSEIGDFNRFEKARYFASYLGLCPGIHSSGLSSQSLGITKAGNKNLRCLLIEAAQSMSHSQICGKKSLRLLARQKDMNPLVVAYADRATERIKRRRNSMIFRGMNCNKATTAAAREMACFIWGMMTNNIA

SEQ ID NO: 180548 - protein, 390 aa, unidentified
MQALHPRPDEHAAVRTDLKAIFVSLELSRSTWVITSLSPGGGEKMSKHAVPSGDIPALLARLSQLKEKARARTGQVFPIIVIQEAGLDGFWIHRVLQQEGIESHVVDPASIATSRRRRRAKTDKIDGEALVRALLAYKRGEPRVCAMVQAPTPHEEDRRRISREREVLTAERVQHVNRIKGLLFAQGIGDDAPLHRNRRERLEELITGDGRPLPECLKAQISRELDRLELLIEQIKAVEAERDAVLAQAQASPGVPAPAAQLLALRGIGPEAAATLWTEGLFRTFSNRKQVAAYAGLAPTPWQSGSVHRDQGVSKAGNPRLRTIMIQIAWLWLRHQPQSALALWYRARIKRTGGRLGKTMIIALARKLLVALWKYATAGVLIEGAVLKPA

SEQ ID NO: 180549 - protein, 421 aa, unidentified
MSYRVAAIDIHKKVLMVVVASGADQVEDAAGEALEFECRRFGTGNAERRHMVSWLKERGVREVVMESTAQYWKPVWLELEPHFEKLHLAQAYSNKAPKGRKSDYRDAKRLARRLLADELLLSFVPEPEQRLWRTLSRSKHQLVRDRIRLQNQLEALLEEARIKLSSVISDLLGVSGRRILAALAKGTTDPAKLAELGDVHLKCSQQELMDALTGSPEPLHLQVLQLFLDRLELLDQQIQSLDTLLAGELKRHEAAVIRVAQIPGFGVDSAQQIITEVGVDAETFPSAAQFSSWAGTCPGSEESAGQNQSSRSPKGNRFVRRILTQAAQAAVKKKGCHFQTVFRRLSPKLGYKGAIWAIAHRLGRLLWKILHDHISYLEQGQETNPKAKKRRAQKLAQALRKLGYQVSLTPINPQLRLEAQA

SEQ ID NO: 180550 - protein, 336 aa, unidentified
MEHLAIDLGGRESQICVRSSDGQIIDERRCRTAALPAYLATRPRSRVVVETCSEAFGIADAAMAAGHEVRVVPSTLARSLGVGARRLKSDRRDARALSEVSCRIDLPSVHIPSREARDHKTMCGMREALVRTRTKLVNTVRGWLRAEGRRPRSGELTTFAARVRELYAEMMLPAHVARQLRVLESLNEEIAGADRELATTAKADPIAARLMTVPGVGPSTSVRFVAALDDISRFGGAHAVESYLGLVPGEDSSAERKRRTAITKAGPSALRWCLVQAAWAARRTRRKDPMHRWVDEVEKRRGKRVAVLALARKLAGILFAIWRDGTVYDPHRSGAV

SEQ ID NO: 180551 - protein, 467 aa, unidentified
MESKGAIGIDPDAHGFVCALVNGQEPKVISRTFLVTDSDLGAFLRWVKAQTDILIAIEGSGGQSRPIEKLLREAGLIFYSFKPADTDKFRKAVLGQNKNNLRDAESVARYALALQAQGKLDRYRRIWFADPQLQPLTRSYERLSQQMTAEINRLWKLIRQAAPDLYLALGDSHPEVNLGANTLKNGGFLTLLANKPDPGQWKTLSEAELLEDMGGFSSAGRRRIVQGLHVLSTRLPSCSASLALLIQASAQRISMFKAHLAAIIAMLDTITQDNSAVAALRQTRGIATVTASTLVAEIIDIRRFPREDSLACYAGLGRKEHSTGQSTRMVPSSLFNHRLKDAFMTAARNVVRFNPDSHLAGYCRNLIKRGMSPLEAYKRVARALVRVFYRTLNGLLPHDTRDDTNSDEAGSDMASGQARSDGCHQSNMPLPAQRHGTTQRVQRIKRDGAKPHVSRRPRKVATDQRRS

SEQ ID NO: 180552 - protein, 416 aa, unidentified
MKKNTNSPMKKEPRAKRAKAQRPVQRDTKEVLAELVEKLQGKLAVKATWASPAEAGGRGELSPNLDRLTVGVDLGDQWSHFCILGLHGETLSEGQIQTREAEVAEFFQALPPARVVMEVGTHSAWMQEVIAGKGHEVVVANPRLMDGSKRRKRKNDRIDAKKLARLGRVDPESLYPIRHRSREVRQDLVVLRAREALVAARTELINATRGLVKSMGTRLPKCSSESFGHKVKDAIPEEVQEALLPLVELADALSECIRSYDQKIEELGNEKYGQTKLLRQVKGVGPITALAYVLTIENPEHFAKSRDVGPYVGLVPKQEDSGESQPQLGISKAGDTMLRKLLVGSAQYILGPFGPDTDLRRHGLRLCERGGKNAKKRAAVAVARKLAVLLHRLWVSGEVYEPLGYASSRAIVQQAA

SEQ ID NO: 180553 - protein, 329 aa, unidentified
MGNVTTIGIDLAKNSFSVHGVDAAGAVVLRKTVSRCRLMGLLVEQPPCLIGLEACSGAHEWARRLQRFGHQVKLMAPRFVAPYRKNGKNDGNGAEAICEAVSRPQMRFIPIKTPEQQAVLCLHRVRQGFIEERTATINRLRGLLAEFGFVLPQSSAAVRHGAGELLERLPSHAARALGDLLEHIRALDTRVRDYEHSIQAHARENQAAQLALQRQGIGPITASALVASVGDVREFKNGRQFSAWLGLVPRQHSTGGKQRLGHITGRGDPYLRTLLVMGARSVLQRAPGQNDPLSRWALAVRARRGYHRACVAVAAKNARVIWAMLSHDA

SEQ ID NO: 180554 - protein, 319 aa, unidentified
MYVGIDVSKDCLDVASLGEGAFAPFQVGRDEKGLSELISRLKAYSIQLIVLEATGGYERAVAAALAAAKLQAAVVNPRQVRDFARATGRLAKTDSLDAAVLAQFAEAVKPQVQPLPDALSMQLDEMLTRRAQLVQMLVAEKNRRASVLVMRNPTQSKKVAKSLESHIQALEKLIAELEDDIDTTIKNSPVWREHEDLLRSVPGVGPALARVLIGYLPELGTLNRRQIAALVGVAPFNRDSGKSTGQRAIWGGRAHVRSVLYMAAVAAIRCNSDLKAFYRRLVAGGKAKKLALTVVMRKLLVCLNAMMRDRASWSPRLPA

SEQ ID NO: 180555 - protein, 331 aa, unidentified
MAQNEVVVVGIDVAKDKVDACIRSLSQRQTFPGTAEGQRALVRWLRKHKVSKAAMEASGGYERDWAKALREAGLEVRIVDPKRVRSFAKSAGQLAKNDPIDAEMIAWFAETFIEAPSQAQDATREKLAQIVNARQNLLDMQTSLQNRSEQSMPEVVQKMQGRLLKEIACEVAKLEAAIVALIKATAHFVELAEIIESVPGLGKITSAGLIAAMPELGQVSNEIAAALLGVAPYDDDSGRRQGQRHIKGGRRRVRNLFYMACLGAATQHNPVLKAFYARLIAKGKEPKVALTACMRKLIVILNTMIARRQKWDASAYKVGDPARLPPSACPA

SEQ ID NO: 180556 - protein, 355 aa, unidentified
MKRTTKYVGLDVHQATIVAVVRDETGRVIARTILPTEAAALTAFVGPWRGRVEVAYEEGTQAQWLHDLLRPLVARVVVCDRRAVRRQGNKSDWRDAEELAAMLQRGAIRSVYHGGGPQQAELKELTRTYVTLVQDATRVMTRVKALYRARAIPTRGRGVYHAGERATWLAKLPAGGVGFRATTLYRELEVLLALRASAKAALLGAARRDPAWALLQTIPFLGPVRVALLLGIVQTPWRFRTKRHLWAYAGLAVVTRTTAEYTLEGRTPVHRRRAPLTRGLNRNHHRLVKALFKGAATAARARPGALQDWYQQRLARGMRDELARLTLARKLAALTLHVWKTGEAYDPAKLTRPAG

SEQ ID NO: 180557 - protein, 338 aa, unidentified
MIVIGVDVHKHSLTAVAVDEAGRMLDERTVAAADGELLAWARKLGSERLWALEDCRQLTRWLERQLLAASEELVRVPPKLMAPQRRAGRIRGKSDPIDALAVARAAVREPRLDHPRPGEERLRELKLLVDHRDDLVDERRRAQQRLRWHLHDLDPELAVPLGALDRAVWLDRLARRLARGEQTVLVQIARQLLGRCRSLTRTILALDRDLQQRTSEAAPRLLALPGCGALSAAKLLGEIGPIERFDSDAQLARHAGVAPLEASSGKHRRHRLDRGGNRQLNCAIHRIAITQARMHPPARAYLERKQSEGKSRREALRCLKRQLARTVYTTLKSEPPLT

SEQ ID NO: 180558 - protein, 363 aa, unidentified
MFTERTSIGLDVHARSVAAAAIDSVTGEVFQARLTPSYEHIRSWVADLPGPAAAVYEAGPTGFGLYRALTDSHVRCEVAAPSKLQKPSGDRIKTDARDALHLARLLRLDEITSVSIPSVDQEAARDLVRAREDCRGDLMRARHRLSKLLLRHGIVYYGGAAWTGAHDRWLRAEAAPQLTSPATRMAFDADYDHVLTMQARRGRLDTAIEEMAAASEFTPIVRRMCCLRGVSTLTGFALAVEIGDWNRFTGNTIGSFVGLVPSEYSSGSSRAQGSITKTGNTHARRLLVEAAWHHRPRYHVGAVMRSRWDRAPAAARARGDEGNHRLHGRWVGFLERRKRPTVANVAIARELAGWCWSLAVMDD

SEQ ID NO: 180559 - protein, 309 aa, unidentified
MKQSVVYIGIDVAKAHLDVAWAGTFHRLSNERSGHAALVRWIKQSTTPVQLICEASGGYEQALLESLEKSEVKVTLVQAVRVRQYARAAGILAKTDRIDAKVLAAFGSAMQPQPTSPLSAEQKRLRQYEAQRRHLSRILVAEENRLAQLSCTELRNLSRSLISKIKTQIKTLDRGISDLIAQDQTLCVKAQKLTAISGVGVRTAALLLAQMPELGQLNRRQAAALAGLAPFNHDSGSVRGKRAIFGARPALRSGLYMAALSAARFNPILSSFYQPLRTKGKPHKLALTAVMRKLPLALNQTLKPLPCST

SEQ ID NO: 180560 - protein, 338 aa, unidentified
MNIETLGIDIAKTVFQLHGVNRAGHVVLKRRVMRDQLIAVLARIKPCTIAVEACTGAFYWQRKFEALGHQVRIISPQYVKPFVRRQKNDGNDAEAICVAARQPHMRFVPTKSIEQQDIQALHRARQRMVNHRTAVVSQIRGLLLDRGFAFAKSITRARRIIPEILSDLDNELTDLAREAVGELHDLMLDLDRRIASFDRKIERVFRSSEVCQRIARIKGVGPKTATALIAAIGDGAEFKNGRHLAAWLGLVPRQYSSGDKRVMMGISKRGSQHLRTLLVHGGRAVVRTATNKTDPLNQWVNQLRERRGYNRTAVAVANKNARIIWAVLRSGEPYRAAA

SEQ ID NO: 180561 - protein, 373 aa, unidentified
MDDLSEAWVAFDTSKLRNSVAIAEGSRGEVRFLGEIDNTPEATRKLVKKLGRKYRRLTFCYEAGPTGYELYRLIKELGYPCIVAAPSLVPKRPGDRVKTNRRDALNLVQLLRAGNLTAIWVPDERHEAMRDLVRARSVAVADLRRKRQQVTALMLRLGRYYPGKKTWSKAHHTWLMKQRLDHLEQRIAFEEMLLAVRQAQERIVRLEDAIRAAVPDWSLAPMVTALMALRGIDLVAATVFLAEVGDLSRFQSPRELMAYLGLVPSEASTGERVRRGAITKAGNRRARHILVECSWSYQHPPRVSACKQARIDAAPRGIAEIAWKAQTRLNARYRALLRKGKKKTVAVTAVARELAGFIWAIHRQSATDRLSPV

SEQ ID NO: 180562 - protein, 408 aa, unidentified
MEVVYGICCGLDVHAKSVVAGLIRQGRRQIRTFGAMTGDLLELRDWLASEGCTHVAMEATGVYWKPVFNILEGAVDVTLVNARHVKAVKGRKTDVRDCEWLADLLRHGLLKASFIPPKEIRELRELTRHRAGLVCELTALSNRIQKVAESGNIKLGQVASRAMGVSGREMLTRLSQGVTDPQVLSDLARGRLREKKEDLQKALEGRLTQTQRWLLAELLRRFDEAEAALERVEGRIDQELKQAEEPSIREAIVLLDGIPGIGKTTAEAIISEIGVDMTRFPTAGHLASWAGMCPGNDESAGKRRNTRTNPANRYLKGAMVEAAWAASHTKATFLSALFRRFVRRMGKKKALVAVAHRILVIVYHVLAKRLPYKEVPVNPVRNDSERQQRRLIKKLETFGLKVTVQKAA

SEQ ID NO: 180563 - protein, 361 aa, unidentified
MNLIVGIDFSKQKFDVTAIFCEDLTETKPRICNQFANDLKGFKELAKWVKKNSENAQSILFCGEKTGIYSTPLCLFLYYSGYDMWLENPYQIKHSIGLQRLKTDKADSGFIAEYAMRHQDQKVTFAPSDPAIEDMRELFQFRNDLLVEKSKMRIRMKEKKEANAKVLEIKKYCGKEIKKKDIFDYMDRAIDKIIKEIDKQLMLCEKKIDMFINANQEIKENYDIITSIKGVARMNAIALIVVTLNFKKFDYDSRKIACYYGVAPFGRYSGSSVRCSPHTSSMANKQLKALLTMAAMSAKLHCPVIEMYYKSRIARGKKPMVALNDTKNKLLHIIVAMVKNKTKYNPQYLIERKNEYNNRIS

SEQ ID NO: 180564 - protein, 340 aa, unidentified
MGKITTIGLDLAKHVFQVHGVDAEGSAVLRKQLRRGQLLIFFSRLPRCVVGLEACATAHYWARELRALGHEVRLMPAQYVKAYVKRNKNDAADAEAICEAVVRPTMRFVPTKTAEQQAALLLHRCRERLVRQRTALVNALRAHLAEFGVIAPQGLRNVGKLIAIIRDEADARLPDLARQVLQVLAGQIEQLETALAAIEKQLMAWHKSNPVSQRLATIPGIGPIIATAIAATVVEPSGFRSGREFAAWLGLVPRQNSTGGKHRLGGISKRGNQYLRRLLINGASANLLRSKATNADPWVIGLRRRRPSLVVAVALANKTARIAWAVMHRQENYQRVAAAA

SEQ ID NO: 180565 - protein, 372 aa, unidentified
MSQSSTLYVGMDVHKESIAVAYVAQAHGAEVVSLGTIGTRQCDIDKLIRQLRSKSKQLVFVYEAGPCGYWLYRYLMKQGYVCWVVAPSLIPKKAGDRVKTDRRDAMQLARLMRSGDLTPVYVPAVDDEAIRDLSRAREETLRALKAAKLRLKAFLLRHDIRYTGRANWSPAHLRWLSEVVCPTPAQQIVFQEYVQTVTEQTERLGRLELELHEQVHTWRLSPVVEALQALRGVQFTVAVTTVAELGDLTRFDKPRQLMNSLGLTPSEYSSGGRRQQGSITKTGNTHARRALVEGAWAYRYPAKVSRHLQLRLEKRPKAIQAISWKAQVRLCKRYRQLMAKGKNANQVVVAIARELSAFMWAIAKQVTVPPKA

SEQ ID NO: 180566 - protein, 410 aa, unidentified
MHFKKRHVYVGVDLHKETHTAVVIDCWSEILAEIKIENKPSAFQGLLDEVKKSANGLTPIFGLEDVGGYGRSLAVFLVEKGEIVKEVNSALSHAQRMSHAMTAKNDAWDAYCVACVLLLKLKSLPDANPQDVYWTIAQLVNRRNSLVRSLATLTNQLHSQLTCHYPSYKKFFADVAGKTALAFWEAYPSPQTLQGVQAEDLAALLRQNSHNSCSTKKAEAILDLVGKDGDTTRAYQETRDFIVKSIAANIRTRQRDIAETEKALRQMLDVVDCRLETMPGVDTVTAAALIANIGDVRRFGSADKLARFAGVAPVRFSSAGKGKDQKSKQGNRELHSILYFLAIQQVQVAKVSGKPRNPVFHDYYQRKITEGKTKKQALVCVMRRLVNIVYGMMKHRTAYIMPDFPEKEAV

SEQ ID NO: 180567 - protein, 346 aa, unidentified
MEISTYVGFDVSKSSIAATAVDPLGRRRRQEKLGTNDEEIRRFLEDLPGPIQVVLEACNVWEHTYDAAAATGAQVLLANPFQTKLVSKTTLKTDRVDSEKLAKLARLQAIPEAYVPTPEQRALRKLVRERVFYTHLWTGVANHVYAVLLQKGISFRPGLLQRRTLRHSVADPRFPEIERGLQELASIEEITRSLDRAIQDAFEASTEAQLLATIPGVGKFTSVALVAFLSPIERFSSLDAVVKYCGLCPSVHQSATTSYNGPLVWDAYHLLKWVLVEAQWNVRRHEGKGDVYRVGHRVARRKGMGSGAVAAARKLVRITASILRRRSPYQPHAPESSSRQRPIAAS

SEQ ID NO: 180568 - protein, 348 aa, unidentified
MLADQLDYVVGVDPHRDWHALAVVRVVSGAVVFEGSVAADSLGYAQALKRADQHAMGRRAFAVEGTGSFGAGLTRYLAGRGEQVLEVGRLRRERGSAGKTDALDAIRAARSVLAQERPATPRASGEREALRALMAAREGAVNAKRAALCQLRDLLVTTPEPLRSELRPLTRAPLLRRLAATRPERRQDPQLRGALLALRSVARRVLQLASEERELAREIETLTRKLAPQLLDQPGVGPLAAAQLVLSWSHKGRISSEAAFARLAGCAPIPASSGQTIRYRLDRSGDRKLNRALHMILVTRRRTHPPTIAYIERRIQEGKSRREATRCLKRYLARTLFRLLEHGTPQTA

SEQ ID NO: 180569 - protein, 412 aa, unidentified
MSSSSNTETSSYSAFCGLDVGKGVHHVVALDPAGTRLVDRPLPNDEGALRELFTGLQTHGRVLLVVDQVAAIGALAVAVARDLGVAIGYLPGLTMRRLADLHPGEGKTDARDAFVIADAARSLPHTLRRVDGDDEQLAELTVLAGYDNDLAAEVTRLTNRLHDALTHVHPALERLIGRHLNRAGVLDLLVAAPTPAQLQRLSWDDIAALLRPRSRRLAAGELPGQILTALTEQTVTVPGTDAFGRVIAGLARQLRQVRDERDSIVEQLEQRLDAHPLAEVLTSVPGIGVRTAINILVHVGDGSAFPTAAHLAAYAGLAPVTRRSGSSIRGETRSRRGNKALKDALFLSAFASLRDPASRAYYDKKRAEGKKHNAALVCLARRRTDVIHAMIRTRTPYRPPSPNPTAVEAAAA

SEQ ID NO: 180570 - protein, 337 aa, unidentified
MLIKELSVRFHVGIDVSKLTLDIFILECNIHKKVSNNPRGFNDLLQMIEKNTHVSPELVVFCFEHTGLYSLSLALYLEERNLHYAMVAPLELKKSLGITRGKNDKVDSARIADYARRFGDRVPLTKLPAKDIRKIHYLLNMRERLVKNMHGHLVTYKETLRVMRPSDFPELFSFYESTISMLKAKIKEVEHLIKTLLKENSALWSSYRLITSVKGIGLIVAAYLIVYTCNFTRFDTWRRFSCYSGIAPFEHQSGTSVKGKTQVSPIANRQIKMLLHLSAICALHTDTELREYYQRRQAEGKSKMAIINILRNKLIARVFAVIKRRTPFVDIKRYAAT

SEQ ID NO: 180571 - protein, 338 aa, unidentified
MKVYAGLDLHATNTYVAMIDAENKVLYKQRHRNDAPSILSALDPFREDIQGVVVESTFNWYWLVDALMDHGYRVHLANVSAIKQYEGLKQIDDRRSSLWLANLLRLNILPTGYIYPKEERPTRDLLRKRLQLVRHRTSHVLSVKNILARNLGIRMKTYDIKKLKASEVNTLFADTEMRLAIMSSIGLIQHFQEEIDRIEMVITKKFKVKKEFKKLLTVPGIGEILGLTIMLEVGHIDRFPTVGDYSSYCRCIRSIHTSNGKVTGYGNSRNGNKYLSWAYLEAAHFARRHHEMIQRYYERKRAKTNKVVAIKAVSHKLARASYYVMRDGVDYDEARLFV

SEQ ID NO: 180572 - protein, 405 aa, unidentified
MSHTIAGIDVHKKLLVVVIVDAAEPDVPLQSRRFGTGSGELRHLSAWLNHYQVKQAVMESTAQYWKPVWMELEPQMRLHLAQAQSNKAPKGRKSDLADTKRLLRRFAAGELMLSFIPEPEQRAWRMVTRGRLQLVRERVQLQNQIESLLEEGRIKLSSVITDLLGVSGRRILRAMAAGETNPDTLAALGDQHLKCGLPVLVDALTGAMGTIHCQLLAQHLDRIDLIDRQIGDLNKLAAARMRRYQDAVTRLVEVPGIGAEAAQEIIAEIGPEAAAFPSPEQLASWIGVCPGSQESAGQNHSGRCAKGNRFMRRLLCQAAQAAVRTNGSQLQAVFKRLIVRLGYVKAVWAIAHRLCKIVWNILHKNARFVEFSETRNPKAVQRAINHHLKALRRLGYQIPMSPAQA

SEQ ID NO: 180573 - protein, 344 aa, unidentified
MNPVPFYVGIDISNDDFAASIFKAPTDPIKTMAEISNDFSGFEKLESWLINNQVQPDNCVICLEATGVYGEALSYFLSAKGYQVAVEPPLKVKRAFSVKGHKNDKVDSKKISEYAYRFFDELKLWRPKANVIEQIKVLLMTREQLVGQRTALSNTLTALRKKVIQTPLANEIYQKNVERFGAQIKKIEKELNKLIDKHPDFKMTVKALDSIPGVGMLLAANFLVVTDGFENEMAIQYRKASAYIGICPYEYSSGTSVYKKPRIPKYGPARLRKLLHLAARSVVTHNADFSTYYIQKIAQGKAKKLILNNVSNKLLKIMCAVTRTHKPFVDNYVSIHPQFAFINP

SEQ ID NO: 180574 - protein, 356 aa, unidentified
MAKTKILARERRIALGLDVDRKAAVVVALDVTNGEILFQGRLTQETEDWQRFLAHFLQCSLWACYEAGYTGFHLCRMLCARGVDCRVVAPSQVPKSPNSKQQKTDRRDAVTLAQLYFHPPRSFVRIPTEREERDRQLLRTREQMVRDKTRTQNRIKALLAFHHLAWPRSESSGYWSQADRHALRQMTLPDRLRTCLDALLETLEGLDAQIGSFNHQIVALSGTEAYHDRCALLRQLPGVGLLTAMAFLLEVFRPEEFLTAEALACHVGLTCCEWSSAQRRRQGHITHWGSPILRRMLVEAAWSWVRKDPDAKRRFEAISASSKRKKIAIVGMARRLAIVMWAMTVKQADYAYRWAA

SEQ ID NO: 180575 - protein, 448 aa, unidentified
MICAAVERCAGIDVGKTFLAVCVMTGPLDGEARVQRRRVGTTTAELESLRDWLQAEGITHVVMESTGSYWKPVYNVLESSVKVYLANPQEVKNRKGHKTDDKDGWWLAHLLRHAMIHPSFIRPRPIRELRDLTRRRKRLLGNAGAEKNRVQKILEDANVKLGNVLTDVFGVSGQLMLDALLKGKARPEEIAQFAKRSAKRKIPEIIQALEGHRMSDHHRTMIGYSLKHLEFLEEQIGEIDGAIVGKIKEAGLEPEWQLLQTLPGIQERSAAAILAETGADMEQFPTAKDLSSWAGVCPGNNRSAGKNKSSHTTGGNPWLRSALTECVWAAAAKKNCFLKDKFWRITTKSGGKKAPALVAVAHMLLLLVYQVLRTHKPFEDRTVAPLDERQKQRLIRHHVRRLGKLGIAIQCYAPSAPGTRKRQPLRPVGPAGPIGPPIGHQKRSTASA

SEQ ID NO: 180576 - protein, 345 aa, unidentified
MPIVGGLDIHRKQITFDYLDTVTGEVKRGQVAPADRAHLRAWLARFAGWDDVTFAVEGCAGWRYVTEELAAAGIAAHLGEPADTAALRGRKRHAKTDKTDARHLRTLLAEARLPECWIPPEHILECRALLETYHDLRREHTAWVQRVHAVFFHQGAPPLGEGALRTEQGLTKLRAAAAAHLSAAGQQQVATALDMLAATEAQLGPLRHQLRQTAAHLMGAKVLAARLYGVGPVTALALTCWLAGAGRFSSSRKAVRFTGLDITVHSSDRKGPPGRLSRQGPPVLRWAVYEAGKTHARTSAPDHGYYAAVADRKNTKRAALSEARKIVRQACHILTELGDDALTAA

SEQ ID NO: 180577 - protein, 351 aa, unidentified
MLIIGCDLHTRYQVIAMLNSETGELVTRRLQHENGEAGAFYASLPAPAQVGIEATGYTQWFERLMAELNYELWVGDAAQIRARAVRRQKTDSRDAEHLLELLSTQRFPRLWIPSPEQRDLRQLLKHRHKLVTMVTTLKNQLHFLAMSQGLCRKSKLWSERGREELESLSLGPWARRRRQELLALLDQLQPQIAELDVAVAQAAAADPAAVDLMTQKGVGPVTALAFVLTLGPVERFQNSRQVVSYLGLNPREHSSGGRQRLGGISKQGNPLMRWLLVEAAQTAVRFDPELRRKYQRLKFRRGGSVAKVALARRLAVRLYWRLRQRKAETQPVRMPGSSGSAVVLPRAGSRH

SEQ ID NO: 180578 - protein, 367 aa, unidentified
MKQSSKIFVGMDVHKDSIDITLAEQGGEVRRFGEVGGDRTALLKAVRKLTSRGGELVFVYEAGPCGFWIQREITALGHPCWVVSPSLIPQRPGNHVKTDRRDSENLARLARAGELTPVHVPDVRDEAIRDLVRARDDAVIAQRRARQQLKALLLRNDIRYVGKTSWTSAHLRWLSELKLPQPAQQIAFQEYVDAITVATGRIERFEQAMRDEVLTWRFAPAVAALQAMRGIQFVHAMTLVAELGDLTRFASPRQLMAYLGLVPSEDSSGQRRRQGSITKTGNAYARRALVEAAWAYRHPARLTRIIALRQDALPKQTCDIAWKAQLRLCAKYRRLRARRVLETKIIVALARELSGFLWAIGQHVKPQ

SEQ ID NO: 180579 - protein, 309 aa, unidentified
MFVGIDVSKARLDVAFRPEGACFQVSNDEAGIGDCVRRLQALRPELIVVEATGGFETALVAGAAVVGLPIVVVNPKQVRHFAKAIGRLAKTDSIDAGVIARFAEAVRPEVRPIQNEAGELLTALLSRRRQVLEMMVAEKNRLVTMQERHVRQRITHHLHFLKQELRELDKDLDKEVRSTPAWREKEDLLKSVPGVGPVLARTLLAELPELGQLDRKRIASLVGVAPMNNDSGSLRGQRRIQGGRAQVRTVLYMAALVASRFNPRLKRFYDSLRARGKTGKVALVACMRKLLVILNALVRTGERWNAEAT

SEQ ID NO: 180580 - protein, 402 aa, unidentified
MNAVGIDVSKGKSMVAIMRPFGEIVSAPFEIKHTASDINSLVELINSVEGESRIVMEHTGRYYEALAHQLSEANLFVSAINPKLIKDFDNDSLRKVKSDKADAIKIARYALDKWQNLKQYNVMDELRNQLKTMNRQFGFYMKHKTAMKNNLIGILDQTYPGVNTYFDSPARSDGSQKWVDFASTYWHVDCVRKMSLNAFIDHYQNWCKRKKYNFSQSKAEEIYGKAKELVPVLPKDDITKLIIKQAVNQLNSASTTVESLRTLMNETASKLPEYPIVMAMKGVGASLGPQLMAEIGDVSRFTHKGAITAFAGVDPGVNESGSYEQKSVPTSKRGSSDLRKTLFQVMDVLIKTHPQDDPVYQFIDKKRAQGKPYYVYMTAGANKFLRIYYGRVKEYLSSLPES

SEQ ID NO: 180581 - protein, 339 aa, unidentified
MTKYVGLDVSQKTTVLCVVDGEGHRLWRGECTSSPDQIVHTVLQHAGAGASIGLETGPMTPWLVHELRSRGLDVICLDARHARAALRMQLNKTDRNDAEGLAQIMRTGWFRAVHVKSFDAHRARALLGARQQLVGMVTSLSNHIRGVLKTFGMLPGPVRGRSFAERVELLVAERLDVAPIVRPMLAAWSKLREQIAAFDKAIRAEVKQSRECRLLMSVPGIGPVTVLAYVSAIERPDRFRRSRLVGAHLGLTPRQYQSGDVDRSGHISKCGDTLARLCFYEASTVIMTRVKRPLGLKIWAMKIAKRSGTNKARVALARKLAVILHSIWRTGEAFCWGTH

SEQ ID NO: 180582 - protein, 339 aa, unidentified
MELYSAIDLHSNSSHVAIIDGHQNRILSRKLANDSKLITSTFRPYRKQLKGIVIESTFNWYWLADLLIEKGYAVHLADPCGIQKYSGLKHADDKHDAFWLAQMLALNILPEGYIYPKEDRPLRDLLRKRAQLVKVRTSLILSLQNIVMRNHGIKIRSSDLKKLTQDPVAELLKEPEELALAGKASKETIDFLTRQIQRIEKVAQNKAVLKDPFSKLMTLPGVGEILAMTILLETGPLERFKAVGHYVSYCRKVPSHWTSNDKVKGKGNTKNGNRYLSWAFSEASDHARQTHGPSRDFYNRKLNQTNAAVAHNALAHKLARAAYYIMRDHVEFEEAKMFR

SEQ ID NO: 180583 - protein, 354 aa, unidentified
MHYVGVDLHKEQSWFYVMDDKGNRALSKSIANKPDALKSFFSTIPTPFTLAVEATYNWYFFIDIAEQYAKQVFLANSYELKAFAKRHKKTDMIDARLIADVLRKGFLPAVFIPDKATRALKELLHCRMNLVRDRCRYIFRLKNILDKLGADSSGNFTTFKGLRDIPIDSFLPVHQRIMTEYVSQITLLSQRIHNTRAYLKEYLSDDVNIKHLIGIEGIDYFSAALIKTEIGDINRFTSFNRLCSFAGLAPRVSQSGNKSAIHGPLMVNRRKNLQWILLETVFHFIKGSPKRMVRWEELKSRKGSNTAKVIMARQMLNIIYHVLKERRPYYSDGNKKHEHANQIQSVAAAALTGV

SEQ ID NO: 180584 - protein, 343 aa, unidentified
MEIRSVGIDLGKTTFHLVALGDNGKVLLKKKFTQRQLITFTANLQTTLIGLEACAGAHFLGRALREQGHDVKLIPAQFVRPFVKSNKNDFLDAEAIAEAVDRQNMRFVPIKTDDQLDLQALHRVRDRLITRRTSVINQLRAFLLERGLVFAKSPAKLRERMPEILENAEEDLTPRMRNLLALLWNEWKDLEQQVVDLNHEVELIASSDAACLRLRQIPGIGPLVATAIVASIGNGAAFRKGREFAAWMGLLPNQYSTGGKAKLYGISKRGNRYLRKILIHGARAMVLRCKRDRVPMGAWMTALEARAPRNVLIVAAANKLARIAWAVLSSGQDYRAVQEPVAA

SEQ ID NO: 180585 - protein, 441 aa, unidentified
MSEYFLGIDVSKGYADFIVLDNNKNIIEKNFQLDDTFEGHQQLYGFLSSFISNKPNANIISAVESTGGYENNWVNLLTKLQKDIPVRVARLNPFGVSHSSKADLKRVITDKISALTIAEYLINHRSKICFVEEDYFAALRKQWIFIKLLVKQKVQLYNQLESLVYSLNPELLIFCRHGKSKWVLQLLKKYPSAALLAKAPVSSLTKIPYISAQKALVLINNAKSSVASVSDKISCSLLKAIVEQIISLDKTITKQVKLLENICCLPEVELLKSFNGIGTYSAVGLMLEIRAIQRFPSAKKLASFFGLHPVYKISGDGIGGIHMSKKGRKEPRLILFNIARTAINSNPLLKEIYIKHRKNGMTGLAAIGVVMHKILRIVYGMLKHNTKFNPDIDRLNSSKTIKPVVKQLVLKHRRYQSFDSSAPVSRKQNKKREEQIKPHNG

SEQ ID NO: 180586 - protein, 343 aa, unidentified
MQQKATVLGIDLAKRVFHLVAMDDVGHVVLKKRLTREALLPFIAQFSPVVIGLEACGGAHYWARQFRAYGHTVQLIAPQFVKPYVKSNKNDPADAEAICEAVTRPTMRFVPIKEVEQQDLQSLHRARERVVKARTALGNEMRGLLAEYGIVLPQSVTKFRHAFLATLEAERAKLTPLSTELFGQLYEEFGVLEKRLAYYTDKIAAIGAAHPVCQRLMTIPGIGPLTATALVAAVSNASAFKNGRQFAAWIGLVPRQHSTGGKPRLLGISKRGDVYLRTLFVHGARATLRWLRLKTDRRSTWLRGLMDRRGKNKAAVALANKNARIAWVLLTTDQVYSAEQAAA

SEQ ID NO: 180587 - protein, 391 aa, unidentified
MELMDPAGRRLTGVRLPEGVAGMARLHAMVAGQLGDAGDAEVVAGIETGRGLWVQALIAAGYTVLAVNPLQASRYRERLTVSGARSDAADAHMLADMVRTDSHQLRPVAGDSPDAGAIKVVARAHKTLIWDRTRQMQRLRHTLLDFFPAALQAFEDLDAAGTLELPARAPDPASAAKLTTAQISAALKRARRRNIAEKTAVIKASLRAGHLRQPDPVAAAYAATVRSQAAILTALNEQIKIMQGQVEAHLGQHPAAEILLSQPGPGLIPGARVLAESGDDPHRYAGTRARRNYAGTSPITRASGKKKTVTARYVHNDRLTGALTARAFTALTASPGARAYYDQLRAREISHRAALRQPASRLAGILHGCLKTGTPYDEATAWPQHSGTLAA

SEQ ID NO: 180588 - protein, 447 aa, unidentified
MMGLCTGSKPNTIKEALLLMKFKQSDGQNQRIERITTSHLVVGIDIAKDTHVAQATNFRGIVLSKRHLSFSNTIEGFEKLMRWVEGIGQKNSLKGLIIGMEPTGHYGLNLANWLSDKGISVVMVNPATTKRNKENRDNCQSKNDPKDALVIADVISREFYYEYSRQAVVFQRLRTIMSDREYWVTNSVRLQNRIIRWIDIHFPEYFSVFKDWSCKRSMATLKEFPFPQDIESLSVSDVITSWKKHMQRAGGSTGLQKAAQLISQAKRSVGDTTAVNEAKQDLKRLLEEFERNSEILDRIEKDLKELLSEIPIADQLRSIKGLGSICTAAILSGAGDLRQYVHGRQLLRKAGLNLAESTSGKRKGQIILSKRGDAALRKYLYLATIQLVGNNPVFQKLHENNVQVKHMKKQQSVFKLLGKLARILISIVQKGETFSPEIAAPAFMQAA

SEQ ID NO: 180589 - protein, 323 aa, unidentified
MKTTSNRHIASNERNVGIDIGKSSLDLCIYEVDVYQQFPNTPEGIKALTKFLARYHLTRILVEATGGYERALVEACVEREWPVIVVQPIQVRQFANAQKLNAKTDKIDSHLIAQFGAVLQPEVRPLNSKKVRYIRDLLARKRQLNECRVQELNRQQKAPLAIAKSHARLIKVLDKDIEWVNSLLAKAVAEVSEWQQTHEILSTVPGIGDGVIFTLLGELPELGHLTGREIGALCGLAPFNRDSGAMKGRRRIKGGRAPIRTVLYMAMLSAIQCNPVIKTFYQHLVAQGKHKKVALTACMRKMMTILNAMVRDNHRWQEKEIMA

SEQ ID NO: 180590 - protein, 424 aa, unidentified
MKVTYQTCCGVDVHKSFLVATIVKTTGDIEPSYQKERFSTFNNSILEFKQWLLDNDCHDVCMESTGKYWVPVFNLLEDDINVVIANPKWVKAVKGNKDDTKDSKWIGDLFRLGLVKGSYIPCKKVRILREYTRYRYKLVSCRSSEKNRYQNALTVCNVALDSVVSDIFGKSSTSIIDYLLEQSGSSINHEEIASKLLRSLKSKEDAVIESVEGYQMTDAQKYRMRLVRAHMDYITAEINDVDKMIENMISSNTDFENAVQFLCTIPGVKRDSAITIISEIGTDMSQFSSSRRLCCWAGLTPGSNESAGKKKSVRITRAGVYLKPALVQCAHAAVKSDKSPYYKKKYESLVKRRGKKRAIIAIARMILTAIYQMLSTGEQWNPSDLYKIDMPVALVEKQKAKAIKQAKKLLQREGLLPPDEPFAS

SEQ ID NO: 180591 - protein, 400 aa, unidentified
MDKKKRYIHFCGIDVAKRKHVFCVIDREGQTILRPRSFTNDKEGYQRLLQSLKNIGLSHTIMLGMEATAHYWYSLHHFLVRHGYHVAVLNPIQTAQQAKKGIRKRKTDKLDAFHIAALLKNGEYKAALMPGELGMTCRQLTRLRCRLVQQTASLKQLIWSRLHPVWPEYEDLFKNPFCATGRKLLYTAPTPGDVLSMPQENLSELIRRASRGKYAQVQAKKVWHAAANSAGMHRSLEGARIGIRTLLTQIDAVRPIREKLEQEIAHLAKGLPAYIFSLPGIDPIRAVSLFGETDPITTFERPDQLVAFAGLDVSVFQTSQYEASYRHISKRGSPFLRETLWNMAFQAIYQEGEIRDYWLRKMAGGLKHKAAVTATSIKLCHITWRILTDKRDYLPEGRPN

SEQ ID NO: 180592 - protein, 347 aa, unidentified
MRFYTRQHKHYCGIDLHARAMYVCILDQSGTILVHKNLPPTPAAFLRIIALYREDLVVAVECIFTWYWLADLCAKEGLAFVLGHALSMKAIHGGKAKNDKIDAHKIAVLLRGGMLPQAYVYPAEMRATRDLLRRRCHLVRQRAELLAHIQNTNSQYNLPEIGKKLAYKANREGVEDHFSDPSVRKTIEVDVALLDHYDKVLREVELYITRTAKVHDGQTFSRLQSVPGVGQILALVILYEIQDIARFPRVQDFVSYCRLVKCAKESGGKRVGTSGKKIGNVHLRWAFAEAVVLFLRHNQPGKEYFTKLEHKHGKAKALTVLAHKLGRAVYYMLTRERAFALNRFVTA

SEQ ID NO: 180593 - protein, 371 aa, unidentified
MMNVTTFAGLDVHARSIKAVALDVVTGEVRSATFGYDACAVAEWIRSIDPGARCVYESGVTGFDLQKKLSSLGVDCVIGAVSKMIKPAADRRRKNDRNDAEFLARMLSVGNIVEVWVPDDECEAARDLARALDDAREDLRRQKQRLSKFLLRHGLVFDERTPSGQRKGNWTGAYWSWISSISFAEKADNDAFAFYVDAVRQAEEDKRRLEKLVADEASRPRWKKRVDSLRCLKGIDVMTAADIVFEAGEFARFRNARSFAAWLGLTPSEHSSGEKVAQGGITKAGNKHLRRVVVESAWHYLSASPHSKGPAPGQAPDPAARRHASKGVRRLVGRRAALLERAVHKNKANVATARELACWCWAVGSMAEGAR

SEQ ID NO: 180594 - protein, 352 aa, unidentified
MGESWSSRPYIFSEPEQLLGLLKPAFVQGRATEEEAMGERSVFVGIDVAKAQLDLAQRPEGPRLSAANTESGIATVVAHLRRVKPTMIVVEATGGLERPLVRAVVDAALPVVVVNPRHVRDFAKATGQLAKTDALDAQVLARFAQAVRPALRPVPDAPTQELAALIARRRQVVEMLTAEKNRLEGTPKRVQKRIQVHLNWLTTELARADDDLDQAIRTSPIWREQEDLLQSVPGVGPVVTRTLLAELPELGTLNRKQIAALVGVAPLNRDSGTLRGKRMVWGGRAQVRAVLYMGAIVAARFNPVLRMFYQRLRAAGKAKKVALTACMRKLLIILNAMMKHRTPWRPEMAQCA

SEQ ID NO: 180595 - protein, 354 aa, unidentified
MSQNPNAGIAIVGIDIGKNSFHIVGLDQRGAIVLRQKWSRGQVEARFANMPPCLVGMEACVGAHHLSRKLKEFGHDARLMPAKYVRPYSKGQKNDFRDAEAIAEAVQRPTMKFVATKTADQLDLQALHRVRERLVSQRTGIINQIRAFLLERGVAVRQGQRFLRAELPRILATPPNVLSPRMVRIIENLAGDWRRLDERVQNLSDEIEAVARQDAGCERLMSVPGIGPIISSAMVAAIGTGDGFSKGRDFAAWLGLVPRQMSTGDRTILGKISKRGNRYLRVLFVQAAWVVLIKPKSWERHGLKSWIEAAKKRLHPNVLAIALANKLARIAWGVLARGRNFEARTNTNATVQAA

SEQ ID NO: 180596 - protein, 357 aa, unidentified
MNEYIAFDSHKHYTLMERQNAQTGRTVQQRLVHQPGALCAGLRGCAAGTAVAVEATGNWYWIVGEIEQAGLRPLLVHPRKAKLMMGLINKTDALDVHGLNRLQQNGTLPTVWIPPASLRDLRELTRTRLVLVASRTKLKNRLQATLAKHGLSLAASDPFGVRARAQWTPHLAALPEQTRFVTGQLLEQLDFLQQQIATQEARLKALLQVTPAMQRLTSLPGFGLILATTVALEIGDIHRFATCEHLASYAGTTPRVHSSGDKTRYGRLRADVNRYLKWAYIEAANVVSLKQKPWATRHVAQLYQRIRQRRGHAKAVGAVARHLAEASFWVLRRDEDYREPARPGKEVSQPGSSATTA

SEQ ID NO: 180597 - protein, 404 aa, unidentified
MWYAGIDWADDHHDALVIDEKGRQVGSLRVSHTSQGLTKLNTFLEHIVGTASKEEMACIIETTHGLLIAHLLEGGWPVYPVNPRTVDRRRSASGAKTDTIDAYLLAKTGRADFADLHRLIPDSEKIAELKMLTRDQDALIHMQTRLVNQLTACLKAYYPVALDLFTKLQQKSTLRFLQSYPTPQSAMAASEAQLQEVLRQAKHPNPKLVAAQIFQQVHQPHLQADAVTARTKARLMLVLVNQLLPLLEQIAQYDREIDTLFLTHEDHEIFASLPRAGQRLAPRLLAEIGDDRSRYRDASSLQALGGTSPVLFQSGMYSKAHRRLGCIKPLRNALHQFAWQSTQSEAWARDYYQRKRAEGKSHTVAVRALSNVWVRIIFAMWMDHRCYESAIFERAQQQHARRAA

SEQ ID NO: 180598 - protein, 410 aa, unidentified
MSERPYAFYVGVDWASETHQFTVLTPERRLEAERRIEHTGRALGEMTDWLTALADGEPARIAVAIEVPRGPVVETLLVRAFHVFAINPKQLDRFRDRHSPAGAKDDRRDGFVLADSLRTDRPAFRQVHVDDPLLIQLRELSRAEEELQTELRRLSNRLWEQLQRFYPQVLRLSPAVDEPWIWALLQLAPTPVAARALRRATLARLLARHRIRRVTAATVLAELHSPALRVAPGTTEAAREHIALLLPRLQLLHEQRGRCARRIEQLLDALEGSDAEHRDVTVLRSLPGVGRVIAATMLAEAARPLAERDYHAVRTQGGVAPITRQSGKSVLVRMRYACNHRLRNALYHWGRVSAQHDPSTRRHYRALRQRGHGHARAIRGVIDRLLVVLMAMLRTGTTYDPARRRVPAAA

SEQ ID NO: 180599 - protein, 394 aa, unidentified
MILVGIDIGKNKHTFSIIDKNSGEILLSPSDFSNNLKGFLFLIPKLSSYTKSKLLIGMEDTGHYHFALLKYLLDRRYTVALINPTTTDLTRKLQGGITKNDPLDSLTICDVISSNHRNKPYRVTKLNRFDLYEQKQLTRHHHNLKEELNTYKNRLQKCIDIVFPEFNSLFHSKYGIVYMNILKAFSSAKAIANADIRSIRKCFEFKGQGKRISLSAEQLKLTAKSSIGIPSVAEEIQIRHLVSQIELLEKQLSEIDKRIEEFSLKNNSPILTIPGISHFSGTSIISELGDICNYTKASQIIKFAGVAPYHYESSQFTAHHTAITKKGSKYLRKTLYQIILPVISNNEVFHAYYTKKLNEGKGHRCAQGHCIRKLLRVIYHILSTGQPFNPELLV

SEQ ID NO: 180600 - protein, 354 aa, unidentified
MSESIGRIGRRSGAHSHPAARSPARVASRRIAADRDGLARLVFELGDEVKACLEMMSGALWVRDELVACGWQVEVADARKVKTVAPLAAKTDKVDARLLAELSRRELVPGLWLPSLDERALRERLRRRMHLVRLRTSAKGRIFGLQTQWGVRVSLARLRRADGLSLLERAGVPEVWRRSVDECLALIDFLDTRIAPLDAELRPFAQADPRAVLLDTIPGVAELLALTMAVEIGEINRFTRPEKLVSYGRLAPRVRQSGDGRARSGRLSKSGSRLLGWAAVEAAQQAWRESNPWHELYLDVGRRSRHTNAARAAVARKILIAAWHMLSRNEPFKPAPRTTAGTSVPASSRLALAA

SEQ ID NO: 180601 - protein, 387 aa, unidentified
MTIVSEKYQFVIGIDTHSKKHVLCLINNLGQKLAVYSIRVLEKDFKRMLKIIKDRTNHRPILFAIEGTSSYGETLTRFLYSQDQVVCEVKPPRVKSRSGIGKTDLIDAELAARSVLMADINELINPRIGINHKALRILFAKHNLLSKQLTMNKNALVALVRSYDIGIDARKPLSLLEIKTISRMRVRSASQEDSPLSQSNLSKISNINNARDVSKMNKARSSLDKTTQVKILVTQQAIYLAKSILKLDQDITNNKKEMELIIKEIASELLLEFGIGVVTASQFLCSYSYKGRIKSAAAFCALAGTNPLPASSGNVTRHRLNRNGDRALNHALDVVARTRMRSDPETISYTQKRIEQGLSKREIKRSLKRYIARSIFKKLEKLNLGID

SEQ ID NO: 180602 - protein, 279 aa, unidentified
MRKSLADDGRTGETRFYGTIRNTGDAILRLTKNLSSNGVTPTFCYEAGPCGYGICRLLRKLNYECAVVAPTMIPRKVGDRIKTDRRDAEMLARLWRAGELTPIWTPNEEHEAMRDLIRTRKQAVDALKVAKQQLLSFLLRHGLRFDRPSRWTKIHWRWINELRKFKYPHQQFAFEELKRAIRQIEERVSSLDQIIADAIPSWYFGPVVDSLRALRGINTTIAVTLMAEIGDISRFSNPRQLMAWLGLVPSEHSSGNKVRRGRITRTGNALARTMMVEAS

SEQ ID NO: 180603 - protein, 385 aa, unidentified
MSQPKDDLSRSLVALEQHRTLIAVVELSLTTWLVGGVIPGIERDPLKKLVPDEEGLLKLLHRWRDEAIKAGHRITRMVVAFEAGRDGFWLARWLRARGIEAYVIHPTSIAVSREQRRAKTDRLDIGLLRRSLLGWLRGETKHCSMAAIPTLEEEDAKRPTREREQLIGKRTGIVNRMKAALIRLGIRGFNPKLRKAPEQLVTLRTPEGCPIPSNTLAELMREMAHLRFIDEQIKQIETARIEQLQQAPQARSNAKVLQLARVHGLGIETADMLTHEAFSRDLRDQRAVARYAGLTGSPDESGRRRREKGLAKAGNARVRRGMIQFAWRFLIHQKGSALAQWYQASVAAGKKRKTVVVALARKLLIALWRFLTRGDVPQGLILRPA

SEQ ID NO: 180604 - protein, 283 aa, unidentified
MELHTIGIDLGKTVFHLVGVNLRGEVVVRKKFSRKQLLHFTANLRVKLIGMEACGGAHFLGRALQEQGHEVRLMPAQYVKPYVKTNKSDYIDAEAIAEAVGRPRMRFVPIKTDDQLDLQSLHRVRERWVARRTAVINQIRGLLLERGITLRKGRCHVDAALPGILEDASAKLSGALRVLLAQLRLELAHLETRINEADAVINKTAGENEACRRLVAIPGIGPVTATAIVAAIGNGAAFRKGREFAAWLGVISRLTEVENRSCHSVYAVFESSKPVQKLLAKSW

SEQ ID NO: 180605 - protein, 346 aa, unidentified
MKKIFIGIDFSKEKFDATLIQAEGLKECAPDVHEVFDNKTSGYRRLVKWVKAHAEGFTADMWLFCGENTGGYSIALCNYLYASGYDMWLECAYNIKHSVGIQRVKNDKADSHAIAEYAMRNYDKMIPYKPQSSSLNALREVFLYRHSLVKQKVALQVRRQEKRLTQESSDIKTFMSFTSKHLLTEVNKAIAKCDQKIKEIIASDDELREVFDIVTSMPGIGVQNATCLMVYTDNFQKFDYDSRKIGCYYGIAPFGRQSGSSINGKPRVSPFANRMIKSLLSQAALAAIKTDIDIYNYYQRLTQRGKHPLLIHNNIKNKMLHRLVAMVRNRQKYNPDHIYRNAKEAA

SEQ ID NO: 180606 - protein, 421 aa, unidentified
MQVLYSRCAAIDVHKDQVTVAVRTPGDGPGGRQTEVRKFRAFYGMLTEMARWLVSLQVTRVAMEATGVYTMPVYHALIEHGRFEQVLVCNAAHVKNVPGRKTDAVDAVWLAELLECGLLRGSFLPEPKIKAMRDVVRYRKKLVGSRTSELQRLGAVLQDAGIKLDSVASSIGTVSGRAMIEALIDGERRPTALADLALGRMRSKIADLTLALEGRFDAHHAVMCQLHLEHIDHLDEMIARLDTQVEQMMVPFARQRDLLVTIPGIGPTAAAAILSEIGANSDEFFADGPHLASWAGLCPGNHESAGKRKHGTPRKGNQHLKPILVESAWSAVRTDGRLRARYHRLVLRFGGYRNPAAKKKAVVAIAHTLLVIIWNVLASDTNYADLGADFYDRRNDPERETRRLVAKLEALGHTVTINPAA

SEQ ID NO: 180607 - protein, 321 aa, unidentified
MLYVGIDISKKTFDAGVLLKSAISNKQFSNEESSFKEFLAWTKSFNDRILFCMEATGIYSLALAKYLCKHKHQVIVVNPLKTHAFFKMELSRNKTDKADAGAIAKYCKFLDDNNQVEKNLFQPKSKNFETLQFLVTRLEQLTKVKTQENNHLEAGVSTIVIKSVKRIVLLINKEIANVENDIQKLVDEDKQLKFNVELLVSINGIGKKTACAIIAYLGDISLFSNSKQVVSYAGLNPRIEQSGSSIDKTSLSKQGNKRLRKALYMPAISAKQYNPLMKKLYDRLLAKGKIKKVALCAVMRKLLVIAYGVLKSGKPFDPCHQ

SEQ ID NO: 180608 - protein, 344 aa, unidentified
MIIIGCDFHPSWQMISWLDTETGETGERKLMHATGEARQFYSGLAGAVRVGLESTGNSHWFVDLLTELGHEVWIGDAARIRASQIRKQKTDRRDAEHILHLLVKDSFPRIWTPSREERDQRQLLIHRYKLVTLRARVKNELQHLALNQGMQKGRSLWSKNGQKQLLDLPLQFWAGTRRKNLLELLKQMDQQMVVLDQAVKKAAEENEKARLLMTQPGVGPITSLAYVLTLGDVTRFRRGKQVASYLGLIPREYSSAGKQHLGGISKQGNRFMRMLLVEAAQIAVRFDPGFRNEYLHRCHHKPKGVAKVAAARKLAVRLFWMLRTNTPYPEVVRIESSSRVPLAG

SEQ ID NO: 180609 - protein, 448 aa, unidentified
MSHPPEAPARSMPNVEAAAFDWYVGIDCGGATHQVGVLDAHGARVGERAVAHSGQALTAFAAWLHELAGPSLARVAVGLETPHGGPVALCLEHGAAVFTINPKQLERFRERASAAGAKDDRRDAFVAASALRTDRAAFHRLAPEAAALVQVRELSRVSDELREEAARLSNRLRAQLERYFPPLLAVVPAADEPWLWALLTLAPTPAAAARLSERRLTRLLRDYRIRRLSAADVRALLQAPALPVAPGTTEAVSAHVALLVPQLELVTRQHRACLAQLEAALTALAGPGDDPPAAAPPNADGAAGPGPGGVDGLGTVVRLLGSLPGVGVGVAGVLLAEAAPALLAGDYHALRTHGGTAPVTKQSGKQRLVVMRHACNQRLRTALFHWARVSIQHDSAAHRYYATLRARGHSHARTLRSLADRWLRILTAMLTTGTAYDASRFAVAAPTP

SEQ ID NO: 180610 - protein, 404 aa, unidentified
MSVHVAPVTSSTIVVAVDVGKTSAVFSVSDAGRQRLVAPAEFAMTGSGLTATVARVMAAAPASVQVKLGVEAAGHYHRPVLDHRWPDGWEVLELNPAQVAEQRRVQGRRRVKTDVIDLEAITELVLAGYGRPVTDRDVVIGEVSAWAGHRTRRVATRSATKNQLLGQLDRAFPGLTLALPDVLGTRIGRLVAAEFADPARLAGLGVNRLIRFAATRDLQLRRPVAERLVAAARDALPTRDAVIARRILAADLVLLADLDEQIQSAESALELLLPRSPYATLTSVPGWAVVRVSNYAAALGDPARWPGPRQIYRASGLSPMQYESAHKRRDGGISREGSVALRRALIDLGLGLWLNEPAAKNYARGLKDRGKHGGVIACALAHRANRIAYALVRDHATYEPTRWA

SEQ ID NO: 180611 - protein, 405 aa, unidentified
MAVMIGVDPHKASHTVTAIDETETVLGELKVRSGANQVERLLGWAAQFEERTWAVEGAGGLGYLLAQQLVAAGERVLDVQPKLAARVRLLSNAATNKNDPNDARSVAIVALRSPKPVAVHAEDHTAVMKLWAKRHRDLARHRTRMACRLHAVLCELVPGGYSGEIYASRAEKLLGELETQGAVATARRELAVELLSDLRRIDEQMRDTKKRIAQAVTASKTTVTEIFGVGPIVAAIVIGEVGDVARFTSSDRFAAYNGTAPIEVSSGPRKIYRLSLRGNRRLNHALHMAAITQIRYGHSEGRAYYDRKTAEGKSGKEAIRALKRRISDAVYRQLQLDARQAREVTAMGSGGQAGNDSVASVTGSHPESRLFGEATPEPATTLRPAAIAHRSRTSRTSPRSVKRAS

SEQ ID NO: 180612 - protein, 356 aa, unidentified
MSRDVKYIGMDVHKEAIVIAVLNGSGKLVMESIVETKASSIRQFIHGLRGELHVTWEEGTWASWLYDLLKPHVHEVLVCNPRRNALLKEGSKSDKVDAHKLADLLRTGMLRPVYHGENGLRTLRELARSYQTISKDLNRVMNRLKAVYRGWGIACAGTQVYAPRYREEWLAKIPHAGVRRRAELLYQQLDGLQSLRRTLRPELLAESRKHKAAKLLRQIPCIGPIRAARLLALMQTPHRFRSKRQLWTYSGLGIETRDSAQYRYIRGQLQRSKKPQQIRGLNENHNHEMKEIFKGAATRASCGVGPLRDFYVALLDKGMRPEMARLTLARKIAAIALTLWKKEERFDAEQLKPQAA

SEQ ID NO: 180613 - protein, 350 aa, unidentified
MPRKFDTAVVTIGIDPGKNTMHLVGLDARGEIVLREKVARTKIVSRLANMPPCLIGIEAGMGTHYMTRDLLALDHDVRQVPPVYAKPFRQTHKNDFRDAHAVAEAVQRPTTRCVPPKTDEQLDLQALHRVRYRLVGQRTAIINQIRCFLLEHGITVRQRLHWLRHALPDILAQRTDVLSPRMVRILEDLAQDWRRLDDRIEAVSGEIDALSKNTEPYRHLMTIPGIGPIISSAVVAAIGDGAAFTRGRDFAAWLGLVPKQISTGDRTILGRITKRGNRYLRMLFLQAARVVLLRPRNWMQHGFGPWLAAAAQRLHHNVLATALANKLARIAWSVLAQHREYEARLRVAAT

SEQ ID NO: 180614 - protein, 350 aa, unidentified
MRDTILAIDLGRYKSVACVYDRGTREHTFRTVDSTPDGIDRLLARSPGAVVVVEACANAGWVHDRAVAAGHEVKVANTAAESWKFKHLKRKTDKDDALRLAELEAIGQLPTVTLPDPPTRQRRLLITARQELVGRRVRCQNRLRGLFAGVGLSSRVGAAAWSADGLAEFEREAKPLAECGADEVWRGLVHLALTEYRDVVGRIADVEAKLDELSAADTGTQLLQTIPGVGPRTAEAVSAYLGDASRFASAKQVGAYAGLVPAQYQSGVTDRRGRITRRGPRLLRKLLVECAWCSLRYNPWARAVYLRLSRGGVSRKKPAVVALARKLLVVCWAMLRSGQPWREAEPAAAA

SEQ ID NO: 180615 - protein, 353 aa, unidentified
MPVYVAVDFHAREQTISWCDTAAGEVHRTKLRHQHDDVRKFYEQFKGEVIVAFEASGYSAWFEQMLAELGHTVWLGNAAEIRRKAPRKQKNDRRDADLMLDLMLKSDFPRVHTFSTASRTVLRQLRYRHKLVKVRTIAKNSVHAIGINAGLPLRGRLLTQTGLEQLQALPLSPVLSQQRDEWLALIRLMNKQIGAVEESLAQYAKDDEAVELLRTHPGIGLLTALALRYTLEPIARFTSTRSVVGYAGLDCVEEQSSERRRMGSISKQGSRLLRFLLNEAGQTAVRKDPQLKQFYRRLLRRRDKPKAKVAVARKLLVRSFIMLRDQIDYAEFVRRGVAARVARETHSPKVTDL

SEQ ID NO: 180616 - protein, 427 aa, unidentified
MSVTQNEKIRQVTDTTMVIGVDIASELHWARAFDWRGLELGKTVKFENSAEGFNFFLRWVSELTVEQKKDSVMVGLEPTGHYWFTLAAHLQGGDFKLVLVNPYHVKRSKELDDGHPSKSDKKDPKTIAKLVLEGRYVYPYIPQGLYAELRVAMNCRWRIRKELASLQNQIQRWLKIYFPEHSKVFGRFTGAGSMALLHSAPFPSDLISLGVEGISGIWKQMKLRGIGRKRAQRIYEAAQTSVGCTTGMEAARMELPILLEDYDAKLQQYERVMQVVENLCSQIPAVAELLKIQGLGLVTVAGLFAEIGDIRRFESPRQIQKLAGLAITENSSGKHKGPTEISRRGRSRLRAILFRAAIPLLAKNREFQLLHRYYTTRQNNPLQKIQSVIAICCKLLRVFYALATKDCAYSPEKVLADIQRNQPLKAA

SEQ ID NO: 180617 - protein, 388 aa, unidentified
MKIGRRKRCGKCRSCGKTKRRFSHSSLDLRSTLPTTPAAAVLPQTQLSFYSLCILGLQGETLSEGQLRTREAEVAEFFQALPSARVVMEVGTHSAWMQETIAGEGHEVVVANPRLMEGSKRRKRKNDRIDAKKLAGLGRVDPQSLHPIRHRSREVRQDLVVLRAREALVAARTELINATRGLVKSMGTRLPKCSSPSFGQKVKDVIPEKVREALLPLVQLADALSDCIQSYDQKIEELGSEKYGHTKLLRQVKGVGPITALAYVLTLENPEYFAKSRDVGPYLGLVPKQEDSGESQPQLGISKTGDTMVRKLLVGSAHYILGPFGPDTDLRRYGLRLCERGGKNAKKRAAVAVARKLAVLLHRLWVSGEVYEPLGYAASRAIVQPAAA

SEQ ID NO: 180618 - protein, 407 aa, unidentified
MKLLIGLDWSKDHHHVCFMAANGSQQASFEIPHTVEGFARLDAERAKFGVSAKECLVALETAHNLVVDYLWSRQYQVYVIAPAVVKGSRGRYGASGAYTDASSAFLLADLLRTDLARFIPWRPDGVLTRQMRAKLSLIEALRCDINRWSNRLLAVLLRVYPHPVGLFSSLTTQIGLHFLIAYPTPQAAQGLSYEDFEAFCRQHRYPASRWPTLYAHLQSPRPEPDAAALLAYQDEVPFLARTLLSLGQHRLQLIREVKELFGQHPDHFIFESLPGAGDLLAPGLLVKFGDHRERFPNAAIPQALAGTCPYTKQSSKKRTILFRKACDHDFRRIAQQFAIESVKHSVWAATYWQEVYARCRSKSQAYRCLANRWLAIIWKMWQTRKPYDEAYHLKQRLLRRQPRSRKP

SEQ ID NO: 180619 - protein, 332 aa, unidentified
MEKNHYIGVDISKKTIDVAIYKKEKAGKAVLCEKFHNSPNGFKDMKRWLRKCGVTLAESLFCMEATGHYTYELCLFLEQQKVVYSVQSPLHLKRSFGLAHGKSDKVDAYRIAYYAYLHREDIKPSQLATNSIRKLKALMAERKSLVVEIARCKAQLNESGSHSSSQGTIKRTKELLEFLETQVIELENEMVESINSEEELKSNYQLLLSISGIGIVNAVNTIIATHNFKMFDNARQYASYIGVAPFEHTSGTSVRGKTRVEPGAKMLKADLTGAVRTCINHDNEIRKYYGRKIAEGKPYGVVANAIKFKLLLRMFAIIKRGTPFVKKADHLI

SEQ ID NO: 180620 - protein, 401 aa, unidentified
MEPHLCVGIDVGCKAHRVGIARPDGSILEEFDISHNDVGFQEFFRRVEAHRQRMDLPVAVAMEGFNGYARPLDRLVLDNQYRLYNVNNMKLAQFKKIFPGPAKTDAIDARKILELFILKEHLPMAKDALQEVTVAPAVNDKLKRLSRRRRHLVNERVRVINCMQADLQAVCPELLAITHSVSNVWFLRLLTFRNDLRQLARLRHSTIHQIPGVGEKYVGIIREWQGKARFSGEVEYVGPMIIADARRILELRAQIHALDEAMAKLAVDSEIARRLSTIDGFGKTSTAELAGEIGTQRRFAAEASLALYLGMSPLTHQSGKMSTTRSPRQVNRRAKAAMMTAVAHHIRCVPQSKAYYDRKRAEGKTHNQAVRALGRHLVRVIWAMLRDGRDYEIREDTHPVP

SEQ ID NO: 180621 - protein, 343 aa, unidentified
MSGVVTIGLGLAKSIFQIHGVDDAGRTVLRRRLSRHELVPYFAKISPCLIGMEACSAAHHWARELSRFGHSVRLIPPQYAKPYVKRNKTDAADAEAICEAVARPNMRYVPIKTLDQQSVLSLHRVRALFVRQRTAAINTVRGLLTEFGIIAGKGIGRIGELRHRANEADGEVLPDEARAAITEVFEHIDALTERIDATEAKIVAWHKSSEASQRLASAPGVGPITASAIVASVGDARQFRSARHFAAWLGLTPRLHASGGKEHIGRISKGGDRYLRALLIHGARAIVGTSFRKGIPPRLWLKQLLARRSVNVAAVAVAHKTARALWAMITREEGYRRIAVQAA

SEQ ID NO: 180622 - protein, 351 aa, unidentified
MGIIGGLDVHRAQITYDYIDTVSGEVRRGKIRPALREDVRAWAERFGGEADVAFALEGTTGWLYVVDELRRSGIEAHLAEPADTAAMRGPKRRAKTDGADARLLCNLLQAGRLPESWIPPPHVEQVRVMVRLRKALLEERSAWYQRLQAKLFHHGLPSLGALSPEDRWTWFERVDLPPASRQVVAVAPRSIDRSTAEMAPLDAHIHWIARRQPGCKALDRGIYGVGPLTAVCIWAELGDVRRFGSSRRAVRHTGLDITVHSSDGKRSPGHLSRQGPEVLRWALYEAAMCAARTGSPDHAYYLDVKARQGSGRAHLSQARRIARRAYHVLLELGEEALAPAPEPPLQHTEAA

SEQ ID NO: 180623 - protein, 409 aa, unidentified
MQIVHQHCAGLDVHKKSVYACAIWPGEKGEKKQEVRSFGTFTADLLKLADWLREHGMTHVAMEATGVFWRPVWAVLEGQFELLLVNPQHIKAVPGRKTDTKDCEWITDLLQHGLLRGSFVPPSEVQDLRDLTRYRAELRQAQNKVDNRIQKLLEQCNIKLSAVASNTLGVSGQRMLAAIIKGEDDPAELADLAQRKLREKIPQLRLALAGKVRDHHRFLLKEYLDEWKALRDRIARIEQEIDRRMGPFEGAVALWESMPGVDHTTACNLVAEVGVNMAQFPSGRHLASWAGLCPGNNESAGKRLSGTMRDGNKWLRRALCQAAWAVTRKKDCYLSAQFRRLAARRGAKRAVMAVAHTMLIIGYAMLKTGQSYRELGGTYFEQINKDQLQKYFVKRLQRLGLTVSVAPPA

SEQ ID NO: 180624 - protein, 428 aa, unidentified
MTVKDCTNVKEFWQLKKEIRGSKDHLIVGIDVAKDDHKAFFGTANGKTLLKRLIFKNDIEGFEKLLAHVKEMKLKHSLDELVLGLEPTANYHKPLGDFLIKCGHMVVFVSGVSVKRNRELLDGRWDKNDTKDSANVADLISQGKFMYYEYAPLLLKDLRGLLSLKRRLKKQEHGLRIRIRNSLLAQYFPELDKYYSKWEPEILSVVRWCLDPSVIAGLEYDQFVSLVSPGSKNIRQQGRLEWIWKKAVDSIGCDAGEAAEFEAKVMVEELRHIREIIKETDAKIKNVCVRYPEYNYLLSIPGFGPDISSKVLAAIGNPFRFNSLSQVLKMAGMDLNANRSGKSSDTAVPVISKKGSPHLRYALYQAAFIASCKNKYFIRYYTNTLRGREREKGIKTKMRVKLAAKMLVIAWTLMKKREPFDPGYLKID

SEQ ID NO: 180625 - protein, 338 aa, unidentified
MTEITTIGLDLAKNVFHAVCCDAHGKVIKKKMLKRSGLLTWFANMPQSLVGVEACASAHHWARELQSQGHQVKLIPPQYVKPFVRGNKNDYNDALAIAEAVVRPEMRFVSIKTPEQQDIQALHRLRERRLRDRTALCNQLRGLLAEYGIVFPRGVNVLRKRIPEILEDGENGLSDFFRGMLSRSYQQLTELDEHIASYTQSLEVLSRQDDACQRLRTIPGYGPIISSAFYSAVGNGSAYRRGRDVSASLGIVPRQHSSGGKEVLLGISKRGDRYLRSLLIHGARAVVIQAVNKEDRLSCWINKIRATRGFNKAVVALANKLARIGWAVLAKNTVYQAA

SEQ ID NO: 180626 - protein, 349 aa, unidentified
MRSFQPPADTRFYAGVDLHARSLYLVVLDRDGQTRFGRNLPAAPEPFLRAVEPFRDGLLVACECVHPWYWLADTCRDHAIAFVLGHAWAMKAVHGCKTKCDRKDAEAIARLLKGGNFPPAYAYPQERRGLRDLLRARLRLVRQRAELYGHVHTARRQANLPPVSSDVKYKSKRAAITADIADPFVRRRVETHLALLEPLDTTIRRLEAEIEEAAQAFYPTELAVLQTTPGVGLVLSLTILLEIDTIDRFDTRQQFCSYARLCGAVQESAGQRTGAGNRKAGNAWLKWAFSEAAVLGAQKDERIGALLQRLASKLGKAKALSALAHKLGRAFYHMLHTKEVFDVQRFVRH

SEQ ID NO: 180627 - protein, 321 aa, unidentified
MLKTERPAAAIQTNLAAIFVSMELSRSTWLITAVLPGNGEKMSKYPIAAGNIAGLFDLFSKLRERSRAKTGQSYPIITIQEAGLDGFWIHRALVKEGIESHVVDPASIATPRRHRRVKTDRIDGEALLRVLLAFKRGEPRVCSMVRTISREDEDRRRIGRERKALMVERVAHVNRIKGLLFSQGITDYEPVYKNRRQRLEELRTGDGHTLPRHMKAQISRELDRLELVINQIKIIEDERDALIAAQTADSKKPAPVTMLLEIKGLGAEFANTLWSEGLFRHFDNRRQVAAYAGLAPTPWQSGSIDRVKAYQRRAIQDCEQR

SEQ ID NO: 180628 - protein, 344 aa, unidentified
MDVMIGVDPHKGSHTATMLDRGEHELRRIKVRVGVRQVSQLLEWADGVTARTWAVESAGGMGYLLSQQLVAAGETVLNVPATLASRVRVLGTGQSSKSDPNDARSVAVAALRAPSLAVVRRADHITVCRLLVKHHNDLGRWRNKLCCRLHALVGELVPGGIEKEVVLNQARSLLEEVEPDDAAAVERHRQAVELIDELEHLDVVMRDSRTRITTAVAASQTTLTEIFGVGPIVAGMLIGYSGDPTRFTTSSRYAAYTGTAPVEFSSGGRITHRLSRRGNRRLNHALHIAAITQIRHPHSPGRRYYDRKLTEGKTPREAIRSLKRRLSDVVWRHLVADARRVAAR

SEQ ID NO: 180629 - protein, 374 aa, unidentified
MCERAVLTNRPSLNLSPIVLEGHRACRGAWDRSGVFLNPNSCKGLEPVPSKEGSWMMAQNDLVVVGIDVAKDKVDAHIRSLSCGRTLPSTAEGRRQLTSWLRRHKVGKAVMEASGGYERDWARALRAADIEVRVVDPKRVRSFARSAGRLAKNDAIDAEMIAWFAETFSEAPGQVCDAAREKLVQMVNARQGLLDLQTRLQNRDEHAEVGAVQKMHERLLKKIAHEIARLEAAIVALIKATPHFAELAGIIESVPGLAATTSAGLIAMMPELGQVNDKIIAALLGGAPYDDDSGKRRGERHIKGGRRRIRNAFYMACLGASTQHNPVLKAFYRRLIAKGKEPKVALVACMRKLIVILNVMIARRQKWDASLHNV

SEQ ID NO: 180630 - protein, 413 aa, unidentified
MDVVYPRCCGLDVHKRNVVACLTVPGVDGQPRKEIRTFETLTDDLLKLADWLVEQEVTHVAMEATGVYWKPVWNLLEGSDLHLLLVNAQHIKAVPGRKTDVRDCEWIADLLRHGLLRGSFVPDRPQRELRELTRYRTSLVRERSAEVNRLQKTLEGANIKLGAVASNIMGKSGREMLTALVEGASDPAALAQLAKGRLREKIPQLERALVGDLGPHQRFLIAQQLAHIDFLDETIERVSQEIAARVRPFEEEIARLDTIPGIDRRGAETLVAEVGTDLNRFPSADHLASWAGMVPGNDESAGKRRSGKTRKGDPWLRTFLVEAAYGAGRTKDTYLGAQYRRLAARRGRKKAAVAVGHSILVIAYHVLLRTVTYEDLGPQYFDERDREGIKRRLVRRLEDLGYQVTVEVAPVAA

SEQ ID NO: 180631 - protein, 366 aa, unidentified
MMGWMAPLRHLSAKMLGVESPADGEPSMSEITTIGLDLAKHVFQVHGVDANGATVVRKRLRRVQVLAFFSRLPRCLIGLEACTTAHYWARELRTLGHEVQLMPAQYVKAYVKRNKNDAADAEAICEAVVRPTMRFVPVKTPEQQAAVLLHRGRERLVRQRTGLVNALRAHLAEFGVVAPQGLRNVGKLITIVRDESDARLPDLARQVLAVLAAQIEQIEAAVAALEKQLMAWHKSNAVSQRLATIPGIGPIIATAIAATVVEPSAFRSGREFAAWLGLVPRQNSTGGKTRLGGISKRGNQYLRRLLINGASANLLRSKLTNADPWVIGMRRRRPSLVVAVALANKTARIAWAVMHRQEVYQRMAAA

SEQ ID NO: 180632 - protein, 388 aa, unidentified
MGRKSRQRLSIVYPDCAGIDIGSREHWVAVDPDRTAQAVRQFGSFSDDLQALADWLSGLGVQQVAMEATGVFWIPLYEVLDARGFEVHLVNARATRQVSGRKSDVLDCQWIRQLMAHGLLRSAFRPSDGVCRLRAVVRQRTTKVQEQARCIAHLQKALTQMNVQLDQVVSDLTGKTGMAILRAIVAGERNPQVLASLRDRRLRADEATLARSLHGNWREEHLFGLTQALEHYDFLSAQIERCEAAIQAALGALPRRTDQKVKSTKRMPGGGRTAGQQAVCHQALFGMLGVDLTAIPTIALDTALVLASEIGPDLSRFPTSEHFCSWLGLAPPTRITGCVFRSKPATDSSASRPPIPIDAGHPFRRKPAGIPGKPATLPAMSATPVLRP

SEQ ID NO: 180633 - protein, 442 aa, unidentified
MAMRKREDSPEVFPNAAGIDIGGSSHWVAVPAAAAEDPVREFGTMTDDLHAMADWLLACGVDTVALESTGVYWIPVYEVLERRGLTVWLVDTRQLKYVPGRKSDVMDCQWLQKLMSLGLLRAAWRPGDAVCVVRAVARQREVLLAEQGGWVQRMQKALVQMNLQLTEVLTDVMGMTGQAIVRAIVAGERDPKALAQHRHGRVKASAAEIERALTGNWREEHLFVLAQALAMFDSLAQRILECDAKIEALLVPLGRHEAELVGPGKRLGKNAPHFDARAALARWAGVDLTRINGLSVTTVMTILSEIGPDLSRFASIKHFCSWLGLCPGTKISGGKVLSARTRRSANRVRQALKLAAMSLSRNDSALGAFYRRLCARMDKPRANTAVAHKLARMVYFMLTRGEAFVDQGQQHYEEQQRQRSIAALRRRASALGFQITPDTKTA

SEQ ID NO: 180634 - protein, 428 aa, unidentified
MNTNETPVGTADQYAAFIAIDWADQQHVFSLQVAGQTKKETGTLEQKPEVIGPWIAQLRARFGGRAIAIGVEQSRGALLHALLGYDFLVLYPIHSTTVAKFREAFKSSGAKSDPLDTDQILLILTKHLALLKPLRPDTVATRLLARLTQDRRKVVDLRTTHIQALLAGLKEYFPQAIELFNGNVTSRLAADFLKKWPDLPAFQAAKPAVLKKFYYGHNVRTPEVIEKMLQLAATAQPLTTDPAIVESGRQLSRLHSQVIQTLNASIAEYDERIAAVFASHPEAKIFTGLPGAGAALAPRLLAFFGTDRTRFATASNVQCFSGIAPVTKSSGRSKVVHFRLACPKFARQTFHEFARLSVAQCQWAANFVEYHTGRGKKYQAVIRALAFKWIRILTQCWKNRTPYDEQKYLADLKKRGSIFATLHLEKKS

SEQ ID NO: 180635 - protein, 350 aa, unidentified
MRTAISVLGIDIGKNICSLVGLDGYGKVVFRRRAKRETLLALAAKFPPCIVAMEACCGAHHLGRVFAAHGHEVRLMSPEYVRPYVKAQKNDDRDAEGIAEAATRPTMCFVDLKTQTQLDLQTLHRSRDRLVGERTALINQLRAILLERGIIVAKGKRNLEKFVAGLLESLEDHGLSDRMRALIADMGTQWVELDRRIRAFDAEFAAFLRQNADAQLLATIPGVGALIASALVAAIGAGETFEHGRDLAAWLGLTPRQATTGGKPKLLGISKRGNRYLRKMVIHGARSALPHVAEYDAPLGRWLKGLLARVPKNVAVVALANKLARIVWAVLRHKEAFTLKGKPPEAIAAA

SEQ ID NO: 180636 - protein, 338 aa, unidentified
MTLYCGIDLHSNNSMISVIDDNDRLISEKRLDNDLNTISHHLLPYQNDMTGVVVESTYNWYWLVDGLIDKGYPVHLANTLAIQQYNGIKYTNDATDARFLAHLLRLNILPTGYIYPKSQRHVRDVLRRRLLLVKQHTAQLLSLQSLIGRHTGQRLTSHQVKQLTTDSLVRYFDDAASLFSARHALLLQQQLKAQIEEIEAFVLSTCQRSEHYARITSTPGIGKILGMTILLETGPIERFVQVGHFSSYARCVPSDKISNGKSKGKGNTKNGNRYLAMAFIEAAHYACIWNPVIKRYYQRKCKKVPLMVAKKAVANKLARACYHMLKDGTTFDVARAFG

SEQ ID NO: 180637 - protein, 404 aa, unidentified
MLDQAWVGVDVGKEHHWVVAEDSQGRVVLSRKVANDQQEIVQVLQDAAGLAQRLVWTVDLTTVEAALLLAVLWQGGQRVQYLSGRAVNQAAAGYRGEGKTDARDARVIADQARMRRDLPALRPSDGLVAELRMLTARRADLVCDRTRALNRLRQQLTAVCPALERAAEVTRQRGWVVLLTRYQRPAAIRRAGVARLAARLVADGVRAGTAQAIAQAAVAAVRTQPLALPGEAVTGDLIAELASQVLDLDARIATVDAAIKQRFGRHRLAKVICSMPGFGFRLGAELLAAIGDLELVDSADRLAAYAGLAPVANDSGKRTGRRHRPVRYNRALRRALYLSALVAIRCDPAARAYYQRKRAEGKRPIQATICLARRRTNVLWALLRDNRTWQPEPPVKTNHPAEAT

SEQ ID NO: 180638 - protein, 343 aa, unidentified
MTHYVGLDVSQKLTAICIVDDTGRRVWRGQCTSDPEQIERVVRRHAEDDARIGIETGSMTPWLVHELRGRGLEVTCLDARHARAALKMQINKTDQNDAEGLAQIMRTGWYRSVHVKSFDSHRARALLGARVQLVGMTTRLSNHIRGVLKTFGLLPGSMRGVPFDRRVEALLVDRDDVSPIIRPMLVAWRQLRQQVATFDKAVRLLVKSSPACRHLIGVPGIGVLSVLAYVSMIEDPARFGRSRSVGAHLGLTPKQYQSGEIDRSGRISKCGDMLARTLMYEAAVVLMTRVKRACGLKEWAQAIARRSGAGKARVALARKLSVIMHSIWRSGEPFRWSEQPAAA

SEQ ID NO: 180639 - protein, 353 aa, unidentified
MAIFIASDFHCKYQKVAWMDSTDGELHIADVHHQDVNEVAQFFRQFPAGSILGMETSGYSHWFEELVVGLGLELRIGNSQVIAGKRPRRQKNDQLDAEHMLCMLLENRFPSIWRPTPENREKRVLIRQRCRLVKMRTQLINALRALVYNHNLHLKRGQLSKKRRRQIADLAMSPILDQQRREMLGLIEQLDVSVKAKEAQIEQWARQDQAAARLLTIPGVGACTALTAVLILGPVGRFPTAKKVVSYIGLACSEHSTNNGYQKRRYGQISKQGNKLLRWLLTEASGTAIRTDVQRKRYYARLKYRKDWRVAKTAVARKILVCIYVLLRDGIDYPEFLRRGPGFGMPAETAGRK

SEQ ID NO: 180640 - protein, 350 aa, unidentified
MELHTIGIDLGKTVFHLVGLNQRGEVVVRKKFSRKQLLYFTANLQVKVIGMEACGGSHFLGRALREQGHEVRLMPAQYVKPYVKTNKSDYIDAEAIAEAVERPKMRFVPIKSDDQLDLQSLHRVRERWVMRRTAVINQIRGLLLERGITLRQGRRHIDAALPGILEDASAKLSGALRVLLAQLRLELDHLQMRIDEADAVINKIAGDNEACRRLVAIPGIGPVTATAIIAAIGNGAAFKKGRGFSAWLGIVPGEYTTGGKQKLLGISKRGNSYLRRLFVQGARAVLQQSAKQSSGLSAWLAQLTTRTHSNVAAVALANKLARMAWAVLAKNEPYRPPMLAGAATECLACR

SEQ ID NO: 180641 - protein, 410 aa, unidentified
MRFYTTPHRYYCGIDLHARRMYICVLDAEGQIRVHRNGPATPEHFLTTIAAYREDLVVAVECIFTWYWLADLCAQEGIAFVLGHALYMKAIHGGKAKNDKIDAHKIAVLVRGGMLPMAYVYPREMRATRDLLRRRCHFTRKRAELLTHIQNTASQYLLPTLGKIAYHGNRVGVAEHFRDPEVRKSVETNLALIDEYDRLLTELELHLTQTAKVHDVNAFYRLRSVPGIGKILALVLLYEIHDIHRFPRVQDFVSYCRLVKCAKQSDGKHYGYSGTKIGNAHLKWAFSEAAVLCLRKNPPAQRYVARLAHKHGKGKALTILAHKLARAVYYMLRRGQAFEVTKFFSGTAGGDRLPRAPRMAAAPAGNDLDGGRYLDPPDIKRRGARRRRHERDGVTTKRVVDAAARVAEER

SEQ ID NO: 180642 - protein, 419 aa, unidentified
MQAIIERCCGLDVHQETVVACLLVGAPGAQPTKEVRTFRTVTRDLEALRDWLREAGVTHVGMESTGVYWRPVYAVLEGHFELIVGNARHMRNVPGRKTDVKDSEWIADLVRHGLIEKSYVPPQPLRELRELLRYRRKLVESQAAERNRLLRLLETANIKLASVASDVFGVSGRAMLRALIEGEASPEAMADLARGQLRRKRTDLILALDGRVEEHHRFLLAVQLRRLEAIEADIAALDLRIGERLEPYSAPHALLMQIPGVDWVVAAVLIAEIGVDMSVFLSIYHLSAWAGVCPGSYESAGRQKSGRARKGNIHLRAILVGAAMSAARTKGSYLKDKFHRLKARRGALRAALAIAHKILVCAYHMLAKNLPYRDLGEAYLDQIGQTRTVANLKRRLERLGYRVILEPNAPAQATPAPAR

SEQ ID NO: 180643 - protein, 420 aa, unidentified
MSKSTISETNFSANPENVFSSDARLGNRVADDTYPLERNAPVGVEPKYFIGIDLHSNNIVYCVLKQENGQPKKIKSGKVSCNNTAGIAAVGEALRPYCENVPHFAVVEATYNWYWLANLFESEGWFLRLADPCTVSQANLKYSNDHTDAAYLAERLRVHSLKTFPIMGQAYRDLRDLSRSLMVLKQDMARLKITVVNELVNHCSVRVRIDSLIRDPLKLVRGNEKKPGVYEKLDELLSKIVHEFVQLPGTHYMLCSQLRRIVRLTLEVEKLGEMLFEKMADSPTAQALKTIKGCGPVLSTIIATEVGDIRRFASAKNFQSYCRLAPTSKLSNGKSKGLGNAKNGSAYLSWAMTELATLMVRFNPEVGAEFQRLLARSGGLRVKAIRALAAKVSRAVFHMLRNGEVFDVKRCFAPRKADAN

SEQ ID NO: 180644 - protein, 340 aa, unidentified
MSLVLQPLLPFPDGCQGMSPHQQGRGTKMTEHCYGGIDVSKDRLDVMVLPDRKSFSVDNNAAGYSELVKRLRGLSIAAIGIEPSGGYERAVIRALLAADLSVRRINPNKLRQFGRARGVLAKNDRLDARLIAEYVAIMPTRVVQRDPATEQLAEVVTMRRQLCDEHVAVENQTAHLEDAMLRRLNKRRLARLAADILLLDRRMAQIIASNANLTRRYELLTSMQGVGPTLAFTLVALLPELGQMSRKQIAALVGLAPYDFDSGRLKGHRCIYGGRLPVRNVLYMAALSACRYNPALKVFHHRLAATNKKPKVIIVAVMRKMITTLNAMLRDNVAWQPKSA

SEQ ID NO: 180645 - protein, 416 aa, unidentified
MKLFVGIDVSSEKLDVCFLTDDNQLSILSEISVANDIEGASFIRETILEFNNSYHFDQIVIGMESTSMYSFHPSMFFHEDEKLKKLNTLVTIENPFRVKQFSRMFDENKTDRNDALRIADFLRIQRFTTSPIKEEKYMALQRLTRTRYQLIKQLIRTKQHFLENLTYKCNTLAREMRDESTSLFSATLISLMTEDFTLDELAELPLEAFCDLLQEKGKGRFKQPEKIAKAIQRAITMSYRLGALAQESINVVLSVLVREIRALEKNIKELDKAIEQVIVVIPEYQCLTSIPGVGKVYAAGLIAEIGQIERFEDQTKLAKYAGLSWKVNQSGNYQSQNTPLTKQGNRYFRYYLVEAANSVKNYLPEYKAFYQSKYKKVPKHQHKRALVLTARKFTRLVDTLLRKHQLYTPPRSVIEK

SEQ ID NO: 180646 - protein, 397 aa, unidentified
MYIVGIDIAKRKHEAAVIDGEGAVIIKPFSFTNNCSGYNRLLAMLTKAKLPLDEVSFAMEATGHYWLALFTRLQKEGFRVQVINPVQTNSIRSFYIRQAKTDPRDALLIAEVIRFGHFSESTLHPENIYELRELCRGRHAIVSMQADVKRKVVALLDQVFPEYETAFTNLFGDTSMAILQNCPTPKELSEMPLEELCHLIEVSSHKRFRMAKAQELQALAHNSFGFAMAGDVFSTMIRLYAKHLVFLKQQVQEMDRKIAEIMDTLDTPITTITGIGPTLGAYILSEIGDINRFSSAAKLAAYAGIDPTMRQSGEYNGVRNRMSKRGSPYLRHAIWLAASSAVLHDPALKLYFQKKRDEGKPYMASVGHACRKMVSIIYAVMRDNKAYTPYIPNEISA

SEQ ID NO: 180647 - protein, 360 aa, unidentified
MGNERTFVGLDVHARSVTGHALDAVTGEVWQRKLCPDPGEVLRWVSGLPGPVKVGYEAGPTGYGLYRCLNDHGTRCVVAAPSKLHRPHGDRVKTDARDAELLAHLLKLGEIVEVNVPSVEQEAARDLVRAREDARGDLMRARHRVSKMLLRQGIVYSGGDAWTKVHDSWLRGQRFDQQSRQLAYDSAYEAMVLTVDRRDRLDRAIDEMAANSSYTPVVRRLGCLRGISTLTGFALAVEIGDWHRFTGATIGAFVGLVPTESSSGQSRSQGSITKTGNTHARRLLVEAAWHHAKPYRVPGKTMRDRWELAPPAARVRGHEGNRRLHQRWQGFNARKKRPAVADVAIARELAGWAWSLAVLE

SEQ ID NO: 180648 - protein, 355 aa, unidentified
MNQEKYIGMDVHQATISVAVLDSSGKLIMECILETKAATILEFIAGLRGTLSITFEEGTSAAWLHDLLKPHVSHLVACDPRRNALLKDGSKSDRIDARKLAELLHANKLHAVYHGEHGVRTLKELGRSYLTITKDLTRVMSRIKALYRSWAIPCSGATVYAPRHRDEWLAKIPHPGVRLRAERLYQQLDVLQPVRQEARRDLLVESHKHHAVKLLRKIPSIGPIRAALLVALLQTPHRFRTKRQLWAYSGFAVETHDSGEYRFVRGKLVRNRERITVRGLNHNHNHDLKNLFKGAAQSATTRPGPLCDFYVALVEKGMRPTMARLTLARKMAAITLIIWKKGVNFDAKQLNRQAA

SEQ ID NO: 180649 - protein, 346 aa, unidentified
MDTHADAHVAVALDQLGARLEELHIATTQAGYDQLEQWAITFGQVDAFGVEGTGSYGAELARVLRRRGYRVIEVNRPDRATRHRRGKSDPIDAEMAARAVLSGVAAGTPKHADGDAEMVRMLKMAKDSAVKTRTQALNQIKAILVTAPAQLREALAGLSVGKLLDHCASVEPGELTTPTAVAQHTLRLLARRNLDLRAEVKALQADIARLATRAAPHLLDIFGIGPDGAAQILVTAGDNPQRLRSEAAFAALCGSNPIPASSGKTNRHRLNRGGDRQANATLHRTAVVRLRWHEPTQKYMTRRLAEGKSKAEIMRCLKRYIDREIYQVLCPTPRHGSAGKDLPQAA

SEQ ID NO: 180650 - protein, 421 aa, unidentified
MPDDRCRLGSDDVVIGLDLASAEHQAVVLTVAGQRLTRFRIPHTRAGLEELLRRTTPAALGRAGSARVFAFEATGHLWEAVAYVLRARGERYVVVNPLATFRVREARQLSREKTDLTDAEQIAELCRTGLVTRTQLEPRPYLALRRAWGEYVRLREERARLKVLVAHQLYGLFPEFLRVWADLLQPGALAVLRTGLTPAAMAALSLTEFVAQARAHGAGHRIWRLKLAQVHRYAEQTIACPDGLDVLAREVQRAVARMDMLTAHMTAVAAEIDIVLAELAEVPYLRTIPGLGWASVAGLLAHVGTITKYHHGRQLIKLAGTNPSRRDSGQTVGRGQRMSHRGRAGLREVLYLATLSCLQHNPRIRAHYDRLIQRADRPLPKMQALGACMNKLLLYAFAVMSRREAFQLDHDWQRTTMARVA

SEQ ID NO: 180651 - protein, 339 aa, unidentified
MEVTTIGLDLGKDVFQVHGITADGTVVFNRSIRRRQLLKFFETLPRCLVGIEACGSAHHWARELTAIGHDVRLMPATYVKPYVKRGKTDAVDAEAICEAVTRPTMRFVAVKSKEQQALLTIHRVRQLIVRQKTQMLNVVRGLLREFGYVIGNGPVAAMRFIKTFQADDDLDMPDVAKSMLKTLCEQVVALDERVVFYDKLIEYHSRIDERAKRIRTVPGVGPITASAIVATIGDGKQFKNGREFAAWLGLTPLNRSSGGKERLGRISKKGDRYIRRLLVMGMTSQVQRARGYPERVHPWIMQLLERKPVRLATIAMANKAARMIWAILTKDTYYRQAAA

SEQ ID NO: 180652 - protein, 389 aa, unidentified
MEARTLNHLPPAASHDGAVRCLLAIELSKKSWIVAVNTPLSNKISRHTLQACDWKGLLELIERIRTRVSQTFSRPVEVISCYEAGYDGFWLHRLLEAHGVRNFVIDPASVQVDRRARRVKTDNIDVGRLLRSLMAYLRGEPKVWSVVRVPSVTEEDDRRLHRERDRLINERVQHVNRIKGLCAVHGIYDYEPLRPNRLARLEQLRAAGKRELPPRVKAEIARELQRLELVLNMIKTIEAERDAIASAGKSSTHANAKKIQDLTRLKSIGPEIGTTLVGEVFYRQFNNRQQLGSYVGLTPSHFQSGPLSRDQGISKAGNPKARTVMIELAWLWLRHQPNSPLSIWFRERVGTAKGRIRRIAIVAVARKLLIALWRYLETGVVPTATVLKV

SEQ ID NO: 180653 - protein, 333 aa, unidentified
MEETGEYGEQELNHSDGEAERFYRELKERGVSVRVGMEATGHARWFERLLAELGFELWIGDPAEIKTKRVRKQKTDREDARLMLKLLRENRFPKVWVPSPENRDLRQLLWHRHRLVQMRTRIMNQLQAVAMNEGYRWKKKLFSEKGRALLEKLSLAPWASRRRKELLELLDQLDPKIAELTAAVEQEAKKWPEVLLLMTHPGVGPITGLAYVLVIGTPDRFPCGKQLGSYTGLIPCEDSSAGKQRLGHISKQGNTLLRFLLVEASQAAARCNPDWRRRYMHLMMRREKRIAKVAMARKLAVRLYWMWRKGWQYSQLAEFGSNAGKLGYVHGVK

SEQ ID NO: 180654 - protein, 345 aa, unidentified
MKRTTIGLDLAKRVFQVHAVDEQSGEIHREQLKRGQVLQYFANRQASVVAMEACASAHYWARQLVQLGHEVRLISAQFVRPFVKSNKTDAADAEAIWEAAQRPGMRYVALKSEEQQAVLGLHRLRQVRVRMRVRLVNQLHGLLGEFGIALPKGGQVMLKAAAQVLSETAVPAILREALLEQIQQIRTLSEQIKVLERQIGAWERRTEQCRRIAAIPGVGLLTATAAVATMGQASSFKSGREFAAFVGLVPRQSGTGGRVKLLGISKRGDRYLRTLLIHGARSVLNWQRQPGHELDPWLKGLLSRRAPNVVAVALANKMARTIWALLAHSRTYQRGYAGCTASGAA

SEQ ID NO: 180655 - protein, 356 aa, unidentified
MPVYIGVDFHTSQQTLSYLTTEDGEIHRCRLEHEPDEPRHENVRQFYSQFQGQVIVGLETGGRSQWFEDMLDELGHEVWVGDAAQIRALAVRKQKNDKLDAEHILVLMVTDRFPKVIRRSKPSCEVLSQIGYRHKIVKMRTMAKNNLQSIASNAGLNLRFRLHTERGRAWLEALKLSPSTDCQAKELIKLIDTLTVEVERVERWLAEQASGDERVTLLRSQYGVGLLTSLALIHTLEPVGRFANGRKVTAYAGLDPVEDSSNKRKHIGPISKAGSRILRFLLCEAAQVAIKKDEGLLRHFNRVTKRRNRQKAVVAVARKLLVRSFILLRDQIDLHEFRRRGVEARSSRKNAKHQIA

SEQ ID NO: 180656 - protein, 408 aa, unidentified
METIVERAAGLDVHKAQVTACARVPGRGRGRAQEVAEFPTTVRGLLSLHDWLNAHRVTQVAMEATGVYWKPVWAILEDEFDCLLVNARHVKQVPGRKTDVSDAAWLCQLLEAGLLRRSFVPPKPIRALRNLTRYRKAQIGERQREANRLHKILEDTGIKLDCVASDILGASGRSMLDALVGGTTDPQVLAELAKGKLRAKIPALREALVGYFDAQHALIVSAMLAHLDFLDEQIHLLSDEIEAQLAPFAGAVDLLCTIPGVQRRTAEVILAEIGTDMSRFPSARHLASWAGQCPGNDRSAGKRRSGKTRHGSKWLDTALTEAAMAATRTTDVYLAAQYQRLRPRRGHGRALGAVKHSILCACWHMLTTGELYRDLGGDYFSRRDPQRATRRLVAQLERLGHTVKLEAA

SEQ ID NO: 180657 - protein, 468 aa, unidentified
MSKRGRRNRKSDQGDARVRKFLEEVNLNAAGIDIGASRHWVAVPPDRTGDIVRSFGVHTRDLNRLADWLDACCVDTVAMESTGVYWIPLYEILESRGFEVVLANAQHVKNVPGRKTDVLDCQWIQQLHTYGLLRGSFRPSEEIVALRSLLRHRQKLLQGCAAHIQRMQKTLVLMNLQLPRVLTDITGVTGMAIIRDIVAGQTDPTVLARHRDKRCNASEQQFIEAMTGHYRAEQVFLLRQHLEMYDYHRTKIAECDLEIERQLADLQGRCDPPEQPLPPRRRRRSSTNEPDFDIRSPLHKMCSGVDLTQVPGIAPLGALTLIAELGTDMSRWPSARHFTSWLTLAPHNKVSGGKRLSSKTQPSANRAAAVFRMAAMANSRSDNAIGSYYRRLAFRIGTPKAITATARKLAVIVYSMLKHGTPYDPLAASAHPRKLAERRLRSITKTAAQLGYRLVPDPDSPATASAVS

SEQ ID NO: 180658 - protein, 373 aa, unidentified
MKKVRFLGLDVHAETIAVAIAEANGEVRSLGIIPNREEPIRKLVKKLGPSEQLQACYEAGPTGYVLYWQMTALGVKCEVVAPTLVPVKAGDRVKTDRRDATKLARSYRAGDLTAVWVPDEEHEALRDLVRAREVAKQDQLRARNRLSKFLLRHGRRAPAGIKAWTQKFQQWIKEQVHFEQPAQEFTLLDYLHEVEHMADRIRRLEQAIAEAVKLAPPKMQEVIQSLQALRGIAQISAITMVAELGEISRFEGARQRMGYSGAVPSEDSSGKRIQRGPITKTGNAHLRRIAIEAAWAYRHRPAIGLALRKRQEGLSEEVKEIAWKAQHRLHKRYRTLSAAGKEKQKVITAVGRELLGFIWAIGVQVERNHKRVA

SEQ ID NO: 180659 - protein, 307 aa, unidentified
MSAFVGIDVSKATLDVAILGRGGSRAFPNTPAGFRRLSAWLRPLAVERVVLEATGGYELAALEALHAAGLPVSRVNPRQSRDFARATGQLAKTDRLDAEVLARLAAAVPLTRWEPREAWQRRLAEWQQRRGHLVEMAGSERQRLERLSDAVLRRGAQRHIALLERELKLIDAEIARQVEAQPSLMALRSLRGVGPVLQATLACELPELGSLSGKAVAKLVGVAPMARDSGQWRGQRVVWGGRGQVRRVLYMAALTAMRHEPRLRDFYRSLRERGKAGKVAIVAVMRKMLVILNARMRDAMAGAPAMA

SEQ ID NO: 180660 - protein, 318 aa, unidentified
MANSTRLTAGIDTSKAKLDVAIHGQTRGCVFENNPAGWQVLQAHLTQEGVGRVGIEATGGYERGVTRHLQAAGFTVTVLQPLQVKAFAKLHLRRAKTDRIDAFLIAACTHLLDAETKMAPDPRFDALGDHLTYIEQLQEDIVRLKTRLEHSADERLRRLVTADIKRLQKRRKEELKRLQATLQSHVDLARRLDLVVSVVGIGAITALSIVVRLPELGQLSREEVASLAGLAPFVHQSGKRKGETHIGGGRARLRRAPYAAAQPASFRWNPALQALYRRLTERGKSHKSALVACARKLLVYANAVVQRGTPWTASLAAA

SEQ ID NO: 180661 - protein, 387 aa, unidentified
MPQPNDLSRSLVALDQNSTIIAVVELSQSSWLVGGMLPGIERQPCKKLEPSPERLLAVLHRWRDEAVKADRIITRIALAFEAGRDGFWLARWLAARGVEAHVIHPSSVAVSREHRRAKTDRLDTELLKRGFLGWLRGERGHCSMVRVPTLAEEDAKRPNRERECLVKERTRLVNRMKGTLARLGIRNSRPTLRKAAEHLAALYTPEGSPLPPNVAAELERDIARLGLVIGQIKQIEAARRQRLEEEPERGRHAMIRQLARVVGIGIETADMLVNEVLSRPLRDRRAVARYAGLTGAPDESGAKRREQGLAKAGNARVRRGMIPLAWRFLRFQNNSALARWYQARTADRRAGTRKTMIVALARKLLIALWRFVTTGETMEGVVLRPAG

SEQ ID NO: 180662 - protein, 387 aa, unidentified
MIKKRGRVVGLDVHPDSFAGAVVEGSDPANAQVLSTSTRVELERLEQWALRHTRTDDTLVLEASGNAFSVAERLRAIGRKAEILDSHRAGKVGKVYCANDRVDAVKIARIYLSALSPIVWQPDQKTLERREVFSAYQAVVKESTRAKQQLRSMLNEHCVRLEKGFRLCHPNAITRLLRLREWTPARTMLLQQLHGSLISARARRTLLRRHMAQEIVAEESLLRLTRLCGINLITLYGVVAAVGDVRRFAHSKKLVAYLGLNPSVSQSGNFEGGGALKRHGRGALRALLIQSGKKLLEVNNPLQKWGLAVAARRGRNKAAVAVARKLCVALWHVLMGHIVGALERLDMLETKLSKFATEMGPAALSALGYHNKADFVEKKLYVLRSYP

SEQ ID NO: 180663 - protein, 416 aa, unidentified
MRTKPTTIVTQPEVLYMSLELSASQWKLAFTTSLCQKPRIRNVPAGQLKLLQAEIASAKVRFKLDPSVPVISSYEAGRDGFWLHRCLVTMDVESHIVDPASIQVNRLKRNAKTDRIDAQKIVNALIRFKAGDKFACRMIRIPDNVHEDARHLSRELKSMKKERTAHVCRIKSLLVAQGCELAINRDFLKNLESTRGGDREPLGARLVGRLKREHERLVLVTEQIRELQKEQFALLGKARAEIAQTDPSYQDQLTKIAEHLVTLRGIGSVTAFTLSSEIFAWRDIGNRRQLAAFVGLTPTPHASGDLEKEQGISKSGRSDLRVLMIEVAWLWLRYQAESKLSKWYAKRFANGTSRQRKIGIVALARKLLVALGKYVSDGELPEGAQLSEKISAQYLTSLNSKAPRNKQQNQSIATAT

SEQ ID NO: 180664 - protein, 348 aa, unidentified
MKKLVAGADLHSNNVVIGIMDQDGKRVAQFRAENRLSEVVKLLAPYKKRLECVAVESTYNWYWLVDGLQALKYPVVLANPAAMQQYNGIKHADDTNDAFFLAELLRLKILPTGYIYNAELRPVRDLLRRRLKLIHQRTALVLSFKSLYTRTTGKEMSLGELKKLEVEAAQDLYDHPANQLIAGMQIQHIDQLTETTDKIEKVVLGNARDLPIYHRLTTLPGIGKILGMTITMEVGDISRFASAGHFASYCRTVQAQRTSNSKKKGDNNSKCGNKYLAWAFVEAANFARRYDPECRQWYDRKAAKTGTIIATKALACKLAKAAWHVMSAQVDYDAKRVFGHTDKEKMKP

SEQ ID NO: 180665 - protein, 352 aa, unidentified
MIVLGADTHKRSHTIAALSATTGELLGEQTVQSGAKGSAPLLTWARSLGAERVWAIEDCRHVSGSLERFLIERGERVLRVHSTLMSASRRQARGRGKSDSIDALAVARAALREGLDSLPAAHLDGPELDLRLLVDHRERLVRQRVAINNTLQWHLHDLWPEVQFPGSALFHGKWGPRIARRLARAEQTMRVRIARDELRRIRELTQTIKALEAEIGDLVAQIAPHLLTEPGFGPLTAAKLVGEIAGARRFATDAKLARAAGIAPIPVSSGKTNRHRLDRGGNRQINATIHRIAVTRLRCHAETQDYIARKRAEGKSTKDAIRCLKRHLTRRIWHLLQTPAPIPNQTPTPSIS

SEQ ID NO: 180666 - protein, 356 aa, unidentified
MLYLGIDQHARQITISLRDQTGDVLQARQVSTQPDKISAFFQQLVRERLQNGESFVVVLEVCGFNDWLIRMLQDHGCQKVILIQPDERKKRKTDRRDAAALSELLWVNRDRLLHGKPVRGLRQVDIANTTDQENRRLTTLRRDGGVARTRVINKIKQILRRHNRQWEMPTKTFPTVAAIAWLKQLELPEMDRLEMNHLLADLEQVEKRLKELEQVIARRCVASKETAILSSMPGMGGGFTAMSLACRVGNVERFPRAHSLANYWGLTPGCRNSGENDQRLGRITKAGSAMARWLLAQLVHKVLRRDARLREWFKRIKRRRGSTIARVAVMRKLATIIWHMLSKRKTYAECRELAAA

SEQ ID NO: 180667 - protein, 425 aa, unidentified
MNTKQNERISQVSSDTLVVGVDIGEEKHYARAFDYRGIEFSRRALPFSNSAVGFNVFYKWLEDMKERTGMKKVIIGCEPTGHYWFTFQKFLYDHKLKLVVVNPYSVNRSKELDDNSPEKDDIKDPKTIAQLVREGRYSIAYIPEGRYAEIREAQVCRDQIMKQHIRLANQIQAWLQQYFPEYLEVYKKFDTESGLLVLEQKPLPADIRKLGAEEIRQIWKDAKLRGRLGISRAQTLIEAAQKSVGLEGGEAARFRIRVLISDYRRKQEQLARVDEILQKEVMLVPNVEKLLAIKGVGIGSVAGFIAEVGDIGRFTDPKQIQKLAGLEITKISSGKRKGKPGISRRGRRRLRRVMFEAARALMQWDTAFSDLFLYYRTRIHHPLGSMQAKVAVECKAIRVFYAILKHGCDYDPEKLRRDIKRPVTE

SEQ ID NO: 180668 - protein, 354 aa, unidentified
MVYIGIDLHRKRSQVAALDGNGELLFNRRVATRPDELFKAIGDAGEEPVEVVFEATFGWGWLADMLAEAGIPTHMAHPLATKAISSARVKNDSVDAKTLAHLLRTNLLPEAWLAPPPAREARRLVRMRAGLVRIRTKLKNQIHAVLGEHGVEVEMTDLFGGAGRRLLSELRLPAVSQQRVEACLRVIEELTEEVAVADQQLKALFGQDHRLERLLPIPGIGITIAATIVAEVWDVSRFPSPDHLCSWAGLTPNEHSSADHVRRGHISKQGSRWLRWVMVEAAIHALRDPELREFFGRIARRRGSKIARVAVARRLLTLAYYALRSENGCRSYPVNPTTTVEARSLAVMASADGR

SEQ ID NO: 180669 - protein, 374 aa, unidentified
MREHSVAYVGLDTSKLHNAVAIAEAGRDGEVRYLGEIDNTTEATARLVRKLSAKHAHLTFCYEAGPTGYGLYRQLTELGHDCIVAAPSLIPRKPGDRVKTNRRDALSLAKQLRAGDLTPVWVPDPRHEAMRELTRARGAAQRDLQAKGQQVLSLLLRLGRHYPARKTWGKAHMKWLAGQKLEHLEQRLALEEMLLAVRQATDRVQRLEQAIRAAVPDWSLAPLVTALMALRGVDFIAATTLLAEIGDLSRFRTPRELMAWLGLVPSEHSTGERVRRGAITKTGNRRARRMLIQCAWSYRHPPRVGSDKLAKVAAAPEAVREIAWKAQTRLTARFRALCRAGKLDVVAITAVARELAAFIWAIARAVVPGMVMTG

SEQ ID NO: 180670 - protein, 418 aa, unidentified
MFKIFRKNCCGLDVHKTWIYACIGITDTNGRTEYKEARFSSFSEGLRKLDDWLTSYSCNEVCMESSGKYWIPVFNILEKNHSVTLAHPKYTKPQRGNKTDRKDAKWICDLFMCDMIKPSFIPPLTIRNLRDLVRYLRKLTNIVTGEKNRAHNCLTVSNLKLDDVFSDVFGKSALSITRHIIDHPGEYFDVAPFVDRRCKTPIKEIQAAVDGSISKEQSVKLRQCISHIEELETHKENIVTEISRIVEPFSNALSLLRTVPGFDSNPMTAITVLSEIGDDMTVFPSAKNLCSWAGCCPRNDQSGRKVKSTRISRAGTFLKPLLVQVANALVKSKSHTEFVERYRRIKARRGHKKAIIAICRMILTAIWNILKNNVPYTANGFKQKLPTHRSKILTTSQALQMLRTRGYVIKDSPAVLST

SEQ ID NO: 180671 - protein, 351 aa, unidentified
MEKYIGLDVHAKSCTAAIIDGRGKRLGSQVIETNRKSLVEFFKLQAGRVHLCLEEGTQSAWLTEVLRPYVAELAVTVPRQRRGQKNDELDAYTLAEQLRQGAFTIRVYQQVGPFGELKQLVKTHLSLVIDTRRVQSRLKALYRSRGIATAGQEVYAQSTRSDWLSQLPKSSLRSAEVLYSQYDALCEIRDQARRDMVRESHRFPITRILETCPGMGEIRVARLVSVVVSPQRFRGRRQFWSYCGLGVVMRSSSDWDQDPSGSWHKVRKPVTRGLNLNFNRMLKDVFKGAATTVLQQGGEEPLYSEYQRQTLRGTKPDLAKVTLARKIAAISLTMWKNEEKYDPKKRKQVLA

SEQ ID NO: 180672 - protein, 418 aa, unidentified
MTATDTNASTLLVAIDISKHRHEVLISVPGKKRRRRLTILNTLADFQRLSVSLASYDLPVRIGFEATGNYHRTLAHHLGQAGFELKLVSSVGLARTREALHNSWDKNDPKDAQVILHMLEIGAVQFFHDPMVVGTADIQELSKTHEIVSRSKTELWHRILTHYLPLYFPEAERFHRSSRTDWFLAFLEKYPSPHMISAMSREAFIADAWDVVGRKVSKEQLLSDIYATAVDSVGLPVHADSDAVRMFRLVLAEGRSLVRQRDIIEARAVELLSDLPDYQLLTTIPGIGPINAMTILAEAGDLRRFRHHRQFLKFCGMDLATVQSGMFRGQSRISKYGNARLRRTLWMAGQTAVLKRTNSFRDKFERYISKDRHNAHLRRKAYTAIAAKMARTVHAVVSHGEPYRPFFEGVSPGGRTSL

SEQ ID NO: 180673 - protein, 313 aa, unidentified
MLYVGIDIAKNKHDVTALNVPGKTVLKPLTFSNNKAGFELLDLSLRQLNQDCLIALENTGHYAFNLLNFLHEQGYKVYTYTPLLIKEFAKSLSLRKTKTDKKDAHGIALKLLSDPNREQFQHDNRQVELKILTRHIHRLKKKQSDWKVQYTRCLDIIFPELDKIVEKHSEYTYQLLTCYPNPQKRLEAGFDKLIEIKRLTASKIQDILSVAPRSIGTTSPAREFEIIKHYKRLIDKAETCVNDLMAEFNSVITTVTGIGNRLEAVILAEIRNIHAFDNPAQLQAFAGLDSSIYQSGQIDLAGRMIKRGSPHLR

SEQ ID NO: 180674 - protein, 402 aa, unidentified
MNCVGIDVSKGKSMIAVMRPFGEVVISPFEVQHTASELSELAKLLKSLDGETRVVMESTGNYHTPVAWLLHDAGLYVSVVNAMLVHDYGNNSLRRAKTDKKDAVKLANYGLDHWLTLPRYVPEEDTRLLLKNCYRQYQQYSKVQTMLKNNLISLLDAVFPEVNRLFNSSPRADGSEKWVDFVSTFWHCQCVSTLPLKSFSARYLKWCRKHGYYFSQEKAFEIHSKAQSCIGVMPRNETTKLLVQQAIAQLKATAAALAALKQEMQSLAASLPEYPVVMEMFGVGSTLGPQLMAEIGDVRRFHSKKALVAFAGIDAPPCQSGQMDIHSRSISKRGSAALRRTLFLVMGIYLQSAPLDEPVYQFMDKKRSEGKPYKVYMMASANKFLRIYYASVTAYLNTLARI

SEQ ID NO: 180675 - protein, 405 aa, unidentified
MPYILALDVSMGHSYSVLYKDDTCLFEDEIEHTQRGFHALLEEIQHLPERPLIVFEATGIYSRPVEKFFQDHHFSYCLLNPLEAKKQMEENTLRSWKTDKSDAHRLAQTHLKNQRQPKEVQSNFYLEMRDLAHFYQEIEKKITRLRMDLHNCLQLTFPELEQFFSNRLTPYALTLIRLFPHPDFVLASTRTKIKNKLINETRKKISANRAEQKADQIIHYAQCAYPAVEKDSIHCQKTIYYAELLQDLLEQKEALATQMIKKAEGSPCFLLYQTFPGIGALTAALLLGELGDITRFETHKQLNAFVGIDIRRYHSGKYTGQDRINKRGNPKARKIIFFTIRNMIRQQRAAPNHIVDYYYKLKKQPIPKKDKVATVACMNKLLKCMHAMVRAHTEYDYAYAVSVDH

SEQ ID NO: 180676 - protein, 345 aa, unidentified
MDHIGIDLHKRDSQICWLKDSGEVVEQRIRTTRERLVAVLGGAPPAQVLVEASTESEWVAQCLEGMGHRVVVADPGYAPMYPRRGRQKNDRRDALALATASRSGTYRAVHRVSAAQRAVRAVLTVRAQLVASRTRLIATARAVVRGQGQPVPSCSAEGFPAQVEALALPEQLRATLEPVVTALTSLTRGIEASEDQLVALTAADERVRALQSAPGVGPITAAAFVATVDDAGRFADAAQLTAYLGLVPRDRSSGEGRRSGRITKAGPARMRWLLVQAAWRLLRTKAAHGQALKRWGEGLVARRGKGIAVVALARRLARILFALLRDGTTFAIDHEAQRRTARTAA

SEQ ID NO: 180677 - protein, 333 aa, unidentified
MSSELFIGIDVSKDHLDIAVRPTAQCLTFENTDTGVDELIRTLLEFSPTLIVMEATGRYHQLALGRLVAANLPAIAINPRQSRDFARALGRLAKTDRIDAALLAEFADKVRPVLRSIPNSDTQELEALSTRRRQLMTMLIAEQNRHHSAPRSLRPGIKKHIHWLEKELEHSDKELKNRIRSSPAWREKEDLLSSCKGIGPVTTHSMLAYLPELGTFNRRQIAAIVGIAPFNNDSGKYRGRRSISGGRRQLRSVLYMAALVATRHNPTIRVFYQRLIAAGKLPKVAIVACMRKLLTMLNSMVRHNTPWRADYLLDRQDSLSWLRRAVCLDLWIS

SEQ ID NO: 180678 - protein, 402 aa, unidentified
MKASKQYLRFCGIDMAKQKHVACIIDQDGQYLLRPKSIRNDVNGFQQILNCLKQTGRTKSILIGMEATGHYWYSLHDFLTRQGYHVVVLNPIQTAQQAKRAIRKCKTDKYDAFHIANLLRTGQYKAAVVPGELAMTCRQITRLRYRIVKQGAMIKQLVNSRLHPAWPEYERLFSNKFGTTSMKLLQIASTPKELMELDPNDLSELIRKASKGRFGPAQTQKVLQSAKNSVGMQRGHYGISTGIKFLLEQIEALEPVRKKMDAEIAKLTTKIPEYLFTLPGATELTIVSLYGEVSPIETFKKASQLVAFAGLDPKVFQSGQYDAPRRRISKRGSPYLRRSLWQMAYRALITEGDLRDFWRRKHRQDKHHLVAVTAVANKLCHIVWRIMTDRRDYVRKGYNPKS

SEQ ID NO: 180679 - protein, 349 aa, unidentified
MQKYTRIGIDLGKNYFQIHALPVGGGAAINRKLKRSKFLEFFKQIEPCEIGMEACGSAHYWARELERLGHKVSLMPPIYTKPYVKRGKNDAVDAAACCEAMSRPDMRFVPIKTAEQQATLTLHKTREVLMKQRNMSINALRGHLAEFGLIAPKGAGHVRELIARAENDATLPKAIQQVVRIMARHIDALGKEIESLEQKIGQAAKRNALCALLDKIPGIGPLIASAIVAFLPDARQFETGRDFSAWLGLTPRQKSTGGKQKLGSITKQGNRYLRKLLVLAGTSLLRRIGDRTGALAEWAQRLRSRKSARLTTVALANKLARIIWAMLSTGESFRQESFLRVKRTPPAAA

SEQ ID NO: 180680 - protein, 360 aa, unidentified
MSTYYIGADVHCNTTELAVNKSGKIVARYAVPTTIPAISNILDSIQGKKHLAVEESPMAGWLYRNLNKKLDTFISSDPRRNKLIASDGDKDDSIDAAKLASLLRGGFLRAVYHSDDEQRVELKHWVSLYHDRVQDAVRNINKIRARCRMYGISIPRKVLRQTEHRGAWLYKLKKSALSKQLLMLWIGYDATAVQARMAKQHLINLSKKFPVIHLWKQIVGIGTIRAVTVFVYLDTPWRFKKKNKLWKYCGIGLQRTASGTDKKGRPKPARLQLPWAVNRTLKNAVLGAAQTAINQRDNAFKDYYERMVRNGVITSNARHAVARKLLTVMWAMWKTNSRFDENLLSESNSPTASTLDRQYL

SEQ ID NO: 180681 - protein, 535 aa, unidentified
MLLHKETVGMATKVKSGKKRTRSRSRKFRQAVLGKPDGVIQPRVQQVGPEHFGIVAIDCAKARSKWMLADFYGKVLIPPTTVEHQRTQLDLAICQLRQAREQHHLQDLIVCVEMTGTYHKPVWRAFRKAGFETRLVHPFASSHYRMPEHGDVKTDDNDLAAIFRAAVNGFGLIEKEIQEVYLEMQILCRHRRDLVNKKSKLQCQIRHHLEHCLPGFAALFDGDNLWTQATPIPLLKAIALRGGTPAAVTEAGQSGVTKWLKDASVRFHAKTVERVVVWAANAASHDAMTRSYTRVWQALLEDWQAKQQQIAALERDIASVLVQTPYLLLLSHPGINVISAAELGGELGPIENYASAKAMSGRAGLFPSRYQSDEVDRGGNLSRFRNGRLRRAWMMVAENMVKCNAYWRAKAAAWKAKGHDPRDIRCRIANRLTRIVFQMISGRRLYQHPSRLDRSYVMEKLLTYHREHNTPPHLIVRDLELAAKQIPASAYAEEAKPLQAAYEASCRSRRREPQPIGTLLVAVLARLGVVGLESE

SEQ ID NO: 180682 - protein, 339 aa, unidentified
MVIATMTTWLLGIDISKRKFDAALSMGGKFKTKAFPNTPSGHRALLEWLARYDADHVHACMEATGSYWEALATFLHDEGHRVSVVNPAQIHAFAKGLLTRTKTDRQDARLIARFCEAMKPGFWQPRPREERELFALIRRLDALKGMRDQERARLQEAHEAVADEIEGHIEGLERAIRELEERIRDHIDRHPGLRDKRDLLASIPGVGETTVHQILSRLSVLSLLGSAKQWAAYAGLSPGERSSGQRQAASSGMVRLGDARLRKALYFPAMVAKQHNPVFQRFAQRLRSNGKRPKQIVVACMRKLLHIMYGVLQSGQRFDPSCYGMAAHTITEMRVAGTR

SEQ ID NO: 180683 - protein, 365 aa, unidentified
MDTHKKEHHVALHYPGQEEIVRFTVRNTARDITKMVKKITKQAPGDVEFCYEAGICGFVLKRRIEAHDCHCAVIAPSLIPRKPGDRIKTDRRDALKLLTLFKAGLLTEIHAPDKQQEAARELTRCRQAAQENLKRVRHQLLKFLTRHGYLYSEGNHWTGKHLKWLRTLEFGESLLQDVFDNYFTEMQHCVQRLMSLDNQVETLARSEPYQESVGLLRCFHGIDTLSAITIITEIFDFGRFSSPGELMSYLGLTCSEFSSGEKQKRGPITRAGNKRVRRILVEVAWHYRHPCNISKALKDRRKGQPQWGIDIADRAGQRLRKRYRHLTHCGKMPCKVTVAIARELAGFIWSVCKEYEARRSVTKAA

SEQ ID NO: 180684 - protein, 409 aa, unidentified
MQQILRSCCGIDVHKSMIKACIAKGPLNKPPKIEIRTYSTMTSDLEKLCEWLKENKVEAVAMESTGVYWKPIFNILEADFPVSIANPKYLKKVPGKKTDVSDSEWIANLLRCGLIPKSFIPQKPIRELRDLNRTRRKMVENMASEKNRLQKVLEDANIKLTSVVSKVDGVSSMNMIQALLKQDEISREDIAAMVRGKLKNKIDQLVQALNGRLTDHHRYLLRLHLKQIAFLAEQIKELDDVIQKKMKPFTKESDLIQTIPGIGKTTAPAIIAEIGTDMSQFPDEAHLSSWAGICPGNNESAGVKKSGKIRKGDKFLKATLCEAAWSASKKKGSAYSAFYNNIAKRRGKKRALVALAHRILMDIFRTLKTGEPYVDEGAEAVYQRNSSGRQKSAIRFLEKSGYVVTKASA

SEQ ID NO: 180685 - protein, 413 aa, unidentified
MYIVGIDIAKKSHQAAIMKPDGTLVGRSFRFTNTKQGFEFLMDKLAAVDSSLENFEFGMEATGHYWLNLYTWLADKNATVHVINPLQSDALRNLYIRKTKTDSVDAKIIAQVIRIGQYSETKLADDRMLMMRDLCRQRFFLVDMVANLKRKIIVMMDRIFPEYQGFFSDTFGKSSTAILKHCTTPEEITLFGEDNLAQLLQVASNGKFGLKKAQELISLARNSFAARLSSKTLSLLVKQMMEQMELLQNQIEILEKHISSHFKSFGTKITQIPGIGPVLGASILSEIGDISRFANPKKLCAYAGIDPSVKQSGQFLGNENHMSKRGSGYLRRCLWMASFVSVNHCREITIVYKSQVSKGKTHFQSMGFVCHKLLNIIYTVLKNDIDYSPMLCINPTITARTSRRIARASLKAR

SEQ ID NO: 180686 - protein, 404 aa, unidentified
MYNAVGIDVSKGKSTVTVLQPGGTVIRKPFDVSHTSQNLNELSSYLESLDGDTKIVMECTGRYHEPILKALSEAGLFVSVVNPHLIKNFGSNTLRKVKSDPADARKIARYTLDNWAELRQYSSMDNTRTQLKTLNSQFSFFMKQKVAAKANLIALLDNTYPGVNKLFDSPAREDGSEKWVDYAYSFWHVDCVRGIGLKAFTERYQAFCKRHHYNFQADKPEKLFNASKELVAVFPKEKTYKLLLQQSIQQLNLASGHVERLRREMNELASTLPEYNTVMGIYGVGKTYGPQLIAEIGDVSRFTHREALTAFAGVDPGVDESGQHKSKSNRASKVGSARLRKTLFQIMTTLLQNAPEDDPVYRFLDKKRSQGKPYYVYMTAGANKFLRIYYGKVKECLRNLEQES

SEQ ID NO: 180687 - protein, 327 aa, unidentified
MRKLHPVGIDVSAKELVVASDCHREARFDNDPAGHKKLIRVLTKGGRGARVVLEATGVYSLDLAFSLHRSPRIEVMVANPRAVANFAKAYLQRSKTDPLDATVLLEFARRMPFTRWVPPAPEHLDLRALSRRIAALVKILQQEKNRLHAASRSLEMTALVREDVEANIGHLAKRIERLRDQALAAIGNHAPLRAAFEHLTSIKGIADASAISILGELVVLPADMTVRQWVAHAGLDPRHAESGSSLHKPARISKAGNKYLRAALYMPALVAIQHEPNVAAFYDKLVASGKTKMQANIAVMRKLLHAIFGMLKHGADFDGEKFYEINA

SEQ ID NO: 180688 - protein, 416 aa, unidentified
MDIVHTHCGGLDVHKKTVVTTIIVPDGQGGLRKETHTFETMTVELLALSDWMLSHGVTHVAMESTGEYWKPIYNILENNFEVLLVNAQHVKHVPGRKTDVKDSEWLAELLRHGLLKSSFIPPIGQRELRELTRHRTNFVRERATLVNRVQKTLESANIKLASVASNVMGVSGREMLEAIIEGKANASEMAELAKGRLREKREQLAKALEGRVKPHHQFVLAELLCQIDSLDETIARFDTEIEKYCRPFEEVVELLDTIPGVARRTAEVIVSEMGSDMSRFPTADHLAAWAGVAPGNNESAGKRYSGKTRKGNQALTSALIQAAHAASHTRSTYLSAQYHRLAGRRGKKRAIVAVAHSILVIAYHLIQRKEPYRELGSDYFDKRKPEATAKRLLKRLSQLGYDVSQVVQSLPAPHLA

SEQ ID NO: 180689 - protein, 343 aa, unidentified
MQQLYHYIGLDIHKRTVAFCEKRADGKTMDAGMFRAKRDCIQQWAAERSTPWIAGMEATLFTGFVYDVLTPYAVEIQVGHPLQLKAISCAKHKSDDIDAETLANLLRADLFPACHMASPLVRELRRVLRYRNFLVRQAIAMKNKTTGILMEVGVQYDSRRIHRQGYFYELLDNLEETPESVRELLRTTRCGLEMFQSAQKQLLEALKKHDHLRERVARLMSIGGVGEMTALTWALEIDTPARFSNLKKVQSYCGLCSGRNESAGKNKRAPLSKQRNAHLQTILIEAAKLAPRYNTQLAQVHAAAIERGYNRNRATCAVARKLVAYLMAVDRSGRDYEDRSATI

SEQ ID NO: 180690 - protein, 414 aa, unidentified
MDVLHQRCAALDIGKKDLKACVRTPNPDGRRSRRQEIRTFATMTNALLELRDWLVAEQVTLVVMEATGDYWRPAFYLLEDCLNVILVNAAHAKGLPGRKTDVADSQWLCQLGECGLLKASFVPPEPIRHLRDLTRYRTSLAMERSREAQRLEKELEDAGIKLSSVATDILGVSGRAMLTALIDGERDVHTLAEMAKARMRPKIPVLVEALTGNFGEHHAFLCRLHLERIDHLTETIAELSARIEEEMLPFARQLELLETIPGVGRATAEAVIAETGGDMGRFRTAGHLASWAGVCPGHHESAGKHKSGRRRHGNRWLNAALGTAAMAASRTKEKTYLGARYHRLVPRLGKKKALVALEHSMLTAVWHILTDNVPYTDLGGDYYAKYDPERAMRRITRQANVLGFTVRFDPIEAA

SEQ ID NO: 180691 - protein, 423 aa, unidentified
MNIVYPICCGVDVHKRFFVATIIISEGIEAKYKKKRFSTFNNDILKFKAWLLENNCRDVCMESTGKYWIPVSNLLEDSINVTIANPKWIQIVKGNKDDDKDSKWIGDMFRIGLVPGSFIPCKDIRILREYLRYRFKLVSCKSSEKNRYQNVFTVCNVALDAVVSDMFGKSASSITDYIVNSDTFDPEYCVSLLQKSLKKKADEVVASIEGFSMTDSQKTRAKMVKEHYDYLLEHIQKIDAAIDELVKPYESVIDLLCTNPGIRRHSAITVISEIGTDMSQFGSSKRLCCWAGLTPRNNKSAGKKKSVKIMRAGAYLKPALVEIAHAAVKDKKNPYYAIKYERILKRRGKKRAIIAIARMILTAIYHMLSTGEVWNPVDLDQVDMPPELREKEVQKQLRRAAKLLIDHGLISPDAIQIPESAPA

SEQ ID NO: 180692 - protein, 348 aa, unidentified
MKKSLKQVVGIDVAQKELVVTLGKLHEDLSIELYAYKVFSNKEKGFEALLKWVKKLTDDQTSVHYVMEATGVYHQKFAYYLDENKLNLSIVLPNKISNYMRTLDLKTITDKSCSEAIARFGLERQLNLWKRPKEVYKKLQQLTRERNQIVEERVMVKNQLHAEESEAEPNTGSVKRIKARIKLLNSQELEIKKEIDLIVAKDESIIKEIETICTIPGVGKLTAVIILAETNGFELIKNKKQLVSYAGLDVKEKQSGTSVKGKARISKQGNRNLRKAMHLPALAAIKHDEHFKEIFVRLVSKSGIKMKGVVAVQRKLLELVYILHKNKSVYQKQYEENKRGQPQVVATL

SEQ ID NO: 180693 - protein, 353 aa, unidentified
MIYTGIDYHKRYSVACTLDAQGHLLHEARIDGNAAAAFAAYFKHLGTPSEVVIEACWNWGVLHDLLEDTAGVAKVVLSHPAKNRIIAEAQIKNDGIDAHALATLLRGDFVAKVHVPSRDVRQRKNIIRQRLWLARLRTMIRNRIHCVVDRHPQLARPAVKDIFSNQGKAWMKRAPLPTADRKLLDDDLALHAVLQTQIDALETIIVADNAANPLAVRLQTLPGIGKILAPVIALEIDQIKRFHTADKLCAYAGLVPTTHASGGKISHGRMLPFCNRWLKWAFIEAAWVAVGCSDYFGTFYRKQRLRGKGANDAITIVARRLAKIAWKMLTDGRNYSPQAPVAKPISPAALITD

SEQ ID NO: 180694 - protein, 412 aa, unidentified
MEVMYPRCAGLDVHKETVVACVRIVEGGNVSRSVRTFATTTASLIELGEWLEVNGCTHVAMEATGVYWKPVWQVLADSSLELVLANAAQVKNVPGRKSDVNDATWVSELLAHGLVRASFVPEPAIQQLRGLLRTRKQLVREKASHVQRLQKTLEEANIKIESVLSDVMGRSGRAMIQALIDGESDPAKLAALAHWKVRASAATLREALHGRIKRHHRFLLRLHLQQVDALDAAIAEIDREADAGLACFRDAVKQLSTIPGVSELSAQVILSEIGTDMGRFASAAHLRSWAGLCPRNDESAGKRRSTRLRRGAPWLKAMLVQCAWAAARTKATYLHAQFVRLRARRGPKKAICAVAASILTAAYHMLKDGTFYEDLGAVHFDRRRPETQARRLIKRLAELGFYVELKPAAAVS

SEQ ID NO: 180695 - protein, 412 aa, unidentified
MQDLLDCAMGLDIHRDTIVACLLKGELDQKPEVELRNFGTMRHEMQKLREWVVETSCRYVAMESTGIYWQPIYETLETCFDDMHLLVVNARHMKNVPGKKTDMRDAEWIATLLRAGLLKGSFIPERSFRELRQLTRYRKNILSDVTSQKNRIDKFLHSAGFRLSAFISDIFGASGRNIMRHLCEHGSVDKAALDKCLKTQTRRKIDDILISVNGTLSIHQRNCLRMMLTYLEQIEVHKQEIEAAIAQEVENHSEALALLCSIPGIDVISGTAIIAEISSNMSHFPSAEHLCSWAGLCPGNNESAGKRKSSHITKGNRYLKSMLCEVAWVIAGKRKTYLSNWYWRIKQQKGAKRATIALARKLLVVVYAMLKTNTPYDEDIYEQRRLQCERKRASRLIHELAKLGYQVSPAYS

SEQ ID NO: 180696 - protein, 434 aa, unidentified
MEPQFAALIAIDWADREHVWAMEIPGQAKPQTGSFSHTPEAVDAWAAEWAGRFGGQPVAVALEQSRGPLVFMLTKYPHLVIYPVHCSTLANYRKSFRPSGAKDDPIDAQLLLDILARHRDKLRPLRPDTVQTRTIQLLVEERRKLVDQKTACTNRLTAHLKMYFPQALDWFGELGSPIAVAFLERWPTLSDVQKSRPATIRKFYSSHNSRSGGDYLDTRIEEIRKAISATNDEAVIAGYSAAVLAWAGLLKQLLLAIKNYDQRIQDLAKEHPDYALMKSFPGVGPVIAPRLIAALGSQRDRYDSAYQIQCYSGIAPVVSSSGKKHHVHCRWACPAFLRQTFHEWAQHSMVSSPWAREYYERQRKTGKGHNTAVRALAFKWIRILFRCWKDHVPYSELVYTRSSTRKKPQPKAGHAVEIKWENKTGMSKFTGFAT

SEQ ID NO: 180697 - protein, 335 aa, unidentified
MLKIGLDVHERNSALCVLDSDGQIRERIAVRGHPRRMLERLKRIQEPFEICFEASCNYGWLYDQLRRQADRVVVAHPGRLRLIFRSKRKNDRIDAERLAKLLYLGEVPEVHVPSIDVRAWRQLIVHRRRYVSNRVRCKNAIRALLRTYGISSPSALWSKKGLAWLQAVDLPTRTAELQREQLLDDLRHDSRRIERVQDRLDEIASSHPGVTLLLTIPGVGPRTAEAFVAYVDDPMRFRPKSIGMYLGLVPSQDASSDRNRLGRITKTGPSIVRGLLTEAAWQGIRNSPAIRAVFERIQGDNVQRKKRAIVATAHYLSRVMLSMLRSGETWRADMA

SEQ ID NO: 180698 - protein, 418 aa, unidentified
MPTCLYVGVDAHAKNNVCCFLDQQGRTVIKTFPIVNNLSGAKELENRIDLVMKEHCFDELKIATEAVSFLGLHLIDYLASSELLAKYSPILYQLNPKITAGFKKAHPDKDKTDTTDAFVVADRIRFGRLPEPYEDSQPYFPLKRLTRYRYHLICNIAREKNYFLTHLFLKYSAFLEIKPFGDIFGKAGLATITEFFSADELASMNIEELVEFLVKESKNRFRNPTAVAEKIKEAARESYKIGPALANSVNLILASTIENIRALTLCLKEINNAIAKEFKAFPNTLESVDGLGPVYSAGIFAEIGNVKRFSSQAKIAKFAGLTWRRYASGKFNAEETRMTKTGNQYLRYYLIEAANSLRVHNEEYRLYYQSKYKEVPKHKHKRAIALTARKLVRLVFALLTKNQPYQQKAEFSKNNINF

SEQ ID NO: 180699 - protein, 345 aa, unidentified
MQVITIGIDLAKHVFQVHGVDANDKVVFNKPLRRSQVLPFFAKLAPCLIGMEACASAHYWARELKKLGHDVRLMPAKDVKAYVKRNKNDSVDAAACCEAVRRPTVRTVPVKTPEQQAQLMQHRVRNLLVRQRTQAINALRSHLAELGIVGAQGYDGLKVLLSIIADSSDARLPENARACLSAIVEQIASCQAEIGTIEKRLLAQHRKNADSKRLETIPGIGVLGASAIVATVPDASVFKTGRDFAAWLGIVSREDSTGGKQRLGPISKQGDRYLRRILVLGAFAVIKRARAHPEKYPWLTQLLARKPAKVAAVALANKIARIAWAVLTKKEIYRVSPITATSVGD

SEQ ID NO: 180700 - protein, 406 aa, unidentified
MQVIYERCCGMDIHKKTITACMITPEGKEIRTFGTMTNEIQALVNWLKEHQCDTVAMESTGVYWKPIYNLLELSEIEAMVVNAQHIKAVPGRKTDVKDAEWIADLLRHGLLKGSYIPSREQRELRELARYRKSLIEERTREVNRLQKVLEGCNIKLSSVVSDIMGVSSRSMIEAIINGINDPELISERGTGRLKSSRETLEQALKGLVGPHQRKMLAVQLKHIDFLDAEIKGLDREVDRRLRPFEEDLELLETIPGVGRRSAECILAEIGTDMNRFPSDAHLASWAGMSPGNNESAGKRKSGKTRKGNKKLRSTLVQCAHAAARSKETYLASQYRRIAARRGGNRAAVAVGHSILIIAYHILKKHQPYYDLGANYFDERKSQSVLKNAVKRIESLGYSVIVEEKTA

SEQ ID NO: 180701 - protein, 423 aa, unidentified
MKSVAYAALIGLDWADQKHDVCLLVPGQSAPETLTLANTPEAIRDWLLQLHQRFGGRPVALALEKTRSGLVHMLMQSDWLVLYPLNAEAVARYRQTFAPSRAKDDPTDAELLLDLLAKHRDEFRPWTPDTATTRELAALGEARRQAVNLRTRLACRLISTLKSYYRQALELIGEDVYSPLALDFLTQWPSLPALQRAKTETVRRFYYAHNSRRADVIEERLQLIAAATALTTDAAIVEPARLTVQMLVEQLRALAVAIGRYETRQAALFAAHEDAPIFQSFPGAGPIFAPRLLAAFGSDRTRYDSARSIQQYSGIAPVTERSGNRCWVHWRWGCPKFLRQSFHEYANESIRHSLWARAFYESQRHAGKAHSAAIRALAFKWQRIMWRCWQDRTPYNEVYYLTMLQKRSSKLLKLIAEPAEQPA

SEQ ID NO: 180702 - protein, 320 aa, unidentified
MKNVLGIDVSKSKLDVALRLPDGKIRSKVVDNTPQGFQNLTTWLIKHGVVETHVCMEATGIYWEAAAEFLADAGHTVSVVNPARVKAYGAASQVRTKTDKVDARLIAQFCVAQHPDPWQAPSPAIRELRALVARRNALDTMRTQERNRLLVARNAVRDGIEAHLVYLRQAIDEIEAEIRKKIDGDPGLKAQYELLDSISSLGNKTIPLLLSYYGGEPRFGKAKEAAAFAGLDPRQHESGSSVHGKPHLSKVGHSALRKALYMPAMVAITKTDWGRAFKARLAAAGKPPMVIIGAMMRKLVHVVFGVLKSGKPFNPALHGA

SEQ ID NO: 180703 - protein, 341 aa, unidentified
MSTTFVGLDVGSSRCQQTVLNGDGTVRFSRAVPTGEQQLRSAFTALGADVRVHLEAGELADWTRSILAPLVSQVVVSHPRTLTWIAKDSNKTDAIDARKLADLLRLNLVHPIYCENSDDRRTFKHLVTHYEQLSREQARLKAKIKARLRTLGIIRRDARVFSPAGRDELLARLTEPAIKQMLAQSFAILRQMLESLAAAKQALVAAAAKFPEVRLLQSAPGVGIVTACRFVAYVQTPRRFSNKHKLWRYARLGVTRRESNGKRLAHPRLDAAGVGSLKDVSRKVFEAARRTKTDNSFKRCYEHSLATTKNAVHARLTTQRKVLATLRAMWLSMQPYREAGG

SEQ ID NO: 180704 - protein, 521 aa, unidentified
MDQISRIGMDTSKHVFQLHGVNAAEAVVLRKKLRRKEMVAFFEKLAPTVIAIEACGASHHRARLLQSFGHTVKLIPPQLVKPYVKRGKNDAADAEALCEAMSRPTMRCVPVKSPEQQAALMLVSLRDRLIRNRTQLANAIRGHAAEFGLTAAQGMAHLVPLLERIQANESLPALARELFAMQVKEYEQLQTQIGEVDTQLLARHRADECSRRLAKIPGVGPVGAMLLRMKTPEPELFRSGRQFAAWIGLTPKDHSTAGKVRLGVITRAGDEGLHSVRVVGATAAIQQAQRRGTASPWLAALLKRKSPKLAAVALANKTARIAWKLMLTGEDYSARLLLGFGVVPGPSRNQAGDEGAEQGFAASASVVHELEEAEIEWQLVLRKTPMRAQPGAQQRPKPFHRVDVDPAKTVAVLVAGILAAPMADRLVPVAPSRQAGVDAVFVRVDESARGDRGGDDRLDFGLLHVGQHAQHNLAATLDQAKDRWFVLFQRAASRRARQPATPTEPPLLAIAAGWPLCPATT

SEQ ID NO: 180705 - protein, 340 aa, unidentified
MLYVGLDIHTKHIALCVLSETGQVVQRARVRGLEEMLRLLKGLPDQFEVCYEASCGYGHYHDLLQPLAARVLVAHPGRLRLIFRTRDKNDRKDAERLAELLYLGETPAVHVPSLDVRTWRELINCRGQVIAKRTRAKNALRALLRGAGVVPPRHPALWTKAGLAWLRQLELPTASQQLRRDLLLEEVEALNGQVRRIEQELNRREHQTPAVARLRSIPGVGIRTAEAVAAFIDDPDRFRHAKAVGRYFGLVPCQDQSGDKNRLGHITREGPAVVRQLVAEAAWQAMRRSPTVRAYFERTRRGDPQRKKIAVVATAHYLVRVMWALLKRGTVWQENEARAR

SEQ ID NO: 180706 - protein, 325 aa, unidentified
MQSQTNYTGIDISKLFFDVAFQIEGRNYHYKFGNDLPGFKSLLKVLPTDSHVVMEASGPYYLKLACFLEANNIWVSVVNPLVIRRFCQMRMSRTKTDKKDSGMIAEYGRTEKPGLWQSPKQHVITLQQLETLLSNLNKEKTALSNQLESFNSSGMLDGKLKKTINKELEHKQALIEKLTKEMHTLAEVHYSEMLINLGSIPGMGKKTAMMLIVLSGGFNRFDDYRKLSSYIGICPRIYDSGTSVKGKARICKMGMSKIRAMLYLCAWSAKRCNKACRELYGRLINNGKAKKQALIAVANKLLKQAFAIATQKTKHNENYSNIICF

SEQ ID NO: 180707 - protein, 423 aa, unidentified
MGVMHERVAGLDVHKETIVACVRIMAGGKATRECRTFDTTTAGLEALLAWLTESGCTHVAMEATGVYWKPVWNILSEGKFELMVANAAHIKNVPGRKTDMNDAMWIADLLACGLIKASFVPESEIQDLRSLPRTRKQLTREQTRHVQRIQKTLEEANIKLDSVITDIIGVSGRRMIEAMIEGQRNPFTLAELADGRIKASRKELYDALHGRLTDHHRFMLRLHLQQYDALAEAIEELDQAIDAAIERMDAEVVAGQATFRSLIGLLCTIPGVRELAATTILAEIGTDMGRFSTAGHLVSWAGLCPGQNESAGKRKSSRLRKGARWLKTMMVQCAWSATHKKDSYYKAQFNRLRGKHGAKKAICAVAASMLTAIYHMLKDGTHHQDLGANHFDHRSSEIRAKRLAGQIAKLGFHVELRPLADAA

SEQ ID NO: 180708 - protein, 365 aa, unidentified
MVYVGVDLHRKSSYVAVLADDGELLASRRIASQPDEFLRVFGELEAEPTGVAFEATYGWGWFADLLSDIGIPAHMAHPLATKAISSARVKNDRVDAKTLAHLLRTNLLPEAWAAPPEVRDARKLARTRVSLARISSRLKCQTHALLADQAIKVPVTDVFGLAGRAFLQEEVLLRPVPQARLQANLRLIDLLAPELAQAERELRELFRADPRIERLTPIPGIGFTTAALIVAEVWDVSRFPSPQHLCSWAGLTPTEHSSADHTRRGHISKQGSRWLRWAMVESASRPYLKDPTLRRFRDGIARRRGAKIAKVALARRLLTLCYYALRDEDGCRAFPVPPTRTKRPNRGRARSPQVMASSGTAAASD

SEQ ID NO: 180709 - protein, 385 aa, unidentified
MAPPRMPEAVIGLDVGKLSHWACVATRDGEILLSAPVANREGDLDSLFGRFPDALVVVDQSRNIGALALARARAAGMSAAYLPGLAAHGAARLFAGDAKTDERDAMVIAKTALGIPDALLPVGDPGPTVAAARALAAQRNFLTCENTRNKNRLRSILLESCPAFEALVDLSDGPQLRLMASLGGAWSVADAGPRRAAALTRGAARGKIEALVRSTASSTRPDAAAIAAEDRAVRLLARRISENSAEIDVITAEISALLEGDDTYRCLLTVPGIGPKTASELAISIDIEDFPSHDRLASYCGLAPRNRQSGTSISSVTASRQGNKRLKNLLIFSCNCLTRTEGRWGDYYARCRERGMPHGKALKALARKRLKVIYAIMRDRVPYAA

SEQ ID NO: 180710 - protein, 351 aa, unidentified
MSHKTAAAVAHTIGIDTGKNTLHLIGLDDRGAIVLREKIARGRIAARFANVPRCLIGIEAGMATHYVARELIALGHDVRQVPPAYAKPFRQGHKNDFRDAHAIAEAVQRPSTRCVPVKTDDQLDLQALHRMRSRLVGQRTAVINQIRGFLLEHGIAVRQGLRFLRQQLPDILAKRGDVLSPRMTRIIEDLSGDWRRLDERIKHITEEIEVLAHSSESCRQLMTAPGIGPLIASAMVAAIGNGAAFAKGRDFAAWLGLVPKQMSTGDRTILGRISKRGNRYLRTMIMQGARVILLRPANWTKHSFGPWLTAAAQRLHHNVLATALANKLARIAWTVLAQGRSYEARVEPKVA

SEQ ID NO: 180711 - protein, 343 aa, unidentified
MTIVILGVDLGKNACSVVGVDAAGAVVLRRSMRRQTLIDYVAKLPTCVVAMEACCGAHYLGRLFAAQGHEIRLMSPEYVRPYVKAQKNDDRDAEGIAEAASRPTMRFVELKSEAQLDIQTLHRVRSRLVNERKNLINQMRAILLERGTTFPVGRRKFEQGIDAMLADEDTTLSPRLRQLMDQLRAEWRELDARIEALNGEFIELARNDAAARRLMSIPGVGVLNATALIAAVGNASSFAKARDLGAWLGLVPRQHTTGGKPRLLGISKRGNTYLRTLLIHGARAALPSLARSETPLGRWLTGMIERGVHRNAIVVALANKLARIAWAALRKEATFERGYPVAA

SEQ ID NO: 180712 - protein, 402 aa, unidentified
MGDNIIGYDDVDVVVGVDVGKGEHHAVALDKSGKRLFDKALPNDEKKLRALITELKQHGTVLFVVDQPATIGALPVGVAYDEGVVVGYLPGLSMRRIADLHPGEAKTDARDAAIIAEAARTMPHALRSLDLVDEQVSELSALCGFDDDLVKQITATSNRIRGFLTQIHPALERVLGPRIDHPAVIDLIGRYPSPAALRAAGETRLANRLGKLAPRMGRHLAAEIMQALSEQTVVVVGTSAAATVLAKLAEQLAILRRQRDEVGLEVERLVEAHPLYEVLTSMPGVGVRTASRIITGLSGKTFASSSHLAAYAGLAPVTRRSGSSIRGEHPSMRGNKELKRVLYLSAFAALKDPTSRAYYDRKRAQGKRHNQALIALARRRCDVLFAMMRDGTHYQNPLTNAA

SEQ ID NO: 180713 - protein, 326 aa, unidentified
MEHELHYIGIDTAKEKLDVDVLRPDGRHRTKKFANTTKGHDELVSWLKGHKIDHAHICIEATGTYMEPVAECLYDAGYIVSVINPALGKAFAQSEGLRNKTDTVDARMLAEFCRQKRPAAWEAPHPLERALRALVVRHQALTDMHTQELNRTETAREVQRPSIDAHLLWLEAELKRLEKQIKDLTDDDPDMKHRRKLLESIPGIGEKTSAVLLAYIGLKDRFARARQFAAFAGLTPRRYESGSSVRGTSRLSKAGHVSLRRALYMPAMVATSKTEWGRAFRDRLAANGKKGKVILGAMMRKLAQVAYGVLKSGVPFDAARHNPVAA

SEQ ID NO: 180714 - protein, 417 aa, unidentified
MKSARDTLPEEPANGLTCGIDWARDDHAVSVVDARGREILRLTIEHSAAGLRQLRDTLARHRVEEVAIERPDGPMVDTLLDVGITVVVISPNQLKNLRSRYGSAGNKDDRFDAFVLADTLRTDRARLQPLTPDSPVTAALRATCRARKDLVTHRVAVANQLREHLKRVFPGAIGLFADLDSPISLKFLRRFDSQDRADWLSTKRLAAWLASVGYCGRVDPAVLHARLTAAPRGATGDEATAAAHITRALLATLDTLVEQIKALTEQITEQLDTHTDAHIFTSLPRSGTVRAARLLAEIGDCRARFPTPESLACLAGVAPSTRQSGKMRAVGFRWACDKQLRDAVTDFAGDSRHANVWAADLYNRAIARGHDHPHAVRILARAWLYIIWRCWHDGAAYDPTKHRALQALLQTHQHPAA

SEQ ID NO: 180715 - protein, 482 aa, unidentified
MKKRNIYQNQSQELLHLFEVAGSGQKVMCVAMDYAKHDHLVLFCNGHGDILRKPFSVKNTAEGIAYIDAQVRRCCRQRNIEKQHVFFGGEDANSFAKNFVSALRNKGFVVANVNAHEAKKQRGHVQASTDRIDLMGIANLLLNCRANCCAAQAGIYANLRTLVRHRRRLVQMLTEVKNRVHGIVDELFPGFLNQNNSGIVAFTQTSLYLMQERFSPKQIARRRRQKLVEILKRLGTSRPEKTAAKLQHHAAKVLHAPVEHVDTLQLSLSQHVKHIRCLKESVCQMEKEIALKLSQTQGAFLTSVRGIGLVLAAGLTAEIGDVNAQKPLNNLASYAGIVPRVKQTGGLRGKTYTGPVAKRCNRILKDYVVKSAYHLGLHGPPDLMADYRRRRVSGQHADFGIARRYLRMAICLMRSSQVYLPLNLRKENSTRQQRAGYYLKSWPYLREKWQRAGALEAAFTTPRPLGLWRQMVQQLYEIKLKL

SEQ ID NO: 180716 - protein, 430 aa, unidentified
MNCNTQNAKIAGITERTLVVGIDIGSEMHYARAFDWRGYEYSKKAFAFSNTEAGFTSFVAWLQEFMEKYNKDTVLPGMEPTGHYWFNLGKFLQDNGMKPVLVNPHHVKKSKELDDNNPTKNDRKDPKVIAGLINEGRFSYPYLPEGVYAELRTASNLRFQAQEELTRVLNRIARWFSIYFPEYKDVYGKTDSVSGLMILKQAPLPSDIKALGVEGVNKVWRDAKLRGVGIKRAKTLVLAAEHSIGSREGLTVARMEIQNLLSDYEIYNRRVEELMILLTGLLESIPYIDKLLAIKGVGLKTVSGFIAEVGDLSRFDNPKQLQKLAGYALVENSSGKHKGETRISRRGRKRLRYVLFEVAMSVLGKNSEFREIHHYYTTRPENPLKKMQSLIAIACKLIRVFYVILTTGVDYDGSKMLLDIRRPCTQAQAA

SEQ ID NO: 180717 - protein, 413 aa, unidentified
MEVFCGIDWAEDHHDIALVDVGGQLLARRRISDGAAGLAALLELLAEHGDSAEDPVPVAIETPRGLLTACLRATGRKVYPINPMAVARYRDRHSVAGRKSDHGDAVVLANILRTDLHAHRPLPADTELAQAIAVLARAQQDAVWARTGAHNKLRSHLREYYPGFLGAFADTRGGITRPEARVILAAAPAPAVAAALTLTQLRSLLRKAGRRRSIDAEAARLREAFRAPQMRQLPLVEQAMGRQALALLRQLDAACAAADDLEQAVIESFNQHPDAGIITSFPGLGPLTGARVLAETGDYRSRFQDAKGLKAYAGAAPITRASGKTTAVLHRRVKNQRLAAAGYVWAFAALTASPGARAHYDRRKDGGDRHAAAQRNLFGRLLGCLHHCLATGQHYDENTAFPAPTPTAHAKAA

SEQ ID NO: 180718 - protein, 357 aa, unidentified
MTWVGLDVHARSTHASAIDVVTGELTRARFGPGSEDVVAWLAELRAPARVVYEAGPTGFALFRAARAAGIAIDVIAPSKTARPAGDRVKNDRKDAELLARLAMAGQLTSVAVPSEFVEAARHLARTREQVRGDLMSARHRVSKLLLAHGRVYDGATTWNATHRRWLGAQRFEQAPTELAFVDLLAAVDGLVARKQALDERLSRLATDERLWPTVARLRAFRGIDTLTALAVHLELGGDWQRFSSPRKLFSWLGLTPSLDQSGQSKTHGSITKTGSTYARRLLVEAAWHYARPPATGVTLANRQAGQPAHVLQIARRAQHRLHRLHVRLRVRGKPHNVVTVAIARELAGFLWAAATAP

SEQ ID NO: 180719 - protein, 365 aa, unidentified
MTSMTSPTAPVTVIGGVDTHGQTHHAAVIDQVGRQLGDREFPTTPAGYRALLTWLRGHGQLERVGVEGTGSYGAALARHLRRMGAGVVEVDRPDRKARRAKGKSDPLDAYAAARAALSGTATGTGKTRDGRVEAIRVLRVARSGAVKARTQGTNQLKALLLTAPAELREQLRHLSTTTLIATCARLRPSSELTDPEQATKTALRRLARRHQHLSEEIAEADTELRTLVTAAAPRLLVLPSVGIEVAGQLLTSAGDNPDRLHSEAAFAHLCGVAPVPASSGRTHRHRLNRGGDRAANNALYIVVLGRLRYDSRTRVYADRRTKEGLSKPEIIRCLKRYVAREVFAVLTAPTVEDPVATTTTMSTAA

SEQ ID NO: 180720 - protein, 322 aa, unidentified
MSECILGVDIAKKKFDVALLINGKLKHKVFTNDQEGFETLLAWLQKQNVDHVHVCLEASSTYGDGLATSMHDAGHTVSIVNPARIKGFAQSELMRTKNDQVDAGLIARFCLAMHPEPWTPVPPEMRQLQSLVRRIDTLITMKTQEMNRIDVSHESIRDSVRNHIAYLDQEIKSLKEQIAAHIKDDPNLTTKRDLLKSIPGIGEATIAAILAELPVFERCDRVEKVVAFIGLAPRQFISGSSIKGKPRLSKIGNARLRKALFMPALVSIQCNPIIQTFYHRLKENGKNGKVIVCAIMRKLVHLIFGILKSGKPFDPNFKPHYA

SEQ ID NO: 180721 - protein, 368 aa, unidentified
MPRIAEQAGPVTGGVDTHAEVHVAAVVDQVGRVLGTQAFPADAAGYRAAVAWMKLHGELARVGVEGTGSYGAGLARYLAGCGVEVAEVIRPNRQARRRRGKSDTADAVAAAVAALSGEASGRPKSRDGAAESIRALKVARAGAIKARTQAGNQLRDLILTAPEPLRQQLAGQPSGQQADVAARFRPGDPACPAEGTKAAMASVARRHQQLTAEITRLDAMLDELVHHAAPAQFLAKKGVATQVAATLLATVGDNPGRVRKEASFAALCGASPVDASSGKQLRHRLNRGGDRHANSALWTIAMTRLACDPRTKAYAARRTAEGKTKKEIIRCLKRYIARETYKALCRPQRPRMPSAPKINQDLSAQVLT

SEQ ID NO: 180722 - protein, 452 aa, unidentified
MTDVDKISMDIVNPRAAGIDIGSRSHWVAIGQGPSDFKEFGVYNEDLFAIAQWLKESGIKTVAMESTGTYWQSLYAVLMAEGFQVILCNGKFTKNIKGKKTDIQDCQWIQKLHSIGLLSGSFLPDEATEQLRTFCRHRANLLDSAAAASKKMQKYLRLLNLRLDVVVNDICGLTGMAIIKAICNGEKNPERLADLRHHNCKKSKEEIAKALHSNGRQDYLFALKQELEMYELFQAKIAQCDIEIEKMLNETIDNDENKKQHYIEKKAYKKVNKNTPKNIDLNLMAYQHFEGVDLMAIEGMSYSTVLSLISEVGVDGIKRFPTAKHFANWLRLAPNNKISGGKVLSSKVPKGSNRLKIALRNAANAIGNLKDSTPLRDFFQRINFRKGRVSAISATARKLAVIIWNMVVKSVPYHNPEEYLFRDQKKKLGLLKRIQKQITKFELESTDFQFTN

SEQ ID NO: 180723 - protein, 340 aa, unidentified
MKIYAGIDLHSNNSYVVLIDESDNIIYQKRLGNDLAIILKELKPYQLQVEGIVVESTYNWYWLVDGLKEAGYRVHLANTVEIKQYTGLKHTNDKTDAIWLARLLKLGILKEGYIYPKEQRGLRELLRKRLLLVRQQTMSVLGVQGRINRYENCKLTARKLKTSKANEEEILSYIHDEHVRLAVQGQLKILQCIVDQLEALERIILKHLQENVDFKRLKAIPGIGSILAMTILLETGEINRFKDPGNYSSYCRCVESKRISNFKKKGENNRKNGNHYLGWAYIEASNFAVRYYNPIKQYYQRKLSKTNRVIALKTIANKLSKACYFVLRDKVDFDMNKAFV

SEQ ID NO: 180724 - protein, 338 aa, unidentified
MDKITTVGLDLAKQVFHLVCCDERGKVIGRKLLRRSQMLGYFAKLPASRVGMESCAGAHYWARELQGLGHEVKLLPPRFVKAFVRGNKNDYNDALAIAEAVVRPEMRGVAVKTVAQQDIQALHRLRSACVASRTALCNQLRGLLAEYGVILPRGVSSLRRRLPALLEDAENGLSALFRRLLAQGYQQLCELDAQIEAYTAEVERHSRQDDTCRRLQTIPGFGPVVASVFHSAVGDGQAYRRGRDVSASLGLVPRQHSSGGKSVLLGISKRGDRYLRSLLVHGARSVVQQAAHKDDRLSRWINRIKAQRGHNKAVVALANKLARIGWAVLSRRSVYRPA

SEQ ID NO: 180725 - protein, 315 aa, unidentified
METSIAQNVGVDISKATLDVHLHPAGSARQFANDAKGINALLGWLGSHDIARIVFEPTGPYHHRLERRLGQAGLPLAKINPLQARRFAQAAGTHAKTDAIDAAMLARMGALLTPPIRPITSQAIDEMRELHIARLALVKDRTAARNREHACRAPLLKRHAAQRLAQIDRQIAAIDAALKVRLLSDPDLVARFEILVSIPGVGALTAITMLIEMPELGQLDSKQVASLAGLAPQARDSGQHRGRRHIHGGRAVLRQALYMPALVATRFNVDMKAKYQALITAGKPAKVAITAVMRKLIILANALLRANRKWTDKTA

SEQ ID NO: 180726 - protein, 342 aa, unidentified
MENIGIDVHKKESQLCIITEAGEVLELRIRTERGRFKEVLGARGKAKVLMEASTESEWVARCLEEMGHEVVVADPNFAPMYGMRTRRVKTDKRDARALADACASGTYREAHRTSEARRQTKALLAVRDALVRARAKNLTLMGALVRQQGLRVATGSAEKFLQRLAKVELPASLKESLEPLMEVVTLLNKQVAVVDEKLSVMVEADEEMKRLCTMPSVGPVTAAAFVATIDDADRFDGPHQVQAYLGLVPSERSSGEKQQRGRITKTGNGKVRRLLVQVALSTMRLKKASSKPLWEWAGRIEEKRGRKVAAVALARKTAGILFAMLRDEAPFKARGQAEPATA

SEQ ID NO: 180727 - protein, 426 aa, unidentified
MNYTQNEKLAQITPETLIIGIDIAKNKHVARAIDDRGFEFGKRIMFTNDLEGFEKLLRWAEDHQANHQKTHMVVGMEPTGHYWFSLADHLDSCGHQLVLVNPSHVKRLKEIDDHSPSKNDTKDAMVIAKQVKDGRYSVPNLLEGIYAELREGIKLRDQLVQLQNQTEGRVQNWLNRYFPEFEQVFKAWDGVSALATLRTFPLPQAIVETTPEAIVDTWKAYAKRHAGFARAQKLHEAAEKSVGITEGLHFARQELEALLDQYDLYTRQLETLEAQLTEQLEHLPGAEQMRDIKGLGDMTIAAFFAEVGDIHQYRHPKQLISLAGLDLKENSSGLYKGQTTISKRGRRRLRRILFLAIRPLVNHNDTFRALHHELTQRSDRPLTKMQSLIALCGKLLKVLFVIGQRECPFDGAKLLQDRKCSQTQAA

SEQ ID NO: 180728 - protein, 379 aa, unidentified
MQAARKCEGYVSADVLYMALELSGSKWRVAFGADGRARQVTVAAGDLSGLLEQIERAKQKLGVDAGARVRSCYEAGRDGFWLHRALCAQGIENLVVDAASIEVSRRARRVKTDRVDAQKLLAQLERYCRGERRALRVVRVPSVQAEDARRIHRERERLLKERGMHGSRIRALLIAQGVELELKGDFAERLRAVRLWDDHALGAGLRAELEREWQRLEQVQKQLKALEAEQRAEFEQVAQSSEGLMQRLSLLQGIGMRSAWVLTRELFGWRQFANRRELAGCVGLTPTPYNSGGSEREQGISKAGNRRVRALLIELSWLWLRYQPDSALSAWYRQRFGGGGARARRIGIVALARRLLIALWRYLEQGLIPEGARLKSCAA

SEQ ID NO: 180729 - protein, 340 aa, unidentified
MGKFTEKKHFVGVDISKDQLDLALLHVSQSDKFTNTTVGNNFKGFDSIPEWLKKNKVKPEDCMFCMEHTGTYGLLLFAWLSQLEYDYCVEPGLKIKKSSGITRGKNDPVDAQRIAEYAYTHRAKLEPFSLPSALILQIKQLLTYREQLVRICTSLKNSLQSHKEYQRVSGLRSISEEIESQISDLETREKRIESQIIELIQSDASLEKNYKLATSVRGVAFVIATYMLVTTNNFTCFENSRKFACYSGNAPFMYTSGTSIKGKSRVSNLANKRIKTILSNGANSACRCDPELRSYYKRKIAEGKDHKLVINSICCKLINRVFAVVKRQTPYVNIYQQNFA

SEQ ID NO: 180730 - protein, 316 aa, unidentified
MSQFNVFVGIDVSKDRLDVHLLPDDKSWQFANDEAGCAELSERLTGLSAAVLVVMEATNVFWRLAATRLASAGLSAAVVNPRQVRDFAKATGQLAKTDAIDAHVLALFAQRIEPPVRALPSEQCQVAAELLARRAQLMGMRVAEKNRLSTARAAKVRKDITATIAFLEKRIGALDEEIDQWLKSTPIDQSRVNLLKSFAGIGEHTAKSLLITLPELGSLTAKQIGALAGLAPFARDSGNKRGQRQIRGGRTTVRAALYMPAITAIRCNAVIRALYQRLINAGKHHYVAITACMRKILVILNAMLRSNQPWKNPQEG

SEQ ID NO: 180731 - protein, 366 aa, unidentified
MKKTITVQAFKSEIFKEQKLTIGLDLGDRWSFYCVKDGAGKVILEQKLPTTPEAMKQTFGKIPRSLMALETGTHSPWVSRLLTQLGHEVIVAHAQKVQWITKSSRKDDRHDAQTLARLARVDPELLGPVRHRSVQAQLHLTVIRARAELVSARTALVNAARGLVKSYGQRLPKCGTYQVSEKLAEGLSAELREVLVPLLKEIESLNEHIQEYDERMEKIAKQVYPEVSLLQQVKGVGTQIALTYVLTIEDPYRFPKSREVGCFLGLRPGRRNSGESEPQKGISKEGDRYLRTMMVQGAHYILGPFGEDSDLRRWGLKLAERGGKNAKKRAVVAVARKLAVLLHRLWVGGEVYEPLRNSQKAMREVA

SEQ ID NO: 180732 - protein, 355 aa, unidentified
MTSTKYIGLDVHKESISIAVLNSAGKVVMECVIETKASTILQFIHGLGGDVHLTFEEGTWAGWLYDLLKPRVTELVVCNPRKNALLKEGSKSDRIDARKLAELLYMSKLSSVYHGEHGLRMLKELSRSYLTISKDLGRVMNRLKALYRSWAIPCAGTQVYAPHYRSEWLAKIHEAGVRRRAELYYQQLDALRLVRQQARKELLAETRKHRATKSLRQIPGIGPLRAAHLVAVMQTPHRFRTKRHLWTYSGLGLETHDSAQYRVVEQQLQRSKKSVTLRGLNTNHNHDLKDIFKGAAMRASTAAGPLRDFYEALLAKGRKPTMARLTLARKIAAITLIVWKKEIRFDANYLKQQAA

SEQ ID NO: 180733 - protein, 322 aa, unidentified
MSPNTPKTMTKKSAAVYVGLDIAKATLQLHLQGRQHALPNSATGHRKLVTLLRSVSGAHVVCEASGGYERAVVAALQAADLPVSVLNPAQVRHFALAQGRRAKNDPLDAAVLTACGEALRPKPTPAPQAVLAELRALVQWRNYLKDQLCAARNQGEHATLRYVQKQQAKLVKHLATQMKKVEAELASALNRAPETQKQVQRLTELDGVRTLTAVSVLSQMPELGQLNRGEAAALAGLAPWTRQSGPWEGQRHIGGGRAEVRRSLYMSAVVLARQTETLLGKFYQRLRAAGKPAKVALTAVMRKLLLQMNQALKPTRDEPQAA

SEQ ID NO: 180734 - protein, 379 aa, unidentified
MQTIDTVNPSILLAIELSASTWLVAARVPGLEKQHRIDSGDTAALLALISSLRARAARRLDAIGIVCCFEAGRDGFWLHRLLTAHGVICHVLEPTSILVNRRARRAKTDRLDAEGMLRVLAAYLRGDHQACSMVRVPTPDQEDAKRTHREREHLVQERLRIENRIEALLFTQGIRKRPSLRSWERDLTVLRTGDGRKIPHHLRAELDRLRRRLVLTLELIREVEAERDQVTKTKSQDQAHHKITALCRIRGIGENFAAVLTREVFYRSFDNRRQIASYVGITPMPYQSGGMDRDRRISRAGNPRARTTMIQLAWLWLRYQPDSELAEWFRERVGTLAGRTRRIAIVAMARKLLIALWRYVETGVIPTGAEIRAETTVAA

SEQ ID NO: 180735 - protein, 431 aa, unidentified
MTYANPFISAGIDVGADFSFMSLALPNHTFIGKPFKIVHNDFKSLERAVLAIKEAEELHSMKVRIVMESTGIYHYPLFCYLRDKEFEVVVINPIITKNSTNMNIRKVANDKSASKNLALIGLKPDLKTSIMPLDSVLNLRNLVREYYNLMDCRCAYVNKLLGVLRVAFPEYFGIFSKVTVKTSLALLEKYQSPGEFLSARKSSVVNIICKTARFGKAYAEEKYQAIVEAAKSAGVFGHFLSSNSAQIRLFVTFIKKYDEEISGVMALMCKLADEHADETFVKHIRLIETIPGAGFLSAATVICEIGDFSVFSSPKKLFAYFGLDPAVKQSGNFTGTKVKISKRGSAVARRAVHAIALNSIGTRRNGIAINPVLREYYLCKCQSKRKMVALGAVMHKVCNIIFALLRDDKVFSLTTPEQHIQNYANVLPSAA

SEQ ID NO: 180736 - protein, 408 aa, unidentified
MSIVFGIDVSSRDSSVCVLQSGVTREYKITNDTIGFKTLLIDLKEYAEHPQIILEATGIYSRRITRFLDEYDYDYVLLNPLKAKKEINQGLRRNKTDRNDAYHLALAQDRNQHQPNRKEPEAYHQLQSLSRSYEELTHDIVSSKNRLHKYLQLTFPELETIFNNSRGVNYWYLVELFPHCQDVRNLDVSTIAKQIKDFKGYGINRAQKLAIKLKHLADLAYPAVDQDDPERDEVVYYANRLLRLTADRERRSEAMIKLAKTLPNRDLEILMSIPGIAEITAVRILAELGDIRRFSNPNKINAFVGIDPGRYQSGEKDSSLRISKHGNAVARKILYRAIGQIDLAAKTSPCHIADYYERKKQFSQTKGFKKIAIASIHKLLRTVYILIITDQMYDYNVANNNQKDFCRN

SEQ ID NO: 180737 - protein, 453 aa, unidentified
MEILYTHCAGLDVHKKTVKVCLLTQGANEQPHKEFRTYLTTTQELLKLSDWLHEQGCTHVAFEATGGYWKPIFNLLEGHFELLVVNAQHIKAVPGRKTDVRDAEWIADLLRHGLLKASFIPSGPQRELRDLTRYRVKLTEEKAREINRVQKTLEDTNLKLGDVVSDIMGKASRMILHAIADGEKDPSRLAAFAVGRVRASQEQLEAALKGHATDHHRFLLREHLTQIHHLEQAIDRVTAEIIRRFTPPSSPEEPTSAAEKEDETTPERTSDPPSASPEGAVPPKAALSWAQAVVLLSSIPGISERSAIGILAEIGTNMQQFPTAAHLASWAGVCPGNHESAGKRLSGKTRKGNLFLRCLLVQAAHSASHQKQCYLAEQYRRIAKRRGAKRAAVAVAHSILVIIYHLRSSQTTYLEKGETFFEERDREGTQKRLVRQLSRLGYQVELQPITQAG

SEQ ID NO: 180738 - protein, 426 aa, unidentified
MRVLHERVAGIDVHKDMVKVAIRSPGDKPWARKTEIVEYRTFYGVLQHMAGELARRGVTHVVMEASGVYTEPVYYALCERDFTEVAVINPAHAKALRGHKTDARDCARLAELFECGLLRGSYIPAPELKEVRDLTRYRIKTVQARTSEIQRLAKALESAGIKVGSVASEITGKSATAMIEALIDGERRGPVLADLAKGRMRTAGKLADLSMALAGRFTEHHALLCRLHLDRIAGFDTAVAGLGERIAGKAARWRREAGLLTTVPGFGDIVAWAWLGEIGPAPHRHFSSHDKLASWVTLCPGNNISARKRKHGRTGDAGTYIKPMLVQAAWSAIRVRGRLQARYHRLVRRFGGDKNPGAKKKAITAIAHTLLKIAYQVLKSGQPYQDLGADFYTRRESPEQRQAWLLRQLQKLNPDCTITITPPEAA

SEQ ID NO: 180739 - protein, 360 aa, unidentified
MAKVTALDFTGTTVFCGLDVHKLSWRVNIRDTEFDLKDFTQKPDANELHKHLIKNYPGAKYKVGYEAGFCGFGIQRELAALGIDCVLLNAADIPKGDKDRRQKNDKRDARSISELLANNKKLQSLYVPSPAWEHARTLVRNRQQQISDSTRCKCRIWHFFYFSGLPIPDKTETGQYWSRKFIQKLEDMDCAGSPELKAALQIKLQDHLQKRQLLLQSTRAIRNMYRKPNYWPLMKLILSIPGIGEINAAIILFELQDISRFKTFDKLCSYVGLVPDTDDSGDTKRNKGLTHRRNTYLREALIESSWVLVKKDPAMLMKYKHYCQRMHKNKAIIKITRHLLSRINYVLRSNTEYVSGLVAG

SEQ ID NO: 180740 - protein, 369 aa, unidentified
MDESITYVGLDVHKDTIAVALAEAGVRGDVREYGKVANTPAAVKALATKLSRVGNALRFCYEAGPCGYGIQRRLTLAGHDCVVVAPSLIPRKPGDRIKTDRRDAINLAKLHRAGEVTAVWVPDPAHEAIRDLVRTRLAAVRSLRQACQQLSGFLLRHGRHYNRPAWTLMHRRWMAGLRFEQPAHHIVLEDCIAAVEAATARRDRLEAHIEAALPDWSLAPMVRALQALRGMALVAAATVIAELGDITRFGNPRQLMAYLGLVPSEHSSGATKRQGGITKAGNGAARRMLIEAAWSYRFPARISREQLLRQESLAKPIRDTAWKAQERLCRRYRKLARAGKSPTVVTTAIARELAGFAWAIAKHVQIVGA

SEQ ID NO: 180741 - protein, 450 aa, unidentified
MNKGVKKTGKGKKEISFQLVNPMAAGIDVSVSEMVVAIPESLAQESVRAFGTMTCDLRELCNWLKECEIETVAMESTGVYWQPLFYMLLSAGFDVCLVNAAHVKNVSGRKTDESDAQWIQKLHSCGLLSGSYLPEDVQRSIRCLTRTRRSYTEEQNKHLNRIQKELESMNIKFHTIINSIAGVSGMAVLHAILDGERNPESFLPYIDPRVKASREEIIKSLEGNWDPTHLFLLAIHVASYKECQKTIEELDKELEKKLVLLEAKVNHGEVKSQPELTKRGHKNSPQAQVEQHLQNIHGVNVLSIYGMGMISALEILAETGIDLSKWRNENHFVSWLNLCPNNKRSGGKELSSKVPRRRANPASQAFKSAANALQRSQHWLGDYFRRMKSRGGNKYAIVATANKLAKIYYRMIQEKEEFKPINLQEYRSKFNQDKIAYLERKLQLLKNQAA

SEQ ID NO: 180742 - protein, 367 aa, unidentified
MKKVSTVAAKPSKKISQQNLTVGLDLGDRNSWYCVLDESGQIQLEQGVRTNAKALQEVFGAMPHSRIALEIGTHSPWISRLLSELGHAVIVANARKVRLIGESRKKDDRLDAQTLARLARIDPELLYPVKHRSVQAQADLMMIRARAGLVRARTGLVNTARGLAKSYGERLRGCNVRNMNPEKAESVSPELQAALEPLLNAIQSLSERIVEYNERIENLAQASYPQVALLKQIKGVGTLIALTFLLTLEDPHRFRKSRDVGCYLGLQPGRRNSGQSEPQMHISKEGDPYLRTLLVQGAQHILGPFGVDCDLRRWGLKLAERGGKSGKKRAIIATARKLAVLLHHLWVSGEVYEPLHNSSRRTVAAAA

SEQ ID NO: 180743 - protein, 376 aa, unidentified
MKTVVMCGADVHDNSITARIAVNKEEPGTRVFRYTVSGRRAMLKYLKAAAMRHGAKRIVVAYEASSLGFVLCDECGGAGIECYVLAPTKMPRSEETTKRKTDWRDAQMILEQLRAHVLAGNELAKVWIPDNVMRDDREVVRMRLAAGDKLTSSKTQVRTLLKRTGMEKPKEVGKAWTVSDRHWLQRLTEPESELLEGARVGLASLLREIAYLEAEIERLDDAVKALADKERYKAAVNALVEQLKGVGVLTAMVFLTEMGDLRRFKNRKKTGAFMGLVPSSNETGEHNDRKGHITRQGPARLRKILCQAAWARIGSDADESKFHERIVERNPKKKKIATVACMRRLGVRMWHIGMRAQIEAGVYETDKLPCPKQIAV

SEQ ID NO: 180744 - protein, 363 aa, unidentified
MRMKRHPQYFISKSPRRGSRVGTTIGIDLGDVWSHYCTINEEGEVIDRGRFRTNPSGVDKRFRDLEPIRIAMEAGTHSIWISEQLRDLGHEVIVANVRELRAISHSDRKSDSVDAEKLARYARLDPEILRPIAHRTVAQQETLTLIRARDVLVRLRTGAVNSVRGLAKPCGYRLPASSTLCFAKRCLAMMPPGLSVALSPLLHQIGGMTVKIKEYDSAIKKLTETEYPETQALIKVYGVGNLTALTYVLTLGTKERFRHSRDVGCYLGLRPKRSQSGDSDPQLGITKAGNGYLRQLLVECANHVIGPHGKDSSLRRWGLSLGARGGSHTRRRAVVAVARKLAVLLHRIWITQEAYVPFYAVAA

SEQ ID NO: 180745 - protein, 330 aa, unidentified
MKFKWFVGVDISKKTLDATLYDKVCLKKSKHIKLSNNLKGFKELIKWIKKQGSLLDDLLICMEHTGVYGIDLAVFLDQNNIAYSMVSPLHIKRSLGMTRGKNDKVDSFHISRFCYLHREELKLSKVPSVTIQKLRGLFNERERIVKMQTVEKQVLKELKTQNSGSSIKRVKARLSHFSKDINSIECEIEQIIKADAGIQKNYNLTRSVTGVGLVNAVLFIIYTNNFYGFPNARKYACYSGIAPFENSSGTSVRGKTRVSHLANKRIKANLSNGARSAVQNDPELRLYYKRKAKEGKEHGVIMNAIKFKLVTRVFAVVNRGTPYVKMRQAG

SEQ ID NO: 180746 - protein, 341 aa, unidentified
MEQLFVGLDVSKDETAICVRTQSGIIRAAFKKPTNPDMIQRALIDNLQHIRCVVLETGRMANWLYSELSQRGLPMVCIDARQAHAVLSQMHNKTDENDAAMLAELARTGFYKRIEVKSRVAQERRALLRAREVAIKSRMNVENTIRGLLATFGICLPKHLKTYDQRVRKALESQPDLLRIILPLLHLRTEALRQAAALTKDMVRQARVDGTCRRLMTIPGVGAVSAVTYVATIDTADRFARSRSVGAYIGLTSRRYQSADVDYGRRISRRCDPMLRTVLYEAANSLLCRVKSGPGQHLKNWANGIKKRTSHKKAVVALARKLAVIMHAIWRDGTEFEPKEA

SEQ ID NO: 180747 - protein, 526 aa, unidentified
MSYSGHVGYPHPPERGGLGAAPRRLADVDNQPAPGAEYGVGPKLGLGDGDGRTMYPSPERAAFSLSAAAVSRFSHNQMPRFERRSIRHDETGTGRPNLNESEVSMNEEGTRTQETQRYWVGLDWGEEEHAVSVVDDDRTVLEQFKVGAALDDLRQLGDRLHGVGAVAGIAIEATCNPVLGYLVSEGFTIYPVNPKLSKNWRESNSVAGAKSDERDGLVLAVELARRHESLRTFKEEEPSVAELAGLCEKLRDLIDQRTALLQRLKATLRQYYPGVIGFFSDWGSPAAWHFVKRFPRPEALARARKNTLIKFLKANHIGLRPIWIERIENRGTIAQWPIPENSMALEVMALATIAQLHALQSHIDKCDRLIAQRTPNMPHAHLLRSLPGAGERLAPALTAITAITLGEEDDIEALRCVSGVAPVEMQSGKRRRVRVRRRCNKHWRNVMHLFAHCSTVSCPWAKAFYDLRREHGDRHAGALRKLADKWIKIINRMLATGEPYDDERYVEALRTKGSPVYLKLCGKPCG

SEQ ID NO: 180748 - protein, 394 aa, unidentified
MKLVGIDIGKNKHFFCIMDKDSGEVLLQPSSFSNTKDGFDSLIQKLSSYSKDSILIGMEDTGHYHFALLKYLLEKNFTVALINPKTTDYTRKMQNGITKNDKLDTLTICDVLDTPVRKKQYRITKVNSFDLYEQKQLTRHHHNLKEELNVYTNRLQKCIDIVFPEFNSLFSSKYGIIYMNVLKTFGSAENIASTDIRTIRKCFEIKGRGNRISLTAQQLKDSAKSSIGISSAAEVIKIKHLISQIELINEQLAETDKKIEEFSIQNNSPILSIPGISHFSGTSILAELGEISNYSKPSKIIKAAGVAPYHYESSQYNAQHTAITKKGSPYLRKTLYQIILPVINNNPVFKQYYDLKISQGKGHRCACRHCVRKLLRIIYHLSSTNQQFDDALLR

SEQ ID NO: 180749 - protein, 352 aa, unidentified
MQITTVGIDLAKNCFQLAEADAQFRISRRARMTRTRFVQWMCQLPQCQIVMEACGTAHHWARVLASLGHVVRLLPAQHVKAYVRRNKTDAADAAALIEASPCEDIKPVAIKSVEQQVLQQLHRLRTQWLEARKARICGLRGMLREFGIDIPVGATRGLAAIREALEIADNGVPDALRPYIGDVLREIDDLALKVRSVERGLRTLTEQDATVKRLEQIPGVGLIVSTAMRAAIADIHRFPSERHLACWLGITAKERSSGERRRLGRISKQGDVYLRTQLIHGARSALLNAKCAANKGVELDRLRRWAIETEKRVGHNKAAVALANKLSRIIWATWKYDRDFSGSWKHQRTVLN

SEQ ID NO: 180750 - protein, 358 aa, unidentified
MQIIGVDFHIRQQTIAMFDTETKELVKKTLKHDGAEVREFYSALPRPVQVGIEATGSMYWFLDLLEELGIERHVGHPAQIRAAEPRKQKYDGRDALLLLRLQIENRFPAVWIPSKELRDLHALLRHRHQWVRMRTRVQNALQAIAVSHGLRRGPSLWSQIGQHAIASLPLAPHAADRRNELLTLYGTLSTKIDELDEQVKDQALQRSGAKLLLTHPGVGPVTALATDVFLGDPTRFTDGKALSSYIGMIPSEYSTGGRQRLGGLSKQGNPLLRFLWCEAGMHAVRRDPELKRFYRRKLHQKGLGKVRVAVARKLGIRLWIMLRDQIDYQEFCRRGQLRQKSGAARAGMPEGVHGPATS

SEQ ID NO: 180751 - protein, 404 aa, unidentified
MNAVGIDVSKGKSTVAVLRPYGEVVVSPFDVAHTGSDLRALADLIKKLPGETKVVMEATGNYFESIARYLHEQNIFVSVVNPVLISDFGGNTLRKPKTDKKDSVKIASYALTYWLDLKEYTPQEDLRKSLKLLNRQYQQSIKLKTMMNNNLISLLDLTFPGINKLFTSPSRESDGHEKWVDFVLEFSHCDMISKLTIKAFAKKYKKWSDKNSYHFTESSCEKIYAFAKDCVSSVSSDKAIVFSVVQAAKMLISATENCHAIQSEMNRVASKLPEYDTVMNMYGVGKAVGPQLMAEIGDPRRFHSRKAITAYFGYDSENNDSGQKTTRSNPMTKKGSGALRRTLFIIIQVLLQTKPQDNPVYDFLIKKKSEGKHYYSYINAAANKFLRIYYARVKEVLNVSEQMT

SEQ ID NO: 180752 - protein, 428 aa, unidentified
MNEDELSRLKEFRQLKKRIQGSDTHLIVGIDVAKDRHHAFLGTATGRTLVKKLIFANTSVGFAELLARVEAVRAQSGLSEVVFGLEPTSNYHKPLGRYLISEGCHVVMVGGKAVKNNRELLDERWDKHDTKDAANIADLVSRGKCFYYDMPSREIEELRDLHSLRARLKKEEHSLSLRIRNNLLAKHFPELDTFYSACERETLAIVRWGLNPQKIAAMPFEEFFKRVAPNARGIAQKLRLQKIHRLAHESIGCPVGSAVQFQARLLAEKIKEVRGQISDVDHLIAQACAPFPSYEYLLSIPGFGPYVASKVLATIADPRRFDSAKQIIRTSGYDLCADRSGKRSDQAVPVISKKGNSQLRYALYQAAMIASSRHRFFMAYFARMLQGREREQGIRTKMRVKLAAKMLVIAWTLMKKGEPFNPEYLNAQ

SEQ ID NO: 180753 - protein, 415 aa, unidentified
MTEDTQWFVGLDWAREKHRVVVLDAKGESVAERDVTHDGAALSELCAWLIEVTGAQPAQIAVAIETPRGPIVETLLERGFVVYSINPKQLDRFRDRFTVAGAKDDSRDAHVLASSVRTDRRAFRRLTFDDPLIIELRELLRIEDELKQERIRLSNRVREQLWRYYPQANRLSDDVADDWFLDLWEQVPTPATAAQVNENTVAKILKTRRIRRFNAAEALAILRQQPLQVAPGTAKAATAHIRTMAVRLRLINEQIKQAERRLDELCAGIKASAPGQICEQRDVAILRSFPGLGRINIAALLAEACQPLRERDYQVLRVLSGSAPVSRRSGKSWIVLRRYACNNRLRNAIYHWARVAIQHDAVSKRRYDELRRRGHGRARALRGVGDRLLYVLCKLLQRQTPYDPEYKIQQMQLTA

SEQ ID NO: 180754 - protein, 346 aa, unidentified
MDYFAGIDASLETANVCIVDGDGAVILEQKVGAEPKDIAALLKHFGKPLKRLGLEAGPTSSWLFSELRAAGYPALCLECRHVKAGLSAMRNKTDRNDARGIAQLVRLGWFRLVHVKSEQSQQIRMLLVNRNLLLGKLQDIENSMRGSLKVFGLKLGHVTKHSFEARVLELVEGHSALTAITEPMLRVRRVLMDEFGGLDRMARKLARKDPVCRRLMTVPGVGVIVSLTYRTGIDIPERFTRSRDVGAHFGLTPRRYSSGQVDYDGHISRCGDEMVRTALYQAAHVLLHHGRWSGLRGWAMRIAKRSGVKLAKVALARKLAVVLHRMWVDGTDFRWTNREQAHALAA

SEQ ID NO: 180755 - protein, 368 aa, unidentified
MLARFHGIDKHKKYSTISVLNRKGEEVDFRQKCYDLKEYIENLGHEDAVVIESSTGAFYWADRIESKGALCYVIDPHKFRIIKDSWKKTDKHDSRNTAKALWVYIVTGEFGIPTVYKPDVVIRELRKLFSQYQLLNRQIRMLKNNIQAVLSENGIYLTKERKNQLLSSKHGMEIANECELTHASELSVKSCLELLWRVEEEKERIRKEILLTGEPLKEAVKLLITIKGIAPLVALAFLADIGDIGRFRSLRKMNAYLGLVPRVKDSGGKSKLGHITRESRKLTRTLLTQSIYHVSNASPYFRKFYVDLTEKRGAGRARIALIRKLCGVMRRMLLTGECFRWMEDELFERKLRNYEKDLEFIRIEKKVA

SEQ ID NO: 180756 - protein, 339 aa, unidentified
MKLYGAIDLHSNNNVTVVTDEQDHVVYEKRLPNDLALITQQLASYRDSLQGIVVESTYNWYWLVDGLMDQGHKIHLANTAAIQQYEGLKYTDDPSDARWLAHLLRLGILPQGYIYPKEHRPVRDLLRKRGQMVRQRTMNSLSIQNLFSRNTGGSMSANRVKRLDSQEIDELVPNAEIRHWRSRLTWAMLQCADGQIDLLEKTIVGRVKLKPEFELLKTTPGIGHTLSLTIMLETGDISRFPTVGDYASYCRCVGSKKISNGKKKGQGNTKNGNKYLAWAYVEAANFAIRFSAKIKSFYQRKKSKTNGIVAIKAVAHKLCRACYYIVKDQVAFDVSKAFA

SEQ ID NO: 180757 - protein, 482 aa, unidentified
MKATPKEPAPKATGQSTQPNWHQMNRKQRRDMERKIQRADLSLQLVHPNAAGVDIGNESHYVAVPPDRDSQPVRHFGCTTAELRTMVDWLKQCGIRTVAMQSTGVYWIPVYDLLEQAGLEVYLVNARETKNLPGRKSDVQESQWLMKLHTYGLLRNSFRPSQQIRRMRTYWRQRKDLIESAGRHIQRMQKTLTQMNIQVANVLSDVSGVTGQAIIQAILAGERDPQKLAAFRDPRVKASEKEIARSLEGNWQEDLLFVLKQEQAGYEFCQKQMAECDRQLEQYLRQLEDRSQGATLPEEMRKDRLQKRKGNKPKFDLRQQLFRMAGTDLTQIDGIDVMTAATILSEAGWDMIKWQDEDHFVSWLRLSPDNRISGDRIIGKGRLPTTNRVTVALKLAASNLRTSQSYLGAQFRRFRARLDTPVAIKAMAAKLARLVYRMLRYGTKYVDRGAQFYEVQQRTRQIKHLKQKAAKLGFHLVQAPAA

SEQ ID NO: 180758 - protein, 358 aa, unidentified
MQGKGTTIDFNGQNVYAGIDIHLKSWKVTIMSGDREHKTFSQDPNAETLRNYLRKNFPGAVYHSAYEAGFCGFSAHRDLVGFGILNLVVNPADIPTTDKEKRQKEDKRDSRKIAKSLRNGELVGIYIPSKGMEELRGLVRYRKTLVKEISRHKCRIKSFLYFNGIQIPLELGGNSTHWSGRFTHWLREVKLSTAHGKMVLDDTLDTAELLRKKLLKVNRHLRQVVGNGEYLEKLRLLQSIPGIGLISAITLLTEMEDILRFRNLDQLCSFVGLVPSTNSSGEKQNVGRITRRNNRFLRSIIVEAAWMASRKDPSLLYCYGLLCKRMEPTEAIIRIAKKLLNRIRYVMKNETEYVHSVI

SEQ ID NO: 180759 - protein, 349 aa, unidentified
MLVTIGVDPHKASHTAAALDEHGQLLGQQRIPTTLDGYQALRQWAGRWPQRCWAVEGAHGLGRALAQRLVGDGEQVLDVPAKLAARVRVLSVGHGRKSDPDDAVSVAVAARNAVGLRQVGVEDQAVVLHLLTKRRQDLVAMRTQAINRLHRLLMDLVPGGARRNLTAKRAAALLAAVTPAGAPAVTRWQLATELVADVRQLEQRIAAVEARIKTAVAESRTTLVELFGVGPVLAATFLGEVGDVRRFPTKHHFAAHSGTAPLEASSGQVVRHRLSRAGDRTLNHALCMMAMVQVRRPSAGQAYYRRKLAEGKSPKEALRCLKRRLSDAVYRCLLADQHLQPCPAGLRPV

SEQ ID NO: 180760 - protein, 363 aa, unidentified
MQNSITWVGMDVHAENIVLAALRDNSDAVLFRAEFPNTPKGRERLAGKLAENAPVRCVYEAGPCGYELRRFLEGRGIECDVAAPALIPRKPGDRVKTDRKDAEKLARLHRLGELATVFVPTPAQEALRDLLRTREDAREDLLRRRHRLSKFLLRQGRRYTEGERWTTKHWDWIRAQTFTERNSETVFREYIVAIEQEVERIRRIEQQIVEESGNPEVGNAIARLRALRGVDTITAMTIVTEAIDLNRFRSPRELMAFIGVVPRERSSGGRERRGSITKTGNAHIRRVLIESAWHYQRLPAGTPKTILARREGQPPEVIETARKAELRLHRKFMKLCGRGKPKGIVAVAVARELAGFIWALGRG

SEQ ID NO: 180761 - protein, 391 aa, unidentified
MEPILQCCCGVDVHKDIIEACIIKGVENSEYIRMQFSTMPDELKSFVKWLYENDCYHIAMESTGVYWRPVYEAIEDHSEYYECIMVVNAHHMRNLPGRKSDVKDAEWIASLFMHGLLKPSFVPDRIIRDLREYSRLYQNFVNEKSRYINRLEKFLQTHGFKLSSVISDIYGVSGRNILYKLSNQGFLDYEDVYQCIKGKTKRTPEEIQAAVCGKLNRPEMQLLTIILHKVDGAVADINEILTAMSELAQPYKNVLEILDSIPGIDTTAAMLILGEIGNNPQDNFERSENLCSWAGLSPRNDESAGKIKSKKILHGNPYIKSVLCQVAWAAVKTRRTPFGQWFWSHQGKLGRKKSIIAVSRKILTLIFYLIKSNSLYNPDIAMRPYSQSIET

SEQ ID NO: 180762 - protein, 343 aa, unidentified
MQTITTIGLDIAKSVFQVHGVDAGGQVIIRRQLKRRQVVAFFQKLLPCLIGIEACASSHHWSRELQALGHTVRLMPPAYVKPYVKRQKNDMADAEAICEAVTRANMRFVPTKTPEQQSGLMLHRTRHMFIRQQTAVINSIRAHLAEFGIVAPVGRKGVTELLRIVADPNDKRMPEVARACLAAQGTQLLALKEQILEFDRMILAWHRSNQTSKRLHYIPGVGPMLATALVASVADPRTFRSGRNFSAWIGLVPKQHSSGGKERLGGISKQGDRYLRSLFVAGALAVIRYAKIHGAGHRPWLTALLGRRPTKVAAIALANKIARMAWAVMAKGERYKQPAALAR

SEQ ID NO: 180763 - protein, 347 aa, unidentified
MRFYTNQHKYYCGIDLHTRKMYVCILDEKGEIREHRNMKTDRDAFLKAVAPYREDIVVAVECIFTWYWVADLCHKEGIPFVLGHALYMKAIHGGKAKNDKIDSQKIAVLLRGGMMPMAYVYPAKMRATRDLMRRRNHLMRKRSALYAHIQNTNSQYNLPDPFGPISRHQNRDGMAECFEQPAVQKSIAMDIEMIRTYDGILLQLERSIIKLANNHDPVSYALLQTIHGVGKIIALILLYEIENIRRFASVQDFASYSRLVKCAKESNGKKCGSGGSKIGNAHLKWAFSEAAVFFLNGNDPAKKYLDRLTKKHGKAKALSILAHKLGRAVYFMLKNKEAFDQKKFLNL

SEQ ID NO: 180764 - protein, 351 aa, unidentified
MSSMPCLQSKVFGGIDTHKDLHMAALVDETGAVIATHAFSTTRAGYRALLRWMTGFGQLQRVGVEQTGSYGAGVVRHLALASVPVLEVTGTDKAERRTRGKDDTLDAITAARAALEGKRISLAKHRDGEIEALRVLRVARQTAVKSRRSALQLLHNMIIAAPDEVRDQTRNLTRMQLIRTCAAWRPDVEAASDPAVATRVALKSVARRIIDLNDEIANLDEPIERLVRELNPKLLDQIGIGVEIAGQLLVTAGDNPERLRSEAGFAMLCGVAPLPASSGITQRHRLNRGGDRQANRALHMAAVSRLRLCPRTRAYATRRKAEGLSKREIIRCLKRYIAREAYHLITAETGP

SEQ ID NO: 180765 - protein, 337 aa, unidentified
MTLYCGIDLHANNSVVSVLDDQDQVRFEKRLPNDLELIKASLKPYREELLACVVESTYNGYWLVDGLMEDGFDVRLAHTGAIVQYSGIKHSNDETDARHLAHLLRLGILPEGHIMPKGQRGVRDLLRRRMLLVHQRTLHHLSLQSLIVRQTGQRLSTNQIKGLEQDDLKDLLPEPICVGGQITLLAMRWLDQAIDRLEQEVQTLLQTRQDYPLLTSIPGVGKILGATIALETGQIDRFPGPGHYASYARCVNTEKISNGKTKGRGNKKNGNKYLAWAFMEAAHYAAIWSPEIKRFYQQRKAKRHVLVAKKTVANKLARACYHMLSNKEAFDVQRAFG

SEQ ID NO: 180766 - protein, 371 aa, unidentified
MKQQSKSSKITVGLDLGDRRHRFCALDERGEVVEEGSICNERDSLRKLAGRYHGALGVMEAGAHSPWISRFLEALGWRVMVSNPRKVRAIYQHERKSDRHDALMLARIGRMDLALPYPVRHGTAEAQQDLLRIKLRDSLVRARVAVINSVRFTLKSLGYTVRNPSSARFHKVAMEEVPESVREMITPSVQALAELTARIKMLELEINTLAQMKYPQSAQLQQIPGVGPITALYFVLKIEDPNRFAHVRDVGAYAGLCPRRDQSGESDPQLRISKRGDAYLRRLLVSAAHYILGPFGPQSALRAYGLMLAADGTAQAKKRATVAVARKLAVLLLSLWKSQQPYQPFPGARLNGQQEDRRSGTIALHRMEATD

SEQ ID NO: 180767 - protein, 313 aa, unidentified
MTEAMWIGIDVSKDKLDCACGSKGELNTCPNEVHAIEGLAKQFLALSPAGVVLEATGGYEKLAVAVLARHKLPVVVINALRIRGFAKAQSQLAKTDAIDARLLALFGEQIKPQIRELPSEALRDLQALFARREQLVDMLSTEKTRLHHAQQVQVKKSIQALIRAIERQIEAANGQLLKAIENNALWSTNAELLRSAPGVGPVNSMAITIKLPELGKLNREQIAAIVGVAPFPHDSGKHRGARHIRGGRAEVRALLYMATVTAIRCNPVIKAFYQRLIQRNKLPKVAIVACMRKLITILNTMIKNQQPWTPNFS

SEQ ID NO: 180768 - protein, 345 aa, unidentified
MIIGCDFHPSWQQIAWLDSETGETGERKLVHAAGDAKAFYQQLAAPARIGMEATGNSQWFIELVQDSGHEIWIGDAAQIRASYVRKQKTDKRDAAHILKLVVEGRFPRLWTPDGEQRDLRQLVLHRHKLVEIRSRVKNELQHLSLNKGMQRKAKLWSEAGQKLLRELPLKPWAACRRADLLGLLALLNQQIGTLDQAVQQAADQHPQAKLLMTQPGVGPNTALAFVLTMGDVSRFPRGKQVASYLGLIPREESSGGRQKLGAISKQGNRLLRSLLVEAAQIAVRFDPGLRKQYLHRCHQKPKGVAKVAAARKLAVRLYWMLRTEKPYPEIVRIESSPRVPLVGAS

SEQ ID NO: 180769 - protein, 343 aa, unidentified
MQDVATVGLDIAKQVFQAHGADASGETLFNTKIKRENVLEFFSKLKPCLIGMESCATSYYWARQLLKFGHDVRLIHTSYVKPFVKRGKTDANDAEAINVALTQKTMRFVPVKTLNQQAAITIFRTRSLFVSQRTQLVNALRGHLAEAGLVAAKGIQNYSKLLKLMESAADTVLPTVMKQALTDICDQIHRLNDLVTKLDKEIERRVQHDENACRLLTIPGVGPKTAMCVIATIPDIHRFPSGRHFSSWLGLTPRTHSSGGRSVLRRITKMGNSELRTMLYLGGTVIMMRDNKTPIGRWAARLRARRPYKVAAIAVANRLARIIWALLTNGGVYDLTHGREASA

SEQ ID NO: 180770 - protein, 381 aa, unidentified
MRNVCGLDVHKDNVFVCIDKENGEKIQFKTGILTKELDALRDTLVANDVTEIAMESTSVYWMPIWRILENDFKLYLVNPYAIKQLPGRKSDIKDAEWIATCLRKELIRGSYVPSSEIQQLRQYNRRIFDINKQSVYIQNKIDAALQRCNIRIGNYISNVRAKSYCEIVDMLSEGKTSPELLIVKVHKRTINKWGRETILAALEGVVNKTDCRILKQLKEELDMLRRHKVECLVMLRDICMENYKEQILDIQTIPGIGEQGAMQIIAETGVDMKAFMTAAMLVGWAGLKPRNDESNGKFKSRSTTHGNKYLRKILIECAWGASRTQGCFFNKFSYHQTMVRKKNRQKVQVAIARKILVVIWNILEKGVVYSDVLEKDKTKDN

SEQ ID NO: 180771 - protein, 408 aa, unidentified
MNTLYVGIDVSSKSNVVYLMLPNGDKHSNFSVANSHEGSTQLVKRILSALTSYSLDTVLIGLEATNVYGDNLVYFLREDATLAPFNRKIHVLNPKQVKKFHDTYNDLPKNDYVDSFVIADCLRFGRINKEVYLGDYRYKALQNLTRARYFAVQSLTKEKQRFINVLFKKYSTMTQEKVFCDTFSTTALAVYDEFDSAEALANMDLHELTNFIIKKGKNRFTDPDAVAKAIQKAARSSYRLPKTINDSVNQVLSISITSMKALESQIKEFDKAIKAQMELLPNVLISIPGIGPVYSAGIMAEIGDINRFNNQAALAKYAGLAWKQHQSGGFEAEVTRLIPSGNRFLKYYLCEAAFSLVRCDKEYGDFYHLKYKEVNRYQHKRALALTARKFVRLVFRLLKDNRLYCPAK

SEQ ID NO: 180772 - protein, 387 aa, unidentified
MYFIGIDISKFKHDCAIIDEAGDTVTASWSFANNCEGFSLLKQLLDALDGQKKIGFESTGHYGHNLKLFLEANNFSFMEFNPLLVSKFVRSKSLRNTKTDSLDAVSIAQYLMTVEYKPYPPSFYHMDQLKSLTRFRDSLVRQHSRQLVELTNILDKVFPEFKPFFKGKLSATALYILTHYQSPEKIANMNAKSYEALRKKSRGKFSMVKFAQLKTLAKNTVGRSDAFLLKQMEITIDIENQLDAKIDEIESQILECIRALNPPILTIPGIGELTAAIILSEYGNINKFENPAQLLSFAGLEPGYYQSGLAEHQGHMVKHGSSHLRYALMNACLPLVTYEPVFAEYYAKKRAEGKPHRVALTHVAKKLLRVIFTLQTKNISYNPTLIR

SEQ ID NO: 180773 - protein, 386 aa, unidentified
MERNDLSRSLVAFDQNSTLVAVVELSLKSWLVAGLVPGLTRQPLKKQGADAAVLLGLLYRWRDEAAKAGRVIKRIVVAFEAGRDGFWLARWLRARGIEAYVIHPSSIPVSREHRRAKTDRLDTGLLLRAVLGWLRGEPKHCSMVAIPTLEEEDAKRPSREHESLVGERTRLVNRMKATLMRLGIRGFNVKRRKAADGLAELRTPEGVALPPNTLAELRHDMARLRVIGEQLKEIERTRLERLRKAPREGTHPMMLMLAKVKSIGIETADMLVHEVLSRGLRDQRAVARYGGITGAPDESGSKRREKGLAKAGNARVRRGMLQLAWRWVMFQKQSVLAQWFRERTENAGGRHIRKTMIVALARKLLIALWRYVTTGEVPAGAILRAA

SEQ ID NO: 180774 - protein, 333 aa, unidentified
MDTHADVHVAAALDPIGGLLGVGEFPATPAGYARLLDWLGGFGTVCLVGIEGTGSYGAGLSRHVTGAGVRVVEVDRSDRQDRRRQGKSDPLDAVSAARAAQSGRARGAPKGRDGTVEAIRALMVAKRSARSERTQTINQARALVLTGPADLRTRFTPHTVAALVAETAALRPRPGDVVGYATRVALRELGRRAEFPGSQLDRLDELIVPLVTAHAPGLLALYGIGPDTAALLLIAAGDHPERLRSEAAWAHLCATAPIPASSGKVTRHRLNPGGDREANHALWRIVITRMSSHPPTRAYVERRTGEGLSKKEIIRCLKRYVAREVYPHLRHAD

SEQ ID NO: 180775 - protein, 358 aa, unidentified
MKKESKHIIRNEEVFVGLEDSKKTWKLCVRSGGMVVNETSMPARYEVLRNYLNNKFPECQIHVMYEAGFGGFDLHDQLKAHGWDCVVTPPHTVTQEKCQRKKNDRTDCRRLAKNLENGDFRRCFVPDKELREDRQISRTYGQVQADITRVCNRIRRMLEFHGLDKDLPAGPWDSGTAYARLKQHLGKIEMSNSLRFSFDVMFKELEQLRELKNEILQQLRKLARSGRYRENVVLLMSAPGIGKLTAIRLALEWGDVSRFRRKEEFASFLGLVPSDYSSGEEEHRGHITKQGNRHIRSWLMECSWVAIRHDPVLLDKFRRVLRNCGSKKKAIVAVARKLALRLRRALLSGEPYVVGVIE

SEQ ID NO: 180776 - protein, 338 aa, unidentified
MKQSSLISIDLAKNVFQLGIIDSNWKVIKNAQISRKALPEFMIQQPQSEVVMEACYSSHYWARVFTSMGHLVHLIPAQHVKPFVIGDKSDRNDVIAIAEASRRPRVKFVPIKTIDQMEIQSLHRVRDRVVRLRTGLVNQIRGLLSEHGVITAQGLSSFHELLKQLVQPDNSELPPILKVLVQDSATEYAQLSERIRIYNNQLARIANTHPFCKLLMSIPGIGYINATAIVCMIGDGSQFANGREFAVWLGITPKQSGSGEKTYRMGISKRGNRYLRKQLIHGARSLVFRSTKRKDKLSQWVNNLRARRGANKAAVALANKLARIIWIMLQKKVNYQPA

SEQ ID NO: 180777 - protein, 315 aa, unidentified
MAKSKQTTPVVGGVDTHKDLHVAAVVDDNDQVLGTQSFATTRQGYKLMLTWMRSFGDLQRIGVECTGSYGAGLLRYMQVAGVDILEVTAPDKQDRRRRGKNDDFDAQSAAHAAFARRRTVTPRSRDGMVESLRVLKVCRKAAVQARRIALQIIQTTIVCAPDRLREILRNMTRMKLIRTLVAWRPDQTGYRDVEEAYKIAFKSLARRYLELNDEVADLDDMIEAIVTDLAVELIARNGVGLDSATQVLLTAGDNPERLGSEASFAALCGVSPVPASSGKTTRHRLNRGGDRAAKSALEIIAIGRLRLDPKTQEYV

SEQ ID NO: 180778 - protein, 334 aa, unidentified
MENVALIGIDLGKHSFHLHCQDKSGKALQRKKFTRTNLMQFLATCPSTVVVMEACAGAHFMARRISDIGHEAKLISPQFVRPFVKSNKNDFVDAEAICEAASRPSMRFVQPRTEVQQAMRALHRVRESLIRDKVKTTNQIHGFLLEFGISLPTGDTVIKRLSLVLVEHEIPEYLSRLLMKLHAHYLYLVEQITELESELNQSIKTDDTAQRIMTIPGVGPITASLLSSQLGDGKQFSCSRDFAASTGLVPRQYSTGGKSTLLGISKRGDKNLRRLLVQCARSFMMRLEHQQGRLAEWVREQLSKKHSNVVACALANKLARIAWAITTNHNEYQG

SEQ ID NO: 180779 - protein, 306 aa, unidentified
MDMTTLGIDLAKQVFQLHGVDARGRVVLSRRVKRSQLVEAVASLPPCVIGMEACGSAQHWGRAFAQLGHTVKLMSPQSVKPYVKTNKNDARDAEAICEAVSRPTMRCVSIKTVEQADLQALHRTRSLLVKHRTAVINQIRGLLAEYGWVMAQSPEKVRPALVRFLEDAESGLTAFSRETFSELYEQLRDLDARIERVTHRVEGVYRAHPVCRKLAAVPGIGPLTAPALLATVGRPQAFHNGRHLAAWLGLVPRQYSSGGKARLGGLSKRGSRYVRTLLIHGARAVVQRAERRVDTQGRWLMSRRWP

SEQ ID NO: 180780 - protein, 360 aa, unidentified
MTMLAEQVDGVIGVDTHRDTLAAAAVSPIGAVLASTDSPANARGYRRLLDFARQHVPGRRCWALEGIGSYGAGLAVFLDQAGEQVVEVCRPKRAANRGGRKTDMLDAIRAAKEALATEHLIQPRLRGEREALRVLLATRHGAVLASTAAINQLKALIVSAPDELRAELRKLKRPAQIAYCAQFRDRPAQDLEHRMTVRAMRSTAQRVQVLQAEAKELENEILALVRRQAPELLGLLGIGPITAAQILVSWSHQGRFRSEAAFASFAGVSPIPASSGLTNRHRLNRSGDRQLNRAMHTITLIRMRLDPSTKTYVARKIAEGKTSRDAQRCLKRVICRQIFKILERADGNRHGNVEELAQAA

SEQ ID NO: 180781 - protein, 426 aa, unidentified
MSERDCNKQVKRRQKINKNTLIVGMDIGSEFNAMALMNEAGEVLGRYPKIHNSREGFEYFKNGIEQVKKKAGLKEVLMGMEPTGHYWRKIAYYGKEQGYEVRFIRTTALRHQRELDESSSAKTDIRDAVTIANIVREGKYIDTVIEDGVFRELRMLGHVRENIQRYNVGTKHRLAAVLDDYFPELKDIFWSMKAKGLWAVLEACPFPEDVKKKNVAEIAELIGKSSRRKGQALEKAKKVYQGAQETVGLKYVGESDRYRLKACLVGIKKFEEELKEVEGKMKELLKQIPSAEILMSIRGVGMITTAVFLGELGNPKNFSDFKQVVKYAGYDPQEDDSGKSVGRKRISKKGRWLLRKYLFFMGMRVIHRNPFFRKYYDRKLKKKNRWGQLLKKKEAICAVVIKLIKVIFALLRDNRKFTTARPVMAV

SEQ ID NO: 180782 - protein, 357 aa, unidentified
MDKSRQLDFSGQSIYVGLDTHLKNWRVSIVVGEDVFKTFSQDPRPELLRNYLAKNFPKADYYSAYEASFCGFKIHRDLVNLGIKNIVVNPADIPTTDKERKQKEDSRDSRKIAKQLSQKDLKAIHVPDIEIEGDRSFIRYRKTLTKEIARTKHRIKSHLYYFGIEIPIQFSGKKYWSKRFTSWLLEVELPTESAKMALTGHMEMAELLRKKQYSTTKEIRKLSEKEIYKENYNLLLSVPGVGSLTAMILLTEIGDINRFKNLDKLCSFIGLVPMTNSTGENEKIGNITVRRNKMLRTAIVESSWIAIRNDPALMLAYRKLVKRMEPQKAIIRIAKKLINRILYVLKNKKAYVQAVVK

SEQ ID NO: 180783 - protein, 376 aa, unidentified
MTEITTYVGIDAHKKDLFVAMLIGQQSTPVTWQLGNEPQAVRRLVRTLEREAPGLVHVWYEAGPCGYALQRQMTTARVRCDVVAPALIPRKPGERVKTNRRDARKLVELGRAGLLTTVRPPTPDDEAVRDLARARDDAREDLQRCRHRLAKLLLRRGLHYAGRNWTAAHRQWVHSLDWAHAAERAVIDDYLLAIDHTEARLRELDARLADIAARDPYRAPVGWLRCFRGIDTLTAILILAELHDVRRFASAPALMAYLGLVPSEDSSGETHRRGRITRTGNAVVRRLLVETAWHYQHRPRIGVALTRRRQGQPARVIAIADKAQQRLCRRFRKLAAEHKPAPKIAVAIARELAGFVWAALQSVPLLDGATANATPQ

SEQ ID NO: 180784 - protein, 318 aa, unidentified
MDTQPIFVGLDVAKGHVDVALRPSGEHWQAPTSEAGLAALVERLRASAPALVVMEATGGLEAPLLAALAVAMPVAVVNPRQVRDFARAMGRLAKTDRLDAAVLAHFAEVVRPSKTELPTAESEALTAMLSRRQQLVEMLTAERNRLGATRVVSVRKDVEAHVAWLQQRLKDVDKDLDGMLRASAVWREKEALYRSVPGVGRVVATTLLAELPELGTLDRKKIAALVGVAPFNRDSGTMRGRRTIWGGRATGRSALFMAALVATRRNTVIKAFYERLLAVGKLKKVALTACMRKLLTMLNAMARNHTPWSPALAGPDPT

SEQ ID NO: 180785 - protein, 421 aa, unidentified
MKPQAPEAFAAFVGLDWADAKHDICLQAAGTARREFLCLAHRPEAIDAWVQSLHTRFNGQPVAVCLELNKGPIVSALCTYDFLVLFPVNPLTVAKYREAFTPSRAKDDPTDAELQVELLLKHRDKLTALSPQSPTMRALAQLVEHRRRLVGDKVRLTNRLTSALKNYFPQVLQWFQEKATAIFCDFLSRWPTLKAAQLARRATLEAFFQAHHVRSADVIATRIHALKSAIPLTTDEGVIAPTALLVQALVSQLRVTVQVIKDFDDAIAQRAQAHPDFPLFDTLPGAGAVFAPRLLVAFGEQRERYTSAAELQKYAGIAPVTERRGKKSWVHWRLQCPTFLRHTFVEWAAESTRHAFWAQVYYQQQRDKGKAHQAAVRALACKWIRIRSRCWQERTPYDESVYLQALKRRNAPLLHNLAKES

SEQ ID NO: 180786 - protein, 337 aa, unidentified
MEYFAGLDVSMAETHLCVMSRDGAVILDVKAPSTPAGIASALAQAPACRRIVFETGRMAPMLFHGLSQLGLPVICIESRQAHQALRSLATHKTDRNDARGLAHLARTGFCKPVHVKSLPAHAVRSLIIARKKLVGHRVTLENQIRGLAVVFGVRLPRALSRAFIEQALRASEGIPGLAAAMRGLVAARAAVLGAVVAIDVDIKRMARASEACRHLMTIPGVGQLTALAFTAAIDDPRRFRRSRDIGAYLGLVPRRYQSGEVDYTGSISKCGDRRVRTLLYEAANVMLTRYAGSLKLKSWALAIARRSTMRKARIALARRLAIIMHAMLRDGTQFEPA

SEQ ID NO: 180787 - protein, 339 aa, unidentified
MKRMAVGADIAKNVMQLHYIDAETGEIVNKPVKRAVFLEHFANRAPCLIGMEACGGSQYWARRLTAMGHEVKLMPGKFVKAFVMGNKNDAVDAKAIWLAVQHAERSVAVKTETQQAVLGLHRMREQLVKFRTMQINGLRGLLTEYGEVMGKGRAALDKAIPSVLERLVDRLPAILIDTLREQWNGLAELDKQIAGIERRLQMWMREDKACKAIAAIPGVGLLTATAAVATMGDAKTFRSGREFAAWIGLVPKQTGSGGKVQLLGISKRGDTYLRKLLIHGARAVLCLTKEPGPWAEGIRKRRPLNVAIVAQANRIARTIWAILAHDRPYEKGYVSVKPV

SEQ ID NO: 180788 - protein, 346 aa, unidentified
MGDAGYVGIDLHRRRSVIVQMDAAGEVLSTTRILNDKELLARELERAGPDTKVVMEATYGWYWAADVVKATGAELHLAHPLGIKGFNYRRVKNDVRDATDLADLLRMHRLPEAWVATPEFRELRELVRHRFKLVSARSGLKNGIHAVLGKQGVELGIGDIFCIGGRRRLEKRPLDPAFRLRVDAQLRLVDAFDEEVDAFDEEVDTVDAELRRRLKDHQGFHAIQAIPGVGPVIGATMVAEIGDVSRFSSPRHLCSWAGLTPRLRESDTTSKSGRITKQGSRVLRWACIEAACRTHPNHLRRWGDQITERKGNRLIARTAVARKILTLAFYGLRDGEIRCLAKAEAS

SEQ ID NO: 180789 - protein, 431 aa, unidentified
MSKFFYRPTVGIDVSADFSVVAILAPNGEIYRKPFKIMHSRNGFDYLVDQIKKAEEEFNMKTGIFMESTGVYHLTLFHFLKDTFEVCILNPLITNCNKNSGIRKVKNDKKDALTIATIGKFQNVKYSSDFDVEIYTLKSLCRDYYKFTDSKSAFKKKLSTDLRVIFPSYSTVFSDITGKTSIAILKKYSSPEAVLNADRNELINLISTSSKRGLAHSEKTYKKLYAAAEDAVYIGLKSPSLFVKIINTIAVIESLEIQIENLLTEIHLLMRSNEVSDEFKKNVQLLYSIPGVGALTAITIMSEIGNIKGFVKPKHLVAYFGLDPSVSQSGKFTSDRNAMSKRGTRIGRRALYAVALASIRKNRKGEPINKVLLNFYNENMKGKKKKVGLVAIMHKLINYIFSVLKNQKEYELRDPKIHSKMYLNNKSTRAA

SEQ ID NO: 180790 - protein, 339 aa, unidentified
MKFIGLDAHSNTCFFVVLGKTGRTLNTQRVTTNESNLLEFVRAVKGEKKLVFEEGVMSQWLFLLFKDEVDELVVCQPTEHDGPKNDELDAWNLADLLRVGRLKSVYHADNEMMNLRTLVSGHDDLIGEITREKNRLKALFRQVAIPTETKLYQSPEMVWQLPTDTQKYVACTLYEQLELFEEQRLGYHERFESNAKRFKEIKLLMSIPGIGVVRANQIVAIMVTPHRFHNKYHLFSYAKLTRHARESDGKQYGKKPAKGQPMLKAVFKSAVTSAMKSNTSFKRRYEDKRNDGADDRTARHAVSKAIAATVLAVWKSGKKYDDKHREVTHRRHQKSHSDT

SEQ ID NO: 180791 - protein, 416 aa, unidentified
MEQIFMIKENYIYVGIDLHKETHTAVMIDCYNQKLGEITFPNRPADFPKLVAKVKKCNTDGKTIVFGLENAYGYGRALAVWLIDKGYLVKDVNTAISHRQAKHRGAMYRKSDSDDAEAIALATLNMLDKLPDAYPNDAYWSLGQLVHRRDNIMKQRTRLVNQLHEQLCITYPSYKQFFNDISRPTALYFWEHYPSRKYLKGKSVEDLRAELVPVSHNKCSTKTCEKILDAVASDKVKNNAYQDARDMVTLSIVSDLQHYDKQLAEVDKMLEQMYKMLGCTLTTIPGVNVITAVKILAEIGDIKRFSNANKLAQFAGIAPLHLSSSGKGKDVATKQGNRRLQATIYFLAIQMVQVSSKGTPRNSVVRAYYEKRKAEGKTSQQALICISRRLISIIYGMLKHGTEYRMPVVESAGENR

SEQ ID NO: 180792 - protein, 346 aa, unidentified
MRIIGCDYHPSWQQICWMDTETGETGEQKLEHAPGEAERFYRQLSEPALIGMESTGNCQWFVEMAAAAGHELWTGDAAKIRASDVRQQKHDRRDAALILQLLREGRFPRIWVPSSEEKDLRQLLIHRHKLVRIRAQVKNELQHLALNRGVSRKRKLWSKAGQQVLRDLTLRPWASRRREDLLKVKGMLDEQIALLDGAAVKAAEQNEKARLLMTQPGVGPITSLAFVLTMGDVSRFQRGKQVASYLGLIPREYSSGGKQRLGPISKQGNWFMRMLLVEAAQTAVRRDPQMRNEYWHRCHRKAKGVAKVAAARKLAIRLYWMLRTNTAYPEVVRVESSSRVPLVSAS

SEQ ID NO: 180793 - protein, 342 aa, unidentified
MDHSAGLDVSVKETSVCIVDDTGRIVREVKAASEPEALLQVLKSPAYHFKRIGLEAGPLSQWLFSALAEPGLPVICVETRHMRAVLKAQINKSDRNDARGIAQMMRVGLYRPVHVKTLRSQKLRTLLTHRKLLQSKAIAIENDLRGTLRNFGLKVGMVGKVKFEARIKELVENIPDLAVLVEPLLTVRRVLREQFVIQHRRLLAIVRDDEVCRRLMTTPGVGPVVALTYRATIDVPARFQKSKAVGAVFGLTCAKYQSGDVEWSGRISRCGDEMMRVMLYEAAQSMLRSKKWSWLKAWAMQIARRRGMKKAIVALARRQAVIMHRIWVDGTEFRWTREVAAA

SEQ ID NO: 180794 - protein, 352 aa, unidentified
MDDPILAIDLGKFNSVCCWYEPASKAATFRSTRTTRAELEREMRRLPVSCVVIEACSPAGWIRDTCSELGLRCLVANTTGAAWQWKNVKRKTDRDDALKLARLAAIGELPTVSLPSRPVRQWKSLIGLRKRLVGERGRGQNRIRGLLVGQGLAAPVGNKAWTELGLAGLEQLAKPLPECGPEELWRGELTSLIARHRFVEAQIREAESALDALAKRSPAVQLLLSVPGVGVRTAEVIATHLHPERRFQSAEQVSAYAGLVPRQYQSGLSDRRGRSTRRGPKLLRAALVECAWCSLRYNGWALALWRRLLANGLTKKKAVVALARKLLIRCWAILKTGQPWRNPLTVVTPLAG

SEQ ID NO: 180795 - protein, 422 aa, unidentified
MVQVETTKEKERREAMISVGIDISKEKFTICALEQGSKIIWKPFDVSLNKRKVEEFLEKLEKLKEKVKITMEATGKYHLPILYELKDRGYFVAVINPLKMKQFCRALNFRKAKNDKIDAKQIAEYGLMYWKELEEYKIDEDNYMVLKELNRNYQHYMELRINQINFIDQTIHQTFPGIKKLIPHNSGDFSKDKLLDFLEKWWHKDLVLKKTEEDFVEEYKTWAKEKRYHPNANKAKTIYKIAEDSISTQPSHNSKLETNIREGINLIKQINQILNRILSQMIEISEPLEEYKEAKKFSGISEKLAVQIVAEFGDLSKFKNKKSLISFIGIDAPPYESGNFKADQRKISKRGNAILRKVGYQAMKCMMSAKNPENEIYKYMIKKEKEGKAKKVCKFAGLNKFLRIYYARVMESKAEKKELKVA

SEQ ID NO: 180796 - protein, 382 aa, unidentified
MQTIDTVNPTILLAIELSASTWLVAARVPGLEKPHLHRIDGGDTAALLALISSLRARAARGLDATIGVVCCFEAGRDGFWLHRLLTAHGVVCHVLEPTSILVNRRARRAKTDRLDAEGMLRVLAAYLRGDHQACSMVRVPTPEEEDAKRTHREREKLVQERLRIENRIEALLFTQGIRKRPSLRSWERDLAVLRTGDGREIPRHLRAELDRLRRRLVMTLELIREVEAERDQAAKTKPQDQTCHKIAALCRIRGIGKNFAAVLTREVFYRSFDNRRQIASYVGITPMPYQSGGMDRDRRISRAGNPRARTTMIQLAWLWLRYQPGSELAEWFRERVGTLAGRTRRIAIVAMARKLLIALWRYAETGVIPAGAEIRAETTVAA

SEQ ID NO: 180797 - protein, 310 aa, unidentified
MQNCVGVDVSKHHLDWVSGGEGNVARVPNTPAGIRRLITSLRKLDLSLIVVESTGGYERALVERLDENDLPVVLVNPWRVRRFGEGLGVLAKTDPIDAQILALYGERARPRRRPLPSPRQRHMADLVSRRRQLIAMIVAEKSRLDTASAVIRRDIQPLVKVLERRVVKIDERIDVAIADDPETSETRTLLETAPSVGPGVARTLVVDLPELGALGRREIASLVGVAPYAKDSGRKRGVRRIRGGRSGPRTALYLAAMNGARFNPVLKAFYLRLREAGKPPKLAFIALARKLLTILNAMVRDRTTWRKATA

SEQ ID NO: 180798 - protein, 329 aa, unidentified
MTLFCGIDWAESHHDVAIIDGGGQLVAKRRIPDDPSGFAELTEMLTAAGDCAEDPVPLAVETLRGPLVASRRATGRPVYAINPLAVARYRERDSVARAKSDHGDAIAPIAAAATKLSASRMAAALRRAGRTRGIDQTAAEIKAELRKTQLRQSVLVETAMAKQTLALLAALDTACNNVEDLGQAAAELFQQHPDYAIITSFPGLADSTGARVLAEIGDDRARFVEARALKAYAGSAPITRASGRSISVTHRHIKNNRLANAGRMWAFSAASNCEHARQQCRRRRDHGDRHAAATRHLFNKLPGQLHHCLQHGQSFDEAKAFPAPLRDAV

SEQ ID NO: 180799 - protein, 387 aa, unidentified
MARKRTLSTLDTSIADEAVGLDLAKEDAAIAAFGPDHEGPYLIDRIPYDKLYELLADMAPTLVAMEPCSGAHQIAEQIQELGHEVMMISGRHVQAWVKDHCNGQKTDLNDAFAILNLAYDRWLTPIRGKTREECRLLALQSSYRQLKGQRTKTMVHVEATLHAWGFPIRTGSFNQKALHELIDANREAFGDEVVETLHLMINRVHDLDHDIATVLKLLTEATQRDPRASLLRSIPGFGVLTTSRWCAVVGDIARFDPPKQTMAFIGLVPNNRITGHHTETSSGREARGQGKMSKRGDKMLRSLCILGAGALCLMVRNDRLPDCPFVASIKERLASPRPWFKVLVYVAAKLVRIATALLKYGETFSFEKAGISKAVLKQWELEQAKAA

SEQ ID NO: 180800 - protein, 424 aa, unidentified
MKVTYQTCCGVDVHKSFLVATIVKTTGGIEPSYQKKRFSTFNNSILEFKQWLLDNHCHDVCMESTGKYWIPVFNLLEDQINVTIANPKWVKAVKGNKDDTKDSKWIGDLFRLGLVKGSYIPCKKVRILREYTRYRYKLVSCRSSEKNRYQNALTVCNVALDSIVSDIFGKSSTSIIDYLLEQSGTSINHEEIASKLLRSLKSKEDAVIESVEGYQMTDAQKYRMRLVRAHMDYITAEINDVDKMIENMISSNPDFENAVQFLCTIPGVKRDSAITIISETGTDMSQFSSSKRLCCWAGLTPGSNESAGKKKSVRITRAGVYLKPALVQCAHAAVKSDKSPYYKKKYESLVKRRGKKRAIIAIARMILTAIYQMLSTGEQWNPSDLYKIDMPVALVEKQKAKAIKQAKKLLQREGLLPPDEPLAS

SEQ ID NO: 180801 - protein, 321 aa, unidentified
MNVIALDISKDTADCHLSGNGKEETLKIDNSISGSLQLLGWIKQHKIRKCVISMEATGIYYETLANHLSQYHQVYVINPLKIKNYSKAFFNRTKTDKADARLIAEYTKRHLDKLDGYHAPEADQYRLHKLIAAKEQIMLQSRQAKNRLHAAGNDEFVKTVYQTIVRQLAEHQEHIEAEIKALIAADERLAEQCGNLATIAGIGEKSAVIILHHLNGRTFATANKFTAYAGLSPKIEQSGISVNKRQVLSSFGNRRLKAVFFLPALNAYRMNLFPQLVRNLEAAKKPKMVIIVAIMRKLAKICYYMHKSGKPFDVRRYQSAP

SEQ ID NO: 180802 - protein, 429 aa, unidentified
MNDATDSLSLFRVMRSSVRGSEKHLLVGIDVAKCNHHAFFGTSNGRTLHKNLVFDNSTKSFESLRSLARDLQNQHGLVEVVYGVEPTASYHKPLAEYLIRQGEQVVYVSNVVVKNNRALLDGRWDKNDKKDAANVADLVGQGRCLYYDVPEVSLRELRSLIAFRIKLKKQEHALRMRLRNNLFAQYFPELDRLYMKTGQPDDMVLSIAEHCLDPREIARMEFDAFLKLISTRKIRIEQERRLRELWEAAKNSAGCLVHDAARWEAKSLVSQLKTLREIVKDNELRMKMMSQHYPEYQCLLSIPGFGPIVSAMVLGAIGDPSRFENQRQVLRLAGLDLSAERSGKNSDSVKPVISKQGKAALRYALVQAAMVASALNPTVRSYFSDLIKGRELERGIKLKMKVKLAAKLLVIAWTLMKRREQFNPSCFPG

SEQ ID NO: 180803 - protein, 341 aa, unidentified
MKRLSVGVDVSKKTLDVAYWAQDESESVFVGKFANNHKGFQAIQQRIEERSETIGATVIHLVMEPSGGYEQPFAHFAHQAEWKVSLPNPLHPKRWAESQGKRGKTDQQDAKNLAHFAFVNDPLTWKPLPPEVEQLSHLLDRLDNLKKMLSQDKNRAQSAEYHVNGDKAVLDDMKEVIAFLEQQIQKLQEVIKEHLKAHPHLKKQRKLLLTVSGVGDKNVLYILVMMHRWGVLTDGGGDNKGLVAYLGLDPKHHESGTSVRKRSGISRQGNKDMRSRLYMSALGGIKAKNSPLTAFYKRLVVEKGKPKKVALVAASRKILVWSWAVFKSETFFDTARPEHNQ

SEQ ID NO: 180804 - protein, 417 aa, unidentified
MFKIFRKNCCGLDVHKTWIYACVGITDENGRTQYKQARFSSFSKGLRELAQWLASYNCRDVCMESSGKYWIPVFNILEKTCFVTLAHPKYTKPQRGNKTDRKDAKWICDLFMCDMIKPSFIPPPDIRHLRDLVRYRFKLTNCLTGEKNRAQNCLTVSNLKLDDVFSDVFGKSAMSITRYILDHPGEPFDVAPFVHGRCKTPIAEIQAAVDGCVSPEQALKLREILAHMDELNAHRQAIETEILRLAAPYQLPLELMRTAPGLSSDPLTSVAILSEIGAVMSVFPSAKHLCSWAGCCPRSDKSGGKVKSTRISRAGVYLKPLLVQVANAVVHSDRYPEFKERYRRIKARRGHKKAIIAICRMLLTAIWNMLSKQEPYCAKGYLVDRQTGQSKIITKAQGIHLLRQRGYLIKDDTPAPA

SEQ ID NO: 180805 - protein, 344 aa, unidentified
MMTHFVGLDVSQKMTAICIVDNAGRRLWRGQCPTAPEQIAAMVRRHAGDNSRIGIETGAMTPWLVHELRALGLEVICLDARHARAALKMQINKTDQNDAEGLAQIVRTGWFRSVHVKSFDSHRARALLGARAQLVGMTTRLSNHIRGVLKTFGLLPGAMRGLRFDRKVEVLLEDRSDVAPIVRPMLVAWRQLREQISAFDKAIRVLVRSNSPCRLLMSVPGIGVLSALAYVSTVEDPARFSRSRSVGAHLGLTPRQYQSGDVDRSGRVSKCGDTLARTLLYEAAVVIMTRVKKASELKDWALAIAKRSGIGKARVALARKLSVILHSVWRSGKPFRWTEQAITG

SEQ ID NO: 180806 - protein, 333 aa, unidentified
MMDKQSEGRTIFGGVDAHKDLHVAAVVDDKDRVIAGESFPTTRHGYRLMLEWMRSFGDLRRAGIEATGTHGAAGLRHFRKAGVQVLEVTGPDKHGRRARGKSGTFDAEAAAHAAFSGKRTVTPKSRDGMIGALRVLRAVRKTAVQARRIALQMMGNTIVAAPDAMRDSIRHMTRMPLIRTLAAWRPDMTACRISLKSLARRYLELHGEIADLDKMIQAIVDELAPGLVAQDAIGYHSAAQLLIAAGANPDRLKSEASFAALCGVSPIPASSGKINRHRLNRGGDRAANSALHIIADGRSKREALRCVKRCIAREVYRLIRARYDQINQTQIVA

SEQ ID NO: 180807 - protein, 353 aa, unidentified
MKKIAIGIDFSKKTFDVTIVRRDEDTYIDLAYSKFNNDAKGFRTFEKWVKTSLKGMPESRNKSEWVFCGEHTGMCSIPLCDYLAKKQYFMWLESALVIHRKCGIVREKNDKIDSKRIAEYALRNFSTDVKPYELDSRDLKKLKSLYAAHDMLTKDKVSKINQLKSGTLDASASARHEIDKQLSHIRKSLDAVDEEIKYLLSESQEFSHNFNLLNTFKGVGVMTIACLIIKTRNFKDMRDSRELGCFIGVVPCKKQSGTSIDKPASTSRYRDRSANSLLTNCVMSALSHNNPIIRPYYDRLLKRGVHPNKARNNCKFKIINVLLAMLRNDTSFNMSIHGKSKDKWHTEREAAAS

SEQ ID NO: 180808 - protein, 339 aa, unidentified
MNHNVIGLDIAKHVFHLYTIQADGKVFKKMLKRQEVLVYFANYPNSLIGIEACGSSHYWARELIKLGHDIKLLNARHVKAFVKGNKNDFNDAEAIFDAVSRPNVRTIAIKTADQQDIQLIHRLRQDAIKRRTALVNQIRGLLSERGIVIGLGVNHIRKRLPELLEDAENALTILSRAAFAEQYGHLLALDKEIKRYDQQMNQLCQANELSQRLAEVPGIGPLTATIVAADLGEDRHYVNARHYSASLGIVPRQNSSGGKSNLLGISKRGNRYIRTLLIHGARAVLRTCQNKNDKLSLWLQNLMQRRGFNVAAVALANKNARILWALAYKDEHYQAAASV

SEQ ID NO: 180809 - protein, 370 aa, unidentified
MGKSSALHIGLDVHANSIDVTAAETGAGREVRHVGSIGGDLASLDRVLRKLRSDGAKLHVVYEAGPCGFVIARHLREQAIDCEVVAPSMIPRRPGERIKTDRRDSVKLARLARAGELTPVHVPERADEAIRDLSRAREDAIRAQRAARHQLKALLLRNGIRYAAKSAWTAGHRRWIARLKLPDAVQQIVFQDYVNSVEESTRRVASLSEALQAQVKGWSRAPLVRAYEALRGVQLVNAVCLAAELGDLRRFANARELMAFVGLVPSEHSSGENRRQGRITKTGNAHARRALIEAAWHYRLPARVTPIIARRWDGLPKSVTDIAWKAQLRLCARYRRLAARRLLPQKVVVAIARELVGFVWAIGQIVEQPH

SEQ ID NO: 180810 - protein, 400 aa, unidentified
MIAAVINADGVIRMPQPNDLSRSRASFEQDATIVAVIEMSQSSWLIAGTVPGIERQPLKKIVPDAVALLRLLQRWRDEATRGGRCVARIAVAFEAGRDGFWLARWLMRHEIETHVIHPTSVAVSREHRRAKTDRLDTAMLMRVFLGWLRGERGHCGMVAVPSLEEEDARRPSRERENLVSERTRIVNRMKAALARLGIRGFKPELRKAAQQLESLHTPEESPIPPNTLDELRRDLARLAILRGQIIAIEQTRLERLEQAPHTGANAMIRLLASVIGVGIETADMLVREALSRGLRDRRAVARYAGLTGSPDESGTRRHEKGLAKSGNARVRRGMIQLAWRFLMFQRDSVLAQWFRARTEGVKGARKTTMIVALARKLLIALWRMVTTGEGPQGVVLRQPT

SEQ ID NO: 180811 - protein, 370 aa, unidentified
MNEGKDIILAVDYHAENIEFRWFNSADGEERTGKYPTTPENIVRQVEEATREVAAGGRVVWIMESTTGWARVKELLGDRAEFVLANVLEMPLPPKARRRKTDQIDTGRLLREYLNGRLPRSFQPAAWWRQVRRLVDFRQDLVERQTALKNWITSLLHHETWQDRENLWSAAGQRRLRAMPLPESDRQLVAWKLEQWAQLQRQQREIEERMQAVYQVWPEAQWVDQIRGIGMMTAVSALAHIGPIARFATPEDLISYAGLAPGVHNSDQTRRNGRLGGGGTDQHLRYLLVEATQWLCQIPRYRPTYERVMAKRGKKVARIVLARLVLRSIHKMLRDRVRFNPAPRPRRALPTFTREPGARLGITRAAGGSR

SEQ ID NO: 180812 - protein, 334 aa, unidentified
MENIALIGIDLGKNSFHIHCQDRRGKAVYRKKFTRPKLIEFLATCPATTIAMEACGGSHFMARKLEGLGHSPKLISPQFVRPFVKSNKNDFVDAEAICEAASRPSMRFVQPRTESQQAMRALHRVRESLVQDKVKTTNQMHAFLLEFGISVPRGAAVISRLSTILEDNSLPLYLSQLLLKLQQHYHYLVEQIKDLESQLKRKLDEDEVGQRLLSIPCVGTLTASTISTEIGDGKQYASSRDFAAATGLVPRQYSTGGRTTLLGISKRGNKKIRTLLVQCARVFIQKLEHQSGKLADWVRDLLCRKSNFVVTCALANKLARIAWALTARQQTYVA

SEQ ID NO: 180813 - protein, 340 aa, unidentified
MYYIGLDVHKKTISYCTKRVDGTVQAEGKLDSTRLALDAWLPGLPQPWTGALEATLFTGWIYDYLKPHAHALKVANPAMLQAIAVAKKKNDQVDARMIADLLRCNLLPQCYMAPSEFRERRRTLRYRNLLVRQNVQMKNRTAGLLMETGVAYNKQKLHGKAYFAQLRKSPEVPECIQPLLKIGRESIERIAKLDRALMKALKSDPLLVARVERLLTIPCVGEVTALTWVLEVGEVSRFSSVKDAVSYCGLCSAERSSAGVQKRMPISKQRNKHLQTVLIEAAKLSQHFNDDLTAVHEKALAKGNKNRATIAVARKIAAYLLAVDRREKPFLEGEESADAA

SEQ ID NO: 180814 - protein, 443 aa, unidentified
MARKRTQQRFELVHPHCAGIDIGSREHWVAVDRKHEKPVRSFHTFTDDLVNLADWLAALKIEVVAMEATGVYWIPLFELLDSRGFKVYLVNSRSTRQISGRKSDVLDCQWIWQLMSHGLLRGAFRPADAICSVRALVRQRATKVRDQAQALNRLQKALSQMNIQLANVISDISGVTGMRILRAIINGERDPQTLAQLMDRRIKADKETIARSLHGNWRLEHLHALEQEIECYDFLEQQIQACDKAISRALAQLPEREEAPQPSRKVLRSQHRSAADQTELHQAVWRVMGVDLTAIPTIGVDTALVIASEIGPDLSRFPTGQHFCSWLGLAPPTRISGGRQLAGSSPKVLNRAAQALKQAASNARNDKSFIGASHRARLTRMDTSCAIKATAHQIARLIYAMLTKGQPYVEQGIEAFEERSKDRQLRALLRKARKLGMDLVKAA

SEQ ID NO: 180815 - protein, 446 aa, unidentified
MLPCASSLSPAEPDWAAFAAIDWASRKHAWSLAPVNGGPPESGILDNTPEAVELWAMALHHRFAARPIAISIEQKRGAVIYLLAKYAHFVLYPVPPSMAASYRQAFFPSGAKNDPGDAGLLLEILLHHRQRLRPRHLESPTTRLLQFLVEQRRQFVQQRVQQVQRLTDCLQQYFPQLRLWFDSLDSPLVAALLDRWPELPQLQRAHPGTLHRFFVEHNCRREELIQERIQAIYAAVAAIDDAVVIEACTRKTSTLLHLIRSLQQEIAELEKRIRTLTEEHPDAPIFASFPGAGPATVPRLIAAFGTCRDAYVNASDLQRVSGIAPVAISSGNAKSTRMRRACPKFLRQTFHEFAAQSIPYSAWAKAYYQHHVQQNKSKHHAAVRSLANKWIRILYRCWKDHRLYDESIFLESQRRRGSLLGADLASLAGVQWQSEAGFQKIQKKPS

SEQ ID NO: 180816 - protein, 342 aa, unidentified
MQVKVMGIDIGKSTFHAVGLDQKGEIVLRRRFTRLQLLAFTANMPSCLIGLEACCGAHHLGRALIAQGHQAKLMPGQYVRPYVKTNKNDFLDAEGIAEAVQRPRMRFVPLKSDDQLDLQALHRVRQRLIGQRTAITNQIRGFLLERAIAVRQGRAPLQKLLPALLEDGHINLSGRIRQLLQHLNEQWFNLDEQIKKMDQHITTAVKESSDCQRLVTIPGVGPITATALVASIGNGAAFKQGRSFAAWVGLVPRQHSTGGKTKLRGIGKRQNCYLRKMFILGAQSMMMHMRDSSPPYSAWIKKLATRAHHNVVVVALANKIARIAWAVLSKEESYREPSPIAS

SEQ ID NO: 180817 - protein, 316 aa, unidentified
MQSILDLGADVDSRFVVVACAAGSFRPQRIANERKAILAWLRAVPRGSRLAMESTGGYQELLAELGHRAGMQVFVINPRDLRRYAEGIGRRGKTDRMDAEVIARYVAREHSELHAYVPPSKAQRELAQLMRRRAKLVQTKGSLTQSLRGIPALRCEAKQLAARIDRLIERVELMMQRALQQTPPARQAAEHIATIPGFGPLGSTCLGHSFTRLPYENSDAVVAASGLDPRPEDSGQKHGRRRLSKRGPAEQRRILFNCARSAARTQLWRPYYQAQLAKGLSSTAATVILARKMLRVAFAVYKHRQPFNPSLLGSCP

SEQ ID NO: 180818 - protein, 458 aa, unidentified
MPKKSSNKAKSQRSRERALLQKVHLNAAGIDIGADAHWVAVPEDRDGYPVRSFGVFTRDLIALCDWLKRCQVETIVMESTGVYWIPLYQMLERKGFEVRLVNAHHVKNVPGRKTDVKDCQWLQQLHTFGMLGGSFRPQAQMCVVRSYLRLRDTLSKDCNSLVQRMQKALTEMNVQLHRVISDITGVTGMSILRAILAGERDCLKLAQLKHPQIKSSAQDIAKALEGDYCQEHLFALETALELYDSYQLKIMACDRHVQDALSAFEPKASAPVPDLNRMRSAEKRQEALRRHHLEEMTGADLTKLPGLDLLAVERILSEIGLDMSRWPSEKHFCAWLNVAPNNRISGGKILSSKPRKNANRAAAALRLAAQSAMQSKTAIGAFIRRIKIRLGAPTAINAGAHKLARLVYRMLKFGKAYVETGQEAYEKLFKERALRNLQRKARELGFQVTPITAAVLVS

SEQ ID NO: 180819 - protein, 348 aa, unidentified
MEYAIGIDIHRRYSQISVMQQDGKIIERQKVNNDRKSFERVLEPYSDHETKAVIESSWNWGLLYDMLSDYVDEVKVAHPLKVRAIAEARIKTDKISADTLAHLLRTDLIPECYARSKDSRRIQQVLRQRMFLVRLQTMVKNRIHSLIDRQENAREEALTYTDLFGAKGMQFLRSADMPALERKLLNEDLELLETLRMRIRSIEAILEQLKENDDIVERLKTIPGIGKFFAMLIRHEIDTIDRFQTSDKLCAYAGLVPSTQSSGGKTYHGGIIKQGNKYLRWALIEAVVHAIQADPDLRSYYESMKLKKGANPAKVATARRLLKIVYQVWKEKRFYRRQSSLRTALVTS

SEQ ID NO: 180820 - protein, 444 aa, unidentified
MELVYERCCGLDVHKKMVVACLILPDEKGKQSKEVRTFRTTTQELLLLRDWLVLTGCTHLAMEATGVYWKPIYNVLDGAVELLVVNARHIKAVPGRKTDVRDAEWIADLLQHGLLTSSFIPPAEQRELRELTRYRTSLVQERARAVNRLQKTLEDTNLKLGDVATDILGKSARAMLEALLAGQTDPAVLADLARGRLKTKRAQLEEALVGVLKPHHRFMLTEHLALIDTLDEAIARATHEIEVRMGPPDPSPQEPQPLAEEESQTGDQEQEPQEKLPLAWDEAVRLLDSIPGINPRAAQGILAEIGTDMRRFPSARHLASWAGMCPGNHESGGKRLSGKTRKGSPWLRQLLVEAAHAAAHTKNTYLSALYRRIASRRGAKIAMIAVGHALLVIIYHMLSEHTSYLDLGSNYFDERDRQSTEKRLVHRLEKLGFQVSLQPATQVA

SEQ ID NO: 180821 - protein, 415 aa, unidentified
MTEEQLTVKRYYIGVNWGDRLHQVYVGDHEGKKVREIKVPETVEGLAEIGRWLDEQRANSFELWAAIEKPAGRIVDFLLDHGVEVYPVNPKAVDRVRDRYRMSGSKSDGFDAYVLAEFLRTDQAHLKALRPSSENAQELKMLCRDQRRVVRLKSRLLNQLTTTLKEYYARPLEVFQDIETEVALDFLTRYPTPAHLSALKRKEFNRFATQQHSLSKQRCEQLWEKLQQPQLGVPEHVVRAKAQLVEVLIDQLRASIKAVKTYQHKVESFFVSSPAAHLAKTLPGGKSGTLVASIWAELGDAQGRWESSSHLQAEAGAVPVTKASGKSHVVHFRFACNKHLRYSMYWFSFVSLNNSEWAKLYYRSQRDKGHNHPQALRALGAKWLKIIFVMWRDHKPYDEKFHLANVALQKMRQAA

SEQ ID NO: 180822 - protein, 347 aa, unidentified
MKILALDLGKYKTVGCEYERETGKHRFKTSFTTPAGLEQLVKEVKPERVVIEVCNIAGWVCDRLRGLGVEVQIANTNEDAWRWRKVKKKNDRRDALKVAQLSAVNQIKEVHIPNIEVRQWRALIAFRQQLVRRRGRMKNHIRDLLVSEGRLLPRGNSCWTKIGIGDLEALARPLSEVAMNELWRGQLEIELRQLKEVQQEITAVEQKLDALAAADPRIKLLRTIPGVGPRLAEAIVALIDEPGRFQHAREVSAYIGMVPKELDSGETVRRGGITKQGSRLVRSLLVEVAWAGLRHNSWVRETYQRISGGKKSRKKIAIVAVGRRLLVRCWAMLRDGTSWRTPVSAAA

SEQ ID NO: 180823 - protein, 314 aa, unidentified
MKKAVEIFVGIDVSKTWLDVGVHEQKDTTRFSNDEAGIIRLVKKLKKLKPKLIVLEPTGGFEMLVVAELSQASLPVAVVNGKRVRDFAKATGQIAKTDKLDARVLAHFAAAIRPEVRSLRSEVEEQLTALLTRRRQILDMLTVEKNRLVSVRAKMRPDLEAHIHWLSNHLKELDQEIEEFVKGSPLWTQKDALLQSVPGVGPVTSATMLGMLPELGCLNRQEIAALVGVAPMNKDTGNKQGKRSIFGGRADVRSVLYMAALSAKKHNPFIRKFYQRLIQHGKEKKVALTACMRKLLVILNAMVRTNQPWRSQTA

SEQ ID NO: 180824 - protein, 427 aa, unidentified
MVDETSGDNPVTRGVLFVTEGQITVGVDVGSHMHRVAIGTPEKKIAEEFDLPHNKDGFERFFGRITHYEKTYQVPVVVAMEGFNGYARPLDRMVQKKGYRLLNVNNLKLRRFKEIFPSPAKTDVIDARKILELVRLQPLLTDQEVILQEVHEVPKEHQILKRLTRRCRQLVCEKAAVLNRMQSDLHAVSPELAGLATNKDGLAFLRFLTCREDLRQLERVQKRTLLGIKGIGEGFAGKVKEWQKKAQFSEEAEYAGPMIIEDARRILELKERIKALDRQIGDLCERSGLAGIVRSIPGFGLTCTSEIVAEIGSMDRFRTERSLAMYLGMAPLDNSSGKRRGTRHAKQVNIRARTAMMTAMNRHILRVEESERYYRKKRNEGKKHNQAIRSLGRHMVRVLWSMIRDGHFYENREVKNIMEVVKEAIPA

SEQ ID NO: 180825 - protein, 354 aa, unidentified
MKYYTSTTQFNCGIDLHARQMYVCVLDRDGKKLVHTNIKNNDFAYFLKLVAPYRHDLTVCAECMFGWYWLADACEAEGISFVLAHALYLKAIHGGKNKNDRLDSEKIAHLLRTNFIPPGYVYPAAKRPLRALLRQRLLYVWNRTELLARIQSHQLAYNRPTQRQTLYNRDAWSEQLLATEPDPVRQFTLQNDLALVGHYDTQLAILEKELLKLTKQTSSRDFTLLQTTPGIGDYLGLTILHEIGDIARFPTVKNFLSYCRLVKGTVASAGKIKGLRGAKLGNPYLRWAFGEAAVVAKRDPLVIGPLAQRREARLNHKFKANTVLAIKLARAVYFMLKTKTVFDPERLVAALCKN

SEQ ID NO: 180826 - protein, 341 aa, unidentified
MSDYSYFCGIDLAKNHFSLHAVDQNGKVILHKSVTRSKLLTTIANIPLMRIGVEACGGAHYWARTLNKLGHDARIMAVKYVIPYRTKGKNDLNDAVAICEAVQRPSTRFVPVKSPEQQAILSVHRMREHWVRERTALMNRMRALLSEFGLTIPVGRSSLMKQVPLMLEDAENELPHLARTVIADAYRHLGELNQRIADTEQVFDSFAKVSTNVQRVMKVRGIGPQTATAILASIGNGSQFDKSRDFSAWLGLVPKQYSTGGKPRLGRITKHGDKYLRTLLVHGARTVIANLGDKQDKLSQWCRGVLERRGMNRAIVALAAKNARIIWSLLHNQTEYENYAA

SEQ ID NO: 180827 - protein, 350 aa, unidentified
MLIIGCDFHSRFQQIAMLDGQTGEVIERRLEHATGEARAFYAALPGRARVGMEATGYAQWFEGLLAGQGHELWVGDAAEIHAARVRKQKTDSRDACHLLDLLLQDRFPRIWVPSPQERDVRQLLRHRHKLVCSRTSVMNQLHALAMGQGVCRKQKLWTAAGRRELESLALGPWASRRRRELIEMLGRFDTSIQELDQAVIQEADRHPAAMRLMEHSGIGPVTALAWVLTIGPIERFEKSRQLVSYLGLNPRESSSGGKQRLGSISKQGNSMLRSLLVEAAQTASRFDPELRRHYVRLKFRRGRAVAKVAIARKLVVRLYWRLREQVSAAPPARTQGNPGNFLMELSPSTK

SEQ ID NO: 180828 - protein, 335 aa, unidentified
MEKVVVGIDISKDDIHACLKESVGDAGSKLKGTHKFPNSHLGFTELQYWVSQRSREAGSVCYVMEATGSYYENLAYFLYENHLKVSVVLANKIKYYAKSQNLKTKTDKVDASLIADFGLSQKPALWQPMSCDYRQLRDLCRERISLQQARSRAKCQLDAMHHSHDKLASILHIKEEQIALYDKLLLEIEQEIRDKVSSDAELSRKVSQIREVKGLGLLTIVTALCETNGFLLFGNIRQVVSYAGLDVKMSQSGHYKGRTRISKQGNTRLRGCLYMPALSAVRSNEPIRNLHLRICERNPNTKMKGIIAAMRKLLVLIFVLWKKDEPYDPNHVWQA

SEQ ID NO: 180829 - protein, 371 aa, unidentified
MTGFIVRSVGLDVHKRVVEACIVDHSGKVVFRERFALNRQTLEGFATKVLRAGDRVALEATTNCWAVANVLRPHVARVLVSNPMATKAIAQAKVKTDKVDACVLGQLLRCDFLPEVWQPDEATRQMRELTARRSALVGQRTAMRNRIHSLLAMRLIEAPLRLFSPAGLHWLAEVELDGQGRLLVDSDRRQLEFLQQEIDALDEELARRGHQSPAVKLLMTLPGVDVATAEALLAAWGDARRFPDGDHAASYLGLVPATKQSAEHCYHGPITKRGNSQGRWMLIEAAQHLDKHPGPLGHFFRRLTRKKNRNVAVVAAARKLATIGWQMLTTGEPYRYAIPRSTESKLARLRVKATGQRRKPPKAKAKAKKGR

SEQ ID NO: 180830 - protein, 306 aa, unidentified
MKRERETREGRYIGLDVHKQYITVGGMNAQQEIVLRPRDVAMERFARWAQENLRDTDEVVLEATTNTWEVYDLVGRLVKRVVVAHPAEVKQIANARVKTDSQDVLRLVRLLVADLVPEVWVPPMEVRELRALISYRWRLVKMSTAIQNRMHSLLHRHNIQAPEGKIDVGENRAWWEQLRLSELETLRLKQELKSLRMVREHILEVEKELGCLSTSQRWNAQTVHVMQLPGVGIVVAMTILSAIGDIRRFESPKQLVGYAGLGAGVHDSGQKHRDKGITKSGRKELRWALVEASWQAIRSNSRLRTQ

SEQ ID NO: 180831 - protein, 339 aa, unidentified
MNKTKYYIGLDVHKEKTTYVIRDRLGNILLEGESATLYNELYERLKPYLKSSVIGVEACTSYYTIYQNFLKNNYYIKVANTIQLRTLITKNDSLDAKRLSEMLRLGTFPCSYIPDEDIQRLRSLVQIRHSLMEEKTRCNIRIQAFLDRNGILMPSYKAFTKKWRHALMQHMGSGEVSLELRYEYDHFVYLEKKIEQLDQEMTGYTKKHWKAEYLYIQSITGFGPLLTCYIIAHILPIERFSSNRKLRRYAGVIPAFHESGGKSSKGHIPKSSSRKLLRWALVQAANTAGKTDTKLGRYYRKKKRQKKNAGIAKIAVASSMIDIIYKVLTTKKPYNPTVC

SEQ ID NO: 180832 - protein, 395 aa, unidentified
MILIGIDIGKNSHYFTIVRKEDGEVLCEPSRINNDLKGFEQFISCIRKYPKKDVLIGMEDTGHYHFPLLKYLLDKAYSVALINPVTTDLTRKASGSISKNDKLDSLTICDVLSSNKKGKKPYRIFKVNRFDLYEQRCLTRHHHDLKEELNVYYNRLQKCIDIVFPEYNSLFNSKYGVVYMNVLRSYGSAESIAKADIRSLRKCFEFKGRGNRISLTAEKLKEAAKKSIGISSVSEVIQIRHLIDQIVLIDAQLDEVDKKIEEFSRQINSPILSIPGISHFSGTSILSELGDINNFTDHRQIIKYAGVAPLTHESSQYKAQHTKITKKGSKYLRKTLYQIILPVINNNKAFKDYYDLKISQGKSHRCAHGHCVRKLLRVIFHLLKTGQQFDPALLS

SEQ ID NO: 180833 - protein, 338 aa, unidentified
MNNHSLIAIDLAKNVFQICSINSNNRVLMNKSFNRKTLSEFMIQQAPSTVAMEACYSSHYWGRLFESFGHQVKLLPAQHVKPFVRGNKNDHNDALAIAEAAQRPEIKAVPIKTVAQQDIQSLHRLRERCVSQRTGLTNQTRGLLSEYGIVFPQGFKAFKQTLAMLLDPKDTRLSQAIKQELQYVTGEFDRLSERLKQLNHTLSTIALNNSHCQKLMSIPGIGYVNATALYSAIGNGSQFKNARELSVWLGITPKQFASGNKQVMAGITKRGNRYLRKQLIHGARAVMYHCKKRDDKLSHWLKNIVNRRGPNKASVALANKMARLAWTLLHKNEMYHPQ

SEQ ID NO: 180834 - protein, 317 aa, unidentified
MQVPLHFIGVDVSKAELVIATHGQDDRLSVPNECTAIQQWLRTLAPGSLVAMESTGRYHQLLANLAAATALPVFVLNARDVYFYAKGLGARGKTDRVDSGVIARYLAEHHDRLHPYHAPSAPQAELEQLLGQRWTVVTKRTALRESLQACGASIAQAASQLDAAFAALLHTIDGRITALINADPQLHRARSLLQSIVGVGSQSSALLTSLLARVPFASSDALVAYSGLDPRANDSGRSRGRRRLSKRGDPALRRQMFMAAMSACHTSTFAATYQALRARGLKTTEALVILARKLLRIAFAVWRSGQPFEAHRVCGNP

SEQ ID NO: 180835 - protein, 416 aa, unidentified
MTFKVVRFICGGMDVHKNLIVATIGTTDRQTLITEYIQQSFSTFYSDLIRLKEWFISHDCYDVCMESTGKYWIPIYNVLETELKICLTHPKYVKAIKGKKTDKRDSKWICDLYKCDLVKHSFIPKKEIREMREIARYRCKLVYMRSSERNRYQNCLTVSNISLASAVSDPFGKTATNIMKELMQSEVIEDDKILKLIHKNCKDKDKILDSLQGYHIESDQRFKMDTVMNHIEYLDKQIQACEAELIKRAYPLRDYFQHITHIKGISALSAIQIVSEIGTDMNQFESDKQLVNWAGLSPANNESANKKKSVRISKAGQYLEPLLVQCALSSIKDKNSYFGIKYCRIKKRRGHKKAIIAIARMMLVCIYHMILTGEEFNPCDYESLTNPKPKKEPIMTVESALQFLKDSNFDFSSIQL

SEQ ID NO: 180836 - protein, 346 aa, unidentified
MKKRSAKGEVKVLGIDLAKQSFQLHGVDQSGQTVLRKKLTRNKLSAFVANLPPCVIGLEACGGAHHWVRVFKEFGHTVKMMAPQFVKPYVKSNKNDSVDAEAICEAVQRPNMRFVPEKSIEQQDMQSLHRIRSQLVDRRTAPSNQIRGLLLEYGIIVPQGIHHVRNQLPLILEAADNGLSDLSREFLHELYEELVHLNERIDALEKKLLRLSAQNEDCQRLLTIPGVGLLSATALVAAVGDVSNFKNGRELAAWLGLVPRQHSTGGKATLMGISKRGDCYLRTLLIHGGRTVVRVAHRHQDRRSRWVSELEQRRGKNISAVAVANKNARIAWALLSKKTTYQATAA

SEQ ID NO: 180837 - protein, 365 aa, unidentified
MISVPQTSTLLGLDVHKLTISAAVLTPGSDVPAVDRISSDPEAVRRLIGRFEDPKSLVACYEAGPTGYELARQLVTMGVRCEVIAPSLIPVAPGDRVKTDKRDARRLALLLRGGQLVAVRVPDVTEEAVRDLCRARADMVIDRTRARHRLGKFLLRHGRVWRDGDNWTMKHQAWIGAQPFGQPALDVTLSHYRATLTAREAAVDAIDAELAQWFDRAPFGDPVARLCAYRGITELGALTLAAEVCDWRRFPTAGMFSAFCGLVPSEHSSGPRTQRGGITHAGNTHLRTQLVESAWAYKARAQVGPTLRRRHEGLDPEVVARAWRAQLRLCGRFGRLDARKSSRKTVVTAIARELAGFCWAEMTAA

SEQ ID NO: 180838 - protein, 331 aa, unidentified
MKNVNESAGIDVSKLTIDVHLFKKNKHHQFVNKSNGFKEMIQWIKKEGLVVEEVLFCFEHTGWYCLELSFFLHEIALKYTCVNPIEIKRSIGLKRAKTDKDDTGYLAHYAWLRREEIKQPVPPSQNIIELQRMMSLREQLVKQSVALKNLRTGMLQIVISREIDPSILILDQTIKELEQQTKNIEKEMELLIKSDTNLKENYLLSKTVKGVGKILAVQMLIHTHNYTRFLSWRQFSSYCGLVPYPYQSGTSIRGRNKIHSISDRKMKSLLSMSAISAIRSDKELKMYYEQRVKEGKPKMVVINIIRNKIVARVFSTVKRGTPYVELNKFTA

SEQ ID NO: 180839 - protein, 330 aa, unidentified
MYLGIDTHTRYSQVAVVDDDGNLQDEIRLPNDRLDELAEQYAGGEAAIEASGHYRPLYEMLDEHLDVTLVNPSKNRVIADATVKTDRIDAKRLAHMLRADMLAESYVPSDEIRTLRDLVRTRKALVEERTAEKNRVRAVLKRTDNAYDSELFGPTGREFLAELSLSDADRTIVEAHLSVIDEYDAQIEKLEAKIEQKTLESPAAQRLLAIPGVGQSTAALIVAEIGEIDRFDRQEELVSYAGLDPMVHQSGDMEVHGSISKEGSAPLRWALVQCAHVSVRYDDYLGNFYTRLKQRKNKQIAIVATARKMLVSIFYMLKRQEPYDPPEVSA

SEQ ID NO: 180840 - protein, 340 aa, unidentified
MYYVGLDVSVKRTAVCIVDSAGKLTHEADANSTPHAVAAAISSIGVEIERVGLEAGVSSAWLARGLLAMGLPVIVIDATHAAAALRTGFRNKTDRNDARGIADLMRVNKFRSVWVKSPTAQRDRALLTVREQLRRQSLDVRNTIWSILQGEGFQPPKLASPAFEALLGQTIDDPDIGHLLRPLATIAAQIDRQVTELDRTIAARAKASVTCRRLMTVPGVGPLVALTYVSGVDQPQRFRNARTVGAHFGLTPRRHQSGEMDWSGRISRAGDGAVRRALYQAANVLLHRSKSWCSLKSWAVRLAKRRGLAKAKVALARKLAVVLHKMWTAGEDYRIKAAVA

SEQ ID NO: 180841 - protein, 348 aa, unidentified
MVLLGVDPHKSTHTAVAVATDDQQQLSSVTVRSSLPEYRRLLRWARQWSQRSWAVENASGLGRHLVQWLIARGEHVIDVPATATSRVRELSRGGGRKNDQIDAAAAATVAHLHGDGREVRAEDHCTALALLDERRVNLAQARVRTVNQLHALLRDLLPGGASGQMSADQATALLRTVRPAGEVEKVRRGLARDLAVELRAIDKQLASNAARLEALVTASGSTLSKTPGIGPVLAARLIARVGRASRFPSAAAFANYTGTAPVEIASADKARHRLSRSGDRQLNSVLHTVAVVQIRMPSSPGHAYYQRKLNEGKTSKEARRCLKRRLADHIWRTMIADEHRTQLLAAAP

SEQ ID NO: 180842 - protein, 401 aa, unidentified
MERSAVRGPCPRIPLRSMRATILSFHNRNRHPCKSDRAGSAKVAGAVADGRPLHPRASKPVPQRGAPSVVPLNPNSREGRLASPVAQGGVQMDAIYVGIDVSKDRLDVHVRPNGEAFAVARDGKGLEELVGRLLALSPTLVAVEATGGFETIVAAALAGAQLPLVVINPAQIRHFAQAIGQRAKSDPIDAAVIARFVEAVKPALRPVPDQQARLLAELVARRRQIIEMIVAERQREQRVESVRIRKGVARHIKQLEKELPDIDNDIDTLVRGSPAWRDKEELLISFPGVGNTLARLFIAEVPELGSLNRRQIASLAGLAPFIRQSGRWKGRSKIGGGRSALRAGLYMAALSATRCHPQLKVFYRRLVSAGKPKMVALIAVARKLLTILNAMLRDQKPWQPA

SEQ ID NO: 180843 - protein, 358 aa, unidentified
MRIIGCDLHARQQTVAMLDTDSGELVEKTLQHDGEELRKFYSGLSRPVLVGIEATGSMQWFLELMEELGIECRVGDPAKIRAAEPRKQKNDRRDAQLLLKLLVEDRFPTIWMPSTEQRDLRTLLRHRHQWVRLRSRVQHTLQSMALNHGLRQGRSLWSQAGQHALRALPLTRYASERRAALLSLYPRLQGSIEELDKEVSEEVQQHPQARRLLTHPGVGPITALATEVFLGDPLRFSDGKALASYIGMIPSEHSSGGRQRLGAMSKQGNTLLRYLWCEAAMHAVERDPELKHFYRRKLVQKGLGKARVAAARKLGIRLWIMMRDQIDYQEFCRRGKARQESGSVRAGMPAINSGPAQQ

SEQ ID NO: 180844 - protein, 328 aa, unidentified
MHFIGADISKLTLDIACFDETTKRWSKPCKVRNIKRGWNELIRTVEKQTQASCDSVCIVMEATGVYHLKVAAYLFRAGLKVIVVNPGRAAQYAKSQNQDNKTDPLDAKSLQRYGSNLEKFHLFTPDSPEISELKTLLSRLRQLDKDLRREQNRLEKSDFQEASTLLRTSLKRSIRFIIKDQKWVQSHIDELIAGSVKLKRDQQLMCSIKGIGKVTSQWLLPLLSDQRFNSAREVGAFLGLAPCHKTSGTTLKTRGKLTGRGNADLRARLFMPAMSAATNDPEMRAFYQGLIAKGKPKKVALTAVMRKLTHLCYGVVKNQTPYKANYAT

SEQ ID NO: 180845 - protein, 339 aa, unidentified
MQVTTIGLDLAKNVFQAHGIAEHGEVVFNRALRRAQVLAFFERLEPCLVGIEACGTSHHWARELIKLGHNVKLIPPAYVKPYVKRGKSDAVDAAAICEAVTRPTMRFVEVKTPEQQAILAVHRTRDLIVRQRTQTINMLRAQLAEFGLVLPQGVYHPLRFAKDCVDGEQPSLPSDAQEVVLDLCDQLLFLHSKILRHSRHMTQIAKREERVALLRTIPGVGPITASAIVATVGSGEQFKNGREFAAWLGLTPLNKSSGGKERLGHISKMGDQYIRRLLVLGMTSRIRSIRLEPEKFDPWFANILSRKPSRVAAIAMANKTARMIWAVLTHNEPYKVRTV

SEQ ID NO: 180846 - protein, 371 aa, unidentified
MKEGARIVGFDCCEDEHSAVLLDASGDFDKRFSIVNERGQIQEALAGVLLDMGPDSQLVVVVESKRSHVRIVADVATELGCELWQVNTVALNHFRDLEGQPRKDDEWDAYLGARMVCLRMGGCREAIETTDEERSLSRLTRIHSRVTEDRKRYVARMRAVLLELAPQMLHAKWKGPRPDSKAMVYLLERWPGFDGLERAQLRSIEKKLRQCRYKTEDRIPVARLIRKVAREISIFADERSSLTMELDLLVRQIRLCDESIAQVYVEIAGRVERHPVGQKLLEMHGIGPVIAGVLVSELFPVARTAPEPKSATYSGVTPLARKSGKSLDKDRLTQGVNKRILHALCTSSVVAIKHSSVDRAYYQKKFRDCAE

SEQ ID NO: 180847 - protein, 385 aa, unidentified
MAVIIGMDPHKRSATIEVIDERAQILALGRFGTDKAGYAEMLTAGRKHPDRVWAIEGCNGIGKHIAHRLVHDGETVVDVPPKLSAQVRIFATGNGRKTDPVDAHSVALVALRRPDLVRVQVDPELVVMGMLVDRRDELGRARTQTVNRLHRVLLELFPGGAKQFLSFYQARALLATIRPRDIVGKTRRRLAVELTGELEVIDKKIKAADKDLKELVTARGSTLMDLHGIGPSGAARLLVDVANVHRFADRNRFASWNGTAPLDASSGDQKRHRLSRAGNRRINRALHIMAVVQLRNATEGRRYYDPKKSAGKTSMESMRALKRRLSNVVFTRMVEDQTRCEAAGPGGHSGTTLKSSVTDLTPDIGSSDKPLPEPAKTHPSGPSVN

SEQ ID NO: 180848 - protein, 421 aa, unidentified
MSNVTEFGKKANNQVHELMENVSWVVGIDIGKEKLSCALMDIKKALICRFDVEGSLAGYNELLNRVKKETKGSGKIIFALEPTGHYWMVLGQFFEDHNQSYVLIHPLVVARSREVHRLSKGKTDSLDARLIGELACDRSITRTQIPEDYWATIRFFAREYMDREKEIAREKNRIVSYLETTLPGFVEIFPKPLCMSGRACLRFLANFREASKGDMEHFEMQIRKHFPGKRLMTSRVRRLYDMLQRGDVLGLRAGRQAMFFRIIHSLNRLEMYEGQEEAAKQAMLDMYKKSEYKEYLDSIWGTAPSVNALILGFMGDPALYDSPASLVKLAGCDPVPNESGKFKGRASISHRGRSLLRKAGDRTSFLLEKRNSVFRAFFNHLMSRQKNKFTKRQARVACINKYFRIVWVLCHYRVPFNPALA

SEQ ID NO: 180849 - protein, 321 aa, unidentified
MAEIITKAAGIDTGKMWLDIATYPVSDRLKVPNTAEGWKTLADWLKQRGIERIGIEASGGYERGVIAYLHKRGLEVILLQPRQVRAFGLYKLRRAKNDRLDAALIAECAAWSTASRQPPDSRLEAFGEWLLFIEQIEADIACLKTRRERFTDRRILKEIDRAIDGLKQRGKAELARLQTAIRKHDDLAGRLDLIESVDGIGMRTALTLVILMPELGKVDRQEIAALTGVAPYDDQSGQHDGERHIAGGRARVRRALFNAALPASQRWNGALMALYKRLVQKGKSHRKALIACARKLIIFANTVLKRQTPWAKSTPLQSSSA

SEQ ID NO: 180850 - protein, 327 aa, unidentified
MTASVSSHNHIFIGIDVGGASFEAAWHRGGCTQYQNRPDAIAAFVARLSLEKQIIRIAVEPTGGYEKRLVKALRGAGLPVEMVHTSRFAAYRTLIGAKAKSDTSDARLLAAYAAAPEEVRGRKAEYVVLPQDAVREQLAELAARRDQLKHMIHAETCRLSTVRNQSVRDEITAHLQALRQADCKIHDTMMQLVRQRDELRNAKRLLKTIKGIGDKTALTSIAAVPELGLISNKAAAALIGVAPFVRRSGTMTAPARIHGGRAPVRNAFYMAAVTASRHNPVLAPFYARLIAAGKPPKVALVAVMRRLVVYANAVLRSGQPWKRAEII

SEQ ID NO: 180851 - protein, 330 aa, unidentified
MRKVTEAGIDVSKDVLDVAVRRDEKQLETARFDNDAAGHQRLVRWLTKGGRTVRVVLESTGTYSLDVALALHRTPSIAVMVANPRAVKQFTGALMQRSKTDLTAAVALRDYAIRMPFVAWQPPAAHVLEVRGIARRIAALVVERTRERNRLHALQATAEASLVVCNDIEVNIRHLERRIELLSAQAVALVGTHDGLRTAFELLVSVPGIAAHSAVQLLPELLVLPATMTVRQWVAHAGLDPRAHQSGTSVDKPARISKLGNAHIRRALYMPALVAVQHNLHVRAFFEKLVARGKTPLQAYVAVMRKLLHAIYGMFTTRTPFLAVKFHAAA

SEQ ID NO: 180852 - protein, 414 aa, unidentified
MKKLATQKPLVVEFEQIVMRGCGLDVHEKTVVATIDGQGIVRETKTFDTYTCSLNDLRDWLQSHAVTHVAMESTGVYWKPVFNILEEHFKLILVNARHLKNVPGRKTDKKDSQWICKLLLAGLLKASFIPEEKIRQLRDLNRYQTKLTQQLASEKNRIQKVLEDANIKLSSIVSDTNGVVSIKLIDGLMAGRSDLETLIKESYHGKMKANKTELLKALTGRMTDHHRFMLRQIKHHMAYLESQIAVIQTEEERLLEEDQESITLLSTIPGVNKVTAIRILAETGTNLEETFGSAKRLAKWTGICPGNNESGGKKLAGRTTHGNKYLKTILVEAAWAATRTKGTYLRAKYDSMAGRKGRKKALIIIGHKILNAAYIILTSRLSYQAYSVEEFEKQRNQKRINYLQNELKELGLAV

SEQ ID NO: 180853 - protein, 374 aa, unidentified
MVDDTALYVGLDVSKEKIVVDLAEAGRNGEVRYYGEIANRADAVRKFVDKLAGRHERLCFCYEAGPTGYGLYRQLSGLGHECLVAAPSLIPTRPGLQIKTDRRDALALAALLRAGELSSIWVPDETHEAMRDLCRARETAVSDMRRARQHLLSFLLRHGRIFEGRSHWTKAHRNWLATQRFDHRAQQIAMEEYIRAIEQIEERRERLTQQMLALLPDWSLNPVVEAIQALRGVAQISAVTLVSEIGDFRRFRNPRQFMAWLGLVPREHSTGASVMRGSITKAGNTRARRMLVEGAWTYRLPARVGQEILKRSEGLPEEIRAIAWKAQVRLCQRYRRMQAGGRPTNIVIVAIARELAAFVWAIATTIPVTPTKAI

SEQ ID NO: 180854 - protein, 356 aa, unidentified
MTSSSKYIGMDVHKESISIAVRNSAGKIVIESVIQTKASMILQFIDGLRGEVHVTFEEGTWSAWLYDLLKPHVSKLIVCDPRRNALLKEGNQNDRVDARKLAELLQNNQLRPVYHGDHGLRAVKELVRSYLTITKDVSRVMTRVKAIYRSWGIPCSGTQVYSTRHRAAWLEKIREPGVRRRGEHYYQELDGLRSLRREVRKELLVESKKHQVWKRLRGIPSIGPIRAAVLLGIMQTAHRFRTKRQLWTYSGFGVEGHSSADHQVVNGQLQRKKNQIEIRGLNKNCNHHLKNVFKSAAIVASSKPGPFQEFYAALVAKGMRPEMARLTLARKIATIVLIVWKKGVCFDANHLKPQTA

SEQ ID NO: 180855 - protein, 344 aa, unidentified
MGEVITVGLDIAKNVFQVHCVDGSGAVVTRKRVSRSKVLKFFAALPSCLVGIEACPSAHHWGRELQSLGHTVKLLPPSYVKAYLKRSKNDANDAAAICEAVTRPSMRFVPLKTREQQAALMLHRTRHLLVRQRTMLSNALRGHLAELGIVSAKGRNGTGELLGIIADAGDQRVPSAARAILEVLARQYHAIAVEIGLIDKSILAWHRTCQASRRLAEIPGIGPIVATALVAEVGDWQSFSSGRNLAAWIGLVPKQHTTGGKERLGHITKQGNRYLRWLLVVGAMAVIRYAKQRGAKNRPWLARLMERRPAKVAAVALANKIARIAWAIMVRSERYNEPKLSMAA

SEQ ID NO: 180856 - protein, 340 aa, unidentified
MNEVVTIGVDLAKNVFQVHGVDAEGAVVVRRRLRRRQVLAFFKKLPPCLVGMEACATAHYWAREIAALGHEVKLMPPRYVKPYVKRNKNDAADAEAICEAVTRPTMRFVAVKSAEQQSVLMGHRTRELLVRQRTMLVNAIRAHMAEFGIVVRTGLPQVKELLAVISDEEDERIPPLARTCLAGFARQLLSLEREIVSAERRIHAWHRTNEESRGLETIPGIGPITASALASSIANPSIFKSGRSMAAWIGLVPRQNSTGGKERMGRISKQGDHYLRWLLVAGAMTVIRHAKRRGTTDRWLATIIADKPTKVAAVALANKNARIAWALLRHGGLYRRPATA

SEQ ID NO: 180857 - protein, 411 aa, unidentified
MEKLFVGLDVSQKDYKVCLMDTEGERIGKVFTLKNNAEDSEKLVDRVVETAAKRSAQKVFIGYESTSVYGWHLQYFLADSPKLTPLLPTIICFNPTVIEHHKKSLGDLPKTDAIDSFAIADRLRIGRLPHSQTADFRYLALQRLTRHRFHIVECIVREKNYYLSNLFLKCSGLCQSGVFSNNFGAAATGLVDDIDNFEQIVDMPLEELVAWLVEKGREKFDNPDETAKKLQDAVRKSFRVNSSVDKSLNLVLRSCLENLKSLEKQKKATEKSIKEQVAFFKNEYTCLKSVKGIGEVIAAGLIAEIAGISRFEDDDALAKFAGIYWNAHQSGEFIADESNLRRRGNKYLRYYFVLAADQLRKYLPEYSEFYSRKFKESKTHHHKRALILTSRKAVRLVFALLRDNKLYSSAH

SEQ ID NO: 180858 - protein, 347 aa, unidentified
MYKANRRDGLCERSLTMFPVGIDVSKNTLDLCMLYDGIKGRIKTRNIQNNRHSVENILRWLRLQHCGPEDVHVVMEATGVYHERLATELHDAGFRVSLANPHRSREFARGMGIMTKTDKVDAYMLACYAFLKKPHRWEPPAPEIRYLGALLRRRDVLLGDALREENRLEKYLSTDTPADIISSCRRMAQLLREEVSNIERQIKAHIKASPALRRDYTLLTSIKSVGPQLGMHMLVVLRSHNFVSAEQAAAFLGVVPIEKRSGTSVRRRPRMSKIGPPQLRAKLYMSALCGKIYNKRMRNIYDEMCLRGKPKMVAIGALMRKLVHWCYGVLKTGTVFNDEDLKPVLST

SEQ ID NO: 180859 - protein, 343 aa, unidentified
MYFIGIDVSTKESALCILDGNGKIVRETKLPSDPEIIARFITDTGLAIERIGLESGCTAAWLFAGLQRYGWPVICIDARHAAAALQAGFRNKNDRNDARGIADLMRVNKYRPVWVKSPEAQRQGRLLTARATLQSQLVALENTIRGLLRQEGIGLTDRRTAFEAAVREVIAEDHLLHAAVHPLLETRNAVLCQRAALDRQILLIVRADPVCRLLMTAPGVGALVALTFKVAVDDPGRFSRSRNVGAHFGLTPREHSSGELRYQGRISKMGDHEVRRLLYVAASRMLRRDAALWCPLKAWAVRLAQRVGIRRARVALARKLAVVLHAMWSDGQVFQWRRTEASA

SEQ ID NO: 180860 - protein, 414 aa, unidentified
MLYVGIDWAVESHTVTLLTRPGEVLKSLVIANTLKGFLTLLDAIRRHIGKDKPAPTPGDVLFIIEDRNQRLVDFLLAQDFIGYLMEPSRMPGYRLRYRSSGNKTDPDDAFIMADVLGRDRDQLPTINPMNATVQTLKTLLMDREGFVRDQTRLINRLTACLRQYYPEALELFSDVAGKTALAFVAAYPDFAAAHRLSREQIQQFLTEHHCPQTKRLERIVELLAQEPIAAPAAVIETKRRLALHIIQQLQGVQATVAEYDEEIKRIGAENEEVQRFKGLPGAGPQIAGGLYTLFGDDRTRFGSAMAVQSLVGTAPRTIQSGKMRVVCFRFGCNGFYRTQAQQLALSALRVSAWAKQYYRGKRAEGKRHQHALRCLANLLMKIAFAIWRDQTTYDENRHLAQIMRHQLRQKSSMA

SEQ ID NO: 180861 - protein, 440 aa, unidentified
MTPRYEKNGRVRRSPEPLQVSHPHAAGIDVHPEVNWVAVPPDHAPPPPKGHPPNLPPYVRKFGTNTADLEMLADWLKACGITTVAMESTGIYWVTLFELLERRGFEVYLVDPRQTKHAPGRPKSDCLDCQWIQRLHSYGLLSASFRPEDQVVVLRSYLRQRLMLIQYGGQHIQHMQKALEQMNVKLTEVVSDITGVTGMAIIKAILRGERDPLLLAKYRHDKCQRTEAEIARALYGNWREEHLFALKQAVQLYEFYQQQLRDCDARLEAYLGTFADKTGGRKLPYKPRQRKRTTNEARFDARGLLHRLSGVDLTIIEGIDESTALVVLSEIGTDMSKFPTVKHFVSWLGLCPQHQGSAGKIRSRRVRRGSNRAARALRLAGQGCHHAKNALGAFYRRLQARHRQRRAGRRQPPECSPLPAKSPSASSACSSTAKSTSVKE

SEQ ID NO: 180862 - protein, 487 aa, unidentified
MARRKHRSAPATTHTSNAPSAPGPRNRAATPLQPPAAADHYHDSLPVRHRHAAGIDVGSRSHWVAALGKEGTIEVAEFDTYTDGLLALVDWLRQRQVTTVALEATGIYGDPLFDLLQAEGFEVIQVNPAYAAQFKGRPKTDKRDCQWIQRLHAHGLLPASFRPAPDIAVLRSYLRQRADLVRAGARHIHHLQKALELMNVKLTEVVCEVTGLTGLKIIRAILAGQRDPQALARLRDKHCKNPTDTFARALHGSWREEHLLALRQALASWEHYQAQQRDLEEVIARHLQRMKKTTALPPLAPKPRQRGRGANEPRFDVRAALYYVTGVDLTELDGIAEVTALVVVSEIGLDMSRFPSVKHFCAWLGLCPKVKKTGGRVVSSRTRPGKGRAARALLLAARALWHSPTPLGAFLRRLKARLGAPAATTATAHKLARLLYQTLRSGQLPARETAAAYAERRRQQAVAGVLKKARRLGLQVVEPGEVVEPPA

SEQ ID NO: 180863 - protein, 462 aa, unidentified
MAGKHERERAQGNRRQLQGLPVIRQNVAGIDLGSERHWVCAPTPDGSGREIASFGATTAELIGMAEWLKARRVESVAMESTGVYWIAPHEVLEAQALAVLLVDTRQLARVPGRDKKTDPTDCEWIQRLHSCGLLQGSFRPEEAVCMLRTLVRDKANLVAERGDWLRRMQKSLDQMNVRVHRAVSDLDGVTGMAILRAIAAGERDAQQLAKLRDPRCSKSEPEIAEQLQGHWREDHLFSLQQALQMHEAVEERIAAYEKEILRKLGDMEREEQGGQTAPPLNNTNKARAIKHRGQEPMRQALYRMSGVDATHIDATGVETLEVVFSEYGPDLSRFPTEKQFVSHLTLAPHVPTSGGKPLKKRKRYSASTRVAAALRMAALSLRHSQTALGAYYRKMAQRLGADIAVFATARKLATLIYRLLRWGQPYVDEGAAAYETRYRQQRIGRLAATAKQLGYQLAPLNA

SEQ ID NO: 180864 - protein, 371 aa, unidentified
MQEGTTYVGLDAHQETIHAAVLLPGIGKAAEDRFANTPETVRRWARRVGKRVPGPVVCGYEAGPLGYGLMRELEASGLQCLVVAPALIPVRPGDRIKTDRRDARKLAELLRAGLLTAVHPPTPEQEAVRDLTRARGAVKTDQIRQRHRLSKFLLRRGVRWTLGRKAWTQAHLAWLRGRRLEHTADQAILDDHLLGLEQIEGRLSALDAKLEAIAQAVPYQEPVGWLRCFRGIDTLTALACVAELHDWRRFDSPRALMAYLGLVPSESSSGGKEQRGAITKAGNVRLRRLLVEAAWHYRHRPGVSYRLRARRAGQPARVIAIADRAQQRLHARYTRLQARGKAHNKIVVAVGRELAGFLWAAMDPKGVASVS

SEQ ID NO: 180865 - protein, 362 aa, unidentified
MESSVTAIVADVYRYVVGVDTHAATHSYAIVAAANGAVIDQATFPTTAAGLRRARDWIGRRTEGDLDGVLVAAEGTGSYGAVLGDVLEQAGYRIVEAPTPRRERGRGKTDTSDAVLAARSTLAVPLSMVRDRRGGQAHAALQVLTVARDQLNADRLRCINTLTALVRSHALGVDARRALTTSQITTIASWRRREEPLGVATARAEAVRLAKRILVTDDELGDNRDQISGLVADQAPELLDLHGVGAITAAVILTVWSHPGRIRNEAAFAQIAGTCPIPASSGNTVRHRLNRGGDRRLNRALNTIVLTRMRSDPDTRNYVQRRLSEGKTNKEIRRCLKRYTSRQIFRTLTAAHRPPTVAEPAT

SEQ ID NO: 180866 - protein, 423 aa, unidentified
MEVLHECVAGLDVHKDNVVACIRTVSGDKTTREHRTFDATTDGLLALLEWLTSCRCELVAMEATGVYWMPVWRILSDGAFKLIVVNAAHIKAVPGRKTDMKDSTWLADLAAFGLLKASFVPDEEQHELRALMRTRKQLVREQTRHVQRIQKTLTEANIKLDSVISDIMGRNGRRMIEAMITGVRDPRKLAALADQRLKATPKQLYDALHGRLTDHHRFLLQLHLGQWDTLDATIKGVDREVATRVFRMDTEGTAAKANFSDLIDQLVTIPGVSRLSALTILSEIGTDMSRFATAGHLVAWAGMCPGQNESAGKRKRTRLRKGAPWLKTMLVQCAWAAKRKKDSYYKAQFFRLQSRRGPQKAICAVAASLLTAIYHMLKDGTIHQDLGSGYFDQRPPEIKVKRLVNQIAKLGFEVTLQPIAKAA

SEQ ID NO: 180867 - protein, 444 aa, unidentified
MVCSGMILIREVADAPVIMGISKPAGLKSPCGEVKIVNPLFVGIDVSSRSNVAYLMKPDGSKHSSFSVQNNLGGAKMLSERIVSALSSMRLSDVVIGLEATSIYGNNLVYALREDGSLSRFQRKIHVLNPKQVKKFKEAYPDLPKNDFVDAFVIADHLRFGRIAKEVYMDDYRYQALRTLTRARFDVIQNLTREKQRFANYLFLKCSGIAQEKDIQNTSATTIALMEHFETVDDLANTDLDELTDFIAQAGRGRFVDPDATARAVRAAAKGSYRLPKTVNDTVNQAMSVSIASMRALKEQVKVLDKAIEQQFEIIPNTLTSIPGIGKVYSAGIIAEIGDIHRFDSQASVAKFAGLVWTQHQSGEFEAEHSRMIKSGNRYLRYYLLEAANSVRRCDSEFRRYYDLKFKEVNKYQHKRALALTARKLVRLFFRLLKDNRLYIPSEG

SEQ ID NO: 180868 - protein, 480 aa, unidentified
MLLVSASNGLVPRRNGRDLCPVGKPRLRAPVQEPDKVAVARVACTINGAPCMAPSRGKCIMHGERQWFVGIDWASQEHVVSLCDGQGKKIGQRNFAHGGTGLSDMIAWLLRASGGEPSEIYVAIETPHGPIVEALLERGFNVYSINPKQLDRFRDRFTVAGAKDDSLDAYVLADSLRTDMHLFRKLTIAEPLIVELREWSRIDEELKVERVRLANRLRDQLWRYYPQMLELGDLDEDWMLDLWEAAPTPEKAARASKAAIERVLKKHRIRRFDAAQVLSALRRPALSVAQGTIEAAIAHIKVTIERLRLVNRQLADAELQLDRLCKKLAEPVANDGENVPGQRQEHRDATILDSLPGVGRTVLVTMLAEAPHALQRRDYYALRNLCGSAPVTRRSGKSCLVTRRRACNRRLSNATLYWAQTATQCDPTSKAKYQALRARGHSHARALRSVVDRLLYVACAMLEKGTLFDPSFAQKKNAAA

SEQ ID NO: 180869 - protein, 384 aa, unidentified
MEKSITLHVGLDVHKDSIDIATAELGRDGEVRHVGSIGGDLASLDKALRKLIAKGHRLHVVYEAGPCGFVIWRHLNALGHSCDVVAPSSIPKRSGERIKTDRRDAMNLARLDRSGDLTAVRVPGATDEAVRDLVRAREDSVRECRNARHRLKALLLRNGIAYTGKSSWTAAHLRWLATLKMEHAAQQIGFQEYLHSITEATHRIERLEQAMRETLPDWSLKPLVQALMALRGVQLIAAMTLVAELQDFMRFASPRKLMAFVGLVPGEHSSGPKRRQGSITKAGNSAARRMLVEIAWHYQHSPRASPVIATRHDRLPQAVTDIAWAAQLRLHAKFKRLLARRVMKNKCVVAVARELAGFVWAIGCEVQTSGWQGVPLESAAIVAA

SEQ ID NO: 180870 - protein, 363 aa, unidentified
MQTINRRGMLFVGIDVHKDTHTAVGLNPFGEKVFEMKIGNEVLDFISLVEKTKDESEKLNLAPSFGLEDVHSWGERLSSFLSEEGLPVVSVAPVLVDHNRSKMTHPEKSDSLDVQAVAKVMIQRIDTLPTYTLTEEAQKAKQIRELSLEREWLVKERARLKNQLHILLHRIHNSSYRTKFKDPFSKKALRYWMRSVPKNTDAILEQRAKRAIRRLLNLREEIQEIEEELESLMTNSGQTLSTASGCGTVIAAEIIGEIGDVGRFHSPAALAKYAGCSPREHSSGKTIRWRKTRSGNRRLNRSFHRMALSQISRSGNDAARTYFKKKISEGKTKAQALVCLRRQLVNVVWMMLKHKTEYRWPVC

SEQ ID NO: 180871 - protein, 420 aa, unidentified
MNDSTQWQPHRAFGALDWASEKHSVIVVNPAGKVIEDFEIEHSALGWKKFREKLQPYGSIPFAIETSQGVAVEQLLEAGMLVYPLNPKSAQAYRERKAPSGVKDDRLDAWSFADALRVDGQDWKALRPEEPLIKALRLLCRDEVTLIEQRTAFVNQLRHALAEYYPAALEAFEEWTSVSAWMFLQRFPTPELLAQAGKGQWQKFLHSRRLWGSDQGPRRMEIFAHATQFAGTAPTVKAKSLLALSLVQMLFTIEKQLALYRQQIEALFARHPDHDLFGSLPGAGPKIAPRLLSEIGDDRQRFGGDPQNLQCLAGSAPVTKRSGKQRKYWHVHQRWACDKHLRHAIHLFAEQSLSRCAWAEIYYHHHRQKNQSHANALRRLSHRWLKIIYQMWIDRTPYNAELHHRNQLQHGSWVFQLQQS

SEQ ID NO: 180872 - protein, 340 aa, unidentified
MEHATIIGIDLAKRSFQLHGARADGSVAFRKKLNRDKVLGFVASQPRCIVAMEACASSHHWGREFEKLGHEVKLVPPIYVKPFVKRQKNDAADAEAICEAASRPTMRFVAVKTREQQSQGMLFRTRDLLVRQRTQTINALRGHFAEFGVVAPQGPAHVERLAEAIEDAESGLPGPVRELGALLVVQIAELNEKIAGLERDMRERAREDERTVRLISIPGIGPLCAMAIQAFAPPLASFRCGRDFAAWLGLVPRQNSTGGKSKLGRISKMGQRDLRRLLVVGAMSTVGWAARRGTKDPWLARMLERKPRMLVAVALANRRARIAWALMRKNEYYRAPLPTV

SEQ ID NO: 180873 - protein, 406 aa, unidentified
MKVARQGRLPGHPELEDLLMSQTIATLMPAAVDYETTLILAIEVSNKSWVLAAQVPGLPHTKAKRTIDPEAKALQAAIAGYRARAAAIGRSIERVIAVYEAGWSGFWLARWLMSHGVEVHVVQPSSVPVDRRARRAKSDGIDSELLLRTLLAWLRGEPRVCSMVPIPDEADEDARRCVRERTELISERVGLTNRIGAILATLGVSDYNPLLRNRSRRLAELRTALGEPLPTNAHAKIKRLLVRLELVLTQIAELERERDAVMETEASDSASRMIQQLTALRGIGVQSATVLVREAFVRGFANGKALGSYAGLASSPYSSGGIDREQGIGKAGNRRVRTVMVELAWLWTRYQPGAAQVCWFRERVGATGRRARKIMVVALARKLLIALWRFVIDGVLPEGAVLKPAA

SEQ ID NO: 180874 - protein, 418 aa, unidentified
MKLFVGLDVSSEKLDVCFLSDDDQLTVLLEDSLGNDIEGATQIKQKILAFQKNYSFSQIVIGMESTSMYSFHPAIFFNEDRELQRINTVVTIENPFRIKQFSRIFDEDKTDKNDAMRIADFLRIQRYTTSPIKEEKYMALQRLTRTRYQLIGQLVETKQHFLENLTYKCNALTRELKNSDTNSSVFGATLLALMTEDYGLDELARMPLTDFTSLLQEKGNGRFKNPEGLAKTIQRAITMSYRLSELAQESINIILSVLAREIRALEASIKDLDKAIEQLVIVLPEYQCLTSIPGIGKVYAAGLLAEIGQIQRFEDQTKLAKYAGLSWKIKQSGNYQSENTPLTKQGNRYLRYYLVEAANSVRRYLPEYQTFYQKKYKETPKHQHKRAIVLTARKFVRLVDTLLRNHQLYTPPRSVIEK

SEQ ID NO: 180875 - protein, 456 aa, unidentified
MGHARARKIPAQLVEDEDYQLRHERVAGIDIAKAKADVCTRLPPAREGGRRASRVEEVPARAAEILALAVRLLADGVELVVMESTSDYWRIWFYLLEGAGLNVQLVNSRQSRQLAGRPKTDRLDAQWIARLAEMGLLRPSFVPPPEIRALRDLTRTRLQLVRDRTREWQRLEKLLEGAAVKLSSAVHSLAKTVTARVILQALADGERDPLALAGLADPRVRGGRAAIAEALEGMTVDGHHRMLIRVHLDHIAFLDRSAAAVEDEIQAALDAIPAAQGVSADGIRCAGPGPEAAVLPAAERLAEIPGVSPDLAHAIIAETGLDMARFPTAAHLVSWAGLSPVTRQSGPRSRKPQKGQGNNYLKGYCTQAATGAARTDTFLGERIRRLSRRLGPNKAKCAVARSILVIAWHLLASPDARFTDLGSNWHERKTSRDRKIRTHVHQLEALGLNVTITPAA

SEQ ID NO: 180876 - protein, 422 aa, unidentified
MKTTPDSISTDRHLAVDLHKHYLVVGGVNTRQEIVLPPRRLELDDWLKWARQNLVLTDTLVVEATTNAWDFYDQTRPLVGRLPVANAGKIALIAKTRVKTDNLDVLKLARLSAANLIPEVWVPPGEVRELRNLIAHRRRLTKMHTMTANRLQSLLHRYHFLPPAGELFWESHRAWWAGLAVSPTERLRVKQDLATLDHLRPQLAEVDEELARLSSEPPWAAEVPRLMQLPGFGLLTVMTVLGAVGDIRRFETAKHLVGYAGLGSSVHDSGQTHRGGRITKQGRKDLRRVMIEAAWTAARRHPFWKREFERLTGRMAKGKAIVALARKLLVAAWSVLSKQVTDVHADPHIVGLKFFAWSWKLTPEQQHGLTRRQFVRYQLMRLGLGNDLTHIQRGGTRRPLAPVEEVLALKPELSAELGLTES

SEQ ID NO: 180877 - protein, 363 aa, unidentified
MVNYIFVGIDLGDKNSVARIAVNRGKTERMGFVNDRRGRARLFEQLRRRAEKVDEGQIVMGYEASSCGFILSDEAQARGIRCWVLAPTKLEKSVEQRKHKNDERDADDVLEKLRAHVLAGNRLPTVWIPDVEMRDDRELVRSRVELVEKQTRLKTQIQMLIKRHGLEKPSGCGVGWTTRHRQWLNALTESDALGGGTRAALQSLLRQLGFLEAEIERMEKPIHQLAQQPRHQPIIDELTQEHGVGLMTAMVYRTEIGHAGRFRRGRRVGKFVGLTPTSHESGQQQDRKGHISRQGPPRLRKMLCQASWVHVQRDPQAKRFYQQLVARNPKKKKIAIVAVMRRLAVRLWHRMRAAELRMAAMMP

SEQ ID NO: 180878 - protein, 358 aa, unidentified
MSMHPDPRRRRVIVGVDTHKYVHVAVALDAVGGVVDARSFTADRAGYDQLISWAAGLGQKLTFAIEGTGSYGAGLTAAVRRRGIGVVEVMRTDRRDRRLRGKSDTLDAENAARAVLSGKAAAVPKAADGTVEMIRQVKVAKDVAVKARTAVMISLKQVIVTAPPELREQLQDLPKMALISRCAGLRPGPVTTVPAATKHALRSIARRWQQLNDEIKAHEKLLAQLTGQLTPQLVAAFGIGPDTAAELLIVAGDNIGRVRSEAAWARLCGVAPIPASSGITTRHRLNRGGHRQANSALYRAVIVRMQHHEPTKAYVARRTAEGKTKPEIIRCLKRLLARETWALMRPLRLTATTHQKAT

SEQ ID NO: 180879 - protein, 342 aa, unidentified
MDHYAGIDVSLECSSVCVVDASGKIAREGKVASEPEAVIAYFGSLRLCVVRIGLEAGPLSQWLYAAMKEAGLAVELLETRHVRKALETMPVKSDRNDARGIAQLIRLGWFRPVHCKSIGAQETRAVLTARKLVQSKLLDVENSVRGILRGFGLKVGHTTNRSFAGRVEDLVVNHASLHQIAAALLSVHAVLLRELKAFDKQVRSMARVDVKAKLLMSAPAVGPIVALTYASAIDDPGRFTSSRRVGAHFGLTPKKYQSGETDYTGRISKIGDATVRTALYEAAHIMLIKPIKGCTPLKSWAMRIARRAGMKKAKVALARKLAVILHRMLANATPFNAAMAAA

SEQ ID NO: 180880 - protein, 335 aa, unidentified
MQSYGIDLAKEKFDVSFFDLTSKKVSNQPSHKVVKNNLKSIGRFLETLPSDAVLVAEHTGVYGDTLLKCCMDSNVKIAFVGGYVIHRYRATPDRAKTDVLDCALLREFGERYPDKLKYKTFPEEALYELRQLARHREMLVEQRKQLITADKSEDCRPVRSLAVKRSMDRIKEMLDTEIAETEKEMLKVINGHDSIHHNYELVKSVDGVGLITAVELLVKTENFTKITTARQYSAYAGTAPYEKSSGKMDKGAHISKIGNRRSKTLLYICAESARLHNKEIKLYYERRTLIDKKPRHYVLNAIANKLLRIIFTLVEKGEYYDANFIRQDPRVVKYN

SEQ ID NO: 180881 - protein, 337 aa, unidentified
MKYFTGIDLHRKTSYLATVDERGAVVAKRNLPNDESAILRYFAQFDDKPKIVIESTASWYWLYDLLDENGFEVLLSNPLKTKAIASAKIKNDKLDALMLAQLLRSDLVATVFVSSPQTRELKELLRHRTRLVRDAARMKHRIRMILAKNNLTVPFRDLFGIKGRKCLDRLSVPAHYRSQIETYAKMYDHLDQQIEPLTDRVKKEAKTHPIAQLLVTIPGIGPILAMTIIAEIEDIARFASYRNLSSYAGLVPGLHASGQMARCGKITKQGSPYLRWAMVEAAQAIGRVKRSRLNLFFRRRIVRSGYQKAITATAHKLLQIVFYVWKNQTPYQENYSG

SEQ ID NO: 180882 - protein, 348 aa, unidentified
MDKITVVGLDLAKQIIQVHGIDAAGRVVLRKAVRRERLLALLAQLPRCVVGMEACSGAHHWARELKKLGHEPRIMAAEFVRPFRKSLAAKNDANDAEAICTAVVQPNMRFVSIKSVEQQALLSLHRVRQGLIEERTATLNRLRGVLAEFGVVVPQSAPALQRALLAVLADAERLPAQAQRGVQVLREHLHDLDAHIAEFDRAIAQHAKSSAPAQRLAALPGIGPLTASAMVATVGNPHDYRNGRQFAAWLGLVPRQYSSGGKRKLGRITRRGDAYLRALLVQGARSTLQAALRRAPARHDRLSAWIVQLAQRVGYHKTLVAIANKHARIIWALLARDRALNLAPTTTR

SEQ ID NO: 180883 - protein, 350 aa, unidentified
MLIIGCDFHSRFQQIAMLDPTTGEVVERRLEHENGEAKLFYATLPMPARVGMEATCDAPWFERVLREHHHELWIGDAAEIRAAMVRKQKTDSRDALHILDLLLTDRFPRIWVPSPAQRDLRQMLRHRHKLVRFRTSVMNQLHALAMGQGLCRRKKLWAKAGRKELEGLVLDPWASLRREELLQLLDQFDPWIAKLDEAVIQAAESRPPAVCLMQQAGVGPVTALAFVLTIGPVSRFANSKKLVSYLGLNPSEDSSAGRQRLGAISKQGNPMMRCLLVEAAQTASRLDPELRRDYQRLKFRRGSSVAKVAIARKLAVRLYWKLREAEQPVPSARMQGSPVGPVVGENLSPN

SEQ ID NO: 180884 - protein, 347 aa, unidentified
MGKIAYIALDLHARSCTLGVMDAAGRFLGNRQFLTSEKELVNALEMVTAKHKHLVIEEGPLTRWAAQVASAHVERVVTCDSRENALIYKSSSKRDTLDTVKLCRLLRLGELKHVYQPESDHRAIFKAAARHYIDLRHQLIAIKQKIKAVFRYWGVINCFGTRLYGAKGRQGYLQQIPHGVVQHQLLRLYELMDSHVQAKESAKAELKELSRRYPEIREFKKISGIGALNASLFDAFIQTPHRFVTKRQLHRYCRLGVTERSSDGKPLGYQRLDRSGIGELKAISHRSFVASMRGDNEVKRFYQQSLARTHNKVHARLNTQRKVLSVMYGLWKKGGTYRADLFLDPSA

SEQ ID NO: 180885 - protein, 483 aa, unidentified
MKPKRVENNKKASCRPTLNNWHAMNRKQRREMTRKIQSQDLSLEIVHPDAAGIDIGNEFHYVAVPSARDCQPVRRFGCTTAELKEMADWLKQCEIRTIALQSTGVYWVAVYDILEDAGLEVYLVNAKETKNLPGRKSDVQESQWLMKLHTYGLLRNSFRPSQEIRTMRTYWRQRNDLVRAAGRHIQRMQKALTQMNIQLANVLSDVSGLTGQAIIKAILAGERDPYQLAALRNWRVKASEEEIARSLQGNWQEDLLFVLQQEQDGYEFCLKQMAECDQRLEHYLREQQDGSHGASLPEEKRKERLRKKKKGNAPQFDLRAELFRLTGTDLTQIDGIDVTTTMTILSETGWDMSKWKTEHHFVSWLRLCPDNRISGDKIIGKGRLPTNNRVTNALRMAASTLRLSNTYLGAQFRRLRTKLGAPVAIKAMAAKLARLVYRMLRYGMPFVDRGAEFYDAQHRKLQINYLKRKAANLGFQIIEAPAA

SEQ ID NO: 180886 - protein, 334 aa, unidentified
MKTPNDLSWLAFDIGAKQHAWASDINGRRESGTVDNDPTKLRAFLKARLKRSGALRVLAEATGVYYLDVMLIAHELGAEVMVINPRTAHHFAQALSQRNKTDKLDAQMLLECLLRLPFQAWEPPSKTWRQLRSYGRFLVQLTDEGAADRNRLHALLNTPDSPALLRTELKRKIASNDKRIERLRAEAIALIRSDEYLWERFKALDTIQGVGEVSAVSLLSELITLPQTLSSRACVCHAGLDPRVHESGTSVHKAPRLSRHGNKYLRRALFYPALAACQSDPGAKAFKARLVGRGKKKMQANVAVMRKMLTVAWAIMKDPEPYDSARLYADLEKA

SEQ ID NO: 180887 - protein, 316 aa, unidentified
MTDTPNFVGIDVSKAQLDVALRPSDEHDTLVHDAAGIDTLVARLRHVAPTLIVLEATGGWERPLVRALVAAALPVIVANPRHVRDFAKATGQLAKTDRLDAVVLARFAEAVRPPLRPHPDAATDALAALLARRRQLLDMLTAEKNRLSTAPTRVQRRIRAHVTWLTAELARLNEDLDGAIRQSPVWCEQEDLLQSTPGVGPVMSRTLLADLPELGTLNRKQIAALVGVAPLNRDSGTLRGKRQVWGGRAPVRAALYMATLVATKCNPVIRSFYLRLRGVGKAPKVALVACMRKLLTILNAMMKHRTPWRALVAQKA

SEQ ID NO: 180888 - protein, 370 aa, unidentified
MLDTTTFIGLDVHARSIKAVSLDVMTGEVRAATFGYDAGAVAEWVRSVDPRARCVYESGVTGFDLQKRLSGLGVDCVVGAVSKMIKPSADRRRKNDRNDAEFLARMLSVGNVVEVWVPDDECEAARDLTRALEDARDDLSRSKQRLSKFLLRHGLVFDERTPTGRRKGNWTRAHWSWIESIGFAERADSDVLAYYVDAVRRAAEEKARLEGLVEAEARKPRWRRRVDSLRCLKGVDTASAADLVFEAGEFSRFGNARSFAAWVGLTPSEHSSGESDRRGAITKAGNKHLRKALVEAAWHYLTCSGRPKDLAKGQAPDRGARRHAAKGVRRLVERREALLARGVHGNKANVATARELACWVWAVGLMAEEA

SEQ ID NO: 180889 - protein, 379 aa, unidentified
MNHSITFYVGLDVHKDSIAVAYAPDERGAEVIFLGPIGTRQCDIDKLIRQLHSRSPRLLFVYEAGPCGYWLYRYLKKKGQDCIVVAPSLIPRRPGDRVKTDRRDAVQLARLMRSGDLNPVYVPCLEDESIRDLCRAREDAIGDLKASKQRLKSFLLRHDIRYVGKVSWNAAHLRWLADDVALPTAAQRIVFQDYVRAITYLMERLQQIEQELQEHVKVWRLAPLVAAYQALRGVQFHVAVTIAAELGELTRFDKPRQLMAYVGLHPSEHSSGKARRQGGIAKTGNSHARRVLVEGAWAYRYLPKVSRQIQVRQESLPQEIRDIAWKAQLRLCKRFRRLVAHGKHPNVAVTAIARELVAFMWAIARQVQLSENLPVDLAS

SEQ ID NO: 180890 - protein, 358 aa, unidentified
MNYVGVDLHQKTSWFYVVDSCGNKLDSRNVPNTEEDLKNYFEKIPKPFTLAVESTYNWYFFVDLAEQYAEEVFLANSYELKAFAKRHKKTDKIDARLIANVLHRGFLPAVTIADKQTRQVRELLRYRMNLVKDRSRNIFRLKALLDKIGCYWWGDFTTYKGLRSIDTEGLPIIYVDIINRYREQIMDLSERIEGIEKGVVDVTHRDVDMCNLLTIPGIGAFSAALIKSEIIDISRFRSFNRLCAYAGLAPRVRASADKIYYGALNTNRRKNLQWILLENVYHFIKGLDRARKKFERIKSKKGHNTAKVSLARDMLKVIYHVLRGKRPFYPEVDVSKKRERQSRNVRIQSVAATALSGV

SEQ ID NO: 180891 - protein, 322 aa, unidentified
MSLTVLGIDIAKQKFDVALLVEGKTKNKTCKNSVEGFETLMIWLEKQGIQKVHACLEATGNYGEDLAIYLHEAGHKVSIVNPARIKGFAQSELVRTKTDKLDAGVIARFCLAMKPEPWIPPAPEIRSLRALVRRVDSLIDMRSQEKNRINTAHESVIVLIKEHIVYLDQEIEKIRKQIADLIKRNPYLKQRKDLLDSIPGLGKVTVPHLLAELNDLEKFTHVREMVAFIGLAPKETISGSSIKGKPRLCKIGKARLRKALYMPALVSIQCNPVMIAFYNRLKERGKNGKVIVCAIMRKLVHVIFGVLKSGKKYDPNYKTTFA

SEQ ID NO: 180892 - protein, 367 aa, unidentified
MSHIIYCGVDFHARQQTICCLKTETGELTSHELKHDHKEALRKFYSELGGPVIVGLEASGYTPWFEQLLEELGHQVWLGDATEIRRRARRRQKNDRRDAALILELLCHDEFPRLHRPSPESREILRMLRYRHKLVKVRTIVKNSLQALSIQAGLSLQARLFTRQGTQQLEALTLSPVMGQQRQQWLALLQELNQRITETERWLKQQTLSDPRISLLRTHPGLGLLSSLGIVHTLIPVSRFPNTRKVAAYGGFDPMERSSADKKRYLGISKAGSRLLRFLLIEATQTAVKTDPELKRFYHRLVPRRGKPKAKVAVARKLLIRSFIMLRDEINYAEFQQRAIAARLAREFARPNVPVPLIGQPASPAKG

SEQ ID NO: 180893 - protein, 312 aa, unidentified
MTCWVGIDVSKQTLAVWVLPQEASIEVSNTAAGHRQLVALLADKAVERVVLEATGGYERGVMSTLSAAGLCVVRINPRRARAFAIALGKLAKTDPIDACVLARMAQVLKTPAQVSASPQREALRDLVQRREQLVQQRDDERRRLAQGHSARVQESLRACIEHLKSQIQQLDRAIAQAARAADAERTEQLTAIAGIGPVTVSSLLAYLPELGQLNRQQIAALVGLAPYNNDSGKYAGKRSIQGGRPAIRRVLYMAALSVIRKQDDFKRRYEQLRTRGKCAKVAIVACMRVLLIRLNAMIRSQTTWKPEPVPQT

SEQ ID NO: 180894 - protein, 325 aa, unidentified
MGQEKMSDPVAPTPTQITIGIDISKYRLDVHQHPQGIVKQFDNDRKGIARLLAWITPWRPTRIVFEATGAYHRALEMALGKAALPSVKVNPLQARRFAEATGKRVKTDPVDAAMLARFGYAMQPDIPPAKDQTIDTLSELLAARRALVKDQTAALNRSKTLTLALLKQQSQQHLNQIRAQIKAIDGERATILASNARLKARSDILVSIPAFATTTAFTLLVDMPELGSMSGKQAASLTGLAPVTRQSGSWCGKSFIQGGRATLRQALYMPALVAIRFNPPLKTKYLALRAAGKPAKVAIVAIMRKLVVIANALLRDNRLWTSEVA

SEQ ID NO: 180895 - protein, 330 aa, unidentified
MKIIETIGIDVSKMTLDIYLYIQKLHFKIENNPKGFSKLIKEINKLGIKPNQRILCMENTGLYSEPLARFLFFNSEKCYVVPSILIKRSMGLIRGKNDKLDAYHISRFASIYQSELTPFKPVHDDLIKLRRMLSLREQLLEQRKGLSCLDKEHKKYLNDQDSDDIIAILKQNIDFLSEQIKVVEYNMVSLIKANKDIAKNYNLLISIKGIGIVLAIQFLLHTGNFERFSSWRKFACYSGIAPFEKQSGTSLHVKARIHPFCDKKMKSLLTMAAINAIRTDNELKAYYQKKVAEGKPKMCAINIIRNKLVARAFAVIKRGTPFVVLFQHAA

SEQ ID NO: 180896 - protein, 428 aa, unidentified
MSTTHSPNPKELPLPESPVDPSLPEWWVGLDWGDQQHSFALQNRSGHYEEGTLDGAPESLHQWLKNLGERTAGRPVRVGIETSRGAVVHALLEYPWLEVYPVNPVTSARYRRAFTPSGAKDDLPDAKVLLELVRDHAQKLRPLREQDPQTLQLAGLVEARRRIVDRRTALLNQLTSLLKSYYPQALSLVGNLNTELAIAFLRRWPDVLRLKAAKPAVLKTFYYQHQIRSDPLVQERLAAIAKAVALTTDEARVSVARLQLAQLLDELEVFRKHVARFDTHIKTLFASHPDASLFRDLPGAGPQLAPRLAVAFGTMRSVYPDPASLQKYAGLAPVREKSGGQLWTHWRWRAPAFLRQSFVEWAGQTVRYSDWAAVFYQRMLNKGKKHAAIIRALAFQWIRILWKCWQERTPYDEARYLRQLLHRKSPMR

SEQ ID NO: 180897 - protein, 347 aa, unidentified
MNIIWIGCDFHPSFQCIAMVDTESGEYVDRKLDHACGEARRFYEGLKGRGVVIGMEACGNSGWFERMMAELGHELWLGDAGTIRSLVVRKQKTDRRDAEHILSLLREGRFPRIWVPSPGMRDSRQLLLHRHKLVQMRTRVKNELQHLALNQGVQQKRKLWTQAGRKQLESLPLTGWTAQRREDLLQLLDDLESKIGKLDQAVKQEAAQYEDTALLQTQPGVGPITALAFVLTIGPVERFEKSRKLASYLGLIPAEDSSGGRQKLLGISKQGNAFLRTLLVEAGQSAARHDPELRRAYQRLAHRKHRALAKVMIARKLAIRLYWMLRTHQPYALARMQGSPSHPVVAG

SEQ ID NO: 180898 - protein, 431 aa, unidentified
MKNRTSQRIEEITIGTLIVGVDVAKEIHWARFVDYRGVEHGKAVSFKNNRQGYEKIVAKIHEISKMKTLRYPIDAVMIGMEPTGHYWKPLANYMMIEGYRVVGVNPYHTKKSKELDDNSPTASDKKDAITIARLVKDGRFFDPYLPQEIYGELRGLSNARVSAMKRNNAVKNTITAIIDEYFPEIYTVFKNPLKGKASRQILRSCPFPAFIMEMDEADVLAEIRKAVKKTVGMKKVRELMSAAKGSIGVGYGLDAARMRLTWLLDELELLERQLAEVEQAMETALLKTGYAEQILGIKGIGVVTAASFLGEVGDPLRFQNARQIANYAGYNLMEDSSGKSKSGTIISKRGRKQLRSILYQMAFTMVGKNEEMKALYQHLTTRKNNPLKKKQALVVVSKKIITVIYSLLKKQETYRPELVLGTARIELMKAA

SEQ ID NO: 180899 - protein, 343 aa, unidentified
MEYYIGLDVSLKQTSICVVNQTGSVVREGVVDSTPEAIAGFVRSKAPGAVRIGLETGPTATWLWTELERLGLPVICIDARHAKAVLKMQINKSDRNDAAGIARIMQTGWFKEVRVKDLDSHAVKALLASRALLVKIKRDLENQVRGLLKNLGLVIGRGTFNVFTARAKELIADRPELTAAASPLLTARTAIGQQIEELDRKVLKLSRQDAQVRRFMTIPGVGPITALCFKATIDDPTRFKRSRSVGAYIGLTTRRHASGELDWSGRISKCGDAMLRMYLFEAAGVLLTRVPKWSALKAWGTRLIKRNGLRKAKVAVARKLAVILHRMWVDGTEFNWSSKEVTA

SEQ ID NO: 180900 - protein, 351 aa, unidentified
MFIIGVDYHPSDQYIAFVDTETGECGEQRLNHREGEAEKFYRELAARGVSVRVGMEATGYSRWFERLLAELGIEVWIGDAAKIKTKRVRKQKTDREDARLLLRLLREDNFPRIWVPSPENRDLRQLLWHRHRLVQMRTRIMNQLQALAMNEGQRRKKKLWSEVGRAQLEKLPLAPWASRRRKDLLELLDRMNPTIEELTRAVEQEARKRPEVQRLVTHPGVEPITALAFVLIIGTPQRFPCGKQIGSYVGLIPEEDSSAGHQRLGHITKQGSSLLRFLLAEAAQAAARCDAGWRRRYAHLALRRQRNIATVAMARRLAVRLYWMWRNGWEYAEWVKVGPHAGQLGTGHGVN

SEQ ID NO: 180901 - protein, 452 aa, unidentified
MGEEKISMEIVNPHAAGIDIGSRSHWVAVGQQEKDIMEFGVFNQDLFEMADWLKEHNVKTIAMESTGTYWQNLYAVLLAKGFQVILCNGKFTKNIKGKKTDVKDCQWIQKLHSLGLLSSSFLPDGKTEQLRTYCRHRSNLIHSAASTSKKMQKYLRLLNLRLDVVVKDICGLTGLNIIRAICSGETNPDKLSQLRHGNCRKSKDEIARALQSNGRKDYLFALQQELETYDHLQKKITECDNMIGQMLNEIIDNDDNKKQHFIESKPHKRINKNTPTDIDLNLKSYQMFEGTDLLVIEGMSFATALSLMSEVGIEGIKKFKSAKHFSSWLRLAPNNKISGGKVLSSRVPKGSNRLKIALRNAANAIGNLKESTPLRDFFHRINFRKGRVSAISATARKLAVIIWNMVVKGTAYINPSGYLYLDQKRKLAVRKRIQNQIDRFALNQSDFKFAIG

SEQ ID NO: 180902 - protein, 402 aa, unidentified
MNAVGIDVSKGKSMVAIMRPFGEIVSSPFEIKHTTSDINSLVELISSVEGESRIVMEHTGRYYEVLAHQLSKANLFVSAINPKLIKDFDNDSLRKVKSDKADAVKIARYTIDKWQNLKQYSVMDELRNQLKTMNRQFGFYMKHKTAMKNNLIGILDQTYPGVNTYFDSPARSDGSQKWVDFASTYWHVDCVCKMSKNAFINHYQNWCKRKKYNFSQSKAEEIYGKAKELVPVLPKDDITKLIIKQAVDQLNSVSTTVESLRTLMNETASKLPEYPVVMAMKGVGTSLGPQLMAEIGDVSRFTHKGAITAFAGVDPGVNESGSYEQKSVPTSKRGSSVLRKTLFQVMDVLIKTHPQDDPVYQFIDKKRAQGKPYYVYMTAGANKFLRIYYGRVKEYLSSLPES

SEQ ID NO: 180903 - protein, 397 aa, unidentified
MYIVGIDIAKRKHEAAVIDGEGAVIIKPFSFTNNCSGYNRLLAMLTKAKLPLDEVSFAMEATGHYWLALFTRLQKEGFRVQVINPVQTNSIRSFYIRQAKTDPRDALLIAEVIRFGHFSESTLHPENIYELRELCRGRHAIVSMQADVKRKVVALLDQVFPEYETAFTNMFSDTSMAILQTCPTPKELSETPLEELCHLIEVSSHKRFRMAKAQELQALARNSFGFAMAGDVFSTMIRLYAKHLDFLKQQVREMDRKIAEIMETLDTPITTITGIGPTLGAYILSEIGDISRFSSAAKLAAYAGIDPTMRQSGEYNGVRNRMSKRGSPYLRHAIWLAASSAVLHDPALKLYFQKKRDEGKPYMASVGHACRKMVSIIYAVMRDNKAYTPYIPNEISA

SEQ ID NO: 180904 - protein, 357 aa, unidentified
MGKSIIDPSSVTRVGLDMAKRVFRIHAVDATGFVVIARSVNRRTLLKFFDMLPRCVVAMEACSSAHHRGRQLLDLGFAVKLIPPAHVKPYVRRSKNDAADAAAICEAAGRPGQRFVPVRSVENQAALMRHRARELMVGQRTAALNALRGHLSEIGVVAAQGVPNAYALKKLADGGVDENGEIVVPDCVRFALAPLVRQIDALDEAIEAIDRTLEASAKTDETARRLMTIPGIGPVTAMALLATIQDFAAFSSGREFAAFLGLTPREHSTGGKPRLGRITKMGDRYLRKLLVQGACSALGHRKGHNDALRRWASGMLERKTVKYKFKLTAVALANKLARIVYALATQGGHYDDRPVAA

SEQ ID NO: 180905 - protein, 346 aa, unidentified
MEVHTIGIDLGKTLFHLVGVDSRGTAVVRKRCSRAQLLAYTANLRVHRIGMEACSGSHFLGRALREQGHDVRLLPAQYVKPYVKTNKSDYIDSEAIAEAVERPNMRFVPIKTEEQLDLQAAHRVRERWVMRRTAVVNQIRGLLLERGLTLPKGRRHLEQAVPGILKNVESKWSEAFLVLVRQLNQELEQLSERIEEMDRVIERTAADHEACQRLMTIPGIGPVTATALVSAIGNGAEFRRGRDLAAWVGLVPREYSTGGRQKLLGISKRGNGYLRRLFVQGARTVMQHRNRQANSLAHWLDDLTARAHQNVAIVALANKLVRVAWAVLHNNEPYRHADRVASDAAA

SEQ ID NO: 180906 - protein, 383 aa, unidentified
MRNYTTYVGMDVHARSIQASAVVVETGEVSNRSFGGCPQAADVAEWLATLPQPVYCAYESGCTGFVLARGLRGLGFDCDVIAVSTLPRSAKDKKQKCDKLDARAIRREIANPDPGYSVVWVPDEKTEAERDLARCYRAAVDAAKHAKQRLLMFLLRHGHVWDERTRTGRLKKAWTRGFERWLDSISFAEPSAERAFAAYRRQVRDACREAGELRALVRELASRPEHKPYVDALTCLKGVDVETAVLARVEVGDFSRFQSGRKVSCWLGTVPSDGSSGESGRHGRITKAGDRYLRRALVEGYSGAATWRSGRKAVPRGAEPSAAAQSIAARANERLHARYSHLTAEGRKSHNKAKVAVVSELVRWIWVIGLQVQEELRGEGAAA

SEQ ID NO: 180907 - protein, 342 aa, unidentified
MDYFTGVDVHSNFCQFQHMDNTGALGLTMRVPTDKAEINKFLNLLDEPTTMTFEAGRNYWWLHEFFTAHPKVSQVNVVDPRRSRNLAKELSVVSGYGRAKNDRIDGEMLAEQDRRGLAPTIHVPTAAQLEQRTLSRHRYMLVLNHTRAVNIIHSILAMHGVKAKINDLMTKPDKKGEMVTSVPYYVSLIVNHLLGQCTLLDLQIEQNETELDRLLPEHHPNIKLLLTVPGIGIVLARIIHTEIMDIIYFKEPKYLISYSGLAPVESDSAGRKGIIKLNRHCNYYLKYAFIEAAHHASTHVKYRRKYDLDVKKHGKIIAKLNLARRLVKSVYWILTRQQPYKM

SEQ ID NO: 180908 - protein, 328 aa, unidentified
MEQELHFIGIDVSKAKLDVDVLRPDGRHRSKKFTNTPKGHEELLNWLRNHNVAPAHVCMEATSTYMEDAAASLSDAGFTVSIINPTLGKAFAQSEGLRSKTDAVDARMLAEFCRQKRPAAWEAPHPVERALRGLVLRHQSLTDMHTQELNRRETARDVQMPSIDAHLLWLEAELKRLEKQIKDLTDDDPDLKHRRKLLDSIPGIGEKTSAVLLAYVGLKDRFGQARQFAAFAGLTPRQHESGSSVNRASRMSKAGHVSLRRALYMPAMVALYKTEWGKGFRARLEKNGKGAKLIIGAMMRKLAQVAYGVLKSGRPFDATLHQENACMA

SEQ ID NO: 180909 - protein, 343 aa, unidentified
MQVITTIGLDIAKSVFQVHGVDAAGQVVVRRQLKRRYVLAFFEKLSPCLVGIEACASSHHWSRELQALGHTVRLMPPAYVKPYVKRQKNDMADAEAICEAVTRANMRFVPTKTPEQQSGLMLHRARHLFIRQQTAVINAIRAHLGEFGIVAPVGRNGVEELLEVVADPSDKRVPEIVRACLAALGAQLRRLKEQILEFDRMIRAWHRSSEMSLRLDDCPGIGPVLATALAATVADPKAFRSGRNFSAWIGLVPKQHSSGGKNRLGGISKQGDRYLRGLFVAGALAVIRYAKIHGTKHRPWLTALLGRRPTKVAAIALANKIARMAWAMMAKGERYKEPVALAA

SEQ ID NO: 180910 - protein, 320 aa, unidentified
MTEAQCYVGIDVSKGYVDVAVRPTGQPWRASSTEEGLGALVEWLWGLSPALVVLEATGGLEVPVTAALAAGGLPVAVVNPRQVRDFARALGKLAKTDRLDAQVLALFAERVRPVPRPLPDPQTQELNALLARRRQIVAMLVTEQNRLSIALPSVRPGIQEHVAWLEEQLEGLNEGIATLLRQSPLWREREDLLRGVPGIGPTVAATLLAELPELGTLNRRQIAALVGVAPLNRDSGTLRGKRTVWGGRATVRAALYMAALVATRFNPVIRAFYQRLLAAGKPKKVALTACMRKFLTILNAMIKHRSPWQPVPFQVLGACS

SEQ ID NO: 180911 - protein, 483 aa, unidentified
MKPKQLRGSQKAGSRPTPDHWHQMNHKQRREMLRKIQSEDLTLEVVHPDAAGIDVGNESHYVAVPSTRDSQPVRRFGCTTAELKAMADWLKQCKIRTIAMQSTGVYWVSVYDLLEEAGLEVYLVNANETRNLPGRKSDVQESQWLMKLHTYGLLRNSFRPSREIRTMRTYWRQRNDLVRAAGRHIQRMQKALTQMNIQIANVLSDVSGMTGQAIVKAILAGERDPYQLAALRNWRVKASKEEIAHSLEGNWQEDLLFVLKQEQDGYEFCLKQMAECDQQLQQCLQQQEDRSQGVSLPEEKRKERLRKKKKGNTPQFDLRSELFRMTGTDLTQIDGIDVTTTMTILSEAGWDMSKWKTEHHFVSWLRLCPDNRISGGKIIGKGRLPTNNRVTNALKMAASTLRLSNTYLGAQFRRLRTKLGAPVAIKAMAAKLARLVYRMLRYGMRFIDRGAEFYETQHRNLQISYLKRKAANLGFQIIEAPAA

SEQ ID NO: 180912 - protein, 351 aa, unidentified
MTEIKRIAVDTSKTVFTLHGVDAAGRPVLRRNLRRRELLRFFERLPPVEVALEACGGSHHWGRALSAFGHRVRLIPAQYVKPFVKRGKNDRNDAEAIGVAAAQPSIGSVPIKSAEQQAAAMLLSVRELLVRQRTQLVNAVRGHAAEMGVVAPLGEKGFKELQTEIAAADEAAVPAAAKQAIALLSREVERIEARLRTIEAELMQQHKANPVSRRLAAIPGIGPIGALSFALRVDAGQFASARHLAAWLGLVPRECSTAGKQRLGDISRAGDERLRQLLVLGATAVIQHANPRVTPAGKRPTGRPAPSQWLLNLLSRKPRKLAAVALANKMARIVWAMMTSGEAYRPRPAAA

SEQ ID NO: 180913 - protein, 355 aa, unidentified
MTTQTHRVTGGVDTHTETHHAAALDHVGRLLGTREFRAGPAGYAELLEWLQSFGSIDQIGVEGTGCYGAGLTRFLRGHDQSVIEVNRPDRRSRRTRGKSDPLDAESAARRALAAEDHIIPKDTTTIVEAIRALRIARTGAVKSRTAAYNQLRDLTLTAPESLRETLRGKTLHRVALESARLRPDMSRLADPIQATKLAMRTIGHRVAALNTEIKALDRQLGQLVKRAAPRTLELVGVGTENAAQLLITAGGNPERLRSEASFAALCAASPIPASSGKTTRYRLNPAGDRDANRALYIITLVRMRYCPQTRAYIERRQAEGLSKREAIRCVKRYVARQTYHAIRADLAAARALDDL

SEQ ID NO: 180914 - protein, 499 aa, unidentified
MNVLDYTYISFPVLCMSIIVLMIILNIHGGIGMSNSIFKFASNDLKNLLAICKPEQLLYAPIDVAKYNHSAMIVNLLGEVITPKFDFPYNLHGIDFLKNKLQSACDISHAKKLFLALESTGHYHENLVASLVDSGYDIAVIRPIDSKNERDNVHAKTDAIDLAAIARVVISNKGTRSNMPDTVYYNLQRASRTHRQLTWQDTRVKNIITMLIDKTFNGLWNPDNEIFADKWGKASLLFVSQYPTPQQAIKMGAKRLSEFFKKHNTKLGIDTADKIIALAKNTPTRPLDVMESDIKAVKSNIVILQALLSEIVEQKKQMVKFLIQTPGIYLLSIPGISVVYAGDFTAEVGDIHRFAYAGQVVSLAGTAPRKYQSGELDKANLPTSHKGKNLLRMTVNQIALSLNTHCPEFHKYYSDKLFHYQDAPPKARTATANRFIKLAYAMMKSETLYSPKTGNPLTTEREYYQSVWNKVKEKLTDYLSDDIPQDNYLVKIADQLEEK

SEQ ID NO: 180915 - protein, 364 aa, unidentified
MCGEHRKDYCSMKKYIGCDAHTRYSIFVSLREDGGCDPAVRIEHNELEMERYLKQLPAGTPVALESSGNWYWLVRAMEEAGLDPRLAHALEAKKRMPGRNKTDHLDAKGLALMLRNGSLPEVWIPPANLLDLRDLMRTRLATRQQGSELKCRILAALRRYGVRREEEGADLFAESRRPKLAIAIARLPQECRIATTEEWVLLRELEQHLEAMEQRIRQRIASLGWVRLLKTLPGVGTILGSTIYLEIGEVSRFPSPEHLASYAGLVPTVHASGGKMWQGPTPRSANHFLKWAFIEAANVIVAHQKGWADKHVVRLYQRLKANKCHGKATTAVARHLAESSWWILTKKQGYREPALATMSSSKNG

SEQ ID NO: 180916 - protein, 356 aa, unidentified
MNKDSTLFVGLDLGDRWSHLTILDPEGEVVEESRVPTSGGALQRKFSALAQARVAMEVGTHSRWVSQALRDLGHEVLVANARKLRVIFDNPRKGDRADSHTLARLARLDPKLLSPIEHRSPQAQADLDVLRSRDALVRSRTLLINHVRGVVKSTGARVPSSSASSFPSKAAGSLPEALRPALSPILETVRALNLEIRSYDRPIEDLCTGKYPDCQRLRRVQGVGPITALVFVLTLENPKRFEKSREVGPALGLVPRRDQSGGQDPQLHITPGLPQGRQDRKCLSPSSPCWLRPVHPWPLWPRLRSPPLGPAAGQPWREECEEESGGGGGKKARHRASPALEDWRGLHPRAFVASTW

SEQ ID NO: 180917 - protein, 354 aa, unidentified
MSQKLDSEIAVIGIDIGKNSFHLVGQDRRGSIVLRQKWSRGQVEARLANLQPCLIGMEACVGAHHLSRKLKALGHDARLMPAKYVRPYSKGEKNDYRDAEAIAEAVQRPTMKFVATKTADQLDLQALHRVRQRLVSQRTGIINQIRAFLLERGIAVRQGLHFLRAELPGIRAKRTDVLSPCMLRIIEDLAGDWRRLDERIESLSAEITRVVEQDPACQRLMTVPGIGPIISSAMVAAIGTGAVFAKGRDFGAWLGLVPKQMSTGDRTILGSISRRGNRYLRKLFVQAAWVVLAKITPEGWERYGLKSWIEAAKQRLHRNVLAIALANKLARIAWAVLHKGRAFECVKTNAPRTA

SEQ ID NO: 180918 - protein, 321 aa, unidentified
MTYIGIDVSKDSFVVAYSPEKNSKTKTFKNTTKGIHEFIQTISKDEHHCVMEATGNYSALLVYLLAEAGITTSLENPLKVKNFARAMLSTVKTDEIDARLIALYGEKMQPAPYKLRSDAILTLKQKRTVIRQLKKQLIATRNLKGSMEALPFFDAKCKKSIEKTIAFLEKQVKDLEEDLASLAKSEYKKQMDLLTSVKGIGITLAAALIMATGGFTYFDNAKQLTRHLGLSPTYQQSGTSVNFKGHINRNGDSSLRSQLYVAAFSSIRCNTECRACYDRLRSKGKPGKVAVIAVANKLIRQAFAVVTQEKPYVDGYISSKK

SEQ ID NO: 180919 - protein, 390 aa, unidentified
MQALFPRPHEHAAIRTDLKAIFVSLELSRSTWVITSLAPGGGEKMSKHAVPSGDIPALLARLSQLKEKARARTGQVFPIIVIQEAGLDGFWIHRVLQSEGIESHVVDPASIATSRRRRRAKTDKIDGEALVRALLAYKRGEPRVCAMVKAPAPHEEDRRRISREREVLTAERVQHVNRIKGLLFAQGISNYEPLHRNRRERLEELITGDGRPLPEGLKAQIRRELDRLELLIEQVKAVEAERDALLAHAQASSGVPAPAAQLLTLRGIGPEAAATLWTEGLFRTFNNRKQVAAYAGLAPTPWQSGSVHREQGVSKAGNPRLRTTMIQIAWLWLRHQPQSALAVWYRARIKRKGGRLGKTTIVALARKLLVALWKYATAGVLIEGAVLKQA

SEQ ID NO: 180920 - protein, 427 aa, unidentified
MGLITATPMPPEQDEQPISYDWFVGIDWGSQKHQVCMLDGNRQVVGERVVDHDGASLAQLVTWLLTVSQGQPQRVSVGIEVPRGPIVEGLIERGFHVFAINPKQLDRFRDRHSVAGAKDDRRDAFVLADSLRTDRPSFRRLRLDAPQLFMLRELSRAEETLLEEFRRTTNRLREQLHRFYPQMLQLSAAADEAWLWDLIELVPTPAHATAVTAEQVHQVLPAHRMRRVTADEVLVCLQAQALPAAPGVREAAQVHCAFLLPCLRVLAEQLRSCAQQVEALLHTLAAEPGEAGGPSDVAIVQSLPGVGRKITAWLFAEAAQPVAERDYQVLRTQGGVAPVTKQSGKRRQVVMRRGCNPRLRHALYHMARVAAPRELHFSRVDEALRAKGQRHGQALRNVGDRLLRILMAMLRDGACYDIARCRREPVV

SEQ ID NO: 180921 - protein, 313 aa, unidentified
MTIQTLIGIDVAKDELVVYRQDLETQETLENRQPILKQWLHGLPARCAIAVEATGTYHVALIELAYQCGHEIFVIDGYQLNHYRQGIGGRAKTDSSDARLLARYLSRERELLRAWTPPPAVYRSLQTLLRRRATLVQARVAIQQSCTELPWLASHLKRLIAQLTRIDQVIQARLRAIVREAGLSHQVARCQAMEGVGELTATALVMAFLRGDFRHSDAFVAFLGLDVRVRDSGKQRGRRKLTKKGDPEVRRLLHNAAMAASRQPTWKATYQQYRARGLKTTQALVILARKLARIAFSLMKHQAEYRPPNLMNA

SEQ ID NO: 180922 - protein, 355 aa, unidentified
MERYIGMDVHAASCTLAVISEKGRKLKDFPVETNGQALVEAVRMIPGHRHLVFEEGLQSAWLYETLSPHVDELVVAGVTQSRGLKSDKRDAYGLAEKLRVGNLDKIVFKSPRQFTRLRELSRIHMTLVKDAVRVQARIKSLYRSRGILVSGEKVYGTRHRDDWQKQLCSSAQTRATRLYDHLDFLLEQKKQAEVDLLREGKKHSIVRILETAPGFGPIRAARLVPIVVTPHRFRTKRQFWSYCGLGIVTRSSSDWMQTADGGWIKARVPQTRGLSRQFNHVLKSIFKGAATTVITQHNKDPIHARYERLLDGGTKPTLAKLSLARMIAATVLRMWKDEEEYEPGRGGLPTKTREG

SEQ ID NO: 180923 - protein, 345 aa, unidentified
MDHFAGLDVSVKETSVCIVDDVGKIVREVKVASEPEALLAVLKNPAYHFKRIGLEAGPLSQWLYSALAGAELPVICVETRHMRAVLKAQINKTDRNDARGIAQMMRAGLYRPVHVKTLRSQKLRMLVTHRKLLQAKAIAVENDLRATLRNFGLKVGVVGTVKFEARIKELVEDVPDLAVLVEPLLVVRRVLREQISVLHRRLLAIVRDDDVCRRLMTVPGVGPVVALTYRVTVDVPVRFRKSKSVGAVFGLTPSRHQSGESDRPGAISRCGDEMMRSMLYEAAQILLVRSTKWSWLKAWAMKIARHRGMKKAIVALARRLAVIMHRIWVNGTAFRWTQEQAAAAT

SEQ ID NO: 180924 - protein, 377 aa, unidentified
MSQVRFIGLDVHAETIAVAIAEPTGEVRPVGVIPNRPESIRKLVKKLGPAEQLRVCYEAGPTGYVVYWQLAALGVTCEVVAPTLVPVKPGDRVKTDRRDALKLARSYRAGDLTPVWVPDAAHEALRDLVRAREAAKKDQLRARHRLGKFLLRQGRRPPTAMKAWTQGHLTWVKSAVHFDHAAQEATLLDYLHEVDHVAGRIERLERAIDAAVQTAPVRIRAVIEGLQALRGIALVSAVTIVAEVGNLSRFVKPRQLMGYSGAVASEDSTGDRIRRGGITKTGNAHLRRIVIEAAWAYRHRPAMGATLRKRQAPVDDEVKAIAWKAQHRLHARYRTLTAKGKTKQQAVTAVGRELLGFIWAIGVTVEAKGHHAQPAAA

SEQ ID NO: 180925 - protein, 338 aa, unidentified
MKVTTLGIDLAKSIFQLHGVDAHGKVTLQKRVTRAKLRATVAQLPPCLIGMEACGSAQYWAREFQELGHTVKLISPQFVKPYVKGNKNDSRDAEAICEAVSRPHMRFVPLKTVESQDIQAIHRLRSRLVKERTALVNQIRGLLAERGIVIAQGITRLRKQLPVIVEDRENELTPVSRGVIRELAEELGMLDERVTRADVMVQRVFTQSVACQKLAQVEGIGPVVATAVVAAVGNAKEFANGRHLAAWLGLVPRQHSTGGKERLLGISKRGDRYLRTLLIHGARATVHHARHKTDARSRWILSLEQRRGKNIAAVAIANKNARIAWALLTSDTEYRKAA

SEQ ID NO: 180926 - protein, 348 aa, unidentified
MVMVGGLDLHRKQITFDVLDTETGQVHRGRISPADRRLFRGWLAEFAGQQVELAVEGCTGWRFVIEECQRAGVVAHLAEPAEVAGLRGRRRHAKTDRIDARHLRDLLLEGRLPQCWIPPQLVLETRAKVRLYKDLADQRVGWQQRMHATLYHLGAPAHRDLLAGDRDRLARIEELSPAARQAITVALSMIESLEAQLEPLRAELTGFARRQPGCQALQAEYGIGALTAVVIWSEMGDARRFTHSRDAVRHAGLDITVYSSDTKRSAGRLSRQGSPLLRWALYEAARCSARAASPDHGYYRQVADRLGGQRAALSVARKLARRAHHRLRALGEHALAPPPTTPAPPTRS

SEQ ID NO: 180927 - protein, 480 aa, unidentified
MNVKARRTKKQVNVENQAINLLSKEELNKKIEVVEKELRSYTWRELETNGKFAKNDKLSFITDDMLIVGCDIGSENHYIRAIDVRGRELSRGAFEFSNTSEGFENAKTWVLALAAKHDKKQIVLGLEPTGHYWFALAAWMISNGISVVQVNPYAVKQSKEIEDNSQLKDDRKDPKLIANLVKDGNYGMPYLPESLYADMRRLSMFRDQLTEDRIRNINRLHRELKIYFPEYMDAFGKIDGTFTLEVLKISAIPSDIVALGAEGMKKIWHDAKLRGRGYSRAGEIVDYAEKSVGLTDGTDAGREAVKWYAEQIMKLDEQLEMVESALHRKCREIPYAENILAINGVGENILAGILAEMGDISRFDDVKEIQKLSGMGLVACSSGKHKGQTKISYRGRKRLRYWLFQAAKSAVSHADEFKQLHEYYTTRSKNPLKKMQSLVVIACKILRVIYTILKTGTIYDPEKMLKDIKHPASAQTSLAA

SEQ ID NO: 180928 - protein, 355 aa, unidentified
MHHTQYDPARVCVVGIDLAKDHCDAVGFNERRAPVFEWPRISYPELMNRLAQLPPAAVLMEACNGAHDKARRIADLGHDARLVNAADVKAVRNTRHKNDRRDARYIATLFFLPDIKYVQVKTSAQQDRQLLIREYKGYQRIRIELGNRIHSALEQYGIPTRQGMQRLACHLTEYLDERAEKITPILRETVLRLFESWKRALADEEAAKRRLEAQAARDADAKRLMTIPGIGAVIALYMQAHIGNPHRFKNSRQAAASIGLVPRQYSTGGRDTLLHISKRGPTALRSALIQGAGSVYIWSEKLKGALGAWVSKLKDSRKKYGVIICAIASKLARICWRILRDRTVYQPNWQAAHSV

SEQ ID NO: 180929 - protein, 347 aa, unidentified
MITITETFASVGIDLGDRIAHYACLDPSGAIVEEGTVEMKPESFRRQFGAMEPTVIALEAGAQSRWASQVLEELGHDVVVANARQLKLITASNRKNDVNDARLLARLARVDTSLLHPVEHRGDAQQVTLVAIRARAQLVKMRTAAMLSLRGMVKCFGVRLPRATSDRFLERCRQAVPEPLRRALDGVLDVIATLTAQIMSYDEQLEETARKQYAPVARLAEIYGIGPLTALTYVVTLGDPQRFTKSRDVGCYLGLTPSQRQSGDQDPQLRISKAGDPYLRSLLVQCAHTLLRDHAPDSALRRWGLRLCARGGKNAKKRAVVAVARKLAVLLHRLWVTGEHYRPNPGY

SEQ ID NO: 180930 - protein, 456 aa, unidentified
MIMKRKKKVLQVPKLESLKQINPNAAGVDVGASELYVCVPEDRDPRPVRVFQTFTSDLHEIAAWLKKCRVTSVAMESTGIYWIPLYEVLEEAGFEVKLANAREAKNMPGRKSDILDCQWIQQLHSYGLLTASFRPPKDIVALRSLVRHRDRLIVARAVHIQHMQKALHLMNLQLDNVLSDITGVTGMRILRALVAGERNLDTLVSYRDPSCKSSTQVIRESLKGNYQEEHLFPLRQSLELYDYHTTMIQQCDREIEQKYRALPSRVDLQRKPLPPSKKQQKKPRKNAPTFDLRSRLYEMAGVDLTAIDGCNAATIQVVLSETGVDMEPWRTCGHFTSWMCLAPHNDISGGKVLRSRAKKTKNRANTALRLAAQALTHSDSWLGAYYRRQRARLGAPKAIIATAHKIARIIYYMLKYQREFVDLGANHYEAQYRKRQINSLTKKAGSLGLLLVPAKA

SEQ ID NO: 180931 - protein, 351 aa, unidentified
MDTIGLDLHKRESQLCIGDEDGTITERRIVTSRERFTAVLGNRPRAKILLEASTESEWVARHLESLGHEVLVADPNYAPMYATRSRRTKTDRRDARTLMDACQTGAYRLAHRLSDPRRHVRAELAVRDALVRTRTRYVALAKTLVRRDGLRVASSESHLVAQRIGALSLSPALAAELQPLFTVLVPLNEQIVAADGRIATLAATDPLVARLATAPAIGPVTASAVVATVDDITRFRSAHQFEAYLGLVPGERSSGEKRRVGPITKAGNSRVRWLLVEAAWRLLRTKSAEAAALRAWAHGVAGRRGKKIAVVALARRLAGILYAMWRDGVPYDASRIRGPRIVAAEVTARAG

SEQ ID NO: 180932 - protein, 347 aa, unidentified
MKNTVIGIDISKKSTDWCLMRGTEVVSYHRVDNEIAAIEGQLQELMDSYLIDRCELMVCAEHTGHYIYPLAIACQNKHVDLWLENGYNIKCEARKERGKSDKEDSRRIAEYGYKNRQDARYYSVPTQEVAALESLLAERADYVVERAKLKGQLQDQKDYTDPAVYKAKAKRLRKLIRQYDKLISEIEQELERLMRENETMGHQAALLETIPGIGRHTAMRMIAATKGFTLFENGRQFCCYAGTAPFEYTSGTSIRSKNRVSQRADKSLKAMLHLCALTVARRSNPNHFSDYYQRKVDEGKNPMSILNAIRSKLVLTMFAVIRTDQPYSPEIVHNYVEKFSIKPIAIS

SEQ ID NO: 180933 - protein, 433 aa, unidentified
MEEVTDEPLYRDRVCGIDIGKAELYATIRVPSDTRPQRRMSETRSFATTRRGVLALADWLRCWQVPAAVMEATSTYWMGPFFRLEAEGFECVLADAKQVKNLPGRPKRDPSDSSWLAQCFERGAVRPCFVATKEFRVIRLHTRYRRDLINERTREKNRAEKLLETAAIKLSSVITDLHGVTGRDIMGHLIAGERDPKVLAQLARTRARAKITELQHALEGAEFFTGHHARLLKTMLERIDQIDAQISDLTAVTEELLAPYEEQLQQAESMPGWGRRSAEDAVAETGTDMTRFATGGHLVSWAGRAPLDKQSGKRKGPARHKKGNTYLGGVLGETAVCAGRTQTREGARYRKLARSRGKNKACVAVGNTQLKVYHKLLSSPGMRYEDLGPDYYQRRAQTRRTIDYHVRELEALGLEVTLCRLPEPGQAATTPAA

SEQ ID NO: 180934 - protein, 343 aa, unidentified
MGEISTIGLDIAKNVFQVHGVDQQGNVVVRRQLRRRQVLKFFAKLSPCLIGIEACATAHHWARELRKLGHEVRLMPARYVKPYVKRNKNDAADAEAICEAVTRPTMRFVPIKTIDQQSVLMVHRTRQLFVRQRTSLINAIRAHLAEFGIVAGVGRNGVEVLLTLIAEGKDERVPPEARDCLVALAAQLDLIKRQILGADRRILAWHRSNSMSKRLEAIPGLGPLGASALVASIPDPHIFRSGRDVSAWIGIVPKQNSSGGKERLGSISKAGNRYLRKLLVVGALSVIKRAKQLGYTRYPWLTKLMERRSVKVAAVALANKNARIAWAMMARNESYRAPKTVSV

SEQ ID NO: 180935 - protein, 343 aa, unidentified
MNIITVGLDLAKSVFHVVCFNDHFKEVKKRMLRRNQVLQFFAQLPPSRVGMEACASSHYWGRELRALGHEVKLVPPQYVKPYLRGNKNDYNDARAIAEAATRPSMPFVAIKTVAEQDMQAIHRMRAQCIRDRTALSNSTRGLLGEFGIVLPKGLTTLRKSIPGLLEDAENGLSDRFRNLLVRRYEQLVELDEHIAFYTNELVVLSQQDDACQRLQTVPGFGPIVSSAFRSAIGDGRAYGHGRAASASLGLVPRQHSSGGKDNLLGISKRGDRYLRSLLVHGARAVVVQAARKDDPLSRWINRIRKERGWNKAVVAMANKLARIGWAILRYNTIYQPVSAASRH

SEQ ID NO: 180936 - protein, 320 aa, unidentified
MSASSVVVGIDVAKAHVDVAVLGAQFVARRFDNDADGQSALAAALQPLGVALVVMEATGGYEAALACALQAAGLPVAVVNPRQARDFAKSMGRLAKTDAIDARMLAEFASVLVRRDDLAKLLRPLTDPDQQVLAALVTRRRQLLTMLLSERQRLQLAIAPVRPGIEAMIEAIRKQLDDVEAQMVTHVQTHYVELDKLLRTAKGIGPVASATLIADLPELGKLNRREVAALVGVAPMANDSGSSKGRRRVVGGRFEIRRVLYMATLTAVRHNPAIKAFYDRLKAAGKLPKVALVACMRKLLTTLNAMVKTNKPWDKSLHGA

SEQ ID NO: 180937 - protein, 452 aa, unidentified
MEEEKISMEIVNPNAAGVDIGSRSHWAAVGQNADEVQEFGVFNDDLKRMALWFKENRIKTVAMESTGTYWQSLYAVLLSEGFEVILCNGKFTKNIKGKKTDIKDCQWIQKLHSLGLLSSSFLPDKQTEQLRTYCRQRALLVDSSASTSKKMQKYLRLLNLRLDVVVKDIVGLTGLAIIKAICDGETDPSKLAELRHFNCRKSKEEIAMALQSNGREDYLFGLKQEIEMYEMFQQKIDQCDIEIQRMLDEIINSDDNKKQHQIENKPYKRINKNSPKNIDLNLKSYQYFEGVDLMAIEGVSYSTVLSIMSEIGLEGIKQFRTAKHFASWLRLAPNNKISGGKILSSKVPRGSNRLKIALRSAANAIGNLRESTPLRDFFQRINFRKGRVSAISATARKLAVIIWNMVVKNKPYYNPKEYLYLDQKRKLGLVKRIQKQITKFELLKENFEFVTS

SEQ ID NO: 180938 - protein, 341 aa, unidentified
MEEYIGLDVSMKETAVAIRRDGVRVWRGKCISDPRVISELIRKRAPTVKRVVFETGPLSVWFYHALRAEALPVICIDARHAKAALDMATNKTDANDADGLAHLADVGFFREVRVKGFESMLARTLIAARTRLVHMTVELSNQIRGIMKTFGLVVPAGKGSVFEKNVRNLLCSQDDLAHVVLPLLDTWKGLRARAADLGRQLVADARSSPACRILMSIPGVGAITATSFATAIEEPENFRKSRSVGAWIGLTTRRYQSGEVDYDGHISLRGDRHLRGLLYEAASVILTRSSKQSSLRTWGLQLRERIGFKRAAVAVARKLAVIMHTMLKTGEFFNPTAGVAA

SEQ ID NO: 180939 - protein, 369 aa, unidentified
MTFFIGVDLHKTQFTVHVRTDEMAETLKQIRQYKTDKTGYAEFTERIQAYRESGACVKIGVESTGNTRFFKHQVEKAGAEVTVINTLKFKVINESAKKTDKHDAATISEFLAKDMLPESYLCSKETENIRRLLKSRERLVRSIVGQKNEVHALLVSMGLKDEQRSLQSKKGRQKILDVLESNNDYVLEAQSVKLMFEIIERIEESVKIIEKQLVELTKEDEMVNRLLTIRGCGKITAWTIRAYTEDIARFATAKKYAAFCGLVPWVQDSNETIHHGKITKRGPQELRTCFVQLVLGIRRCKDTSDWRMMQRYEYMKTHKGSGKSIVAAARKMAEIVWAMLSDKKDFDAQKMIGKYKPISLAEEALTAMN

SEQ ID NO: 180940 - protein, 343 aa, unidentified
MELYIGLDVSLASTAICVVSSHGKVIKETTAASELEELERALQSLPGTVVGVGLEAGPLSQWLHRHLTEAGFDTVLMETRQVKGALKAMPIKTDRRDAEGIARLLQMGWFRQVHCKSISAQEMRALLSARKAIQQAIINLELSIRGVLRNFGLKMGRVAKGRFEDRVRELADGNAMLQAAANPILTARRVLRTELAGLEKLSRDHAKSDPVCRQFMSMPGVGAIVALTVKSAIDDPDRFRSSKDVGPWVGLTPRREQSGERDILGAISRAGDVGLRTVLYQAALVMLNLGRPSWLTAWAWNVAKRRGKRRATVALARRIGVILHRMWQDGTEFRFKRIETAAA

SEQ ID NO: 180941 - protein, 414 aa, unidentified
MTEENFAWFAGIDWGSERHQTCLVDADGRIVGEREFPHGGAGLADLCDWLVSTCGAPDSVAVGIEVPHGPVVDTLIDRGFVLHAINPKQLDRLRDRHSVAGAKDDRRDAFVLADGVRTDRRLFRRVHVTDPRLVELRAWSRLAEELTEERIRLGNRVHSELWRYYPQMLKIADGDVTAPWVLDLWNLAPTPAKATRLHAAPVEKLLKRHRIRRIDAESVLRILQEPAIKVGKGVAEAAGVHLRSLFTRLRVVSRELREAEAQLDKLCAAIGETDADSGEGLQRQDVMILRSMPGIGRINLATLLCEGSGPLSRRDYQALRTLCGAAPVTKRSGKSHVVIMRYAAHVRLRKAVYHWARVATQHDPKSRIRYAALRQRGHSHGRALRGVADRLLGLACVLLQRQTPFDPDLAKPAA

SEQ ID NO: 180942 - protein, 353 aa, unidentified
MATYYIGADVHSNSIEMAILNRKKIVKRYTIPATIPAAAQVLGSLGGKKYIAIEEGPMAGWLYRNLHQKVERFVVADPRRNKLISSDGDHDDKIDSAKLAMLLAGDYLREVYHSDNAQRDELKQWVNLYHDRVKDAVRNINKIRARCRMHGVKIPRKVLRQEEHRAEWLKELKKTALAKQLLMLWVGYDATAKQARMAKQQLINLGRKYPVIRLWKQLAGIGTIRAITIFAYLDTPWRFKKKNKLWKYCGIGLQRTASGTDKKGKPKPARLQLPWATNRVLKNAILGAALTAINQKQNTFKTDYERMVQNGIIPSNARHTVARKLLTVMWGMWKRSFQLNRASFSEPAVQCVL

SEQ ID NO: 180943 - protein, 345 aa, unidentified
MTPPTKRPAYQLFVGIDIAATTFTAVWTRDGPPRERARTFGQTPEGFAALQDHLRATGAPSAHTLIVVEATGSYWVALAVCLHQAGYVVSVVNPAQAHNYALSLPRRAKTDVLDAPVLAQFAAERQPAPWTPPEAIYHELRQRLIARDALLSMRQQARNQRHALIQWPVVIESVRVQLEGVIADLDGRLATLEAEIAQVLADGAWAESAALLASITGIGLITTAWLLVGTVNFQACASAASASAYVGLVPLAHESGSSVRGRAQIGHGGHARLRTALYLATLSAARFNPSIKAHYERLRAAGKPAKVARCAAARKLLHLAWAVVTKRQPFDPAYRTRTAQVRLVA

SEQ ID NO: 180944 - protein, 423 aa, unidentified
MKHPKMLFTYVGIDSHKDTHTAVFIDCFFEKLGELTFENLPFKFGAFLSEALKLQAEGTALVFGMEDVTAYGRQLAVFLKENGLLVKHVNALLVARERKNRNTVHKTDSFDAECAARVLLSKFAELPIADPSDKYLMLRTLVMRRDFIVKNNAALKNHLHTLLLAHYPRYDKFFHDLYCKSSLAFFTKYPSPPTLIGVTAAQIADCLKEASSGRVGINKASQILGMVNESGFDGLEFQEVRDMTIRSTIRQIQYNLIELESVDSDLADFLERFECTLTSMNGINVVTAAQMLSCIGDIKRFPTPAKLARYSGIAPVSYSSGKQDAQYANRRGDRELNSLFYCLAVRLVAAVKPTNRAINPFFYEYYHRKLSEGKTKKQALKCVQRRLVNIIWTMLTNNEEYVNPPMFDMQIPEFSDIQKPENA

SEQ ID NO: 180945 - protein, 455 aa, unidentified
MMKLKYSICCGLDVHKNVIVATIVTTNKDGISEYLQKSFSTINSDIQRFHNWLIENNCYHVCMESTGKYWIPIFNYLENDIDVCLTHPKYVKAIKGKKTDKKDSKWIADLYKFDLVRCSFIPPKDFRQLRELSRYRFKLVCMKSSEKNRIQNCMTISNVGIASVLSDPFGKTATEIISYLLEHTADSMDEKAVRKLIKKGAKSKSDEIIEAIKGYTIETDQAKKLELARGHLEYLDDMITQTEVELYVRIKPYYEFVEFVSTMPGMTELSSTIVLAETGVDMDIFDDAKHLCSWCGLSPANNESAGKKKSVRIAKAGDYLKPMMVQCALAAIKSKKQPYFAIKYGRIKKRRGHKKAIIAIARMMYKDPMILIFDEATSSLDSISERYVKKALDSLSKQGKTIIVIAHRLSTVKTADNIVVLDQGKVAESGNHQSLLSKNGIYHRLWKEQFDEIDL

SEQ ID NO: 180946 - protein, 424 aa, unidentified
MKVTYQTCCGVDVHKSFLVATIVKTTGGIEPSYQKKRFSTFNNSILEFKQWLLDNDCRDVCMESTGKYWVPVFNLLEDEINVVIANPKWVKAVKGNKDDTKDSKWIGDLFRLGLVKDSYIPCKIVRILREYTRYRCKLVSCRSSEKNRYQNALTVCNVALDSVVSDIFGKSSTSIIDYLLEQSGTSINHEEIASKLLRSLKSKEDAVIESVEGYQMTDAQKYRMRLVRAHMDYITAEIKDVDKMIENMISSNPDFENAVQFLCTIPGVKCDSAITIISEIGTDMSQFSSSKRLCCWAGLTPGSNESAGKKKSVRITRAGVYLKPALVQCAHAAVKSDQSPYYKKKYESLVKRRGKKRAIIAIARMILTAIYQMLSTGEQWNPSDLYKIDVPEALIEKQKAKAIKQAKKLLQREGLLPPDEPVAS

SEQ ID NO: 180947 - protein, 313 aa, unidentified
MSEPLPQTIGIDISKATLDCHAHPAGIDRQFANSAKGYKSLLAWPRQWEIERIAYEATGTYHRALEQALAHMPCVKLNPERARRFAQATGTLAKTDRIDAALLARMAATLQPPIRPARSAQQALLAELVNARDGLVRDRTALKNREKNLTVALLKRHCKQRLELIARHLEALDAEIAAIIAADADLARRHQILTSIDGVGTLTANQLVATMPELGTLENKEAASLAGLAPVARQSGQWKGKSFIRGGRANVRQALYMPALVAARFNPDLKDKYQQLIAAGKPAKVAITAVMRKLVVTANALLKADRLWVKSLA

SEQ ID NO: 180948 - protein, 333 aa, unidentified
MFFNGQNIYLGIIDQDDHRVHKKRLSNKQDVILAELEPFKDEIVGIVVESTFNWYWLVDCLMDAGYKLHLANPAAIQKYKGLKYSDDQYDSFWLAHLLRLNILPEGYIYPKKDRPVRDLLRKRGHLVRLRTSLINSLQGIISRNCGTKLGANKIKQVKENRVAPFLLGEDDLALSGAVSKDSIDYLGQQIRKIELAVTNRAKLKKSFVGLQTIPGIGKILSLTIMLETGSIERFAKVGNFSSYCRKVPTAWTSNTKKKGKGNTKNGNKHLAWAFSEAAEFCRRYDEVARAFYNRKVSRTNRMVAHTALAHKLARAYYYIMRDNVEFDSRKLFA

SEQ ID NO: 180949 - protein, 345 aa, unidentified
MPIVGGLDIHRKQITFDYLDTVTGEVRRGQIAPADRQHLRAWLARFAGRGDVAFAVEGCAGWRYVAQELAAAGIAAHLGEPADTAAARGRKRHAKTDKTDARHLRTLLAEGRLPECWIPPEHILEYRALLETYHDLRREHTAWVQRIHAVCFHQGAPPLNEDALRTEQGLAKLRAAAAAHLSPAGQLQVATALDMLAAAEARMHVLRKQLRETARHLTGAKVLAERLYGVGPVTGLALTCWLAGEGRFSSSRKAVRFTGLDITVHSSDRKGPPGRLSRQGPPVLRWAVYEAGKTHARSSAPDHGYYAAVKDRKNSKRAALSEARKIVRQACHILAELGDDALTAA

SEQ ID NO: 180950 - protein, 419 aa, unidentified
MIAFPSGARVRLATGHTDMRKGFGSLALMVQEGVIRRRKVTTPIRGQSSTPMGWTPLRRHLVPRSWLSKTATRGEAPVDEVSIIGLDLAKNVFQLHGARGDGSVAFRRTVSRSKLLSFFAAMPRCLVAMEACASAHHWARQIGALGHEVRLIAPIYVKPFVKRNKNDAADAEAIAEAASRPTMRFVAVKTVEKQAAGVAFKTRDLLVRQRTQAINAVRGHMAEYGVVAPNGPVHVARLVGALHDPESGLPAAILGVCRLLLDHIATLSDEIWVLEKELRERARADETARRLMTIPGIGVICATAMEALAPPPESFRKGRDFAAWLGLTPKQNSSGGKTRLGGTSKMGQRDLRRLLVSGAITQVRWALRKGAPEGSWLARMMGKKPRLVVAVALANRTARVAWALMARGGIYQASRPARA

SEQ ID NO: 180951 - protein, 343 aa, unidentified
MKAYVGLDVSQKKTAICVVNEAGEKVYQADVDSSPVAIRAFLVAHGYKDAKIGMETGPLAVWLYHSLKAGELDVDCIHAQHVHAALSMQLNKTDRNDALGIAKLVRSGWYRPTHVKSLGCHHQRLMMTAREKLIQIRVTISNQIRGLLKTFGVILPPGKNSVFKRSILESEPSIEAVKPVVLMLLDTWTHITMQIRQFDKMLAKQAKNDPVCQLLTSIPGVGVLTALSFRTAVDDPSRFKSVSDVGAFLGLTPKKYQSGEVDRNGGISKHGSRQTRSLLYEAASCLLSRYGTETTLAKWANSLRQRMGYKKAVVALARKLSSLMLSMWKSGEFYNDNQGKLAA

SEQ ID NO: 180952 - protein, 467 aa, unidentified
MSVRPDQSPRPRRCPEPLRVTHPHAAGIDIHAAIHWVAVPPDDAPPAPDHAPHLLAHVRSFGTCTADLIALADWLTRCGVTTVAMESTGIYWIPLFELLEARGFEVFLVDPRQSRHAPGRPKTDVRDCQWLQRLHSYGLLTASFRPAEQIVVLRSYLRQRQMLLRYAGQHIQHMQKALEEMNVKLPEVVSNITGVTGLAIIRAILAGQRDPLELAKLRNDKCRRTQAQIARALYGNWRAEHLFALQQALALYEFYHRQLRACDVQLQAHFKTLPDQSRGQARPRRQRRPCPNVNDPAFDVGQALYQMAGVDLTVLEGINASTALVLLSEIGPDVSRFPTVKQFTSWLGLSPQHQESAGKIRRRRVRRGFNRAGRALRLAVQGCCHAKHVLGAFYRRVKARAGAPKAIVATARKLAERVYRLLKYGTAYVCQEIDVYEAKYRERLVKGLTRKAAELGYRLEPVSPVGT

SEQ ID NO: 180953 - protein, 458 aa, unidentified
MRRNKSTDRDRRTMAVVHPNAAAIDVGATMHMAAVNADRTPEPVRSFGTFTTDLHRLVDWLSECGVDTVVMESTSVYWIPIFELLDARGFAVFLVNARDAKHVPGRKTDVSDAQWLQRLHSFGLLRASFRPKGQIAELRAYLRQRERLLEYGASHIQHMQKALTEMNVQLHHVVTDITGATGLRIIRAILGGERNPAVLARMRDSRCHASVETIEKALAGNYRAEHLFALEQALALYDTYQQKASACDTRIEAVLKELSIRRGRQAGPLPSPRWYRSRQQNSLLFDVRAALFALLGKDLTQINGLGPYLVLKLIAECGDDLSAWPSAKHFTSWLCLAPSNKISGGKVLSSRTRPSGSRAAALLRLAAATVGRTDTALGAFYRRLSARIGKAKAVTATARKIAVLFYNAVQHGMEYVDPGASAYETRYRARVIDNLHRRAKAFGFVLQPIDQTPSIAVS

SEQ ID NO: 180954 - protein, 428 aa, unidentified
MRRQVYSSRRLSAKDFGRFVSGVGPGPVTIGVDVSKRELVLMVRRGPGNFLGPLCAANPLQVREVVDLVGLVAARGPVKVAMEPSGTYGDALRQAMSDAKLELHKVGSKRSHDYAEVFDGVPSQHDGKDAAVIAELCAIGKSSPWAYEPPDEKQGRMRLLVEWMDGQDRIRRLWLGRLEAILARHWPEATGVLPLRSATLLRALEHYRGPADLAADPQAVHKLLGWGGKLLRREKAEALVESARTTPGVRQNQADRDRLGRVAGQALAACHELRRSRSQLKQLAEGNPTIAAQAAAVGLATACVLWVRLGDPHDYPAAAAYLKAMGLNLAERSSGQHKGHMHISKRGDPLVRRWLHMAALRLVGAQGPVRDYYRGKRAGHGGSHRYAITAVVRRLAVALYKVAVHDRQFDPARLFAGPKAAQAASGGK

SEQ ID NO: 180955 - protein, 377 aa, unidentified
MATTRTVLRDQLTAKPGDLYMSLELGDKHWHISIGGERRSVSHYIVEAGHTEEVADCIAKAAARLHTARVHSCYEAGRDGWWLHRWLTELGVDNIVVDPASIEVNRRARRAKTDRLDADKLLAMLVRHHSGERVWSVLREPSPSDEDARRAHRELQRLTHERIAHTNRISSLLVLHNLRPRIVIGGRDWPAWWNANREQVPPTLRAELEREAARLKVVKEQVRAIEAARAKELAEGKQPLVAQLVRLRAVGAKGAWVLVKEVFGWRHFANRRELAGSLGLVPTPYASGDSEIEQGISKAGNRRVRALLVELAWSWSRLQPGSALTQWFNRRFARGGKRMRRVGIVALARRLAIALWRYLQTGEIPIGARLKPTGSGI

SEQ ID NO: 180956 - protein, 449 aa, unidentified
MSKINNPANGLPVIHERAAGIDIGSRFHVVAVPTALSAEPVQTFQAFTADIQRMAAWLLSLSIETVVMESTGVYWVPVFEVLESAGIDVIVANARETRSVPGRKSDINDAQWLQRLHACGLLRASFRPGRDIAALRAYLRHRERLLDYAAAHIQHMQKALTFMNLQLHHVVQDITGATGMKIIRAIVKGERNPDVLTEFRDVRCKSSPETIRGALVGNYQPEHVFALTQSLALYDFYQARIDECDQQIEQALEVLKADKPLPEQPIPKIRNRTKQPNAINFDVRKALFQLIGIDLTQIHGIGPFLALRLIAECGTDLSKWRTAKHFTSWLTLSPGCKISGGKVLSAHSRKSKNRLAAHLRLAAVTVGKTNTALGAFYRRLAARIGKAKAVTATARKIAILFYNAMRFGMNYSDPGADHYEQKYRERVIKQLHRRAAEFGFELHEVECVS

SEQ ID NO: 180957 - protein, 402 aa, unidentified
MHYLGIDVSKASHECVILDASGESLGKSFTVQSSKDDFAKLVKKLSDLDIPKFDITAGLEATGNLWENIYIYLKDQGIKVILLNPFQTNKFHQAMMKKAKTDSIDALVIAGLLRSGCASGSYIPDEDIQSLRDLARLRDGYLRDMKTYKRKAYSLLNLVFPELLTLVKDPFNISCTEILSKYQTATDFKTIKTKDLLKVARGHQGNNYDETWADKVIQAAKDSIYSGKASKARGVVLKSLVLNIKNLKEQINSLDNEIQNILKPDDGSSNNKIDNLLTIPGVGPKTVAVFLAEVGDIQRFLSCKDFVGFVGLYPKIEQSGSSLNKARLTTKGSRILKHALYMASVASLIHNPYLKTVYKNKLSQGKSAKQALIVVSRKLACIMYSMLKNGSVYSPERVAIAV

SEQ ID NO: 180958 - protein, 334 aa, unidentified
MDKVTTVGIDLAKRVFALHGVDAAGRVVLRRTVRREQLMEAMAGLTPCVVGMEAGSGAHEWARRFQALGHTPRLMAAKFVSPYRRKGKNDDNDAEAICEAVGRPNMRFVPIKSAEQQALLTLHRVRQGFIAERTALINRIRGLLAEFGVVLAQRSPVVRRHSLAAAENLPVLARRAIEDLCAHLRTLDERIAGYDAQLRAQARTCEPAQRLMKIRGIGPLSALAIVATVGNARDFRSGRQFAAWLGLTPRQHSSGGKARLGHITKRGDAYLRTLLVLGARSVLQTAARHSDALSRWVLSVQGRRGYHRALVAIAAKNARIAWALLSRNQTLRIA

SEQ ID NO: 180959 - protein, 377 aa, unidentified
MKYVGVDLHKQSISACVVVKECERRQVAARKRLACQDESAIAAWFRELGPFEVVVEATSSYEWFVQLVEPLAHRVLLAHPKKLRVIAESKRKSDKLDAQVLAEFLASDEIPLAYRPAPRVREHRTLVRYREYLQRRITSVKNKLRHILARYNADVPHLFTEAGQEHLAAVGLSPCDRLVADALSVELSQHGQRLTKINRELRRFATKAPLPEKEARAVLDSIPNVGPVTADIVLAELGDWRRFRSQADVVSYAGLAPGYRESAGKAKQLGITKEGSRVLRWAMVELAWRMVRTSHKWGRQFTRLEVRMGAKKAIVAIARRLVGVIFALLREGKRYSLALETSPPASCRNQSPRDTCPSDPARLRGQPRQASSLRAGG

SEQ ID NO: 180960 - protein, 392 aa, unidentified
MDSPPPRHHSATVAFEEANGSEGETMKKHSSKHNPLSSTDVELCTTICVDLAKQVFQLAGEDASGRVIYEDRIKSRQAFHDFLLKLPPTVTVLMECGPGAQAWARLLQGKGNAVRILPAQRVADHRSGAKNDRNDALAILRAGRDTSIAAVPIKSTTALAVQALHRIRRGSIKRHTAIGNQIRGLLLEHGVSMPQGDAAISKHVPRAVEDASLPLPDLLRELLDELLTDWQSLAERIAGLSRRLETTAKEDAVAQRLTTIRGVGPIIATAIVAKETEPSRFASGRMYAAFFGIVPDQHSSGNKIRLGRMSKRGDGYIRSLMIQGAHAVLSQLKPDSDQPDDRRLSRWLSRLGRKEAAIRLANRNLRIIWALLKSNKVYQRKPNSNSEAAMSL

SEQ ID NO: 180961 - protein, 339 aa, unidentified
MKVTTFGLDIAKRFFQLHWVDMETGEVHRRQLNRAQMAEFFATCAPGVVAMEACGSAHYWARKLASLGHEVRLVAAQFVRPFVKTNKTDAADARAIWEAAQRPEMKFVAVKSEEQQSVLTLHRLREQLVKFRTMQTNQLRGLLYEFGVCLPPGRAKGMPAAIEALGQLEDTLPAMVIDALRQQMVRIQALNDDIAEIEKKLTLWKRQERLAANLMEIPGVGILSATAAVATMGDAKAFKNGREFAAFLGLVPRQSGTGGKVRMLGISKRGNTYLRTLLVHGARARINFQKQRDPWIERLLARRPFNTVVVALANKMARTIWAMMAHDRAYQKNYATSIA

SEQ ID NO: 180962 - protein, 405 aa, unidentified
MPYILALDVSMGHSYSVLYKDDTCLFEDEIEHTQRGFHALLEEIQHLPERPLIVFEATGIYSRPVEKFFQDHHFSYCLLNPLEAKKQMEESTLRSWKTDKSDAHRLAQTHLKNQRQPKEVQSNFYLEMCDLARFYQEIEKKITRLRMDLHNCLQLTFPELEQFFSNRLTPYALTLIRLFPHPDFVLASTRTKIKNKLINETRKKISANRAEQKADQIIHYAQCAYPAVEKDSIHCQKTIYYAELLQDLLEQKKALATQMIKKAEGSPCFLLYQTFPGIGALTAALLLGELGDITRFKTHKQLNAFVGIDIRRYHSGKYTGQDRINKRGNPKARKIIFFTIRNMIRQQRAAPNHIVDYYYKLKKQPIPKKDKVATVACMNKLLKCMHAMVRAHTEYDYAYAVSVDH

SEQ ID NO: 180963 - protein, 345 aa, unidentified
MKITTIGIDLAKNVFQIHGVDKRGKAVLRKQLRRAQLAEFFANLPACLIGMEACASAHHWGRTLQRLGHTVRLMAPQFVKPYVKSNKNDVADAEAICEAVSRPSMRFVPIKNIEQQAILSVHRVRQGFVKARTAQANQIRGLLGEFGLVIPQGIYNVTRRIPDLLEDASNELPVPFRELINRLAEHLKELDRQVKDLEEQIILWHRNNEHSRKLEKIPGIGPLAASALVASIADARSFNNGRQVSAWLGLVPRQSSSGGKPMLLGMSKRGDAYLRTLLIHGARSAILAAKNKGGNTSGWLSNLLNRRHPNIAAVALANKNARTVWAILAHGGEFESDHEPRRMAA

SEQ ID NO: 180964 - protein, 331 aa, unidentified
MHGDNGYYGIVDQSGKRVLGRRLPNDLGEVLGLLEPYRESLREGVVVESTFNWYWLADGLRDHGYRVRLANPAAMEQYNGLKNSDDKSDAFFLAELSRLKIVPEGYIYPQEDRPGRDLLRRRMLLVQQRTAHILSFQSLAARELGGGPTATQVHGMHPEDVEGFFDDSRLVLMGRTNVEVIRFLTERIHELEGVALKQVALKAENVKLLTAPGIGQVLALTIMLETGDVHRFKKAGNYTSYCRCVKSKRESNGRSKGENNRKNGNRYLCWAYIEAANFMRRYSPEAKAWYQRKLSRSKRVVATKALAAKIAKACYFMMWDQVDFDVKKLFG

SEQ ID NO: 180965 - protein, 352 aa, unidentified
MTVYIGVDLHVRTQTVCWVDTADGEQHEITLDHQRNDVRAFYAQFAAPAVVGVEASGYSLWFHRLLEELGHHLLVGDALAIRQCARRRQKNDRRDARLLLDLLLHQEFPAIHIPAPASREVLALLRYRHRLVRIRTMLRNGLQAVALSHRLRLGPKLFTAGGLQQFAALPLTGAFAVQRQHSLALLASLAEQVLAVEAQLENRAQQDPRVLRLRTHPGVGLLTSLAVVHTLEPVSRFDRARRVAAYCGLDPKERSSGDTQRWGHISKQGNRLLRFLLIEAAHTALRGDDDLCRFFFHLQARKNASIAIVAVARKLVLRLYRMLRDEIDYTQFRRRGRDARRAREDTSQAASG

SEQ ID NO: 180966 - protein, 387 aa, unidentified
MSKQNDLSRCLVALEQDATLIAVVEMGQASWLVAGIVPGLDRYPLKKLGPDRDALLQLLHRWRDEATKAGHAIARVAVAYEAGRDGFWLALWLRSKSIEAHVIHPSSVPVSREHRRAKTDRLDTELLKRAFLGWLRGEPKHCSMAAIPTLEDEDARRPGRERQVLVEERTRIINRLKANLARPGIRGFRPNLARAPSQLEALRTPEGVTIPMNTLAEMRRDLDRLRFVKQQIKEIEKTRVERLAKAPDERRHVAARALTRVVGVGVETADMLVQEVFSREIRDRRALARYAGLTGAPDESGQRRRERGLAKAGNARVRRGMIELAWGHLTHQKGSPLSAWYRMRTADARGGTRKTMIVALARKLLIILWRLATTGEAPEGLQLRPAA

SEQ ID NO: 180967 - protein, 437 aa, unidentified
MRVLYEHVAGIGVHKDMIKVAIRSPGEKPWTRKTEILEFRTFYGVLQEMARLLRRRGVTHVVMEASGVYTDPVYYALCERDFAGVAVVNPAHARALRGHKTDAADCRRLAELFECGLLRGSYIPPAELREVRDLTRYRMKTVQARTSEIQRLGKALESAGIKLGSVASDITGKSATAMIDSLIDGERRGAVLADLAIGRMRTAGKLADLSMALTGRFTEHHALLCRLHRDRIAGLDAAVADLDDQIAGRAGRWQRELDLLKTVPGFGDVVAQTWLAEIGPAPHRHFASHEKLASWVTLCPGNNISARKRKHGRTGDAGTYIKPMLIQAAWNAIRPKGRLQARYSRLVRRFGGEKNPGAKKKAITAIAHTLLKIAYQVLKSEVPYQDLGADFCTRRESPDQQRAYLERRLRKLYPGCAITITISPPEAVLTSTVSNAP

SEQ ID NO: 180968 - protein, 321 aa, unidentified
MNKSTIFIGIDISKDVFDIYDPIQGHCQYANNIKGFRSFLKTLGEDHWCVIEATGCYHQQLALFLYDKLIRVTIMNPLVIKRFIQMKLNQVKTDKSDAKMICHYGQEQEMDLWHPSPEYVEECKQLQTITQLYFKQSTAIKNKLHTLQTRGYKTSKMTRSLKRQLKSLQKEIKLLETEMEQLIKANQQDLYTKLNTIPGIGKKTAILLIVTTNGFKDFQSSKQISSYLGLAPNERSSGSSIRGKTRISKTGNPIVRNHLFLCSFTASIHNPQCKALYERIVAKGKSKKLALIAVCNKLIKQAYGISKSGSPYDKNYVSKLA

SEQ ID NO: 180969 - protein, 397 aa, unidentified
MIAVGIDVSKSKSTVAILNGDGSIRAKPFDVHHVADELQALVDYIKRTSDPPTILMEPTSHYHYPLLKAFTEAELPVCLINPYQMKKYGDTELRKAKTDKRDSLRIAQYALEKSYSLIPYTPQDQKYEDLRFLSRQYSQRISTLTVAKVQLLSLLDETMPGITTILPLKSRDPDNCVLLRFIKRFKSFDVIRKMGKTRFLDSYQVLVKKTKDRFAGSKGLAIYELVLNSVTTRGENPLSAMTQDQCVDLVSTSQKAADEINLQMRIIAETMPEYKVLRSMAGVGDRLGPIILGEIGDIRRFHNGKALNTYAGNDAPPYQSGQFESRNRHISKRGNPALRKACFEVMQALKLTKPQDDPVYLFLLKKEQEGKPYNVAKMAAVNKFLRIYYARAMELYK

SEQ ID NO: 180970 - protein, 355 aa, unidentified
MKGELQERRILGRGKEVFIGVDVHKESWHVTVRVEEEEVFHGSIPSQYHALQRLFDHFKDCKVKVAYEAGPCGFWLYDRLTEDGIETIVVPPSLIPIESGNKVKTDKRDSRKLAKLLEGNMLKRVYVLKEEDRVDRELLRTRRQIVEHRNDVARQIKSKLLFYGIRSPFAPRYGWGRNYLEWLKGLDLPREGLRACFESLIELYEYLSDQLMKMNQRVKELSQSSKYRQRLKLLSSVPGIGTLIGMEILVELQDVERFKRADELASYVGLTPSEFSTGQYVRQGRITRCGNKRVRTCLVESSWILITKDPLMRLKYHRLKSMKGAKRAIIAIARNLIIRIRRILLNNEPYVVGGC

SEQ ID NO: 180971 - protein, 402 aa, unidentified
MNCVGIDVSKGKSMIAVMRPFGEVVVSPFEVRHTANELSELAGLLKSLDGETRVVMESTGNYHAPVAWLLHGAGLYVSVVNAMLVHDYGNNSLRRGKTDKKDAVKLANYGLDHWLTLPRYVPEEDTRLMLKTCYRQYQQYSKVQTMLKNNLISLLDTAFPDANRLFTSPPRTDGSEKWVDFVATFWHCECVCGLSKKAFTAKYQKWCRKHGYNFSQDKALDIYASACGRFGVMPKTNTAKLLVEQAISQLQTTSAALAALKQEMQSLAASLPEYPVVMGMFGVGPTLGPQLIAEIGDVRRFHSKKALVAFAGIDAPPYQSGQIDVRSRSISKRGSASLRRTLFLVMGVLLQCAPMDEPVYQFMNKKRSEGKPYRVYMMASANKFLRIYYASVKAYLESLEHD

SEQ ID NO: 180972 - protein, 342 aa, unidentified
MYYIGLDVHKKTISYCVKDAAGHVHREGKIGSTRRELDAWIPTLPQPRTIAMEATIFSGWIYDHLRPHAVAIKVAHPLMLRAIALAKKKNDKMDASKIADCLRCDFLPECHMASTEIRDRRRILRYRHLIVRQMVQTKNRVSGLLLETGVEHTKSRLHKVGYFRRLMTTNSEIDESIRPLLRLSRENIERCQKTEYALVSSLEHDPLLKERIRRLRTVPGVGPITALNWALEMGDISRFRSIKQAVSYCGLCGDEHSSADKVMRMPLSKQRNKHIQHVLVEAAKLAPRQSAELALIHQKAMEKGNRNRATLAVARKMVAWLLAVDRENREFIPAEQREIRAA

SEQ ID NO: 180973 - protein, 358 aa, unidentified
MKILGCDLHAKQQSIAMVDTETGEFTEKTLSHEGNEVREFYAALEGPVVVGIEATGAMQWFLELLEELGIVCRVGHPAKIRAAETRKQKHDRRDARLMLDLLMRQDGFPEIWMPSSEQRDLRTLLRDRHQWVKMRTRVQNTLQAMALNHALRRGRGLWTATGQKALQALPLAGYTSQRRDALLRLYVQLQQRVQELDGQVEEQVQQRPQALRLLTHPGVGPVTALATEVFLGDPSRFATGKNVASYIGMIPCEHTSGKRQRLGKLTKEGNSLLRYLWTEATIHAVRKDPELKRFYRRKLIQKGMGKARIAAAHKLGIRLWIMLRDQIDYKEFCRRGQQRQCGEAHAGMPNNNSGPASQ

SEQ ID NO: 180974 - protein, 316 aa, unidentified
MTPSGTFVGIDVSKAQFDVAVRPAGAHWTSVHTEAGITLLVARLVSLRPMLVVLEATGGFEISLTGACAAAGLPVVVINPRQVRDFAKATGHLAKTDTLDAQVLAQFAEAVRPTPRPLPDAQTQELAARLTRRRQLVEMLVAEKTRRGQAPGPIQKQIQVHLTWLERRLRDLDAELATAIRSSPLWREKDELLQSIPGVGPVVATTVLASLPELGILSRQQIAALVGVAPLNRDSGTSRGKRTIWGGRAHVRATVYMAAIVASRCNPMIRAFYHRLCAAGKAKKVALTACMRKLLTILNAILRTRRPWQDRWAPEA

SEQ ID NO: 180975 - protein, 358 aa, unidentified
MNKLAKVDNFFNNVDLTVDDQLYVGIDVHKRSYHVALYLNDAPALDFVMPAAKEQLSKKLKNASSAIKQVAYETGPTGYGLARHLRKNDLPVTVAATSRILRSSGDDKTDKLDSRKLAEYAAKGLLRPVSIPSLKQESDRQLYRMRHRQVRNLSRVKTQIKSFLLMHGIDEPVGLSKWSRKGVDQLRTMKLRETLRLSLDELLGDLDYYSSRVKALDKSLTEYLDKGLLARQIAILRTHPGVGVVVSCQFAVELFHFRNFSSTREVFKYLGLSPKIHQSGERSVSRPINKVSNARLRSNLVQAAWQWIRVDIEAKKTYLRLLNNCGGLKQKAIIAMARKLSGHLWTMLVNDQPYNPSK

SEQ ID NO: 180976 - protein, 377 aa, unidentified
MSNCTRYLGLDVHAETITAAIAEGRGRIRNLGKYPNRPEAVRKLLEKLGGGKNLKVCYEAGPTGYALYWQFTQLGVDCEVIAPSLIPRKAGDKVKTDRRDAEKLARSYQSGDLTPVWVPTPEHEALRDLVRQRAAAKHDESRAKHRLITLLLRHASREPNGSRAWTHPWWRWVQALKFEHEARQVTLADCIAEVLHMGERLARLEQAIDRLVESAPPHMRAVIAALQALRGVAKLTAVTIVTEVGTFQRFHRPTQMMGYTGLVPSEHSSGARQAQGGITHTGNAHLRSVLVEAAWHARHRPWLNQRLKKLLPTLPAGVAEIAWKAQERLHRKFGKMIYSRKHAGVVAAAVARELVGFIWAIGTMVEAKHNETMARAA

SEQ ID NO: 180977 - protein, 344 aa, unidentified
MHIASIGIDLGKTTFHLVALGERNKILLRRKFSRSQLLTYTANLPASLIGLEACAGSHFIGTVLREQGHQVRLIPAQFVKPYRKTNKNDFIDAEAIAEAVAKQNMRFVQIKTQEQLDWQAMHRVRDRLVQRRTALINEMRGFLLERGLVFAARPIQLRKNLPSVIEDAEQNLSPRLRWLLDRLWQEWKQTEIDIKTITDELERISNEDARCRRLRQIPGFGPLVSTATVAAIGNGAAFRRGRDFAAWLGVVPRQYSTGGKQKLFGMSKRGNVYLRRMLIHGARAVLFRVKYDSGGFGQWVHRLAQRAPRNKVVVAIANKLARIAWAVLSSGKDYRHQPLQLAAA

SEQ ID NO: 180978 - protein, 436 aa, unidentified
MFVGHRFRTDPDELDTLWARLPKDAERIEVVMEPTRNAWVALAAWFRRHGATVVMVPPEQSADLRDYYNKHTKTDRLDSKVLARLPLLHPEGLHREDSLGPGDELKRAVKIRSGLVHRRTACMARLDALLEILGPAWIAALGSDMTLTALRFLARYANPVQVKRLGKARLAAFFRRCSRQAWADERADAVIEAAATTLRLWGSDGGELDFDALAADIAAEARLALTLTDQINGFDKRIGAPYDKADPAGIVRSVPGAGRVCAPQILGRLGDPTRFANLAAVRSFAGLVPAADSSGQADGHRGPTKAGDSCLREALFIAADHARKVDPTLAVRYQRLMLAGKHHDSAVCTLAAVLLTRIAACLRAGTHYLLRDTDGRVITEAQGRAIVAERYTVPPEVRAARRKVTPHRHPRRNERNERAKTGVATRSKASPVPQPA

SEQ ID NO: 180979 - protein, 424 aa, unidentified
MRFGIAYPHPVARKSTTHGGLLPISSVQEHEHIADGHSERNMTLAYWGFNSCTLILCRKNDINQLNIYMTTQQKQSCLYVGIDVHRDTHTAVGISPWGDKVFELTVGNYNPDFKKLEEKVEEVRGTLSPCIGLEDVRGYGEKLAGYLYDKYPVYHVPSVLVDRLRQNATHPEKSDSLDASGVAKVMMNSIDSLLVYTISQESQKAKQLKEISIDRESLVLERTRLKNQVHTLLYRIYNTEYEQKFKDPFSIKALRFWRNAKPKCDPFLLKTMKRKVRRLLDIHIEVADLEKDMEKLLENNYTIQTASGCGIVLASTIIGEIGDINRFHSPGALSKYAGCSPRERSSGKKVRHVKSRSGNRRLNCAFHRMALSQISRMGNDRAKQYFKRKISEGKSKSQALVCLRRQMVNIIWMMLKHKTIYRNT

SEQ ID NO: 180980 - protein, 318 aa, unidentified
MLIHYIDIAKRNFVIAVSSLSKTKTETNNPKGIAHTIEYLKKHKVALVVTESTGGLEIPAAKAIRRAGIAVIIANPRQTHQFAQSQPLTKTDAKDAKMPAFFAQMTAQKEDSQTMPYQPPTEAEEVLEALVNRRNQSADMRTAEKNRLHQVHETQVGSVKQLIAHFDRLIDESDKQIDDHTRTHFDGKAQVAEQIKGIGSITTATLMAMLPELGRLLHKRIASLVGIAPHPRESGETKFKSRCFGGRSTVRKALYMATVAATRFEPLIRDFHQRPLSEGKPYKVAVTACMRKLLTISNARMRDYFAENDTAENGIRTA

SEQ ID NO: 180981 - protein, 345 aa, unidentified
MIIGCDFHPSWQQIAWLDSETGETGERKLVHASGDATRFYQQLEAPVLIGMEATGNSQWFIELVQDLGHEIWIGDAAQIRASYVRKQKTDKRDAAHILKLVVEGRFPRLWTPDREQRDLRQLVLHRHKLVEIRSRVKNELQHLALNQGMQRKAKLWSQAGQKLLRELPLKPWAACRREDLLGLLTMLNQQIGTLDQAVQQAADQHPQAKLLMTQPGVGPNTALAYVLTMGDVSRFPRGKQVASYLGLIPREESSGGRQKLGAISKQGNRLLRSLLVEAAQIAVRYDPGLRKQYLHRCHQKPKGVAKVAAARKLAVRLYWTLRTGKPYPEIVRIESSPRVALVGAS

SEQ ID NO: 180982 - protein, 428 aa, unidentified
MNRMNERITRITPTTIIVGIDTAKEVHWARITDYRGVDLTKPVKVHNSIDGFESLLAKIENLRIKHGCEQVIVGMEPSGHYWRALGWYLKLHDSRPVLVGVNPYHTKQAKELDDNSQTKSDPKDALVVAHLIREGRYFDTYLPEDEYAELRQLNTERQRIMKQISRANNILIALLDEFFPEYATVWSNVTCPTSLELLKVYAFPSDILSAPRDKLLKDIRMASGGTEGIKLMEKMIKASSHSVGVKEGLRTVRLRMLNLIDELHYFGEKKDAIEAELESAMDTLQLSKVLQSMLGVGPIISAAFLGEVGDISRFTNWKQVRSLAGLNLVENSSGKHKGKTKVSKRGRPYLRYMLYLAGECGCRCNPEMHKFYRYLRDRKNNPLTGHQALVATGLKVMRILFHLAKTGERYDPSKALGAVRIQQIASLA

SEQ ID NO: 180983 - protein, 464 aa, unidentified
MSKAAYVGIDVSKGYADFIVLQQDKDIVEPAFRLYDIADGHLRFGALIERWQQKGYDHIYCGVESTGGYENNWVNYLQQTGKTKSVQVVRLNPKAVKSLGEATLTRTVTDSISAGIIAQYLIDFHHKICYLHPSQSQRVYSEGRKHNSFIRMLKKQRNQLGNQLEKLIYEHLSPLMCYCRNGQPLWLLVLFQKYATADAIKKAGVSRLSKIKGISPDKAASLLAKVAALNGSTSDHIGSIIKRTTAQILHLEKSIKMEKEDIYSRFKNNSEAMLLTSITGVGEQSAVEILLEIEDVNRFETAKKLGAYFGTHPMYKQSGDGTWGNHMSKKGRSEIRAVLYMCSMSAVRHDELFKALYARARAKGKNHFNAMGVVMNKLLRVIYGVLKNKAKYNREVDDKNQQNARAKQKDKEEKQIESKKEKQTKLERFNAPEIKDLPVSKRYAKKKRQSPKLQKEECTGSDAS

SEQ ID NO: 180984 - protein, 357 aa, unidentified
MKIVAGKSKKSVVGKDVYVGIDVHKESWQVTVRTGGEEIFNGRIPGQYQSLKKLFERYQGCRMKVAYEAGPFGFWLSDKLVEDGIEALVVPPSLIPTESGNRVKTDKRDSRKLARLLESNMLKRVYVLTPEEREHRDLLRTRRQIVDHRNDVARQIKSKLLFYGITSPFTTTTRWSLTYIEWLKVLRCDTDYLRESFNLLIDLYEYLTRQIVRINKKVALLCRDKKYRDKIKLLCTAPGIGRLTAIEILVELQDITRFESAEELAAYIGLTPSEYSTGERTRQGRITRCGNKRVRTYLVESTWMLITKDPAIRLKYLKLKSLRGGKRATIAIARKLLIRIRRMLLDNVPYRMTAMAA

SEQ ID NO: 180985 - protein, 339 aa, unidentified
MNATTFGLDLAKRVMQVHWVETETGEICRRQLKRGQLLEFFARRSPAVIAMEACGSAHYWGRKLTALGHQVRLIAAQFVRPFVKTNKTDAADAQAIWEAAQRPGMRWVAVKSEGQQAVLMLHRMREQLVKMRTMQVNQLRGLLYEFGAELPPGRQAGLARIPEALAKLESVLPAMVIDTVRDQLARIGGLDQDIAAIERRLAGWKQDDAASRRLLDIPGVGLLTATAAVATIGEARAFRSGREFAAFVGLVPRQSGTGGRVKLLGISKRGDVYLRTLLIHGARSVITHGKQPDAWLTRLLARRPFNAAVVALANKMARTIWALLAHERTYRKDYAAQAA

SEQ ID NO: 180986 - protein, 337 aa, unidentified
MDHFGIDLHQKHSEICGMDASGKVKLQERVATSEAGLRKVFGKRKRCRVVLENGGQSSWAARLLVEMGHEVVVVNPRRIRLIAESTLKTDRIDAEILARLAREDDHHLRRVYQRSEGAQELRTRLRVRTSLVRVRTALINSVRGTLRAHGYRMSSCVSGRFAARFVELKIEAELRQVLDPLVATISEVSTRIEQLEKELVEESGSDELLIRLQEVPGVGPLVSLAFIGWMDKPERFQRSRDVGACLGLRPQVRGSGERERRGPITREGDGEMRRLLVQAAQASLHCRKDSALKRWALHLATRVGKRKAVVALARKIAVLLHRLWVTGRSYQALPKAA

SEQ ID NO: 180987 - protein, 351 aa, unidentified
MTMLADQVDVVVGVDTHKYTNTAAVVLAATGGVLDEKTAPTSPEGYEALFEMAVTHGAARAWAIEGTNSYGAGLTRFLRERGEWVIELDRPNRTARRGGKKSDPLDAVRSAREALSRPELGQPRAMGDRAALSVLLAARRSAVEARTAAQRQIQALVLAAPEPVRARFRGKTSNQAVTSASRLRILSHQDTETNATIGVLRSLARRVLELEAETNLHERAIVEIVRAWRPELLDECGVGPIVAATVLCAWSHQGRFRSEAAFASLAGVSPIPASSGITVRHRLNRRGDRQLNRALHVVVINRIRHDKETQAYVERRRAEGKSDREIKRCLKRYVARQLFRQLEDERRLDAL

SEQ ID NO: 180988 - protein, 347 aa, unidentified
MRLYTKQHQHYCGIDLHTNKMYLCILNQEGEILLHRNIRTEPAAFLAAIAPYREDLVVCAECMFSWYWLADLCATENIPFILGHALYMRAIHGGKSKNDKIDSQKIAALLRGGLIPMAYVYPQRMRSTRDLMRRRNHLMRKRAELFAHTQNTASQYNLQVPLGRIAKPQNREGLLDRFDDPSVCMSMAANLDMIDAYDRVLAVLEQDIIAHAKEHDPTAYALLMSIPGVGRINALNLLYEIEDISRFPRVQDFASYCRLVTCAKESNGKKSGNGGRKIGNAHLRWAFSLAAQLFLKSNEPGRQFHDKLVRKHGKGKALAILAHKLGRAVYFMLKNRQGFSMQKFLTA

SEQ ID NO: 180989 - protein, 356 aa, unidentified
MHANFRPINDQLCVGIDLHKDTMFVVALDPRTGTLMEQRIACKCREQVAGFFAALPRPHVVAIESVGFYRWLWDLLEPVADELVLADATQCRALAGRRIKTDREDARNVAELLAAGRLPRAWAPPSDLAALRDVTRHRHYLARQHARVLHRVQAIMAQVNRPGPHRLKAAGLQKYVKAQREKLPGHLVDQLEMAVDELVLLERQLDRIDERLKATLLSPRFAAPARRLMSFPGVKWVLAGTILAEVGDFRRFAGPASGGRNGLTRYTGLDPRVFSSADTTRTGKITKCGSRELRWALVQAAWVAVRCDEGYRKLWLRIRKRAGGKRAIIAIARRLLLGMRAAELQETSFRPRKSVA

SEQ ID NO: 180990 - protein, 343 aa, unidentified
MNSRRVTAQCGKNSFHVVGHDKRGAIILRQKWSRGQIETRLANLPPCLIGMDACVGAHHLSRKLEMLGHDARLAKYVRPYSKGQKNDFRDAEAIAEAVQRPTMKFVATKTAEQLDLQALHRVRERLVSQRTGIINQIRAFLLERGVAVRQGLRFLRAELPRILAAPCDALSPRMLRVIEDLAGDWRRLDERIEGLSSEIEALARQDKECERLMTVPGIGPIVSSAMVAAIGTGDAFSKGRDFGAWLGLVPKQISTGDRTILGSISKRGNRYLRTLFVQAAWVALVRIGPKHWDRYGLKSWIEAAKERLHHNVLAIALATKLARIAWSVLACGRAFEASKIQAA

SEQ ID NO: 180991 - protein, 374 aa, unidentified
MQKKVRFLGLDVHAETIAVAIAEPDGEVRSVGVISNRAESVRKLVRKLGPAEQLRACYEAGPTGYVLYWQLTELGVECAVVAPTLVPVKVGDRVKTDRRDAAKLARCHRAGDLTAVWVPDGRTEALRDLVRAREAAKHDQLRARHRLSKFLLRTGQQPAPGVKAWTQAYLAWVRQLRYEHAAQEWTRMDHLHEVEHMGERVKRLEQAIREAVKLAPAAMQQVIGGLQALRGIAELSAVTMVAELGQVSRFANARQLMGYSGAVPSEASSGQRQQRGGITKTGNAHLRRVAIEAAWSYRLKPAVGPALRKRQEGVPEEIKQIAWKAQMRLHNRYARLAASGKDQRKIVTAVGRELLGFIWAIAGKAETAPEAIAA

SEQ ID NO: 180992 - protein, 345 aa, unidentified
MNKISVIGLDLAKNVFQVHGIDHNGEVVVRKQLKRSQIRQFFAKLEPCLIGMEACGGAHYWSRELTRLGHTVRMMAPIFVKPYLKSNKNDRNDAEAICEAVQRPSMRFVQPKTPEQQAVLHLHHGRRLLVRQRIALSNHMRGVLSEYGIVLPQGAKAILQRLPELLEDADNDLPMLARHLLAELKAEHNQLIERIERIEARIKDWHANNNVSQRLASIPGIGVLTASALAATVGEGQDFRNGRQLAAYLGLVPRQLSSGGKERLLGISKRGDSYLRGLLIHGARAVIYHIQRRLKASQPGGNPWVEQLLLRCHPNEVAVALANKMARIAWVLMARNETWCAAQPV

SEQ ID NO: 180993 - protein, 411 aa, unidentified
MSYKIAGIDVHKKVLMVVVIDATTPEEKPERRRFATLPSDLHRLLIWLREQGVEEAVMESTAQYWRSVWLELEPHMRLHLAQAFSNRAPRGRKHDFKDAERLVRRLIANELILSFVPGGEQRSWRNMTRMKLQLTRDRVRLQNQMECLLEEMRIKLSIVVSNLLGASGLRMLRALAKGETDPKQLAQLGDERLQCTEEQLVDALTGRAQPLHREMLALQLERLQLIDTQIAKLNGLIAQAMKPHQEAVMRLAEVPGLGVDSAQQIIAEVGEQASTFPSAAELTSWVGTCPGKDESAEQNHSSRSAKGNKYLRRVLNQAAHAAVKRKGSYFQVVFRRLMPRLGYQSAIWAVAHRLCRVVWKILHEGVRFIEHGIELDPKAKMRHARRLAQALRKLGYQVTITPTNLASGMQM

SEQ ID NO: 180994 - protein, 339 aa, unidentified
MAWTVAIGVDTHKEAHVAVACDRLGRQLDACELPAGAGGYARLLEWAEGLGSPAFAIEGCGSYGAGLARFLQASGAAVFECERPRRRERRRGKSDLIDAALAARRLVAGEGLARPRGGGRREELRLLLLERRGLVQARTAALNQLQAVLVSAPERLRVRLGSLRGTRLARAAQALRAGSDEERVLVGVLRRLARRVQQLEAELAELEAELEAIVSELVPELLAECGVGPVCAAQLVASSGDPARMRSEAAFAALAGTSPVDASSGRQRRHRLNRGGDRQLNRTLHVIALARVRHDRETAAYHERLLGSGKTDREARRCIKRALARHFYHRLSANSALTT

SEQ ID NO: 180995 - protein, 411 aa, unidentified
MEPKLVVAGIDVHKKMLAVVVVDEAHPQQALEQRKFGTNGDELKHLAAWLGSHAVSLVVMESTALYWRPVWLALEGQYALHLAQAQSNAAPRGRKSDYSDALRLARRFLSAELRLSFVPDAEQRTWRCLSRSKHQKRRRRVQIQNQIEALLEESQIKLSSVITDLLGATGYRILKALAQGETDPAKLVELAAGNLKASQEQLAEAVSGVMQGRHRAVLAMQLEELDLLDKHIAELGRQLGRALQGNQEAVLRLCEMPGVREDAAWQMIAELGPEAAVFETAQQMASWIGVCPGQEESAGQSKSNRSAKGNRTMRRVLNQVAWSAVRTKDSFFRELYHRLIPRLGIHKAIWAIAHRIAKVVWKVLHDKVHYIERGPMALDPLAMKRRVTKLARQMRRLGYTIEVKPVAVATT

SEQ ID NO: 180996 - protein, 370 aa, unidentified
MLYVAIDQHAKQITVAIRNDRGEDVLKRQVSTRREKIKEFFDQLALLDTEFMAILESCGFNDWLLEELRNRKCREIVLIHPERPSKKKTDRRDARKLCDLLWLNRERLASGQAVHGLRRIYIATQAEKDDRQITSLCQGLGRRRNRVLNKIQRVLHRHNLMWDYPTKNFQTQAGKKWLKQIVLPEMDRFEVDLLMQEWALIEEQISRVDAKIIERSSRTATGCVLNATQILMTVPGVSHYTGLGLSSRIGSIKRFPRPRSLANYFGLTPSSRNSGQSKDRLGSITKEGSKFARFLLGQLVLHILKNDPKMREWYRRIKLRRGSKIARVAVMRRITTIFWHMLTHQERYTVGGPPPRLRKQQANEAKGTAA

SEQ ID NO: 180997 - protein, 355 aa, unidentified
MTMLAEVIDAVIGIDTHRDSHEVEIADPAGKLIATMRIGNDSGGFAQLLATIAELAPGPRVVACIEGSRSYGIGLARALAASGLLVIECEQPSRKQRRGKGKSDPIDAHLAVLTALRLDTSRLPAPRADGDREALRILLVARLEMTVAATAQASRLRALLLAGDDTDRRAARKALSNAALAALAGRELPAHADREHAVRQAEISRLALALAQARRQLKDNRAQLLAVVDDIAPGLTGRYGVGPVSAAQAIVSFSHPGRCRSEAAFAALGGTSPIPASSGRTIRHRLNRGGDRALNRAIHTIALTRMRSCARTRAYVARRTAEGKTLREIRRCLKRYIAREIYRQLNQSMKPLTSP

SEQ ID NO: 180998 - protein, 425 aa, unidentified
MHKTQYSRQLEKRKRIGDQTLVIGMDIGSEFNAACFMDKEGNVLGRYPTIYNSRKGFDYFYTLVTKTKRKHRLTDVLIGMEPTGHYWRKIAFFAKEKGYEVRFVRTTAVKHQRELDESSSARSDIRDAHTIGNIVREGKYIDTVIEESVFRQLRTLAHARERILRYIVGSTHGLQAHLSDYFPELRHLFWSMKARGLWRLLETYPFPEDVRNAGCAAVTALLAKGRGKKRHVGEQAAQVCKAAAESVGLTAIGKADRARLTMYLEEIKRSDARRQLLEREMEELLKEIPCAQYILSLPGMGKVGCAVFLGELGNPEYFKNPRQIIKYAGYDPKENDSGLRVGRKIISKKGRWLLRKCLFFMVLRLVHRSSFFKAYYEHKKKGFDRPLEKTEALCAVILKLIRVLFALMRDRRMFIEELPRCEQAA

SEQ ID NO: 180999 - protein, 412 aa, unidentified
MRLFAGDDWAEDHHDIEVMDGAGTVLARRRLAEGPAGMAQLHALIGGFVPEEDPDSTEVVIGIETDRGPWVAALVAAGYTVFPVNPLQASRYRERHGVSGAKSDAGDAHMLADMVRTDSHQLRAAAGDSPEAAGIKVVARTHKTLIWDRTRAVQRLRHQLREYFPAALEAFGDLDAADTLELLGMAPDPDRARKLTRAQVSAALKRARRRNIPDRATAILAALRSEQLTQPPALTAAYAATVRSLIAVITALNEQVKALQGQVGEHFGRHPDAEIYLSQPGMGTILGARVLGEFGDDPLRYRDSKARRNYAATSPLTRASGKKKAVIARFVHNDRLVDALNAQAFAALNASPGARAYYDHLRTRGIEHNDALRRVASRLVGILHGCLKTRTLYDEATAWGHRENLPQSSLAA

SEQ ID NO: 181000 - protein, 424 aa, unidentified
MNQLAEIPFTVHVGIDWADAKHDICVQVAGSEDREFDRIVHKPEQIEVWAQALYQRFGGPIAVALELTKGPIVSALQKYDFLVIVPIDPIRLASYRKTFTPSGAKDDPSDAEFALDYMMRHPERLKVLKPQSVPMRKLTYLVEARDRLKGDQSRFVNRLIQALKQYYPQPLDWFSERNTVVFCDFLVQWPTLEKAKRARKKKLEAFFKNHNVRFAHLIAARIDAIKAATPLTHDEAIITAHRLQVEALVEQLRLTIQAMKRFDKEIVATAEQLSDYKLLFTPLPGAGKVLAPRLLAAFGEDRERYTCAEELQRRTGIAPVTQRSGQSQWVHWRWQCSKFLRQTFIDWSAQTINKSAWAGAYYRQQRTKGSSHQAAVRALAFKWIRILYRCWQDRSPYDESKYLEALRRADRPCSNNSPKRLKKT

SEQ ID NO: 181001 - protein, 367 aa, unidentified
MTFVGIDIGAERHVVAVVDESGAILHRPVSFGEEAAGYRRLRELLGNPADYLAAMEATGHYWRNLFAWLTAEGFSIALINPLRTRRFAEEELERTKTDKVDAVGIARFAAQKHPMPTELPQPAIDELRQLVRLRETTVQHLGDRVRNLHQAIDLTFPEFTRHVRGLDSELATSILSRYPTAEKLREVSIRRLAGLCCDGRRRVGSTLAHHLIEAAKISVGSHDSEAYELQVRYACKDIIGLRARERELKVEIERRLSVHEVGKLLTTIEGVGTLTAACIIAETGDPARFRSAAALASYVGVVPRLHQSGKRKHSGKAAVPLGNARLRRALWMPVLVAVRLNPWLRAYYRRLRAAGKRPKVRDDRRHA

SEQ ID NO: 181002 - protein, 309 aa, unidentified
MDAVYVGIDVSKDRLDVHVRPTGESLAVARDGEGLAVLIARLQPLAPQLIAVEATGGFEIVVAAAIGGAGLPLVVVNPAQVRHYAQAVGQRAKTDAIDAEIIARFVEATHPSPRPLPDAATQLLADLVTRRRQIIVMMVAERQRAMRLPENLKKSCERVVRVLERELGELDRQLDTAVRGSPAWREREDLLASVPGIGPITARTLIAELPELGQLDRRKIASLAGLAPFARQSGKWRGKSFISGGRASVRTALFIATLSAARHNPVIRAFRQRLIAAGKPKMVAAIACMRKLLTILNAIARDHKPWQTA

SEQ ID NO: 181003 - protein, 475 aa, unidentified
MNIKGTKKKNQVVTANIFEQQELLKKAEVIKENLTASTWRELETNGKFDKNKKLSFISDDMLILGCDVGSETHYMRAIDTRGRELSKSAYSFNNDYEGFQSAKEWAVKIAAEHDKSQIVLGLEPTGHYWFCLATWMIANGISVVQVNPYAVKQTKEVEDNSQLKDDRKDPKLIANLVKDGNFGMPYLPEKIYAELRRLSMFRDQLNEDRIRTINRMHREMKIYFPEYKEALGKVDGAFSLELLKEAPFPDELTALGEEGIRQIWHAAKLRGRGYSRAREILQYAKASVGIKDGSIASKAAVKWFVQKIMELDVELAVIENQINQKCQEIPHTGNVLEISGIGENTLSGILAEMGDISRFDDVKEIQKLSGLGLVACSSGKHKGETKISHRGRKRLRYWLFQAAKSAVAHAEEFKELHMYYTTRADNPLKKMQSLIVIACKLLRIIYTILNTGTKYAPKKMLMDIRRPENKEAIVA

SEQ ID NO: 181004 - protein, 423 aa, unidentified
MAVYCGIDWAEGHHDIALVDDEGKLIAKRRINENLEGLAELTVMLAAAGDSAETPIPVAIETPRGLLVAVLRATGRAIYPINPLAVARYRERTSVSGKKSDHVDAMALANILRTDAHLHRTLPADSALARSITVLARAYQDAVWRRTKLVQELRARLREYYPGFLAAFASSPRGGLSTTHLASGDARAVLAIAPGPAEGLTVSKARVETALRRGGRQRRLGSLAASIVAGLRVPQLRQDPVVEQAMRTEALALLGVLNAICDAVDQLAAALAEAFAKHPDYEIITSFPGLADISGAIVLAEIGDDRNRFIDDRAVQAFAGSAPVTRASGKSRTVTRRRTKNNRLAAIGYCWAFSAAARRSPTREHYLRRRERGDGHPAALRHLFNRMLGQLHHCLQTGQTYDPAKAFPHATPTHAQPAERVAA

SEQ ID NO: 181005 - protein, 554 aa, unidentified
MTESASIALGVGIDTARYGHHVTFLREDLQPASSPLEVPESREGYERLRKKFDELRTRYPAAHFHIRLDVAGQYAANLEAFLRSLPFAKTITMGEPARNKNYRQAHFPKRKADVTESYCAARFALVERPHGDPEGDPQLVELREVASRLEAQTRHTVRLTSQLHNVLSRVFPELATVATDLSADWVLALLAKYPTAPKIARARLDSLATIRYLTIDKAERIQSLARTSIGTFHGAIAETLVMQLVAALRASKTDENRLARLLVQAYRELPDNRISSIPGIGELTAAILMAKIVRIDRFATLGHLVSYFGVFPEERSSGFDKQGQPKPTASLRMSRQGNDLVRKYLWNCAKSAMLHNPAVRALYRRLVGRGKRGDVALGHCMRKLLHLVYAVWKTGKPFDPQHYPWEAGQEEITAAGRSQEQSSEKKAVTAADSSLERAGATVNWIDFTELRQQVSLEQVLAHLGLLEGLSGSGPQRRGYCPLHSSDKHRHHSFSVNLEKNVFRCFDRECRQQGNTLDLWAALHKLPLREAALHLAETFHCRTRSNREEEPVTSL

SEQ ID NO: 181006 - protein, 350 aa, unidentified
MLIIGCDYHPGFQQIAYVDSETGELQERRLPHPEGAEKFYRDLWEGSVKVRVGMEASGHARWFERLLEELSFELWMGDAAKIRAKRVRKQRTDRLDAQHILKLMLKDDFPKIWVPNWGNRDLRQLLWHRHRMVQTRTRIMNQLQAVAINEGVRYKKRLWRDAGRKQLESLRLAQWASRRRQDLLEVLDRINPTIAELTQAIENEAEKCCEARRLMTHPGVGALTAVAFVLIIGEAHRFDCGKQIAAYLGLVPEEDSSGERRRLGHISKQGNSLLRFLLVEAAQATARSDGRWRNQFFHLAQRRGRKIAKVAMARRLAVRLYWMWRRGWDYEQLQSFGSRAGQPGYPHGVQ

SEQ ID NO: 181007 - protein, 382 aa, unidentified
MQPINTVNPTIYLAIELSASTWLIAARLPGSEKPHLHRIEGGDTAALFALISSLRARVARRLDAAIGVVCCFEAGRDGFWLHRLLTAHGVANYVLEPTSILINRRARRAKTDRLDAIGMLRVLAAYLRGDRQSCSMVRVPTPEDEDAKRIHRERENLVQEKLRIENRIEALLFTQGIRKRPSLRSWERDLAVLRTGDGREMPRHLRAELDRLRRRLVTILELIREVEAERDEVVTTNPEHQTSRKIVALCRIRGLGENFAGVLTREVFYRSFDNRRQIASYVGITPMPYQSGSMDRDRRISRAGNPRARTTMIQLAWLWLRYQPGSELAEWFRKRVGTLAGRTRRIAIVAMARKLLIALWRYVETGVLPAGAEIRPESVVAA

SEQ ID NO: 181008 - protein, 346 aa, unidentified
MLKLKQYVGLDVSLKETSIAVIDENDKLVWRGSVASTPEAIAEALKKHALRAERIGLEAGQLSSWLYHGLRAKGWFVTCIDARHAKAALSLKVNKTDANDALGLAQIMRVGWYREVAVKGHDSQAVRALLVARAQLVSQITTLKNCVRGILKTFGFVVRKGLRSQFPKHVREAIHANPALAAIVEPTLRVLEAARAQLLVYDRAVIQRARSDDTARQLMSAPGIGAIVVLAYMTGVESPARFRRSSSVAAYFGMTPARYQSGEVDRAGRVSKCGDGMVRSLLFEAAKVLLSRSARPSALQSWGQALAKRIGTKKATMAVARKLAVILHRMWATGATFRWPTPAPAA

SEQ ID NO: 181009 - protein, 341 aa, unidentified
MFNLPLYVGLDYHTNTIQVCVMNQQRQILANQSVENSVEAVFRVVAPFGSNVNVAIEACNGAQDFADELAAKNPTWHVELAHPGYVARMKQTPDKSDWTDAKLLADLSRAGYIPRVWLAPKYIRELRDLVRHRHGLVQQRTQVKLRLRALLRQHRITCPYSPWTIKGKAWLLDNANITSPSRMFLIRDHYDTIEFYDKKISVVLAQMQNAVADDPVVKQLLRQPGIGMITAITMRALIGQFDRFRTGKQLAHFCAVCPRNNSTGGKTTTGGLIKAGDELLRQVLVETAHRLIRCDNEWKAMATRLKANGKKACVVVAAVANRWIRRLFYQMTSAESSGNPA

SEQ ID NO: 181010 - protein, 318 aa, unidentified
MGTVMNQSSSVYIGIDVSGSALDVAIHDTTEHFRVDNEPVAIEQLVQRLIALSPTLIVMEATGKLELAVLRALCEAGLPAVAVNPRQVRDFARATGSRAKTDRIDAFAIAHFAAVLKPAVRPLTDVQTGQLQALLLRRAQLIEMLVAEKARLERAHAAARDSLNDHIKWLKQQIKVADNDIDSFLRSSPAWRQKEDLLRSVPGIGPGAAATLIAFMPQLGSLNRREIAALTGVAPFNSDSGRHIGKRRIQGGRAVVRRALYMACVPALRFNPTIRAFYDRLREAGKPFKVAITACIRKLVVTLNAMVRNATPWSSSIN

SEQ ID NO: 181011 - protein, 311 aa, unidentified
MKGSVIGIDVGKYELVAYWNGQYVTLKNDEKELQAWFKKQKIALKAVDLIVYEPTGGYERKLQKSLDFHKLPYRRVHANHVRAYAKATGIAAKTDQIDAKILAEFAVRMELTPKAVVAVEPELKALLTRREQLIEMRLQERNRLDTCDVLLAKWIEKNIKQLSKQLKEIEEKIKDFIDEHPEVAKLLGLYSSIPGIGKVTALQLIVDLPELLEENDKVLAALVGLAPWNRDSGTKIGRRQTRGGRIRVRGLLYMAALVAARFNPEIKAFYSKLKQKGKATKVALIAVAHKLLGILRSIAQRQTPWVPAIEK

SEQ ID NO: 181012 - protein, 352 aa, unidentified
MAKTEFDELRSVGIDIGKDTFHLVGFDQDGQRVLRKQIKRLALITTFEKLPRCVVGMEACLSAHFVSRTLRKMGFEPRIIPAIYVKPFNKGQKNDYNDAEAIAEAALRPNLKAVSEKTQDQLDLQALHRVRSRLVSRRTATINQIRAFLIEQGITVRKGLRALKNSFETILEERKDEISPRMRSILIGLYGDWMWMDDRIDKVSAEIEEISRTEENCRNVMTIPGIGPMISTAMVAAVGEGEAFDRGRDFAAWVGLVPRQYSTGGRTILGRISKRGSRYLRMLFVQAAKVIMMRPHRWPDFSFGRWLIRASERMHRNKTAIALANKLARMAWSILRHKTAFDTPRNEVAVGI

SEQ ID NO: 181013 - protein, 455 aa, unidentified
MEVYDAGVSGATGLLLRARGSVSWQRSLRASAVRRWSPHRWREDVMEVMFDRVAGLDVGKESVTVCVRTPGSRRGRRSETRTFKTMTGSLRVMRDWLVESGVTIAAMESTSAYWKPPFYCLEEVMEVWLLNAAHMKAVPGRKSDVRDAEWIAQLLEHGLLAPSFVPPPEIRRLRMLTRYRVQLMADRAREIVRLELMLEDASIKLSSVASSLKTVSARAILTAMIEGESDPLRLADMAKGRMRRKIPDLAQALTGHFDANHARLARSMLRRLDLVEQAIVELDAVIVEACRPWQHQIELLQTIPGVGPKVAETIVAETGADMTRFPTAAHLAAWAGVAPAMHESAGRQTPAGKRHGNKWLTAMLVEAAGSVGRMHGKNYLAVQHARLTKRRGMGRAQVAVAHSILVAAYWMLKRDEPYHDLGADWHSRRNDEAHTRRLIAQLEHLGHTVIIDPAA

SEQ ID NO: 181014 - protein, 530 aa, unidentified
MTSNVSTNRRQRRKSRSKSNRRRRRSLQKPNGVIGPRVKEVGGERFAIVCVDPAKHRSEWMMADYFGNLLIEQQTLEHRAASFKLAVAQLRDAQQQHNIQDMIVVVERTGNYHLPPKRAFTKAGFETRVVHPFATKQYRMPADPGNKTDGNDLNAQHRAAVAGFGLCEFELESPYRELQLRARHRRNLVEKSSAIACQIREHLHLAMPGYANLFDRLFEHKTALAIACRCDSPTKLIELGQAGLSQHLRENNLRHQVRTLHKVLSWASQAAGDSIQDGPMHHAIWTDLHELYQHFRQRISTLERELAGDLVQTPYVRLLAIPGINVVSSAELAGEMGPITRYANANAITGRSGLYPSRYQSDQTDNDSGPIIRQANRRLRCVLTRIADNLACHCDYYRGQADVDESRGVDKRASRVKIAKRFSRLAFACVAGDEPMKHPAFQEPDSILEKLREFHHKHQTPVDRILADLETAVGQLPYHTRSHEAEIVADVLQQQTNRRRGASAIGELLPAVLARLGITTTTQNENGDRS

SEQ ID NO: 181015 - protein, 412 aa, unidentified
MQVVYARCAGLDVHQKTLSACVLVCEPDGKKRRQVRVFDCFTGDLLLLADWLRGQGVTHVAMEATGVYWRPVWAVLEGQFEQLLVNPQHIKTVPGRKTDTKDCEWIADLLQHGLLKGSFVPPTPIQDLRDLTRYRVELRQSQNRVANRIQKLLEQANLKLSSVASNTLGVSGRQMLEAIVSGQDSPEQLAQLARGKLKSKIPQLVQALEGRVRPHHRFLLAGFLEEWDWFEQRIVRMEEEIDKQIRPFEQAIALWQTMPGVDHVTACSLVAEIGVEMNQFPTAQQLASWAAICPGNHESAGKRKSGKTRDGNKWLRRTLCQAAWAVSRKKNCYLSSQFRRIAARRGPKRALMAVAHSMLVIGYHMLKTGKGYRELGGNYLDQINKDQLQRHFVKRLQKLGFKVTLERSLEAA

SEQ ID NO: 181016 - protein, 412 aa, unidentified
MFCGIDWAEDHHDVALVDADGALVAKRRIDDSADGFAELLAMLADAGDTATDLIPVAIETPRGLLVAGLRQTGRRVYSINPMAVARYRERHSVSRKKSDHVDAMTLANILRTDAHAHRPLPADSELVQAIAVLSRATQDAIWRRSRATQELRAVLREYYPRFLAAFAKGGATNLASAEARVVLALAPTPAAAAKVTKARIAAALRRAGRQRGIDALAAQVLEDLRKPQLRQPRVVEEAFGRQALALLATLNAECASADHLTEATTTAFQQHPHYAIITSFPGLADLSGARVLGEIGDDRARFTDARSLNAYAGSAPVTRASGRSISIPRRTVKNDRLNATGFVWAFASIGRAGAPRDHYHRRRARGDRHAAALRHLFNRFLGQLHHCLETGQTYDPAKAFGPALDPPTGAAT

SEQ ID NO: 181017 - protein, 406 aa, unidentified
MSIYIGIDWSQEKHDVAFMNAAGAIIARLTIPHQPDGFRKLETTRQQLSVTAADCLIGLETAHNLLLDFLWDHSYQHIYVIPPWVVKSSRGRYGHSGARDDTLDAQLLADLLRTDRARLQPWRPDSQLTRQIRARVGFISFLTHSANRTHNRLRAALLRYYPQALELFSGLMVPTTLAFIVTYNTPQALTALSYETFASFAQQQGYWNRQGLFACYARLQHTPLQASPATVAAYQDEARLLAQQLRELILAKRQVQRDLNTLFAQHPDQAIFSSLPGVGAFLAPALLAKLGDDRERFPSAASLQALAGTCPVTVASGKHKRVIFRHACDHEFRQIAQQWARCSLRKSVWAVAYWQQVRPRCASDHDAYRRLANRWLAVLWKLWHSGELYNEAYHLQQRRLRSQPLA

SEQ ID NO: 181018 - protein, 321 aa, unidentified
MSKFIGIDISKQTFDVCFFDGEHQKFDNNLKGFKKLLRKLVADNKIVMEASGPYYVKLASFLHQESMVVFVVNPLKIKRFSQMNFNRAKTDKKDAQVIRDFAIKMDNELKEWKPESKHVVELKQLNTSVELLTKQINQMKLQMQSFEDSGYITGKIEKGYKKILKNLQREKENLEAEMARIAKDEYAQTVASLTSIPGIGIKTATMLIAITGDFQKFDHYKQLIAYVGFSPRIYQSGTSINGKGHICKMGKSQIRKLLYMCSWTAKRYNKACKIMYDRLKKRGKPERVIKIAIANKLLKTCFAIAKSKGKYQENYVPKVCF

SEQ ID NO: 181019 - protein, 403 aa, unidentified
MNSVGIDISKGRSTIAVMRPFGEVVISPFEVRHTGSELSKLAKQLKSLDGETRVVMEATGNYHASVAKLLHNAGLYVSVINAKLVHGYGNNELRRVKTDRKDAVKLANYGLDRWLTLPRYIPEEDTRLLLKNCYRQYRQYSKVQTVLKNNLISLLDTVFPNANRLFSSPIRGDGSEKWVDFVAEFWHCRCVSEKSERAFTGKYLRWCRKHGYNFREAKAHTIYAEASGHIGVMPKSETTKLLVEQAVAQLRATSTALAALKHEMQSLASQLPEYPVVMDLFGVGPTLGPQLIAEIGDVRRFYSKKALVAYAGLDAPPNDSGDVTGRHKSMSKIGASSLRRTLFLVMSVYLQTAPLDEPVYQFMDRKRAEGKLYRVYMMASANKFLRIYYATVKAYLESLEHTA

SEQ ID NO: 181020 - protein, 332 aa, unidentified
MDLAKKVMQIHFVTGDGEITDKQVKRAEFLDFFRNRTKCLIGMEACGASQDWARKLEAMGHEVHLMSPKAVKPFVSGQKNDYNDAIGIYKAMFNGVRRVPVKSTEIRDLQTLRRIRSQVTKDKVKEINHVRGLLAEYGIVLGKSITAFNKGISSALESLKERGDVSPLVAEELRTTVESIKTKIERQKRLDREIEQLARGCKNYENFLKTPGVGPFTAAMLCVLLCDPAIFANGRQFAAYIGLAPRSRGSGGKNFIIGIPSKFNCDSESRAVFVECAQALARYKNKSPWVDGILRRKPKKVAVIAIANKLARQVWAMANKGESFKQMTILTA

SEQ ID NO: 181021 - protein, 371 aa, unidentified
MKKNITFVGLDVHKATIDVALADAGRTGDVRFYGTIDGDLESLHKIIRKLQSKGTELRFVYEAGPCGYDIYRSLTKHGFDCIVTAPSMIPRKSGDRIKNDRRDALNLARLHRSGELTAVYVPTAEDEAMRDLSRGREDAVKALRVSRQVLLAFLLRHGYRYSGKTHWTRAHKNWIADIKMPHRAQQIVLQEYVHAAQEQLERVDRLTRQIQNLLPQWSQAPLVNALQALRGVSLLVAVTTVAELGDLTRFKSAKQLMAYLGLVPSEHSSGGTVRRGGITKTGNGHVRRALTEAAHAYCHPARESRILLARLDGLPPEVRQIAWKAQVRLCGRFRKLLRHGKNKKTVVIATARELSAFMWAVANAVSPVTPE

SEQ ID NO: 181022 - protein, 419 aa, unidentified
MKPQALATWAAFVGLDWADANHDICLQAAGTERREFLVLEHRPEAIHAWGQTLRTRFHGQPVAVCLELNKGPIVSALRAYDFLVLFPVNPFTLAKYREACTPSHAKDDPTDAELQVELLRTHRDKLTPLSPQSPTMRAFAQLVEHRRRLVGDNVRLTNRWTRALKNSFPHVLQWFQEKDTGIFCDVLRHWPTLKAAQLARRTTLERFFRAHHVRSADVITTRIEAIKSAVALTTDAGVITPNTLLVHALVAQLRVPLQAIANFDRAIAQRAQDHPDFPLFAALPGAGAVFAPRLLVAFGEQRERYASAEELQKYAGMAPVTERSGKQAWVHWRLQCPTFLRQTCVEWAAESTRHAFWAQVYSQQQREKGKAHQAAVRALAFKWIRLLYRCWQTRTPYDASVYLQALKRRRAPLLHHLAH

SEQ ID NO: 181023 - protein, 336 aa, unidentified
MIGLDIAKTVFQVHGEDEAGRVVLQRRLSRAALEKFFAALPPARVGMEACGSAHHWARTLRTMGHEVRLVPAAYVKPFVRRNKTDARDAAAICAALRHPDMRTVPVKSVEQSCARGLERARDLLVRQHTQLANAMRGLLAEVGVVAPQGRRGLAQLAALIDAADAAIPSVLLAGAQALLAQWRGTAEAIAALEKRLLERARADATMRRLMDIPGIGALSAHAIVAAIGDGKQFRSARDFAAWAGLTPREHQSANKRRAGGISRQGDGGLRRLLVLGASAVIRQAKSRPERASAWQSGILSRRPVKVAVVAQAAKNARVAWAVLTRGTTYRTGSATA

SEQ ID NO: 181024 - protein, 352 aa, unidentified
MSHKSAPPTVSTIGIDLGKNSFHLVGLDQRGAIVWQLKCSRAQLERRLANIPCCLIGMEACSGAHYIARQLATLGHDVRLLPAQYVRPFLKGHKNDYRDAEAIAEAVQQPTMHFVAIKTPEQMDLLALHRVRSRLVSQRTGVTNQIRGFLMERGITVRQGVVPLGRALPHILSSNTGALSPRIVNLIGELVQDWRRLDERIAAVSADIESLVEQDEACQRVMTVPGVGPIISSAVVAAIGTGDAFSKGRDFGAWLGLVPKQISTGDRTILGSISKRGNRYLRALFVQAAWVVLVKVGPKHWARYGLKSWIEAAKKRLHHNVLAIALANKLARIAWSVLAHGRTFEASKIQAA

SEQ ID NO: 181025 - protein, 387 aa, unidentified
MQVSTVDTPTAGHCGTIFVTIELSQKTWLVTLHSPDRDRISRHKLEGGDHAGLLALLERIRGRAAGKLGSAPKIVSCYEAGYDGFWLHRLLTAAGITNYVFDPSSIAVDQRARRVKTDRIDGETMLRTLMAYLRGEPRVVRIVRVPTPEQEDARRDTRERDRLTKEQTAHTNRIKALLRLHGFAVGQPRRRDWLSWLAAQRDWQGQGVPPRVLSEIENEHARLMLVRKQLAALARTPAAADPAPAVAEMVRRSELLQRLKSLGLVFAAKLTQEVFYKDFRNRRQVASYFGLAPSPWQSGGTDRDQGISKAGNPRARCSAIELSWLWLRHQPDSELSQWFRQRTLNAGRRTRRIAIVALARKLMVALWRYLTTGLVPAGAVLKSAEAS

SEQ ID NO: 181026 - protein, 348 aa, unidentified
MLADQLDYVVGVDPHRDSHALAVVQVVSGAVLFEAAVSASSDGSANALKLVDQHAKGRRAFAVEGTGSFGAGLTRFLTANGERVLEVGRLRRERRSGGKTDALDAIRAARSVLTQNRPATPRASGEREALRALMAAREGAVNAKRAGLCQLRDLLVTTPEPLRSELRPLTRARLLQRLAATRPERRHDPELRGALLALRSVARRVLQLTAEERELAREIETLTRKLAPQLLEQPGVGPLAAAQVVLSWSHRGRISSEAAFARLAGCAPIPASSGQTVRYRLDRSGDRRLNRALHMILVTRRRTHAPTIAYISRRTQEGKTKREATRCLKRYLARNLYRLLEQGAPPAT

SEQ ID NO: 181027 - protein, 414 aa, unidentified
MMEVIHTRCAGIDISKRDAKVCVRVQGSGSRATASAVTTWGAMTRQILALKEHLLAEHVNLVVMEATGDYWRPFYYVFEAELQVILVNAHDAKNVPGRKTDVSDAQWLADLGAHGLVRASFVPPPPIRELRDLSRTRTIITRERTKEIQRLEKLLEDAGIKLSSVASDITGVSGRLMLQALIEGQNDPAALADLAKRRMRSKIPELTEALTGRFGAHHRFMTGLYLKRIDAHSADITQIDERIEEAMEPFRGARELLISIPGFSTYVAEVFIAETGADMSVFATAGHLASWAGIAPGSNESAGRVKSTKTRPGNRYLKGALGIAALSVIRSKNTYFSAKYKRIASRRGPSKALVAIEHSMTIAAWHMLTTGELYRDPGADYFTQRTPTKTKARAISQLESLGYHVTVEPLTEAG

SEQ ID NO: 181028 - protein, 358 aa, unidentified
MVDKVTEAAVVGGVDTHKDLHVAAVVDQNNKVLGTQYFSTTRQGYRQMLAWMTSFGTLKRIGVECTGTYGSGLLRYFQNAGLEVLEVTAPDRMERRKRGKSDTIDAECAAHAAFSGIRTVTPKTRDGMIESLRVLKTCRKTAISARRVALQIIHSNIISAPDELREQLRNMTRMQLIRTLGSWRPDASEYRNVTNVYRISLKSLARRYLELHDEIADLDVMIAAIDDELAPELIKRNAIGYESASQLLITAGDNPQRLRSESGFAALCGVSPVPVSSGKTNRYRLNRGGDRAANSALHIIAIGRLRTDAKTKEYVARRVAEGHTKMEAIRCLKRYISREVYTLLRNQNRRINSIPITA

SEQ ID NO: 181029 - protein, 311 aa, unidentified
MAFLHHPPLHCLGFDIAKDTIAVCDGSTVQVIDNRRAAIRRFLRSCQADFAVCEPTGGHEAVLIEECLHVRLPLHRSDTRKLKAFIRSRGQLGKSDAIDARELAAYGRERWASLPLWQAADRCTERLKGLVRRRDDLVAMRVAEQNRAKAPGAKDLADTFKAVLATIERQIERVEQAIRALMSTGTLSHKTDVMTAMTGIGQITAAALIATMPELGTMSRKQAAALAGLAPHPTESGKKIGYRRMRGGRPEVRTILFMPAMQAAGGRGEFAAFYKRLIAAGKKPILAIAAVMRKMIVTLNARLRDAQSQQS

SEQ ID NO: 181030 - protein, 407 aa, unidentified
MNAVGIDISKGKSTVAVLRPFGEIVVSPFDVSHSPKELSKLVTLLKTLNGDTKVVMEYTGNYYLPIALFLRNNGFFVSVVNPILVKDYSTKSLTVRKVKTDKKDALKIASFALDRWNELSPFSAQSEARLLLKSYNRQYNQYNKLKIILKNNLIALLDQTFPGANTLFSTPTRKSDGHEKWVDFVLKFSHSECISKKSFSFFLKSYLSWCKKFGYKFSKSKAQAVYDFACNCSPSLSFSDSSALLVSNAIIQLNSINETLASLASEMNKIAATLPEYDSVMSMFGVGSVLGSQLIAEIGDVSRFPNKKALVGFAGLDASPFQSGNFNPQSRSISKRGSAALRKTLFQVMSVVLQRAPTNNVIFQFMDKKRSEGKHFYVYMTAAANKFLRIYYARVTEHLNLFTTTTA

SEQ ID NO: 181031 - protein, 404 aa, unidentified
MYNAVGIDVSKGKSTIAVLQPGGTVIRKPFDVSHTSQNLNELADYLGSLEGSTKIVMECTGRYHEPMLKVLYEAGLFVSVVNPHLIKNFGNNSLRKVKSDPADARKIARYTLDNWAELRQYSDMDDTRTQLKTLNSQFSFFMKQKVAAKANLIALLDNTYPGVNKLFDSPTREDGSEKWVDYAYSFWHVDCVRKIGLKTFTERYKAFCKKHHYIFQQDKPEKLFNASKELVAVFPKEKTYKLLIQQSIQQLNLASGHVERLRQEMNALASTLPEYNTVMGIYGVGKTYGPLLIAEIGNVSRFTHREALTAFAGVDPGVDESGQHKSKSNRASKVGSARLRKTLFQIMTTLLQNAPVDDPVYRFLDKKRAQGKPYYVYMTAGANKFLRIYYGKVKECLRNLEQAE

SEQ ID NO: 181032 - protein, 350 aa, unidentified
MTDCSWVGIDLHRSRSQVAVLDDQGTELVSRRIANDPETFLALLAEIDGESKIALEATYGWEWLADLLEDAGYELHLSHPLRTKAIAAARVKNDSVDARMLAHLLRTGLLPEAYIAPRELRELRDLLRHRVALTRMRAALKSRAGAILAKQGIQRPYSDMFGPGGLRFLEALALPESPRRRLDSVLSLIADFTREIDQTTREIDARAKQDPYVEVLCQIRGVGRYIAMLVIAEVGDVGRFGTARQLCSWAGMTPTVRSSDMRTRLGHISHQGSPALRWALVEAAQHAARGGGPLRGTYERIAKRRGGQVAKVAVARKILTLCFYGLRDGEIRCLAPRAGARAVRTLAVAS

SEQ ID NO: 181033 - protein, 418 aa, unidentified
MFKIFRKNCCGLDVHKTWIYACIGITDANGRTEYKQTRFSSFPKGLQELANWLAKYNCTEVCMESSGKYWIPVFNILEQSCFVTLAHPKYTKPQKGNKTDRKDAKWICDLFMCDMIKPSFIPPANIRHLRDLMRYRFKLTNMIVGEKNRTQNCLTVSNLKLDDVFTDVFGKSAMSITKYILDHPGESFDVAPFVDRRCKTPVEVIQDAVDGAICPEQAVKLRACLKHIDQLQAHKTAIEQEILEIVKPFKVALDLLHTIPGLDSNPMTAIAIVSEIGGDMSVFPTAKNLVSWAGCCPRNDQSAGKVKSTRISRAGCYLKPLLVQISNALLRSKKHPEFRERYRRIKVRRGHKKAIIAVCRMLLTAIWNVLSKLEPYTPDGFQQQRPVSKDKVLTKSQALNLLRLRGYVIKDEPNPQAS

SEQ ID NO: 181034 - protein, 288 aa, unidentified
MPIVGGLDIHRKQLTFDYLDTETGEVKRGQVAPADRAHLRAWLARFAGREDVAFALEGCTGWRYVTEELAAAGVAAHVAEPADTAFARGRKRHAKTDKTDSRHLRQLLAEGRLPECWIPPGHILECRALLELYHDLRAEHTAWVQRIHAVFFHQGAPALGDGALRTGKDLAALRAAAAAHLSPVGQLQVAVSLEVLEALEARMHQVRHQMLAAARHLTGAKVLAARLYGVGPVTALAMTCWLAGKDRFSSSRKAVRFAGLDITVWSSDRKGPPGRLPAGTAGAALGGV

SEQ ID NO: 181035 - protein, 356 aa, unidentified
MRKLRVKTKRDSGLYLLFLKLRIMDKLFKQCIGIDISKDKFTACVSKHYISDRQNVSDVEEFENNKTGFNQFVRWSRKNLSKEIPALYLMEATGVYYESLAYHLHKLKEKIIVVLPNKAKYYARSLNIKTKNDIVDAKVLATMGCRQFFKCFWEAPKPIYMQLRTLTRFYSDLQKQKTVFNNHIESLKHSGEQVISVIKAYEKLSKEIEKSIEACLSDIEKLIKSDSELCGKIEKIGTIKGVGFITIVTIIAETKGFKLTTSRKQLASYAGLDVVERQSGIVSGKTKISKKGNSRIRAALYFPAVAASVHNKELREDYLRIVEKNPKYKKIGVTALQRKLLLLIYTLWKNGETFKT

SEQ ID NO: 181036 - protein, 409 aa, unidentified
MQPILKSCCGLDVHKSMIKACIAKGPLDKPPKFEIRTFSTMTSDLIKLKDWLVKNEVEAVAMESTGVYWKPIFNILEDCFDIVLANPQYLKKVPGKKSDVKDCQWIATLLRNGLIPKSFIPPREIRELRDLNRTRRKHIETMASEKNRLQNVLEDANIKLGSVVSKIDGKSSMRMIQSLLEKDDLSREEISEMARGKLKSKVPQLVEALKGRVTEHHRFLLRFHLDNIAFQLEQIQKLDEEIQRRMVPFQKENCLIQTLPGISKTSVAAIIAEIGTDMSQFPDEAHLSSWAGMCPGNNESAGVKKSGKVRKGNGFLKGILTEVAWAASRTKGSAYSAIYNGIAKRRGKKRALIALGHRILCDIYRVLTTGEAYVDEGAEAVFKRNSKAREGAMIRSLERSGYTITKVTA

SEQ ID NO: 181037 - protein, 343 aa, unidentified
MQAITTVGLDIAKSIFQVHGVDAQGNVILRRQLKRRHVLAFFQKLPRCLVGIEACASSHHWSRELQALGHTVRLMPPAYVKPYVKRQKNDVADAEAICEAVGRPTMRFVETKTREQQGCLTLHRTRHLLIRQQTSVINAIRAHLAEFGIVAPVGRRGVDQLLAVVSDASDKRLPEVARTCFGALGAHLQMLKAQLLEFDRMIRAWHRSNEASRRLDAIPGVGPALATALVASVADPRAFRSGRDFSAWIGLVPKQSSSGGKERLGSISKRGDRYLRSLFTAGALAVIRYAKIHGTTHRPWLTALLARRPTKVAAIALANKIARMAWALMARGERYREPVALAA

SEQ ID NO: 181038 - protein, 342 aa, unidentified
MQITTIGLDIAKNVFQVHGIDASEKVVVRKQLRRGQVMKFFEALPPCLIGMEACATAHYWARELTKLGHEVGLMPAKDVKAYVKRNKNDAADAEAICEAVRRPTMRFVRAKSAEQQGRLMQHRTRDLLLRQQTQVINALRGHLAELGIVAAQGREGLKQLLAIIADEADERVPIDARASLIVLAAQLQALQTMIGSIEKRLVVQHRANEASKRLESVPGIGLIGASAIAATVTDPNAFRSGRDFAAWIGLVPRQDSTGGKQKLGPISKQGDRYLRRILVVGAIAVLRYAKQNPEKYPWLTQLLARRPFKVVAVALANKMARMAWALLAKGGTYRAPALAAAA

SEQ ID NO: 181039 - protein, 368 aa, unidentified
MIDNTFVHHEGAAAPAAAGTQISLPPAVIKLGLDIHTKTYVVVAQHDHAALRPPQRFAPAEFVPWVEELLAQGHTVHVVYEACGFGFGLCRALQKAGAHCLVIAPRKLDEQRTGVKTDARDAAALCQRLSRYLDGNTRELAVIRVPSEEEEQQRHLPRQREALVRLRTRLQAQGRGLLVSHSQPAPPHWWRTQTWNRLNKVLPAWLLERLEVFRPILTALDTQIAGLSHELEAAAPPELPRGLGKLTSVALSREVCDWRRFHNRRQVASYTGLCPGEHSSGAKRVQGSVTKHGNPRLRASLVELAWRLVRFQPTYPPVRQRLAVLAKGARATGAQRKKAIVAVARHLAVDLWRLHTGQCSAPQLGLTN

SEQ ID NO: 181040 - protein, 375 aa, unidentified
MQSIVYVGMDVHKEKYTLCCYQIDDEKLRYEQTIESDVKYILRYLERVRILYKEDIKIICGYEAGCLGYTLYHQLTERGVECIILAPTTMAIIEKKYFKTDKRDAGNIAKCLAYHTYSRVHVPTADDEAVKEYIRMRDDQQKFFKATKQQILSLVLRQGYRYTDSSNWTVKHVAWLNSLDLGGVLQETLDEYLITYNNLADKIKRLDQRIVELSKEERYEEDVNKLRCLLGVESHTALATIVETGDFKRFATAQQFASYLGLVPGEHSSGETQIRLGITKAGNSHLRRLLIESANSFTRGTVGHKSKRLIAKQYGNTPAVIAYTDKANERLRRKYYRMTLKNGIKNNIAQTAIARELACFIWGLMTDKIDFKAAI

SEQ ID NO: 181041 - protein, 351 aa, unidentified
MEHHVGIDVSLELSSLCVLDATGKVIREAKVASEPEALVTFLRGLGVTIVRVGLEAGPLSQWLYDGLQAAGYESVLLETRHVKAALSAMAIKTDRRDARGIAQLLRMGWYRPVHRKSVPSQEVRALLAARKQMQIKAMDLEQTLRGLLRGFGLKVGDVSRGKLAERIRELVSGHAMLERIAEPMLTAREALWIEFAKLHREVLAIVKEDQVCRRLMTVPGVGAVVSLTYRAGVDDPTRFAKSKSVGAFFGLTPKRYQSGETDVTGAITRVGDAGVRTALHDAANALLTRATKFSTLKRWAMDVAKRRGMRRAKVALARKLATVLHRLWADGTEFVWGKDPAATPAVNAKEA

SEQ ID NO: 181042 - protein, 430 aa, unidentified
MKSNTQNAKIEAITEKTLVLGIDVGSEMHYARAFDYRGIEYSKKPFKFSNTEAGFVTFKEWILDLKERHEKDKVIPGMEPTGHYWFNLGKFLQDNEMKPVLVNPHHVKKSKELDDNNPTKNDRKDPKVIAGLVREGRYMIPYLPDGVYADLRTASNIRFQLQAELTRIQNRISRWFNIYFPEYKTVYGKPDAKSGMLILKAAPLPEDILTLGIDGVNQIWRDAKLRAVGKARAKTLIEAAEHSVGSKEGAVSARMEIRMLLEDYESRNTRLQEVMVLIEELIRKIPMAEKLLEIKGVGIRTVSGFLAEVGDISRFNNPKELQKLAGLALVENSSGKHKGETTISRRGRKRLRYLLFEVAMSLVSKNQEFRELHNYYITRRLNPLKKMQSLMAIAAKLIRVFYAMLTKGVDYDPKKMVSDIKRPAVYLQAA

SEQ ID NO: 181043 - protein, 479 aa, unidentified
MKRPVRLNGVATAGEERSILLGAASPMLRRTPAVLSTTDCCHPVRVSTQVSFPEMPLPHPLLRIHTAGERRMALEVVHDRCCGLDVHKKMVVACVIVSEGREIRTFGTMTDDLEALAGWLEERGVTHVAMESTGVFWKPIYNVLETFEFELLVVNAQHMKAVPGRKTDVKDAEWIADLLRHGLLRASYVPSREERELRELVRYRKSLIRERAAEVNRVQKVLEGANIKLASVASDVMGKSGRAMVEALCAGATDPKALAALARGRLQDKQSELERALRGVVGAHQRRVLATQLRHIAYLDEEIEGLSSEVAERERPFADALGRLQTIPGVGQRTAEVILAEVGPDMSRFPTAGHLASWAGVCPGQNESAGKRKSGRTRKGCVSLRESLTEAARAAGRTRRTYLAAQYHRIAARRGAKRAAVAVAHTILVIAHHLLRDGTTYQDLGANYFDERDKTGTIKRAIARISRLGYDVTLMPKAA

SEQ ID NO: 181044 - protein, 372 aa, unidentified
MKDFIKYVGLDVHKETIAIAVAEAHGGEVRYVGEIANTPEAVEKLVRQLRKNDARLSFCYEAGPCGYGLQRQLTDLGWECMVVAPSLIPKKAGDRVKTDRRDSLSLARLHRAGELTAVCVPDGPQEALRDLTRAREDLKHLQRQAKQRLLAFLLRHGKRYDGKSNWTQAHFRWLETVKFAQPAQQIVMQEYVDTVIACGKRVTGLDRYIEQTAQACRVWPVIEALMALRGVSLLTATTVVAEIGDLKRFANAPQLMAYLGLVPSEYSSGSSTRRGGITKTGNSHVRRVLVEAAWTYRHTARKTAVVQRRAERTPQVIQDIAWSAQKRLCQRYRALEGKGKLKVQVCTAVARELTGFIWAIGHALPPVDAVAA

SEQ ID NO: 181045 - protein, 336 aa, unidentified
MGEYSEAFVAFDVAKAKHAVAIAAGGRGSEVRFLGDVANTPAAVERLIHKLAGRYNKLHICYEAGPTGYGLYRQIGALGHACLVVAPALIPKRPGERVKTNRRDAVTLARLHRAGELTGVWVPEATHEAVRDLVRAREAASDDRRRKRQQLLSFLLRHGRIYSGGGHWTLAHRRWLAQQSFEHPAQQIVFQEAIDAIADADQRLRRLEQQLALIVPSWSMAPVVEAYQAMRGASFIVAVTFAAEIGDVRRFDNPRQLMSFLGLVPAESSTGETVRRKGLTLAGNRRARRVLVEAAWTYRYPARVGETLRARPKGCPKPCVTSPGRGRSGCAPATAG

SEQ ID NO: 181046 - protein, 412 aa, unidentified
MMVREPGRAIGLDVHREFCEVAICEEGKVRSAGRVDSSPEAVEALAASLGADDRVALEVTGGAWAIVSILERHVARVVVVSPGDTGIAQARAKTDRLDARTLARLLWAGELEGVWAPDELTRLLRRRLARREQLVRARSRAKNEIHAVLMRCLVGKPPFSDLFGVAGRKWLRRLELPVEECETVEACMRHIEFLDTEVAEVERVVARYALSCSDARRLMGVAGVNVICAATFLAAVGDIGRFRTSRQLVGYLGLDPRVRQSGSSPAKSGRISKRGSGSVRWALVEAAASVIRQPGPMRAYYQRLRARRGHQIAVVAVARKLAVLFWCLLSREEQYAHQQPSLTAKKLRLLEIRGGAPTKKGSPTGTWATREKMREAEKALALQAEASYVRMVSDWQAAAPKRAGAGVTPGRA

SEQ ID NO: 181047 - protein, 406 aa, unidentified
MRYYIGVDWADREHAVCVQDESGARVTQRRVAHSAEGFADWGRWVDERRAEGIELWAAIERPDGRVVDFLLDHGVVVFPLNPKALDRARDRFRMSGAKSDPFDAQVAADFLRTDHAHLAPLRPSSEAAQELKAVTRDYARQVRQQTRVLNQLTVTLKEYYPRALEVCPDLKSRWAQEFLAAYPAPAALHGLSERQWTRWARGHRLSAARAAELWPVIAGAQLPVPAHVVRVNARRLAVLLEQLAVTGRAVAAYREAVEVFFARMPAAQWAATLPGGRSGTTVPAVWAELGDAPGRWQTAQHLQGHAGMVPVTARSGKAHIVLFRFACNTHLRAAVQQLAFVSLRHSPWARTYYQQCRARGHAHQHAVRARGAKWLKIIFAMWRRAVPYDEQYHLASIGRHHVGQPA

SEQ ID NO: 181048 - protein, 342 aa, unidentified
MTTFVSFVGVDIASASFMASVGTQPWKVTVKPTKFENDENGFVSFLGWLQEHNLKTESTVVCMEATGVYSEGLAYFLYASGYSVAVEPPLNIQRKFPVNASKTDELDCQYIAEYACRYADKLSLWKPRAEILEQVKLLLTTRQHFSVQLTGHKNALHAIHRKKVSSELAKHSHQNMIEQITKSIKEIDKEIRRLIESDPTFKQTLLLLMTVPGIGLQLAAHLLILMQETLDPRSLAAFIGICPIKHESGSSVYSAPTSRHFGPPKLRKLLYLAACSVRTHKKQFQQYFYRKVADGKHKKLVLNNIQNKILKIACAVVRSQQPYLPNYVAVNPLVFQKTLTAS

SEQ ID NO: 181049 - protein, 317 aa, unidentified
MEVTSIFVGIDVSKARLDVAIRPTGERESVANDKAGIKGLVKRLAKIQPTLIVLEATGGFERQIMHALVSAELPVVVVNPRQVRDFAKATGQLAKTDSIDADVLARFAEAVRPALRPLPDAVTLELRALIARRRQILEMIGAENNRLAMASKPVRKRIDAHIRWLEQELERADKDLDRSIQQSPIWRENEELLRSTPSIGPVTSRTLLAELPELGALDRKQISALVGLAPFNRDSGTLKGRRSIWGGRASVRKSLYMAALVATRHNSVIRDFYKRLTAKGKVFKVALVACMRKLLTILNSMIKHKTSWSKTFSLQTT

SEQ ID NO: 181050 - protein, 347 aa, unidentified
MKFYTNSHKHYCGIDLHTKTMYVCILDSNANILIHKNIITSEKAFLKLIKPYREDIVVGVECTFSWYWIADLCARENIAFILGHALYMKCIHGGKAKNDKIDSEKIARIIYGKNFPLAYVYPPEMRAVRDLMRRRSYLVRIKSEVQAHIKITNYQYNLPTITKNLVHKSNRQGLDEHFDDPTVRLNVETDIAVMDALHDDINRLNNYIIKHARGFKSRLLYKLKTVRGIGDVLALTILYEIQDISRFSSVQQFCSYSRLVKCAKESAGKKMGSSGSKIGNPHLKWAFSEAAILFLRDSDRAKAYVDKLAKKHGKAKALSILAHKLGRAIYFMLKRDDAFDENYFFRT

SEQ ID NO: 181051 - protein, 438 aa, unidentified
MSNKVIFNLDDLFISVGIDVGADFSWMSIALPNQQFVGKPYKILHNSMDSLTTAVSKIKEAEELYSLESRIFLESTGIYHYPLFCYLRDKGFNCSVINPIITKNSTNINIRKVHNDRFDSKKAALVGLKPDLKVSLMPSDLALNCRNLCREYYDLMDNRSAYVNKLLGELRMAFPQYLGIFSKVTINTSLTLLETYTSPSAFLEADKQEIIDVIKSTARFGLTYAENKYHAIIQAANEANEFGYIIDSNIKRIRLYISFIRKYDEEINGILESMHELINANEDTDFVKQIHLIETFKGAGFLSAISLMGEIGDFSAFSKPKQLFAYFGLDPAVKQSGKFEGTKIKMSKRGSAIARRVIHTLALQSISTSRTGEAKNPVLRDYYLEKCKSKPKLVAMGAVSHKVCNIIFAILRDNKPFEIITPQEHVKQYNAAKCDTAA

SEQ ID NO: 181052 - protein, 479 aa, unidentified
MIYSVGIDLHQGQHRARCLDDRAQSCDGFSFQTTPEGLATLEERVFRNGANPTIVLEPAGLPWKMVAVYLRSRHPDCRLVKAKTQKVAALRRYLRGPVKSDRLDALTLAKMPFIDPEKLVEIYLPPAEIHALQRLTRQRKRIESAISGRKIRISAIVDGYLPGVRRTFNDTWASPFRAFLRSQLNPYAVVREGEKALHAYLSKACPRSKWSRAETHLVFLACHSVAGVCELSRPAGTVNEEFFTDLQDEIARELRLMESEEAESESLARRIMELYRKLHPSDNLTSIPGVGEHTAPIFLSAVGDPARFHSQSAFANWEGVVPGARQSSDVEAKGLRMTKAGPSIMRMGLYQAGDIGRRWDPQLAAVYYREMVYHGKNHRQAMGAVMSHLGARVFTVLREDRPYELRDTDGNTISKGDARRLILSKYQVPEEIRRQRRRRNRKANNTVGASSKDREMATYRTNEAAKAPQPVQVKAISRQ

SEQ ID NO: 181053 - protein, 347 aa, unidentified
MKIATVGLDLAKTLFQVHGVDSQGHVVVRKQLRRADVLVFFAKLEPCVVGMEACGSSHYWGRELTKLGHTACLIAPQFVRPYVKSNKTDAADAEAICEAVNRPHMRFVPIKTQAQQTMLSLHRARAGLVKSRTALANQIRGLLSEFGIVLPQGIRLLGQRVIEALSNREHELCEQFRSLIQLLVEHLRELGNKAAELEGRIRAMHRTDEAGQLLETIPGVGPLTASALAASIGNPRAFRDGRELAAWLGLVPRQHSSGGKPRLLGISKRGDTALRTLLIHGARAVIRMAANKPEMTDSWVMKLCRRRHKNIAAVALAAKNARTAWALLIRKEAYQVSHVPARTDVTV

SEQ ID NO: 181054 - protein, 391 aa, unidentified
MSMYFVGIDISKYKHDCCIISAVDQQIVSKFTITNDKDGFEQLLISLNSLSNPEDIKIGFESTAHYALNLELFLENANHSFMEVNPVLIKEYKKSTTLRRTKTDSVDCESIARWLMTVEYKPHSKGFYHAYSLMSLTRLRDRLIRQRSFYLVKITNVLDHTFPEFKPFFNERLSKTAIYLLENYGSAEKMAHMNSASYDKLRCISRGKFSIQQFLHLKELAANTVGVNNSIFDIELNSLLTLYNSLCKEIKNLEAEITRLIEEVHPHYMSIPGIGPISAAVIYAEYGDISNFSNPSQMLAFAGIEPGINDSGTESHGGRMVKHGSSQLRYVLLNACLPLIRFDLTFATYYAKKRAEGKKHRVAITHVAKKLIRVIYALERQDVDFNAQKIR

SEQ ID NO: 181055 - protein, 470 aa, unidentified
MSKVKVKKTKVKDIISMQIVNPYSAGIDVGDKEMVVAVPEGLSEPRVRTFGTMTCNLHEIAAHLKACEIDSVGMESTGIYWKPLFRLLIHEGFEVNLVNAAHVKNVSGRKDDENDAMWIQKLHSCGLLKSSYLPDEEQEALRTLVRHRKTLVQDGSRFVNRMQKSLELMNVKFHTVISDIVGETGRAVVEAIIGGERNAANFLPLISKRIKADSSTIEKSLQGNWLEEHLFTLKQNYEMYKIFWEKIAVCDQQIEKQLQQYEAKCNEGVIEEPKTIKQEPAVAPAGKKGKIVKKHGDKNRPRFDVHGYLERIYHVDVMAIHGINSTSALDIFAEIGTDLSKWKNEKHFVSWLNLCPNNKISGGKLISSKLFHKKPNPASLAFRAAANGVQKSDNWLGDYFRRKKAKGGNKYAIIATANKIAAIFYKMVRYKEEFKPVELEQYQQKYKQVKIAYLERKLMQLKRETEKIAA

SEQ ID NO: 181056 - protein, 384 aa, unidentified
MPRYIGLDLHKMYVHGCEWIPTAPDKDKAKHFRFPNTQEGWTWLLNQVDRTCWVALEVTGSAFEAYDRLSPHVERVLLANARELKRLGSKRHTDRVDALRLAKALALDLVPAVWVPPLSMREVRRLLRYRDQLGRARRRCISQAKRIFLRHGVLLTPHADVQHAAAQRDLSIIPSGDRIILASALRQAAALEAEVLTIEREIAARVHPIPQVRNLLTITNVGMVAAAAMWASLGDPHRFAHPKQVGRYAGLDPSFVQSGEELRRGRISKNGNTLLRTILVEVALGLARHDNGALGRFYHRKKAQIGHKKAVVALARKLLIVAWRMLLTGEEYRAIKPLAVTRKYRTLQRLAQQLSPFPAIAAVVVPQTHITYTRLRHARTTVPA

SEQ ID NO: 181057 - protein, 418 aa, unidentified
MTSIPCTTPQTTWVGIDIAMRHNDVLVDRPGHRRRRFRVANQLEDYQRFANFLDGIPERPVIGFEATGNYHRPLAFFLAEKGFALRLVSSVAAARTREALYNSWDKNDPKDAQVIIHMLKTGVTQLYHDPLVHGINELQELSKTHFQISLHKVRIQHSILTHYLPLYLPEADKYMTHSRAQWFTHLLERYPCHAAVVRFSREEFIEDAWGYVGRKVNKKAFLEDFYATATQTIGLPVSECSEAIRMFRIVLREHQRLCEVRTDIEKEAESFLGDDVDYVRLKTLPGIGPILSLTILAEAGDLRRFAHHRQFLKFCGFDLSSQQSGQFRGNKKLSKRGNRRLRYAFWMAATTAIRLRENSFRDKYTRYVEADPTNADLRRKAYTAVAAKMARVAYGMIKNGTDYRPFHERAVPGGTIPS

SEQ ID NO: 181058 - protein, 448 aa, unidentified
MVRRGKPAGLPIINPRAGAIDIGSRFHVVAVPPDVTDEPVQTFQAFTGDLQRMAQWLKSIDVTTVAMESTGVYWVPVYEVLESAGIEVVVANARDARSVPGRKSDVNDAQWLQRLHACGLLRPSFRPDREIAALRAYLRLRERHLDYAAAHIQHVQKALTFMNLQLHHVVTDVSGVTGMKIVRAIVAGERDAKALAAMRDVRCKATAETIEGALQGNYQPEHVFALKQALELHDFYQRQVEQCDVQIEAALTRLKANKGTPSEPLPAPRHKTKAPNAVAFDVRPSLYQIAGTDLTQIHGIGPYLALRLVSECGTDLSRWPTVKHFTSWLSLSPGCKISGGKVLSSRTRKTANPMAAHLRLAAVTVGRTSTALGAFYRRLAARIGKAKAVTATARKIAVLFYNTMRFGIDCRDPGADYYEAAYRERVIKQLHRRAATFGFRLATIDSVS

SEQ ID NO: 181059 - protein, 341 aa, unidentified
MTIEFFVGIDIASASFVACVGITPCKLMVKPVQFENEEDGFISFLDWLKAHNLKMESTVVCMEATGVYSEGLAYFLHASGYSVAVEPPLNIQHKFPVNASKTDELDCQYIAEYACRYQDKLSFWKPRAEILEQVKVLLTTRQHFSVQLTGHKNALHALSRKKVSSELAQRSHQTMVEQIAKAIKEIDREIRRLIENDPTFKQTLLLLLSVPGIGLQLAAHLLILMQETQDPRVLSSFIGISPIQHESGSSVYSAPTSRHFGPPTLRKLLYLAACSVRTHKKQFQQYFFRKVAEGKHKKLVLNNIQNKLLKIACAVVRSQQPYIPNYVSVNPLVFQKTLTLS

SEQ ID NO: 181060 - protein, 339 aa, unidentified
MKYTPVGVDIAKHVIQIHFINEHTGEVVDKQLRRQDFLTFFGNREPCLIGMEACGGSQHWARELTKLGHKVRLLQARFVKAFVMGNKNDVMDARAIWMAVQQPGKEIAVKTEEQQSVLVLHRTRMQLVKFRTTQINALHGTLLEFGETIHKGRAAMEREFPEALERMKERLPPYLIMVLENQYNRLNELDSLIEDIEKQLTSVARQNETCKRLLDIPGVGPLIATAAVATMGEASAFKSGREFAAYVGLVPKQTGSGGKVRLLGISKRGDTYLRTLFIHGARAVALVAKEPGPWITELKKRRPASVAIVAMANKLARTVWAITAHDRKYDRNHVSIRPY

SEQ ID NO: 181061 - protein, 353 aa, unidentified
MALLSSPTALLKCVVGIDIAKDSFVACVGHATLSQQLHFGKETTLVNSASGFAALLSWVAKQHTGGSPLWFVVEATGVYYEELAYFLADNQQLLSVLLPNKVKHFARSTELKSKTDQLDARLLCRLGLERALPAWQPPTPALRQLRALARERQVLVRQAAQLKIRAHAYQHSYQPDSRTLARLAAQQQLLVSQLKALDQDLADLLKAEPELARKLGQLTSIPGIGLTTAIVVVAETNSFILVENERQLASYAGLDVVQRQSGLSAHATRISRRGNVRLRTALYLPAVSSLRYNPQQIAFYARLRARQPSGKPGVIAVMRKLLVLCYSLWKNDCAYDPHYHPAHLAEKEVAPTT

SEQ ID NO: 181062 - protein, 483 aa, unidentified
MKPKPQEKTKTATGDPTQPHWNQMNRKQQLETMRKIQSEDLSLEMVHPDAAGIDIGNESHYVAVPPKRDSQPVRRFGCTTAELKAMAEWLKQCRIRTVAMQSTGVYWIAVYDILEEAGLQVYLVNARETKNLPGRKSDVQESQWLMKLHTYGLLRNSFRPAQEIRRLRTYWRQRNDLVRSAGRHIQRMQKALTQMNIQLANVLSDVSGMTGQAIIKAILGGQRDPHKLAEFRDPRVKASEEQIARSLEGNWEEDLLFVLKQEQDGYEFCQKQMAECDRRLEQYLREREDRSQGVSLPEEKRKERLKKKKKGNAPQFGLRADLFRMTGTDLTQIDGIDVMTATTILSEAGWDMSKWKTEDHFVSWLRLCPDNRISGDKIIGKGRLPTNNRISIALKMAASTLRLSSTYIGAQFRRLRTKLGAPVAIKAMAAKLARLVYRMLRYGMKYVDQGAEFYEAQHRQRQISHLKWKAAKLGFQIIDAPAA

SEQ ID NO: 181063 - protein, 344 aa, unidentified
MKIVGCDFHPGWQQVAVFDDATAELEDLKLSHGNGEAERFYRALPVPSLIGVEACGNSQWLIDLLQQLGHEVWIGDAAQIRASYVRRQKTDKRDAAHILKLLLEGRFPRLWTPTAEQRDLRQLLIHRHKLVEIRTRVKNGLQHLALNRGVQRKHRLWTAKGRAELEKLPLEGWAGVRREDLLGLLEQLNRQIATLDDAVELAAKENPQARLLMTQPGVGPITALAFVLTIGEVSRFPRGKQVASYLGLIPREHSSGGRQRLGAISKQGNSFVRMLLVEAAQTATRLDEGMKKQYLHRTHHKPKGVAKVAAARKLAVRLYWMLRTNVGYPEIACIESSPRVPLVD

SEQ ID NO: 181064 - protein, 369 aa, unidentified
MKQVTTIGLDLAKAVFQVHGVDGSGVVTLRRAVRRRQVLAFFAKLPPCLVGMEACATAHYWAREITKLGHDVRLIPPAYAKAYVRRNKNDPADAEAICEAVSRPSMRFVAIKTETQQAASGIHKVREMLIKQRTMLINTLRGLMAEFGIVVAEGPHHVGELVAILADPANQRIPSPLHEGLLAIVETLRGLQRRIEIVEKQIVGWGRDNQTCRHLITIPGYGPILSSAMAAFAVDPATFASGRHFSASLGLVPRQDGTGGKVKLGPISKRGNGYLRRLLVNGAMSVLCSKRAKEDPWLVKLLETKERKVAACALANKMARIGWAVMIRQEDFRSRRHDQSCPDPGQLGAVLTTVKTAARAPAAVAFGQS

SEQ ID NO: 181065 - protein, 414 aa, unidentified
MELVYDRCCALDVHKRQVTACVHVPDRKGKRTELRAEFQTMTPDLLAMRDWLKGLGVSCIAMEATGVYWKPVYYLLEDDFELLLVNAQHVKNVPGRKTDVGDAQWLCQLLEHGLLRASFVPPKPQRELRDLTRYRKSLVWERAREANRLQKLLEDANIKLGDVASDVLGASGKAMFKALCEGQSDPEALAELARGKLRPKLPLLRRALQGRFSSHHALLLSHLLSHIEHLDEMIGSLSSEIEERLLPLERKHELLCTIPGVAERTAQVILAELGPDMGRFPSHRHAASWAAICPGNDQSAGKRNTGKTRKGDRWLRTALVEAATSAAGRTKDTYLRAQYLRVKRRHGHKKAIVAVAHSILVAAYYILSEQKPYEDLGGDYFIRREDPERVTRRLVRQLERLGQRVTLEPAPVER

SEQ ID NO: 181066 - protein, 425 aa, unidentified
MNKQSQQTNTPQNLSDAVVVGIDWADREHVVCVIDQNDRSKIETLKQSPEAIDAWVAELSRRFPGKTIAIVLEQSKGALIHALMKYEQLVLYPINPKQLSRYRDAVHPSGSKNDPEDAKLLAQFLKRHAEQLRPWKADTEATRTLARYTEIRRKIVEERQRLALQLGSLLKQYFPLAKELFPRNLPLMTALIKRWGSLEKLKRVHPKTLRTFLKENGMANQDRQTEVIEAVRAAVPLTRDKAIIEPNAVYARMLAGQIQDLSNTIGQLEEELAAAVAVHPDDKIFRALPGAGDALVPRLIAAFGSDRDRYDSAEEIQCYSGIAPVTRQSGKTRHVSRRYACPKFLKQTFHEFADHARKWSPWSAAFYRQKREAGCKHQAAVRALAFKWIRIMFRLWKDHTIYDEAQYIEQLKKRNSPLVKFIQNV

SEQ ID NO: 181067 - protein, 322 aa, unidentified
MSKTINNERFVGIDVAQDTLDVYIDPSDAVRAWQHLPYDARNVGALAKELQALGPTLVVLEATGGLETNLACELVAHGLPVAVVNPRQVRDFARASGELSKTDRIDAGVLCAFARAIRPAARGVPDEATRELAELLRRRRQLVDMRVQETQRSLQAHSKAAQKSVKSHIAWLDKRIAEIDADLRGRLRESNAWRAKDDLLRSIPGVGQVSSFTMMARCPEIGQLNRRQIAKLVGTAPLACDSGKHRGKRRIWGGRADVRKVLYMGTVSAMQHNSTIKEFAQRLKAAGKPAKVVIVACMRKLLTIMNTIIKTNTPWNPTLKSA

SEQ ID NO: 181068 - protein, 339 aa, unidentified
MMGKIVKQVAGIDVAQKELVVTLGHLLDDFSIELFAYKVFKNSDSGFKSLAEWTNKLTDNEVDVLYVMEATGVYHQKFAYFLTDNNYKLSIVLPNKISNYMRTLELKTVTDKSCSQAIAQFGLERKLDKWSKPKVTYKELQQLTRERDQIVQERSIIKNQIHAEITEAEPNQRSLERMQARIRFLNSQEKEIKEDIDCIVKENQDIRQIIDRITTIPGVGELTAVIVLAETNGFELIRNKSQLSSYAGLDVKEKQSGTSVKGKPRISKKGNRALRKSMHLPALTAVKWDDNFKETYARLVSKHGIKMKALVAIQRKILQLIYILFKNETIYDKDYTIKK

SEQ ID NO: 181069 - protein, 403 aa, unidentified
MNNVAGIDVSKGKSMVSVLRPFGEVVAKPFSVGHTGSELKELAGYLKSLDGETRVVMEHTGRYYEPVARFLHEEGVFVSAVNPKLIKDYGNNTLRKVKTDKADARKIARYGLDNWAELRQHTPMDTIRMQLKTLNRQQSLYAKTKTMMKNNLIALLDQTYPGVNALFDSPVREDGSQKWVDFATAFWHMDCVRNMSLTAFAERYRKWCKRHGYNFSQSKAVEVHTGAQDLIAMLPKDALTKTMVRQAIDALNAVSASLERLKAEMQALAAQLPEYPVVMAMHGVGDSLGPQLMAELGDVARFTHRNAITAFAGVDPGADQSGTHEAKSTRVSKSGPPELRRALFLVMDCLLKTQPQDDPVYRFMDKKRAEGKPYLVYMTAGANKFLRIYYGRVKEYLESLEEN

SEQ ID NO: 181070 - protein, 413 aa, unidentified
MDVVHPRCVGIDCSKKDAKVCVRIQGQGRRRGSSTVTTWGATTSQILALREYLVAQKVTCVVIESTSDYWKPFYYLLDDELNVMLVNASRVRNVPGRKTDVSDAAWLADLGAHGLVSASFVPPPSIRALRDLTRTRTHITRERSREIQRLEKLLEDAGIKLSSVATDITGVSGRAMLEALISGQRDPAVIADLAQRRMRSKIPALTEALTGRFSEHHSFMARLFLDRIDSHSADIARLDQRIEEAIAPFVAARELLASIPGFSRIVAEVFIAETGADMAVFLTAGHLASWAGLSPGSNESAGRVKSTKTRPGNRYLKGALGIAALSAARSKNTYFSAKYRRIASRRGPMRATVAVEHAMVIAAWNMLTNGDFYRDPGADYYTAHHPARSKARALNQLEALGYRVTLQPLTQSA

SEQ ID NO: 181071 - protein, 408 aa, unidentified
MELTPIYKRVIALDVHQAKITACAIVEHDDGRQEMTKLDFGAFKRDRRALAQWALQIRPEVVVMESTGVYWKSPFAALEAVGIIAWVVNARHVKAVPGRKTDMADAQWLATLARAGLLRASFIPRVEFRQLRLVARQRQKLVGVLSAEKNRLHKVLVDAGIRLGVLVSDVHGQSARAMIKALIKGEPIHEILDLKGRLGASREELFEALSTEQFSATHAFVATEIMQHIEYVEQRIAHMDEYLLGGLKAWQPQLNLLQTVPGVDKIGAAMLLVEISADMSAFGSAERLASWVGICPGNNESAGKRKTGRIRKGNAWVRRLLCEFAQAAARTRSALRAKFDSLAIRKGRKKSVIALAHKMLRTIYAMLSAGTHYEDKTVDYEAMSVARNAPRWIKMLKKHGFIGQAAAA

SEQ ID NO: 181072 - protein, 311 aa, unidentified
MNEKTLFVGIDVAKDRLDVAVNLSGETKTFTHNHQGLSSLTAYIRSLAPALIVLEATGGYHKTVLSTLAAEGLPAVAVNPRQIRDFAKATGTLAKTDRIDALVIARFAEAVRPEVRPLKDEEAERLQALITRRRQLIEMLTAEKNRLAMAAQWTRKDIRAHIQMLERQLKRIDDQLKDLIDQSPLWRQKDNILQSVPGVGPVLARTLLAELPELGTLNRRKIAALVGLAPFNRDSGRFRGRRMIWGGRAHIRTVLYMSTVAAARFNPVIRAFYQRLKEAGKRVKVAITACMRKILIILNTMIKNNTSWKYA

SEQ ID NO: 181073 - protein, 380 aa, unidentified
MKKLNIGIDAHALTNVIGLAFDDMEDPVLYGKVSADLNCTVDAIRRILKKYDLKKEDVKICYEAGPTGFVLARRLIKLGFDCIVVAPSLIAKKPGEKKKTDRRDARKLANYLRANDLTAVHIPDVDDEVIRDVCRGRTDASQELSRTKKQLKSFLLRNGYKYKGKANWSNAHMRYLRELVMAHPSQKLVLEEYIQRIDALEEQIKRIEDQMATLLETWQRKPLVAALMGFRGFKLVAAMVTVSEIGYFSRFKHPKQLMAYLGLIPSEASSGETRRMGSITKCGNGHARWMLVECAGHYKLPPKISKALSVRQEGLNRDVLALSWRTQNRLSKRWFKLMIKNKNVNKIRTAVARELVSFIWELALLIEGQQTPCASNAVEA

SEQ ID NO: 181074 - protein, 375 aa, unidentified
MKEKVRFLGLDVHAETIAVAIAEPDGEVRSLGTIANREESIRKLIKKLGAAEHLRACYEAGPTGYVLYWQLTQLGVECAVVAPTLVPTKAGDRVKTDRRDALKLARSHRSGDLTAVWVPDGDSEALRDLVRTREAAKQDQLRARHRLSKFLLRTGQRPAVGMKAWTELYMAWVRQVRFERPAQQATLQDYLHEVDHMVARVKRLEQAIAEAVKLSSPQVQEVVRGLQALRGIAEISAVTIVAELGQISRFDTAPQLMGYSGAVPSEDSSGKRKRQGSITKTGNAHLRRIAVEAAWSYRHRPAIGPKLRKRQEGVPEPIKEIAWKAQIRLHKRYMKLTAAGKDRRKIMTAVGRELLGFIWAIGVKLETPVKQQIAA

SEQ ID NO: 181075 - protein, 390 aa, unidentified
MAKKRISDDSAGFTVLTEMLAAAGDSFDDAIPIAIETPRGLLVAALRATGRPVFAINPLAVARYRERHSVAGAKSDHADAMTLANILRVDSHLHRRMPADSELVQAIAVLARAQQDAVWRRSKASNELRSMLREYYPAFLDTFAGKSATNLAKPEARAVLAIAPTPAHAAKLIKTRVAAALRRAGRKRGIDGLAVNILEHLQAPQLRQPELVEKAMDRQALALLAMLDAACTGADELAQTAAEEFRKHPDYAVITSFPGLADLTGARVLAEIGDDRDRFADDRALKAYAGSAPITRASGKVTSITHRRIKNDRLAAVGWVWATYAYINPGPAQDHYRRRRDHGDRHAAALRHLFNKMLGQLHHCLQTRQTFDPIKAFGQPRTAPREPAAA

SEQ ID NO: 181076 - protein, 360 aa, unidentified
MKITTVGIDLAKDVFRVHGCDARGKVVVSKSLTRHDLRMFMAKLRPYLVGMEACHTAHYWAHELQQFGHQVKLMAPRFIRPYVKNNKNDTRDAEAICEAVTRPTMRFVPIKSRAQLDVQAVHRVRQQVVKERMTLANQLRAFLAEHGIVMRKGFSAVKCVVPDVIENADNGLSGLMRELLRDLYERFRLTEERLHRYDELIEKVVEQDERCQRLAQLPGVGPLTATAVVASVGNAREFRSGRELAAFFGLVPRHYASGGRTIMLPIAKRCDHYLRTLMVQGARASMRYLDRRRDPRGIWANRLRLKRGSYITAVAIANKNARVMWALLTRGESYRETPAQRAPSTLRVTVGRRREVPRRA

SEQ ID NO: 181077 - protein, 411 aa, unidentified
MRNRDQHIYVGVDLHKESHVAVIINCWHEKLGEIKFFNMPSAFDHFVEQVNQFALEGRTPVFGLEDIGGYGRALAFHLLEHNQNVKAVNPALAADKRKSNSNPKKNDVWDALCVAKVLIDEFANLPTAYLQDEHLLVKHCVNRRDSLAFELTKTKKQLHNELSYHYPSYKKFFTDIIGKTALAFWRKYPSPSCLEGVSIEGFAEFLRKYSNNGLSTRKAEEIFAFVKHAGVGARSGQEIKDTLIQSYVRQVLFLQIEIKRMESILEPLVTQGGYQLATMPGISLVTAADFIAQIGDIRRFKNANKLAKYAGIAPYENSSGSRIDVKKSKTGDRHLHGIFYDLAVRQIAVTRGKKEPRNPVLFAYYQNKIQTGKTKKQAIVCIMRKLVNIIFGMMKHKTPYIMQNLNEFKAE

SEQ ID NO: 181078 - protein, 410 aa, unidentified
MIKVGIRSPGDKPWTRRSEVLQYRTFYGVLQQMAADLRQRGVTHVVMEASGACTEPVYYALAERDFDEVAVINPAHAKALRGHKTDARDCLRVAELFECGLLRGSYIPVAGLKEVRDLTRYRMKTVQARTSEIQRLGKALESAGIKLGSVASELTGKSATAMIEALTDGERRGRVLAGLAIGRMRTAGKLAGLSQALTGRFTGHHALLCRLHLDRIAIFDTAVAGLEDKIALRAARWQREQDLLRTVPGFGDAVACAWLAEIGPAPHAYFASHEKLASWVTLCPGNHISAGKRKHGRTGDAGTYIKPMLVQAAWAAIRVRGRLQARYSRLVRRFGGEKNPAAKKKAITAIAHTLLKIAYQVLRSGKPYEDPGADFCTRRESPQQRQAYLMRQLQKLNPGCTITITPAEAA

SEQ ID NO: 181079 - protein, 412 aa, unidentified
MQDILTCAMGLDIHRDVIVACLAKGELGTDPEIEIRSFSTLTPEMRKLRDWVLEAECHYVAMESTGIYWQPIYEMLEPCFDGQISILVVNARHMKNVPGRKTDMRDAQWIATLLRAGLLKGSFIPDKTFRELRHLTRYRKSIVRDITAQKNRIDKFLQSSGFRFTAFLSDAFGASGRNIIRHLMEYGNISREALDRCLKTQTRKRIDEILIALNGSLSEHQRGFLRMIFGHLEALEQHRHTVEDAITKEITKHEEALSLLCSIPGIDVTAAAAIIAEIGTDMSAFPDSQHICSWAGLSPGNNESAGKRKSAHINKGNPYLKSMLCEVGWVISGKRSLYLSGWYWRIKQRKGAKRATIALARKLLALIYTMLKTGSPYNEDCFEIRRKQSERKRASRMVNELQKLGYFVVAPS

SEQ ID NO: 181080 - protein, 368 aa, unidentified
MVVQLTVLDGQTNWHLTNERRPFMNNGKVTHSDGKGKSLSNKSFDHFLALDWSMKVMAVAHMTKRSKEPQMFERRSDLKELKTYLASLKGRKILALEETTTAQWLYLELVDHVDRIIICDPYRNRLLSDGPKTDKIDASKLCQLLRAGLLKEVFHSANDLYELRRLVSAYEDLIKAGVRAQNQKSCLEQAHGDTGKHAAFILEHLDNSIELYRSSKQHYERKFSEFAKRNRFARNLTAVTGVGDISAVKIVAVVVDAHRFPRAGKYLCYCGLVEHEKLSGGRTYGRRRPRFNHTLKAVYKLAAMSAISSKNNPIRAYYDSLLAKGVAEHNARNAVARYIARVTYGMLKTGKRYQPYQHRDQAAAQQAA

SEQ ID NO: 181081 - protein, 315 aa, unidentified
MERASAAPVFVGIDVAKDRLDVHLRPSGEVLAVGRDGTGLTVLVERLAELAPALVVLEATGGFEVTVAAALGAAQLPLAVVNPRQIRDFARATGRLAKTDRLDAEAIARFAEAIRPEPRPLPDAAARALGELVARRRQLVEMIGSESQRRRQLRDPRLIRRLDAHLAWLQKELSEIETDLDDAVRTSPAWRATEDLLASVPGIGKTSARTLIAELPELGSLDRRKIASLVGVAPVNRDSGAFRGRRMILGGRASVRKALYMPTLTAIRRNPAIRALYARLVARGKPAKVAITAAMRKLLTILNAILKSQTPWQPA

SEQ ID NO: 181082 - protein, 426 aa, unidentified
MAYRIAGIDVHKKMLAVVVADVEVEGEYEFAGQRFGSHPEELRRLSAWLSQQGVEEVVMASTAQYWQPVWGALERSWKPVCHRREGAGGMSGGLPLAQAQSNRGRKGGKKDFPDAERLVKRLVAQELILSFVPEAEQRLWRAVTRRKYQLTRNRVQLPNRLESLLEEAHSKLSSLVSDLLGVSAPALAEGETNPLALAALADQRLRASEAQLTDALGACTELHPVYRRLLPMALPELPFLEQPRDQREQEIAALLRQHEDAVQRLAEVPGLGVDSAQQIIAEVGATAATFASAQTLASWVGACPGDEESAEVSKSHRSPKGSRHMRRLLNQAANAAVRTKGSIFQIVYRRLVPRLGHHHTIGAIAHRLGRLIWLILHRGVRYEERGPAVSQRSLRQRTRKMIRELQKLGYRVERLSVVANAPAPAQ

SEQ ID NO: 181083 - protein, 338 aa, unidentified
MEVYAGLDLHSTNTYVAVIDKDNKVLYKQRHGNDLPTILSVLDPFKKDIQGVVVESTYNWYWLADALMDAGYRVHLANVSAIKQYEGLKQIDDKRSSLWLANLLRLNILPTGYIYPREQRAVRDLLRKRSQLVRQRSTQILSIGNLVARNLGTHAGGNEIKRWQREHVDAMPLLDEQKQALMANLAVMRCLDSQIDALERSILAKAKLREDYQALKTVSGIGEVLALTIALETGEVGRFDSPGHFASYARTVDSRRESNGKKKGEGNAKCGNKHLAWAFIEAAHFAVRYDAAIKCWYQKKCANGLAVVAIKAVAHKLARACWHVMKDGKPFEVSRAFG

SEQ ID NO: 181084 - protein, 367 aa, unidentified
MKKVSTVSTKQSRNISQQKLTIGLDLGDRNSWYCVLDEAGRIQLEQGVRTRAKVLQEVFGAMPRSRIALEIGTHSPWISRLLSELGHEVIVANARKVRLIGESRKKDDRLDAQTLARLARIDPELLYPVKHRSVQAQADLMTIRARAGLVRARTALVNTARGLAKSYGERLRGCNVRNMNPEKAESLSPELQAALEPLLNAIESLSERIVEYNDRIEALAQTSYPQVELLKQIKGVGTLIALTFLLTLEDPHRFRKSRDVGGYLGLQPGRRKSGESEPQLHISKEGDPYLRTLLVQGAQHILGPFGIDCDLRRWGLKLAERGGRNGKKRAIVATARKLAVLLHHLWVSGELYEPLHNSSQVTVAAAA

SEQ ID NO: 181085 - protein, 343 aa, unidentified
MQVVRIGLDLAKYVFEVHGVDNRGKVIVRKRLRRDAVARFFANLPACLVGMEASNGAHYWARVLTELGHQVRLISPQFVTPYVKSNKNDRNDAEAICEAVGRPSMRFVPQKSTDQLAVQAVHRIRRRLVADRVRLVNQIRGLLSEHGIVIARDIAQLRRGLAVIVGNINDGLSEMVRALMRELQAELAELDARIAVYDRRIKEIFRASEQCQRLGKIEGIGPVTATALIAAVGDRSCFKNGRQFAAWLGLVPKQRSSGRRARLFGISKRGDRYLRTLMIHGARAALSRASGKQDPRNLWLGKVRQRRHPNVAAVALANKNARIVWAMLTGDTAYEPALSVKAA

SEQ ID NO: 181086 - protein, 355 aa, unidentified
MNQEKYIGMDVHQATISVAVMDAQGKLIMECLLETKAATIVEFVRGLHGTLSLTFEEGTSAAWLHDLLKPHVSRLLVCDPRKNALLKDGNKNDRIDARKLAELLRGNQLHPVCHGEHGVRTLKELGRSYLTITQDVTRVMNRIKALYRSWAIPCAGATVYSPRHRAEWLAKIAEPGVRVRAERLYQQLDLLQPVRLEARRDLLAESHKHSAVKLLRQIPSIGPIRSALLVALLQTPHRFRTKRQLWAYSGFAVQTHDSGEYRSVRGKLQRNRERMTVRGLNDNHNRDLKNLFKSAAISASTRPGPLRDFYVARVEKGMRPTMARLTLARKMAAISLAVWKKGVRFDPQQLQRQAA

SEQ ID NO: 181087 - protein, 366 aa, unidentified
MKKISTLRTNGNMIFKGHKLTIGLDLGDRWSFYCVLDEAGKVILEQKLATTPEAMKQTFERIPRSLIALETGTHSPWVSRMLRELGHEVLVAHAQKVQLISKSNRKDDRHDARTLARLARIDPELLGPVRHRSAKAQIHLTMIRARAELVSARTALVNAARGLAKSYGERLRKCGTQQVSRELAAELSVELREVLEPLLAEVESLNERIKEYDARMEKIARESYPQVELLKQVKGVGTQIALTYVLTLEDPHRFPKSREVGCFLGLRPGRRDSGESQPQMHISKEGDRYLRTMLVQGAHYILGPFGADSDLRRWGLKLAARGGKNAKKRAVVAVARKLAILLHRLWVSGGVYEPLRNSNKAMRAVA

SEQ ID NO: 181088 - protein, 443 aa, unidentified
MKRFSQLPVINPTAAGIDVSDTEMVVAFPVNSEQIEVRSFECFTRDLHSLAKTLQEYGVTTVAMESTGVYWVTLFLLLQSYGFEVYLVNARHVKNVSGRKDDESDAEWIQKLHSCGLLKASYQPDNMTRTIRSMVRHRKNLVNTSTTYINRMQKALELMNIKLQTVISDIDGKTGRLIIKAILDGERNAEVLANLRDHRIKASREVIIKSLEAYWTDEHLFELKQCFELYEIHRQMIDECDQEIEKKLLELIASLNEGEIPVMPDVKRKISSKHQISFNATASLKLILGVDVTSIIGISELSALTIMSEVGIDMSIWESKNHFTSWLGLVPNTKISGGREISSRISKKVQYAAQAFRMIAYSLSKSKNFLGDYYRRIRAKAGPAKAIVATARKLAVYYYIVASKKEVFDLNFIVEDNKKCNEMKINQLKKKILELQNGLNLVT

SEQ ID NO: 181089 - protein, 339 aa, unidentified
MKLYGGIDLHSNNSVIVLLDEEDQKVYQRRIGNDLKTILGALEPYGDSIEGLAVESTYNWYWLVDGLMEAGHQVHLVNTAAVKQYEGMKYGDDHTDAHWLAHLLRLGILPQGYIYPKEERAVRDLLRKRGQLVQMRTTNLLSVQTLITRNTGSSLSANGVKKLQSEQVAELLPCEDTALAVNSNLNVMQALQEQIKILEKVVQKKAKLKAGYAALQTVPGIGNILALTIMLETGPIQRFAKVGNYASYCRCVGTTRLSNGKQKGKGNAKNGNRYLSWAFVEAANFAIRYNDNIKAYYQRKQAKTNRVVAIKTVAHKLARACYYILRDHVEFDLNKAFSA

SEQ ID NO: 181090 - protein, 348 aa, unidentified
MVTIGIDPHKHTHSGVAVDPLGVQVAQRTVAARREGFGQLLEWGRKLDGERVWVIEDVRHVSGGLERFLIDRGETVVRLPPRLMADARQGVRERGKSDPIDALAIARAALREGVETLPTARLAGVELEIRLLALHRERLVDTRTRLINELRWQLHDLWPEWEIPKRVLIQPGWQTKIAQRLSRVTVTVQVQIARDMIARVRELTRTITKLHEQLTGLVKQAAPQLLAEKGLGVLIAAKLIGEIAGIDRFTSDAQLARISGCAPIPVSSGRTDRHRLDPGGNRQLNHAFHMLALTKLLHDPRTAAYLAKQRRNGKSTREAIRSLKRHLVRRVYHLLRDPNSVPITICLT

SEQ ID NO: 181091 - protein, 349 aa, unidentified
MEEKRFVGIDLGKREYTIAIIKEKGKVSTHHGKTSIEGRMALYRLLRKGDRIAVEAGNLAFIMAWEILNIVGSEVIVLNSAKLPFIWDAPTKTDKEDARKLARLVEERRDEKLPIVPLPDKEEMERRETISNYGREMKNRTRAINTLHSLFVKQGITTVVKKNLATVERRAEAIKVLSGREREDAVWQMKYLEMYEQRIKELKDRIKKEAKTDENMKLLQSIAGVGPIVAYAFVAHVGDGRRFSKGAQVSNYIGFVPRLYYSGTIQRNGHITKRGNGYLRGLLVQAAWAAVLSKSGGALRERFIIKTKEQGYGKKKTIVAIARRLVELMYSVLRSKKKYEPKPYMGILI

SEQ ID NO: 181092 - protein, 414 aa, unidentified
MEDILECCCGLDIHKESIVACMLIGPIEGGLKPRSEIREFGTQLKDLIALRQWLEEHHCRYVAMESTGIYWQPVYAVLETSLSDEMHLLVVNARHMMNVPGKKTDMRDAEWIVTLLRAGLLKGSFIPEHDIRDLRQYTRYRKALIRDITSQKNRIEKLLQSSGFRLSSFLSDIFGSSGLAIMQQLVRVGCISEETLKVCLKGRARQKTAEILSSLNGTLSLPQRQLLKMQLAHLKDLQDNLHEVEEQIRKDFSQFEGPRNLLDSIPGIDLIAAYAILAEIGNKMDAFPTAQHICSWAGLAPGNHESAGKKKKQRATPGNNYLKTILCEVAWVIASHREHYLSGWYWRLKQRTDSKRAIVALARKLLVIIYTMLKTNQPFDEQKFLERKEISDRKRVNRMVSELTRLGYAVSVPA

SEQ ID NO: 181093 - protein, 347 aa, unidentified
MNFYTKQHKFYCGIDLHTQRMFVCILDAGGNVRVHQNINTNPEVFLRIIAPFHEDIVVAVECMFTWYWIADLCIQENIPFVLGHALYMKAIHGGKAKNDKIDSLKIATLLRGGMLPQAYVYPARMRATRDLLRRRNHLMRKRAELFAHIQNTRSQYNLPDPLGCIAKPQNREGIVERFDDPSVQKSIAVDLEMIEAYDHILTQLERDIIACAKEHDLRSYALLQTIPGVGRILGLVLLYEIESIGRFPQVQDFVSYCRLVKCIKESNGKKYGSSGKKIGNAHLKWAFSEAAVLFLKGNEPAKKCLQRLAHKHGKAKALSILAHKLGRAVYFMLKNKEAFNQKKFLGL

SEQ ID NO: 181094 - protein, 452 aa, unidentified
MRYIGLDVHRTFAEVAMIEEGRSRRGGRFATTADALRRFASTLTPEDHVVLEATCNTEAIARVLRQHAGRVVISNPLRTRAIADAKIKTDKVDATMLAQLLASGFLPEVWLPDEVTAQRRRQVARRAQVVRQRTQVKNHIHAILHRNLVPPCPYADLFGKVGRAWLATQPLPADEQQTVASLLRMLDQFTAEVAGIERDLAEETLACGPARRLMTIPGVDAAIAMTLVAAVGEIARFSSSQKLVSYLGLDPRVRQSGLHPATHGRISKQGHAHARSMLVQAAWAATKTPGPLRAFFLRLRAHRGKQIAVVATARKLAVLVWHLWSKEQDYLWARPSLTATKLRTLELRAGRPARRGQRGPTVNYSIQSLRNQELAIGEQAERAYADAVARWQPRRPARQKSIGVSAAKEERTQPCQARVRRREPSTSELAVPVGVAHADDQHSRNLGRRGGA

SEQ ID NO: 181095 - protein, 403 aa, unidentified
MIFAGVDWAEAHHDVHVQDEQGRRLAGGRLAEGVEGIARFHELAAAHAASPGEVVVGIETDRGLFVSALAAAGYQVFAVNPMSASRYRERYGSSGAKSDRGDAKVLADLDRHNHRPVAEDSDQAQGIRALARAHQSMIWARRRQANQLRSALREFYPAALAAFDDLTSPDAIAVLKAAPQPALGTALSRAQITAALRRGGRTRRLAERTAAIQAVLRAPQLQPAPALAAAMGTTVAALAGVIAEMNTQISVLEQQIAADFEQHPDAEVVRSLPGLGTILGARVLGEFGDAPGRYATAKSRKNYAGTSPITRASGTRRAVLARHARNKRLADAIYLWAFSAITASPGARAYYDYHRAAGDTHHQALRALGNRLVGILHGCLASHTPYHENTAWAHRSHETAHAA

SEQ ID NO: 181096 - protein, 341 aa, unidentified
MEQFIGLDVSLKATFISVREGGQRIWRGKCPSDPRLIAEVIRKRALNPKRVVFETGPLSVWFYHALALEGLPAICIDARHAKAALDMARNKTDANDADGLAHLAEVGFYREVRVKSFDSMLTRTLITAPNQMLKVAVQLSNQIRGLMKTFGLVVPKGAGRVFEGHVRSLLASNAGLEQIILPVLEAWRGMRASAAGLSKQLVASARASEQCQLLSSIPGVGAVTASSFVAAIEDPENFRKSRSVGAWIGLTTRRYQSGEVDYDGHISRRGDNHLRGLLYEAATVILTRSTAESALRIWGLKLKEKIGFKRAAVAVARKLAVIMHAMLRTGELFDRSMTPAA

SEQ ID NO: 181097 - protein, 460 aa, unidentified
MTLLARLGEQLPERNYLGIDVGYKEHVAVVITLQSFAQDGDRWKRTPCLHFPSTRSGLEKLQEYLDSFSADAGTFFGICEPTGGFYGATMFQYLLDQGYPMWLIENATTRHMREKIMGHIPKTDDIEARVMARIAYLHEAVGEEFTLRPLVLAEPEDADLLALCRDSWRLKTMISRARNQLSQLMAVVYPELKTFFTGSVSSIAPVRLIAAYPTPAELAAASAEEVRALLWQARAYHHAHRVGDLQALARNSSGLLPDPQRAWRLAWVTDFLLANFKADAALDKQIEMLVTQRKEYPWIVNVPYAGPATLGLILAATGDINRFRNYRQYVAYTGYFAGLEKSQTIDRTRMSKRGNRDLKRALFQIAAPLVWFDRSENPYKALFKRKEAEGQPWHRAMPYVCAALARHIYHCLKFQDPYDADRALGAPVSSHPCEDTIVDLRAGLEDRLEVMEAHLSQEER

SEQ ID NO: 181098 - protein, 428 aa, unidentified
MDEVNRSRLEEFRQLRQEIRQSEEHLIVGIDIAKDRHHAFFGTATGKTLLRRLVFSNDGEGFGKLLDQTEALRVRHGLKKVVYGMEPTGNYHKPLGEYLIHMGRMVVLVSGVTAKHNRESLDGRWDKHDDKDSANVADLISQGKCLYYEYPPAQLRGLRGLLSLKRRLKRQEQSYRVRIRNHLIAQYFPELDSHYGRSEAQGLAIVRWCFPASHITEIDVDPFIERVTSRRVRVEKRRRLEALWEKAGESIGCDEVPGLDHEVKVMVEGLRQVREMIQETKDRIEELCKRYPEYPFLLTIPGFGPDVSAKVLGAIGDPDRFENGKQVLKQAGLDLSANRSGKNSAQAIPQISKQGKADLRYALYQAAFIASTKNRGFMRYYTSKLRGREKEKGINGKILVKLSAKMLLIAWTLMKKKEAFNPAYLNAE

SEQ ID NO: 181099 - protein, 420 aa, unidentified
MEIVVERCAGLDVHKDSVVACVRVPGPSGERETKVATFATFTEDLLALRDWLVSLGITRVGMEATGVYWKPVLYLLEGEFDCWLLNARHMRNVPGRKTDVGDAQWICQLTEHGLVRASFIPPPQIREIRELTRYRRSVVEDRSREAQRLDKVLQDAGIKLSSVASDILGASGRSMLVALVSGTEDPAVLADLAKGQLRKKLPQLRSALEGRFGPTHAILVAEIMSQLDYSDEAISRLSDAIDERIAPFADARDRLCTIPGVDRRIAEAIIGEIGVDMTKFATPGHLASWAGMCPGQHESAGKSKKGTARKGDSWLQRHLAVAAMAAARTKGTYLASQYHRLAARRGKMRARKAVGHTILVAVWYILSDSETTFVDLGPDWFDRRNSPELRARRKLSELRALGCLVTPNGDGSTTIILPAA

SEQ ID NO: 181100 - protein, 395 aa, unidentified
MFIVGIDIAKRSHEAIIIAEDGQVVRKAFSFRNNCTGYNLLLEQVRRLTLVKSQIVFAMESTAHYWLALYARLLKDGYAVMVLNPIQSHSLRELYIRKAKTDARDSLIIADLVRFGRCKASNVPQDKILALRELCRSRAYLVDMAADLKRKLIALLDRIFPEYESLFDSVFSKASIAVLRKCSTPQKVKNANLRKLTDILMESSNGHFGEWKAHQLKEAACSSFGIDDSGGVYSTLLGMFLEQILSLTAQADSLEKQISIFFQEFNNPLTSIPGVGTVLAATILSEIGDITRFSSADKLLAYAGLDPSVKQSGEFKSNQNRMSKRGSPYLRRDIWLASTVAVHRDPMFQTYYEKKISEGLHYMNVIGHVSRKMTAVIFAVLRDGQPYQPILQSAG

SEQ ID NO: 181101 - protein, 402 aa, unidentified
MRRCIGLDVHREFAQVAIWEAGLVRQAGRIELTPEALRVFADSLCVSDEVALEATGNTHAIARLLERHVGRVVISNPQKTRAIAEAKVKTDKVDAAVLAGLLAADYLPAVWLPDEATFALRRQVTRRAHIVRQRTRLKNQIQSILHRNLIPRCPAADLFGNKGRMWLAAQDLPPDEQQAVQALLRQLDFHGQELRIVDAELGRIGLERAEVRRLLTIPGVDATVALAIVAAVGDFGRFSSPQRLVSYLGLNPRVRQSGGQPAQHGRITKQGRAHARGMLVEAAWAAAKTPGPLRAFYERVRARRGMQVAVVATARKLATLCWHLVVKGEDYAFARPSLTDKKLRALQLRAGMPPRRGQQGTAAAYSRKEVRRRERALTEQAEVAYRQLVAGWQPKRPATKPQ

SEQ ID NO: 181102 - protein, 330 aa, unidentified
MTQDPSQDPSQVVPPVFVGIDVAKDKLDLARSDSVELIAVANDGQGIARVVRELTAARPTRIVVESTGGLERPLLEALLDANLPVALVNPARVRHFAIGIGTLAKTDPIDARVLVKFAQLAEPRLAQKRTENQAELDELVTCRRQLTAARTAQANARLTTRSGDAQKSIDAVLKELDKQVELLDRKIRKLIDSDDDFKHLDGLLRSVPGVGPVLSATLLAELRELGTTDRRQITALVGLAPFNHDSGKSTGRRAIRGGRTSVRCVLYMAALAAIRFNPVLSRFADRLRRTGKRAKVIIVACMRKLLALLNAMIRDNLTWTELRVVKALDI

SEQ ID NO: 181103 - protein, 338 aa, unidentified
MHTTTLGIDLAKNVFQLHGVDARGCTVLSRRVKRGQLLQVVASLPPCVIGMEAGGSAHHWGRAFEQLGHTVKLMHPKYVKPYVKTNKNDGRDAEAICEAVSRPTMRCVSIKTVEQADLQAVHRTRSLFVKHRTAVINQIRGLLAEYGLVIALSPGKVRPALVRFLDDAASGLTAFARDTFSELYAQLTELDARIERVTHRVERVSRAHPVCQKLAAVPGIGPLTATALVATVGQPQVFHNGRHLAAWLGLVPRQYSSGGKARLGGISKRGSRYVRTLLIHGARAVVQRAARRTDTQGRWLCALKHRKGTNVAAVALANKNARVIWALLAHDETYRQPA

SEQ ID NO: 181104 - protein, 347 aa, unidentified
MRFYTQQHKHYCGIDLHARSMYVCLLDQAGTKLVHKNVAATPEAFLRVIAPYRDDVVVAVECIFTWYWLSDLCAREGIVFVLGHALYMKAIHGGKAKNDKIDAHKIAVLLRGGMIPMAYVYPPEMRATRDLLRRRCHLMRKRAELLAHIQNTNSQYNLPEFGKKLAYKGNRDGVEDHFPDPSVRKAIEMDVALIDHYDQLLGEVELYITRTAKGHDAQSFARLQSVPGIGQILALVILYEIQDITRFPRVQDFLSYCRLVKCAKESAGKRHGLSGKKIGNPQLKWAFSEAAVLFLRQNQPGQEYFTKLERKHGKGKALTVLAQKIARAVYYMLTRKQAFSLKRFVTA

SEQ ID NO: 181105 - protein, 407 aa, unidentified
MRLLVGDDWAEDHHDVEVLDAAGRRLARARLPEGVAGIARLHAIIGELAGEDAEDVQVLVGIETDRGPWVAALVAAGYQVFAVNPLQAARYRERHTVSGAKSDTADAHVLADMVRTDAHQLRPVAGDSAQGEAVKVVTRTHKTLIWERTRHTQRLRHALRDYFPAAVEAFEDLDAADTLELLAKAPDPASAATLTRAQISAALKRARRRDIPAKSERIWTVLRADHLGQPEVVTAAYAASVRALVAVLMVLDEQITILQGQVAAHFGRHPDVEILTSQPGLGAVLGARVLAEFGDDPARYACAKARKNYAGTSPITRASGKTKIVAARYVHNDRLIDALMTQAFAALNASPGARAYYDQLRARGATNNAALRQLANRLVGILHGCLKTRTRYDEATAWSHHSKALAA

SEQ ID NO: 181106 - protein, 320 aa, unidentified
MRNAVGLDISKLTFDASAMVGNAEYSAKFDNDSKGLNQFSDRLKSLGCQNLHICMEATGNYYEEVADYFAQYYSVYVVNPLKISKYAESRFKRTKTDKQDAKLIAQYCRSAQESELVKRQKPTDEQYRLSRMTAAYAQIKSECAAMKNRYHAAKDEEAAKAYAEIIKAMNEQLEVLKEKIKEQTEKPKCKEGVKCLETIPGIGRMTAAVLFHHLTSSKFETSNKFAAFAGLSPQQKESGTSVRGKGKLTKFGNRKLRAVLFMLTMVAYRIRAFPDFIKRLEEKKKPKKVIIAALMRKLAVIAYHVHKKGGDYDPSRYKSA

SEQ ID NO: 181107 - protein, 339 aa, unidentified
MTALYSGIDLHSNNCVVVVMDAGGTVVYRRRLDNELERIRWALAPYRERLRGVAVESTFNWYWLVDGLMDAGYRVKLANTTAIEQYSGLKHTDDDSDAEWLAEMLRLGILPTGYIYPRAERAVRDLLRKRAHLVRQRTANLVSIQNLLQRNTGGRLKSEAVKGLTPEQPGQLLANPDVALAVAATVRVRQCLDTEIAGLEKVVLERVQLRPQFRQLKTVPGIGEILGLTIMLEAGPIGRFASVGDFASYCRCVGSTKLSNGKRKGGGNVKNGNRYLAWAFIEAANFAPRYCAPIQRFYQRKAARTKAVVAIKTVAHKLARAAYYILRDQVPFNVSKAFA

SEQ ID NO: 181108 - protein, 408 aa, unidentified
MNTLYVGIDVSSKSNVVYLMLPNGDKHSNFSVANSHEGSTLLVKKIYSALTSHSLDTVLIGLEATSVYGDNLVYFLRKDATLAPFNRKIHVLNPKQVKKFHDTYNDLPKNDYVDSFVIADCLRFGRINKEVYMGEYRYKALQNLTRARFFAVQNLVKEKQRFMNVLFKKYSTMTQEKVFSDAFSTTALAVYDEFESAEALANMDLHELTDFIIEKGKNRFPDPDAVAKAIQKAARSSYRLPKTVNDSVNQVLSISITSMKALESQIKEFDKAIIALMELLPNVLISIPGIGPVYSAGIMAEIGDINRFDNQASLAKYAGLAWKQHQSGGFEAEVTRLIPSGNRFLKYYLCEAAFSLVRCDKEYSDFYHLKYKEVNRCQHKRALALTARKFVRLVFRLLKDNRLYCPAK

SEQ ID NO: 181109 - protein, 429 aa, unidentified
MSYRIAGIDVHKKMLAVVVSDVEVDGEFRFERRMFGSNPEQLRTLAAWLLEQEVEEVVMESTAQYWKPVWETLERYWKPIREKREGASRKSGTLHLALAQSNRGRRGRKRDFPDAERLVKRLVARELTLSFVPDAEQRLWRTVTRRKYQLTRDRVRLQNQLESLLEEAHIKLSSLVSDMLGASAQRMLKALADGETNPAALAALADRKLRATPEQLCDALGACTDLKPVYRRLLKMALEQLQFLEQQIGQLDQEMASLLSPHQDAVERLAEVPGLGVDSAQQIMAEVGPTAATFPSEKCLSSWVGACPGDDESAGVNYSHRSPKGNRHMRRVLNQCANAAARTKGSIFEIVYRRSVPRLGHNQAIGAIAHRQCRLIWLILHQGVRYEERGPAVTKQSKQNCTARMIRQLRSLGYRIEQTNPQPSQAQAQ

SEQ ID NO: 181110 - protein, 346 aa, unidentified
MSEVTTIGLDLAKHVFQVHGVDVSGATILRKQLRRGQVVAFFAALPRCLVGLEACATAHYWARELQAVGHEVRLMPAQYVKAYVKRNKNDAADAEAICEAVGRPSMRFVAIKTAEQQAALLLHRGRERLVRQRTSLVNALRAHLAEFGVIAPHGLRNVARLIAIVRDESDTRLPDLARRVLDVLATQLEQVAAAVAAVEKQLTAWHRDNPASQRLASIPGIGPIIATALAATVVEPIGFASGREFAAWLGLVPRQHSTGGKARLGGISKRGNRYLRRLLINGASANLLRSKATNADPWVIGLRRRRPSLVACGCVGQQDGARRLGGDAPGGKLPASVRGGINRRRT

SEQ ID NO: 181111 - protein, 371 aa, unidentified
MQTLKEYTLEATPVASAKELKTQKRPKAKLIAVGTDVHLRGYQAARKVDNTAIGAVTNLRSETELLLYIEKQLEQAEEVVVAYEAGPLGYGLYRKLTARGVKCLVCAPDSTQQKKKRRKNNQIDARTLTSNLSNYLNGNEGALQLVRVPTEEQERVRLVSRQHDQLVEERKRLGAQGNALLLSQGFGSWKNWWRPKTFSRLEQLLPGWLFEMLQSWVDLLRALDEKIQVAKAALTKRWSGPRPKGAGANSLVQLGSEVLDWELYTKRRKIACLAGMVPSEWSTGESQRRGSITKVGVPAIRRIITEMVWRIILFQPQYPPVQKWQEVLGGTNRTLKKKAVVAIGRQLMVDLWRLQTGRASAQQLKLVMIGG

SEQ ID NO: 181112 - protein, 365 aa, unidentified
MFYLGIDQHKRQLTVNSRGEDGTVLLQRQVSTEWEKVRAFFADYAERARADGGFMAIVEVCGMNPWLLAMLKEYGCREIVVIQPAERSKQKTDRRDAGKLGHVLWVHRQQFLEGKHPIGLRRVEPPTPQQADDRQLTALRARLTKKRTAVLNGIHKILRKHNLEQAQPTKLFQTQKVRRWLAEMELPAMDRLEMNLLLPQWALLDEQLETTEAKIAERAAADEQVKLLESVPGLGHYSAVAISSRIGDIARFRRPDSLANFLGLTPGCRNSGLATQRLGSITKQGSKMVRHLLNQAVIKVLRFDGQMRTWYKRIKKARGSKIARVAVMRRVTTILWHMLKKKEKYRYDSAIQKHEEFEAFDGRAA

SEQ ID NO: 181113 - protein, 343 aa, unidentified
MDHFAGLDVSVKETSICIVDETGRIVGEVKVASEPEALLQMLMNPAYHFKRIGLEAGPLSQWLFSALGEAGLPVICVETRHMRAVLKAQINKTDRNDARGIAQMMRVGLYRPVHVKTLRSQKLRMLLTHRKLLQSKAIAIDNDLRGTLRNFGLKVGMVGKVKFEARIKELVENFPDLAVLVEPLLVVRRVLREQLGILHRRLLAIVRDDDVCRRLMTTPGVGPVVALTYRATVDVPARFRNSKAVGAVFGLTPSKYQSGEINRTGAISRCGDEMMRMMLYEAAQTMLMCSAKWSWLKAWAMKIARHRGMKKAIVALARRLAVIMHRIWVDGTEFRWTREVAAA

SEQ ID NO: 181114 - protein, 340 aa, unidentified
MKITTVGLDLAKNVFHAVCFDEHSKEVKKRVIRRNQVRMFFAQLPPCKVGMEACASSHYWGRELRALGHEVKLIPAQHVKPYLLGNKNDFNDARAEALTRPQIRGIAIKTTDQQDIQATHRMRSQCLRDRTALCNSVRGLLAEYGVVLGKGITTLRKSIHGLLEDAENGLSLTFRHLLAKSHERLIELDGHIDFYTQELVVQSRQDDACQRLQEIPGYGPITASAFYSVVGNGQAYSCGRDVSAAIGVVPRQHSTGGKNVLLGISKRGDGYLRSLLIHGARAVVIHASNKKDRLSQWINRIVAERGKNKAAVAVANKMARIGWAILRHNAHYQAALKATC

SEQ ID NO: 181115 - protein, 434 aa, unidentified
MSGKKSLELRVSVDVGYRRHSVAIGLPSGEVLEEFEIAHRPEGFAEFFSRIEKHHKARRCGVAVGMEGFNGCARPLDAMVRRRGYRLYNINNLKLARFKEIFPGAAKSDRIDARKGLELFQLSDHLPLAKEVLQEVKGTPQENEVLKRLTRRRRRLVDERVRVISNLQTDLQAVCPGLLEITKNAGNQWFLNFLVSAATLPQLARLRPSTLLKVPAVGRKYARLIEDWQKRAHFSEEVEWVSEMIQEDAKRCLELDEKIKALKAKIKGVAKDSKIAKTLLSIPGFGTICTAELAGEIGTIERFSKEGSLALYLGMSTLDNSSGKYQGSKQPKHVNRRAKAAMMVALDRHRKYVPQSQRYYEKKRREGKKHNQAIRALGRHLCRIIYKMLNDEREYEIRPEKGNTKTKVKSRSCVKTQIRKAKISAKGKITNGAR

SEQ ID NO: 181116 - protein, 345 aa, unidentified
MKHFAGLDVSLQETAVCIVDEDGIVISEGKTASEPDELARWIATTGLAITRVGLEAGPLSPWLYTELRAAGLPAICIETRRMKGATAAMAVKTDRNDARAIAHAMRVGWFTTVHVKTAESQELRLLLSNRRTLLEKRVAIDNEIRGTLKVFGLKIGPVTVANFEARVLELLASRSRLLGMVKPMLAARTALRQQCDVLHRMVLKTVRTNAVCRRLLSVPGVGPIVALTYATGVDDPARFAHARDLGPHFGLTPRKYASGEMDRNGSITKAGDGAVREALVQAALTLLTRVQRWSVLKAWGMAIAKRRGLRRAIVAVARKLAIVMHRIWVDGTTFTWSRETAPASA

SEQ ID NO: 181117 - protein, 313 aa, unidentified
MQIATIGLDIAKNVFQVHGVDGEGRALLRRKVRRDQLLALFSGLEPCLVGMEACATAHHWARQLGALGHAVRLMPPAYVKAYVKRNKNDAADAEAICEAVTRPTMRFVPVKSADAQSVLMLHRARHLLVRQRTAQVSAMRAHLAEYGIVAPKGRAHVRDLVAALDSATGLLPDLAHQTLLLIARMIESLSAQIRKIEIELMAWHRATPACRRLETIPGIGFITATALVATVSDARAFRSGRQFAAWLGLVPRQNSSGGKNRLGGISKMGDRYLRHLLVGATAVVRSHRPECAPHECRRRSRCANPGRARCGRG

SEQ ID NO: 181118 - protein, 344 aa, unidentified
MEISTIGLDLAKSVFQIHAIDGSGRSVVRKALRRSQVLPFFGKLPPCLVGMEACGTSHHWARELAGLGHDVRLMPPAYVKPYVKRGKTDANDAEAICEAVTRPTMRFVAVKSPEQQAALSLHRTRNLLVKQRTQLVNMIRGLLAEFGLATPRGLHHALALSARLVEGEAADVPALAQRVVAGLARQIETLQAELTAIEKEILVWHRSNDVSQRLATIPGVGVISATALAASVTDPQQFRSGREFAAWLGLTPLQNSSGGKERMGRISKMGDKYLRRLLVVGMTSLVRRARVSPASIDPRINELLARKPVRLATVAMANRTARIVWAVMARGETYRRPSIMALAA

SEQ ID NO: 181119 - protein, 370 aa, unidentified
MSIKRILVNTIDTDLEYEVIGIDLAKNCVSAILLTTDGEIFGIDRLDYQELEKSAQELSPTIFAMEPCTEMNYMVQKLEDWGHHCIVISGKNVKDYVESHFSNQKTDLNDAQALAFLTKDTQLRTVKAKDPEQLKYASLTTLREQYVKQYRQTMVSLKGICQVWGLSISKGISGKARLKDMIENHAAFPAELRTALVGMVAHAQAVQKDLKSVTKILEELAKKDKACQLIQTVPGLGTICSCRLRATVGDIQRFKHPKDFPAYYGLVPRSMATGHNEKKGKITHRGDKTMRSLMVQGAGIVINQATKCNLHSKQLTNWILKKQKEKMPWGKLVCAVAAKLLRIVRAILISGKPYNPKIAGVAKCSLPKAS

SEQ ID NO: 181120 - protein, 355 aa, unidentified
MKNQAIQYLALDVHQATTVATVREESGAIRMRATVATEAGAIVGLVRGLGARVHVALEEGTQAQWLHDLLQAHVERVVVCNVRGRSETTNKSDRLDADWLSEMLRVGSIKAVHHASTSILTLKELVRCYTNVVDDSIRVMQRIKAIFRARGIATPGKGVYRGSQRKTWLSKLESRGARTRAAALYEQLDLLTKQRPAAKAAMIAEARRHHGWKILRSVPFIGPVRAAVILAIVATPFRFRTKRQLWPYAGLAVVTRSTSDQQIIEGKIRRRKRAPLTRGLNRNHNPVLKSVFKGAANAAAATEGPFKDFYLRCVGRGVREEMAKLTLARKIASVVLRLWKKGELWDPAKLTTQTT

SEQ ID NO: 181121 - protein, 402 aa, unidentified
MNAVGIDVSKGKSMVAIMRPFGEIVSAPFEIKHTASGINSLVELINSVEGESRIVMEHTGRYYEVLAHQLSKANLFVSAINPKLIKDFDNDSLRKVKSDKADAVKIARYALDKWQNLKQYNVMDELRNQLKTMNRQFGFYMKHKTAMKNNLIGILDQTYPGVNTYFDSPARSDGSQKWVDFASTYWHVDCVRKMSLNAFIDHYQNWCKRKKYNFSQSKAEEIYGKAKELVPVLPKDDITKLIIKQAVNQLNSASTTVESLRTLMNETASKLPEYPIVMAMKGVGASLGPQLMAEIGDVSRFTHKGAITAFAGVDPGVNESGSYEQKSVPTSKRGSSDLRKTLFQVMDVLIKTHPQDDPVYQFIDKKRAQGKPYYVYMTAGANKFLRIYYGRVKEYLSSLPES

SEQ ID NO: 181122 - protein, 378 aa, unidentified
MTTMAHPAVTRVTVGVDTHGDVHLAHAGDQLGRRLDTVSVPTTPSGYRGLLAWARGLGELDAWGVEGTGAYGAALARFLHDCGQVVVAVNRPDRAARRRRGKSDPVDAEAAARTVQAGQATALPKAGTGQVEMLRSLRMARASAMKARTQAINAIKALLVTAPVDLREQLRGLPAAQLVRCAAALEPGRLTSPTAAAMLALRTLACRYQALSAEITTLTTELKRLTATAAAPLVALFGVGSDSAGALLVAAGDNPGRLRSEATFSMLCGSSPIEASSGTTIRYRLNRGGDRQVNAALYRIVLVRLRYDPATRAYMARRITQGKSKREVIRCLNATWPGGSSQPSARWSACAAHVPEGSRHPLPPAQRDHGWRRGQCQW

SEQ ID NO: 181123 - protein, 359 aa, unidentified
MINVGVDVHKIFCQACLKDEHGTVLEEFRFRNNLEGADKLASILKKHGEAKVALESTGNLWVKLYDRLDQEENIDVILTNPKKTRVIAEAKIKTDKIDARLLSDIIRADLVARSYVPPKEIRMQRALLRERISLVESRTMIKNRIHALLDKYEIQPGYTDLFGKKGMIWLRTLHLPDIDQTILEVNLQRLEELEVHIDAFTSKIAKEAIQKPEVKLLMGFTGIDYYSAMLLASEIGDIKRFPSAKKLVSYAGLAPGTRQSADKTIHGHIVKEGNKRIRWILVEAAHHAARHDPRLQPFYHRILKRRGYHKAIVAVARKMLVSIYHVLSKSEVYQGENSQLLQRKLKRLEWKVSHNLHAE

SEQ ID NO: 181124 - protein, 367 aa, unidentified
MSSMPHPQPSDADEVILGVDTHKDVHVAAVLTALGVLLATSSFPTTAKGYRQLLAWARGFGALHRAGVECTGSYGAALSRHLSSEAVTVIEINRADRGDRRRRGKTDTIDAETAARAVLSGRATAIAKSGDGPVEMVRMFKLVKASAIKSRGQAINQLKAVLVGTDPALRDSMTGLSNPALFRRCAELNHSNPTDTPSAAAFTLRLLTRRILELSSEIDELNAQIATTIEARAPQLLQRYGVGPDTAAALLLAAGDNPERLHSEASFAALCGVSPIEASSGKTHRRRLNRGGDRQANSALYTITIARLRWDKRTQDYVQRRVAEGKTRREAIRCLKRYIAREVYHDITSTRADSDRDVVTDALRVYA

SEQ ID NO: 181125 - protein, 459 aa, unidentified
MARKKKLEMEIINTEAAGIDVGSRSHFVAVGQSLEDVKEFGVYAEDNTELCQWLLSYGITSVAMESTGDYWQNLYAELLKHDISVVLCNGKFTKHAKGKKTDVKDCRWIQKLHSLGLLSSSFLPDETTEKLRTYCRQRTNMINQSATVSRKMQKYLKFLNFRLDVVVKDVCGLTGMKIIEDICSGNLEPSSLAEHRHYNCRKSKEEIAKALQGNNREDYLFGLKQEYQSYMFYQKKIEQCDKEIAKFIKETLRKSPDKKSFRTVDKPHKRINKNAPAIKDFNQIAFQYFEGVDLMAIEGVSHSTILTIMSEIGPEGFKKLNSSKEFVSWLRVAPNNKISGGKVLSHRIPKGSNRLKIALRQSANAIGNLKDTHLSDFFKRIAYRRGRQAAVSATARKLGVIIWTMITKKVPYSPPTEYLFLDQKRKLKMVSRIKKNIVKFGINLEEIRTDNMQIINNII

SEQ ID NO: 181126 - protein, 359 aa, unidentified
MLKYSLGMDASMKDIHVCLSVIDSRQQVKVKASSKFANNVQGFKDLLVWVTRHKKESDIPLVNVIEATGVYYEGCALFLFKAGFDVAVVLPNKAKKYLQALGLRSKNDKIDAAGLARMGAEQCLELWQPMDEFFYTLRGMTRHHQSLQELKTNINNQLHADEHSIYGNKAVIKQLKKLITTIEKQLKETDQNIHDHLYSNDEVGPRVDQIIDIKGLSYMTVATVLAETNGFVLFKSASQLVRYSGYDVIENQSGGHRGKTKISKKGNSHIRRAMFMPAFNVVRYEKGNFKTFFERILARHHQKMKAYVAVQKKLLVMIYTLWKKNEAFNHDAKINISRKEETAPSFALTEGQHNEVAPA

SEQ ID NO: 181127 - protein, 341 aa, unidentified
MTSYVGLDVSLAETSVCVLEADGAVRFEGRVKSSPEALIRCLVERAADAGRIGLETGQTAGVLVRGLRAAGMPVICMETRHAHRVLSARTHKTDRNDARGLAELMRVGWYREAWVRGASATYIRSLLQARKLLMQTKRTLENTLRGAVKRFGVITTKTAGRGFAQRAADARAQDPAYGAYATPMLEVLRGVVEQIRTYDRQLRAIAREHQVSRRLMTVPGVGHLTALAFLSTIEDPTRFKRSADVGPYLGLTPKIYQSGEIDRSGRITKTGDAMTRSYLVEAANVLLVKIDRPVPLRLWGLRIMERAGLKKAQVAVARKLAVLMHAMWSDGTEFEWAQADA

SEQ ID NO: 181128 - protein, 470 aa, unidentified
MGPADKEAEIKTRWFATTIPALRELHAWLREEGCTTVALESTGSWWISVKNELETDLRITLVCPRKHHPKKGDKTDFCDAVDLAVHHRHGLLTGSFLPERRIVELRDLTRRRKKLLGNLSSEKNRIQKVLDTAGVKMGNVISDVFGVSGQEILHALLKNKPLKTEELADLAKKRLRNRIPELTEALQDHYMNDHHRWLIQQSVDHAQFLDVQVEGIEKRIDEKLKPFARQYELLQTIPGIKEHTAASILAEIGADMDQFATAKKLCKWARICPGNNRTGGKDRKAHIQRGNKFLLAALVEASWGASRKQGSIFQRQYRRWVKKGPQVAAIAVGHALLRAVWSVLKHDTAYVEPDAAVLSSLERQKQIRQQARKLRELGADEQTIQTLVEQLSRRLDEPAPEPAHAEEAKAPPENRVSQGKRPLARGVLGFRIRTAPRKEYSVEKDLLTGASPRGRSKQPTQNQHETQNQT

SEQ ID NO: 181129 - protein, 317 aa, unidentified
MPGIINFIGIDMAKNDFYACLNDMIEPCKFNNDTKGIKSFFSYLKHNDFQKENTLLGVESTASYHLKLCIESAERGYKIKVINPLIVKKQNQTDLRRVKNDKKDSRLIRFCLAGGAGYEFINDPEAIILKSLIRQRDSLVFAKLKFDRQEEDIRRKEKCLKQEISPVYREIINVLEDKIEALKTDLRLYRPKEQYLLQSIPGIGPITSASFISEVGDINRFQKPEQLVAYAGIDPRVHQSGTSINGKGYISKRGNKILRTRLFNAASVAVLYDNMFKTFFQKKKSEGKPYRVALVATMRKMVHVIHSVWTRGTPFVN

SEQ ID NO: 181130 - protein, 346 aa, unidentified
MTIVETPAITGGVDTHADVHVAAALDPIGGLLGVQEFPATPEGYGRLLGWLGGFGTVCLVGIEGTGSYGAGLARHITWAGVRVVEVDRSDRQDRRRAGKSDPLDAVSAARAAQSGRAAGASKGRDGAVEAIRVLMVVKRTARSERTQTINQARSLVLTGPDDIRVRFIHHTTSGLVADLAGLRPRPGATVGYATRIALRELGRRAQFLGGQLESLDQLILPLLTAHAPGLLALYGVGPDTAALLLIAAGDHPERLRSEAAWAHLCAAAPIPASSGKTVRHRLNPGGDRQANHALWRIVITRMSSHPPTRAYVERRSKEGLSKTEIIRCLKRYVAREVYPHLRPPAG

SEQ ID NO: 181131 - protein, 414 aa, unidentified
MEVIHPRCAGLDVSKRDAKVCVRIASPGRVKAKSTVTTWGSVTNQVLALRDHLVAEEVTLVVMEATGDYWKPFYYLLEDGPFELMLVNARHAKNLPGRKTDVSDAAWLAQLGAHGLVRGSFVPPEPIRQLRDLTRTRTTIVRERGREIQRMEKLLEDAGIKLSSVASDINGVSGRAMLEALIDGQRDPAVLANLAKRRLRIKIPELTEALTGRFGEHHAFLARLHLDLIDGHTQAIEELTARIEVVIAPFCRVRELLVTIPGISAIAADVIIAETGGDMSRFPTAGHLASWAGTCPGSNESAGRVKSTHTRSGNPYLKGALGTAALSASRSKDTYLAAKYRRIASRRGPIKAVVALEHAMLIAIWNMLTNTNDYCDPGADFYTRLNPDKAKNRAVDQLRKMGYDVTLEPLAAAG

SEQ ID NO: 181132 - protein, 360 aa, unidentified
MLPVGGSVRIADTQERSPKMKKTLYGGIDLHSNNAMYVITDEQDRPLFQKRLPNELPTVLAALAPYRPRLKTVAIESTYNWYWLVDNLEDNGYPVALANPAKMEQYNGIKEANDLTDAAFLAHLARLNILPTGYIYPAADRPVRDLLRRRMLLVRYRTGLKQSLQNKVMRQTGQAVGWRGVRELDAEGRAELLADSDCLPFVATHQVELIESLNEKIGLFEAKVLARVQLRPTYAWLLTLPGVGVILALTIMLETGDIGRFETAGDFTSYCRCVRARHTSNGKKKGSNNSRNGNAYLSWAFVEAVHHALRCCPAAKRFYDRKVAKRNGALATKALAAKWSKAAYYVMKRQEAFDLTRVFG

SEQ ID NO: 181133 - protein, 368 aa, unidentified
MSKNITFVGLDVHKDSISVALADEGRDEDVRYYGKIDGDLESLHKTVRKLVSTGATLHFVYEAGPCGYEIYRSLTKQGFECVVVAPSLIPKKSGDRIKNDRRDAISLARLHRAGELKAVYVPTEEDEAMRDLTRAREDTVKALRVSRQVLLAFLLRHGYRYSGQSHWSNAHMNWIADIKMPHRAQQVALQEYVHSVKENSERVDRLTKQIQELLLLWKHAPMVKALQSLRGVSLIVAVTTISEVGDLTRFDSPKQFMAYLGLVPSQHSSGSTTKLGSITKTGNGHVRKVLTEAAQAYSHPARESRILLGRLEGLPQEIKSIAWKAQVRLCARFKRLQARGKNRNSVVTATARELAGFMWAIACAMLPS

SEQ ID NO: 181134 - protein, 347 aa, unidentified
MKFYNKQHKYYCGIDLHARSMYVCILDSNGLVKCHKNVKTSPDALMKAIKPYLDGLVIAVECMFSWYWVADFCEDHNITFILGHALYMKAIHGGKAKNDKIDSHKIASLIRGGTFPMAFVYPRDMRSTRDLLRRRMHLMRKRAELLCHIHNTNTQYNYDRLVKNLRYKNNRKLVHGRFADPSAQKNVDLDIQLINFYDEQLSGVEWYIKKHAKINNYQSYMLLKSVHGIGKIISLVILYEIYDINRFPRVQDFASYARLVKCKAQSAGKTYGTSGAKIGNAHLKWAFSEAAVIFLRGNPRAKAYVERLTKKHNKGKALSILAHKLGRAVYFMLKRKQPFNMDQFLPA

SEQ ID NO: 181135 - protein, 417 aa, unidentified
MQSARNTLPEEPAGSVTCGIDWARDDHAVSVVDARGREIRRCSVEHSAAGLRELLAMLARAGAREAAIERPDGPVVDALIEAGITVVVISPNQVKNLRGRYGSAGNKDDRFDAYVLADTLRTDRARLAPLTPDSPATISLRRACRARKELVGHRVALANQLRAHLRNAFPGAVGLFAEIDSPISLKFLARFGSQDRASWLSPRRLAAWLASVGYCGRIDPAVLHARLAAAPRGATGDDGAAQAAITLALHAVLITLTQQIKALSEQISEQLALHADAHIFTALPRSGTVRAARLLAEIGDCRARFPTPQSLACLAGAAPSTRQSGKTRSVSFRWACDKQLRDAVTDFAGDSRRASPWAAGLYNQARARGHDHPHAVRILARAWLFVIWHCWQDHTAYDPARHRALQRLLQQDQQHAA

SEQ ID NO: 181136 - protein, 362 aa, unidentified
MKSTTVAVDLAKSVFQLAVADASWKVVETHRLTRSQFERWFHNRDVSLVVMESCGSAHHWARHLSGLGIEVKRLPAKYVRAYVKRNKTDAADAAALLEALRASDIAPVRIKSVEQQALQGLHRTRSLWMATRTSRINALRGFCREFGLVIPQGSRTGVEAMARALADPRSAIPELIRGSMKLLIAEIRLLEQRIAQLEQELSAQVKHSPACQELLSVPGIGLLTATAMVAATSGEVGHYRDARHFASWFGLTPKEYSSGSTRRLGRISKRGDRYLRMLLTHGARAVLRSALMARQAGHQVDGLKEWALRVQGRTNHNKAACALANKIARICYAVLKHHEPYGSQTRREENKKTNRTAYAVAG

SEQ ID NO: 181137 - protein, 343 aa, unidentified
MKYIGLDAHPATFTLAVVDEEGKVINHVKRSTSGKNLIEVVSQVTGPKQLAVEESTLAQWISITLEPYVADLTICDPRQNRWIAEADYADDKTSAVKLAQLLRGGYLKAIRHPDRKMAELRRMFRHYYDLNHQLTRFKNKVKAFFRQAGVHPSGNSVYRNDEREHWLSHLKDWRGLLHRTSDCLTVVDLLEEMKSGIRNKMSQVARNADRSSYRILRGVPGVGPVVATGYMAIIVTPERFSRKNKLWSYAGFGNTQHESGETVSTEGTSNEGNKVLKWVVTQHYQAAIRTSWDGSPCRFARKSSQLQQKGLDQQARRRSICRTLLSVIRGVWRKGEPYRERQR

SEQ ID NO: 181138 - protein, 455 aa, unidentified
MPRRAAAPGTKPRKNTRIFKRIFEDTAGIDAGSSEHWVAVPDDRDEQPVRRFGTTTRELNDLARWLLSCRVRRVAVEATGVYCQPLLAVLEKHGIETRLVKSSSLKAVNEYQKSDMLDCQWIQVLETFGLLRAAFRPSPEISRIRVLSRERRDLIEQATQNINKMNKALTAMNVRLDLAVSDITGQTGLRIINAILQGQRDPNKLAELRDDRCQKSVAQIADALNGEYDDAHLFVLQNALDLFNSCRTLIARCDARIEQSVQSLEPKASPADVPAPRRKEHVRKNVFAFEAREAFFSVLGTDLTQIDGISTSTVCTFIAEVGTNVDAWSTEKHFCSWLRLSPGSNKTGGKQRSSRNAPTANRLTTALHVAAQTLTRSNSALGAFYRRMRSRMGPDKAIKAAAHHLARQIYFCVKYRRQYVDPGPQYYQVKNRDRAIAALSKRARALGLTLVESPA

SEQ ID NO: 181139 - protein, 389 aa, unidentified
MDVITEKCCGIDVHQKQITLTTLIGRADQKPRKNSRRYGTTSPELRQCANWLLEKEVEVVLMESTGQYWRPVWQILEPYGFKMVLCNPRIIKNIPGKKTDQKDSEWIAELARLGLVAASFIPPRPIQELRESTRTRKSLTETATSIKNKIHNILQRSNIKLTTYVTDIFGSSGQKLLVLLIQGKPINLQTVSKCMHAKLKAKPEMIVAALDGSLSPSDRQILKIELALLADVQQAIHALELLIEEQLQPLEELYLRLQTIPGISKHIAQIVIAEVGTDVSPFPTAHHLASWAGLCPGNYESAGQSKSSHILHGNVYLKTALVTAALGAKRQTCSGLKDFFYRLKGHMSAQKAVVALAHKLLRITYAMIETGSSYQEYRKDQRAKALVGQ

SEQ ID NO: 181140 - protein, 414 aa, unidentified
MGGFPVFSLLLFQGGVALSALYIGIDVSKDFSAAQAIDGKGNKCFYLELAMTADGFDKLLKAIKAHGKDISQVTVAMESTGCYHINLFSFLTHKGIRCIIVNPLLTANFARLSLRKTKTDKKDAFTIAQFLLVHKDSLLKTDLSPDRQDLKDLAREHESLTNLIAGMKNDIRRMLQITFPELESVCNIFSETILDLLRQFPSARLIKIAKPNTIAKALLHEDKRKKISVSAEDIIKAAKASVASHGAAKEIILPEKISTLQYLIEKKVRMKKALVEACEGMMVEDIEIITSIGGISNITASRLLAEIGDYRTFSTYKHLIAFAGLDPSVHQSGKFEGISRISKRGNRHLRYIIYLMTTCVVRGDNIFRTYYQKRRAEGQPFKKAIMATAHKLIRVLFTMLSKRTTYQSKEVNAI

SEQ ID NO: 181141 - protein, 416 aa, unidentified
MRVNEKIKRITQDTLICGIDIGKTKCCARFCDYRGMEVYHKVWFDRTENLDAIGCQITAAMYKENKTDVMISFEPTGHYWLNIDKYFKDCGQETVLMPTYTVKQSKEQYDQNPTKSDPKDALLIARLTSEGKYVKPIERDDIYQDIYSGYQIYDDIQKEINRVKNKIHVWNDKYFPELEHVYKIDSVSIKPIYKKQLIPSEINNMELEAFIEIMTENNHYAKKENIKKLKELCKKSNAINIDNFSKYEIKRLYERYEELVKDLEEIKSKLIELASQIDYVEKLVEISGVNYISIVGIIAETGDLRNYDHAKQVIKMSGLSLKESSSGQKKGKKHISKRGRSKLRRNLKQIGIALVKNNNFFLQLHTYYTTERDNKLSKLISINAIIRKFTYIMMSIVKTGESFSVDKAIKESCIFN

SEQ ID NO: 181142 - protein, 313 aa, unidentified
MSKRYAGVDLSKEWFDVAVVPDGLSWNLPHTEKGLREFVKRMKDLQVALVVVEACGHLERPLSRTLQEAGIPVSVVNPRQLRDFAKSLGRLAKTDKLDAGVLARYAQAMTPEPRPLPDEDDEELQSLLARRRQLVEMITAEKNRLRRALPQLRHRIEEHIRWLEEQVKELEKEIRRLQKSKPAWKELMTLLESAPSVGPVLSATLTAYLPELGQLDRRKISALVGLAPFNCDSGKREGTRAIWGGRAHVRAALYMSVISAVRYNPVIRSFYQRLRSQGKRPKVALVACMRKLLTMLNAMVRDWTPWQPQPASP

SEQ ID NO: 181143 - protein, 332 aa, unidentified
MENFYFIGVDVSKKKLDFCVMFEGKVVHEEATANHQTAIMSLLRHLEEDYGITSDRMLVCAEHTGQYTFPLACACKSVECKLWLENAAEIKYSSGVQRGKNDKVDARRIAIYAGRFQDKVRYYERSTEDIERLKQLESERTLYVTDLAKYKGQMKDQKDYMPKALYERKMKRLQALMDDLEEAIQAITDEMDEVIASCPVLFRQRELLMSIDGVGRVVATNMIIATEAFTRFDDPRKFNCYAGVAPFSYSSGSSLHSKARVSHRADKVMKRLLHLAAVAVTHRIGGELKKYYERKVAEGKNKMSVINALRAKIVARMFAVIKRNEKYKPILS

SEQ ID NO: 181144 - protein, 354 aa, unidentified
MRTVRKNEGMSLIGKRVYVGIDVHKESWQVTARAEGEEIFNGRIPGQYLSLKRLLDRYQGSPMKVAYEAGPFGFWLSDKLVEDNIEVMVVPPSLIPIESGNRVKTDKRDSRKLAKLLESNMLKQVYVLTPEERQHRDLLRTRRQIVDHRKDVARQIKSKLLFYGIVSPFSATPYWSLKYIEWLKALRFDTDYLKESFHLLIDLYEYLTRQIARINRKVALLCRDKKYRERIRLLCTAPGIGRLTAIEILVELQDISRFESAEEIASYIGLTPSEYSTGEKTRQGKITRCGNARVRTYLVESTWILIKKDLALRAKYLKIKNARGGKRATIAIARKFIIIIRRMLLDNVPYRMAA

SEQ ID NO: 181145 - protein, 402 aa, unidentified
MNAVGIDVSKGKSMVAIMRPFGEIVSAPFEIKHTASDINSLVELINSVEGESRIVMEHTGRYYEALAHQLSEANLFVSAINPKLIKDFDNDSLRKVKSDKADAVKIARYALDKWQNLKQYNVMDELRNQLKTMNRQFGFYMKHKTAMKNNLIGILDQTYPGVNTYFDSPARSDGSQKWVDFASTYWHVDCVRKMSLNAFIDHYQNWCKRKKYNFSQSKAEEIYGKAKELVPVLPKDDITKLIIKQAVDQLNSASITVESLRTLMNETASKLPEYPVVMAMKGVGTSLGPQLMAEIGDVSRFTHKGAITAFAGVDPGVNESGSYEQKSVPTSKRGSSDLRKTLFQVMDVLIKTHPQDDPVYQFLDKKRAQKKPYYVYMTAGANKFLRIYYGRVKEYLASLPES

SEQ ID NO: 181146 - protein, 341 aa, unidentified
MDKVSIIGIDLAKRVFQAHGAAADGSVVFRKKLSRAQFLAFLAVQPPCSVAMEACATAHGWGREIGKLGHEVRLIPPIYVKPFVKRQKNDAADAEAIAEAASRPTMRFVAVKSEEQQARSMIFRTRDLLVRQRTQLINALRGHLAEHGVVAPQGSVHVKRLADVIGDETVALPATVRQIGWLYLEQIDVLGERIDALGKKLRAEAGQAEPTRRLQTMPGVGPITAVAIESFAPPMETFRRGRDFAAWLGLVPRQNSTGGKQRLGRTAKMGQRDIRRLLIIGAMAGVRAATRHGVPEGSWLERMLAKKPKMLVAIALANKMARGIWAMMTKQEDYRNPAAAA

SEQ ID NO: 181147 - protein, 351 aa, unidentified
MQPLKERGPEMNATTYGLDIAKRVCQMYWVDGQTGEIANRRLRRDEVISFLARRSPGRVALEACGSAHWWARKIKALGHEVVLLHARFIRPFVQTNKTDAADARAIWTAVHQPGMRTVAAKTEDQQAMLSLHRMRSLLVKFRTMQVNQMRSMLYEFGATFRSGRAAGLAEIRERMAKLEAELPETILLNLLEQLRRIEGFERDIDQLEKRIGAWQRQDAACRAIAEVPGIGRLTATALVATMGDATAFKSGREFASFIGLVPRQNGTGGKVRLGSISKRGDAYLRTLLIHGARSVLFHSKAAPTAWQKGIQERRPANVATVALANKMARTAWAILAHGERYRRGPIEVAAV

SEQ ID NO: 181148 - protein, 354 aa, unidentified
MTSSVRHVIGGVDTHGATHHAAALDAGTGKLLGDQQFPVTPAGYRQLAAWLRGFGQVEQVGMEGTGSYGAGLFRYLDAEGVTVIEVDRPNRRDRRRQGKSDPIDAIAAARAVLAGVATAIPKRRTGPVEAIRILRTTRAGVVKARVAALNQISGLIFCAPEDLHATLTGLSRADLITRCARLRVDDTAIADPATAAKFALRALARRVQNFDLEIDDADRQLHILTRATAPATSAIFGAGSDVTAQILATVGDNPDRITSEAALARLCGAAPVPASSGNTTRHRLHRGGDRQANRALWVIVLSRLRWHEPTRAYVARRTAEGKTKKEIIRCLKRAIVREVYIAIKTDFPDLTAIA

SEQ ID NO: 181149 - protein, 392 aa, unidentified
MKISIGIDAAKQTHWACAVDEAGRVVLDRAVENDPQAIEGFVAALRGLGGDPAIGIDVVGSFARFLEAVLLAEGYALVHTPGIAVNRAGQGFAGGERKSDPRDARTIAELVRTRELRPIAPNNETVVAIRLKVGRRRELVTEQTRRLARLRDLLCGIHPGLERVLDVTTKGPLALLSRFVTPAEIRRAGKARLIAQLRKTPQVRNVEALAEQALEAAQAQRIAVVGEAATADLIRELAAEALQARERVVRIDRDLEGLLTSHPDGALIRSLPGMGAVLAAEFIACVGDIGRFPSADALASAAGLAPVLRQSGRRAASRRAFGGDKALKRVFFQSAFCAVMTRDPLSRAFYDRKRREGKHRTQALIALARRRVNVLWTMLHSRQNFDPTRKAA

SEQ ID NO: 181150 - protein, 319 aa, unidentified
MDGSITHFAGIDVSKKSLDLCLLPEDRRQTFTHDKAGIQQLLAALPVGGTCLIAVEATGGYHRNLVAELVNATHQVAVVNPRQVRDFARGLGILAKTDRLDAHVIACFAQHVRPRVAAPLSPAQAELEQLVTRRRQLVDLRTAELNRMQTVSSKSVRKSVQQMVDMLRKEIRRVEHDILTLLQSDDDWKAKMDRLESVPGVGPVSVASLLAELPELGQLNRQEIAALVGVAPFNRDSGRFRGKRAIWGGRASVRSVLYMAALTARRHNPILRAFANRLEAAGKPFKVVITACMRKLLIILNTMLKERTQWQPEKSLANA

SEQ ID NO: 181151 - protein, 326 aa, unidentified
MATIGIDVSKKKLDLCWLRDAQAGKVKTRVFPNAHDHYPALLSWLLKQIDASPGELQVYLEATGIYHEPLAYWLHQSGVTVYVLNPARVRYYARSLGDQGKSDKKDSKRIAYFAQANPELTPWQPEPEEVRTLRQLAKRLETVQKDIHREQNRLEKAQFNRDTQAEHSITHVLALLRREAKRLVKEVDDHIDRHDGLKRDRRLLESIPGIGEVLSVHLLVALRSRRFKSGRQVAAFMGLVPVEWTSGSSVRHAPRLSKNGDPALRQKLYMGAVVAMQHNPSIRRQYQRLCAAGKRKMSALGAAMRELVHIAYGVLAHQKEYEPQPM

SEQ ID NO: 181152 - protein, 464 aa, unidentified
MPNYGEIMVKNTKKAMNVNKNTNKFSQVNPLVGGLDIGANSIYACVGLSDGSQRVREFSTFTSDLKKMAAWFKKHKNSTVAMESTGVYWIASYDILAQSGIKPVLVNAHHLKSVPGRKTDVKDCQWIQQLHSYGLLRGSFRPDDDGVKFRTLVRQRSRLLESSSVQVQLMHKALAQMNIQMRQVISSITGVTGLNIIRSIISGETNSVELAKLRDARCKKSEGEIALALEGNFRPELIFSLKQAVDGYDFFQKQVCECEDKIKEILECWNNEQETISRNAENKERLNTKKTYNKSTYQFDAGDKLKKFTGVDLTEVPGIDDSTAIKIISEIGFDMKYWPSAKHFASWLGLCPGNKISGGKVLCSKTKPTANKAAQALRMAANALYASKTALGAFFRRMRARLGTPKAITATAHKLAIIIYNMLACKRPFHEAGQEEYERRYRARSIANLKRRAKNMGFELVEIE

SEQ ID NO: 181153 - protein, 367 aa, unidentified
MKKVSTAATKQSRNISQQRLTIGLDLGDRNSCYCVLDEAGRIQLEQRVRTTAKALQEVFGAMPRSRVALEIGTHSPWISRLLSKLGHEVIVANARKVRLIGENRKKDDRLDAQTLARLARIDPQLLCPVKHRSAQAQADVMMIRARASLVRVRTGLVNAARGLAKSYGERLLGCNVRNLNAEKAEGLSPELQRALEPLLSAIEEVSERICEYNDRIEALAQTSYPQVELLKQIKGVGTLIALTFLLTLEDPHRFGKSRDVGCYLGLQPGRRQSGKSDPQMHITKEGDPYLRTLLVQAAQHILGPFGIDCDLRRWGLKLAERGGRNGKKRAIVATARKLAVLLHHLWVSGEVYEPLHHRSPMTSAAAA

SEQ ID NO: 181154 - protein, 377 aa, unidentified
MSKIRFVGLDVHADTITVAIADPGKEVSLYGRIPNQLDSVRRMVKKLGAGFELRACYEAGPTGYVLFWQLSLLGVKCEVIAPSLVPTKAGDKVKTDRRDAVKLAKHYRDGELTPVWVPDAAHEALRDLVRTREDARADQQRARQRLGKFLLRHGKRPEVPMANWSAKHLEWVKRKVHFDQPALEATLQDYVREVEHAGERITHLEKSIIEAVQNSAPVIRAVVEALQALRGVALITAVSIVAELGMLSRFESPRQLMGYSGLVPSEHSSGNRIKRGAITKTGNAHLRRVIVEAAWAYQFRPWVSGYLAKRQKGLDAEIIEIGWKAQHRLHSRYKKLLASGKNKPQIVTAVGREMLGFIWAIAVKTEAKYQVQQKAAA

SEQ ID NO: 181155 - protein, 411 aa, unidentified
MELFHPKCAGLDVHKDSVVACARSTTQGTIEREVKTFETTTRGLLALQQWLSSQGCTHVAMEATGVYWKPVWHMLEGDFELVLANAAQVRNVPGRKSDINDATWLADLLAHGLIRASFVPPAPIQQMRDLTRTRKQLVREISQHTLRIHKTLEDANLKVASVITDMLGMTGRAILAALVAGQSDPEHLAGLAQGRLKAKHEQLVEALHGRVTDHHRFLLKLHLGLIDELDKAVDQLEARMTQVLAPMVRSAQVLSTIPGVSTTAARVIIAEIGTDMSRFPSAGHLLSWAGLCPRMDESAGKRRSTRVRKGAPWLKTTLVQCAWSAARSHGTYLRAQFLRLKSRRGPKKAVLAVAASILTAAYHMLRQDVLYKDLGPDYFERNDKERLAKRLLRRLENLGVRVVPVPTAQEA

SEQ ID NO: 181156 - protein, 431 aa, unidentified
MNYNQNKKIAQITSQTLIIGVDIAKFKHVARAQDFRGMEFGSPCQFENTKEGFEHFLKWISEIKKEQRMSKVMVGMEPTGHYWFNLAHILKENGIKFVAVNPLHVKKSKELDDNSPTKNDVKDAKVIAQLVKDGRYAEPTIPQGVYAELRVAKKIRDLLTEDLQTVQGQVHNWIDRYFPEFLKVFKKWEGKAALQFLKLYALPHEIAVFTEEELLVHLRKSVSRSVGLNKIRELKQAASQSIGLRQGAEMARLELKTILAKYELIQLQFEELDAKIDGQLDEIPGVQQMLAIKGVGRDTIAGFFAEVGDLGEYNHPRQIIKLAGLSLKENTSGKHKGKTTITKRGLKKLRALLFRVCMILVAKNSAFKALHAYYTQRPDNPLKKMQSLIALCNKLIRIFFSIGKKQFDFNEEKMLKDIPHLAVTKKKEMAA

SEQ ID NO: 181157 - protein, 334 aa, unidentified
MEKDHYIGVDISKKTIDVAIYVKNQAKKGTFPHETFLNTAEGFKDMKRWLRKQGVVLSKSLFCMEATGNYTYELCLFLEQIGVAYSIQSPLHLKRSFGLTHGKNDKVDASRIAYYAYLHREDIKLSKLASGSVRKLKSLIAERKSLVVEIARCKAQLKETGENAPSPGTIKRTEALQLFLENQVESIEEEMAQTIETDEQMRTNYNLLLSVDGIGIVNAINTIIATHNFEMFDNARQYASYIGVAPFEHTSGTSVRGRTHVEPGAKMLKADLTGAVRSCINHDKEIRRYYDRKIAEGKAYGVVANAIKFKLLLRMFAVIKRGTPFVRKPDFIYQ

SEQ ID NO: 181158 - protein, 352 aa, unidentified
MRTIITIGLDLAKKVFQVHGVDAEGKVVVARKLRRKEVLSFFAKLPPCLVGMEACGSAHYWAREITKLGHTVKLMPPKYVKAYVKRGKTDAIDAAAICEAVTRPSMSFVPVKGPEQQGLSMVHSARSQLIGQRTQLINSVRGHLSEFGIVAERGLLGLTELVAIVRDETDQRLPMTARVALMILVRQIEMISTEIAALDSILRKENKASELGPRLETIPSVGPVIASAFRARVTDAKLFKNGRHLSAWIGIVPENDSTGGKVKQKGLSKKGDRYLRSLLVNGAMAVVRQAQRRPDKHPWVAKLLGRMSAKQAAVAIANKTARIAWAIMVHGGVYEAGHRAPQYRAQARVATG

SEQ ID NO: 181159 - protein, 351 aa, unidentified
MDKFAGLDGHTSSCTLGVVNPKGKHLSCQVIETNGEALVNVITGIPGKVHLCIEEGSQSSWLAEILSPHVAELVVVGLGQRRSKGQKNDQRDAFALADMLRNNDLESVVYKQVGPYGTLRQLVKVHTQIVRDVVRVKNRLRAIYRSRGVRSDKTIYHPNHRAAWLEQVPKSSRAAAGQQVGPYGTLRQLAAFFFFFFFFFFFFFSISRLLETCPGFGPIRVAQVVATVVSPSRFRKRQQFWSYCGLGILMRSSADWRQLPDGSWQRVMVNTTRGLNHNHNHMLKAVFKGAATTVISLSPADEPLRQVYLRQTAAGTKPTMAKLTLARKLAALLLSMWKHQEVYDAKRIEVG

SEQ ID NO: 181160 - protein, 444 aa, unidentified
MHFNKLLQMLDGSSYLSVGLDVGADFTWMSIALPNGSFPWKPFKIIHHDPYSRELAVAKIKEAQELYSLKSRCFLESTGIYHIPLLCFLRDKGLDCSVINPIITKNSTNINIRKLHNDKFDSKKAALVGLNASLKTSIIPDEDIADLRNLVRDYYYFKDLQSSVVLKLNAELKVSFPAYLKVFSKVTTQSSLKLLGAYPLSRDMLAAPGEELVGIIRSTARFGETYALSRYEAILEAAKDAAIFGRALPSHAVRIRLYIESYQTYQKHLDTLLLALHEAVDRLHGTPVYDRICLLQSLRGVGFLSAVVLMAEMGDFDLFSSPKKLYAYFGLDPAVKQSGKLNGDKVHMSKRGSSLARRVLHMVALNNLKVDKGTKTPVNPVIYNYYTGKCANKKKNVAVGAVMHKICNIIFAMLRDNKPFEIIPPEVHCKQYVLNHTASVTNAA

SEQ ID NO: 181161 - protein, 450 aa, unidentified
MIQKQNNKEHPSLQLGLIYPAAAGIDVGSMNMMVSYPGAAGIQTVQEYGAFTDDLRTLAEDLQKAGVTHVCMEATGVYWMAVYEVLEQCGFKVTLVNARHYKNVDGQKTDVKDCQWLQQLHAHGLLRTSHIAEEQYRELRTYVHERGILQKNKSDTLNRIHKVLTQMNIKVQHIISDIEGVTGMQIIERIACGITEPQAILEGLAIGRFKASKEQLEQSLKGIFKSHYTTVLKNHLISYHFYKKQMLQYEQEIESLLKKLLPKDQQQTAISNKTTRARKNQYHFNLKEYLHKIAGVDLTEIDGLDENTVLTIISVVGLNMHKWPTSDHFASWLNLSARPKKSGGKIIGYQKRFTNNPATQAFRMAAQTMWQQKGVLGHLYRRLAHTKGSKKAIKAVARRLAVIFYNMVKKQTMYDPKIVALDEEKLKQRKIARLQKEAEKLGCTIKLPAA

SEQ ID NO: 181162 - protein, 376 aa, unidentified
MGDYSEAFVGLDTSKLRNAVAIADSGRGGEVRFFGEIENTPAATAKLVRKLALKYKRLTFCYEAGPTGYGLHRQIKDLGFECVVVAPSLIPKRPGDKVKTNRRDALSLAKLLRADELTPVWVPDGRHEAMRDLTRARETAMLDLRTKRQHVSAFLLRLARHYPESKNTWTKAHVSWIASQKLEHPQQRLVLEEMMLAIRQAQERLARLEQAIAAAVPEWSLAPVVTALMAMRGIDLVSATTLLAEIGDLSRFRTPTELMAYLGLVPSENSTGDTVKRGPITKAGNRRARRMLVECSWSYQHPPRVGQAKQPKVDAAPPAVREIAWKAQCRLYRRYRTLIRNGKLKTVAIVAIARELAGFIWAVARAVTTAGVAATA

SEQ ID NO: 181163 - protein, 344 aa, unidentified
MKYFTGIDVSLRSVSICVVDEAGVVQYENKVAAEVEVIVAALRRCSAEIRQVGLEAGTLTQYLTYGLQKAGYEVICLEARQTAATLAAMRNKTDRNDARGLAQILRTGWYRTVHVKSLESHQERALLASRKAILAKCVDLENELRGLLKIFGVRLASHVAHRRFDETVRAAVSTTPELSMSLLPLLDARAVLYKTYLKLDNAVKSVVRHDPVCRRLMTAPGVGPITSLTFKAGVDDVNRFRSSRTVAAHFGLTPRRYQSGETDNPGRISKAGDVEVRQALYTAAHILMTRSGAWSTLKVWGLRLAKVRGHRRAVVAVARKLAVILHRMWVDGTDFRAARPLGAA

SEQ ID NO: 181164 - protein, 377 aa, unidentified
MSESLIFIGMDVHQDTITLAVFEGASKEAAVVQKLPNDLRKLRRFFDRWAKRGEIRTCYEASGAGYVLYHELTEWGHACEIIAPSLTPIRPGEQRKHDRHDAIQLARLYRAGELVPIRIPSPSEERVRDLVRCRQTFQREILRSRHYILKFLSRRGFVFRHGRRWGPKHRAWLERLLHQEQLALQDRAVFSEYLALMDYKVSRRDDLDRQIEEVAFSELYRPQVQKLACFRGISTLSAMTLITEIGDWRRFERPGQIMAYLGLVPSEHSSGARNHKGSITKAGNSRCRHVLVQAAWHYRHRPAVGVELKKRQRGQPPGVIAHGWKAQHRLYKTFHRIAHRKSSHIAVVAVARELVGFLWAVMRDHEIEQATALHAAA

SEQ ID NO: 181165 - protein, 358 aa, unidentified
MQRNKKTFKGQNIYIGIDVHKKNWQVAVITESGYTERLSTAADAKALFKFLKSHYPDGNYRAVYESGFSGFATHYALSELGVSCVVAHAADIPSSQYELTMKSDRIDAEKLARALRAGLVRGIYVRPKDNLDDRGVLRIRKTIQIQVGGYKTRIKHLLHSNGVELPERFSRSGTHWSRAFIAWLREDVRLLSDTRRSLDLLLLQVETLRANLLEATRRVRALSMTDRYREGCALLMGVPGIGLTVAMTILTEVCDIGRFGNERQFASYLGLVPTSHSSGERGSHGEMTFRGNKHIGPLLVEASWVLIVRDRELGRMYTEYRWRMAGQKAIIKIARKLSNIIFAVLKTRKAYEPYRRDA

SEQ ID NO: 181166 - protein, 318 aa, unidentified
MNTNTLQNINVGVDTGKSQLDIYVRPLDIYFTVPNTDKGISDAIKIIKKHKPQRVVIEATGRLEMPFILACDKAKLPYVVANPLRIKRFAEAIGQRAKNDRLDAELIAHYAERVQPELTKLKSENIRLMSDLVTRRNQLLTIQTMERNRLQILPKNISSTITPILTALKNQLEKVEAKIEKLIESCPEYQAKNTILQSMPGVGKILAASLISNVPELGFITNKQASSLIGVAPITRESGRFKGKRMIKGGRPQVRTVMYMAMMSAIQCNPVFKATYERLLAAGKPKKVAIVACMRKMVVTLNSMLRDGAMWDKDSVKN

SEQ ID NO: 181167 - protein, 389 aa, unidentified
MYFVGIDVSKYKHDCFIFNDSGEVIANDLVISNSYEGFSVLLSTLKSLDSSQEIRIGFEATGHYTSNLKRFLENAHYSFMESNPALISKFIHSQTLRKTKNDSIDSRSIAHWLTTVDYKPYPKGFYHTYSLKSLTRLRDTIVRQRSLYMVKLTNVLDHIFPEFKPFFKDKFSQTALYLLEKYHTPDKMARMNAASYDVIRCISRGKFSMQRFLALKELSTNTVGDSNEIFEMQLVSILNLYQLADTEVQRLESEIKVLITELNPRTLTIPGIGPISAAIIISEYGNIQNFSSPAQMLSFAGLEPGYFQSGTMEFKGKMVKRGSSQLRYALMNCAMPLIMYNMVFAEYYHKKRVEGKPHRVALNHVAKKLIRVIYTLETTDVSFDVSKLR

SEQ ID NO: 181168 - protein, 394 aa, unidentified
MRSVGLDLGARHISFCEVRDGKVIDRTTVRNLSQLASRIGPNCPPARVAFEACREGWHVHDKLTEWGHDPRMLDTTRIRSIGVGQHKRKNDAIDAETIALALESGRIAEAHVLSPARRVLRAQLSVRGALVETRAQYVTTIRGLARAAGVLLPTCETENFTKRLASATLDEATRRLVEPLAQTLVTIETQLAHVEQLLSGIAERDPIIKLLATAPGVGLIVAATFVSVLDEAKRFRNAHAVGAYLGLVPGESTTGGPSKRRLGAITKQGNRVARAMLIQAAWCILRMRDVDDPLRQWAEHIRKTRGTKIAVVALARKLAGVLWAMWRDGTVYDRASQAQAHAQGVRKVSIKQAHRADALEHAAKKLRRSPPVMNPNSAARSRTRRSKTQEVHAM

SEQ ID NO: 181169 - protein, 402 aa, unidentified
MPFFVGIDWASQTHAVCVIDEAARIQWHGTVPHTAEGLPELLGRLRRFQTRGPLRVALERPSGLLVDTLVDAGLEVVPIHPNALKASRPRYSAAGGKTDPGDAFILADLLRTDGHRFRPLHAPSDETRALRTLVRGRDDLVAQRVGLANQLRALLDRFWPGAAVIFADVDSPIALAFLTRYPTPHSAARLGEKRLAQFLGQHAYCGRRSVADLLARLRTAPPSQVGEAEAEASGDAVRALVAVLTPLVAHIQQLGAAIAATLAQHPDGPLLQSLPRSGAVNAAQILAELGDDRARFPTDASLAAEGGLAPVTHASGKHHAVVFRWACNKRLRQALTTFADNSRHASPWAALVYQRARGRGCRHPHAVRILARAWVRVLWRCWQDRTPYDVTRHRAAQTLAAA

SEQ ID NO: 181170 - protein, 412 aa, unidentified
MEVLYPHCAGLDVHKDTVVACVRHMATGSVEREVRTFKTTTKDLLALSDWLAEHGCTHVAMEATGVYWKPVWHILSDGDFVLVLANAAHVKNVPGRKTDVNDATWLADLLAHGLIRGSFVPDEQTQEMRNLLRTRKQLVRECSRHIQRLQKTLEDANIKLDSVISDIMGLSGRAMIEALIAGESDPERLAQLAHRRIKAPPEALCEALRGRVTRHHRFLLRLHLKQIDAVNVAIDDIDQEVDAQIEPFRTAIQLLITIPGVSELSACVILAEIGHDMNRFPTAAHLISWAGLCPKNDESAGKRRSTRMRKGAPWLKTTLVQCARAAARKKASYFQAQYHRLRARRGDKKAIGAVAASILTTAYHLLKYGTLYEDLGPDYFDKRGKGKHVHRLINRLQNLGFAVQITPVEAAA

SEQ ID NO: 181171 - protein, 342 aa, unidentified
MQITTIGLDIAKNVFQVHGIDAAEKVVVRKRLRRSQVLAFFKALPPCLVGMEACATAHYWARELTKLGHSVRLMPAKDVKAYVKRNKNDAADAEAICEAVRRPTMRFVQIKSPEQQSRLMQHRARDLLMRQRTQVINALRAHLAELGITAAQGNAGLKELLAIIAGDEDERLPADAHAILIVLAAELQAMQTLIGSIEKRIMAQHRVCEESQRVETIPGIGVVGATAITATVTDPKVFRSGRDFAAWIGLVPRQDSTGGKQKLGPISKQGDRYLRRILVVGAIAVLQRARQQPEKYPWLTQLLARKPFKVVAVALANKMARIAWALLAKGGTYRAPKLVAAV

SEQ ID NO: 181172 - protein, 350 aa, unidentified
MLIIGCDYHPSFQQIAFVDTATGEYGERRLEHMEGAGQFYRDLRARGIEARIGMEASGYTRWFEQLMAELSFELWIGDAAAISRKRVRKQKTDKQDAELLLRLLIEDRFPRIWVPSREDRDLRQLLWHRHRLVQMQTRLRNQLHAVALNEGVRLKKRLWRPKGRVQLESLALMPWANRRRHDLLELLDQVDATIAELTSAIEQEAEIRPEVVRLMTHPGVGALTALAFVLILGTPERFARSKEVSSYLGLVPTEESSGERRHLGHISKQGNTLLRFLLVAAAQITVRSDPDWRRCYLHLAMRRERAIAKIAMGRKLAVRLYWMWRNGWDYTQLPKLGSYAGQPGDRLGRQ

SEQ ID NO: 181173 - protein, 338 aa, unidentified
MTVVTVGIDLAKNVFAVHGVNAAGKAILVKPLVRRAKLLELIATLPACLIGMEACSGAHYWAREFQKMGHTVRIMAPQLVSPYRMGGRHGKNDAADAAAICEAVARPNMRFVPVKSIEQQGHLFVHRAHQGYVSERTALINRIRGLLSELGIVLPQAFKAFLSGVAQVLEDLPGYCNQVIGDLLNELFHIEEKIKNSEKLIQQLARDNSAAQLLMQFRGVGPMTATAIVASIGNGHDFRNGRQFSAWLGLTPRQQSSGGKARLGRITKAGDSYLRTLLVLGAKSVLLGAAKNDDPVSKWALQLKERRGYGRALVAIAAKNARMCWAMLHLKDEFRFPV

SEQ ID NO: 181174 - protein, 324 aa, unidentified
MTRRCFGLDVHREFAQVAIWQDGVVRHAGQIVATPEGLRLFADSLAPSDEVAIEATCNTHAIARLLEGRVARVVVSNPQKTRAIAEAKVKTDKVDAEVLAQLSAADYLPGVWLADDHTHALRRQVARRAHIVRQRTRLKNQVHSILHRNLVPRCPAADLFGHKDRAWLAEQPLPPDEHRAVGALLRQLDFHAEELRVIDAELGRAGLASAEVKRLMTIPGVDATVALSIVAAVGDFGRFPSPEKLVSYLGLNPRGRQSGGQPASHGRITKQGRAHARGMLVEAAWAAAKTPGRCARSLSACGRGAGCRSRWSPPRASWPACAGS

SEQ ID NO: 181175 - protein, 325 aa, unidentified
METKKLCCGIDVSHTKLDVCYQNNLGELFHLQVGNNNSGYQKIIEHTGVDYHFVMEATGVYYIRLAFYLHQQSCKLSVVNALSIKRYIQMHLERNKSDKKDAAWICRYAIEQTPPYWEMPDSAYFESKQLYNTIREYTEQIKRINNQLHSLRLLPVPSKDTIKSLEKIVVCMEKEIKQLEQKLQLLLLQWQPEQLKNVSSIKGIGKRAAAMLIVFTQGFKHTQSHRQLISFAGLAPTQYSSGSSIQGKPRIYKRGGKNLRDVLYMCSMNAMKTNTACKTLYDRLRANGKTGKQALIAVCNKLLKQVFAVVKNNTQYQPNYCSAKP

SEQ ID NO: 181176 - protein, 350 aa, unidentified
MTFVGCDLHSRSHQVAVLNTDTGELQEQRLAHEGQVVEQFYRALPCPVTIGVESVGYAQWFHALIQREGPTLLVGDAAKIRAMVPRKTKTDRRDAAHLLKLLGEDRFPTIWVPDPGVRDRRALVAHRMRLVRTRTMVKNGLHAIALNYRLAAGAALFTRRGRAQWQALALPPHLTQRRDESLELLSWLDAHIDPLDGQIAAAAAADDQARRLLTHPGVGPLTALATVLVLGPVTRFPTSKHVVSYIGLAPAVAASAAKCRLGHITKQGNALLRYVLGQAGQVAARSETDLRRLYAMVMHRHGRPKAKVAVARKLLIPLYIMLRDQIDYAEFRARGRRLRTHPRPKGTERA

SEQ ID NO: 181177 - protein, 356 aa, unidentified
MNNEKYIGMDVHQASTSIAVIDAAGKLLMECIIETKAATVLEFIQGLRGSLWVTFEEGTSAAWLYDLLKPHVTKVVVCDPRRNALLRAGNKNDRVDARKLSDLLRAGLLTPVYHGESGVRTLRELGRSYLAASKDLTRVMNRLKAIYRSWAIPCAGQQVYSPRHRAAWLEKLRETGVRRRAEQTYQQLDFLMGIRKQTRKELLAESRKHPARKLLEQIPRLGPIRVALLIALIQTPHRFRTKRQLWNYCGLGLRTRSSGEYRYTGGQLQHARKPPALRGLNVNHNHDLKNLFKSAATQAGACKDDPLGEFYQNLLAKGMQPQMARLTLARKIAAIALKIWKKGERFDPAKLKQQAA

SEQ ID NO: 181178 - protein, 378 aa, unidentified
MSDIGSSESGAVVYAAIELSRSQWLIAVLPPDAARPSRHAVPAGDSAKLIKLFERVRHQSEQRLGQAVRVRCCYEAGYEGFWLHRVLIAAGIDSLIVDPSSLQTERRARRRKSDGIDVESILYALIAWDRGERRRCSMLRVPDPAIEDERRLTRERGRLVAESTAHRNRIGGLLMTVGIYDFQPLARDRLHRLAALVTGDGRKLPVQLAIEIRREIERLDLVERQLALLEKARRPKRHAQPTPAECRIARLMALKGVGIEIASVLGNEVFWRDFANRREIARYAGLDPSPHDSGDKRFEQGISKAGNRRARWVLIEAAWLWRRWQPDSALARWYHQRVGTATGRLRRLFIAALARKLLVALWHYLKTGNPPEGAVLSA

SEQ ID NO: 181179 - protein, 364 aa, unidentified
MSSVFYVGMDVHKDSVRLAVLKGREKETTYEGTMKNDVAKIVKTVKAYTAKGTVLAGYEAGCMGYTLQRAFTAAKIECRVIPPNQIPRVGSQRIKTDARDAILIARMLKSNEGGSINIPKAQDEATRDLLRCRDDIKLDRNRCKHRISKLLLRLGFTYDKEATWTKGHRAWMKGLSFSNDLHRETFQQYYSHLESMEDRLERLDTQLRAVATSPAYGDAVAKLRCFKGIDYVTALAFVCEVGDFNRFPGAPAFMSYVGLVPSEYSSGGKRRQAGITKTGNTHLRNLLIESSWHYRYRSAPGATLKARREGNDEIVIGYADKALRRLQNKHADLVKAGKSSKTATAAVARELAGFVWGMMTQQYA

SEQ ID NO: 181180 - protein, 347 aa, unidentified
MKSRQIATYVGADLHKNNTHFIAQDKAGKEIASRKLDNNGVMFREFLSNLPQPVKVIVESTSNWAWFCEEVKAGGHEVMVAHARETSSKSETREKNDPMDARLLATLLRGNLLKKECWQAPPEILRTRERLRYMQFLTRQKVANKNRIHSILTRLNIKSPFKDAFCKGGKRFLRSLDIDAEYKTSLSRSLDLMENIEILLAEDLAFCRKLTIEDPLAGLLTTMPGVSAQLACMIRFETGDIDRFERVEAYVNYTGLVPGKRSSSDHSKDIGVTKEGSFWLRWAFVQAAQTADRQRKGRLSTFFWRQFRKTRNRNKAIVATAREMAVIAYHMMKRKEKYNEPAIFVCK

SEQ ID NO: 181181 - protein, 342 aa, unidentified
MYITTVGLDLAKNVFQVHGVNERGKTVLKKQLKRSQVLPFFANLAPCLIGMEACAAAHHWARKLVTLGHDAKLMAPQFVKPYVKSNKNDARDAEAICEAVSRPNMRFVPSKTPAQQAVLSLHRARQGFIKARTAQANQLRGLLGEFGIAIPQGIRQLSTHVPDIVEDADNGLPGVMRGLVQRLWEHFQELDRQVGELDRDIRRLQREDEASRRLAEIPGIGFLSASALAATVGDAKAFANGRQLAAWLGLVPRQHSSGGKEILMGISKRGDCYVRTLLIHGARALIQQAERRNEADSWLKRLLARRSKNVATVAVAAKNARIAWAILAHGRDYDSEYQPVAP

SEQ ID NO: 181182 - protein, 339 aa, unidentified
MNLTPVGIDIAKRVFQIHFVDAATGEVINKPIKRAKLLEHFANRAPCLIGMEACGGSQHWARQLVALGHEVKLMPAEFVKAFNIRNKNDAADAQAIWLALQQPSKPVAVKTEAQQAILALHRLRQQLIKFRTMQINCLRGLLTEYGEVTARGRLALDKAMPMILARVSERLPLALIDTLREQWAALSKIDDQVSTIERRLQQAAINDNGVKAITAIPGVGTLTATAAVASMGDVRAFKSGREFAAWIGLVPRQAGSGGKVVLGRISRRGDTYLRTLLIHGARSVLYRYKQPNPWLEQIKQRRPANVVVVAIANKIARIIWAILSHDCPYQQGHVSTRPA

SEQ ID NO: 181183 - protein, 392 aa, unidentified
MYIVGIDIGKNHHEASIVSPKGKQIGRSLRFATTHKGADSLMSFIFKNIGNSPCVFGMEATGHYWYPIYSFLKAKGYTIYVINPIQSDSLRKMYIRQTKNDSIDSFLIAEVIRFGQFGTTSMADENILAMRQLCRYRDSVISSRTEIKLRIGTIMEQIFPEYEKQFSSLWVSTSMGILEKYLTPENIENAPIDELFEIIKDKSHNRLTRAKAISIKEAAADTFGIKIAQDAFSFQLKQLIDRMNFLDKQIEALDCQILEYYEKFDCYLHTIPGIGIIGAATILAEIGDISRFKNSSALVAFAGIDPTVRQSGEFNSTHNHMSKRGSPYLRHAIFLAATTCSFHNSPLNAYYKKKRDQGKHHLTATGAVARKLTTVIYAVLRDSKPYEPKKFC

SEQ ID NO: 181184 - protein, 372 aa, unidentified
MPHAHTSFQSFVGVDLHKCTVSLAAVDAAGDPIGRLTCHTKCVERIDRFLAELPGGAGASHMAVEAVTFAEWFIDRFGPTVGKIDIAHATALANLRGKRRKTDRNDAMDVAVRLARGDCPLGWIADPEVMQLRKLGRHWRSLSRTLARSKHAVRSMLDAANIKGPALDGAAMHKWLLAHGHLLKDAQRLAFEDLMDVILLLERKRERLKLAITTANRSDRFEALTTLLRTVPGIDQINACIIAAEVGDFKRFPNADALEFWSGLTPDNLESAGRVQSGSITKAGSATLRWSLGQAAMCLCRSDAKLEARRQRLIRTRGKARANVAMARHLLTILYAMTRDGTVYERGEQTDHTAKANRARMRKRTQRSKQAA

SEQ ID NO: 181185 - protein, 351 aa, unidentified
MTIVADLFRFVVGVDTHAATHTYTILDAAGRLIDQQQFPTSPAGLGRAIDWIGRRTGGDLDSTLVAAEGTGTYGAVLAGRLAATGYRVVEAPTPRRDRASGKNDAMDSLAAARSTLAMRTDRLRDRRGGGEAASHRAALQVLLTAREQANAERTRAANALTALLRTHELDIDARRALTTSQIKTVARWRSRTESIDIATARSQAIHLARRITDLDTTLKDNATQIERLVRDQAPLLLEQPGVGPVTAAIVLTTWSHPGRVRNEAAFATIAGTAPLPASSGNTCRHRLNRGGDRRLNRALHTIVLTRMRHDPATRAYTERRTAEGKTTREVRRILKRYTARQLYRTLNASTA

SEQ ID NO: 181186 - protein, 343 aa, unidentified
MQAITTIGLDIAKSVFQVHGIDAEDKVIIRRQLKRRYVLAFFQKLAPCLVGIEACASSHHWSRELKTLGHTVRLMPPAYVKPYVKRQKNDAADAEAICEAVTRANMRFVATKTPEQQSCLMLHRTRHLFIRQQTAVINAIRAHLAEFGIVAPVGRNGVEELLDVVADPSDKRVPEIARACLLALGAQLRKLKEQILEFDRMIRAWHRSSEMSMRLDEAPGIGPVLATALVATVTDPKAFRSGRNFSAWIGLVPKQHSSGGKDRLGSISKQGDRYLRSLFVAGALAVIRYAKIHGTKRRPWLTALLARRPTKVAAIALANKIARMVWAMMVRGERYKQPVALAA

SEQ ID NO: 181187 - protein, 417 aa, unidentified
MPKLLFVGIDVSSNHNVVCCLTEDHQAKPLGRFTVPNDDPGIYQFRDRIGSIMDKHALTHIRFGLEHTGCYSSHLARYLQSVLVFAPYEHEVYVFNPSLIKQFKKVHYLDAPKNDRVDAWFIAAKLRSGHLPRAFTWSESLAALQRLTRARFHVMKNLTRETNFLLTNLFLKFSSYSTGPFHHKTTSATSLAVIEQFQSAEDIVQMSQEDLLAFVMKKGKNRFEDPQGVVNSLQKAARSSYRLPKAMADSVNLAMASNICVIRTLQEQAKSLEKAIAEHLATLPQTLTSIPGISTIFAAGMLSEIGDISRFPDHKALSKFGGLAWQENQSGNFKATETRLIRSGNRYLKYYFTEAAKSVQVHDTGFAEYFNRKKAEPAKYAEKRALALTARKFVRLVDHLLRTNRLYEPKGAIRQKA

SEQ ID NO: 181188 - protein, 339 aa, unidentified
MELYAGLDLHSRNTYLGILDGNLKRVFKKKMANDLELIIDTLEPFRSDLSGIVVESTYNWYWLVDGLMDTGYGFIHLANPSAIKQYEGLKHSDDQHDAFFLAHLLALGILPEGYIYPKKDRPVRDLLRKRSFLVKHRSSHIVSLQSMIERHTAERLNSNKIKSLCSQDLESILEEEYIVLSAMANNRTIKFLGEQIKLIEKAVKEKVRLMEHFKLLLTVPGIGQILALTIMLEVGDIGRFPTVGDFASYARCVPAERLSAGKSKGKGNRKNGNRYLGWAFVEASHFARRYYPKFRSYHQRKAAKTNTFVATKAICNKLSRICYYIMRDRVPFREEAIFC

SEQ ID NO: 181189 - protein, 308 aa, unidentified
MSTIAIYFGVDFAKDKFDYHGAELHGSLPNTPAGHRRFLARLPPGAHLICESTGTCHRALVAAAHAAGVAVTVANPRQVRDFARGLGRRAKTDPIDAASLYDFGRLTAPQADRAPSATQTALQELVVARQQAVLERSTLKLQAAAQLLPLVKALTRARLKLLDTQIAKLEAALAKTTAQDEALAAQAARLAQVPGVGALTAATTLALCPELGTLSRGQAASLLGVAPFNHDSGQLKGQRHIAGGRFRLRCALYMAALSAARANPILRAFYQRLRAAGKPAKLALTAVLRKLFILLNHLLKNPHFQLAS

SEQ ID NO: 181190 - protein, 339 aa, unidentified
MEQPITIGLDLAKNVFQVHAVDALGTIVVRRQLRRSQVLAFFSRLEPCLVGMEACAGAHYWARELTAVGHEVRLMPPAYVKPYVKRGKTDAADAEAICEAVSRPTMRFVPVKPADRQAALLDHKARDFLVRQRTQTVNAIRAHLGEFGIVVPKGIHNVDRLLDAAQNVHASARPALDMLTDQLRDTQARIEKLTTRIEEMQGEDALARRLATVPGVGTISSSAFAATTPDVAAFRNARDYAAWLGLTPKAHSSGGKEKLGRISKAGNRYLRRLLYLGTMAQISARRGRRQIPAGQAPDWLDRMLVRKPVKVVAVALANRMARTIWALIARGSSYRAATA

SEQ ID NO: 181191 - protein, 403 aa, unidentified
MNSVGIDISKGRSTVAVMRPFGEVVISPFEVRHTDSELSELARQLKSLDGETRVVMEATGNYHAPVAKLLHDAGLYVSVVNAKLVHGYGNNDLRRVKTDRKDAVKLANYGLDRWLSLPKYVPEEDTRLLLKNCYRQYRQYSKVQTLLKNNLISLLDTVFPNANRLFSSPIRVDGSEKWVDFVAEFWHYRCVSEKSQKAFTNKYQRWCRKHGYNFSEAKAHTIHAEACGHIDVIPKSETTKLLVEQAVAQLRATSAALAALKHEMQALASMLPEYPVVMDMFGVGPTLGPQLIAEIGDVRRFYSKKALVAYAGLDAPPNDSGDVTGRHKSMSKVGASSLRRTLFLVMSVYLQTAPLDEPVYQFMDRKRAEGKPYRIYMMASANKFLRIYYATVKAYLESLEHTA

SEQ ID NO: 181192 - protein, 395 aa, unidentified
MRFVGVDIGKESHMVAAVDESQAIVLPPTPITEDAAGYGKLREMLGKPDATLVAMEATGHYWQNLFAFLVSEGFSIALLNPLRTRRFAEEDLVRAKTDAIDALVIARFAAQKRPPASTVSEEATLELRELVRLRDRWVQEFGDHVRQLHRLVDLGFPEFTRHVKTLDSVLATTILAEYPTAAAFKQARPGILANMRYDGRHAVGRALANDLIAAAKTSVGAHHSEAYQLQVRTLCEDITTLRRRLRRIEGEIERTLETHEVGKLLTTIDGIGPNSAARIIAEVGDPAAFRDAAALAAYVGVIPATKHSGKRQPLRAPISKLGNARLRRALWMPTLTAVRRNPWLHAFYQRLRARGKLPKVALIASMRKLLAAVYSVAKNRKPFVPRLPDHVGTTG

SEQ ID NO: 181193 - protein, 349 aa, unidentified
MSHKLDSSIAVIGIDIGKNSFHVVGHDKRGAIMLRQRWSRGQLERRLANLPPCLIGMEACVGAHHLSRKLRMLGHDARLMPAKYVRPYSKGQKNDFRDAEAIAEAVQRPTMKFVATKTTEQLDLQALHRVRERLVSQRTGIINQIRAFLLERGVAVRQGLRFLRAELPRILATPCDVLSPRMLRVIEDLAGDWRRLDERIDGLSSEIEVLARRDAGCERLMSVPGIGPIISSAMVAAIGTGDAFTKGRDFAAWLGLVPKQISTGDRTILGKISKRGNRYLRVLFVQAAWVVLIKPKSWDRHGLKSWLEAAKKRLHHNVLAIALANKLARIAWSVLAHGRTFEASKIQAA

SEQ ID NO: 181194 - protein, 348 aa, unidentified
MDHIIRIGMDTSKHVFQLHGVNAAEEPVLRRKLRRNDMVVFFERLAPTIIAIEAAGASHHWARLLRSFGHEVKLIAPQLVKPYVKRGKNDAADAEALCEAMSRPTMRFVPVKSAERQAALMLLGLRDRLVRNRTQLANAIRGYAAEFGLAAAKGIAHLAPLLDRIQSDESLPGLARELFATHAQEYAQLQAQIDEVEGKLMAWHKTNPGSRRLVQIPGIGPIGAAMLIMKTPAPEMFRSGRQFAAWIGLTPKDHSTAGKVRLVVITRAGDAGLRSALVVGATAVIRHLRNGKGRSMLSAWVEQLLKRKPPKLVAVALANKLARIAWKLMVTGEAYAAKSAPAALAAAV

SEQ ID NO: 181195 - protein, 419 aa, unidentified
MLYDSRVHMDRTFVEFLPSSAHLLGGVFMTYFIGIDIAKYKHDCFIMDQDGSVIRDSFSFSNDSAGFCLFLSVLDSLDPSYEKRIGFESTGHYGLNLKCFLEEHDISFMEINPILIKRFSSATTLRRTKTDKADAALIASYLTTVEYITYPIQSYHIHNLKSLTRSRDALVKLRSGQLVMITNVMDKIFPEFKPFFNKSLKSSTAMYLLRNYTVPSKMASMNSESYRKMSSKLKKTISYARFSKLRELAKNTVGREDPCLTFELNTYLDIYQSLDFKIKEMEAHIEEEFKKIHSHIQTIKGIGWMSAASIYSEYGGIENFQTPNQMLAYAGLDPSRSESGEHAYKGHMVKHGSSHLRYVLLNCAEMVILHNPVFYDYYRKKREEGKHHRVALSHVARKLVRIIFFLEKNNVDYDPKKMR

SEQ ID NO: 181196 - protein, 398 aa, unidentified
MRLFVGLDVSSFDMKVCFLNGEGEKLDSFSVSNDLPGAQVLKERLLQCTTNQEVETLKIGLESTSVYSFHPSMFLHHDEDLKRFGTKVFLLNPKQVANFKKSYSDMNKTDEIDAFVIADYLRFGRNQMSIVKESQYVALQQLTRSRYQLVRMLTKEKQHFLQHLSYKCNTFSQEVDSSIFGNAMIELFLEKFSLEELADMPLEELAEFLQEKSKNRFGDPKCVASTIQKVVRTSYRLDKVIEDSIDILLGTSIEIIRTYQKQIKELEKSIKRIMAGLTQTLESIPGIGPIYAAGIIAEIGHLERFDDETKIAKYAGLYWRTYQSGRFTAENTSLSRNGNHYLRYYLVEAANSVRKHVLEYQEYYAKKYNEVPKHQHKRALVLTARKFVRLVDALLRNH

SEQ ID NO: 181197 - protein, 362 aa, unidentified
MDKTPRWFAGVDWASQKHDVWLADASGKRLGKKTFEHSGEGLAQMCSWLMATSGGRPEDIHVAIEVPHGAVVETLLDRGFKVYAINPKQLDRFRDRFSPAGAKDDSRDAETLSSSLRTDRRAFHQVALADPAIIELREWSRMADDLSADKIRHTNRLREQFRRYYPQMLQLGSDLAEEWIFALWEKAPAPAKAARLRQTEIEKLLKRHRIRRIGAAEVLAILKQPALVIAPGVTEAAVAHIRVLIESIRLFTQQLKEVHRQLDRLCNLLAEPIPGRNEQAGPEPGQTLVAILQSLPGAGRIVLAVLLAEAFETLQRADYASLRMLCGVAPVTRRSGKGWAVTAACLQSKATELLGGCRAAVR

SEQ ID NO: 181198 - protein, 352 aa, unidentified
MEYIAFDCHKKYTYAVVEDEKGRVHWEGRIAHERGALAAFLLEACYPGSPVAVETVGNWYWIVEEIEQAGCLPRLVHAAKAKLMLGMINKTDKLDARGLNRLQRAGTLPTVWIPPGELRDKRELTRARMALVRQRTQLKQRIQATLAKYNLVITEVSDPFGVRGRKLIIEKILELPPETRAVTRMLLEQVGILDQRIAELEKRMKEVLAPSREVELLMTLPGVGFILATVIALEVGDVRRFPGPKHLASYVGMVPRVQQSGGKVRYGKTREDVNRYLKWAYGEAANVIARNHQNYALRHVGRLYARIRERKGHQKAVGAVGRHLAEATWWVLGTGEPYQEPAICRLGRVMGT

SEQ ID NO: 181199 - protein, 339 aa, unidentified
MRKLCIGIDVAKSKFDVMYTIDGENYFGYSTFPNDKKGIKKFVKQAEKFLKQEKCEQIHFCMEATGIYHCELCEYLQNSAHKVSVVNPVRTKSFSKSLQLRTKNDKVDSQMIAHYTFLYNPTQTPKVPKELQHFRRLVKFKETLVEDRAKELMRIKSALDSDVKQLINKRINFLEKQIKETMYKIETIVKDNEFLSRNFNLLITVDGINFNVAWRILAELNYETINDITPKSLVAHAGLSPRENSSGDKYGKVTISKIVKSDLRKIMYMPALSCIRHDNYFTDFYLHLVEKGKAKKVAITAVMRKMILTAMGVLRNQEPFDPNWAKKVQAKYQENLKIA

SEQ ID NO: 181200 - protein, 317 aa, unidentified
MSMTDRAVFVGIDVSKAQLDVALRPEDRFAAPNDETGIARIVDRLRSAGPTLIVLEATGGLELPLAGALAAAGLPVVVVNPRQIRDFAKATGRWAKTDALDAAVLAHFAEVIRPTPRALPDEQTQALSALLTRRRQLLEMLAAEKNRFSQASSPVRKSVRAHLAWLQRALTQVDRDLAHAIQQSPVWQEKEALLRTVPGVGPVLATTVLAELPELGTLTHKQIAALVGVAPLNRDSGTLRGKRTVWGGRAPVRTALYMAALVATRFNPVIAVFYHRLRQAGKAKMVALVACMHKLLTILNAMLKHRTPWHPTPEASR

SEQ ID NO: 181201 - protein, 416 aa, unidentified
MDVVVARVAGLDVHKDTVMAAVRIPGDKGRRTELVKEFSTFTGDLIRLRDWLSDCGVTEVTMEATGVYWRPVWHVLEDEVGFELRLVNARHVKNLPGRKTDVSDACWIAQLAECGLLRGSFVPPKVIAELRDLTRYRKKLIEEHTREVQRLQKVLEDAGVKLDSVVTDITGKAARSMIEALIAGERDPVVLAEMALTRMRPKIPELRRALVGRFNEHHAFLARMHLDRMDSLDEAVAKLDAEVDRVIAPFSDAVVRLQTIPGVGLRTAEVVVAECGIDMSRFPTAAHLASWAGLCPGNDESAGKRRSGRARKGNAALRSALCEAAWVGVRTRDTYINAQFRRFRRRFGAKSEGKALFAVAHTLVVIIWNVLATDQATYVDLGPDWFQQRDDTQAHVRRLVRQLERLGLSVDVKPAA

SEQ ID NO: 181202 - protein, 352 aa, unidentified
MKKGITKVVAVGIDVGDKTSQVCAKDATGAVVWEKKVKTTEAGFRGALGKAGPYRIVLEAGSQTHWIKACLEGLGHQVKVADPRKLRRIYQSESKSDVRDARELAEEALWRWDRMSEVTLRSQRSQEKLAVLKARDALVRARTALVNLARSVLKQEGVVVPKGTPEAFPKKAEPLVPEGQRAALGPVVKQIAMLTEEISGYDRWIEKAGLAEGPVRLMRTTTGVGPVTSAAFVWTLDTPDRFAKSRTVGAFVGLRPRRDQSGDTDKELPITKTGNAFLRRLLVGCAQYILRRSSPKSALKDWGLKLAGRGGKRAKRRAVVAVARKLAVILHRMWVTGEEYVPFPQRARAHAA

SEQ ID NO: 181203 - protein, 414 aa, unidentified
MYYVGIDVHQKSSSVEILDCNGKLFKRREVRGRWPVLIEELAKVPKPFAVCYEASCGYGYLHEQFSKLAQQVKVAHAGGLTWIYRSKRKHDRIDARKLAKLLFLDEVPSVHVPPKEVRLWRQAVEFRQKVLRSRVAAKNQARALLRERGIESPRNLFSGKGLAWLKDLKLEDLGDALRRDLIVEQIEESDEKIKRVVKHLDSLSNNHAGVALLRTIPGIGPRTAEALAAYVDDAKRFSNLRNVGAYFGLVPCQDASADKNRLGHITRDGPPTMRKLLCEAAWTAVRESPTVRAYYERVMRQDPDRKKIAIVATAHYLVRVAVSMLKSGECWRESVKGDPGTVKEDSDPKPDRGGGETPSGPQGFSPPPITSPGSEQATSPPPLSASPFSPQRGRRKRHRNKASREERGVKIHKE

SEQ ID NO: 181204 - protein, 338 aa, unidentified
MKLYGAIDLHSNNNVTVLIDEQDQVVYQKRLPNDLPLIAQQLSGYRDRLQGIVVESTFNWYWLVDGLMDQGHKVHLANTAAIQQYEGLKYTDDHSDARWLAHILRLGVLPQGYIYPKEERAVRDLLRKRGQMVRQRTTNLLSLQNLVTRNTGGSISSNRIKTLDAEQIDQLLPNPDLALAVKANLAMIQCAAAQIDILERPVTERIKLRAGFSFLKTVPGIGQILALTIMLETGEIRRFPTVGDYASYCRCVGSQKLSNGKKKGSGNTKNGNKYLAWAFVEAANFAIRYNARIKSFYQRKKAKSHGVLAIKAVAHKLCRACYYIMKDQVPFDITKAFA

SEQ ID NO: 181205 - protein, 427 aa, unidentified
MVCLRLPPGPGKTRRTSRTWEVTARVPDIEALAAELKACRVERVSMESTSDYWRIWFVVLEGAGLEVQLVNSSQAKNLPGRPKTDKADAAWIARLTEMGLLRGSFVPPPQIRALRQYTRQLVHLTGDRTRYWQRLEKLLESALCKLTSVASGLAGSKSCLAMLEAMIAGERDPQVLAGYALGPMKNKHAALVAAFTGMQFGPEHAFSASSDLRMIKMLDAEIAGLEQQVRDHLAAIPAAWGVDADGTTGPGAGTGPDAAVLPAVARLAEIPGVSPGIAAGLIAEIGLDMTRFPTPDALASWAGLAPVPNQSGSRKGRGKKGTGSSYARRYAGQAGHGAAHTDTFLGERHRRIRRRPGGGGWKKATIAVGRSILVIVWHLLADPAARYRDLGPDHYARHTDTNRKARGHKRQLESLGYDVVLTPREAA

SEQ ID NO: 181206 - protein, 357 aa, unidentified
MAKRSSEKVEIVGLDLGDRYTSWCLCRVGGEVISEGRVRTTAEALSRQFGDAPRRRIVLETGTHSLWIARLLRAMGHVVFVLHARSLRLITASRRKTDRLDARVLAQLGATTSVEVLHTVDVIDESVQADRAVLLARDLLVRARTQQVAHVRGVAKAWGVRLSSATTKSFPGKVREQIPQALRPALTPILDSILRLCEAIAAYDEQLEKLAEESYPHSRLLTQVPGVGTLSALAYLWTIRDPKRFAKSRQVGAYVGLTAASRASGQRDPQLRITKQGNPLLRRLLVQCAHHILSRNKGDSDLQRFGLRIAAQGGRRGKKRAVVAVARKLAVLLHHLWKTGEVYTPNFGGDSVLKKAA

SEQ ID NO: 181207 - protein, 344 aa, unidentified
MSKLDTCGVEVSAKELVVALRREEALEPLRSFANTAEGHQAVIRYLRRAGRVVRVCLEATGLYGLDLALALSAQAGMEVMVANPRAVRHFATALMQRSKNDQLDAGVLEQFAARMPFQLWTRPSPAALALHALARRLGELVEMQTAEKNRQHAAELSQAIPAAIRRDLARSLRAQERAIARLTREARKVIAPEPELTERFALLDSVPGIAETSAIQILAELAVLAPDLEARQWVAYAGLDPREYSSGTSVHKKTRISKAGNKHLRRALYMPALVAVQHDPHLRAFYQRLLERGKFKMQALVAVMRKLLHAFQGMFKTHQPYDGAKLFRPVVSPLQEVARAHAAS

SEQ ID NO: 181208 - protein, 343 aa, unidentified
MEHYAGIDVSLELSSVCVVDATGRIVREAKVPSEPEALVGFLGQLGLPLTRVGLEAGPLSQWLHAGLTGAGLEAVLLETRQVKAALSAMIVKTDRKDARGIAQLLRMGWYRPVHRKSPPAQEVRALLVGRKLLQGKLVDVELSIRGLLRGFGLKLGEVSKGRFAARVRELVAGQPMLERVVEPMLRARDVLRAEYQVLQRAVLAIVREDAVCRRLMTVPGVGALVAVTFASAVDDPARFRRSRAVGAHFGLTPKRYQSGETDVTGGISKAGDGMVRAALYEAAHAMLTRTGRFSTLKRWALEVAKRRGMKRAKVALARKLSALLHRLWVDGSEFRFGREAAEA

SEQ ID NO: 181209 - protein, 351 aa, unidentified
MNIIGCDLHTRYQIVAWLEPGTGEIRSRRLEHENGEARAFYASWPPGARVGIEATFPALWFERLLGECGHELWVGDAARIRGSEVRQQKTDTRDAEHLLELLLTNRFPRIWVPSRAERDLRQLLVHRLKLVRTRTAVKNQLHALAMSQGVCRKRKLWSARGRAELESLALLPWASRRRQELLALLDQLEGPIAELDRAVAAEAQQREAAVRLMTHPGVGPVVGLAFVLTLGPVERFPNSRKLVSYLGLNPREHSSGGRQRLGAISKQGNTLLRWLLVEAAQTAARYDPELRRAYQRLKFRRVSGVAKVAIARRLAVRLYWMLRAQMDYAQLVRMSGSPSSAVVPPWTGSKV

SEQ ID NO: 181210 - protein, 433 aa, unidentified
MKVLYEHVAGIDVHKEMVKVAIRSPGEKPWTRKTEILEFRTFYGVLQEMARELRRRGVTHVVMEASGVYTEPVYYALCEQDFTQVAVINPAHAKALRGHKTDAKDCARLAELFECGLLRGSYIPAPELKEVRDLTRYRTKTVQARTSEIQRLGKALESAGIKLGSVASSITGTSSTAMIESLIDGERRGAVLAELAIGRMRSAGKLADLSMALAGRFTEHHALLCRLHRDRITVFDDAVDGLDQRIAGKAARWQREAGLLTSVPGFGDVVAWAWLGEIGPAPHQWFASHEKLACWVTLCPGNNISAKKRKHGRTGDAGTYIKPMLIQAAWAAIRVRGRLQARYNRLVRRFGGDKNPGAKKKAITAIAHTLLKIAYQVLKTGTPYQEPGADFYTRRESPAARQAFLERQLQKLHPGCTITITISPPEAALTPAA

SEQ ID NO: 181211 - protein, 343 aa, unidentified
MQVTTVGLDLAKRIFQVHGVDAAGKVVIRRRLQRSEIAAFFADLPACLVGIEACATAHHWARLIGASGHQVRLIPPSYVKPYVRRSKTDAADAEAICEAVGRPSMRFVPVKSAHQQAALLHHRARDLLVRQRTMLINAIRGHLGEFGIIAPAGRRRVADLVNLLQGADDAEVPALAREALQSLFAELSALEIRIKVVEAVIMREHRSNAVSRRLTTIPGIGPITASALAGTIADPFAFKSGRELAAWIGLVPRQHSSGGKQKMGRVSKQGDRYLRRLLTVGATAVMRRLPGKTDGLSLWVRALLDRRPFRLVSLALANKMARIAWAIMVRPETYKASAMTAAA

SEQ ID NO: 181212 - protein, 375 aa, unidentified
MQEKVRFLGLDVHAETIAVAVAEPDGEVRSLGTIPNRAESIGKMIKKLGRAEKLRACYEAGPTGYVVYWQLAELGVQCEVVAPTLVPIKAGDRVKTDRRDAEKLARCYRSGDLTAVWVPDEGSEALRDLVRAREAAKQDQMRARHRLSKFLLRSGQRPPSGVRPWTRPYLIWVAQLRFTQMAQEATRQDYLHEVEHMRERVARLEQAITEAVKLASPALRQVINDLQALRGIGDISAVTIAAELGQVSRFESARQLMGYCGAVPSEDSSGKRTRRGGITKTGNAHLRRIVVEAAWSYRRPPCIWYGLRRRQESISEETKEIAWKAQHRLHKRYRKLGAAGKDQRKIATAVARELLGFIWAIGTRAEAIVRQQAAA

SEQ ID NO: 181213 - protein, 343 aa, unidentified
MSIQVIGIDLGKSNFHLVAHDPKGQAILRKKLSRQQLVQFVQNTPASTIAFEACGGAHWLGRLCMTYGHTVKLLPPQYVKPYVKGNKNDFIDADAIAEAATRPSMRYVPVKSEEAQLLSAIHRIRQGYIKDRTACMSRIGALLLEFGVSLPQGHSVMKTLPAWLAEPARHLPALIHNELCGMHQHYQLLMLKVAEQDNKLKRYLASNEDAQLLKSIPGIGDITASQCIAELGNGGQFTNGRNLAAWLGLVPHQHSTGGKARLLGISKRGNKHLRTLFIHGARAILSRPEKTGAVFGNWLTKLRASKPFNVVCVALANKLARMVWAVLKYRQEFNAAKLQSGYA

SEQ ID NO: 181214 - protein, 351 aa, unidentified
MPCKKDVAVVRAIGIDTGKNTLHMVGLDEKGAIVLREKVSRGRIAARLVNVPPCLIGIEAGMATHYLSRELLALGHQVKQVPPAYAKPFRQGHKNDFRDAHAVAEAVQRPSARCVPIKTDDQLDLQALHRVRSRLIGDRTAVINQIRGFLLEHGIPVRQGPRFLRQQLPQILATRTDVLSPRMVRIIADIVDDWGYLDERIERVTDEIEELARTEVSCGQLMTVPGIGPIIASAMVAAIGNGTAFAKGRDFAAWLGLVPKQMSTGDRTILGRITKRGNRYLRMLFIQGARAILLHPTSWAKHSFGPWLTAAARRLHRNFLVVALANKLARIALIVLVQGRSYETRIEPAAA

SEQ ID NO: 181215 - protein, 355 aa, unidentified
MKQGTQLDFSGQTIFVGMDVHKRSWKVCIRSEHMELKTFSQEPSAKLLINHLKHNYPSATYKVVYEAGFCGFGYQREFSEAGINCIIVHPADVPTTDKEKQRKSDTVDCCKLGNTLSKGDLTGIFVPSVEQQDDRGIIRVYLQMVKDRTRFKNRIKGWLNFQGITIPGDDDYKYWSNNFTKWLKALSLTPSARVNLDILIQGYEQARAMVLTATRQVRVLSRQERYKKKIELIRTIPGIGEIAALLFKTEIGDMNRFKDLDQLCDYLGLVPKIHGSGDKETVLGLTHRGHHQLRETLIEASWVAIRLDPVMTMFFNDCCKRMKKNKAIIKVARKMLNRIRFVMKNQREYVPAVLI

SEQ ID NO: 181216 - protein, 338 aa, unidentified
MAMYCGIDLHSRDCWLAILDDGLKVVREAKVGNDLGAILEILEPYREDLKGIAVESTFNWYWLVDGLDEAGYQMHLVNTWAVKQWEGLKYSDDRHDARWLAHLLVLGILPEGYIYPKQERSVRDLLRRRAFLVRKRTSFLLAMRGAFECRTGVRTTSNEVKQWTAEEIESYLDDPIEALGITCLLEPMKALDSQIRIIEKGALTRARLRDEFAPLLTVWGIGKILALTVMYEVGEISRFRKVGNFASYCRLVASARLSAGKRKGSGNARNGNPYLSWAFSEAAHFAVRYHPEAKKYFQRKRSKTNGIIAIRALAHKLARASYYVMKDQVDFDSERVFG

SEQ ID NO: 181217 - protein, 341 aa, unidentified
MKKLLYCGIDLHSSNAVYVVTDSSDKILLKRRLHNDLSTILATLEPFRKQLVMVVVESTYNWYWLVDGLMEAGYPVKLANPAAIDQYDGIKQADDLIDATFLARLARLNILPTGYIYPKEERPVRDLLRRRILLVRQRTAIKLSLQNMFTRQAALNLNWRGIRRLSVKERSEALNDQDYLLFVTKEQLELIEQLNAHIIQFEDKVLERAELKPEYEYLLTMPGVGMILGLTIMLETGEIDRFAHVGNYTSYCRCVRANKISNGKSKGKNNSKNGNPHLAWAFVEVVHHATRSCPKAKQFYDRKRSKRNGALATKALAAKWSKAAYYVMKRQEAFDLKRVFG

SEQ ID NO: 181218 - protein, 340 aa, unidentified
MHATIIGLDLAKNVFQLHAEDRSGKVLWKRRLRREELEAFLRKQPPALIGMEACGSAHHWARVFTAVGHEVRLMHAKYVKAYVKRGKSDVRDAEAICEAVQRSSMRFVPIKSVEQQIDRSLERARDLLVKQRTQLMNATRALLAELGVVARAGLRGFTTLADKIAAGDAVIPRPSLTALKPLVEQWRALQASIDQLEARLVARAHSDERMRRLMKIPGVGPLTAHAVVTAIGDPKRFSTGRDFAAWAGLTPLTDSSAEKTRIGHISRQGDHSLRRLMVLGAVNMARHARAKPCEANAWLNGVIARRPVKVAMVAQAAKTARIAWALLCSGENYRGRTAAA

SEQ ID NO: 181219 - protein, 386 aa, unidentified
MKIALGLDLADRRCAAHAVPVGRAKKSQKEFLEKFNKDFRRVKTDRDELHRMIDVLRSDGNEIYVLIENSTITHKVYWILVEKGCDVVVAQSADLLRITKSVTKNDDNDAEELAAYMRRRLNGENEFKAVVMAPPEIMSRKMFIRAIYTDKTYLSECKKRVRARLKIMGADLKRDYADISCDRSLMQLRSTADPYLCYEVAVMKETKARIKDGERYISTLFKDDPYYDLLMTIPGFGMEISAYLSTVIIDIDRFDNVKQLEAYTGLVPRQRSSADSDPDCRTTHFGDDWAREFLGYAVRAHVMWAPDSIITQMYNRLRARGKPYKKIITACSRKMVSVIWSVLRNRRPFTTDRNVLQKARGAAAEIEQLESELFEEEIEKKYAEVA

SEQ ID NO: 181220 - protein, 356 aa, unidentified
MTKTLMAGIDLHSNNLMIGMVDQDGQRVGHQKLACDLKAVLAFLRPYQRRLKSLAVESTYNWYWLVDGLRAAGYPVVLANPAKITQYDGLKHADDKSDAYFLAELQRLKILPTGYIYDAELRPVRDLLRRRVSLVQQRTALMLSFKSLYARMTGQAMSLSRLKGMAAKAARELYEHPADQMIATVQQEHIAALNGSIAKIEKLVLARARTLPWYEHLDSLPGVGRILGMTIALEVGEIGRFESPGQFASYCRAVAAERTSNEKNKGANNRKCGNKYLGWAFVEAANFAKRYDERSRRWFDRKAARTCKVLATKALACKLAKAAWHVMSGNVPYDGDRVFGKAAANQMNGLATSQRD

SEQ ID NO: 181221 - protein, 397 aa, unidentified
MYIVGIDIAKRKHEAAVIDGEGTVIIKPFSFTNNCSGYNRLLAMLAKAKLPLDEVSFAMEATGHYWLALFTRLQKEGFRVQVINPVQTNSIRSFYIRQAKTDPRDALLIAEVIRFGHFSESTLHPENIYELRELCRGRHAIVSMQADVKRKVVALLDQVFPEYETAFTNLFSDTSMAILQTCPTPKELSEMPLEELCHLIEVSSRKRFRMVKAQELQELARNSFGFAMAGDVFSTMIRLYAKHLVFLKQQVQEMDRKIAEIMDTLDTPITTITGIGPALGAYILSEIGDISRFSSAAKLAAYAGIDPTMRQSGEYNGVRNRMSKRGSPYLRHAIWLAASSAVLHDPALKLYFQKKRDEGKPYMASVGHACRKMVSIIYAVMRDNKTYTPHIPNEISA

SEQ ID NO: 181222 - protein, 429 aa, unidentified
MKNSTAYKLRQVPPGYLIIGIDPHKKIHVAVAMTQDTIIHTKFKFANSRQGYEDVMKKAKEQMVRTGSRGVIFAIETGGHYWRNLAYFLDEQDIPFRIINPFTLKRMREGKDINRRKNDFRDAEMAAELLRNGEFVETKLPKGIYAELRATYSTYRRLIKERTRIKNLLKGLLDGLFPEFNQVFKNICGMTSLQVLSICPAPKTITGMKLEEFVAIVREGFKGRAPKVRKLHTIYSLAQTSIGIETGAESVSLELSFLVQRLRLLIEQIEKTEDILVRLLYSIPDARYLLSIVGISYISVAGILAELGPLEAYQNAGQLIKMAGTNPIEWESAGKRGSHTPMSKKGRPGLRWCIWTAAMCLLRHNTDFRSWAKERRERPAHLHPLKAREVFGAVANRLLRLAYALVREQTFYQIPKPKSVPEPELVAAI

SEQ ID NO: 181223 - protein, 348 aa, unidentified
MAIVGGFDIHRRQVTFDYLDTVTGQVRRGRISPACRETLRHWLERFAGRQDVTFAVEGCTGWQFVVEELQRAGITALLAEPAETAHLRGPKKHAKTDKTDSRHLRMLVADGRVPLSWIPPRQVRELRALLQLYRDLAEEHTAWTQRIHATLFHQGVPSLAGRLSGPQVRARLAGDGAGMGLSPAGVQAVAVALRRIDDLEAELGPVHAQITAFARRQAGCKALAGELFGVGPLVAAVVWAFLGDARRFSSSAQAVRHAGLDITVYSSDDKRTPGHLSHQGPPILRWALSEAGHQGSRKASPDHRYYAGVAGRIDASRAALSVARKLARRSRHILRRLGDQAYTPVPGW

SEQ ID NO: 181224 - protein, 324 aa, unidentified
MINGILGIDVSKNTLDVSISSCTKVRTKSFANTSDGWHHLLDWLIAHKIRRVHACLESTGRYSLGIACALHEAGHVVSIINPAQIRDFVRTKLGRNKTDGVDASHIREYCELFKPQPWVPPSEAHRRLGELQTIRAGIIAGLTEWKNRKNSGIVDAEAQTLADATISHFTSQLGTVDQAIALTIENDSHLRSKRDLLLSINGVGETLAGVVLAELPGPDVLHSSAEVVAYAGLNPRQHQSGTSVDRATRISKIGNAVLRAALYMPALSAMRYNPAIVALVTRLKSRGRLKPKQIVVAAMRKLLVLCFGVLKTGKPFDPTIAMGC

SEQ ID NO: 181225 - protein, 416 aa, unidentified
MKLFVGLDVSSDKLDACFLTDTLTILHQGSYANDIEGATQIKETIVNMFEQFAFDKVVIGMESTSMYSAHPLIFFHEDEDLKNMHCVVTIEDPFKIHNYAKVFNADKTDTNDAFFIADFLRSERYSHSPLKEEQFLSLQRLTRSRMQLVNMLVETKQHFIENLYYKCNTLSRELRDEESLSTTVFSTSIIELITSDMGLDEIAQLPLNKLAETLQTLGRGRFKHPEKLAKTIQKAIRSSYRLSPTFETSIDIVLATLVGQMRSLEASIKQLEKGIERIVKAMPEYQCLTSIPGVGLVYAAGIIAEVGQIERFENQAKLAKYAGLHWKKSESGNYKSENTPLTKRGNRYLRYYLIEAANSVRRHLPEYNEFYRKKYQETPKHQHKRAIVLTARKFVRLVDTLLRNHQLYTSPRSVES

SEQ ID NO: 181226 - protein, 335 aa, unidentified
MSTVPVFVGLDYHERSVQVCVLDREGRMLANRSVGNDVKEIAQVVAAEGRRVFAAIEACNGSAELAEELIKLGWSVHLAHPGYVARIKQNPDKTDFADARLLADLERVGYLPKVWLAPHAIRELRRVVRYRQQLVDERRNGKLRIGALLREQRIRCTESCRPWTIAWLRWLQEEAELSEQSRWIVKQHLRRIRELSKAITEVERRLRGMTAEDSVVETLLKLKGVGLVTAVTIRAEIGRFDRFRTGKQIARFCGLSPRNASSGQKQADAGLIKAGNPQLRATLIQAAHRLKRLDPRWRALAQQMRDRGKAGSLIAAAIANRWIRSIFHVMQPLAA

SEQ ID NO: 181227 - protein, 407 aa, unidentified
MELPAIFPCVVGLDVHQAKISACAMIEQPDGTLTVEHREFGAFKRDRRALAEWVRTLGPDLVVMESTGIYWKSPYAALEQVGIAAWVVNARHVKNVPGRKTDVADAQWLATLARAGLLRASFVPPADIRHLRLIARQRQKLSGMLASEKNRLHKLLADAGIRLNVLVSDIHGQAGRAMVKALIEGQPLPEILDLAGRLRASREELFEALQPEQLSDAHRFVLSEIMAHIEELEARMGRFEQTLLAGLAAWEPQLVLLQTLPGVDRIGAAMLLVEIGTDMASFASAEKLASWVGICPGNNESAGKRKSGKIRKGNAWVRRLLCEFAQAASRSRCGLKEKFKALSIRKGHKKAIVALAHKMLRIIFAMLKNHTPYQDQAVDYEALLVQRNAPRWIKMLLKHGFISPAST

SEQ ID NO: 181228 - protein, 322 aa, unidentified
MSVTILGIDIAKQKFDVALLVDGKTKHKTCKNSAEGFETLMIWLERQGIQKVHACLEATGNYGEDLAIYLHEAGHTVSIVNPARIKGFGQSELIRTKTDKIDAALIARFCLAMKPGSWTPPSPDIRYMKALVRRVDSLIDMRSQEKNRLSTAHGHVIVLIKEHIAYLDQEIEKIRKQIADLIGRNPQLKQRKELLDSIPGIGKATIPHLLAELNDLDKFTHVREMVAFIGLAPKETLSGSSIKGKPRLCKIGHARLRKALYMPALVSIQCNPVMIAFYNRLKEKGKNGKVIVCAIMRKLVHVIFGILKSGKKYDPNYKPVLA

SEQ ID NO: 181229 - protein, 499 aa, unidentified
MSRVAPKAPIGELLPSPILDGKGQSSLTLHRYGVGVDCHSRFFQVCILIPKGTELVKFERKVSAVWPALEAAKTWVLDTLREQGIPVDASDLRYTCESTGQYHMPLCLAWKGHPAIINPSDTSHVRRKTDRLDAQKLAQHSLCGLWRESWMAPDEIQELRVLANQRSKLVGERSRLTNRINSDLLRFGHVVGQLGKINGSRVRALIEDFCAHGSVAVHRDYFSEIRIPAGVIHVLEERWKRVDALEREIKTVEDLCLERVDAMTWRIGGGRTVSGGELRSHLESIPGVGTQTAITWLAEVGDITRFGTVNRLLAYAGLDPSDGISAGKVTAKKPRKGNARLHCALRNAARAMLAHAPTSKFARWARGYQGRHARAGKSKAIHALARRIGKALYYCHLKNAPFDDSGYHALLEESSYPLCSVEEMGLSPGVVRKLKANGLRTSRQVVDAFYSDLGRLPGCGKITVQAVATWIDSHRNRSRDRSRKSRSPEPSGNPPPTEG

SEQ ID NO: 181230 - protein, 353 aa, unidentified
MKCDKYMGMDVHQAMTVVVVLDAEGQVILETMVATGAAAIIRLVQSLSAPLHVTFEETTQAEWLWNVIRPFVAEVIVCDPRRNKLLSEGSKADKVDARKLAELLRTGMLRSVYHGHEATRKLKELVRAYESLSIDTQRTMARIKAIYRGRGIATPGRGVYQAKQRERWLTLLAEPGLRQRAAWLFEQLDHLRPLRRTAKETMLAESRNHHATGLLRTIPQLGPIRAALIVATVDTPHRFRTKRQFWSYVGLAVVTHMSSEYEMQAGRVVRRRKPVATRGLNHNCNHRLKKVFISAASAGNRYEPYRPYLAALKENGMRAEMARLTLARKIAAVALIVWKKGETFDPKKLNLTT

SEQ ID NO: 181231 - protein, 392 aa, unidentified
MYIVGIDIGKNHHEASIVSPKGKQIGRSLRFATTHKGADSLMSFIFKNIGNSPCVFGMEATGHYWYPIYSFLKAKGYTIYVINLIQSDSLRKMYIRQTKNDSIDSFLIAEVIRFGQFGTTSMADENILAMRQLCRYRDSVISSRTEIKLRIGTIMEQIFPEYEKQFSSLWVSTSMGILEKYLTPENIENAPIDELFEIIKDKSHNRLTRAKAISIKEAAADTFGIKIAQDAFSFQLKQLIDRMNFLDKQIEALDCQILEYYEKFDCYLHTIPGIGIIGAATILAEIGDISRFKNSSSLIAFAGIDPTVRQSGEFNSTHNHMSKRGSPYLRHAIFLAATTCSFHNSPLNAYYKKKRDQGKHHLTATGAVARKLTSVIYAVLRDSKPYEPKSFC

SEQ ID NO: 181232 - protein, 349 aa, unidentified
MRFYSHQHQFYCGIDLHARSMFLCIMDQAGEVLLHRNYRTNPDALLRAIAPYREDIAVAVECIFTWYWIADLCSREGITFVLGHALYMKAIHGGKTKNDKIDSQKIAALLRSGMLPMAYVYPQGMRSTRDLLRRRLYLARQHAELQAHIQNTNTQYNLPYFEKRIDRRSNRASIGLRFTDPVVRTSVEVDATLMDALHEQILAIERQINAQVPEHDPVAVHLLRSIPGIGKTLALVILYEIHDISRFPAVGNFISYARLVKCTHESGGKRKTGPNNKIGNVHLKWAFSEAACLFLRRNERGKLYHQRLVSKYGKAKALSIIAQKLGRTVYTMLKRRTPYDARQFFETVG

SEQ ID NO: 181233 - protein, 416 aa, unidentified
MTDQRHCYAGVDWASESHHVFLTDGDGRKIGERVFRHGGERLAEMAAWLMATSGAVEGDDIQVAIEVPHGPVVETLMERGFKVHAINPKQMDRFRDRFTLAGAKDDSRDAEVMASALRTDPRCFRLLAVSDPVVIELREWSRIAEDLSAERNRLTNRMREQLWRYFPALLELENDLGAEWLLDFWETVPTPDKAARIREATIAKLLKRHRIRRFDAARVLDILRQPPLKVAAGRTESASAHVTTLIARIRLVNRQLKQAHHRLDGLTVSLIATAEAEPGQKKQHDVEILASLPGVGRIVLATLLAEAFDALQRRDYAALRSLTGVAPVTKRSGKSCIVVRRQACHDRLANAMYHWARVAVQHDLRSRLKIRRPSKPRSQPWSSPAICRRPPSCLRLRYAQNWHDLQPALAPQKSAC

SEQ ID NO: 181234 - protein, 357 aa, unidentified
MTTTYYIGADVHSNSIEMAILNRKKITERYTVPASITAVAQVLDSLQGKKYMAIEEGPMSGWLYRNLHQKVDSFIVADPRRNKLISSDGDHDDKIDSAKLAMLLAGGYLREVYHSDNNQRVELKHWVSLYHDRIRDAVRNINKIRARCRMYGVPIPRKVLRQPEHRAVWLLKLKNTALSNQLLMLWVGYDATAKQARMAKQQLINLSKKYPIIRLWRELAGIGIIRAVTIFAFLDTPWRFKKKNKLWKYCGVGLQRTASGTDKKGKPKPARLQLPWAANRTLKNAILGAALTAINQKQSSLRADYERMVQNSIIPSNARHTVARKLLTVMWGIWKRSCQFDQAEVTLSESTEQCVCV

SEQ ID NO: 181235 - protein, 399 aa, unidentified
MQTKDRTAAVIGLDVHRRFSTVTARNAEGKIAWRQRLEHADRDRLRKVLEEWPQGIPVILESSFGWEWVCEELAQAGLEPCLASSRKVAAWRTARGMAKSNRTDADLLSELGSQTDRWWQVWLAPQEVRDRREWLRYRMSLVRQQTGLKNRTHAILHRHGILHDFADLFGVQGRRMLTRLANNVQDQRLRESGRATLKGYLQLLDHLRRQIATATRTIRGHLRASPEGKRLQGLPGVGLVLAHTILAEVGDFARFRSAKHLASYSLLAPRAFDSGEEDSEAPKGRHVGHMGRRTLKWAWIEAAHGAVRRGGRFREAFDRYTDGGKRNRNRGYILVGHELCRTAYAICKKETDYCDEPPERPGSSKKRAAARQREPRRSATSQNSRPGTGQPDHGLVVVG

SEQ ID NO: 181236 - protein, 393 aa, unidentified
MPSWTVTVKVGPSFTIAASPDGVTTLLRTLAARDATTAQTLIGLEASGHLWENLEAALGGAGYRVLVLNPLQTRRYRDVVRRKAKTDDIDAHVIAGLLRSGAAQASYVPDEQIQSLRELARLRARLLADRQDYQRQLIAQLDVVLPEHRVVLGDLLTARARGILAQFPTAQHLAHASPRAIRRAAEDAGARGFSLDDATGVRDHARRSLYSGKAAVARAHVVRTLVSQLERLTSAMDEVDHAATTLLPPSEPGTSPSDAELLQTIPGIGPQTAATLLGEFGALTRFTDARALVAYVGFYPVISESGDRAAPPRLSRVGPRIARHSLYLAAVNAVRHSREWRTIYLRKKAQGKTAKQALVVVAVKLLHAVYAMLKHREPYNPSRLLVAPATIGT

SEQ ID NO: 181237 - protein, 332 aa, unidentified
MMYVGLDYHKRYSVATKMGEDGEVLEQVKLLNDAPCLLEFLSGLPPDTKIALEATGSWYWFYELLEDRGTELHLAHPLRTRAIAEARIKTDRVDSRILAHLLRTDLLPAAYIPPRAVRDVRETLRYRASLISLRTQVKNKVHAILSKNGIRPRYKDLFGKGSLHQLRALELRPAYAEELRGYLRLAEALQRLIAEVDARVEEIAKDDPRAMLLTTIPGIGYYSALLITSEIGDIGRFPSARKLCSYAGLVPRVRSSGGRTHYGPITKQGSKYLRWIMVELSPHFVRGSSRMERLYRRVCLRHGKNAARVAVAREMLKVIYYMLRDERPFYED

SEQ ID NO: 181238 - protein, 440 aa, unidentified
MGAQSNGAALTETRGDPAAAGTHLFVGVDIGRFYHLVAAIPQERMENGSWERAVARRFATSADGFEELVAWLHSFDVSVDDIRVGLEPTGGLYSRTVVAWLVRHGFQVDWLQNWAVHDRRHLLIGKQAKSDALDARLIARLLYERECLGLVGGFLHRTPMAAEGLRMLVRNRFKLLSLHTRHRLQLAALEDVLFPEFKEVFRGSQTKLAARRVLEHFPTPADLAVAPREDIREVIYRQAKAMRLVEAADRLQTLAARSAGLVEGIEEIVRTQRHVLRELNVLDEELRIADAAIAEALESWPPRQRAILDSLPGMSVQRQAVLLSAIGDLGTFRTDRELRKLLGWYPETLESGSSVSKHRLGLSGNRLARRELWLWSMSIVAPRFPANPFKDYYARLRARNLAGHVAIGHVAGKLISVLFYCMRNGEPYDPVRHARDLGFG

SEQ ID NO: 181239 - protein, 387 aa, unidentified
MAQVNDLSRSLTAFDSISTLVVVLEMSKASWLVSGAVPGVERQPLKKLEPDATALLRLIERWRNEAVRAGRPISRIALAYEAGRDGFWLARWLIARGIEVHVIHSASVAVSRESKRAKTDRLDAAMLMRVFLGWLRGERGHCGMVAIPTMEEEDARRPSRERESLINERSRITNRMKSVLARLGVRGFKPHLRKAPERLVGLRTAEGTGLPANIMEEFRRDMARLALVREQINSIEKTRAERLKRAPDTGPHAMVRLLARVIGIGIETADMLVREILSRKLRDRRAVARYAGLTGSPDESGLKRREKGLPKTGNARVRRGLIQLAWRFLTFQKDSVLARWYRTRTEGPSGGRKTTMIVALARKLLIALWRLVTTGEVPDGVELRPVG

SEQ ID NO: 181240 - protein, 375 aa, unidentified
MIATTRPEISVSEPTLYMALELGKKDWKLAMTSGFGGTPWLRTVAGGDVHAVARALRQGRVRFGLAAQAPVVSCYEAGRDGFWIHRALTQVGIRNRVVDSASIEVNRRARRAKTDRLDALKLVQMLVRVCYGERRVWSEVHVPTVAEEAARQVSRERTDLTQEQTRVINQLRGWLTTWGATLPSRRRGDWWATVRDWAGAALPTEVQARLARADARLAVLEGQIAGLDGQQQAAVTHAVPASALHQLVQLKGVATTGASVLLDEGLVWRAFCNRRQIGGLLGFAPTPYDSGASAREQGISRAGNRRLQTISIQLAWSWVRWQPHSALTQWYHERFGHGKRARRIGIVAVARRLVIALWRYVTTGVVPAGAVLKVA

SEQ ID NO: 181241 - protein, 352 aa, unidentified
MQCIAFDSHKHYTWALVEDETGKVLREERVDHERGALREFLGECEKGSPVAVETIGNWYWIADEIEAAGMVPRLVNAGRAKLMSGSINKTDKLDAQGINRLQRSGTLPTVWIPPRELRDARELPRTRMVLVRQRTKLKNRIHANLAKYGLTAKGSTDLFGVRGREVLEESLADLPSETQFATRCLIDQLDHLQDEVKAIEKRMSSLFSDTQDLELIRTLPGVAFILGVVILTEVGDVERFPSASHLASYAGMTPRVHASGGHIRYGRTRPDVNRYLKWAYAEAANASMIHRRCHPERHVSRLYERVKRRRGHPKAIGAVGRHLAEATYWMLKKSEAYRDPAVTQTDESTREA

SEQ ID NO: 181242 - protein, 359 aa, unidentified
MDNHTSLTADVIGGVDTHKDLHVAAVVDGRDRVLGTRSFPTTRQGYRQMLAWMRTFGKPVRIGIESTGSYGAGLLRFMQAADIEVMEVTAPDRHDRRKRGKNDDLDAQNAAHAAFAGHRTVTPRSRDGMVEALRVLRVCRKTAVNARRIALQMIQNTIIAAPDGLRDQLRQMTRMQLIRTLAALRPDLTTYRDLEAAYRISLKSLARRYLELHDEIADLDVMIGAIVNELAPELLARNSIGQNSAGQLLLTAGDNPERLKSEASFAALCGVSPVPASSGKTVRHRLNRGGDRAANSALHIIAIGRLRTDDRTKAYVTRRIAEGHSKLEAIRALKRYIAREVYGVIMHRQKEINATGIAA

SEQ ID NO: 181243 - protein, 311 aa, unidentified
MTDDTIGIDISKATLDIHRLSDGKTMSFSNCPAGFKALSRFCAKTAVARVVYEATGAYHSGLERALGAHLPLVKVNPLQARRFAQAQGLRAKTDAVDAKMLADMGNAFALEPDEPAAEIQHDLKELRSFRSGLIKDRTGIMSRMKTQTLSITRRQSKARLAQVDKQIAEINAEIERLINFSDTLAHSMKILRSIPGVGAICAATILIEMPEIGSMDRKQVASLTGLAPMTRQSGQWRGKSFIQGGRKIVRDALYMPALVAMRHNPDFKAKYQALIKAGKPPKVAITALMRKLIELANALIKADRNWVTKGA

SEQ ID NO: 181244 - protein, 375 aa, unidentified
MKEKLRFLGMDVHAETIAAAIAEPDGEVRSLGTIPNRMESVRKLIKKLGPVEKLRVCYEAGPTGYVLYWQLAELGVQCEVIAPSLVPVKAGDRVKTDRRDAEKLARSYRSGDLTAVWVPDEGSEALRDLVRAREAAKQDELRARHRLGKFLLRSGHRPPTGVRAWTHLHLIWVSQIRFTQMAQESTRLDYLHEVEHMRERVLRLEKAIVEAVKLASPALQEVITDLQALRGIAQISAVTIAAELGQVSRFPGARELMGYCGVVPSENSSGKRTQRGSITKTGNAHLRRIVVEAAWSYQRPPAIWAGLRKRQQSASEEAVEIAWKAQHRLHKRYARLAAKGKDKRKIVTAVGRELLGFIWAIGTKAEATVRQRVAA

SEQ ID NO: 181245 - protein, 345 aa, unidentified
MEQISRIGMDTSKHFFQLHGVNAAEKVVLRKKLRRKEMVAFFKTLAPTVIGIEACGASHHWARILRSFGHEVKLIAPRLVKPYVKRGKNDTADAEALCEAMSRPTMRFVPVKTAEQQAALMMVGLRDRLIRNRTQLSNAIRGYAAEFGFTAARGMAHIDPLLDRIQADENVPVLARELFAAQAEEYAQLQAQIAEVDAKLMAWHKADECSRRLAKIPGVGPIGAALLMMKTPAPEMFRSGRQFAAWIGLTPKDHSTAGKVRLGVITRAGDEALRSVLVVGATAVVQHVRRGGRGSPWIVDLLKRKPPKLAAVALANKMARIAWKLMVTGNSYAAKSAPAALMGAA

SEQ ID NO: 181246 - protein, 378 aa, unidentified
MQDHSPSIGATSASAATLYVALDLSRSSWVAAIRAPHVDKVSQHKLMPGAEGLLALLGRVREQAERALGAPVRVMSCYEAGRDGFWLHRVLRGTGIENQVIDPTSLLVDRRARRVKTDRLDAAALLRALMAWCRGELRVCSIVRVPSVEEEDARRTTRERANLLKERVRHVNRIKGLLATQGIYDFEPLRPNRLEQMERLVTADGRVLPERLKAEIRRHLTRLVLVLEMLAEVEAERDRVLAEAKGHEAVLLRLKGIGPESAAILCAEIFHRSFVNRRGVAAYAGLTPSPFASGDTRRDQGVSKAGNARVRRVMVELAWLWVRFQPESALSQWFTTRVGTAKGRIRRLTIVALARKLLVALWRYFETGLIPAGAVLKA

SEQ ID NO: 181247 - protein, 289 aa, unidentified
MTDQRLSYVGQNVYVGVDVHKDTYTVTCIHHKRIVKTATVQADPASLAASLPRWFQGATLSSVYEAGFSAFVLHRSLTKAGITNIVVNPASVAVAANDKVKTDRRDSKKLAFDLADGRLRGIYVPTEEEELARLLPRTRAQIVEHRATIARQIKAKLHQFGLIAPSCRRLISNRYLREIAAWSLPPELQASLTLLAEQWRFATRQLIEMRRLLREQAQAQEAIDKVYRSVPGIGEVVARTLATELGDMTRFANERALFSYTGLTPSAHSSGTSVRRGHMSRQGSSRVRP

SEQ ID NO: 181248 - protein, 428 aa, unidentified
MESKTDRLQQFRVLHNTIRGSDTILVVGVDVAKDKHYAFFGTSNGRTLWKRLIFDNNLQGFNSLRSMAHDLSVKHSLRRSVFGLEPTASYHKPLAEYLIKNGEQVVYVSNVAAKNNRALLDGRWDKNDTKDAANIADLVGQGRCQFYDLAEDGFRELRSLLSYRAKLKKQEHALRMRIRNTLLAQYFPELDKMMPQGGQDGLILDIIARDFAPARIASLSFDEFHQQYHMEKRHLIHEQRLRTIWEISHVSVGCTPPSAAIWEGRMLVEQLHQVRQTKRELEKRLKKAGQTFPSYAYLLTIPGFGPIVSAMTLAAIGDAHRYTSRKQIIRLAGLDLSASRSGKTSNSAIPVISKQGKAELRYALVQAAQIASYRDEVIRSYFTRLLKGRELERGIKLKMRVKLAAKMLVVAWTLMKHKEVFDSDYFRP

SEQ ID NO: 181249 - protein, 389 aa, unidentified
MERPLQKLDDLSRSPYPLDPASTLIAVIEMSLSSWLVAAIVPGVERQPLKKLAVDESALLKLLHRWREEAAKAGYRIKRIAVAFEAGRDGFWLARWLRARDIEAYVIHASSVAVSREHRRAKTDRLDTDLLKRSFLGWLRCERDHCKMVAIPTIEDEDAKRPHRERESLVGEQSRIVNRMKAALIRLGIRGFNPKLKKAAERLDSLRTPEGEPIPPNTLAELRRDMARRQLVSAQLRQIEHARLERLKQAPSAGPHAMVRLLARVIGVGVETADMLVQEVLSRNMRDRRAVARYAGLTGSPDESGRKRREKGLTRSGNARVRRGMIQLAWRFLMFQKDSTLAQWFRDRTESARGTRKTMIVALARKLLIALWRLAREGMVPDGVVLRPA

SEQ ID NO: 181250 - protein, 375 aa, unidentified
MQNKVRFLGLDVHADTIAVAIAEPDGEVRSLGPIANRAESIRKMVKKLGSVEQLRACYEAGPTGYVLYWQLAELGVNCEVIAPTLVPMKAGDRVKTDRRDAERLARSHRSGDLTAVWVPDAGSEALRDLVRAREAAKQDQLRARHRLSKFLLRTGQRPAQGIKAWTLGYMAWIKQIRFAQMAQEATKLDHLTEVEHMGERVARLEKAIEEAVKLASSEIQEVVKDLQALRGIAPISAVTIAAELGNISRFKGARQLMGYSGAVPSESSSGKRTQRGSITKTGNAHLRRIAIEAAWSYRLRPGVGPALRKRQDGVPEEIKEIAWKAQHRLHKRYSRLEAAGKDRRKIITAVGRELLGFIWAIGTRAEAAVKQRRAA

SEQ ID NO: 181251 - protein, 344 aa, unidentified
MDHFAGMDVSVKETSVCILDDAGKILKEVKVASEPQALLKVLGNPAYCFKRIGLEAGPLSQWLFSALAEAELPVICVETRHMQAVLKAQINKTDRNDARGIAQMMRVGVYRPVHVKTLRSQKLRMLLTHRKLLQSKAIAIENDLRGTLRNFGLKVGMVGTVRFEARVQELIETIPDLVVLVEPLLVVRRALREQIVILHRRLLAIVRDDEVCRRLMTTPGVGPVVALTYRATVDVPARFRKSKSVGAVFGLTSCRYQSGEIDWGGRISRCGDEMMRTMLYEAAQSMLHSKKWSWLKAWAMQIARRRGMKRAIVALARRLAVIMHRIWIDGTEFRWTREPATAAA

SEQ ID NO: 181252 - protein, 408 aa, unidentified
MKMLHARCAGLDVHKDLVVACARLQEGAKVKREQRRFETTTKGLLELQGWLSELGCTHVAMEATGVYWKPVWHVLEGHAELVLANAAHVRNVPGRKTDVNDATWIADLLAHGLITASMIPPTPIQELRDLTRTRRQLVREIGQHSQRVQRVLEDANVKLSSVISDILGMSGRRILEAIVAGEADPERLAALGSERLRCSHEHLREALRGRISTHHRFLLRQHLDTIDHLQRVVDQFDAQIASLLEPFRVQFERLMTIPGVRETAAATLIAEVGVDMSRFPSAEHLVSWAGLCPRMDESAGKRRSTRLRKGAPWLKPVLVQCAWGAARTKRTYTQAQFLRLRARRGPMKAVVAVAATILTAAYYVLRDDVTYRELGPDHFVAQNRTRVAQRLARRIRELGYEVTISEAA

SEQ ID NO: 181253 - protein, 310 aa, unidentified
MSLYNNYIGIDIGKLTFVVGIYGCKITKEYANDTTGIHDFINDYKDKLSDGLCVLEPTGGYEISLLYTLCDQGFVVHRANTRKVKNFIRSFGNGAKTDSLDAKALALYGYERNERLEKFTPCSETSIRLYNLIQRRKDLKQMLVAEKNRLKNPKSKLVSTSCETMIKVINDQVEILTDEINKLISADNTLKQRQQILKSIAGIGEIVSQELLILLPELGTINRRQIASLAGLAPRANDSGSFSGYRRTGAGRNTVKPILFLAAMAARRSNSALKEYYEKLIKRGKKKMVALTALMRKIIVIANARLKGMQ

SEQ ID NO: 181254 - protein, 321 aa, unidentified
MTYIGIDVSKDSFVVAYSPEKNSKTKTFKNTTKGIHEFIRSISKDEHHCVMEATGNYSALLVYLLSEAGITTSLENPLKVKNFARAMLSTVKTDEIDARLIALYGEKMQPAPYKLRSDAILTLKQKRTVIRQLKKQLIATRNLKGSMEVLPFFDAKCKKSIQRTIAFLEKQVKDLEEDLSSLARSEYKKQMDLLTSVKGIGVTLAAALIMATGGFTYFDNAKQLTRHLGLSPTYQQSGTSVNFKGHINRNGDSSLRSQLYVAAFASLRCNTECKACYDRLRSNGKPGKVAVIAVANKLIRQAFAVVTQEKPYVDGYVSSKK

SEQ ID NO: 181255 - protein, 342 aa, unidentified
MEHYAGIDVSLEYSSVCVVDANGKIVREAKVASEPQALIAWFGSLGFGLERIGLEAGPLSQWLFAAMREAGLAVELLETRHVRKAFEAMPVKSDRNDARGIAQLMRLGWFRPVHCKSMSAQETRSLLTARKLVQSKLHDVENSLRGILRGFGLKVGKTTGQKFAGRIEELVTGHPHLQMIAKALLAVRAVLRTEFAAFEKQTRRMVRSDMQARLLTSIPAVGPIVALTYASAIDDPARFKSSKQAGAHFGLTPKKHQSGETDYTGRISKIGDASVRTALYEAANVMLTKPVKGCSQLKSWAMRIKRRAGMSKAKVALARRLAVIMHRMLADGTPFNAAAAAA

SEQ ID NO: 181256 - protein, 404 aa, unidentified
MKGPIVSIDVSKGKSDYQAFKNLNVKYTGSRSTKHTKEGFDEIVNLVREMEKKLEAEVCVVYEATGVYHRVLKKVLEDNNIKQFIINPLLSAKTRKNDSLRCPKTDKLDPKSIAKTYYSHSLHNSHKPETIYHELRELSRYYEDILVHIRKDKVAFRAQLDIVFPGYDTLFDDLYSPVSLTVIEKYPHPEMLQKKKINTVSKVIQSKTCHRQAASDTMADKAIEYSKTIYSGCDKDDIEVLILQRFIKKLKEDMAEAERTIGEMIKLAQELPDFSIIKSIPGIGDNLAARIIAELGDMTRFKKKNELVAFAGLDPRISESGQDDGDHMHITKKGNKRLRCLLYLAVTCSIRLKRDNNSIKDFYIKKKQQSNPMCSKAAKTACASKLVRIIYSMCKTGELYQYNK

SEQ ID NO: 181257 - protein, 340 aa, unidentified
MDITTLGIDIAKSVFQLHGVDADGAVVVQKKLRRGAVLNFLGKVGPCLIGMEACATSHYWAREIAALGHEVRLIPPAYVKPYVKRQKNDAADAEAICEAVTRPNMRFVPIKTEEQQSVLVLHRARDLLMRQRTMILNAIRGHLAEFGIIAAQGPRQVMGMIARLRDDGDASLPEIARSALLALGAHLEALAGEIRALERQLIVWHRADPTSQRLEPIPGVGLITATALAASVSDPSVFKSGREFAAFLGLVPRQNSSGGKDRLGRISKMGDRYLRKLLVVGATSVIRRAGSKSTKTGAWVRSLMERKPARVVTVAMANKTARIAWAVMTRGEAYRASPIA

SEQ ID NO: 181258 - protein, 313 aa, unidentified
MRIFVGVDVSKDSLDVYRPDTAEQIKIDNSEAAVADLCQQLQKKKRHLIVVMEATGGYERLLVNQLALHDLKAAVINPRRVRDFAKGVGMDAKTDPIDAKILSRYGEVVSPKPMAVKSEHEQKHAALVARRNQLLELISQENNRLQQTWDDDVKQSIRDVLEMLKKQLKSIDSQLAKMLKADAKNQRTIEILQSAKGVGPVMISTLIAELPELGRLNRAEIAKLVGVAPINRDSGKKSGKRFIGGGRGQVRRVLYMATIVAIRHNEKIKTFYQHLKSKGKVSKVAIVACMRKFITILNLLVKKDQLWQTKTSV

SEQ ID NO: 181259 - protein, 324 aa, unidentified
MIDAILGIDVSKNTLDVSISSCTKVRSKSFANSSDGWHHLLDWLIAQKIQRVHACLESTGRYSLGIACSLYEAGHVVSIINPAQIRDFVRTKLGRNKTDGIDASRIREYCELFKPSPWAPPSEAHRRLGELQTIRAGIIAGLTEWKNRKNSGIVDTEAQALADATILHFTSQLGAVDKAIALTIDNDSDLRSKRDLLLSISGVGDTLAGVVLAELPGPDVLRSSGEVVAYAGLNPRQHQSGTSVDRATRISKIGNAVLRAALYMPALSAMRYNPAIVALVTRLKSRGRLKPKQIVVAAMRKLLVLCFGVLKTGKPFDPAITMGC

SEQ ID NO: 181260 - protein, 388 aa, unidentified
MESAVYLGVDIGKSGHYALAVDAAGKPIYQTSVVNDEVALRKLVDWAKERQASVVVDQPGGAAALLLKLCWQSEVRIGYLHGLAMARARDFYAGESKTDPKDAFVLADVARAHPTRVVWLEPSSEALAHLELLCGYDADLRADANRITNRLRGLLVAHWPALERAFGERLDSRGVLAVVQQYPSGPAIKEAGVEQLTAALKAQRVRRPEAFAKQLHDAALAQTVTITGSATAARLIAELAAQLAAVLTRRDELEKEIEEGFFALPEAAILRSLPGIGPRLGARIAVEIGSISRFRTPGHLAAYAGLGPTPWKSGTSINANMPSRLGNHRLKNALFLAAFASWDARRIFSSLISLAIFAVVAISSPIAGTAFPFAATAPALPHPCARWW

SEQ ID NO: 181261 - protein, 342 aa, unidentified
MWIIGCDFHPRFQQIAMVNTEGGEWEERRLEHVAEAEQFYRGLAGQAVRVGMESGAQARWFERLLAELGFELWIGDAAKIRAAETRKQKTDARDARHVLELLLNGQFEKKMRIWIPPADNRDLRQLLWHRHRLVQMRTRVKNQLRSLAASEGLGRKPSLWSKPGQQQFQDLALPPWSEQRRKDNLELLSDLLRRTDPLDQAVQQAAQQRPEALRLMTHPGVGPITALAYVLILGDPTRFANGKKLASYLGLIPAEDSSGGKQRLGHISKQGNALLRGLLVEAAHIAVRHEPEWKRYYFRLAMKKNRSIAIVAVARKLAVRLWWMWIRQCHYAQLSGSGSHAG

SEQ ID NO: 181262 - protein, 385 aa, unidentified
MAPPTRPRIVIGLDVGESAHWACVVTREGELLASGPIPNREDAIDGLYAQYPGALVVVDQVRNIGSLALSRARLAGMPRAYLPGLAAHGASKLFAGDAKTDERDAMVIAKTALGIPDALLAVADRPPEIETARSLAAQRDFLTCENTRSKNRLRSILLESCPEFEAQADLSDPATLKLMAAVGGPWSISGASPQAVEALTRGCRRAKVAALVESVESSSRPHPAAVACEDRAVRLLARRISENAAEIESLTSEISALLAADETYRCLLTVPGIGPRTASELVISIDIADFAGHDRLASYCGLAPRNRRSGTSISSVSASRQGNKRLKNLLIFSCNCLARSRNRWGEYYARCRDRGMPHGKALKAVARKRLKVIYAIMRDKVPYAA

SEQ ID NO: 181263 - protein, 411 aa, unidentified
MIREPSVDDSVHKYLFLEVLYMTFFVGIDIAKYKHDCFIMDEDGCVIRDSFSFSNDSNGFNFLLSILKNIKKKGKIKIGFESTGHYHFNLKLALEKNGFDYIEINPLLIHKFMTTQTLRRTKTDKKDAKTIAKYITTVDYKPYPNSFYHINNLKSLYRLKETLITDRTRFLNLITAYLDQIFPEFKPIFNGSFNKSAFYLLTNYLTPHKMAKLDAKKYEKMKSELRNPISYQKLCTIRDAAKNTIGNSTPALEYSLKSTIDLCLYIDNQIEEISQKILEIYNQLDSHIHTIKGIGTLTAAGILSEIGNFDKFTTANQLLAYAGLEPSKNQSGTLEGGGKMVKHGSSYLRKYLMNAAETFYVYNPAISDFYWKKRNENKPHRVALSHVARKLVNTIFYLEKHKVDFDVNVVK

SEQ ID NO: 181264 - protein, 379 aa, unidentified
MTTTIDTRDVCCVALELSKKIWVCAFAAPGDGKVIVHKFKAGDVDRLIGLLNSSRAKAEQQLGRTLEIVLCYEVGYDGFWLARLLIARGIRTVVFDPASFLMPRRGRRAKTDRLDAEGMTRTLRAWLGGDKEVARDVQIPSVEQEDAKRIERERKYLVEERIGIVGRIKGLLALHGIWLTGKRIGKGLRERLDTLKTGDGRPLAPFLRRDIERMLRHYDFVSEQIEEVVADRKAALADKRGHFPQAEKVQRLATLGGVGETSATVLVAEVYHRSFETRRHVASFIGLAPSPYKSGDVDRDRGISKAGTKLARQTLVELAWFWLRYQPRSKLALWWHERFADKGMRGRQVGIVALARKLAIALWRFVEEGVIPEGATLKV

SEQ ID NO: 181265 - protein, 385 aa, unidentified
MSELNDLSRSLTSLEQDKTIIAVIEMSQSSWLVAGIVPGIERHPLKKLEPSEEELVRLLTRWRAEAIKKGHTITRIAVAFEAGRDGFWLARWLRARDIETYVIHPTSVAVSREHRRAKTDRLDSGLLKRVFIGWLRGEPDHCHMAAIPTLAEEDAKRPNREREGLVRERTRIVNRMKSCLIRFGIRNFKPTLRKAPERLATLGTPEGVPLPPNTLRELRRDMARLRFVMDQIKEVEEARAERLEQAPQERTHAMVRLIARVIGVGIETADMLVHEILSRKLRDRRAVARYAGLTGAPDESGSKRREKGLAKAGNARVRRGMIQLAWRFLVFQKDSTLAQWYRTRTESAGKKRKTMIVALARKLLIALWRLVTTGEVPAGVVLRSA

SEQ ID NO: 181266 - protein, 424 aa, unidentified
MSYRIAGIDVHKKMLAVVVADIEIDGEYQFARRQCGSNPEHLRLLAEWLIEQEVVEVVMESTAQYWQPVWGALERYWRPICQKREGAGPKSGTLHLAQAQSNRGPRGRKKDFPDAERLVKRLVANELTLSFVPDAEQRLWRTVMRRKYQLTRNRVQLQNRLEALLEEAHIKLSSLVSDLLGVSARRMLKALGDGETNPAVLAAMADKKLRATPTQLCDALGACTELNAVYRRLLKMTLEELQLLEQQVGQLDQEMASLLSQHQDSVKRLAETPGLGVDSAQQIMAEVGTMAATFPSAKQLSSWIGACPGDEESGGVSKSHRSPKGNRHMRRILNQSANAAVKVKGSIFEIVYRRLVPRLGHKQTIGAIAHRLCRLIWIILHRGVRYEERGPAVSQRSRRHRTNRMIRELRSLGYRVESMNLLPT

SEQ ID NO: 181267 - protein, 399 aa, unidentified
MADRLFSVFLGIDVSKEKFDVCCINSTGEKLFRTSLSMGKEGFDELSRKLSSLSVPKESILIGMESTACYHINLFSFLTSLGYTVVIINPLLISNFMKLQLRKTKTDKKDAFVIAQFLVLNRESLSESSVSSDIADLRDLSRQRESLVHQMNAVKHEIKRVLTITFPELERITGIFSKSMLRLLQHYPSAYAIRKAKRTKIAKVLIQGSYGKQDDESVQRIKEVAERSIGTTSPAKEVILKQKASLLMQMEEHLEELTDILIDQCKAMIREDVEILKSIKGVGDKTATNFLLELGGDINKFKSHRQVLAMAGIDPTVYQSGKYIGQSKISKRGNRHLRRVIWIMATKVIQFNRIFKLYHAKRMKDGLPYKKAVLATAHKLVRVMFSMLTNKTVFIAKAN

SEQ ID NO: 181268 - protein, 256 aa, unidentified
MSTQNYAGIDIAKRHFVIGIHGKDKTKTETNNPKGFTHTIDYLHKHNVGLVVMESTGGLEIPLAKTLHRAGFQVVIANPRCTKNYANGFSLAKTDHLDAKMLADYAQALEIKGLVANMLYIPPSEAEEKLEALVKRRSQLVDIRAAEKNRLEQIHESQQQSVKDLIAHLDKLIAELDKDIDSNADAFDGKGQVLTAIKGIGSTTSATLLSMLPELGTVPHKRIAMLAGVVPPPNQSGDTDKKTGCIGGSMAVRNMQ

SEQ ID NO: 181269 - protein, 348 aa, unidentified
MISMPDSVIDVVGGVDTHADAHVAAAVDRLGRVLGTGAFATTRSGYLELIAWLESFGRVTTVGIEGTGAWGKGLTRVVQDTGIDVVEVIRPNRQTRRRYGKSDMVDAIAAARAVLNGEATATPRDTDGTIEALRLLRIARRSAIAARTRTANQLHAVITTAPDPIKTQLNGLTMTRIARIATNYRPGTNLTNTTHATKYTLKTLAQRWRTLTNEITHLNTQLDTLVAHAAPPGLLDICGVNTHTATDLLIAAGTNPQRITSDQSFAALCGVSPVDASSGHHIRHRLNRGGDRQANAALYRIVIVQLRYHQPARDYMTRRLQQGRTKPEIIRCLKRYVARTIWTHLNPN

SEQ ID NO: 181270 - protein, 409 aa, unidentified
MTAPPVAVQPQLFAGLDWASKTHMVCVVDQSGEIRARFEIPNMGKSFTGLVKRLTKLSVAGVAIERCDGPLVEALLETNVPVFVITPRQVKGLRSRYSGSGSKSDAGDAYLLADVLRTDRHRLTPLTQDGEATQVLRALSRTRKQLVESRVGLVNQLHAELERCFPGAIGLFARLDSDVAIAFLRRYPTQHAAARLTRARFAAFLRRISYCGRTPVDELFARVSDAPTAGLTATEAEGHAVCVLALIRAIQTTRGEERELEAEIIERLDAHADAHIFTSLPKAGHGVRAALLLSEIGDVRERFPDEESLAALAGVAPITRASGKAHSVGFRWAADKKLRNALIDFADDSRHASPWAAKVYRDAITRGKRHPHAVRILARAWVRVIWRCWQDHTPYNPQLHGGAMQLIAA

SEQ ID NO: 181271 - protein, 408 aa, unidentified
MKPLYHCIAGLDVHRMLHVLTVLVEQADGSIVKHQRSFGGFKRDLRELTRWLLSLDVQLVIMESTGIYWKSVYAALEKAGIAAHVVNAHHAKNVPGRKTDISDSEWLAQLGRFGLVKPSYIPPQDLRELRLVSRYRQKQTQILAGEKNRLHKLLDDAGIKLGAVVSDIGGVSAQAMIDGLLEGRPIAQLPNLAKGVLRNKRDILAQSLDGDLSSRHLFVLQQIQRHIRELEAHLAQLDALLINAMTPYTEFWYLLQTMPGIDQIAAAMILVETGVDLSCFGSSEHFASWAGLCPPNNESAGKRRAGKSRKGNHAIRYLLCEAANAARRTKSSLHDKYQSLLPRKGHKKTIIALAHKMLRTIYILFTRRQAYHDPGIDYQAMVVTKNAPRWIQALKKYGYWPSPQSVRV

SEQ ID NO: 181272 - protein, 407 aa, unidentified
MDRWAGLDWAKDAHQVCVLEAEGDPLVQRGFTHDERDLDGMCELLVELDVKRVAIERPDGVLVERLLEAGLVVLPIHPNQLKAARPRFRASGGKSDSFDAFCLAELARTDHHRFRALAPDSDETKALRALTRAREDLVHTKVSLTNRLQAELEAFWPGAACIFSRIDSPITLAFLKRYPSPKDARALGEKRLQSFLARHSYCGGKSAAELLAKLHSAPKGRAQEAEEAARRAAVLSLLAALYPIVEQIRLFDSRIAHAVRVHPDGEIFLSLFRNPGSTLTAATLLCEIGDRRERYPSAEALAADAGMSPVAKESGRRKVATFRRACDKRLRDAMTTLADSSRQHNPWAKDIYLRARGRGCDHPHAIRVLIRVLGRAWLRVIWRMWQDEVPYDPDKHGGRRRLSAAGG

SEQ ID NO: 181273 - protein, 384 aa, unidentified
MKLVSGLDVHKDSVFMCILQENGEKIEGKYGTMTPDLNKLRETLLFHKVEEVCMESTGVYWIPVWNKLVDFFELKLVNPYFIKQLPGRKTDVKDAEWIATVLQKELVRGSYVPCGIIQEMRQYERGQADLRKRIVYLEQRIDMQLQRCNIRLSNYVTDIGGVSMRKVVKAIIQGETRPEVLSVLVHGRITNKHGHQTITDSLSGIINSVDVFMLKQYMDQLELLEKQEQECLETLSDISDHYFKNEMALLMTIPGVQKQSAMTILAELGADMKMFATAAALVGWAGLRPRNEESAGKIKSRKTLHGNKFLRIILVQCAWAASRTKKGRLGDKYRQLASRMRAQKALVAISRKLLVIIWNVLSKKEAFDPNRGIKSRTRIKTSLS

SEQ ID NO: 181274 - protein, 421 aa, unidentified
MHFTQNERINQITSSTLIVGVDIAKFKHVARAQDYRGVEFGKPIAFENNRTGFEYFDSWFEKLGAEQGFQDVIVGMEPTGHYWLNLAHFLREQQVKYGVVNPLHVKKSKELDDNSPTKNDVKDVKDGRYAVPNLPQGVYAELREAMKIRDHLSTDLSVVQGRVHNWLDRYFPEFLTVFKDWECKSAIHLLRLYLLPHELVSLSDETLLLHRREIAKRGLGLGRVKSLKAAAARSVGIKQGSQLAKMELRLLLTQYELLQKKFEELEVHLDELLMQIPFVPQLLAIKGIGRDTIAGFLAEVGDIEQYRHPKQIIKLAGLNLKENTSGKHKGQAKITKRGRKRLRALLFRVMMPLVAKNAAFKALHEYYTKRPDNPLKKMQSIIALCNKLIRVLFGILKKGHEFNESKMMQDIPRFAELLKAA

SEQ ID NO: 181275 - protein, 369 aa, unidentified
MKQQTKSSNITVGLDLGDRRHRFCALDERGEVVEQDSICNDRVSLRKLAGRYHGALGVMEAGAHSPWISRFLEALGWRVVVSNPRKVRAIYQHERKSDQRDALMLARIGRMDLALLYPVRHGTAEGQQDLLRIKLRDSLVRARVAVINSVRFTLKSLGYTVRNPSSARFHKVVMEEVPESVREMITPSVQALAELTARIKMLELEINTLAQMKYPQSAQLQQIPGVGPITALYFVLKIEDPNRFAHVRDVGAYAGLCPRRDQSGESDPQLRISKRGDAYLRRLLVSAAHYILGPFGPQSALRAYGLMLAADGTARAKKRATVAVARKLAVLLLSLWKSQQPYQPFPGACLNGEQEDRRSGTIAMHRVEA

SEQ ID NO: 181276 - protein, 346 aa, unidentified
MSYFVGLDVSLDETAICVIDDAGAILKEGKAETEPDAIIAWLTAVDGPIERLGLEAGPLSPWLYEGLRAAGVPAICIETRRMKGATAVMAVKTDRNDARAIAQAMRVGWFTAVHVKTAESQELRLLLTNRKTLQTSRVRLENEIRGTLKAFGLKVGHVSTVAFEVRVIELTGDRPRLQAMVRPMLAARQALRVQFDALHVMVLKAVRAHAACRRLLTVPGVGAVTALTFATAIDDPARFTRSRDVGAHLGLTPRKYASGEVDRNGAISKSGDRLAREALFVAAHTLLTRVTRWSALKAWGTAIAKRRGLRRATVAVARKLAVILHRIWADGSEFRWRREEAVAARN

SEQ ID NO: 181277 - protein, 370 aa, unidentified
MHETITSYVGLDIHKDSIAIAIAKAGRDAPQFIGTTVSQLAHVRKVLTRQKCAPSKTLVVYEAGPCGYGWARYLSTQGFHCEVISPAHVVRSAAGKAIKTDRRDALLLARESRAGNLTSVTVPDERDEAIRDLSRAREDAIAARLRARQQLKAMMLRHGRTYPGTSWTLAHERTLATVRFEHPAQQIAFEEYRQTVKGAHERCERLTEALREQCKDWRMGPVVDALMCLRGFDFIAAVTIVAELGDLHRFAHPRALMSYLGLVPSEHSSGNTRRQGAITRAGNRHARRILVESAWTYRFPAHVGREQQIRQQGQPTAIRDIAWKAQVRLTKRYRKLSLGRKMKATKVCVAIARELCGFIWDLARHVQLQR

SEQ ID NO: 181278 - protein, 363 aa, unidentified
MSLEHHRQEPSAIQTNLGAIFVSLELSRSTWLITSLARFSELKQKALARTGKSFPIIVIQEAGLDGFWIHRVLQSEQIESHVVDAASIATSRRRRAKTDRIDGEALVRTLLAYKRGEPRVCAMVRAPMPEDEDSRRLCRERKALTTERVQHVNRIKGLLFSQGVSDYEPLRRNRRHRLDELRTGDGRPLPPHLKAHIGRELDRLELLLEQIKVVEAERDALLTSVAKTEGTPAPPAMLMGLKGIGPEFAAVLWSEGLFRSFANRKQVAAYAGLAPTPWQSGAVAHEQGVSKAGNPRLRTTMIQLAWLWVRHQPHSALTRWFHERVKRNGGRLRKTIIVALARKLLVALWKYVNSGVVIEGAIV

SEQ ID NO: 181279 - protein, 364 aa, unidentified
MEVSIIGLDLAKNVFQVHGVDAAGRIVIRRAIRRSQVLPFFAKLPSCLVGLEACGTSHHWARELLAVGHDVRLMPPAYVKPYVKRGKTDAADAAAICEAVTRPTMRFVPVKSREQQAILSLHRTRALLVKQRTQLVNMIRGQLAEFGIYIPQGLERALMLARQIIEGKEAPDLPGHAVKMLAILCRQTLAGHEQIREIDRDLMVLQKSDEMARRLATIPGIGPIGATAFAAAVTDPGQFKSGRQFAAWLGLTPLQNSSGGKERLGQISKMGDKYLRRLLVIGATALVRQFRNRPDKATPHFASLLARKPVRVATVAMANKMARIVWALMTRGETYRAAHTPGCVRDNGIQLGHLAARGCGSDAM

SEQ ID NO: 181280 - protein, 473 aa, unidentified
MDVKGTRRKNQVVNIFEQQEMLAKAEEIRNSLKASTWRELETNGKFDKNDKLTFISDDMLILGCDIGSEVHYARAIDTRGRELSKSVFAFSNTKEGFESAKEWAVQLAAANDKKQIVLGLEPTGHYWFCLATWMICNGISVVQVNPYAVKQTKEVEDNSQLKDDRKDPKLIANLVKDGNFGMPYLPEKVYADMRRLSMFRDQLNEDRIRNINRLHREMKIYFPEYKDAFGKTDGQFCLEILRVDPFPEDLLRLGEEGIRQIWHEAKLRGRGYSRASEIIKYANESVGLKNGTEASKTAARWFAEKIMELDKQLAEIKEQLMRKCSQIPHAEKILEISGIGENTLSGILAEMGDISRFDDVKEIQKLSGLNLVSCNSGKHNGQTKISHRGRKRLRYWLFQAAKSAVAHAEEFKELHTYYTTRPDNPLKKMQSLIVIACKLLRVIYAILTKGVTYDPKKLLSDIKRPARQVAQAA

SEQ ID NO: 181281 - protein, 338 aa, unidentified
MLFYGGIDLHSSNSYICVIDDNDKRVFDRRLPNQLEQILMAFSPFKDNLKGIVVESTYNWYWLVDGLQEHQYSIKLANPAAIKQYEGLKFTDDSSDAFWLAHMLRLNILPQGYIYPKEDRGLRDLLRRRSMFVGQHTAQLLSLQSMIIRNTGIKMSGNAVSRLNIEDTQEMFSSPHLALMAQNNLESMVFLKSIIKRIETTVLAEAKLRKEFQLLLDIPGIGKILALTIMMEVGDISRFRNAGAYSSYCRCVQSRRETNGKKKGENNRKNGNKYLSWAYIEAANFMRRYCLSAQKFYQRKEAKANSILATKALSNKIAKASYYVIRDQVPFDVEKLFK

SEQ ID NO: 181282 - protein, 389 aa, unidentified
MKIYVGIDIAKLNHFAAAISSDGEIILEPFKFTNDADGFQLLVSKLESFDKNSIIIGLESTAHYGDNLVRYLVAEFYQVCVLNPIKTCQMRKNNIRKTKTDKVDTFVIAKTLMMQDDLRFITFFDLDMMDLKALGRFRQKTIKQRTRLKIQLTTYVDQVFPEIQYFFKSGLHQNAVYALLKEAPSPKEIASMHMTHLANLLKVNSHGHFTKEQAKELRVLAQKSVGANDSAISIQITQTIQQIELLDSQLEKIEAEMTDIMKFNDSVIMTIPGIGYINGGMILGEIGDIHRFSNPNKLLAFAGLDPSVYQSGNFQAKTTRMSKRGSRILRYALVNAAWNVVRNNATFKAYYDAKRAEGRSHYNALGHCAGKLVRVIWKMLTDEVEFNLE

SEQ ID NO: 181283 - protein, 331 aa, unidentified
MKIKDTIGIDISKLTFDVRIHSNQDYRVFENSIKDFKELTKWAFKSSAFSKDEIIFVFEHTGLYSHELAVYLSEQNIPFALVPGLEIKRSLGIARGKDDKVDATKIALYAYRLKDEIKPTELPLEDIMALKRLLSLRERVVKQRAGYKTSLKEQKRVLAKNKNKVLFESQEKIIIYLSKQIDEIEKEMDNIIKKNERLSQIYKLITSIKGVGPQTALFMIAYSNGFTKFKNARKFASYCGIAPFPNSSGTSIRGKTKISNLANKKIKSLLDLCAKSSIQFNEEMKVYYNKRIEKGKNKMSTINIIRNKILSRIFAVVERNTPYINLMKYAN

SEQ ID NO: 181284 - protein, 361 aa, unidentified
MTHNMTTPPDARKVIIGVDTHKHVHVAVAIDTWGIRLGDHSFVADSGGYEALVMWAQTHGRIEAFGIEGTGSYGAGLVSTVRCAGHRVVEVNRGDRRTRRAAGKSDTIDAEVAARSVLAGQATAIPKTADGAVEMMRQLKIARDTAVKARTTAMNTLKQIVVHAPSGLREALHDLTDHSLLRRCAGLRPGPLDTLPASAKHTLRALARRWIALAEEIATHDRHLARLTTETSPTLREGFGVGAHTAAELLILFGDNPDRIRSEAAFAKLCGVCPIPASSGRTTGRHRLNRGGHRQANAALYRAVIVRMRYHQPTVDYVARRTADGRTTRDIIRCLKRFLAREIYQRVMTDFRARQEIIQAA

SEQ ID NO: 181285 - protein, 317 aa, unidentified
MTEPTAYAGVDVSKHHLDAAIVPTGEHVSMATGDLAKLVAWLARRKPKLVVIEATGGYERDVVAAAAAAGLIVAVINPRQVRDFARATGRLAKTDRIDAAVLAAFGQVVQPEPRALQTEQAQALRDLVARRRQLLDMRKAEKTRLQTRIGPVVRAGLQRHLAWLDAEVASADDDIDRMIRQSPAWRADEDLIRSVPGAGPVLARTLIAEMPELGRLNGRQIAALVGVAPFNRDSGKMRGTRSVWGGRAKVRSVLYMATVSAVRHNPILKTTYQSLRLAGKPPKVALTACMRRLIVTINAMLKSRSPWRPDLTAITAA

SEQ ID NO: 181286 - protein, 320 aa, unidentified
MQSPSAVLNIGADVAKDAIMVACSEGSFPVREVANQRPAVLAFLKGLPAGSRIGVESTGTYHELFAETAHQFGFRVFLLNPKDTRHYAKAVGLRGKTDRVDAELIARMIAHEHTQLHVWNPPTPQQREIDRLIKRRATLISLREAVEMSLHGLGGFADELKALRTHFNQLIARIDLRTKALVEASPDRKQNFTRVCTITGVGPVIGTALVNTLERVPVKSADAFVAFTGLDPRPDDSGQHRGKRRLSKRGPGELRRLLFLAAMSAAKTKTWRPLYEHYRAKGLSGTAALVVLARRIARTAWSIYTHKTEFDPARLMKPLT

SEQ ID NO: 181287 - protein, 422 aa, unidentified
MKNSTARKLQQIPAGYLLMGVDPHKKKHVAVAMTQDAIVHAKLRFTNSKEGFEEMLERARAEMVRTGSRGVIFAIETASHYWRNLAYFLDEQGIPFRLINPFTLKRRREGEDVNRRKNDFRDAEMAAELLRTGKFIETRLPRGIYAELRATYHAYRRLVKDRARFTNLLKGLLDGLFPEFTQVFRNPRGKTALTVLSLCPVPRIIASMTLEDFVDSIRKEFHGRAPKVQKLHALYAASKTSVGIDAGAESISFELSLLTQRIRLNEEQIERTEAILVRLVDSITDSRYLLSIRGLSYISVAGIMAELGPLSLYRDAGQLIKMAGSNPTESESAGKQASHTPMSKKGRPGLRWCTWVAAVSLLRHNPDFASWAKDRMERPAHAHPLEKREVIGALANRLLRLAYALVKKQTMCRVPQMAEIAI

SEQ ID NO: 181288 - protein, 329 aa, unidentified
MKRKWFIGIDISKRTLDVVIYDQENIKAKSHFKVDNDIKGFKKMMKLFKTEKVAFDSAFICLEYCGVYGLEIGFFLEKKISFCFCSPLHIKRSLGLTRGKNDKLDAFKIARFSYLFRDELSPSSMPTATMLKLKNLMGERHRAVKAATIDKQVLKELSGQLDRKAVLRSRKRLKVLAADISAIEKEVMTLIIENPELKKNYDLLITITGIAIVNATMMILCTNNFEGITNARSFACYCGVAPFEYTSGSSVRGKTKVSNLANKRMKANLTNAARSAIVHDPELRIYYKRKREEGKAYGTILNAIKFKLITRVYAVINRGTPFVKLRQAG

SEQ ID NO: 181289 - protein, 399 aa, unidentified
MISVGIDISKEKSTVCVLKPYGEVVCSPFEINHTEKDLSELSAMLLRLNEDVKIVIEATGIYHLPVLSYLQDRGLFVSVINPFEMKQYRSQGLRSVKTDKKDSIAIANYGIDHWFRLKDYEIAEGLYQELKILGRQYSHYMCMRIESVQSLTHLLDYTMPGIKNLLKGWQDSTEKDKLSDFVEAYWHFDNITKLSLEEFTESYKTWAKTKGYHQSQNKAVKIYSLAQDGIPTLPAEMESTQIMIQQSVSVLRQINTTLKTILTRMQELAKKLPEYPVVRAMGGVGDILAPKLIAEIGDIRRFHSSKALIAYAGIDAPPYQSGQFIGTNRKISKRGSSTLRKIGYEVMRVLKTHNAPEDSAVYWYILKKESEGKSKKVSKIAGLNKFLRIYYARVKEVYQ

SEQ ID NO: 181290 - protein, 336 aa, unidentified
MKKNYEFIVGLDVSKDKLDYCIINQSTLHQDFGQLTNTAKGITAFLSSVSKKFKGKMEGILFCLENTGVYSMPLCYWLQASQFDYWVVSALEIKRSKGIVRGKTDKADSRDIALYAMPHLHQLKLSSLPEKDFVELRLLFTEREKVIKAINLFNMTNESKNFLPNSVLKTTLQHNKRMMTFLKKQLKQIEQSIENLVEANPIFKQQDELLQSIPGVGKQTSVLLIAYTQAFTLFQNHRQFACYAGVAPFEYLSGSSIKGRTKVSNLANKKLKTALNMAALSAKKYDTQLKFYYEKKIAEGKNKMLVLNAVRCKIISRAFAVINRNSKYVDTMKAVA

SEQ ID NO: 181291 - protein, 369 aa, unidentified
MPHVTSIGLDVHARSVAAAAFNPFTGEVVHRDFGTDAAEIAEWALGFEEPRACYESGPTGFRMARELRALGLDCAVAAVSRMQRPAADARRKNDRRDAEFIARMLATHNIVEVPLPDAAAEAARDLDRALDDATADYLRARQRLNMFLIRIGRVWDERNAGGTRKKAWTRAHWRWISETRLEGPQRDVLEHYVTAARCAESDKRQLERKVVALAGTDRWRPAVEALSCIKGIDTLTAFRLAAEAGSFSRFRSAPAFASWCGLTPSERSSGETERRGGITKAGNRLVRTALIESAWHYSMCTPRPKVPAPGADVPAAIRSRADECTARLCRRREALSAAGKNACKANAAVARELACWVWEIGCRAEGTLG

SEQ ID NO: 181292 - protein, 411 aa, unidentified
MNQITSVGIDVSKGFSMVAIRQPGGVIVEPPFRVNHTSRELNALVQRLHILPGEIRIVMEHTSCYWRPIGLTLVNAGFFVSIVNAMLIHDFHDNSIRRVKTDRADALKIANYALTFWTELKPYSPEDELRQLLKMQCRLYERTLSTSVTLRNGLISLLDQTFPEINRMFHPLVKQSNGHVKWVDFVKTYWHKEKIATMTESRFMDSYRRWCKREHYQYYTSHARRIYGLAKETVASMPRSESTRQLICQAVDSLNAVYEALHQLRKEMLRLAQQLPEFEAVMSLPGAGNITGPKLMGEIGDVRRFTSKRALVAFARVDAMPYQSGIMDSHSRRMSKRGSPLLRKTLFQMCSICLQLSRVDDPVYLFMDRKRGEGKQFYVYMVAGAAKLFRMYYARAKSVFDADKEENKITA

SEQ ID NO: 181293 - protein, 378 aa, unidentified
MDKDSGEVLLQPSSFSNTKDGFDSLIQKLSSYSKDSILIGMEDTGHYHFALLKYLLEKNFTVALINPKTTDYTRKMQNGITKNDKLDTLTICDVLDTPVRKKQYRITKVNSFDLYEQKQLTRHHHNLKEELNVYTNRLQKCIDIVFPEFNSLFSSKYGIIYMNVLKTFGSAENIASTDIRTIRKCFEIKGRGNRISLTAQQLKDSAKSSIGISSAAEVIKIKHLISQIELINEQLAETDKKIEEFSIQNNSPILSIPGISHFSGTSILAELGEISNYSKPSKIIKAAGVAPYHYESSQYDAQHTAITKKGSPYLRKTLYQIILPVINNNNPVFKQYYDLKISQGKGHRCACGHCVRKLLRIIYHLSSTNQQFDDALLR

SEQ ID NO: 181294 - protein, 465 aa, unidentified
MARVQESTSKPRAKQNHRAKLKPQDCTLGLQVVHPKAAGIDVGNEEHWVAVSPDVDPAPVQSFGCFTRDLQAMADWLLRCGIETVAMQSTGVYWVALYDILAERGIRVFLVNASDTKNLPGRKTDIQECQRLLKLHAYGLLRNSFRPEEEILVMRTYWRQRQQHIADAARCIQHIQKALTQMNVQLANAISDISGTTGQAILSAIVAGERDSGKLASLRDPRVKASEETVAKSLEGNWRPELLFVLRQELESYRTFQTKIVECDRQLQLHYATMQSKADPEQLAPVARDKRAHGHVPTGFDLREQMFRTTGVDLTAIDGLNILTVQTLIAEVGSDMSRFATEAHFVSFLDLSPRNKISGGKVVGREKRKTKNRAGLALRQAAGSLLNSDSYLGAQYRRLRTRLGAIKARKAMANKLARIAYRMLKYGENFVDKGKEFYELKYRRLQINILTKKAAALGLQLTQSA

SEQ ID NO: 181295 - protein, 427 aa, unidentified
MSQGTADWSERAAFVGFDWASDHHDVVVVDGRGMIVEEFRFEDTAEGWQLFHKKLSPHPNPAVALETSSGATVERLLAAGYAVYPINPKAAKRYRERKAPSGTKTDRIDAWSLADALRLDGHTWRALKPDDPLTVELRLLCRDEIGLIRQRTALVCQLRAALGEYYPVALQAFDDWTSPSSWAFVEAFPTPQALHQARKRRWEKFLHVHKLYRPETYEKRLALFAQARAFCGSEPAVQAKSLLALALTAQLRALQSHLDKYRERIHELFAQHPDHELFGSLPGAGEKLAPRLLAELGDDRERFDSPQALQCHAGTAPVSYQSGQINKARFRIACQKLLRHTVHLWANLSREKCPWAEAYYRTKRAEGQSHACALRCLGQRWLKILWKMWQTRTSYDAELHQRNQLKHGSWVLNLMTPKTTALAAGEA

SEQ ID NO: 181296 - protein, 369 aa, unidentified
MQTRSFIGLDVHKATISISIAEDGRNGSVRFLGVIPNAPDDIAKMAKRLSRHGELDFCYEASGCGYGIHRQLTVLGHRCTVAAPSMIPRKPGERIKTDRRDSEKLAILHRSGDLTPVWVPDTTHEALRDLVRARVDASMHLMRARQQLLAFLLRHGRSYSTGKHWTQRHRSWLAGQTFREDAHQIVFQDYLEAVWTTQQRRDALIERISAMVADWSLGPLVEALRGLRGIDLISAATFIASTGDLSRFESPRLLMGYLGLVPSEHSSGGSVRRGGITKTGNREARRMLIEAAWSYQYPARVAKEKAEILVRLPKSIREIAWKAQTRLCVRYRSMIAKGKKPTVVVTAIARELAGFIWAIGQEMRIAMAG

SEQ ID NO: 181297 - protein, 353 aa, unidentified
MANPMANLTIGVDLGDRYSELYVVDAAGACVETGRIRTTVAGLEQWFGGRPPARVVVEAGTHSPWASRVLQRLGHEVLVANPRKLRGLYENDSKDDRVDAEYLARVGRLDPALLKPITHRGEAAQADLAVLSSRDVLVRARTLLINHTRGVVKALGGRLPRCSAEAFARRVGPHVPPAVRPALAPVLEQLQQLTTTIRGFDRAVEHRCAQSYPETARLRQVTGVGPVTGLAYVVVLDDPTRFRRSRAVGAYLGLRPRRSQSGEQDPQLRITKAGNPFLRRLVVQAAHYILGPHGPDCDLRRHGERIAARGGKNAKKRAVIAVARKLAVLLHHLWISGAVYEPLRHRPALAQAS

SEQ ID NO: 181298 - protein, 355 aa, unidentified
MDSKKYIGMDVHKESISIAVMNGAGKIVMECVIETKASMILQFIDGLRGDLQVTFEEGTSAAWLYDLLKPQVTKLVVCDPRKNASMREGNQSDKIDARRLAELLRLNHLNPVYHGEHGLRSLKELVRSYLTITKDLGRVMTRVKAIYRSWAIPCTGKQVYAARHRAEWLGKIGEPGVRRRAEFYYQQLDALRTVRQEVRRELLAEGKKHKAWKRLCQIPSIGPIRSAVLLGILQTPHRFRTKRQLWSYSGFGIETHSSADHRRVNGQLQRAKKQSSIRGLNRNCNHDLKNLFKGAAIVASSKPGPFQEFYTALLTKGIRPEMARLTLARKIATIVLMVWKRGACFDAQHLKPQTA

SEQ ID NO: 181299 - protein, 388 aa, unidentified
MQTVADRPEAPTAIRTDLGAIFVSLELSRSTWLITSLSPGGGEKMSKQVVRGGDVAELLERFARLREKARARTGKVFPFVVIQEAGLDGFWIDRALQNEGIESHVVDPASIATSRRRRRAKTDGIDGEALVRALLAYKRGEPRVCAMVKAPTPEEEDRRRLCRERKVLIGERVQHVNRVKGLLFSQGISGYEPLRRDRRERLDTLQTGDGRLLPDHLKAQVCRELDRLELLLEQIKAVEAERDVLLAAQQVAAPAPAARLLDIKGIGPEFAAILWSEGLFRHFDNRRQVASYAGLAPTPWQSGSVDREQGVSKAGNPRLRTTLIQLAWLWLRHQPQSALALWFEERVRRNGGRLKKTTIVALARKLLVALWKYVTAGVVIEGAVMKRT

SEQ ID NO: 181300 - protein, 339 aa, unidentified
MQLYAGLDLHSRNTYIGILDREFNRIFKKRVGNNLELILQTLQPFGSQLKGLVVESTFNWYWLIDGLMDNGYQCVHLANPSAIKQYEGLKHADDQHDAFFLAHLLILGILPQGYIYPKKDRPVRDLARKRMFLVQHRTAHILSLQSLIARCCAKKVSSNEMRHLTLDDLQHLLEEEHLVLSAQANLDSIRFLTQQIKKIEKTINKKVKLNQAFQNLLTVPGIGNILAMTIMLEVGDISRFAKVGNFASYCRCVSSQRLSDGKSKGHGNRKNGNRYLSWAFVEAAHLTRRHCQQFRRYYNRKVAQANTSLATKALSNKLARICYYIIRDNVPFREDLSSQ

SEQ ID NO: 181301 - protein, 362 aa, unidentified
MAMKAMALVGLDVHARQTHAAVLAPDTGEVRVCKLRMAPVEVVGFLEGLGTVRAVYEAGPTGFGLARAARERGIDVRVAAPGSIPKGSGDRVKTDRRDAIRLARLLAAGELAFAFVPSVADEAFRDLVRAIEDVRGDLMRARHRLGKFLLRRGERYPGPGGTWTHAHLKWLRALDIDDACSHAAFADYLAAVELLSARRASLLVALEAQIPESSHAPQIARLRCFRGIDTLSSAGLCAEVGDWRRFLQPMRLSGFLGIVPSERTSDTKRRQGSITKAGPSHARRLLVEAAQHYRYPPRIGPALTRRQAGQDPRVIAIAWRAQRRLHQRWQHLHHDRRKPAGIVAIAVARELAAFCWEAATLD

SEQ ID NO: 181302 - protein, 339 aa, unidentified
MELYAGMDLHSTNTYVGILDSGLKRMFKKRVQNDLGLILETFEPFRKDLQGIVVESTYNWYWLVDGLMDAGYRCVHLANPSAIQQYEGLKYCDDKHDAFWLARLLALGILPEGYIYPKEDRPVRDLLRKRSFMVRQRTEHIHSLQSMIERHTARRLTGNEVKKLESENLEGIFEHKYSTLAADADLCAIKFLAEHIKEIEKAVLEKAKLKEPFKRLLTVPGIGEILALTIMLEVGDIGRFPKVGNFTSYARCAPSGRISNGKKKGEGNRKNGNHYLGWAFLEACNFARRFYPKFRSYHQRKASKSHPFVATKAICNKLARICYYVMRDGVSYREEAIFC

SEQ ID NO: 181303 - protein, 426 aa, unidentified
MPYQIAGIDVHKKMLAVVVADVEVDGEYHFERRKVGTSPTQLRALAEWFLDRGVEEVVMESTAQYWRPVWETLEQYWRPQRRAQDGASPVSGILHLAQAQSNRGAGGRKKDFPDAERLVKRLVAQELTLSFVPDPEQRLWRTVMRRKYQLTRNRVQLHNRLESLLEEAHIKLSSLVSDLLGVSARRMLQALADGETNPTTLAALADQRLRATPEQLSDALGACTALHRVYRRLLTMMLTELRVIEEQTAELDREMAGLLAEHHDAVQRLAEVPGLGVGSAQQIIAEVGAAAATFPSPKHLASWMGACPGNEESAGVNYSHRCPKGNRQMRRVLNQAANAAVKAKGTIFAMVYRRLVPRLGHAQAIGAIAHRLCRLIWKILHQGIRYEERGPAVNESLKQARARKMIRELRSLGYHVERMVQSTGPA

SEQ ID NO: 181304 - protein, 429 aa, unidentified
MNYTQNEKIEQVTDSTMVVGVDIGSQIHYARAFDNRGRELTKRIFSFHNDLEGFNSFNLWAETLKTENKKTAVLIGCEPTGHYWFAFAKYVNDHQKRLVMVNPFSVKKIKELDDNSPKKTDSKDPKIIAKLVVDGRYSIPYMPEGIYAEIRDLVYSRDRIMKQHNISANRIQRWLAIYFPEYLGLYTRFDAISGLAVLEKAPLPKDVIALGVNGIRKIWHDKKMRGRGVTEDRAKTLVEAAHNSVGLDGGIGTKSELYMLLEEHRLWTSQLEAVNKVLEEMILKVPHVEKLLDIKGVGSITIAGFIAEVGDIRRFDSPKQIQKYAGLELVENSSGKHKGRTRISKRGRRKLRKILYQVMVPLLARNKEFRGIYDYYVTRVKNPLKRRQAMVAVSCKLIRVFYAVLTKGVEYDRFKMMSDIHRKSDIIAA

SEQ ID NO: 181305 - protein, 397 aa, unidentified
MYIVGIDIAKRKHEAAVIDGEGAVIIKPFSFTNNCSGYNRLLAMLTKAKLPLDEVSFAMEATGHYWLALFTRLQKEGFRVQVINPVQTNSIRSFYIRQAKTDPRDALLIAEVIRFGHFSESTLHPENIYELRELCRGRHAIVSMQADVKRKVVALLDQVFPEYETAFTNMFGDTSMAILQTCPTPKELSEMPLEELCHLIEVSSHKRFRMAKAQELQALARNSFGFAMAGDVFSTMIRLYAKHLDFLKQQVQEMDRKIAEIMETLDTPITTITGIGPTLGAYILSEIGDISRFSSAAKLAAYAGIDPTMRQSGEYNGVRNRMSKRGSPYLRHAIWLAASSAVLHDPALKLYFQKKRDEGKPYMASVGHACRKMVSIIYAVMRDNKAYTPCIPNEISA

SEQ ID NO: 181306 - protein, 343 aa, unidentified
MRIVGITGGVDTHADNHVAAAVDRNGGLLGVESFPADEVGYEDLLAWLASFGELVRVGVEGTGSWGVGLTRFLTDHEIVVVEVDRPNRQTRRKQGKSDPTDAISAARAALSGEATVTPKSRNGPVEQMRVLLVARRSGREQRIQSLNQLRHLVFTAPEEIRARFKDRPKTGLISEAANMRPRKGSNPIVYRTNQVIRGLAKRIQGLNTEIKTIDQTLRLLIEEKAPGLVALHGVGTDTAASLLVAAGDNPDRLSSEGSWAHLCGVTPIPASSGKVTRRRLNRGGDRQANAALYRIVLTRMSSHEETRRYVARRRSEGLSTPEIMRCLKRYVARQTYKHLPHMI

SEQ ID NO: 181307 - protein, 379 aa, unidentified
MEAKRKDPLSIRHRCARVEMLVNHSQDRGSDMQVTTYGVDLAKQVFQVHWVEPDSGEVKRKMLRRGEFQGFFARRPAGLVAMEACGSAHHWGRSLKELGHQVRLISTQFVRPFVKSNKTDAADAQAIWEAAQRPEMRFVALKSEQQQAVMGLHRIRAQLVKQRTMQANQVRGLLYEFGVVVPKSWRALLAQAGPILADESRSEVPGLIRGQLQQQLQGLRDLTQRIEQLERTIGSYRQQDERCRRIEAIPGVGPLSSTAVVASMGDARAFRSGREFAAFLGLVPRQSGTGGRVKLLGISKRGDPYLRTLLIHGARAVLNHSGRPGRHMPRWLQGLLARRPKNVAIVALANKIARTIWALLAHGRTFEDWWGQTVSVPVV

SEQ ID NO: 181308 - protein, 373 aa, unidentified
MGEDRTVCVGLDTHKAKIAVAVAEPGRSGEVRFHGEIANQADAVRRLIERLADKHGRLRVCYEAGPCGYGLQRQITALGHDCMVVAPSLVARKPGDRVKTNRRDAVTLARLHRAGELTAVWVPDPTHEAMRDLVRARTAAMEAVRRARQQLQGFLLRHGRVFTGRKTWSPAHRRWLAGLRFAHPAQQIVLQEHIDAIAEAERRRDRLEQQIRELVPDWSLAPVVAALQAMRGIAFLSAVVLAAEIGDFRRFTSPRQLMAWLGLVPSEHSSGSKVERGGITKAGNGRARRVLIEGAWSYRFPARVTSPIQARLDDVPEGVRAIAWKAQVRLCARFRRLVAAGKNVNVVTTAVAREMAAFAWAIACQVQPREAAA

SEQ ID NO: 181309 - protein, 409 aa, unidentified
MEIVIMRCAGLDVHKATVVATVRVPGEAGRRQVVTETFGTMTPDLIALREWLQAFGVTHVALESTGVYWKPVYYVLEDAFELLLINMLELKRVPGRKTDVKDSEWLAQLLECGLLRSSFVPPPPIRELRDITRYRVQQTRDRSQEVNRLQKVLEDAGVKLTSVLTDVMGASGRAMVEALVAGTTDPQVLADLARGQLRKKLPALQRALVGRFRPVHAFLLEEILAKIDYLDEALERLTAEIDRRVTPFEPMLSALDTIPGIDRIGAISLVAETGGDMTRFPSAPQLCSWGGMCPGHEESAGKRRSGKTRKANRYLRTTLIQAGNAAARKKDSALQALYQRVARRRGHKKAVVATGHQILEIAYYVMRDGVTYRELGADYCQRRDRDRTVRRHVKQLEALGYVVTVQPAA

SEQ ID NO: 181310 - protein, 462 aa, unidentified
MQDSQKRKSSSGNRREIEGLPVIRRRIAGIDIGSERHWVCAPTIEESGREVADFGATTPELIRMAKWLKERNVESVAMESTGVYWIAPHEVLEAEGLEVMLVDTRQLARVPGRDKKTDPVDCEWIQRLHSCGLLMGSFRPQEAVCMLRTLVRDKGNLVAEAGDWLRRMQKSLDQMNVRVHRAVADLQGATGMAIVQAIVEGERDPRKLAKLRDHRCHKSEAAIAEQLSGHWREDHLFSLRQALKMYHSILERISDYEQELLKKLAAMEREECRGQEAPKVNNPQKAHAIRRRGEEPMRHALYRMSGVDLTGIDAIGVATVEVVLTEYGPDMSRFPTEKQFVSHVTLAPHRPTSGGKPVKKKKRNSASTRVAAALRMAALSLRHSDTALGAYYRNIARRKKGDVAVFATARKLAALIYRLLRWGQPYVDEGAQAYERRYQQTRIRGLMARAKELGYQLTPTTA

SEQ ID NO: 181311 - protein, 457 aa, unidentified
MARKGRSTKGIEKAQPFEGISRVNPNAAGMDIGSVEIVASVDGAENTQLVRAFGNYTSDLENIGDWLSEHGVKTVAMESTGVYWIPIFETLEKRGFECLLISSRSLRRVAGRKSDIADAQWIQTLHGYGLLESSFRPQADLIALRTLLRHRGQLIEHRSPHIQHMQKALLQMNVQLSQAVSDITGVSGLRIITAILNGEREPAKLGALREPGCKKSAEEIGRALTGTWRAEHLFVLKQSFEMYVYYSEQIVDCDEEIERTYAELRVDNDPGELPPMSRRKRGSHSKNKPKQSEEIRAHLKRISSVDLSLVDGFGVSLSQTVLSEVGTDMSKFPSEKHFCSWLGLAPKHEISGGKVLKNRTLKTKNRAGQAFRMAAQSVKRSETVFGVKYRRMRARLGPAQATVAVAHAIARVVYRMLKYKVEYETISVEEYEKQYKEQQLKYMKRKAAKLGFTLVPA

SEQ ID NO: 181312 - protein, 429 aa, unidentified
MNYNTQNAKIASITEKTLIVGIDVGSETHYARAFNWRNYEYSKKPFAFSNDEAGFAAFKEWMDDIAEKHGMEVIIPGMEPTGHYWLNLGAYLQEQGMKPVHVNPHHVKKSKELDDNNPSKNDRKDPKTIAGLVNEGRFSYPYIPTGIYAEIRNLSNLRIQTQEEITRIKNRMARWFSIYFPEIKDVYRNPDAVSGLMVIKQAPLPCDIRELGVEGVNKIWRDARLKGAGIKRATTLVTAAEHSIGNTEAPRSARKEIRNLLEDYEGYKKRMDELMEEIEKTLSEIPYIDKLMEINGIGIKTVSCFIAEVGDIGRFDNPKQVQKLAGYAIVADSSGKHNGESWISHRGRKRLRYALYEAAISVIGKNKEFKEIHSYYRTREKNPLKKMQSVIAVACKLIRIFYTILTKGVDYDGQKMLNDIVRPEIQPAA

SEQ ID NO: 181313 - protein, 343 aa, unidentified
MQTITTIGLDIAKSVFQVHGVDANGQVVIRRQLKRRYILAFFQKLPPCLVGIEACASSHHWSRELQALGHTVRLMPPAYVKPYVKRHKNDAADAEAICEAVTRPNMRFVTTKTEEQQGCLTLHRTRHLFIRQQTSVINVIRALLAEFGIVAPVGRNGVEQLLAVAADASDQRLPQVARACVIALGIQLQMLKAQILKFDRMIMAWHRSSEASRRLDDIPGVGPALATALVASIADPKVFRSGRDFSAWIGLVPKQNSSGGKDRLGNITKRGDRYLRSLFTTGALAVIRYAKIHGAKHRPWLTALLTRRPTKVAAIALANKIARMAWAIMARGERYKEPAALAA

SEQ ID NO: 181314 - protein, 348 aa, unidentified
MRIIGCDLHARQQTLATLDTTTGERVHLTLMHEGNEVREFYSQLPRPVLVGIEATGSMQWFLNLMDELGIECQVGHPAQIRAAEPRKQKHDRRDADLILKLLAEQRFPASWLPSKELLDLRALLLHRHQWVRIRTRIQNALQAIALANGLRRGPGLWSYDGQAKIAFLPLLPHASYRRSALQALYRKMEEEIENLTHQVAEQAGQRSAAQRLMTHPGVGPVTALATEVFLGDPKRFADGKALASYVGIIPREYSSGGQQRLGGVTKQGSPLLRFLWYEAGAHAVRRDPGLKCFYLRKLIQKGLGKARVAVARKLGIRLWIMLRDEIDYQEFCRRGQRQQSGAACGGDA

SEQ ID NO: 181315 - protein, 414 aa, unidentified
MDVLYPRCAGLDVHKDTVVAAVRSAANGPANTEVRTFDTTTPGLLALSGWLAECGCTHVAMEATGVCWKPVWHILSDGDVTLILANAAHVKNVPGRKTDVADAAWLADLLAHGLVRASFVPEAPTQAMRALLRTRKQLVREQASHAQRIQKTLEDANLKLASVLTQVMGKSGRAIIGALIAGERDPDALLRLVQRGVKAPPERLRAALTGRVTERHRFLLRLHLRQIDALEAAIAEIDQEVDRDLDPFRQAVRLLRTIPGLSDLTAQVIVSEIGLDMSRFPTAGHLISWAGLCPRNDESAGKRRSTRLRKGAPWLKTTLVQCAWAGTRTKGSYLQAQFQRLRHRRGPKKAVCAVAASILTAAYHMLRDGTFYQDLGPDHLRRATPEAQACRLARQITKLGFTCTIAPADKPVSV

SEQ ID NO: 181316 - protein, 391 aa, unidentified
MQVTADRPEAPSAIRSDLSAIFVSLELSRSIWLITSLSSGSGEKMSKHSVPAGDICALMARFSELKQKALARTGKLFPIIVIQEAGLDGFWIHRVLQSEGMESYVADPASIATSRRRRRAKTDRIDGEALVRALLAYKRGEPRVCAIVSAPTPEAEDNRRLCRERKALTAERIQHVNRIKGLLFSQGVSDYEPLRRNRRQRLDELKTGDSRPLPMHLKAQIGRELDRLELLLEQIKAVEAERDALLASAKPTEETSALPAMLVGLKGIGPEFAAVLWSEGLYRIFANRKQVAAYAGLAPTPWQSGTVAHEQGVSKAGNPRLRTTMIQLAWLWLRHQPHSALAQWFKERVKRNGGRLRKTTIVALARKLLVALWKYVNAGVVIEGAVMKVSS

SEQ ID NO: 181317 - protein, 337 aa, unidentified
MFMQVYGIDLSKEKFDVNFIDANGKEESLKVKNSLASISRFLSSVSEDGFLCAEHTGAYGDLLVYLCNQMNISIALIPGYTIKHSLGLVKGKSDPLDSKRIREYGERFTDKLEYTEYPEENIVELKQLYTLRYQLVRQRKSLRTIDKGRGVLPMQSIEVYNHLNNVMVKLDEEIAAIEDEIEALIMSDQEMRESYELATGVIGIGPVIATNLIIKTGNFKTIDTCRRAASYAGVCPFPKTSGKMVGKSKISPFADKELKTLLYMGAKAAVKHNKEFKLYFQKKELEGKPYFLIMNNVSNKLLRTVYSVVKNKTPYEKDHICLDPRERNTNSSTKKVA

SEQ ID NO: 181318 - protein, 318 aa, unidentified
MPQETRIVGLDVAKSKVDACIHSMGLRLSAPSTPEGEADLVAWLRANRVGRAVMEASGGYERSWAEALRAAGLKVRIVDPKRVRHFAKAAGRLAKNDPIDAETIARFAEAFPDDNAQSHDPAREEIGRLLQAREALKDAQERIKQQREHQPPAIVVQALAAVAKTLRAELRRLEASIASRIKANPAFARRGELIDSVPGLADQTVAGIVAWFPELGRIPNGAASALLGAAPYDDDSGQRKGARSIRGGRRKLRNLLYMAVVGAATQHNPVLKAYYQRLLARGKEPKVAIIACMRKLIVILNTMIARDEPWNPPAQAAE

SEQ ID NO: 181319 - protein, 394 aa, unidentified
MFIVGIDIAKRSHMVRVIDSEGRTVYKPFSIRNSCSGCNALLERLRKLTNRKSEFLFAMESTAHYWLALYTRLRKEGYQVVVLNPIQTDAMREMLMEENKTDEIDTLVIAETIRFGRYRASSVPQEKLLALRELCRNRFYLIDMGSDLKRKITALLDQVFPEFESQFSTIFGKTALAVLRQYPTPEKLSRAQTGKLTEVLQTASNGRFGEWKARQLKELARDSFGIPDCEGAYSALLLLYLDQFQSLQDAAAVLEKRITELFSQFDSTLTSITGIGPVLGAVILSEIRDISCFASADKLAAYAGLNPKVKQSGDKKSSAVHMSKRGSPYLRRAIWMAGAIAVQFDPMFKVYYEKKSAEGLRYMNIIGHVSKKMTSVIFAVMRDNKLYEPVLPAA

SEQ ID NO: 181320 - protein, 430 aa, unidentified
MKYNTQNAKIASITEKTLVLGIDVGSETHYARAFDWRNYEYSKTPLAFSNDEVGFLTFKAWVEDLKEKHGKTAVIPGMEPTGHYWFNLGKFLQDSGMRPVHVNPHHVKKSKEMDDNNPNKNDRKDPKTIAALVNEGRFSYPYIPTGIYAEIRSLSNLRFQTQEEITRIRNRIARWISIYFPEYKDVYGKMDAVSGLMVLKEAPLPAKIRELGAEGINQIWRNAKLRGAGMKRAKTLLSAAEHSIGSQEAPEAAALEIESLLEDYEKYKGRMAELMGRMEEKIKEVPYVEKLLAIHGIGLKTVCGFLAEVGDLSRFDNPKQVQKLAGYAIVKNDSGKHAGESHISYRGRKRLRYVLYEAAISVIGKNAEFREIHQYYQTRDRNPLKKMQSVIAVACKVLRVFYMILKKGVDYNGEKMLQDIRRPGRNIKAA

SEQ ID NO: 181321 - protein, 348 aa, unidentified
MILLGVDPHKSTHTVTAVEPEAVRALASVTIEASLPEYRRLTAWARQWPHRMWAVENAHGLGRHLAQWLIARGERVVDVPSTATRRVRELSRGGGRKNDQIDAAAAATVACLHGDAREVAAEDHATALALLDERRGNLAQARIRAVNQLHVLLRDLLPGGAPRQLSADQAAALLRTVRPAGPVERVRKDLARDLVTEVRQVDRRLAENTASLQTLMAATGSTLTNTPGVGPVLAARLLARAGRASRFPTSAAFANYTGTAPVEIASADKSRHRLSRCGDRQLNSVLHTIAMVQIRMPDSPGHAYYQRKLAEGKTSKEARRCLKRRLADHVWRVMLSDERRAQIAAAHP

SEQ ID NO: 181322 - protein, 392 aa, unidentified
MYIVGIDIGKNHHEASIVSPEGKQIGHSLRFATTHKGADSLMSFIFKNIGNSPCVFGMEATGHYWYPIYSFLKAKGYTICVINPIQSDSLRKMYIRQTKNDSIDSFLIAEVIRFGQFGTTSMADENILAMRQLCRYRDSVISSRTEIKLRIGTIMEQIFPEYEKQFSSLWVSTSMGILEKYLTPENIENAPIDELFEIIKDKSHNRLTKAKAISIKEAAADTFGIKIAQDAFSFQLKQLIDRMNFHDKQIEALDIEIMKYYEQFDCYLHTIPGIGIIGAATILAEIGDISRFKNSSALVAFAGIDPTVRQSGEFNSTHNHMSKRGSPYLRHAIFLAATTCSFHNSPLNAYYKKKRDQGKHHLTATGAVARKLTTVIYAVLRDSKPYEPKKFC

SEQ ID NO: 181323 - protein, 400 aa, unidentified
MKASKRYLRFCGIDMGKHKHVACIVEKDGRYLLQPKSIRNDAHGFETILNCLKQTGRTKSVLTGMEATGHYWYSLHDFLTRQGYNVVVLNPIQTAQQAKQAIRKCKTDRYDAFHIANLLRTDQYKAAVVPDELAMTCRQITRLRYRIVKQAAMIKQLLNSRLYPVWPEYEALFSSKFGKTSMELLKKAPTPKELMELDPDELSELIHRVSKGRFGPAQTQKILQSARNSVGMQRGHYGISIGIKFLIEQIVALEPVRKKMDAEILKLSAKLPQYLFTLPGATELTIVSLYGEVSPIEAFEKPSQLVAFAGLDPKVFQSGQYDAPRRHISKRGSPYLRRTLWQMAYRALITEGDLRDFWRRKHRQNKHHLVATTAVANKLCHVVWRIMTDRRDYIRKGYNP

SEQ ID NO: 181324 - protein, 296 aa, unidentified
MLIIGCDFHPRYQQIAMMDTETGELVERRREHENGEARAFYASLPKPVLVGMEAPGYAQWFERMLAEFGHELWIGHASEIRAGVVRKQKTDARDAQHLLRLLLEKRFPRIWIPSPAERDARQLLRHRYKLVCFRVSVKNQLHGLAMSQGVCRKKKLFTAQGREELEKLSLGPWGSCRRQELLGMLDQLNPVIDELDRAVRQEAESRADAARLMIHPGVGPVTALAFVLTLGPVARFRRSKQVVSYLGLNPKERSSGDKQHTYAISKQGRRNAVELARGRAVNFSESRREPHKFGQR

SEQ ID NO: 181325 - protein, 350 aa, unidentified
MTVKHYIGFDVHKKSISYCVKLADGTIVEEGKLRANRVSLREWAGKRLEAWQGAMEATLFSSWIYDTLKPFASKLEMGQPAMMKAISAAKKKSDKLDARKVADLLRCDLLPVCWVAPPEIRELRRMLRYRNLVVRQAVQMKNKISGLLMESGAEYSQRRLHGERYFAELMEKLEEIPESVKDLLKLSRGSLETFQATQQQLLKQLQKHRKLAKRVKLLRSIPAVGEVTALSWALEIGEPQRFASIADAVSYCGLTSALISSADKQQRGPISKQRNPHLQTVLIEAAKLAPRWNRQLAALHKKEKQRGDSNQATIAVARKLVAYLLAVDKSGKEFEVRTPLEPGSEIQPAA

SEQ ID NO: 181326 - protein, 404 aa, unidentified
MERPSAGIDWASEVHALCVVDGEGTKLAGEFFAHDEAGIRQLVARMQALGVRKVAIERPDGLLVDRLLEAGFTALPVHPNALKATRPRFEAAGGKSDGFDAFCLAELARTDAHRLRALRPDSDETKALRALTRTREDLVGARVRLGNELRAQLQAFWPGAAQVFADVDSQIALAFLERYPAPGDARGLGEKRLEGFLARNRYCGRRSAAELLERLRSAPEGRAGALESEARRGAVLGLIAALKPIVAQIAELTSQIAGAVRSHPDGQVFLPLFKDPRSVITAARLVAEIGDDRSRYPTGEALAADAGMSPVARESGKRKVASFRWACDKRLRDAVCCLADSARHHHPWARAVYLQARSRGLDHPHAIRVLGRAWLRVLWRCWQDGVPYDPAKHGNLQRLQPAGG

SEQ ID NO: 181327 - protein, 341 aa, unidentified
MKQFIRIGVDLAKNFFQIHGVEREGVEAVSRKLTREKFRAFFERLGPCRVGMEACGSAHYWGRELMAMGHDVVLIAPIYVKPYVKRGKNDAADAAAICEAMSRPDMRFVPIKSADQQAVLMLHKTRELLVKQRTMIVNALRGHLSEFGLIAAKGVQRVHELVALAQGEEGLPEAARQAVAVLAEQSEQLEGSIDGLEKKIAQSSAASPMARLLKEIPAVGPLISSAMAASYPDPSLFKSGRDFAASLGLTPSQHSSGGKEKLGSITKKGNRYLRKMLVVGCTSVLRVAHKYKGALAEWIVAIKAKKPERVAAVALANKLARICWAMLSTGESFREELYTKA

SEQ ID NO: 181328 - protein, 387 aa, unidentified
MTRVVIGMDPHKRSVTIEVMAPDETVLDGGRYATDPVGYAAMLRRARHWPERFWAIEGCSGIGRHVATRLLVDGEQVVDVPPKLSARVRVFSTGQGRKTDATDAHSIALVGTRMAGLRPVVDDQQLAVLRVLADRRRALGEDHTRTVAQLHHLLLELIPGGAKKDLSAAQARALLSKVRPRDAAGKARRRVAAELIADLERIYARKKAADKELRELIQATGTSLLTLNGIGPSGAARLLIDVGDITRFPTKGHFASWNGTAPLDASSGEQIRHRLSRAGNRQINRTLHIMATVQLRNPTEGRAYYDRKKASGKTSMEAMRCLKRRLSDIVYRHMVDDAVRAMTGPGGHRGTATQSSATGSHPHTGSSDKSLPGPATPEPTTALPAAS

SEQ ID NO: 181329 - protein, 398 aa, unidentified
MLSIGIDVSKGKSTVCGMKPGGEIVYTPFEVQHTREGMSELVSLLRGSGEEVRVVLESTGSYHCPVVAALLENGIFVSVVNSLRMKRFCSQSIRRVKTDQIDAMQIALYGLAYWQELQPTRLPENTYRELQLLARQYYQMTSLLIKAKVDFNALCDQVLPGMQELMSDHAGRHKLSDFVLRYHHTAHILEMGETRFRKDYCKWAEKKGYRNHERMAALIFATAQNGIPVLPDAPSTQIVITEAIRVLHTVEASRDAILTQMQALAKTLPEYSLVREMPCIGDTLAPRLIAEIGDVRRFHSKRALIAYAGIDAPPYQSGKFCANNRHISKRGNRYLRKTGYEVMQSYVMHKPANDPIFTFIEKKRGEGKSGKLAMVAGLNKFLRVYYGKVTELYRSLPQ

SEQ ID NO: 181330 - protein, 340 aa, unidentified
MSLYGGIDLHANNSVIVVINEQDEVIYRKRLPNALPTILEQLAPYHTEMQGLVVESTYNWYWLVDGLMEADYRVHLANPAAIQQYSGLKYTDDHSDARWLAHLLRLAVLPEGYIYPKAERAVRDLLRKRAHLVRQHTANVLSVQNIMARNTGARFSVKRIQELTKQELQSLLTEEPQVLAVTSSLAVLDCLKHQIKTLEQTVHKRLNHTPSYEQLLTVAGIGTILAQTIALETGDIRRFPSVGNYASYCRCVDSNKISNGKRKGTGNVKNGNPYLAWAYMEAAQFALRFQPAAQRFYQRKLAKSRNNTVLARKAVAHKLSRACYYLMRDLVPFEETKAFG

SEQ ID NO: 181331 - protein, 362 aa, unidentified
MTIYIGLDVHSKWTYYAAQSSSGALIGSGRVPTSRQGLLGLLESLAAEPGTAAALESGTQAFWASRLLVEAGMEPLVVSAREVRAKARRRAQKSDSRDAFELCDGLRRGIWCSIVHVPCARVQRLRRVLSRRRFFVRECVRNANAARYLLRGAGLRGEPAGALSGRPGWRRLLCRQDIGPLREHLLLHARAWLLSRRNVERLEAELSAALEPFAREAELLQTVPGVGPITAASFIAAIARPDRFADAGRVASYLGLVPSSYDSGGRRRHGHITRSGPAAVRAVLCEAAHQAARAAHPLNPYWRRICSRGGYRKAVVAVAQRLARILWALWRRGEPFDVGRLNVELHPHAVRRTYIYRLKRPA

SEQ ID NO: 181332 - protein, 446 aa, unidentified
MNTKFKALQIKRQFLINKYVVGIDPAKARQQAAIVDGHGMLSGKPFTFANSLDGYENLLRKVKLQTADVNAQNIVFAIESACNLWIPLAWYLKKQGYEVLLVSPLSTKQSRPMIGHDFSRTDPKDALLVASNAQRGYFDFYREYSDQIKAMHSLSISYDKLRKNLVQQRNRIHALLDRCFPEFFKVLSTESKTAAYLLGKYFRPGHFLTMDIDEECEVIRKLSYGNIGRGHLEKLQQYARQSIGIDLDVYEEQAERLALDSYLALSALLEKQMDRILKHLIELAKQTRYFKILISLKGISQTQAALFIAETRDLSGFNHYKQIEKFAGYNLRQSQSGDYIGPRHINHIGNHRLSHILYKMCEETIKYIPEVREKFVSRQLSKRSYRKNVVACCSRLLRLIMSLVKQKRTYQARGNKSVERLCYMEKKYAILKNSDRKRFGNKATAV

SEQ ID NO: 181333 - protein, 339 aa, unidentified
MQITTVGLDLAKNVFHVVGLNQGQKEVMRKKLRRAQVKRYFANLPRCLVAMEACGSAHYWGRELAKLGHVVKLIPAQAVKAYVQGNKNDYNDALAIAEAVRRPKMRCVQVKTARQQDIQALHRLRDGAIGQRTKICNQIRGLLAEQGMVVAKGVARIRQAIPHLLEDGENELSGHFRTLLQQAYCQLQELDGHIKIYDQYLVQQVKENEDAQRLMSIPGFGPVVSSVYLNTVGDGHAFRRGREVSAYIGLVPRQHSSGDKPVLLGISKRGNRQLRTLLIHGARAVVRYAPQKDDALSRWVTKLVLRRGKNKATVALANKLARIGWAVLTRGGVYQPRRV

SEQ ID NO: 181334 - protein, 305 aa, unidentified
MISWVGIDISKSNLVVWVQPQKDGFEVPNTIEGFDVLVARLGQYTVGRVLLEATGGYERKVMAALQQASFSVLRINPRRARAFAVAMGKNAKTDPIDAAVLADFAEALHASREKPISPEREALRELIQLREHFVQQRDDNKRRLQQAQLPAVVEAIRDHIRYLQTQIKQLGKAIDQSMRELDAEKADRLISVKGIGTVATASLMVYLPELGELDRREIAALAGIAPYNDDSGNHSGKRQIYGGRARVRRALYMSCWVVIRCQADFKARYESLRERGKSAKVALIACMRILLIRLNAMLRDGTEWR

SEQ ID NO: 181335 - protein, 419 aa, unidentified
MKNSKTKKLKTVNEKTLIVAIDIGKAIHHGYFRGPDGQDIKPFPFRNGQKSYEEFWMKVLHFKQQKNLEEVVVGFESTGPYAEPLMNFLAKKPVRLVQVNPMHTKRLKELTGNSPNKTDSKDPRVIADVIFLGHALTVVVPVGPAAELRRLTQARQRASKNRTAMVNQLHHLVFVVFPEFMQIIKKITSKSSLYLLKNHPSPEDIVDLGFERLHALLKKISLGRLKQCQVKALFEAAGNTAGIDEGKESILTEIRHLVSCIERDSQFMARLEEQMSQYLKKIPYSQSILSIKGIGEVTVAGLIGEVGDFRQFKTIPEIMKLDGLDLYEISSGKHRGQRHISKRGRSYLRKLLFFTAINTIRTNGIMHEKYLRMLDRGMPKVKAVVAISRKLLRMIFALARNHTTYMENYGHNHHVKLAA

SEQ ID NO: 181336 - protein, 339 aa, unidentified
MDHVAIDLGAKKSQICVRSADGRILEEKRWPTGELGTYLAGRPTSRVVVETCAEAFCVADAARRLGHEARVVPATLVKTLGVGARRLKTDRRDARTLSEVSCRIDLPSVHIPKRESRDRKTMCGMREALVGARTKVINTVRGWLRSRGRRIERGGRGSFRQRVKAAWEGQVPSYVERQLQVIDVLNVQIKAADAELKSWVEADETCGRLMTVPGVGPLTALRYVAALDDVTRFESAHQVESYLGLVPGEYSSSERQQRLSITKAGPRALRWVLVQAAWALHMRCRKPEALPLQLWSHRIEQRRGKRTAIIALARKLAGILYALWRDGSVYDGSRGAKMI

SEQ ID NO: 181337 - protein, 417 aa, unidentified
MDDIRWFAGVDWASEKHRVCLLNASGQAVGERDVDHTGAGLSELCEWLLAKTGGAPGQIAVAIETPHGPVVEALLERGFAVYAINPKQLDRFRDRFTMAGAKDDSRDAHVLGDALRTDRRALRRLALQDPLLIELREWSRMTEELQQERTRLANRVRDQLWRYYPQALEITDDLAADWFLDVWQQVPTPAKAARISERTIARILKARRIRCIDAAEVLRILRKAPLVVAPGTAEAASAHIGTVAARIRLVNQQIKQAHRKLDELCAQLEAPSENAPGQVCEQRDVTILRSWPGIGRIVLATLLAEASEPLQRRDYHALRTLSGQAPVTRRSGKQCFVIRRRACNKRLENALYHWARVAMQHDPVSRCRYAELRRRGHSHGRALRGVGDRLLYVLCKLLERQVLYDPDHPRPQMTAAA

SEQ ID NO: 181338 - protein, 408 aa, unidentified
MKKNLPLELRVGVDVGCHSHNVAIGLSTGEILEEFSIAHEPEGFRQFFSRIEKNERNYGCPVAVAMEGYNGYARPLDTLVRTRNYRLFNINNLKLARFKEIFPGAAKTDDFPGAAKTDDIDARKALELFQLRDHLPIAKDVLQEVKATPQENDILKRLSRRRRRLVNERVRVLNNLQADLQSVCPGLLEITGEAGNLWFLRFITSTDDLQKLTRLRETTIRKISGIGAKYASIILKWQKTAEFSPETEWVSDMIQQDAERVLALHKQIETLETRMAEIAANSNIAQLLSTMPGFGPITTAELAGEIGTIERFESESSLALYLGMSNLDNSSGKYKGSKAPKQVNERAKSAMMIAVDRHRKHAPQSQKYYDKKRSEGKKHNQSVRALGRHLCRAIFKMLKENRGYFLAQ

SEQ ID NO: 181339 - protein, 340 aa, unidentified
MKQIKRIGIDLAKSVFQAHGVDAHEHVALRKRLTRGRVLAFFAQLPPCQIGMEACGSAHYWARELRKLGHEVRLIAPQFVTPYRKNDKNDGNDAEAICEALGRPRMRFVPIKNAEQQAVLCVHRARSLLVGERTALVNQIRGLLAEYGMVVAQGVVRLRHALPGILEDGENGLPLLAREVFADLYARLQALEAGVAAYDRRIAQLARTMAPAKRLMQVEGVGPLTATALVATVGDARLFKNGRQLAAWLGLVPRQHSTGGKSRLGRITKRGDVYLRTLLVHGARSVLRHLAAKGDAKSRWGTALAARRGFNKAAVALAAKHARILWALLAHDTDYQRATT

SEQ ID NO: 181340 - protein, 369 aa, unidentified
MKKNSKNNKEKTRQRALQAKSRKMKLTVGIDLGDEWSHCCFLGEEGEIVEECRVKTTREAVKSRFGELKLAVIALEVGTHSRWVSQMLSEFGHEVIVANARELRAITGSDRKSDRVDAEKLARYARVDRRILRPIKHRGEEAQVDLVVLRARAVLVKTRTQIVNSVRGMVKSFGYRMPKCSTERFVKLNNEVPEKLREHLAGLMEVLEHVQKQIEEYDQRVEKLAKEKYPETTVLRQIWGVGEITSVSYVLTIEDKGRFEKSRDVGPYLGLRPRRSQSSESDPELRITKAGDCFLRSLLVECAQRILSKKGPDTALKQFGLRIEARGKKKAKKRAIVAVARKLAVLLHKLWVTGEVYEPFPETTVRKAA

SEQ ID NO: 181341 - protein, 437 aa, unidentified
MACHLSTTPLGRRSLLGARTHRVQSEGRHKVIFVGVDWAEAHNDVLVMDEGGVVLGRGRFSTGVTGLAQLHALVADCAEEPGEVIVGIEIDRGLLVDSLVGAGYQVYGVNPLAASRYRDRHTTSGAKSDAGDAKLLADLVRTDRHNHRLVAGDTEEAGAIRVLARAHQGLVWARQRQVNALRSALRDYFPAALEAFGTDLAQTDALAILTIAPTPERARGLSRTKIAAALRRAGRQRNIEQRAIELQSALRTEQPEGPSQIAEAFGAATAARVVVLVSLNRQITELEHAMAEHFDRHPDAEILRSLPGLGLVLGARVLGEFGDDPSRFTDPRGRKAYAGTAPITKASGHSLVVLARVARNRRLADACEWWAFCSLGASPGARRYYDALRARGKTHSQATRQLANRWVGILHACLERREFYREDVAWPERREVLPLAA

SEQ ID NO: 181342 - protein, 472 aa, unidentified
MMTELNIGVLDKVENLGEDKKLFIGIDIGKENNYSSFVLRGRKREIKKRLKTKNNVYGFYKLLEELEKLLIEQSIDLDEVIIGIESTGHYWQNLYDFFDKRNYDVVMVKNRLVKLKREAKYSQKGKNDSIDCHCIALVLLDDDYFIIRKNDRNYDSLRRLSRTKEDYVKLSTQNKNRLRAWIDVNNPVYLMCFVDPFCKTGRAILRDFPSPRDIVNKDIDDIIEILKNDERNKGILYRMVTEYIQLCQELYKDTIKISEGDREEVAIYLSAYESIEDMLDKLKIRINKLAKETIVQLDNFTSIKGLGENEIIDLIAEIGKIENFDCARRLQSYFGLGVKSEQSGNGVMKKPSINKAGNRRGRRGVYHMSMNLVDKNSDWRKLYCYYKAYNRKNSSSNKKMLVAVSCKLLRTIYGILKYNQSFDSKMIFKNLDFSKCNKEKFIEEYNDKKGKWRIGEEELEELFEKPNLNENF

SEQ ID NO: 181343 - protein, 529 aa, unidentified
MSMTRSTRRRCGGKARRPFQVHKARGVLHPRVQAVGPEHFGLVCFDCAKARSKWMLCDFYGKVLVEPTTVEHQRGQLALTVATVCQCAQQHHLQDLVVAIERTGNYHLPVKRVFEAATFEDRPFDVRVVHPFATKQHRQPANPGDKTDDNDLAALFRATVAGFGLQEPEQDDEHRQLHLLARHRRDWVQKRTAVCCQLREHLEAVLPGYAALFGDKLWDSQVALPLARQVASPAEFARLGVAGLSQLLHDSQTRFHGRTLEKIAAWAANAAQPDAQAATYHRIALALDQDRLQKTREILGLERELALHLAGTPYVLLLACPGVNVVSAAELAGEMGPISNYARGNRISGRAGLYRSRYQSDEVDLQHGPLVRMCNRQLRAVLLLIADNLVLCNPHYRALAALWSSRGQDPRHIRVKIATRFTRLVFQIVSGRQVLRHPGMRGRDAILDKLMRFHLEHATPMATLLSNLQQAVQQLPAGSHADEAAPLVKELEKAQASRRGPKPIAEILPLLLARLGVGDLQSEVAREPS

SEQ ID NO: 181344 - protein, 366 aa, unidentified
MKKTSTVRVNGNMNFKGQKLTLGMDLGDHWSCYCVLDEAGKIILEQKVAMTPEAMKQTFAKIPQSLIAMETGTHSPWVSRLLTELGYKVIVAHAQKVQLITKSNRKDDRHDARTLARLARIDPELLGPVRHRSAQAQIHLTVIRARAELVRARTGLVNAARGLVKSYGQRLPKCGTQRVNRELAAGLHAELREVLEPLLQEVESLNERIQEYEVRMEKIAKENYPHVELLKQVKGVGTQIALTYVLTLDDPHRFPKSREVGCFLGLCPGRRDSGESQPEMNISKEGDRYLRTMLVQGAHYILGPFGADSDLRRWGLKLAARGGKSAKKRAVVAVARKLAVLLHRLWVGGEVYEPLRNSDKATRAAA

SEQ ID NO: 181345 - protein, 349 aa, unidentified
MLADEVDYVVGVDTHRDQHVLAVVVAGTGVVGARRSVRSSARGYAEALRFAQAAADGARVWAVEGVGHYGAGLARHLSGRGETVLEAGRGPRDQRRLQGKDDSLDAVRAARTALASETPALPRTGQQREALRLLLLARRSAVDVRRLALVQLRSVIVTCPDQLREELRGLPAGRLVERCSRLRRSPSRTPDELAATLVLRSLARRIQAATVEAAELEREILAHVRALAPQLLDEPGIGPIVAAQLIVSWSHHGRVRSEAAFARLAGVAPVPASSGQTTRHRLSRGGDRQLNRALHTVILHRRQHDPATKDYIARRVAEGKTRRDAVRLLKRYLARHLYRVLDYQGPLMT

SEQ ID NO: 181346 - protein, 351 aa, unidentified
MKYYTSTTEFNCGIDLHARVMYVCVMDRQGNKLVHTNIQGNDWDFFLKRIEPYRHSLTVVCESTFNWYWLADACYEAKLPFVLAHALYLKHIHGGKNKNDRIDSEKLAHLLRANLIPPAYVYPAERRPIRALLRQRMSYVWQRSALLTHVSMNQTAEGLVPAAKGGLNRDVWVERILAQYENPLHRMAVTCEMDVIRAYDTQIQTLEDEIVRQAKRHEGRDYHLLNTVTGIGQVLAITILFEIDAIERFPTVKNFLSYARLVKGSVASAGKVKGLTGGKMGNAYLRWAFGEAAVSCKRYHPLITLYADRLIAKRGKFKGNAILAAKLARAVYFMLQKGTVFDAEKLIATSL

SEQ ID NO: 181347 - protein, 419 aa, unidentified
MSFKILKFNCCGLDVHKTWIYACIGITDSNNRTEYKQARFSSFTKGLNELCDWLAKYNCTDVCMESTGKYWIPVFNILEQHNLWVTLSHPKYTKPMKGNKTDRKDAKWICDLYMCGMVKPSFIPPADIRELRDLVRYRYKLTCMIAGEKNRAQNCLTVSNLKLDDVFSDVFGKSSRSITEQILQHPGEKFDVAPFVYGHCKTSIEEIQAAVDGAISKEQAVKLRQCLDHIDELNKHISEVEQEILCLSDKYEAALNLIRTVPGFNKNPMTAIQVLSEIGCDMSVFPTDKHLVSWAGCCPRNDKSDRKIKSTRISRAGSYFKPVLVQVANALIKSKKHPEFTNRYKRIKARRGHKKAIIAICRMILTAIWHILSDLKPYTPEGFLESRPVKEDKILSTSQALNLLRQRGYVIKDEPLAVS

SEQ ID NO: 181348 - protein, 461 aa, unidentified
MPGQNKKGQKRPDQKVVKLDSLKQLNLNAAGLDIGAAEIWVCVPEDRAEVPVRVFHTFTPDLHALADWLESCGVETVAMESTGVYWIPVYEILEARGFEVYLVNARHLKNVPTKKTDVLDCQWIQQLHTYGLLNASFRPEADMVALRAYIRHRDNLIRYRTGHIQHMQKALQLMNIQLTNVISDITGQTGMQIIRAIVVGEYDPVKLAQFRDPRCHSSQAELAKALSGHYQAEHLFALKQGLELYDFYNQQIQACDAQIEHKYTAIKPAAETQPQLPPPAPKQRRSKNEPAFDLHRYLYQLTGVDLTQIDGLDVLTVQQILTETGLDMSPWPTVKHFASWLTLAPHNAISGGKLLKSHTLKSTNRAAQAFRMAAQSAGRSDSALGAFYRRIRAKHGAPKAITATAHKIARIFYHMLKSKQPYQDPGQAYYEQKYRERVINNLKRKAKLLGLELVPLQPSVS

SEQ ID NO: 181349 - protein, 481 aa, unidentified
MKAKPPEKIQKATDPSTRGRWKEMNRKQRREMMRKIQSEDLSLEVVHPQAAGIDIGNEFHYVAVPPTRDSQPVRRFGCTTVELKAMAEWLKQCGIRTVAMQSTGVYWIAVYDILEAAGFDVYLVNARDTKNLPGRKSDVQESQWLMKLHTYGLLRNSFRPSQEIRTMRTYWRQRNDLIRTAVSHIQRIQKALTQMNIQLANVLSDVSGVTGQAILKAILAGERDPHKLAALRDPRVKASEEQIARYLEGNWQEDLLFVLKQEQEGYEFCQQQMAECDRQLEQYLQQREDRSQGASLPKEVRKGRLVRRKGNKPAFALRAELFRITGTDLTQVDGIDVVTATTILSEAGWDMSPWKDEDHFVSWLRLCPDNRISGNKILGKGRLPTNNRASIALKMAASTLRASNTYLGAQFRRFRTKLGAPVAIKAMAAKLARLVYRMLRYGMKYVDQGAKFYEAQHRQRQITQLKWKAAKLGFHVVEAAA

SEQ ID NO: 181350 - protein, 368 aa, unidentified
MSRKERLLVNAIDVEQEYKVIGLDLAKNDTSCVCIADSGEIIAIDRLSYSDLLETAKQLSPTIFAMEPCNGMHWLVNQLQDYGHECRVISGDAVQQYVESHFGKQKTDLNDAQAIAYLALDEMLRFIRAKTPSEMSIQALQAIRTQLTKQKIASIVCFKSMCQGYGISISKGKSSVAAFIALLKETDRISEEVKEALRMLIANYRVLRTRISKIDKVLEKIVVTNPIGKRLKDIPSFGVQCAARLLTIAPNIKDFKGPKDLVAYCGLVPRNITTGHIQKTAGITKRGDKLMRRNVVQAANVLYCKNKHGQLQSCKLKRWMDKKLKILPYPKFIIQLAAKLLRIAYAVMRDGTEFDYARAGVARSALIS

SEQ ID NO: 181351 - protein, 351 aa, unidentified
MPRTSAVHAVTTLGIDMGKNTLHMIGLDTRGGIVLREKVSRVHITSRLANLPACLIGIEAGMATHYVARELAALGHDVKQVPPTYAKPFRQGHKNDFRDAHAVAEAVQRPTTRFVPAKTNEQLDLQALHRVRSRLVSERTAVINQIRGFLLERGIIVRQGLRFLRQALPDILAKRTDVLSPRMVRIVADLASDWRQLDERIEAVTDEIKTLAKSDDSCRRVMTVPGIGPIISSAMVAAIGSGAAFARGRDFSAWIGLVPKQMSTGDRTILGRISKRGNNYLRTLFMQAARVILLRRASWPKHGFGIWLARAAQRLHPNVLAAALANKLARIAWTVLAQQRGYEARIVKAAA

SEQ ID NO: 181352 - protein, 346 aa, unidentified
MVILGIDAHKRTHTVVAIDEAGRQLGTKTTLTTTTEAHLEMVRWADRFGPERRFAVEDCRHLSRRLESDLLAAGEVIVRVPPKLMAHARASARTYGKSDPIDALAVARAALREPDLPVARLDGPSRELRLLVDHREDLVRERTGHINRLRWHLHELDPTWDPASRSLVRYMRLDAVAARLEGQGGMVARIARDLVARIRELTVQERALEREITTMVKKLAPRLLALPGVGTLIAAKIVAETADIRRFRSKDAFARHNGTAPLPVWSSNRVRHRLSRTGNRQLNCSIHRMAVTQKRCHPDARIYLDRRIANGDTKLEALRALKRKLSDVVYRALLADAVVGVVADAA

SEQ ID NO: 181353 - protein, 337 aa, unidentified
MSVYVGIDVHRKRSQVAVVAEDGQVQLNKNVVNGSEPMLRLIGDLPSGTPVAFEAAFGWGWLARLLEDYGFEAHLVHPLRCKAIASARLKNDKVDAAILAQLLRADLLPEAWIAPVEVRQLRALLRHRASLVRLGTQQRNRIHAVAADHGYDRSASYWTGPGRGWLAELDLPAVSREIVSDCLAAIDGLAPVIDRIDAELRQHAKADPRVKVLQTLPGVGQFTALMMVAEIGDITRFPSARKLASWAGLTPTVRGSDLTVRHGHISKQGSAWLRWVLNQAAQTAKRSPEFAATYSSIAKRRGKKIATIAIARKLLTRAYHLLAEMQATSTNEPPRRP

SEQ ID NO: 181354 - protein, 356 aa, unidentified
MSYDIKYIGMDVHKEAIVIAVQNESGKLVMESVIETKASSILQFLHGLRGELHVTWEEGTWAAWLYDLLQPHVQHIVVCNPRRNALLKEGNKSDKVDAGKLADMLRTGMLRPVYHGENGLRTLRELGRSYQNISKDLTRVMNRLKALYRGWGIPCAGTQVYAARAREEWLNKLPQAGVRRRAELLYQQLDGLQALRREVRPEFLAESRKHKAAKLLRQIPYIGPVRAARLIALMQTPHRFRSKRQLWTYSGLGIETHDSAQYRFVRGQVQRSKKPQQIRGLNRNHNHEMKEIFKSAATRASGGRGPFHDFYAALLAKGMKPEMARLTLARKIAAITLTLWKKEERFDVEQLKTQAA

SEQ ID NO: 181355 - protein, 344 aa, unidentified
MTNVSRIGLDLAKNVFQVHGLDGSGNVVVRKQLRRSQVEPFFAKLSPVIVGIEACGSAHHWGRVLGKLGHDVRMMSPAYVKPYVKRNKTDGRDAEAICEAMSRPTMRFVPVKTPEAQAIQVLHGTRRLLVRQRTMSGNGLRSRMAEFGIVAAQGLKGLHALMQLLDDPATPLPDLARMALQMLARQWETQNAQICKLEAEIVRAATSDADARRLMKIPGVGPLGATAVQAAVPDASAFKSARNFSAWIGFPPRQFGTGGKQRSGAMSKQGNRELRRLLILGATAYLRHEIARGPRDPLLRAMLARRPFKVVAVALAAKNARAIWAMLVTGEGYRPRQHAAALAA

SEQ ID NO: 181356 - protein, 422 aa, unidentified
MQILYQRCAGIDVHKDQITVAVRLPGPGPGGRDTEVRKFAAFYGVLREMTRWLASLGVTHVAMEATGIYTMPVFHALMEPGAFEQVLVCNAAHVKNVPGRKTDAVDASWLAQLLECGLLAGSFIPPANIKALRDVVRYRKKLVEQRSSETQRLGGVLQDAGIKLDSVASSIDTVSGLDMIRALIDGERRGAVLADLARGRMRAKIADLSLALEGRFDAHHALMCTLHLEHIAGLNEMIARLDAQVEQMMIPFARHRDLLVTIPGIGPKVASVIISEIGADVAEYFPADAHLASWAGLCPGNHESAGKRKHGRPRKGSQHLKPALVEAAWAAIHADGRLKARYHRLVLRFGGYRNQAAKKKAIIAVAHTLILIIWHVLAEGVPYTDLGADFYTRRIDPQQETRRLIARLAELGHTITIQPAAA

SEQ ID NO: 181357 - protein, 424 aa, unidentified
MQNTAARKRRQVPEGYLVVGIDPHKKRHAAVAITQDFTTRVKFKFDNTREGLEMMLDRARVEMVGSGCRGVIFAIETGGHYWRNIAYYLEERGIPFRFINQYTLKRRREGKDLNHRKNDYRDGEVAAQLLCTGEFVESVIPQGVYAELRTAHNAYQRLVKERTRITNLVKGLLDALFPEFTQVFKDPGGLTALSVLSTCSIPKMIAGMTEDEFVATIEARHKGRRLMRKKLRALHYLAKASIGINAGARSVSSEIAFLVDKLELIRRHIRIMEGMLVRLVDETEEGKYLLSIRGLNYIAVAGLLAELGCFKLYRSAKQMIKMAGSNPTESESAGKKRSKTPMSKQGRPLLRYCAWTSVIPMLRFNPDFRAWAKQRRERPAHANPLNGREVVGAALNRLLRLSFALVKNQAYYQDVRPTLLPVAV

SEQ ID NO: 181358 - protein, 338 aa, unidentified
MEYGAIDLHARKTLIRIVAADGTVVLDQTITTTREGFTKVFADRARMRVLVETGTESEWVAHTIEACGHEVIVADPNYALMYGVRVRAVKTDRRDVAALAEACRLGIYRAAHRVSAAQRQVRRQLRVREQLIRMRTQAINLLRAQLRQEGYRLPSGASPSAVQRCRRLAVSPELCGDLAPVLTLLEALAPLIKARDQDAETRAAADPVVRQLMTAPGAGPIVGLTYRAVLDDVARFRDASSSTAFLGLVPREDSSGTRRRKGAITKRGPTALRVLLIQAAWTIWRQRQGRAALHAWVERLAARRGRHIAVVALARRLARILYAMWRDGCDYRPVPAAA

SEQ ID NO: 181359 - protein, 415 aa, unidentified
MKKNNYRTKKVNDINWPQLREQFAGQPLVFAVDVAKEQQFALLSNPELSESVLMHWNHLEQTAELINELKQLNTPITVVMESTSTYGDAMRYQFRQAGFTIHQACAKRVHDAKEIYDGVPSLHDAKAAWLIARLYKEGLTKPWHELDDKERELNAYRREYELHQSQHERNQNRLEAFLSRHWPEVLPLLALDSVTLESLLIDYGSPEQIAANAEQAAKDMRRWGKSCLSLEKIDAIIYSAATTLGQPCIEAERHYLQALAEELRHSRKQAKNAKQALEVVVKAEPGLKEMGLTIGMVTTAILIGLHLDPRHFGCARSYLKALGLNLKEKSSGQDHGKLTLTKRGSALARKYLYFAALRLIKSDPVVSAWYRSKVDPRAKSKTVIAFMRKLAKALWHVARGQRFDARKLVKAAVVN

SEQ ID NO: 181360 - protein, 456 aa, unidentified
MQNYYLGIDVSKGYADFVILDAHKKTVEPNFQLDDTFDGHCKLYEILLRFLQEHPEGMLSAAVESTGGYENNWLHSLMKFQATLSMRSARLNPLGVNANSKASLNRVITDKIGARNVAEYIISHPEKVSYQQEDYFGSMRKLWGFSNMLTKQKTQLLNQLEFLLYSANPEVMAYCKEKIPFWMLETLKRYPTAQRLSEAMPESLAAIPYVSPRRAQELIDNAKQSVASTSDTVTEELIVDTVEQIAHLKKILQIQEKKMSALCSIPEVAILKTFKGIGIASAIGLLIEIQAIERFASVKKLAAFFGLHPVFKSSGDSAGGFHMSKQGRKEPRRILFMVAMASISHNPHIRGIYEEHTKKGMEKMAALGLCMHKILRIIYGMLKHNRAYDPQIDLNNRAKMIQGKKAVAKDKNRRYQDLDNKAPISRRQHKNRMEKKPSHNDNITRCGIVTSIPSHA

SEQ ID NO: 181361 - protein, 352 aa, unidentified
MSSLFVGCDAHKHYSQLEIQDSSAHVMRRCRLDHARGALLSFFSSLPNGTPVALESVGNWYWIADEIEAGGCRPLLTNPAKAKLLMGHVNKTDKLDASGLTTLLRLGSLPSVWLPPAELRDQRELPRTRMVLCAERTRLKNRIHSLLAKYNLSPSEGTLFSQQGRTWLDSAISELPPETARCLAEQLKLLDFLSLQISDLEDRIHELIALTPTMQLLKTLPGVGDMLAIVIEREVGSIERFPSAQQFSSYCGTTPRVSSSGGKTHYGKMRSESNQYLKWAFIEAANAVSAHHAQRGWTDRHCSKLYLRIRGRKGSSIAIGAVARHLAESAFWVLKKNEPYKDPDTTVSPRQG

SEQ ID NO: 181362 - protein, 322 aa, unidentified
MSAPILGIDIAKQRVEVALLVEGKVKNKSFKNAPDGFEALALWLRKLGIQQVSACLEATGNYGEDLAIYLHEAGHTVSIVNPARIKGFAQSELTRTKTDKVDAGIIARFCLAMKPESWIPPSPEIRSLRALVRRADSLIDMRSQEKNRLGTAHESVTPLIKEHIDYLDKEIKKVRDQIADLIDRDPNLRQKKDLLASIPGIGMATIAALLADLDNLGKFTHVRQLVAFIGLAPRETLSGSSIKGKPRLCKTGNARLRKALYMPALVSIRYNPIMIAFYNRLKEKGKNGKVIVCAIMRKLVHVIFGILKSGKKYDPNYKPIYT

SEQ ID NO: 181363 - protein, 343 aa, unidentified
MKAYAGKQFVGIDLHRRRTVIVRTTEAGEVLETVRIVNDVQRLASVMARAGDCPEVVLEATYGWYWAVDALQAGGANVHLAHPLGVKAFEYRRVKNDVRDAQDLADLLRMGRLPEAWIAPPPTRELRELVRHRAKLVGLRSHCKAEVHAVLAKCGVQVLMSDLFGLAGTELLDRLELPAPYAARIASLRRLMDDLDFEINLFAGIIRGRMAHEPGYTAVQKIPGIGPTLAAVLVAEIGDITRFASASKLTCWAGLTPKHHESDTHVRRGRITKQGSRLVRWAAIESVKTISKTSEVGVLRERVADRRGRNIGSVAAGRRQLELVFYALRDGHVRALEHLPAAA

SEQ ID NO: 181364 - protein, 425 aa, unidentified
MNQALSPSPLEGISAYVGIDWADQKNDVVLRSAAEPNKVEYKVIAHKPEALMDWVSQIHQRFGAKGKVVVCLEQTRGGLIYHLMGYEFFELYPINPRQLASFRETFAPSGAKDDRPDADLLCELVRSHRDRLRAWKPDSELTRKLATLTEGRRKAVDQRTELSNEIKSQLKLYLPLVLQLVDNDCSTALAADLLLQWPMLELLQKQSVHKLRKFFYGHNSRSEQKMLERLKLIKEAKPLTRDRAVIEPAALRVKMLAQQLKSLLPFIALYEKEIAQLFDAHPDSFLFRDLPGAGAALAPRLLSAFGSDRDRFKSAAELCTFSGVAPIRIASGKKACAKFRRACPKFLRQSFHEFAACSIRCCPWASACYEAHRARGKGHHAAVRAVAFKWIRILFACWKHRIAYDPDRYLSVLENRGSQYAKAAP

SEQ ID NO: 181365 - protein, 343 aa, unidentified
MQAVTTIGFDMAKYVFQVHGVDMQGRVIIRRQLKRRQVLTFFRKLPPCLVGMEACASSHPWSRELQGLGHTVRLMPPAYVKPYVKRQKNDATDAEAICEAVTRPNMRFVATKTADQQSCLMLHRTRHLFIRQQTAVINAIRAHLAEFGIVAPVGRKGVEELLRVVADASDQRVPEIARACVAALGAQLRVLKIQILEFDRRILAWHRSNATSRRHDAIPGVGPALATALVASVADPRAFRSGRDFSAWIGLVPKQHSSGGKDKLGGISKQGDRYLRSLFTAGALAVIRYAKVHGTRHRPWLAALLARRPTKVAAIALANKIARIAWAMMAKGERYKEPAALAA

SEQ ID NO: 181366 - protein, 358 aa, unidentified
MNRNTGMNAGQIIGTMGGKQVIGLDIAKHVFQLHTVNMGTGEIVNVQIKRAKVLEHFVNMPQCLIAIEACGGAHHWARELTAQGHSVRLLHAKIVRPFVSGNKTDATDARAIWLAVQQPGVKLVGVKTAAQQATLTLHRQRELMMKMRTMQTNALRGLLYEFGATFAKGRKALFQDVEQTLEDLSTQLPQMVRDSLREQVARIKAISEDMLAIEKRLGLQLKADPPMQRIAQVPGVGLLTATAAIATMGEPSAFKSGREFCAWLGLVPKQTGTGGKVRLGGISKRGDTYLRTLLIHGARSVLAHAKEPGPWLEQIKTRRPVNVVIVAQAAKMARTIWAVTAKEQSYQRGFKSVRPQTV

SEQ ID NO: 181367 - protein, 358 aa, unidentified
MQTQRNKVDFKGQNIYVGFDVHLKSWKVTVMTEKLTHKTFSQPPKPELLHQYLKNNFPGGTYHSAYEAGFCGYWIHNKLKSLGVNSIVVNPADIPTTDKEKVQKEDCRDSRKIARTLRSGELTPIYVPSLKTLEDRGLLRMRSTLVKDLARNKNRIKSFLYFHGIDIPESFANQTRWSKPFVKWMEELSMSHQSGKQAIQAIIVASKNLRQSVLEITREIKALSKTESYSDNITLLRSIPGIGLLTAMMILTELETILRFESFDKLCGFIGLVPSTNSSGENDIVGDITPRGHSLLRGAIVESAWVAARFDPALTKSYHDYCKRMEPNKAIIRIAKKLLSRIRYVLKNRQPYECSIIK

SEQ ID NO: 181368 - protein, 319 aa, unidentified
MDVLIERCAGIDIGKDGVVACVRTPAPSGRGRQKQTRTFSSFTGSLEAMADWFAAEGVIEIAMEATGSYWKPVWCVLEDRAFTLKLVNAHHVKILPGRKSDVLDAEWLAELLEHGLLRASFVPPPAIRELRDLTRYRKRLIQAHTAECQRIQKTLEDAGIKLDSVASDVLGVSGRAMLAALVAGERDPEVLAELAKGRLRRKIPALRQALRGRFRDHHALLIGLCLDHTAHLEAAIARLDERIDALFATHTSETGIPFAEARDRLDTITGVGKRAAETILAEIGVDMSRFPTAAHLASWAGVAPGNNITGGKRGSGKTT

SEQ ID NO: 181369 - protein, 596 aa, unidentified
MLPQHAPPPQSPRRVGVGLDTSRYGHYAAFLTDDLQSAADELQFPESAAGYARFRQRLERIRQRDGPVSFVVRLDAAGPYADNLLHFLHRLATPVADVPGALAPFALTLSCGDPQRNKNYRAALFGSQKSDPVEARAAARFALTERPTSDPPLSLELRTLRQVAGRLQAVVRQRTRLINQLHHLLALTFPELALLTKDLAAGWVLELVHRYPTARRLAEATATDLAHIPYVPDKHIAPLLEHARTSIASLGGAPIEELVREQVRQLRDVGARQKRLENLLVAAYHALPHGNHLDSIPGIGAVAAAVLTAFIWDIERFETPSKLVAYFGVLPIEVASGVDRGGKARAARRWVMSRRGNDLVRRYLWMAALSAIRCNPAVRALYARVVAKHPQHKAVAVGHAMRKLLHLVFALWKSGRPFNPEHYPWQAPAHIEGSDNGVSLEGQTSDKGMSQQDQAAGPKPDAVPARTGVAAACTDTVAEAESVGESVSIDFVHLKRQLPLARVLDQLGLSARLCGDGPQRRGACPLHRGDARGRTFSVNLDANVFQCFDKRCGQKGDVIDLWSQVKGMSLREAALDLVRTFGLEPAPRGGTEKRNG

SEQ ID NO: 181370 - protein, 320 aa, unidentified
MQGPYKRVIGVDIASEKVDVCDSELKINGTIPNTVSSIRKQLISKVRSPQETLIVCEATGGYEHVLVDAAHEAGIPVAVANPRQVRDFAKGHGFLEKSDSIDARMIRRFGEDVELHLAVPRSKEEKHHQALVRRRCQLMQLINQEENRLRQTNDSVACEMIESTISHLKKQLEETDQRLEKLLAELATHEPRIKIIESVPGVGTVTVSTLLAELPELGQLNRAEIAKLVGVAPMLNQTGKSDKKRPIRGGRSQVRKVLYMAALVATRCNPVIKSFYQRLLRRGKPKKLALVAAMRKLLTILNDMVRNQEPWRSANLTLSK

SEQ ID NO: 181371 - protein, 327 aa, unidentified
MTNPELFVGIDVSQARLDVALHPSGETFHVTNDEGGFELLCTRLAALSPTLIVCEATGGMERPVVLASTLAHLPIAVVNARQVRNFARATGQLAKTDRLDALILAHFAQAVRPEVRLVRDEQIRHLEALAVRRRQIVTMLTAERNRLGATHDQGVRIHIEHLIAHLQTLRKDLDRELLDAVQAHPATQHRFELLCSAPGIGPVVALTLLSALPELGMLSRGQVAGLVGVAPLNRDSGRMRGRRTTWGGRAEVRTALYMATTVAVRHNPTIKAHYEQLVARGKPKMVALIACLRKFVVHLNAMIRADEPWRDQPGVAMKPDESVGSIS

SEQ ID NO: 181372 - protein, 343 aa, unidentified
MIEATTIGLDIAKSVFQVHGVNAVGEVVIAKRLTRGKVLAFFEKLPPCLVGIEACPTSHHWARELTKLGHDVRLMPANYVKAYVKRSKNDANDAAAICEAVTRPSMRFVATKTKEQQAALMLHRSRQLLVRQRTMLSNAMRGHLAELGIVAPMGRKGLATLIKAIGDAQDTRIPVVARKCLAGLTRQYMLVQDEISALDKHIHAWHRSNEMSRRLQEIPGIGPIVATALVASIPDAKTFSSGRNMAAWIGLVPKQHSTGGKQRLGGVSKQGNRYLRWLLVVGAMAVIRYAKQHGFKKRPWLARLMERKPTRVAAVALANKMARMVWVVMARGERYTEPALLAG

SEQ ID NO: 181373 - protein, 336 aa, unidentified
MSKYIGMDAHMSTCTFSVLGESGLELDNTTIPTNGRIIINYLRGIKGSKSLAFEECELSNWLFEILKDEVDKLIVCNPVANKGYKKKKTDKFDARKLAELLRGNFLTPVFHDGSKRERFRGLMSGYQDLVNDTVRFKNRYKSLFRRSGIRVEGERIYKDRGLLKNLERPDFRFIGIQLHYMLERMNESLAIYQQQIGRSKKHFKEIGNLMSIPGIGPIQAAKIVSQVINPKRFPNKYKYFAYCELVRHKKESGGRRYGNEKIWGNRTLKCVYRMAGHQALKGTSALRKYYDHLRLKGVSDKKAYNAVCRKIAAISLSIWRNNTKYDDNIILNDLIK

SEQ ID NO: 181374 - protein, 343 aa, unidentified
MQTVATVGLDIAKSVFQVHCVDAAGQLVIRRQLKRRYVVAFFQKLRPCLVGIEACASSHHWSRELQALGHRVRLMPAAYVKPYVKRQKNDATDAEAICEAVTRANMRFVETKTPEQQGCLMLHRTRHLLIRQQTAVINAIRAHLAEFGIVAPVGRNGVEELLRVVADPDDRRVPEVARMCLAALGSQLRMLKAQVLEFDRMINAWHRSSETSKRLDEIPGVGPALATALVASVGDPRAFRSGRDFSAWIGLVPKQYSSGGKDKLGSISKQGDRYLRSLFTAGALAVIRYAKINGTQHRPWLAALLARRPTKVAAIALANKIARMAWAMMAKGECYREPAALAA

SEQ ID NO: 181375 - protein, 343 aa, unidentified
MDHYAGIDVSLEQSSVCVVDATGRIVREAKVASEPEALITFLRGLTLPLVRIGLEAGPLSQWLQAALVKAGFAAVLLETRHVKAALSAMIVKTDRKDARGIAQLLRMGWFRPVHYKSMPAQEVRALLVARKQLQAKMRDVELSLRGLLRGFGLKVGEISKGQFAARVRTLVAGHTMLERIAEAMLQAREALRVEFGKLHKAMLAIVRADAVCRRLMTVPGVGALVAVTFTSGVDAPERFARSKGVGAHFGLTPRKHQSGETDITGAVSRVGDVMVRTALYEAAHILLTRAVRFSALKRWALEVAKRRGMKRAKVALARKLAVILHRIWVDGTTFRWGREAAAA

SEQ ID NO: 181376 - protein, 467 aa, unidentified
MTPHKDYCLDPCPPVLTPMLPPSPILSDALQVCHPHAAGIDIGEAEHWVAVPPGSDPQPVRRFGPFTADLDALADWLIDCGVTTVAMESTGVYWIPLFELLEARGVQVLLIDPRQAKRAPGRPKTDRLDCKWLQRLHAYGLLAGAFRPADQVCVLRGYLRHRQMLLTYAAHHIQHRHKALEQMNLKLTQVVSDITGVTGMAILKAIIAGERDPVTLAKLRNPHGQHSEDEIAKALQGTWRAEHLFALQQAVELYQFYHQQLTTCDQRITAHLETFADKSAGQPLPPKARRHKKTNEPRFDARTPLYRLAGVDLTTIEGIEENTALILLSEIGTDMHRWPSVKHFGRWLGLCPQHQSSGGKVLSRRVRPGAHRVTVALRLAARSLHHSQSALGAFFRRMKARLGTPKAITATAHKLARLVSHLLKHGSAYVQQGLENYEAQYHERKVKTMAKQAKALGYTLVPLAAQG

SEQ ID NO: 181377 - protein, 338 aa, unidentified
MFEYMEMTGFAWLGIDIAKQKFDVALTWNTRRRAKVLSNDGEGWQALLRWLKDLGVGQVHACLEATGRYGDGLAIALHEAGHRVSVVNPAQIKHFGRVKLGRNKTDRADAALICDYCRLFEPAAWTPPSAALRQLRDLVRTREALSASRVEWANRRASGQETAVADAAMAKVIAQLEAEIAALDQAIDDALGQDDDLQAKHDRLVSIPGIGTHTAAVVLCELPGPDVLRTAREAAAYAGLNPSHRQSGSSLDAPARISRIGNATLRAALYLPALAALRWNPLVAALRQRLKDQGRLKPKQIIVAAMRKLLHLCFGVLKTGKPFDPEHTTSTEEAASTV

SEQ ID NO: 181378 - protein, 344 aa, unidentified
MTDIAVIGLDLAKSVFQIHAVNQQGLPVLKRQLRRGELLKFFQKLSPCLIGMEACGSAHYWAREFEALGHTVRLMPPSYVKPYLKRGKTDARDAEAICEAVTRPTMQFVPVKSVEQQSVLMLHSSRDLLVKQKTMLINALRGHLGEIGIIAPKGVVGAKSLGGLVHENQDAWPDEMRTVAHAFLDQLRMIQTQIEKLDDKILQWHRNSESSMRLATVPGIGPVVASAIAASVPDPKLFRSGRHFAAWLGLTPRVHGSGGKDTLGRITKAGNGYIRRLLVVGVTSLLRIDRKKTPTHLWGQMLREKKPGRVVAVALANKTARIAWALMSRGETYNGTAAALSAVC

SEQ ID NO: 181379 - protein, 457 aa, unidentified
MKWYLGIDVSKGYADFALVSELLIQVEETFQLDDTRSGHEQLKIWLDALFRRHPHLEIDCGLESTGGFENNWYALLIKLSSSLPIRAARLNPSVVKNASKALLNANKTDAESAKEIAGYLKRYEDQIDFAVRDNQYASFRSLQNHLELVTKQKTQLINELKQILYSSFPELQRFCKQGIPGWVLELLMQYPSPEKLVRQKPMKLARIKGITEEKAKSLIEKAQATIASRSNSTYEFLIVQMATEVKHKQEKIKQLKQYLEDHCKGKEKEWLESIKGIGSYSAAAIMIQIEDIRRFASPKELASYFGLHPLIKMSGDKRMVSRMSKQGRPAMRALLFMCANSAVRCDEHMRTIYARHRAKGKNHKQALGAIMHKMTRVIWGVLIHEKPYDSRIDLANQSKNIQNPVQDELKETENKRRMQQFDSDAPISRIASKKRKVHAASQVGEAELVRDLEHEPG

SEQ ID NO: 181380 - protein, 350 aa, unidentified
MELHTIGIDLGKTVFHLVGLNLCGEVVVRKKFSRKQLLHFTANLQVKLIGMEACGGSHFLGRALREQGHEVRLMPAQYVKPYVKTNKSDYIDAEAIAEAVGRPKMRFVPIKTDDQLDLQSLHRVRERWVMRRTAVINQIRGLLLERGITLRQGRGHVDAALPGILEDASALLSGALRLLLAQLKLELDHLQMRIDEADAMIKKAAGDNEACRRLVAIPGIGPVTATAIIAAIGNGAAFKKGRGFSAWLGIVPGEYTTGGKQKLLGISKRGNSYLRRLFVQGARAVLQQRAKQSSGLSAWLAQLTTRTHSNVATVALANKLARMAWAVLAKNEPYRPPMLAGAATECLACR

SEQ ID NO: 181381 - protein, 428 aa, unidentified
MNMSSKSAQFAALIGIDWASQRHALCLYDCATGKRESSLLEHTPEAIAQWARGLQERFKGRKIALCLEQSKGPLIYALLEYPFFVLYPINPATAARYRQAFKTSRAKDDPSDAQVCLELVLHHREKLKPWLANDAQTRELSCLLQHRRAAVDLRTLLTNMLRDALKSYYPQALELAGQDLFAPLGCQFLLKWPSLQELQKARKESVRKFYYMHNCRRMDVIEKRLDAIAQMTPLCRDRALLEPAMVQVRMLARQLLQLGGALKEYHSKIEQLFAQHSDALIWESFPGAGPTLAPRLACAFGTQRSRYQSAVAIQQYSGTAPVTEKSGKNQHWVHRRWARPHFTHQSFFEYASQSVLHCQWAKLYLKEQMARGKAYPTAIRALAFKWQRIMFVCWRDRVPYEETIYLQSLQRRGSHLARKLNQQPSKAA

SEQ ID NO: 181382 - protein, 338 aa, unidentified
MKEYSLISIDIAKNVFQVCGFSQKNKIEFNRKVSRKALLNLLSNTQPTTVVMEACYSSNHWGREIQALGHKVNLIPAYQVKPFVVGNKNDANDAVGIGEASWRPKASFVAVKTIAQQDVQTLLRVREQILKIRIMVSNQIHGFLAEYGVHCAKGHKALMTTLAEALAPESKQLSPIAIEMMTLLLEQYLDLTEQEQVIQRKLIDLCQENSLYSLLQTIPGIGPVVAATLIASVGDPGYFKNGRQLSAWIGLTPKQHASGEKSRMGKMSKRGNRLLRKMLIHGARAIITWVGNKEDKLSLWIKALQQRMSPGKVVVAVANKLARISWAVMNDQVAYCAK

SEQ ID NO: 181383 - protein, 406 aa, unidentified
MRVVHERCAGLDVHKSSVVACALLPEGKQLRTFGTLTWQLEQLAQWLQGLSVGVVAMESSGVYWKPVFNILEAADFELLVVNARHIKAVPGRKTDVKDAEWIADLLRHGLLKPSLIPSREQRELRELTRYRRTLIEERAHEVQRLQKVLEGANIKLEDVISNVVGLNGRRFLSALIAGDYDPEAVAATANYGLQRKRELLAQALHGTLATHQRFLLDQLLSHIDFLEQRIAALDQEVKQRSRPFETAIDCLDQIPGIGTRAAEEILAEIGTEMSRFPSDRHLASWAKVCPGNNESAGKRRSGYAGKGNRWLRSILVESAWCASRKKDSYFKVQYHRLAARRGRKRALLAVSHSLLTVIYHLLNDGVVYQDLGPNYFDQRDRSQITRQAVRRLERLGYHVSLTEGAA

SEQ ID NO: 181384 - protein, 374 aa, unidentified
MSDHNEVFVAFDTSKLRNSVAIAEAGRTGEVRFFGEIDNTPAATEKLVRKLAAKYSRLTFSYEAGPTGYGLYRQIKALGHECVVAAPSLIPKKPGDRVKTNRRDALNLAKLLRAGELTAVWVPDARHEAMRDLVRAREAAVDDLKSKRQQILSLLLRLGRHYQGKRTWTRAHMIWLVSQKLEHAEQRIAFEEMLLAAREAEQRVIRLDAAIRAAVPDWSLAKVVTALMALRGLDLISATIFLAEIGDLSRFASARELMAYLGLVPSEHSTGETVKRAGITKAGNHRARRILVECSWSYRHPPRVGKKKLDKVAAAPRAVREIAWKAQARLTARYRALTRRGKRPTVVVTAIARELSGFIWAVNQALGAHAAPAM

SEQ ID NO: 181385 - protein, 424 aa, unidentified
MKVTFQTCCGVDVHKSFLVATIIKTTGGIEPSYQKRRFSTFNNSILEFKKWLLENECLYVCMESTGKYWIPVFNLLEDEINVTIANPKWVKAVKGNKDDTKDSKWIGDLFRLGLVRGSYIPCKKIRILREFTRYRYKLVSCCSSEKNRYQNALTVCNVALDSVVSDVFGKSSTSIIEYLLEQSGTSIDHEVIASKLLKRLKAKEDAVIESIEGYQMTDSQKYRMHLIRAHMDYITAAINDVDSEIESLIASDPDYENAVELLCTIPGVKYDSAITIISEIGIDMSQFYSSKRLCCWAGLTPGSNESAGKKKSVRITRAGVYLKPALVQCAHAAVKSDKSSYYKKKYESLVKRRGKKRAIIAIARMILTAIFQMLTTGETWNPCDLYKIDMPEALLEKQKQKAIKQAQKLLIREGLLPPTEPIAS

SEQ ID NO: 181386 - protein, 491 aa, unidentified
MINTSIFSAQSKDLRKLFEQAGHRSKVLCAPLDYAKKQHTVLFCNGHGDILKKPFSVDNSPAGLKFLLDQLQHTLTGRHLQAKHVFFGGEDIPAYAENFITQLRQKGYLVAQVNAWEAKKRRENFQASNDHLDLTAIAKLLLDWRGNVAPAAHGTYRSLRELSRTRRRVVRDKTALSNRIHTYVDRLFPGFLDVAQSGLAPFSKASLALMSERFSAPQIRRRRRPSLSHQLQRHGVEKADEVAGQLQQLAAQVLEPASEHVSVWQVSLQQQVLLYNATQAACHALEAEVAHWLALTPGAFLTSIRGIGLTLAAGLSAELGDPKRLRRLACLCSYAGIIPGSKQTGGPQSPAHTTGVKPRCNRILKDWAVQASVKIGPCGPPELKAAYLALEAQEQHAQFIMAKRLLRLCKCLLRTQSIYRPSHLLAADTPRGKLAAYYLELWPALLTKWKGTCDLRHVFAAQHPLGGWRLMVQDLYGLALPLPKETAMTPD

SEQ ID NO: 181387 - protein, 396 aa, unidentified
MISVGIDVSKGKSTVCIMKPCGEILESPFDIGHTADELDSLISLIKSFDEETRVVMEDTGHYHLPVATYLSSHNIFVCCVNALRMKKFCSQSLRRAKTDKIDSIKIASFGITYWNELVKAYPSNVIYDELKFLARQYYQVTGMLVKSKVNFSNLLDQVMPKINDVLSNQGENHKLTEFVSRYIHFQNILNMGEMKFTSDYCKWAKKKGYRLNERKAAEILALAQNGIPTLPNSQSVKIAVSEAVKLIHSIEESRNTILAQMQDLCNTLPEYSVVKEMDCIGDTLAPRIIAEIGDVRRFKNKHSLIAYAGIDAPPYQSGAFHASERHISKRGNSYLRKTGYEIMQSLIKHKPADNAVYDFIQKKRSEGKCGKEAMIAGLNKFLRVYYGKVMEFYSEH

SEQ ID NO: 181388 - protein, 363 aa, unidentified
MIYAGCDAHKRYSVFALVNDKGPVGRPVRVEHDRALYRDFLDELPLGTPIAVETIGSWYWMIDEMEAAGHNPILTHARKAKLMMGQVNKTDKLDAAGLAQLLRNGTLPGVWIPPGELRDQRELPRMRMALVRMRTTLKNRIQATLAKYAIEIDEVSDVFGKRGREVLGQRLAELPPQTRLSVEMELTLLDQVEDQIRKSEEQIRAVVTETPAIKLLMTLPGVGSILGIVIALEIGDVERFGGADRLASYAGTVPRIAASGGKVRYGKTRSDVNQYLKWAFYEAANGVSARQKSWSDRHVVRLYLRIRERKGHGKAVGAVARHLAEAAYWVLKKNEPYRDPQSSSTSSTREETRFPHEDGELDR

SEQ ID NO: 181389 - protein, 340 aa, unidentified
MRWSLPPSRYYAEDRLSFGELSWKTLRSLVSIWVKLFPYSLPDRRGKAVYRKKFTRPKLIEFLATCPATTIAMEACGGSHFMARKLEELGHSPKLISPQFVRPFVKSNKNDFVDAEAICEAASRPSMRFVQPRTESQQAMRALHRVRESLVQDKVKTTNQMHAFLLEFGISVPRGAAVISRLSTILEDNSLPLYLSQLLLKLQQHYHYLVEQIKDLESQLKRKLDEDEVGQRLLSIPCVGTLTASTISTEIGDGKQYASSRDFAAATGLVPRQYSTGGRTTLLGISKRGNKRSELCWFSVRVFIQNWNTSLANWPIGSGIYCAGKATLSSLVLWQTSWPE

SEQ ID NO: 181390 - protein, 481 aa, unidentified
MPRQKQQPNELGEGNTTTGKGKRGRKQKGMCLGDRPILEPNAAGIDIGAREIFVAVPPDRDENPVRVFSTFTEDLQKMAKWLMSCGITTVAMESTGVYWIPLYDVLEQNGVKPCLVDARGMKNVPGRRTDWHECQWLQFLHSVGLLRAAFRPDGDVCAVRSVMRHRSEQVLMANQHIQHMHKALTQMNVQLQHVISDITGVTGLAIVDAIIGGQRDPAALAKLRDPHIKASEETIRKSLEGSWRPEHLFTLEQSRKSYQHYQQQITACDEEIEKLVTAFAPRVNPEEKPLPPDRKRKQRGRKKKNVNPKTGFDLRTESYKLFGVDLTQIPGLMAMVLVLFSEVGRDMSRWSTAAHFASWLGLCPDNDISGGRVLWRGLRRVHNRAGDLFRLAAYSLHHDESPLGDYLRRMKSKLGPAGATTATAHKIAIIFYTMVKKQVEYDASLWAQRDAERTQRFEAKLKRQAQQMGYKLVPIEEMPAA

SEQ ID NO: 181391 - protein, 323 aa, unidentified
MNKDIKYFGIDISYLVFDVTDSDGNYYQFKNTLSGFKKFKKLLNSNSHCVMEATGYYHYQLAYYLFEAGIKVSVENPLSVKRFIQMRLSKIKTDKSDSNLICAYAEQVELKLWQGSSKEEQECLQITRTLSVYTKQCTMLKNKLHGELVLGNPSKAVVRSLNRSLKHLDKEITNLESKLLILVKEAHKDLFTRIKTIPGIGRKTSIMLIVLTGGFERFSSASELCSYAGLTPVIRQSGSSLNRRPRISKMGNQKLRNLLFMCSFSACKYNKACRDIYERIVAKGKSKKLALIAVCNKLLKQAFAIAKSGLIFDNEYKSLLVKN

SEQ ID NO: 181392 - protein, 328 aa, unidentified
MSHFIGIDVAKATLQVYIPQGELDLEFSNTKAGLNKLYKTLKTSDKKTIQELVFVYESTGCYSRPLEEFCQKMEINCFKVGAYQSASFSKTIKNRNKTDKVDARMLSAMQILVSEGDIKVPYRDENAHQLRSYIKYYQSLNKEKTRQKNYLEASEINQEDDYILKQVKKRIKQIDKEQDNLMALSMKLIKANSDYLNAYENITSIKGVGQTSGIVLLYLFLRYPNASRQQITALTGLDPVQKESGTSLKSKTRISKQGISLVRGLLYMPILSTVQHNNEMKHFYERLIESGKVKMSAQIAVMRKVILLAHSLYKNDERYDENKYLKFI

SEQ ID NO: 181393 - protein, 324 aa, unidentified
MIKDIKYFGIDISHLVFDITDSNDNYHQFKNNSSGFKKFVKLLNQQSHCVMEATGYYHYQLAYFLLESGIKVSVENPLAVKRFIQMKLSKIKTDKSDSKLICEYAQKVDLKLWKGNTKDEMECLQITRALSVYTKQSTMLKNKLHGEAVLGEPSKAVVRSLKRSLTQLTKEMKTLEDKLLVLVKQSHQDLLTRLKTIPGIGPKTSIMLVVLTGGFDRFTSAAELCSYAGLTPVIRQSGSSVKGRPRISKIGNQKLRNLLFMCSFNACKYNKACRDLYERIVAKGKSKKLALIAVCNKLLKQAFAIAKSGLIYDKEYKSTLVRNK

SEQ ID NO: 181394 - protein, 458 aa, unidentified
MAQGKDGTRRVSARLVEDEEYQLRYERACGIDVAKASGMACTRLPPDRAGGRRVALLEEVAATVPAVTALGGRLLEAGVEMVSMESTSDYWRLWYYVLESCGLRVQLVSSSQARQLAGRPKSDALDAQWLARLTEMGLLRPSFVPPPEIRELRDYTRARLHKAQDRTREWQRLEKLLEGALIKVSSVASSLQSKSVLDMIAALISGERDPRALAGLARTSMRAKMADLEHALTGMFDDHHAELARMLLDHIGYLDRQVARLDDAIAACLDKIPAARGADADGAILPASADAGDAAVLPAAARLAEIPGVSELLARNIIAEIGLDMTRFPTPGHLVSWAGLTPVTAQSGKRQARGKKGHGDTYAKNAATQAANGAARTRTFLGERYHRIARRRGNARALVATARSILVIIWHLLNDPTARFTDLGHDHYARKTDKDRKLRGHVRQIQALGFQVTITPAA

SEQ ID NO: 181395 - protein, 451 aa, unidentified
MRSYRSYQKKRVKAAGKTIIGIDPGKSKHQAVIIDAGGIPTGKTFSFAVNHKGYHEKLWNEINKQIAEYSSSDLLFAVEASCNLWQTINNYLRSAGYAVVLVSPMCTKQSRVMLNNDFSKTDPKDALLIALNAQRGYYNKMRIYPEKSNNMHILSIAYNKLRKDHSSYRGRLRAAIELIFPEFLEVITLGTKTSFYLLGKYLFPEEYLNMNIQLESLQIGTISRRQYGIKHLHKLQELAKHTIGISSNNELYDRTIVLTWLEGMKEIGSRLQVILDQLIKLASSMKEFSILTNLMGISDETASLFLAEIRDISAFDNYKEIEKFAGYNLRLTQSGKHVGSRRISHMGNSRLRWVLYRMTEETMKYIPEVRIKYLKRQLKKQIYRKNLISCVPQLLKLIFSLLKENRFYEYYKERVAEMEKLDVQYQVVKAERAAKHRKHRSTIKEELRKTA

SEQ ID NO: 181396 - protein, 423 aa, unidentified
MNVVYPICCGVDVHKRFFVATLITTEGIEPKYKKQRFSTFNKEILKFKAWLLENNCRDVCMESTGKYWVPVSNLLEDSIHVTIANPKWVKTVKGNKDDTKDSKWIGDLFRIGLVPGSFIPSKDIRILREYTRYRFKLVSTKASEKNRYQNVFTVCNVALDAVVSDMFGKSASSITDYIVNSDTFDPAHCASLLRGALKQKADEIIESIDGFQMTDSQKKRAKMVREHYDYLIEHIKKLDAVIDMLVKPFESAVTLLCTNPGIRRDSAVTIISEIGTDMSQFGSSKRLCRWAGLTPGNNESAGKKKSVRTQRAGVYLKPILVEVAHAAVKDNKNPYYRIKYERIAKRRGKKRAIIAIARMILTAIFYMLTTGEVWNPVDMKQIDMPPELREKEIQKSLHRAAKLLVAHGIIAPDFIQFPKTASG

SEQ ID NO: 181397 - protein, 401 aa, unidentified
MIDTGDIDVFLGLDVGKGEHHATAVTPTGKKAFDKRLPNTEPKLRELFAKLQAKHGTVLVVVDQPASIGALPLAVARDMGCPVAYLPGLTMRRIADLYPGEAKTDAKDAFIIADAARAMPHTLRAIDGEDETIAELEMIVGFDDDLAGEATRVANRLHGLLTQVHPSLERVLGPRLQHPAVLTLLERFGSPAQIRKAGRRRLVTLLRPKAPRMAERLVDDIFTALDEQTVTVPGTEAAALIVPSLAGSLTAVLDQRKLLAGRIEELLEAHPLSKVLTSMPGVGVRTGARILIEVGDGSTFPTAGHLAAYAGLAPATRSSGSSVRGEQPSRRGNKQLKRAFFLSAFAALGDPASRAYYDKKIAQGKHHTQALLCLARRRADVLFAMLRDGTFYEPQPSAAVT

SEQ ID NO: 181398 - protein, 330 aa, unidentified
MNLIGVDVDSVWLVCRISRRGVVQPIAKFANTAMGHRKFIAWATRRGQPARVCLEATGVYSQAFALELHRAADIEVMVANPKAIHQFAQATLARGKTDAMDADVLLEYLVRMSFKAWQPPSDEVLEIQALSRRLVQLTTERTREKNRLHAAERRASIGRVIAHDIALNVRHLERRLESLRAETLTLIRAVPELAHVYERIVSATGFGPHTAIKLIGELMALPADMLAAQWVAHAGLDPRPRESGTSLYKPRRISKAGNRYLREALYMPALVAIKNDPNVKGFYDKLVSAGKKPLQAIVAVMRKLLLAIWGMLKNDEDWNGEKFYRLPKTA

SEQ ID NO: 181399 - protein, 349 aa, unidentified
MGALAVITIGIDPHKATLTAVAVDPSGRRLGQRRFLVNAATLGQLAAWAAGWPARRFAVEGAYGLGRPIAQQLAAAGEQVLDVPATLAARVRLLGSGGGRKTDAADAASVAQAALHHPRLRTVAAEDQTTILRMLAERRDDLIGERTRILNRLHRLLLDLVPGGAPANLTAVKAAALLRGVRPVTTTAACRRQLARDLLSDLRRVDARLADNKFQLQDALAATGSTLTQIHGLGVVLAAKLLGHVGDIGRFPSQDHFASYTATAPLDASSGNQQRHRLNTGGNRQLNAALHTIAVCQARDPGPGRRYYLRKLSEGKTPAEARRALKRRLANVIYRRILADQRRPQPAAA

SEQ ID NO: 181400 - protein, 343 aa, unidentified
MLYLGVDVHKRSCWVTVLEADGQELEQRKLGMDRRTLLGYFGKIPKPAAVAVEATFNWYYFLNVIEPLGLELHLVHPQKTKAIAAARIKHDKLDSRILARLLHAGFIAEAWIAPPHVRELRQLLRFRTRTVRWATRAKNGVHGVLNREGIVSPLDSLFGPKGRAFLEEVKLKELDRWEVDDQLARLDLLEKQIQEWDQEIRERGEMSAVAQALDALPGIGPFIALLLVAEIGDRSRFPTAKHLVSYVGLAPSLYASGEKRWTGQITKQGSSLLRWALVQAAHQAARSPQFAGGYERQQARHGPGKAAVALARKLATISYYRWRAAEVRRPPQPVATSSGVHLA

SEQ ID NO: 181401 - protein, 363 aa, unidentified
MLILAIDLGKAKSLACWYQTDDATHEFRAVPTRPGDFHTLLAARPVDRVVVEICDAAGWVVDLCRTLGIAVQVANTNQEAWRWKNVKNKCDRGDGLKLARLSAMGQLSPVHVPEKVVREWRSLILYRHKLIDRRTSVRNAIHSILVAQGKAIPGRRSVWSDDAMSQLADLAKPLSECTTMEDLWRGHLKMELEHLDELCRRVVELDRKLDALGEADARVRRLRTIPGVGPRLSELVVAMIDDPNRFASARQVSAYAGLVPRRYQSGEMDRSGRISKAGCGKLRKLLTEIAWGMLRHNPHGATVFNRISTGQKTRRTQAAVALGRKVLCWCWAMLRDGADWRVPAARERATQHSVPLPPACTTG

SEQ ID NO: 181402 - protein, 321 aa, unidentified
MKKVSKQMRKMEVADKPEMTLGLDMGDRYSHYCLLNADNDVVEEGRMQSTEAALRRHFEGEPRMRIALECGTHSPWVSRLLQALGHQVIVANARKIPAITGSESKNDRNDAEKLARFAAYDPKLLSPLAHRSPERQLDLNLIHARSTLVRARTMIVNALRGLVKSAGGRLPACSTESLPSRAPTAIPPALATVATPLVEQIALLNAQIGGMDKQIEKLAVKYPEISLLRTVPGVGPIVATAYVLTLDRPGAASNRSAGAFLGLRPAQSQSGDSEPKGLPRTQGSKTIMLESKALASESISAPLQTMPSDFAFRWRVGFCGY

SEQ ID NO: 181403 - protein, 312 aa, unidentified
MREHCYGGIDVSKDRLDVMVLPDSKSFSVDNNAAGYSELVKRLRDLPIAAIGIEPSGGYERAVIRTLLAAGLSVRRINPNKLRQFARARGVLAKNDRLDARLIAEYVTIMPTRLVQRDPAAEQLAEVVTMRRQLCDEHVAVENQTTHLEDAMLRRLNKRRLARLEADILLLDTRMAQIVASHANLTRRYELLTSMRGVGPTLAFTLIALLPELGQMSRKQIAALVGLAPYDFDSGRLKGHRCIYGGRLPVRNVLYMAALSACRYNPALKIFHNRLAATNKKPKVIIVAVMRKMITTLNAMLRDNVAWQPKSA

SEQ ID NO: 181404 - protein, 431 aa, unidentified
MNYNQNDKIAQITSQTLIIGVDIAKFKHVARAQDYRGMEFGSPCFFDNTKQGFQLFLDWILQLKKEQEMEQVIVGMEPTGHYWLNLAHVLKEHKIKFVAVNPLHVKKSKELDDNSPTKNDVKDARVIAQLVKDGRYAEPTIPQGVFAELRVAKKIRDLLTDDLQTVQGQIHNWIDRYFPEFLTVFKSWEGKAALQFLRLEALPHELISYSDQDLLIHLRKAVTRSVGLNKIQELKRAATESIGLRQGAAMAKLELTTLLDKYDLIQMKFEELDSKIDNLIEHIPGVQQMLAIKGVGRDTVAGFFAEVGDLQDYSHPRQIIKLAGLSLKENTSGKHKGQTKITKRGRKKLRALLFRVCMIMVAKNQAFKALHTYYTQRPDNPLKKMQSLIALCNKLIRIFFAIGKKQFEFSEERMLKDIPHMREQIGARLAA

SEQ ID NO: 181405 - protein, 317 aa, unidentified
MGRFIGLDVHRDFSEVAIADRGRARSAGRVATTPEELALFAQCLAPDDRVVAEATGNALAIARIIEPHVAEVVLAHAKRVRAISHARIKTDKVDARVLADLLAADLIPRVRIGDERVRALRRLVSRRRGLVKRRSQVKNEISAVLHRNLKRQPPATDLFGVRGRAWLAVQELPLDERLTVDGCLRHLDFLGEELAQIDRLIAAEALATTDVRRLMTIPGIDVTTAVTLVAVIGDVSRFPSARHLVGYLGLHPRVRQSGNEPARHGRLSKEGSAVARHVLVEAAWVATRSPGPLRAFAARVGARRGRHTAAVAVARKL

SEQ ID NO: 181406 - protein, 346 aa, unidentified
MTIVDCTRPVTGGVDTHLDLNVAAALDSIGGLLGVAEFRTTRIGHGLLVDWLGGFGPVARVGVEGTGSYGAGLARFLRGAAIEVVEVDRPNRQARRRTGKSDPADAIEAARAALSGRAQGAGKTRDGNVEAIRALVVAKRSARSSKIKALNQIRHLGFTASDELRERFSGISRQQLGAAAARLRPRAGSDAVTFATKTALSILGRRVLALDEEKERLNVLLAELVGKTAPSLLELHGVGVDTAATLLVAAGDNPGRLRCEAAWAHLCGVAPIQASSGKVTRYRLNRGGDRQANSALWGIVITRLRSDPRTQMYMERRLKEGRSKPEIIRVLKRYVAREIYPHLPRG

SEQ ID NO: 181407 - protein, 436 aa, unidentified
MTSHCQSYDYKFQEVVLLSFKILKFNCCGLDVHKTWIYACIGITDSNNRTEYKQARFSSFTKGLNELCDWLAKYNCTDVCMESTGKYWIPVFNILEQHNLWVTLSHPKYTKPMKGNKTDRKDAKWICDLYMCGMVKTSFIPPTDIRALRDLVRYRYKLTCMITGEKNRAQNCLTVSNLKLDDVFSDVFGKSSRYITEQILQHPGEKFDVAPFLRKNCKTPVEEIQAAVDGTISKEQAVKLRQCLDHIDELKKHISEVEQEILCLSDKYEAALNLIRTVPGFNKNPMTAIQVLSEIGCDMSVFPTDKHLVSWAGCCPRNDKSDRKIKSSRISRAGSYFKPVLVQVANALIKSKKYPEFITRYKRIKAHRGHKKAIIAICRMILTAIWHILSDLKPYTPEGFLESRPVKEEKIISTSQALNLLRQRGYVIKDEPLTVS

SEQ ID NO: 181408 - protein, 340 aa, unidentified
MESRESFWVGFDVGKNSFSAALDCHGKNIRAKITSLPCRDFKRTPEGVEQFFLWAKKTIPGHDIRIVMETTGCYSQHLTDWINQLHPEISVTIENARNIHAFIQSLNLPHKTDKLDAQAIARFGSERHPKPTNRPSKTILTIRELSRERTALIKARVNLENRRNTLTSPVVRKINAQTLATLTTQIEKIDREIKACVVQDEELLSEVHIMTTMPGVSFISAYSILAEIGSLKQYSAKELSALSGLAPRIIESGSSVHSSYLSRRSSGRLRQILYLDSVPGVPKIPVLQEFHQRLIGKGKKKMTARCACMRKMLLILRSMVVHNTPFNGKFPNNQRRGLDF

SEQ ID NO: 181409 - protein, 328 aa, unidentified
MDQISVGIDVSKTFFVVGLAPTGERWTSETTPVAIDALVTRLRGLAPAIIVVEATGGYERALVAACGVAGLPVAVVNPRQVRAFAQALGLTAKTDDIDAGVLATFGDRVQPAPRPLADAATQALAALVARRRQLIEMIGMERQRLEQAPPTGRITRDLRNHIRWLERRVSDVDDEIGTAIQASPIWRVQDNLLRSVPGVGPITARTLLADLPELGTLDRRAIAALVGVAPFNCDSGQHRGQRHIWGGPASVRTTLYMAAVSAARHNPVLATFYRRLRDAGKPAKVALVATMRKLITILNAMLKHHTPWTGDGASTPAAIARRAPAATV

SEQ ID NO: 181410 - protein, 280 aa, unidentified
MLSFMRSTIGCDLGDRNSRVCCLTADARVETEATVRTTRQGMREFFSARAKARVVLEVGTHSRWVSELLKSLGHEVVVANPRRVKLISQSDSKSDISDAKLLARLGRADPELLAPIIHRGTQVQADLAAAKVRDALVRTRTKLVCQARGLVKSFGERLPRCSAESFHRRARADVPEALKAALEPLFDILEKLEIQIKLQDVAVEQLAKKYPDVEVISQVNGVGTLTALVFLLTLEDKSRFKKSRTVGAFIGLRPGRTNPATQTSSYPSPKRATPSYGGSW

SEQ ID NO: 181411 - protein, 347 aa, unidentified
MNFYHSTHRHYCGIDLHARSLYVCVLDHQGEVLLHKEIKAHPEPLLALLEPFRDDLVVGVECMHCWYWISDLCEEHRINFILGHALYMKAIHGGKTKNDRIDSFKIAMLMRGGNFPLAYVYPKEMRATRDLLRRRTRIVRHGAMLKAHAVNTLGQYNLPPSKTNLNNPGGRSQLTAAFTDPDVQRNIDLDLAIVDCYQHELKKLEWHLEQQAKQHDPASLNVLKTIPGVGRILALTILYEVGDIQRFESVQKFASYARLVKCKAESAGKVYGTQGNKIGNAHLKWAFSEAAVLFIRNNDKAKRYVEKLQKRMNKPKALSALAHKLGRAVYFMLKDKRVFDEQRFLKG

SEQ ID NO: 181412 - protein, 266 aa, unidentified
MTKTICIGIDVAKASLEIALGAQGTVMTYPNTPEGHDELTVTLANYAIDLVVLEATGGYEVPVACVLQTLGLAVAIVNPRQARDFAKAMGNLAKTDKIDAQVLAQLALVLSQRTDRDKIVRILPSAQQRVLQAMIARRRQLVVLSISERQRLGNCHPDIRESITLMISFIQEQLKVIESALSKHIKTYHRSKLDLLSTVKGVGPATIATLIADVPALGKLTRREISALIGVAPFNRDSGFFRGETNNLWRKSNGASNALYGHVNGN

SEQ ID NO: 181413 - protein, 355 aa, unidentified
MDKIKYIGLDVHRDTISAAVLNESGRLLQQSVLMTRTAAILDFIGGVRGSLHVTFEEGTHSAWLYDLLSRRVDKLVVCNPRKNALLKSGNKGDAIDARKLADLLRAGLLSPVYHGETSALEVQQLARSYLMLTEDTTRAMGRLKAVFRGQAISCTGRRLYGPKHRGEYLEALGACALRRRAERLYQQLDALQQLRRDARHDLIVECRKHAEAKWLQTVPFLGPLRAAVLIGRVQTPHRFRTKRQFWTYCGLALETHDSAEYRVIDGQVERKKRPAQVRGLNWNYNHELKNVFKGAANAASTGQGVFREFYLGLLKKGMRPEMARLTLARKIAAIALKIWKKGESFDAEHLKSKAA

SEQ ID NO: 181414 - protein, 319 aa, unidentified
MNSTTAAHIDRSERNVGIDIGKSTLDVCIFELDVYLQYPNTAEGIRELIKKLSRYNLTRILVEATGGYERSLVEACAEKELPLIIVQPAQVRQFANALGINAKTDKIDSRAIAQFGAVIKPEARPLNNKKVRYIRDLLSRKRQLNEMRTQELNRQHKAPAILAATHKRLLKVLDKEIESINKLLAKAVSEVTEWQRTYEILSSVPGVGDGVSFTLLGELPELGQLSPRKIAALCGLAPYNRDSGIMKGRRRIKGGRAPIRTVLYMAMLSAIQCNPVMKKFYKKLVEQGKHKKVALTACMRKMVTILNAMVRDNCEWQAS

SEQ ID NO: 181415 - protein, 321 aa, unidentified
MAMSATPIEAGVDTAKDELVIQAAPNTKPFAIPNTPKAIKAWLKALPKGSALAIEATSTYHMEMAEQAHAAGFAVYVIDGLRLSKYRESIAVRAKTDAHDAALLARFLSNERGSLKAWTPPPAGHREIQVLLRRRAKLVAVRGMLRMSLSGDKLFASELKRVEKVLKCVELSLEKQLRAVIKKVGLSDQLRRVQKLPGVGFLTAAGLVMSFMRGEFKNSDAFVAYLGMDVTVAQSGKWAGRGKLSKRGDSEVRRLLYNASMSGSRTATWKQYYAHHQARGKKTTQALVILARRLARLAFGLMRHQADWKPEIYTGGAKLAS

SEQ ID NO: 181416 - protein, 452 aa, unidentified
MAKKGNRRCDALPILHPDAAGIDVGASELYVAVSADRDPQPIRCFPTFTHDLHTLADWLEQCGIHSVAMESTSGYWIPVYQILETRSLEVYLVNAQHVKNVPGRKTDVSDCQWLQYLHSVGLLRASFRPPGFICAIRSLWRHRSSLIQMAAEHVLHMQKALDQMNLQIHRVLNDVTGISGLKILDAILVGERDPLTLARLCHGGVKNSEDTIAKSLEGDYRPEHLFALRQSLAAYRYYQKLVVEVDQEIKHQLGELKTAATAESITPARTKASPYQRRRYEPKTFDLRGELYRIFGVDLTNVPGISAITAQTILCEIGTDVSRFRNASAFASWLGLCPEKKISGGKVLFTKSRRVRSRVATALRMGAQSLHHAKDYLGEFFRRITRRLGKPQATTATAHKLARIVFHLLSTKQAYNESVFHKSEEETLRRAEYRLRRQAAQLGFQIIPAEIA

SEQ ID NO: 181417 - protein, 519 aa, unidentified
MTATRARKRPARRPAPCVAKPRGVLHPRVQQVGPDHFGILCVDCAKARSKVLLADFYGRILIPPTTVAHNRPDLDAAIAQVRAAFAEHQLRDGLVAIERTGRYHRVVQRTFAAAGFETRILHPFVTKQYRQPVDPGNKTDDTDLMALHRATVTGCALQEAPRDEAWTTLQLLIRHRRDLVRKGAALNCQIRDHLDAAMPGFAACFDKLWDSPVAWHLVHHFPTAERLSAAGLTTLCQSLRQAGIRFQQRTVQTVLDWAAQAAPGDVAAEQHRRIAVALHDDRARKSQEIQALERDIAGRLVQTPYLLLLSFPGLNVVSAADFAGEMGPIEHYANSKNITGRAGLRPSRYQSDQVDKANGPLVRVANRSLRAAIMGIADNLVKCNHHFQALATRWAAQGKDPRHTRVKVGLRFVRIAFQMVAGRQVFHHPGLQGRHYILDKLNAFHRDHDTGSADLLRDLQAAIAQIPGREYAAEAGPLQDELEKIQDGHRRGPQLLGDILPIVLARLGVGAVQSKESGE

SEQ ID NO: 181418 - protein, 354 aa, unidentified
MSHLNSGIAAIGIDIGKNSFHVVGQDERGAIVLRQKWSRGQIDARLSNLPTCLIGMEACVGAHHLSRKLQALGHDARLMPAKYVRPYSKGQKNDFRDAEAIAEAVQRPTMKFVATKTAEQLDLQALHRVRERLVGQRTGIINQIRAFLLERGIAVRQGLRFLRAELPTILATRSDALSPRMLRLIEDQAGDWRRLDARIEDLSEEVEALARQDQACERLMTVPGIGPIISSAMVAAIGTGDAFSKGRDFGAWLGLVPKQISTGDRTILGSISKRGNRYLRALFVQAAWVVLVKLGKKWERYGLRSWIEAAKKRLHHNVLAIALANKLARIAWAVLHKGRAFECVKVNEMAPRSA

SEQ ID NO: 181419 - protein, 421 aa, unidentified
MQVIYERCAAVDVGKDVIAVAVRLPGDRPDGRQTVKRTFKTFYGVLAEAARWLVSLGVTHVAMEATGIYSMPVYHALIEHGAFEKVLVCNAGHVKNVPGRKTDFSDAEWLAHLLECGLLAGSFIPPAEIKAARDVLRYRAKVAQQRVSEIARLGNVLQDAGIKIDSVASSIATKSGRAMIEALIDGERRGTVLADLAKGKMRVKIPDLAMALEGRFGDHHALMCRLHLDHIDHLEAMLARLDAQIEAMMTPFHAARDLLTTAPGIGPLSAAAVISEIGADVREYFPSDARLASWTGLCPGNHESAGKRRSGKRRKGNPHLQSILVECAWAAVRHDGYLKSLYHRHVMKWGGYRSQTAKNKAIIVVAHALVVIIWHILATGKPYHELGADYFTSRLDPERETRRLIAKLQALGHQVTLQPAA

SEQ ID NO: 181420 - protein, 344 aa, unidentified
MDHFAGLDVSVKETSICIVDDAGRIVREVKVASEPDALLAVLTNPAYRFKRIGLEAGPLSQWLYSAFAEANLPVICVETRHMRAVLKAQINKTDRNDARGMAQMMRAGLYRPVHVKTLRSQKLRMLLVHRKLLQSKAIAVENDLRGTLRNFGLKVGIVGKLKFEARIKELVESHPDLAALVEPLLVVRRVLREQTAVLHRRLLAIVRGDEVCRRLMTVPGVGPVVALTFRATVDVPARFTNSKAVGAVLGLTPCKHQSGESERTGAISKCGDEMMRVMLYEAAQILLVRSKRWPWLKAWAMQIARRRGTKKAIVALARRLAVIMHRIWVDGTEFRWTRQEAAAA

SEQ ID NO: 181421 - protein, 350 aa, unidentified
MTDCSWVGIDLHRSRSQIAVLDDRGSELLSRRIANDPQTFLELLAEIDGESKIALEATYGWEWLADVLQDAGYELHLSHPLRTKAIAAARVKNDAVDARTLAHLLRTGLLPEAYIAPRELRELRDLLRHRVALTRMRAALKNRAGSILAKYGVRRPFADMFGPGGLRFLDALELRESPRRRLDSTLTLIGDFTREIDATTREIEARAKQDPYVEVLCQIRGVGRYIAMLVIAEVGDVGRFQTARQLCSWAGMTPTVRSSDMRTRLGHISHQGSPALRWALVEAAQHASRGGGPLRETFERISKRRGRQVAKVAVARKILTLCFYGLRDGEIRCLAPRAGARAVRTLAVSS

SEQ ID NO: 181422 - protein, 345 aa, unidentified
MQHTITGVDLAKDVIQVCVVKRSEVIFNKEMSIQEFVSWLGSSKAMMIVFEACSTSNYWKQKATEMGHDARLVSAKLVSKIRENQKTDENDALAVAQAGQLVGVNFIKGKSFAQQQLQSILRMRELTVEHKVAQGNQLKGLLLEFNIRISPSKGGINGVIGDVLEDADNGFCLFFRKALQVSWHAYQDTISRIDEYDMQLNKAIRQHPECVKLLALEGVSTINAVNLFVALSCGEAGVFKTGRDAAACIGVTPIQHSSGGKTRIGSIGKHVKNTGMRACLITGAMAVVRHVSNREPRTAKEQWLKQLIERRGKKCAAVALANKTVRTAFAMLTQGTEYRVEPLRA

SEQ ID NO: 181423 - protein, 341 aa, unidentified
MSLAPPEALFFTGIDWAAETHAVCVADAAGTIAAGFTIEHSADGIAALVRHLARHGEAGDMPVAIERPDGRLADLLLEAGHPVVPVSPNAIKAWRDGEVLSGAKSDAGGAAVIAEYLRLRQHRLKTAAPYCDETLALRTVVRSRGDLARHGYSGRRTAAGLLARLRDAGLAAVGVLTALNASVKNPGRSVAAHLGEHPDGKIFTSLPRSGQVNAAQVLAEPDDCRQACDGPGSVAALAGCTPVTRESGKHRGVHFRWACNKRFRAAITLFAGNSRHASPWAAKTYTDARASGKDHPHAIRILACAWIRVIWPCWLNGIPCHPARHGAAAALAEQPAKQIAA

SEQ ID NO: 181424 - protein, 462 aa, unidentified
MRSRKTLASKKKQSGRKNVDWKVLDIMHPDAAGIDVGGNEHWVAVSPDRDAEPVRRCGCFTADLREMARWLTEKGVRSVAMQSTGVYWMPVLEVLEQHGLEVYLVNARHTKNLPGRKSDIQECQWLLKLHTFGLLNNSFQPTDEIRIARALWRQRGNLVADASSAIQRIQKALIEMNIQLTSVLTDISGVSGMTIIGAVLEGERDPWQLAALAQPGVKAIPADIAKSLEGNWREELLFVLRQEVELYRVYQEKIAACDQQLRQHLEKLGSKVDLEAQPIGPRPKGKRESKHAPEFDLRTELYRITGIDWAQINGMDVLTAQTVIAEAGADLSAFPSEKQFASWLGLCPTNEQSGGKILNRRTRKVVNRATVAFRNAANSLLRSQSYLGAQYRRLRTRLGAPRAITAMARKLACLFYRLIKHGKQYVDKGTEYYEAKYREQQIRSLTRRAQKLGLQLVTPKAA

SEQ ID NO: 181425 - protein, 331 aa, unidentified
MNQVGIDISNAVFDTTMQLGSSVVRKQFSNTKTGHHQFIRWALRRTTSARVCLEATGVYHLQLALALHRHTDIALMVVNPCAARRFAQANMVRAKTDAIDADGLLQYLQRMPFRPWSAPREEVLQLQSLAHRLAQLDKEIIRERSRLHAARRAGSHTRLVQQDIQAHIKQLQRRLERMKSQAYQVVHNDPQLTDDARFVKSAPGFAELSATKLLAELSGLPDDMTPAQWVAHAGLDPRPCESGSSQRSSRRISKQGNARIRRALFMPALVAIQRDANVSAYYEKRLESGIAKLQAITAVMRKLLHALWGMLHHRQEWDGEKFYRLSEPKTT

SEQ ID NO: 181426 - protein, 342 aa, unidentified
MKKASIIGLDLAKRSFQAHGALADGSVAFRKKLTREKVLGFLAEQPRCVVAMEACGSAHHWGRAIRDVGHQVRLIPPAYVKPFVKRQKNDAADAEAIAEAASRPTMRFVAVKTEEQQARAMLFRTRDLLVRQRTQLINALRGQFSEHGVVAPQGPANVAILAQAIDDMTPSLPLLVVELARVYLDQIDGLSEKVAGLEKAIACEAKRGAMTRRLQTMPGVGPITAMAIETFAPPMEVFRRGRDFAAWLGLVPVQHSTGGKQVLGKTSKMGQRDIRRLLITGAMVIVRWACRKGAQEGTWLHRMLGRKPRMLVAIALANKMARSIWAMLTKGEDYRGPVAATL

SEQ ID NO: 181427 - protein, 347 aa, unidentified
MVIIGCDFHPGFQQVAIFDKRTGEIEEKKLKHREEAEQFYHALAGEPVRVGMEACGHYPWFERLLAELGMELWLGDAARIRASVVRQQKTDRRDAEQLLKLLREERFPRIWVPSLGERDARQLLVHRHQQVQARTRVKNQLQAMALGQGVQRKRKLWSAVGRAELEQLPLLPYAWQRREQLLRSLDWLDAEIAELQRRVEQEACERPAAVKLMTHPGVGPVTALAMVLTIGPAERFQSPRQVASYFGLIPSEHSSGGRQQLGRISKQGNAFLRFLLVEAGQSAARYDAELGRFYRRLSARKHRALAKVAVARKLAMRLYLMLREDWNYAQLSRAVVQAGPSHSVVQR

SEQ ID NO: 181428 - protein, 354 aa, unidentified
MNEAKYVGLDVHQSSTVAAVHNERGKRVMESILETQRETIESFLKGLSGTVHVTFEEGTHAAWLYEVIKPLVSELIVCNPRANKLLASGNKSDRVDADKLAQLLRGGHLKGVYHGGLSVRALKELVHNYDALVEDTTRVMNRIKAIFRSRAIRCAGREVYHQQHRGEWLQKLMEAAVRRRAEFLYEELESLKVLRREAKKEMLREARRHSAYQLLKQIPVLGPIRVAAVIARIGSPHRFRTKRQLWTYIGLAVTTRSSAEYEVERGRVRRRVKSVATRGLNTNYNHRLKYVFKSAALDATHREPFASFYQDLIKHGMRPEMARLTLARKIAALTLRIWKKGERFNELRLKREAA

SEQ ID NO: 181429 - protein, 408 aa, unidentified
MQVTFGIDVSKSTSTICELIGESKNELTITNDHPGFIQLLKELSAFSKHPQIIFEATGVYSRRLQAFLEDYDYDYVIINPLKAKKEMDLGLRHNKTDKTDAYHLALIQRLHHHPVNHLQSQTYKQLNSLSHFYDQLTSDLVIAKNRLHQALQSTFPEIETLFCSAKGKNYWQILLHYPHCDLVRKNDKKQIINWLMQLKGVGFKHAQKTADKLITLAYKAYPVVSCDSVEVEQVQYYAHRLLSLSEYREKIIERMVQLAKSLPNHDLENLESIPGFAQTTAVRVLAELGDLRRFSNPNKINAFIGIDPGRYQSGEMDSNLSITKHGNAVARKLLYRAIGQIDNASKTNPCHIADYYESKKLSSQTKGFKKIAIASIHKLIRTIYALIINDQLYDYNVATHNQKDFSRN

SEQ ID NO: 181430 - protein, 421 aa, unidentified
MKIVYPVCCGIDVHKSFLVATIVSVTKMRTLSYKKERFSTFNKDLQRLKHWLIENDCYDVCMESTGKYWVPVLNVLTPELHVVIANPKWVRAVKGNKDDVKDSKWIGELFCFGLVKSSFIPGKEIRILREFTRYRCKLVNMRSSEKNRFQNGFTVCNIALDSVVSDMFGKSARQITDYLLTDKDPTAQHCSTLLHRSLKKKAVAVVASIEGFQLTEVQKFRMLQIRQHMEYLDAAIQTIDEKLDHMTTPYAAAIRLLCTIPGMKRESAITILSEIGTDMTQFDSSKRLCSWAGLTPGNNQSAGKKKSVRITRAGVYIKPMLVQAAHAAVKCTRQPYYKVKYENIARRRGKKRAIIAIARMILTAIYHMFKTGEVFCPTDLRQIDMPEEVKEKLRLRKIHNAIHLLKQHGILTETFVAPSCA

SEQ ID NO: 181431 - protein, 308 aa, unidentified
MFVGIDVSKATLDVASETAAWAPVANEDAGIAALVPQLRAATPTLIVVEASGGYESAVVSACALAGLPIVVVNPRQVRDFARAIGRLAKTDAIDASTLALFGARVRPAVRALPDSALQDLRALVQRRRQLLEMLGAERQRHQQATVRRVVKSLERHIAWLERQLGDVDDELRRQVEASPLWRTQDNLLQSVPGIGPITAMTLLTDLPELGRLTHRQIAALVGLAPFNRDSGQWRGRRTISGGRASMRALLYMATLSAVRHNPALRAFHRRLRAAGKPPKVALVAAMRKLLTILNAIVAHQQPWHPTAV

SEQ ID NO: 181432 - protein, 342 aa, unidentified
MNIHTIGIDLGKTSFHLVGLNEGGEVVVRKRFSRAQLLRFTANRKVHVMGMEACGGSHFLGRALQEQGHEVRLIPAQYVKPYVKTNKNDFIDAEAIAEAVGRPTMRFVPIKSDDQLDLQSLHRVRERWVSRRTAVINQIRGLLLERGITLRKGRRYVDAALPGILEDADAKLSGALRLLLAQLKLELDQLALRMEQADRVIQKTASENEACQRLVKIPGIGPVTATAVIAAIGNGAAFHKGREFAAWMGVVPREHSTGGRQKLLGISKRGNRYLRKLFVQGARAVLQQKTKQTPGLKAWLEKLTARTHRNVAAVALANKLARMAWAVLATGEAYRAPLPAAA

SEQ ID NO: 181433 - protein, 478 aa, unidentified
MSAKKPTGKPKGSAQRKVDWKALEIVHPDAAGIDVGGSEHWVAISPDRDLEPVRRFGCFTADLREMSRWLVEKGVRSVAMQSTGVYWMPVFEVLEQHGLEVFLVNAQHTKNVPGRKTDVQECQWLLKLHAFGLLNHSFQPSDEIRIARTLWRHRGNLVAEAGSTIQRMQKVLTEMNIQLSNVLSDISGVSGMNIIQAILDGKRDPWELAALVNPGVKATPEDIAKSLEGNWREELLFALRQHVELYRIYQEKIRDCDLQLHQHLESLGSKIELKTQPIGPRPKGKRNSQNAPAFDLRTELYRITGIDWSQINGIDVLTAQTVIAEAGADLSAFPSEKQFASWLGLCPTNLQSGGKILSRRTRKVVNRATVAFRNAAMTLLRSQSYLGAQYRRLRTRLGAPKAITAMARKLACLFYRLIKHGQPYVDKGTEYYEARYREQQIRSLTKRAQKLGLQLLIPETALIVALLRRAQGATVAWI

SEQ ID NO: 181434 - protein, 361 aa, unidentified
MVNHIFVGIDLGDKNSVARIAMDREKSERLGFVNTRQGRARLFREAKRRAEQAGGAQIVMAYEASACGFVLRDEAEAMGIQCWVLAPTKMEKSVEQRKQKNDDRDADDIVEKLRGHILAGNRLPTVWIPDQQTREDREPVRCRLELGEKQTAVKAQIAMLLKRHGLEKPSGLGSGWTKGYRRWLEQVAEKESFGWGMRQALGSLLRQVEFLENEMERMQELLNQLAKAPRHQAVIEELMKEPGVGMVTAFVYRTEIGYAGRFRRGRQVGKFVGLSPTSHESGEQNDRKGHISHQGPPRLRKVLCQASWSHIRHDAAAARVYQSLVSRNPKKKKIAVVAVMRRLAVRLWHRMRQAELDRMMN

SEQ ID NO: 181435 - protein, 370 aa, unidentified
MDVHTTNYTLCIFEPSFEHEGTVHYITQVKPEVKNIIDVIDKLKEKLKNDDLDITCGYEAGCLGYSLYRELKDKGVKCIILAPSTMRVQKGGKKLKNDYRDARQIAECLSYGGYSAVYVPTKLDNAVKEFIRMRDDLNQNLKSIKQQIIALLTRNGKHYGDGSHWTGKHIKWINEIHFDEELLNETLAEYMIEYHRLLDRIVCLDARIEEISTKEIYVEKVNKLKCFIGIRAHTALSLIVETSDFSRFSKGNVYAAYLGLIPGDDSSGEDSNKLGITKAGNRHLRKLLIESAQCFARGQTGHISVKLKQRQALCSSDIVAYANKANERLRRRYYKMIGKGKKYNIVKTAIARELACFIWGMMTENIQLSH

SEQ ID NO: 181436 - protein, 346 aa, unidentified
MRFYQQQHEFYCGVDLHARSMHVCIVDQEGQTKVHKNIDTHPDRFLPLIRPYRAGLVVAAECMFAWYWLADLCAQEQIPFVLGHALYMKAIHGGKAKNDKIDSQKIALLLKGGMLPVAYAYPKAMRATRDLLRRRTKLVRTRAEALAHIQNTVSQYNLPPLAKKLTFAANREGVAEQFADESVRQMVQTDLSLIGHIDEQLKTVELYLVRHAKIDDPQAYHLLQTIPGVGKVLALILVYEMHAAGRFGDQRHFVSYCRLVRPCHESAGKKSAGKGHKIGNAHLRWAFGEAACLMLREVPAAQTYVARLEKQHGKAKAISILAARIARTAWLMLKRKEAFDATKFLK

SEQ ID NO: 181437 - protein, 333 aa, unidentified
MMNMHSQGRVASGAPRPNAGIDVSKEHLDVHLLDIDLRVDNDASGWDALIAKLKESDVDLVVVEATGGYERGVVTALHRAQVTVARVNPRQARDFAKSMGVLGKTDRVDARCLRDFADMLARHKDRHKYITLPADPEREQLASLMTRRRQLVDMRVAESNRLEGATVRTVRSIRSVIKTLDKQLQDIDGDIDQQLERHFKPQKELLDSVRGVGPVTILTLTSALPELGRLGRRQIAKLVGVAPLADDSGKRNGVRRTWGGRSEVRAVVYMATLTAIRHNPAIKAFYSRLVAAGKPKKVAIVACMRKLLTILNAIVRDKAPWSHAAGLTSQRSP

SEQ ID NO: 181438 - protein, 377 aa, unidentified
MIYVDINIAKLNHFAAAISSDGEILIEPFKFTNDYDGFYLLLSKLAPLDQNSIIIGLESTAHYGDNLVRFLISKDFKVCVLNPIQTSSMRKNNVRKTKTDKVDTFVIAKPLMMQDSLRFMTLDYIELKEFDRFRQKLVKQRTRLKIQLTSYVDQVFPELQYFFKSGLHQNSVYTLLKEAPTPTAIASMHMTHLAHLLEVASHGHFGKEKARELRILAQKSVGVNDSSLSIQITHTIEQIELLDSQLFHTELEMANLVTCLHSVIMTIPGIGFINGGMILGEIGDIHHFSELKKLLAFTGLDPSVHQSGNFQAQRTRMSKRGSRVLRYALINAAHNVVKNNSTFKAYYDAKRAEGRTTLQCPWTLCWQACQSHLEDAH

SEQ ID NO: 181439 - protein, 377 aa, unidentified
MWSASSEAQDGGVRVTVGVDTHTDQHVGVALDQFGRRLGTRSVPTTPAGFAELVAWARDFGAIEQIGIEGTGSYGAGLTRWLRARGLAVIEVERPHRHDRQARRRRGKSDPLDAEAAARAVQAGTGSGQPKAGDGQVEMIRTLRLTRRSAMKARTQAANQLHALVVTAPDDLRARLRPLPMAGLITLVAAFRPVRAGPVLSTPVAAAKLALKGLAIRYRQLSAEIDALDVHLGQLVATAAPELLAVKGVGTDIAGALLVAAADNPDRLRSEAAFASLCGVAPIPASSGKTNRHRLSRGGDRDANRALYLLTVGRMGWDPATRTYVTRRTAAGLSKSEIIRCLKRYIARELYRILTASAASPPHSTDGDVAPSSAIAS

SEQ ID NO: 181440 - protein, 339 aa, unidentified
MQLYAGLDLHSRNTYIGILDQEFNRIFKKRVSNNLELILQTLNPFRKNLKGLVVESTFNWYWLIDGLMDNAYQCVHLANPSAIKQYEGLKHADDQHDAFFLAHLLILGILPQGYIYPKKDRPVRDLARKRMFLVQHRTAHILSLQSLIARCCAKKVSSNQMRHLTLDDLQHLLEEEHLVLSAQANLDNIIFLTQQIKQIEKTITKKIKLNKAFQNLLTVPGIGNILAMTIMLEVGDISRFAKVGNFASYCRCVSSQRLSDGKSKGHGNRKNGNRYLSWAFVEAAHLTRRHCQQFRRYYNRKVAQTNTSLATKALSNKLARICYYIIRDNVPFREQLSSQ

SEQ ID NO: 181441 - protein, 374 aa, unidentified
MSSTLYIGLDVHKSGIAVSTAVGERGGEVAFIGEIPNTPDRVGKLIKQMMAKERPLEFCYEAGPCGYGLYRQITDAGLGCMVVAPSRIPKASGDKIKTDRRDAQKLAVLHRSGDLVRVWVPDQTHEAMRDLVRARTAAMVALSRAKQQLLAFLLRHGRFYETGRKYWIYRHKEWLAGQNFDDPAQCIVFRDYLEAVWAAKDRQDALVKQIEALVPHWSLGPVVEALRCFRGMELVSASTFVASVGDLTRFDTPRQLMAYLGLTPPEYSSGGRISRGGITKTGNREARRMLVEASWSYRYPARVSQDKIQLVTRQPKAVRDIAWKAQERLCKRYRSLSRKGKKSTVVVTAIARELSGFIWSVGRELAPEPNVPKG

SEQ ID NO: 181442 - protein, 402 aa, unidentified
MIARYIGMDIHKNYAVIAAVNADQQVILDPRRVEMDHLADWAAGYLTRQDEVILEATTNAWPVVDLLREHTPTVIVANTYKTKLIAEAHIKNDKVDALALAKLLAARFVCDVWVPDRQVRENRALAAHRANLQKQCTRVKNRVHGLLRRHNLRCPEKSLFTAAGYAWLDTLDLPLVDALQVQQLRAQLALLEEQLNETDKLVARQASKDPRVPYLMQLTGIGFYSAFAVLAVIGTIHRFPSPEKLTAYGGLVPRQHQSGSRSFNGHITKAGNSMLRWLMVEAAKSAIRWDPHWQQVYERIARRRGSSIATVAVARKLLVTIWHVLHDHTNYFYLRPQTFVTKLQEWAYRIGRDHLPASSAKEFVIDLLSALEMHSLANSLTSHPKNARLHNLSECRAACGVG

SEQ ID NO: 181443 - protein, 333 aa, unidentified
MNYVGVDVHKKYSVLCALDERGRKLREARVEGNTGCGFAQFFRSLEGPSKAVVEACWNWGLIHDELEELDQVEEVVLAHPAKTRLIADAQIKTDRLDAHALGTLLRGNLVARAHVPRRQTRSRKNLLRQRLYWARLRTMLRNRIHALLDRQRGLELPQCSDIFGQRGLFFLRQLQLPEPDGMLLREQLALHDLIAQQMKAQEKRIAAEFKSEVIHRQLLSMPGIGTTLAAVIGCEIDQIERFPTSEKLCAYAGVVPTTHASGGKVAHGRLLPFCNKWLRWALIEASWVAIGCSPYFGALYQQHRARGKKAKHRHHHRRPADVSYYLATAEREP

SEQ ID NO: 181444 - protein, 480 aa, unidentified
MNSRCRSVCAAALATEAVSLWRSQSPRMSMAGTLGSTTNCSLRKLRRARIGDFRFFEASNAARWEGVPRWKLYPCCCGLDVHKKSITACVLWAEAQGKNRKEKRRFGTFTHDLLQLADWLGECGVTHAAMESTGVYWKPVWNILAEQFKVLLVNAQHIKAVPGRKTDQKDSEWIADLLQHGLLRGSFVPPRPTRELRDLTRYRVSLAQEINRIANRIQKVLEDANIKLASVATDALGASGRAILKAMLAGEQDPARLAEMAQGKLRNKIPELKLALEGRMTEHHRFLLRQLFDHLRFTESKLGEIEQEIDKRTRPFADKVTRLCTIPGVDQVTAWGLLAEIGLDMNQFPSSEHLSSWACLCPGSFESAGKRLSGKMRKGNVSLRRCLSQAAWAISMTKNNYLSALYRRIAARRGAKRAIMAVAHALLVIAYHMLKRKEDYRELGADHFDRIDVNRTRRSLVRRLERLGHKVTLEPLAQTA

SEQ ID NO: 181445 - protein, 456 aa, unidentified
MTPKTQSSVGKSLPVIQPDAAGLDIGAEKIWASVPADRAAPTVRSFATFTPDLQTLATWLNTCGIKTVAMESTGVYWIPIFELLEAAGFEVYLVNARHIKNVPGRKSDVQDCQWIQRLHSYGLLSASFRPEADMRALRAYLRHRGMLLEYRAAHIQHLQKALQQMNVQLTQVLSDITGVTGLDIIRAVVAGERDPVHLARFRNPRCKSSSDEIAKALTGNYRAEHVFALQQALALYDFYTQQLQACDQQIETQYSVLTPRFDEDLPPLPPDPKVNSHSKNAPTFDVRGRLYRLTGVDLTVVDGLDDSTVQGVLSETGTDMSKWRTEKHFCSWLGLAPHNDITGGKVIRSRTLKVHNRAGQALRLAAQSLSRSQSALGAFYRRMRARLGGAQAIVATAHKLARIIYHLLKHRQPYRHASAKAYDQQQHDRHTKSLQRQAAQLGYGLTPLPIPASVSE

SEQ ID NO: 181446 - protein, 455 aa, unidentified
MSKSNRTDTPLRAARAQISNPEITVHAMYRSAIGIDVHLNQLVCCHQKQVAGHREQSESRDFNTDRASIDAFAAWCRECNPDIILMESTGSLWQSPYEALERAGFTSEQLALINARDAKAAAGRKTDRKDASRLASLARTGNFKKSFVPEKAFRLQRVISRDLQKNRNDISRTSNRFGKSLNLTGCRPTTVFSDIRGGKAASLILMAKLRDDPHLFDVIKQNSRRLRASPEQIMQALDFEIEPMMKEQILALRKKIDQLEEYDRSTFERLRQLQAPYEKDIQLLITITGIQERSARMIYAELCPDLKEHFPTSEQFASWLGICPGDNTSAGKQKSGKCPKGNKHLRRTLIEAARGLAVGGTAALKEKFQVLKMRRGYRRAMVAFAHLLARIIYSVLTHQKGFEPYLSTAFRDALIERAKNGVKQLLKLKGTKYVIADGLVVETKTGAILGAVVSS

SEQ ID NO: 181447 - protein, 371 aa, unidentified
MKEDSVIFIGLDTSKLKISVAVANGERNGEVRFFGDISSEAASVASMVDKLSKRGAKLHFCYEAGPTGYGLYRQIIELGHECVVAPSLVPKRAGDRVKTNRRDAVSLARLHRAGELTSVWVPDKGHEAMRDLVRAREAASDALKQARQQLQSFLLRHGRIYTGRKPWTRAHTRWLACQAFDHPAHHILLAEYCQAIEDAGVRLDRLTTLVVETAASWSMAPVVAAYQAMRGVAFMTAVTFVVEIGDVRRFDNPRQLMAYLGLVPSEHSTGERVKRGGITKAGNARARRVLIEGAWTYRFPAGVSPTIQARLEGVPRNVREIAWKGQLRLCARYRRLVAGGKPKVIAVTAIAREMAAFLWAIGQEIAPATKV

SEQ ID NO: 181448 - protein, 373 aa, unidentified
MPGWLVLGNPSEKGKVMDKITRIGVDLAKNVIQLHGVDSMGRVVIRKALSRQKLLEWIANLEPCLVAMEACSAAHYWGRKLRALGHEVRLIAPQFAAPYRKGGKHVKNDRLDAEAICEAAGRPHMRFVAVKTADQQNVLVVHRMRSGFVEERTALINRLRGELVEFGVFLPQGIDAFRTHFVEALEDGATELNGVARTALLRGWEHLQALDQQIAWCDAQVATHVKHDNDAQRVMAVIGIGPLTASAALATVGDARVFKNGRQFAAWIGTVPKQKSSGGKTRLGRITKQGNTYLRTLLFQGARSAVTSAHRRTDRLSRWIVQLQARVGWYRTLVAVANKHARILWAILAKGERFDPSYVPTRTAPAAREPRTA

SEQ ID NO: 181449 - protein, 479 aa, unidentified
MIKSVGIDLACTGEHKVRCLDERAQPCDGFSLETSSEGLAKLEKRIFGDGANPVIVFEPAGLTWFILAICLRARHPDCRLVRAKGQKVAALRRYLRGSSKSDRLDALTLAKMSFIDPEQLDEVYLPPAKIHALQRLARQRKRLESEIAARKTRIGSIVESYVPGVRKVFSDPWSSQARAFLRCRLNPVAVAHNGEKALHSFLARARRRNKADKEESRRVYLTCQSAAVLYQLSSCAGAVDDGFFSVLQEEIARELRLMELEEAESEAIAKHMEELYRELHPSDNLRSIPGVGQITAPVFLATVGDPARFHNQSAFVNWTGVVPRTRQSSDVEAKGLRMTKAGPAIMKWALFQAGDIGRRFDPQLASLYYREMVHHGKNHKQAMGAVMSHLAARVLAVLQENRAYELRDIQGNPLSRGEARRLILSNYQVPEEIRRERRRRNPVKRGYSKLRGITVPRTNEAAIAPQPVNTTAIPQNQSN

SEQ ID NO: 181450 - protein, 407 aa, unidentified
MNDSRKRYIGLDVHKHYLIALGVDEELQVVLPARRVELTYLEAWMKKTLTRQDEVVLEMTTNTWQLYDELAEYAGSVTVVHPPHVALITRSQVMNDKIAASILARLLAKGLLVGIWVPPQEVRELRGLVAQRQKMTRLATQAKNRLHAVIQRHHLSVPTGNPFGKSNNGWWQALSLGRLEKMNLQSDLETLQFAEKQEARLQAEMTGIVAENEELGRLLHISGFGVITAVTVYAAIGDICRFAEAKKLVGYAGLGARVHDSGLTTRTGKITKAGRRDLRVALVEAAHVAANSHPHWKAELARLQPRLGYNKAIVAIARKLLVTVWHVLARKVVDRFVEPEKVSKKMLHFAYEVGKVNRAGKSAAQFTRERMDTLGLGSELTSIPWGSKKPIPLPPSKLKKESAVPNK

SEQ ID NO: 181451 - protein, 344 aa, unidentified
MDHVGIDIAKVKSQMCILSADGVVLERRFKTSREELARLLGGRPRAKVLLEACGESEWIARVVEELGHEVVVADPSYRVMYGARSAGIKTDRRDAEALAVACQMGAYRTAHRQSEPQRQFRRTIVVREALVRTRAKLVTLVQALLRQDGIRVPSGNSKTFLDRLSRLELPEHLELAIGPLRVAIEPLNGQIDACDELIERRTQMDDRAKLLCTIPGVGPLTSTVFVNTIDDVARFEDPHQLEAYLGLVPREYSSGERQSRGSLTKAGDARTRMLLVEAALRIRRLKNPKTERLWSWSEQVAQRRGKKIATVALARRLAGIMYAMLRDKTEFRFGAKEATTAVAA

SEQ ID NO: 181452 - protein, 343 aa, unidentified
MNAYYSVGLDIHKKLIAYCVKAADGRLVTQGMVGADRESLSQWAESLPGPWVGAMEATIFTGWVYDFLAPYAVDLKVAHPEMLKAITAAKKKNDRADAEKIADLLRVNLLPECTMLPEEIRELRRILRYRNHVVQTAVKMQNKMNGLLMEVGAGYNKRRLRGKRYFHELLARVDEIPASVKELLLLSRAGYEMFQSVQKRLIQTLRTNELIRERVHRLMTIPGVGEITALTWVLEIGPPERFASIRQAISYCGLCSAQRESAGKEQRGPISKKRNKHLQTILVEAAKLAPRWNAQLADVHQKELKKGNRNRATLAVARRMVAYMLAVDKGRQDFVVREEAKAA

SEQ ID NO: 181453 - protein, 370 aa, unidentified
MEQVDDIRPRKFRQVKKEIRGSGQYLIVGIDVAKERHNAFFGTANGKTLHKGVIFDNTIEGFEKLLTMTEALKVQHDLTKVVFGLEPTANYHKPLGEHLIQCGHMVVLVSGAAVKNNRSLLDGRWDKHDTKDSANVADLISQGKFLFYEYPDPKMQDLRNLLSLKRRLKKEEHSLRIRIRNQLLAQYFPEMDQHFGSEVSLSVVGHCLDPSVIAGMEFDEFRRSVAPGSTNLAQQKLLQTIWQIAPESIGCHVGDAVPFAGKLMVSKLHQVRETIKEVENKIEDICMQFPEYLHLLSIPGFGPDVSSKVLGAIGNPFRFVSGKQVLKMAGLDLCAQRSGKTSHSITPVISKQGKSDLRYALYQAAFNASR

SEQ ID NO: 181454 - protein, 390 aa, unidentified
MPRIVDDLSRALVAFEQDSTLAVVVELSQSGWLVAGLVPGVARRPLKKLSADAAELLALVHRWRDEAVQAGKAIKRLVVAFEAGRDGFWLARWLRRRGIETHVIHAASVAVSREHRRAKTDRLDTQLLMRALLGWLRGEAGHCKMAQVPTLEEEDDRRPGRERDALVAERTRLTNRVKAVLVRFGISGFKPLLRKAADRLAGLRTPDDEGLPIHTLGELRRLVERLALLKTQITAIEAARLVPPAPSATQAQARLMQTVLARMVGVGVDTAELLTQELFRRGLRDRRAVARFAGLTGSPDESGSRRREKGLARAGCTRVRRGMIQLAWRFLRFQKASALAAWFQQRARGASGKERKVLIVALARKLLIALWRLASAGVVPDGVQMRAQTA

SEQ ID NO: 181455 - protein, 386 aa, unidentified
MEDGPFIPVQYDVFGGLDVDKKSIAVTFMSHEGLLKSLSLPYQGENLISYVRNHFGGKKMAFAYEAGPTGWGLYDTLTGQGYRCLVAAPSMIPRAPGQRVKTNRLDSRRLCENLRGGQLKGIHVPSHPYRHLRHLIQLRDTFVKEVVGMKLRIKALLLFEGIGFPSAPSGTQWSFMVKDRLRKLPCTEPVRFKLDRLLESLEFSEKQALQSIRQIRRFCRNDPELFQSIKYLMTIPGIGWIVASHLLARIGDPRQIQNVRQLGGFLGLVPTEHSTGDRTVRGSITRAGDSRLRGKLIQSAWAAIRQDAELREFYRSVYERHPRERAARKAIVAVARKLTTRIYAVLKQQRAYVVREKVHSAPLTKEETVPQGTTRGLAEPGEPELP

SEQ ID NO: 181456 - protein, 392 aa, unidentified
MYIVGIDIGKNHHEASIVSPKGKQIGRSLRFATTHKGADSLMSFIFKNIGNSPCVFGMEATGHYWYPIYSFLKAKGYTIYVINPIQSDSLRKMYIRQTKNDSIDSFLIAEVIRFGQFGTTSMADENILAMRQLCRYRDSVISSRTEIKLRIGTIMEQIFPEYEKQFSSLWLSTSMGILEKYLTPENIENAPIDELFEIIKDKSHNRLTRAKAISIKEAAADTFGIKIAQDAFSFQLKQLIDRMNFLDKQIEALDCQILEYYEKFDCYLHTIPGIGIIGAATILAEIGDISRFKNSSSLIAFAGIDPTVRQSGEFNSTHNHMSKRGSPYLRHAIFLAATTCSFHNSPLNAYYKKKRDQGKHHLTATGAVARKLTTIIYAVLRDSKPYEPKKFC

SEQ ID NO: 181457 - protein, 360 aa, unidentified
MKKLSKQTQEMEATLGKPTMTLGLDMGDRFSQYCLLNEEGDVVEEGRMQSTESAFRRHFENEPRMRIALECGTHSPWASRLLKQLGHQVIVVNPRLIPAITGSASKNDRNDAEKLARFAAHDPRLLSPLEHRSQERQLDLNLIHARATLVRARTMIVNALRGLVKSAGGRLPACSTESLPARAPSAIPSALATVATPLLEQIGLLTTQIGGMDKQIEKLATKYPEIVLLRTAPGVGPIVAAAYVLTLDRPDAASNRSAGAFLGLRPGQSQSGDSDPQRRISKTGDSCLRSLLVQSAQYILGRFGPDSELRRWGLKLAATGGKRGKKRAIVAVARKLAVLLHSMWRNGQRFQPFPQAAIAA

SEQ ID NO: 181458 - protein, 350 aa, unidentified
MKKNSKAVERQPVETVGVDLGDKVSRYAILNEEGEVIEEGSFRNNAESIATHFAKQGPSRVALEVGAQSAWIAREFKKLGHEVIVANARELKWITSSDTKNDRNDAVKLARLARADRKLLAPVEHRTAEQQAELAVIRARDALVKSRALLVNTARSLAKGFGLRLPATITHTFGARALAGLPEPLHVAMRPLLEQIDALGVKMRDYDQRIGAVAAKHPEVERLASVPGVGTLTATAFVLTLGRRERFAHSRDVGSFLGLRPQQRQSGERDPQLGISKSGDKYLRKLLVQCAHHILGHWGKDSALRQWGLSKGNDGSSKKRAVIAVARKLAVLLHRMWTTGEIFKPFPKMV

SEQ ID NO: 181459 - protein, 323 aa, unidentified
MQGQKSPERSAQPGVYVGVDVCKDWLDVCLHPIGQQVRVANTPEGLKALKRRIAELPIALIVMEATGKFHRQAHRTLHAAGFAVAIVNPLRARLFAEAVGQLAKTDRLDARMLALMGQTLEPSAIAPAPEAIEALQELARARAAAKAEQTALSNRRGASQTAFLKAELGRRLKVLTRHIERLDAEIERRIGADSALKRRFDILITIPGVGPVAALALVIGLPELGSCSAKAASLLAGLAPLACDSGDKAGERHIKGGRAFVRTGLYLAAIAAARFNPQLSDDYNRLRNVGKKAKVAITAIMRKLVVLANVLIKEDRPWIPFRA

SEQ ID NO: 181460 - protein, 458 aa, unidentified
MQNKQLNGPDQSQRPEFLQINLNAAGIDVGSRNHYVAVRQDRDKQPVRMFDAFTADLYDLADWLEACGVETVAMESTGVYWIPLFDVLEQRGFEVKLVDPRRLKSVPGRKTDVVDCQWLQQLHTYGLLSGAFRPPECIRQLRSYLRHRSMLIEYAAHHIQHMQKALTQMNMKLQHVLSDITGKTGMDIIRAIIAGERDPLKLAELRNYRVRADKETIAKALQGHWQDEHLLELTHAVELYDAYHEKVAECDQRIEAHLNTFEDRSDGEDVERDPRKRTQQHNAPKFDLQTYMYQMTGVDLTKIDGIDGYTVLKLISEIGLDMNQWPTAKHFASWLGLCPGSKITGGKQKSSRSKVSASRAAAALRLSAGSLHSSKTALGAYLRRKKAKMGSPEAITATAHKLARLVYAMLKYGRDYMDAGQDYYERQYRERVLRNMTRTAEQLGYKLVMIADPDLEPA

SEQ ID NO: 181461 - protein, 476 aa, unidentified
MKLPINQDQNPFSGQEQRLESSNASHLAQINENAAGIDLGSAEHWVCVPPLRDEKNVRRFGCFTPDLMAMADWLSQCGVTSVAMEATGVYWIPVFQILETRGFEVKLVNAHHLKTVPGRKTDVKDCQWLQQLHTYGLLSGSFRPEDQVCILRSYIRQRECLIKSAGTHLQRMQKALIQMNLHLHQVISDISGLTGMTIIKAIVAGERDPQKLAALKDPRIKSSKTDIAKALTGDYRPEHLFVLNQELTLYEVYQQQIAAIDKEIEKCLNTFEIKVQDEPPPSKRKRRKKPVGNNPNFDLRKYLYHISGVDFTLIDGLDVLTVQTIFSEVGLDPKRFPTVKHFTSWLGLCPGQKITGGKVKSSQTRRVVNRAASAFRMAAFSLTQSRSALGAFYRRLRSRLGAPKAITATAHKLARLFYQMWATAGQYTDPGMDYYEQKYQELILKNLRNKAHALGLEIVPISPEQQNTLSSPTLAT

SEQ ID NO: 181462 - protein, 393 aa, unidentified
MLAEKEIAAPVSSAPNDPIFIAIEMSRSKWVVGTHLPASDKVGIHVLPWGDIAALHALIDRLRSRAADMPGTAEILCCYEAGYEGFWLHRRLTAAGLRVLVIDPGSLLVNRRARRAKTDRLDAKAMIRALMAYNRGEDQVLRAVHVPSVEQEDERRLMRERQRLVQERTAHSNRIRGLLMTQGIVGFDARGRHAERQLEELVTGDGRPLGSRLRDEVRREIVRVQLVIRQLETVNAERDAIALMKRRDAGAIASDEAKTDDTMIAALTRIKGVGPNDASVLVREAFWRKFSNRREIAAWSGFAPTPWASGTISRDQGITKSGPAAFRSHLLQIAWRWLKWQPRSRLAEWFTERTKGATGRMRRIMIADSDGSRPRFRDDLAHHSDLMSLGVPR

SEQ ID NO: 181463 - protein, 453 aa, unidentified
MSRKKTRLQSVTEVPAIRPDAAGIDISPEVIYVAVDPQRDAPAVRPFGTFTGELYRIANWLKACGVRTVAMESTGVYWIPLFQVLEERGFEVYLVNARHYRNVPGRKTDVCDSAWLQYLHAVGLLQGSFRPAQEVCAFRTLMRHRSGLVQAASEHIQHMQKSLDQMNVQIHRVLSDLTGVSGLAMIDAILGGERDGHRLAELRDGRVKASQERIVAALEGDYRPEHLFTLQQSLESYRHYQKLIRACDQQLREAMEKFEDRGEGQEPPAARKKMRTQDDEALRQKFYRILGVDVTAIPGMNIGTVEVLIGEVGPDLRRFRSAGAFAAWLGLCPGNEISGGKVLSSRTRKVNHRLAGALRMAAESLCRDKSYLGQFYRRMKARLGGGPQAITAAAHKLARIIYLLITKHKEYDETQFARFEQRNEEKQRQRFLRQARRLGYTLVLTNNPAVIVS

SEQ ID NO: 181464 - protein, 430 aa, unidentified
MKSNTQNAKIEAITEKTLVLGIDVGSETHYARAFDYRGVEYSKKPFKFSNTEAGFVTFKAWVLDIKEKHGKDKVIPGMEPTGHYWFNLGKFLQDNEMKPVLVNPHHVKKSKELDDNNPTKNDRKDPKVIAGLVREGRYMIPYLPDGVYADLRTASNIRFQLQAELTRIQNRISRWFNIYFPEYKTVYGKPDAKSGILILKAAPLPEDILTLGIDGVNQIWRDAKLRAVGKARAKTLIEAAEHSVGSKEGAVAARMEIRMLLEDYESRSIRLQEVMTLIEGLVKQIPMAEKLLEIKGVGIRTVSGFLAEVGDISRFNNPKELQKLAGLALVENSSGKHKGETTISRRGRKRLRYLLFEVAMSLVAKNPEFRELHNYYTTRRLNPLKKMQSLMAIAAKLIRVFYVMLTKGVNYDPKKMVNDIKRPAVYLQTA

SEQ ID NO: 181465 - protein, 317 aa, unidentified
MHQHNTEDVGIDISKAKFDVSFPDRSKSVVYKNTPAGRKKLIATLMKLQPKRVCLEATGGWENRLVACLHKHQIPVSVVNPRLIRDFARAKNQLAKTDEIDARIIREYAEVMDPRLTPPLTEAQQKMREFTSRREQTSKMIIQEKNRLETIVDQDVIKMIEQSIAFHKEQLRLIEKELKALIDADEESRKRSKILQSVPGIASITATLLISDLPELGSLNRKQISRLVGVAPTNRDSGTLRGRRTIGGGRVRIRNGLYMPTVVALRHNPIISAFYKRLVKNGKPKMVALVAAMRKLLIILNTMVKEGKQWEANVRNS

SEQ ID NO: 181466 - protein, 342 aa, unidentified
MNITTIGLDIAKNVFQIHGVDANGKVVLRKQLKRNQVLAFFANLLACRIGLEACAGAHYWARELIKLGHDARLISPQFVKPYVKGNKNDANDAEAICEAVGRPNMRFVPVKSIEQQDIQMLHRVRSGLVKERTALANRIRGLLGEYGIIIALGLVKLRQQLPEILEDAENGLTMAARQIFADLQEQLIELDKQVSAYGEKIQVLHRASEVSQRLGEVPGIGPITATALLASLGDGKAFESARQVAAWLGLVPRQDSSGGKPKLLGISKRGDVYLRTLLIHGARAVVKAAAKKDDAQSRWINDLVKRRNGNIAAVAVANKNARIVWSLLTKSETYNPPTPASV

SEQ ID NO: 181467 - protein, 341 aa, unidentified
MGQVSTIGLDLAKSIFQVHGADASGAVVFRKRLRRSQVRPFLAAQPPCTVAMEACGSAHYWAREIGMLGHAVRLIPPAYVKPFVKRQKNNATDAEAICEAAQRPTMRFVAPKSEQTQAAALVFRARDLLVRQRTQVINALRGHLFEFGIVVAKGPAHVPQLVQAVENPDEPLPEIARPVLQILIDTLHRLDEQIALLDREIAQRAKADETAHRLMTIPGIGPVTAVALTALAPPAQTFRRGRDFAAWVGLTPLQHSTGGKQKLGATSKMGERTLRRLLIIGASAVLRWAARHGAPAGSWIARMLACKPPMLVRVALANKMARIVWALMAKGGTYQAPAVRA

SEQ ID NO: 181468 - protein, 332 aa, unidentified
MIDDDLIYVGVDVSKANLDICVGVMGSMSTLNNDGSGHEALCRMLKPLKVGLVVLEATGGYEFACAAALQSAGLPVAIINPRQARDFARAMGRLAKTDRIDAQGLAHLAQVWADRPDAAHLVKPLPDAQQRTLAALVGRRRQLVQMRTMEGNHLGVAHPSAHKSIKIVIKSLETQIRHIEAALAAHLKLHHADVSKLLGDVKGIGAATVATLMAELPELGTLKSRQVSALAGVAPYNHDSGRLKGKRCISGGRATLRSALYMATLAATRFNPVIRVFYQLSLGSREAKESRLGRVHAQAADHLECNCQIRFTMEREFAHSGCQNCLTSKTVA

SEQ ID NO: 181469 - protein, 351 aa, unidentified
MVVVIGADVHKATHTLVAVDEVGKVIGQGVFPARREGHLKALGWARHAFRDRETVWAVEDCRHLTGLLERDLLAAGQRVVRVCPKLMGTARRAGREPGKSDPIDARAVARAAQAHPDLPVAHHDEPSRELKLLVDRREDLVAERTRMINRLRWHLHELDPDLAPPTGSLDRAVVVTGLRERLVMLPGLVAQIAVEVLDDIAVRNTQVRDLDRRITAAVEQTVPVLLQVPGCGPLTAAKIVGETAGITRFHSEAAYAMFTGTAPIPVWSGQTAGRVRLNRTGNRQLNCALHRIAITQVRLGGPARDYYDKKRAAGKTSTEAYRSLRRHLARTIYNTLTNNHQATPAPLPAAA

SEQ ID NO: 181470 - protein, 388 aa, unidentified
MFKTVERPDAPAAIRMDIGAIFVSLELSRSTWLLTSVSPGAGEKMSQHATPAGDLRQLFECLAELKRKAMARTGKTYPIIVIQEAGLDGFWIHRALEREGIESHVVDAASIAVPRRRRRAKTDRIDGKMLLRTLMAFKRGEPRVCAMAKPPSVEEEDRRRLGRERKTLIAERVEHVNRIKGLLFTQGAIDYQPLRRDRRARLEALRTGIGDPLPARLKDLISRELDRLELLLAQIKAVEAERDALLAEQSRQAPAAAGMLLAFKGIGPEFAAVLWLEGLFRSFANRRQVAAYAGLAPTPWRSGSIACEQGASKAGNPRLRATLIELAWLWRRHQPKSALTLWFEDRVKANGGRIKKTLLVALARKLLVALWKYVTTGLVIEGAVMKTA

SEQ ID NO: 181471 - protein, 443 aa, unidentified
MAKAAKTKKKTKGEWDEGLFALNRNAAGIDVGNADHYVAVPIGRDPEPVQTFGSFTSDLHRMAQWLKACGVETVVMQATGVYWIALFQILESYGFQVNVVNARHTKTLPGRKTDVLECQWLQKLHTFGLLNNSFRPPEEIQILRTYLRQRENLVTAASTCIQHMQKTLTQMNVQLANVISDISGVTGMAILRAIIAGERDTERLATYKHNRVRASREEIARSLEGNWREELLFVLEQSLQLYDLYVEKIAACDQQIERHLKTMTSKLEPVQPSDPIALSAPREQPRFNLKDQLCRITGVDLTRVAGLEVQTVQTIISEVGVDMSRWNTEKQFASWLGLCPDNRISGGKLLKSGPRHVVNRAATALRLAAWSLIRSQSALGANFRRLRSKLGAPKAITAMAHKLARLIYRMMKFGADYVDKGMAAYESKYRQQQMKWLANRLLH

SEQ ID NO: 181472 - protein, 373 aa, unidentified
MPRYSTAFGMDVHLRSTTVCALDAETGEAVTRRFRGNPWGEVAEWMSGFPGPSLAAYESGYLGFAPQRELSGLGVDCVVAAVSKVPRSAADFSSKNDRNDAARMAKAILSHDISPVWVPSPEIEGLRDLAGAHDAATARLAAAKQRLLAFLARRGYAYGGTTPAGNPRRYWTYDFLRWLDKVRPADDGGIRALAALRNEVEAAAETRDDLLAEYRAAVAAGPLSAEVEALQSIKGCGFALAAAFASEVGDFSRFRSGRQVTSYFGLAPKQRSSADSVRLGGISGAGNALVRRLAVEGSWSYVQASHQPKLMPKGSGVPLEVRMHGRKGSERLLRRREEMLARGMPQAKANAATAAELVRWLWALGAMCREATE

SEQ ID NO: 181473 - protein, 352 aa, unidentified
MEQFIGCDAHKRYSVFVAVGEDGGCSPAWKVSHTEGAFEAFLEELPEGSEIALEACSSYYWMVAAMERTGHHPHLAHPLEAKHRMGKTHKTDKLDAGGLGILLRNGTLPEVWIPPAELRDQRELLRLRMQFVQQRTRWKNRIHGALIRYNVHVGGSDAFGVRGREQMTQQLGALPPHTRRSVEQQLAVLDFVESQIADCERRLAGLLQPSEEIRLLRTLPCVGPILSAVLWLEIGDVNRFPDAPNLASYAGLVPRVRSSGGHTRLGSVCRDVNHHLKWAFVEAANLVAVNQRRLAPCHVLELYQRLKKRKNHQKAVVAVARHLAEATYWILKKREAYREPKAPRLALSSTRG

SEQ ID NO: 181474 - protein, 339 aa, unidentified
MKHYCGIDISAKTTNVCIIDDDRRVVKECVVPTDGQALRDCLSGFESLLCVVEAAPLAEWVCKEVEAGGHEVEILCPRHAKAVTATRKKTDKNDARNLAEVCRTDWYHRVHRKSDESRAMRSYVTGRKQMCDAAQGLASSIRGIFRAHGIRLVVPEGTEFSQIVIDRLSELPPLVREAIRPMLKAWSDLNDSQKKLYRRLEKRAKKSPECELLMSIPGVGPLVAAVFLSTLDTHERFSGADKVGAYLGLVPSVYQSGQTEYYGRITKQGDRLLRWLLVEAANVLLTRTKADFALKSWGLRLAREKGSAKARVAVARKLACLLYRVWKTGESFDAAKGVA

SEQ ID NO: 181475 - protein, 389 aa, unidentified
MFYLNPKSMRNVCGLDVHKDNVFVCIDKENSEKIQFKTGILTKELDALRDTLVANDVTEIAMESTSVYWMPIWRILENDFKLYLVNPYAIKQLPGRKSDIKDAEWIATCLRKELIRGSYVPSSEIQQLRQYNRRIFDINKQSVYIQNKIDAALQRCNIRIGNYISNVRAKSYCEIVDMLSEGKTSPELLIVKVHKRTINKWGRETILAALEGVVNKTDCRILKQLKEELDMLRRHKVECLVMLRDICMENYKEQILDIQTIPGIGEQGAMQIIAETGVDMKAFMTAAMLVGWAGLKPRNDESNGKFKSRSTTHGNKYLRKILIECAWGASRTQGCFFNKFSYHQTMVRKKNRQKVQVAIARKILVVIWNILEKGVVYSDVLEKDKTKDK

SEQ ID NO: 181476 - protein, 343 aa, unidentified
MKLSRVGIDLAKNVYQLHGVDRSGKTILKRRLKRHQWLKVLLDKTEPDCVIGMEACAGAHHWGRELQSRGYTVKLIPPQFVKPYVKSNKSDAKDAEAICEAMSRPNMRFVTVKRVEQQDIQATHRIRAELMTQRTAKANQIRGLVAEYGLVAPKHLSSLRAAIPCWLEDAENGLTGDFRALLQGVWNDLLGLDDRVCEMDQLIKRLADNNEDCVRLQQLRGVGPMISTAMIATVGDARQYHKSRQMAAAIGITPKQHSSGDRHRLLGISKRGDVYLRTLMIHGARAVVARATHKDDQLSRWVTNIANKKHPNVAAVALANKTARMAWAMLRNGTDYDPDYAIS

SEQ ID NO: 181477 - protein, 482 aa, unidentified
MKKKASQGAQRKTSSARRKKAGAWQLVHPRAAGIDIGAAEHYVAVPPESAGAESRPVRKFRAFTEDLEALVEWLKACQVDTVAMESTGVYWIALFQKLEAAGIKVILVDARAVKHVPGRKSDVQDCQWLQQLHSYGLLRAAFRPEDSIYRLRTLVRHRQNLVSSAAEHIQHMQKALVQMNVHLHQVVSHINGETGLRILRAIVAGQRDPEELIKLRDAQITRSTPEEMKAALQGDWRPEALFVLQQSLSLWDTYQDRIKECDRAIEEQLQQIPTPAPQPLPASVPKADPLATETPKKKRPQSRKRNDPQVDLRPQLARLCGLDLTAAHGMGVLTVLVILAEIGLDMSKWRSAKAFVSWLGLCPNNKVSGGRVLSARTRHVNHRAAVAFRVAAMGLARTDTWIGSFHRRMKGRIGDAAANTATAHKLAVVVYHLLKHKQGFVDRDVAKYEARVYKHNVAYVKKKAKALGMKLVPLTDEASLTE

SEQ ID NO: 181478 - protein, 409 aa, unidentified
MQVMSQRCAGIDVHLRFVVVCVSIIEAGQRRKEVRTFRNETADLLALRSWLLQERCSHVGMESTGVSWLHIYRRLEGFFELVVANAQHIKAVPGRKTDVQDAEWIADLLQHGLLAASFVPSQEQQELRDLTRLRVSLVQERARLINRVHKVLEEAGIKLSVVLSDVMGKSGRAILQALCAGESDPVRLAKLMHPSVQASQEQVVAALTGDLREHHRFLLRELLSLIEAQSRSIQHVEQELARRLSPFEEQIERCEHITGVSRQVVQVLMAEVGTDLSRFPDAEHLSSWAGVCPGQKESAGKRLSGRSKQGNRYVRATLVQAAHGVRRTKTYLGERYRRLKKRRGSKRAALAVGHSILVIYYQMMKTGQEYQEKGEGFFQQTDRAKVERQLVHRLERLGYQVTRQPPPAA

SEQ ID NO: 181479 - protein, 414 aa, unidentified
MDVLHPRCAGVDISKRDAKVCVRIADPGRAKAKSTVTTWGAVTNQILALRDHLIGEPVTLVVMEATSDYWKPFYYLLEDGPFEVMLVNARHVKNLPGRKSDVSDAAWLAQLGAHGLVRGSFVPPEPIRQLRDLTRTRTTITRQRAREIQRLEKLLEDAGIKLSSVASDISGVSGRLMLDAMIAGQRDPAELAELSKRRMRSKIPELTEALTGRFGEHHGFLARVHLDLIDQHTHAIDDLTARIEVVIEPFRGARDLIITIPGISTLVADVIIAETGADMTQFPTAAHLASWAGTCPGSNESAGRIKSTKTRPGNPYLKGALGIAAMSAARSRGTYLAAKYRRIAARRGPVKAIVAVEHAMLIAIWNMLTTGAFYADPGGDFYTRLNPDKAKNRAVDQLRKMGYDVTLNPLAAAG

SEQ ID NO: 181480 - protein, 311 aa, unidentified
MTILTSQTVVGIDIAKAEIVVYRADLEAIEAVKNDRAALKRWLKTLPAQSAIAVEATNIYHLETVDLAHAMGHQVYVVDAYRVSHYRRGVGQRAKNDPCDARVLARYLTNEQSKLRLWNPPPKAYTVLKSLLHRRATLIQNHTGLMLSWADEPLLKKERTAQQKAFERSDKVIQKLLRKVSKEAGIDDNIDRCKAIEGVGELTATGLATTYMRGDFANSDAFIAFLGMDLTVDDSGKKNGPRFLSKKGDPEIRRLAYNAAMAACRSTKWKPFYESYLARGFSKTQALVALARKLCRVAFTLMKNQGEYRSV

SEQ ID NO: 181481 - protein, 380 aa, unidentified
MASMHDSTRSKTTVYAAIELSKKSWVVAIARPDRDRPSIHRIAGGNLADLIGRLRKAAGEKQRIVVCYEAGYDGFWLARSLAKIGIDCRVLDPASIQVNRRARRVKTDRIDSLALLRALIAIDRGERHVCAVVRVPTVEEEDSRRSHRERQRLVRERTGHINRIKGLLFAQGIRGIEPKRRRTRIDFGKLTTAEGMPLAERLRRELEREYQRLELIETQIRIVEKERDTADAQDPAVEQKRELLCALQGVGGASAAILAREVFARQFASRRQLCSYLGLTPSAYDSGSTTRCQGISKAGNSWARRVLIEVAWLWRKYQPGSPLSHWYAQKTADQSPRIRRIMLIALARKLAISLWRYVETGLVPDGAVMAKTTPHMAAAA

SEQ ID NO: 181482 - protein, 293 aa, unidentified
MNNYFIGIDFAKEKFDAVLLQKGKLQESGFHQMFENDLKGYKKFLRWTRDNGAKELGETLFFGENTGIYSKLISDTLSKDGYVMWLENPLQIKQSLGIRRGKNDKQDAYDIARYAARNEDMAKPHTAPTKEMEALGFYYSEHKSMVREKGNLQRIIKSQSSMAGSNPYLRSELKGNIKVLESIKARIKEIIQCMKNLIVSIPEIYKTYHILTSMKGIGVINAVALIVVTDNFRRFDYNARRLCSYYGVAPFARTSGSSIKGAPHVSNFADSYLKSIISEAVLCAIRYCPEISE

SEQ ID NO: 181483 - protein, 355 aa, unidentified
MNDTKYIGMDVHRESISIAVMNSAGKIVLECIVETKASIILQFIDGLRGDLHVTFEEGTWAAWLYDLLKPHVTKLVVCDPRKNASMKQGNKSDKIDARRLAELLRLDHLNPVYHGEHGLRSLKELVRSYLTITKDLGRVMSRVKAIYRSWAIPCTGKQVYAPRHRGEWLGKISELGVRRRAEFYYQQLDALRTLRQEVRRDLLAESKKHQAWKQLCQIPSIGPIRGAVLLGILQTPHRFRTKRQLWTVGGLGIETYSSADHRYVEGQLQRSKKPAWIRGLNENCNHDLKNLLKGAAVVASSKPGPFQEFYTALLAKGIRPEMARLTLARKIATIVLIVWKKGVCFDAQHLKPQTA

SEQ ID NO: 181484 - protein, 345 aa, unidentified
MPIVGGLDIHRKQITFDYLDTVTGQVRRGQVSPADRVHLRAWLARFAGRDDVAFAVEGCTGWRYVVEELAAAGVAAHVAEPADTAFARGRKRHAKTDKTDSRHLRTLLAEGRLPECWIPPGRILECRALLELYHDLRAGHTAWVQRIHAVLFHQGAPALGESALRTGQGLAALRAAAAEHLSPAGQLQVATALEVTAALEARLHAVRHQLLDAARHLAGAKVLAARLYGVGPVTALAMTCWLGGAGRFSSSRQAVRFAGLDVTVWSSDRKGPPGRLSRQGPPVLRWAVYEAGKTHARASAPDHRYYAQVKDRCNGKRAALSEGRKILRQACHILAELGDDALAAA

SEQ ID NO: 181485 - protein, 350 aa, unidentified
MTTIAEARPVVTGGVDTHLDVHVAAVVTAVGGVLGTEQFPTTAAGYRQLLSWMRTFGPLDRVGVEGTGTYGVALARHLRAEQVPVVEVMRPNRQVRRRHGKTDVVDAIAAARAVLSGEASATPKTHDGPVEALRTLKVLQRSATKARTQALNQLRALLVTAPDELRARLRDLTQRDLLATCAALRVSADDDSLAAVTRFGLRELAQRALFLADRLEQVKLRLKRITEQVAPALTNLKGVGPDVASTLLLAAGDNPERLVNERSFASLCGASPVQASSGKIHRHRLNRGGDRQANAALWRIALVRLNCDQRTKDYLAKRVSDGKSKTEAIRCLKRYIAREVFAALPGPATT

SEQ ID NO: 181486 - protein, 410 aa, unidentified
MEVVHAHCAGLDVHKETVVACVRHMTDGKVTTTIKTFNTATQELLALSDWLSAENATHIAMEATGVYWKPVWNILSDGEFELVLGNAAHIKNVPGRKTEVKDAAWLADLMAHGLVSGSFVPDQTTQEMRDLLRTRKQLVRERTSHTQRIQKTLECANIKLDSVVSNVVGVSGRRMLEALIAGQTDPKELAAMAHGRLQATPAELEAALRGRVTAHHRFMLKLHLDQIDSFDEAIARIDKEVKDNDRNFRAAVELLKSVPGVGSLAAEVIVSEIGIEMNRFATAGNLVSWAGLCPRNDESAGKRRSNRLKAGAPWLKTTLVQCAWGAARSKGTYLHAQYVRIRARRGNQKAICAVAASILTTAYHMLKDGTFYEDPGPDYFDNRNKDQQANKLVNRLQNLGFNVTIQPTAA

SEQ ID NO: 181487 - protein, 334 aa, unidentified
MENIALIGIDLGKNSFHIHCQDRRGKAVYRKKFTRPKLIEFLATCPATTIAMEACGGSHFMARKLEELGHSPKLISPQFVRPFVKSNKNDFVDAEAICEAASRPSMRFVQPRTESQQAMRALHRVRESLVQDKVKTTNQMHAFLLEFGISVPRGAAVISRLSTILEDNSLPLYLSQLLLKLQQHYHYLVEQIKDLESQLKRKLDEDEVGQRLLSIPCVGTLTASQIPGELGGGKQPPPSRDFAAATGLVPRQYSTGGRTTLLGISKRGNKKIRTLLVQCARVFIQKLEHQSGKLADWVRDLLCRKSNFVVTCALANKLARIAWALTARQQTYVA

SEQ ID NO: 181488 - protein, 409 aa, unidentified
MEVVHEVCCGLDVHKKSVTACVLWASGRRKQIREFGTFTRDLLQLADWLRSCGVTHAAMESTGVYWKPVWNLLEGQFEVLLVNAQHIKAVPGRKTDQKDSEWIADLLQHGLLRASFVPPTPTRELRDLTRYRASLAQEINRIANRIQKVLEDANIKLASVATDTLGASGRAMLEAIIKGEQDRQRLAEMSQGKLRNKIPELQQALEGRVTAHHRFLLRELLDHLYFVESKMRRIEQEIAERLGPFQSEVARLCTIPGVDRVTAWGLVAEIGLNMAQFPDARHLASWAGLCPGSHESAGKRKSGKIRKGSLWLRRCLCQGAWAVSMQKNNYLSALYRRLAARRGSKRAAIAVAHNLLVIAYYILRDKVCYLDLGPDYFDRLNPEGLRRRLTKRLEGLGFKVTLEPLAQAG

SEQ ID NO: 181489 - protein, 338 aa, unidentified
MELSVIGMDIAKNVFQLHCVDRQTGEIERIKLRRNEVLPYFARRTPAVVAMEACGGAHWWARQLQQLGHTVRLLPAKAVRPFVLRNKTDAADARAIWTAVQQPEMKTVAIKTVYQQSILALHRMRAQLLKFRHTPTNAIRGLLLEFGHPLPESYLALRKAFPTVMATLDKQLPGILIETLREQWARVQSLDNEIALIEGRLKRALAETPTCQMISDIPGVGLMTATAAVATMGDPASFKTGREFAAWLGLVPRQTGTGGRIRQLGISKRGDAYLRTLLMHGARAIIARRRYSDWVAGLIARRPYSVVIAAIANKLARTIWAVLATGKRYDGASFAAAL

SEQ ID NO: 181490 - protein, 335 aa, unidentified
MEEYIGLDVSMKETAISIRRGAKRVWRGKCASDPRLIADIIRKRAPAARRVVFETGPLSVWFYHALRDEGLPAICIDARHAKAALDMAPNKTDANDVDGLAHLAEVGFFREVRVKGFDSMLARTRLVRIATEHSNQIRGVMKTFGLIVPAGKGGSFEKNVRALLVDQNALASIVLPMLDAWRSVRTRAADLGRQLVSAARQSHSCRILTSIPGVGAITATSFATAIEDPNNFKKSRSVGAWIGLTSRRYQSGEVDYDGHISRRGDHHLRGLLYEAATVILTRSSADSSLRTWGLALRQRLGFKRAAVAVARKLAVIMHAKLKTGTFFDRTAGRAA

SEQ ID NO: 181491 - protein, 351 aa, unidentified
MIVLGADTHKRSHTVAAVAAATGELLGEQTVPVGRRGFGALLRWARALDGERVWALEDCRHVSGSLERFLIERGERVMRIPTHLTANARRSARQRGKSDPIDALGVARAALQEGLESFPAAQLDGPELDLRLLVDHRERLVRHRVELNSTLLWHLHDLWPELQLPGGALFSKKWSTRIARRLARAEQTMRVRIARDELRRLRELTQAINALERDITELVGQLAPQLVSEPGFGPLTAAKLVGEIAGAQRFATAAKLARAAGVAPIPASSGNTSRQRLDRGGNRQINAALHRVIVTRARCHTPTRDYIARRRSEGKSTREAIRCLKRYLARHVWRLLQPPHPAQGKHSPSTS

SEQ ID NO: 181492 - protein, 429 aa, unidentified
MNSTQNKKIDQVKETTMIVGIDVGSEKHYFRAFNWRGIELTRKPVAFSNSMEGFNSFYNTIVELMQKRELEEALVGIEPTGHYWFDLGQFMGEKNIKFVMVNPHHVHKTKELDDNSPSKNDRKDPRVIAGLVRDGRYFYSYMPTGVYAELRNASNRRFVLVEEQTRAKNRLQKWIAVYFPEYKGIYTHIDAKGGLLVLKQAPTPEEIVRLGVEGIIKIWKDAKLRGNGHKKAMLILNAAMKSIGLKSGLTEARMEIQDLIEDYELQTKRLERVNDLIKELCQQVRYADKLLEIKGIGITTVAGFIAEVGDITRFDSTKELQKLAGLELVSDSSGKHNGKTKISKRGRKRLRYLLFEAAISVVGKNEEFKEIHSYYTTREKNPLKKMQSLIAVACKLIRVFHVILTKGISYDASKMLKDIRHQGEQLKAA

SEQ ID NO: 181493 - protein, 356 aa, unidentified
MSRDIKYIGMDVHKEATVIAVLNGSGKLVMESIVETKAGSILQFIHGLRGELHVTWEEGTWASWLYDLLQPQAAQVLVCDPRRNAFLKEGNKSDKIDARKLADLLRTGMLRPVYHGEHGLRTLRELGRSYQTLSQDLNRVMNRIKALYRGWSIPCAGTQVYAPRYREEWLQKIEHAGVRRRAELLYQQLDGLQALRRTLRPELLAESRKHKASKLLRQIPCIGPIRAARLLALMQTPHRFRSKRQLWTYCGLGIETRDSAQYRFVRGQLQRAKKPQQIRGLNRNHNHEMKEIFKGAATRASCGVGPLRDFYVALLAKGMRPEMARLTLARKIAAIALTLWKKEERFDAEQLKLQAA

SEQ ID NO: 181494 - protein, 346 aa, unidentified
MEHYAGIDVSLELSSVCIVDAKGKIVREAKIASDPEALVAFFKKLGFPVARIGLEAGPLSQWLYAGLAQDGFEAVLLETRHVKAALSAMTVKTDRKDARGIAQLIRMGWFRPVHCKSPGSQEVRALLVARKQLLGKLRDVELSIRGILRGFGLKMGVVTRRNFEERARELSAGQAMLETVIGAMLVARAALQTEYDKLHKTMLAIVHDDKVCRRLMSVPGVGPVVAITFKTAVDDPARISKSKAVGPLFGLTPKKYQSGETDVTGGITRVGDTMVRTALYEAANILLSRVTRFSALKRWGMEVAKRRGLKRAKVAIARKIGVILHRMWIDGTDFCWAKAERAVAAS

SEQ ID NO: 181495 - protein, 447 aa, unidentified
MKQKKPSKKGSVKLPKHLQHLNQHAAGIDVGSRSHFVAVPEGADEKPVQEFSTFTDDLERLAKWLRSCGVTAVAMESTGIYWIPVFEILERHGFEVRLVNARHVKNVPGRKSDVLDCQWLQQLHTYGLLRGAFRPTDQICTLRAYVRQRATLVRSSASHIQRMQKALAQMNVQLHNVVTDITGVTGMGIIKAIIAGERNPKVLAGLRDKRCKNSVETIARSLHGNYRVEHLFSLQQAVELYEFYLQKIADCDQQIVAQLRSFDASGGIDPDSKPPSSIEEALQQMSGADLSCINGINTNTALKIIAEIGTDMNRWKTVKHFTSWLGLCPGSKISGGKILSSATKPVANRAAAALRMAALTLFNSKSALGAYLRRQRSRLGAPKAITATAHKLARLVYSMLKHGTAFVEAGQEQYEEHYRSRVVLNLKRRAQEMGFTLVAIQEETQTV

SEQ ID NO: 181496 - protein, 345 aa, unidentified
MDHFAGLDVSVKETSVCIVDDTGKIVREVKVASEPEDLLEILNNPTYHFKRIGLEAGPLSQWLFSALAEAGLPVICVETRHMRAVLKAQINKTDRNDARGMAQMMRAGLYRPVHVKTLRSQKLRMLLTHRKLLQSKAIAIDNDLRGTLRNFGLKVGVVGTVKFEARIKELVENLPDLAELVEPLLVVRRVLREQFVIQHRRLLAIVRDDEVCRRLMTVPGVGPVVALTYRATVDVPARFRKSKSVGAVFGLTCAKHQSGESERSGRISRCGDEMMRVMLYEAAQSMLLHSKRWSWLKAWAMQIARRRGMKKAIVALARRLAVIMHRIWVDGTEFRWTREQAAAAA

SEQ ID NO: 181497 - protein, 457 aa, unidentified
MEQALAQRNRSVSLKPGKSRAALTITHPNAAGIDIGSASHFVAVPPDRDDEPVREFPSFTVDLNALADWLKACGVDTVAMESTGVYWISLFELLESRGFTVLLVNARHVKNVSGRKSDVLDCQWLQQLMTYGLLSGAFRPADQVCVLRSLWRQRGMLLRSQARHVQHMQKALTQMNVQLANVISDVAGETGQKILRAIVAGERDGQVLGSMKNARIRASVDEIAKSLQGNWRAEHLFALKQALGAFDFVGKQLAECDIEIEQQLKTLQVHEGEPAKGKRRGRARNAPKFDLRTQLFKMCGVDLTRIDGIDVTTALAVISETGVDMSRFKTVGHFTSWLGLCPGTKITGGKVMNGKTKRCANHAAQALRLAAAALRASQSALGAYFRRMCARMDKPKAITAAAHKLARLIYTMLTKGEEYTDQGQAYYEERYRERVLRQLSQRAQKMGMKLVVAEQVA

SEQ ID NO: 181498 - protein, 305 aa, unidentified
MDAIRERCAGLDIHQETVVVCLLSGPLEKRPRSVTETFGTTTRELLRLQEWLEQQGCTEIAMESTGVFWKPVWNILESTCTITLANPHHIRNMPGKKTDVKDAEWIAKLHRCGLIEGSFVPDEPIRDLRDLTRYLRKLKQNATQEKNRIHKILQDANIKLTTYVSDLFGVSGRALLDSMVNGEVLDVHEVRKLVHTRLKMKVPSLVEALNGRLRLHHRKMIRRHLEHLQYLESEIQTLEAEIEELVQPYMKEIELLDTVPGVSTDAAASIVAELGTDMSPFPSEAHLASWVGVCPANHESAGKKK

SEQ ID NO: 181499 - protein, 445 aa, unidentified
MHYKRLLALIDSVSSHLSVGLDVGADFTWMSIALPNGSFTGKPFKIVHSDPVSRDLAVAKIKEAQETYSLKSRCFLESTGIYHIPLLCFLRDKGFDCSVINPTITKNSTNINIRKLHNDKFDSKKAALVGLNVSLKTSIIPDDSVVDLRNLVRDYYYFKDLQSAVALKLTAELKVSFPAYAKVFSKITTQSSLKLLSAYPLAKDMLAASKDDIVEIIRSTARFGEAYALRKYNAIIAAAQDAAVFGRALPSNAVRIRLYIDTYQEYQKHLDALLKALHETVDRLQDTLVYDQICLLQSLRGIGFLSAVVLIAEMGDFKLFSSPKKLYAYFGLDPAVKQSGKLNGDKVHMSKRGSSLARRVLHMAALNNVKVDKRSGTPVNPVVYDYYARKYSSKKKPVAMGAVMHKICNIIFAMLRDNKPFEVIPPEEHCRRFAAEHPDKIRKAA

SEQ ID NO: 181500 - protein, 410 aa, unidentified
MTEGAVAGVDWAKDAHEVLVADGEGERLWGETVAHDEAGIARLCRTLVTLGVIRVAMERPDGLLIERLLDAGLTVLAIHPNMVAAARDRFRAAGGKSDRFDAFVLCELARTDSHRFRALSPDSDQTKALRALTRGREVLVEQRVALCNQLRAELERFWPGAAQIFRELDSPISLAFLERYPSPIDAHRLGEKTLARFLARHHYSGRKHPGELLAKLRAAPAGRADELEADARRGLVLALVAALRPIVEQIRLLTSEIGHALHAHPDGAIFASFFKSPDSVICAATLLAEIGDDRARYPTAEHLAADAGMSPVAVESGRKKVACFRRGCDHRLRDATSTLADATRHWHPWAQDHYLRARGRGHDHPRAIRTLGRAWTRVLWRCWQDGVAYDPARHHGLQKHTQIAIPNVRG

SEQ ID NO: 181501 - protein, 341 aa, unidentified
MKPELSVVGIDLAKSLFHLVGMDERGKITLRKRLARGEVLPFMAKLPRVLVGMEACGGAHYWARQLRAQGHEVKLMAPQYVKPYVKTNKNDLRDAEAIAEAVTRPSMRFVPIKNVEQQDLQALHRVRERLMGARTALVNEMRGLLAEYGIVLPTGINAFRHALAEKLEAEQAKLTPLSQELFGKLCAEFKKVETEVAYYDEKLQAMATTHPESQRLLTIPGIGPLTATALIAAVGDVGGFTNGRQFAAWLGLVPKQHSTGGQTRLLGISKRGDRYLRKLLIHGARATLRWARTKTDSRSQWIRGLLERRGWDRTAVAVANKNARIVWALLSRGGVYGESTN

SEQ ID NO: 181502 - protein, 303 aa, unidentified
MDSVVIGADPHKLSVTIEVLDGRERVLHQGRYGTDRDGYRQMLSAARQFERRSWAVEGCNGIGRHVAQRLVADGETVVDVPAKLAARARLFDTGNGRKTDPADAHSVAVVALRTRSLMQVRVDDELVALRLLADRRDELGRSRTQAVNRLHRLLLELVPGGAKRFLTAAQAQVLLDSVTPADVAGRVRHQLATELLGEIVVLDKKMNDSDKALRKAVTATGTGLLDLFGIGPAGAARILGDVADVARFATRARFASWNRTARLDASSGLCRTRHRPLYGDLLVMPTGEGNRRSGKACVATRSA

SEQ ID NO: 181503 - protein, 415 aa, unidentified
MFKIIRSKCCGLDVHKTWIYACIGIADSSSRVDYKQARFSSFSKGLKQLSEWLAKYDCTEVCMESSGKYWIPVFNVLETTCDVTLAHPKYTKPQKGNKTDRKDAMWICDLFMCGMIKRSFIPPADIRELRELIRYRTKLTNMITGEKNRALNCLTVSNLKLDDVFTDVFGKSSSSIIRFMLDNPGVYFDVTPFIHGRCKTPVEEIQAAVDGAMSPAHAVKLRECMSHIDQLESHKRMVEQDILRLSAPYGDELALIRTVPGFDKNPMTAITILSEIGADMSVFPSAKHLVSWAGCCPRNDQSAKKIKSARISRAGVYLKPLLVQVANALIKSKHHPEFKERYRKLKARRGHKKAIIAICRMLLTAIWNILSKAEPYSPAGYLSDHQVTEVKTLTQKQALNLLKSRGYVITDEEPA

SEQ ID NO: 181504 - protein, 341 aa, unidentified
MKECIGLDVSMKETAVSIRRDGERVWRGKCVSDPAVIAQLVRKRAPAVGRIVFETGPLSVWFYHALRAEGLPAICIDARHAKSALDMAPNKTDANDADGLAHLAEIGFFREVRVKGFDSMLARTLIAARNRLVRITVDVSNHIRGFMKTFGLLIPAGKGSTFEAHVRRLLSDQPKLSEILLPMLDAWCATRLQAARLARQIAVEARQNDGCRILMSIPGVGAITATSFVTAIESPDNFRKSRSVGAWVGLTTRRYQSGEIDYKGHISRRGDHHLRGLLYEAASVILTRSSAESDLRAWGLKLRERIGFKRAAVALARKLAVTMHAMLRDGTLFERGMKPTP

SEQ ID NO: 181505 - protein, 362 aa, unidentified
MGDITTTANRGKLTVGLDVGDRYTQICVLDEDGMVMEEGRVATSPRAFRQRFAAMPPCRLVLEAGSHSLWAHRLLEQAGHQVIVANPRMLRFIYGNTSKNDRADAGYLARVGKLDPDLLHPITHRSEETQTHLALLRSREILVRTRARLVSHARGLVKPFGFKLPHCSTTAFATKVGDHIPEVLAPALNPVIGIISTLSEQIRELENKIETLAHETYQETALLTQVPGVGSLTALAYVLTIEDPSRFSRARAVGSYLGLRPRQDDSGAQKPQLHITKAGDKFLRHLLVECAQYMLSSRGADSDLKRWGLKLAERGGKAAKKRAVVAVARKLSVLLLRLWVTGEIYEPLRMATRRGDLVVPSS

SEQ ID NO: 181506 - protein, 312 aa, unidentified
MPTNPPNYVAIDIAKDSLQIQTDHAAWSVPHTDTGHRQLLERLQPLGPVQVVCEASGGYEQPLLRFLHQQAVPVSLVNPARVRAFARSEGQRAKTDPLDAAILLRFAHEKRPLPTPPPAPQQAALAAWLDRRAQLSEQLAREKNRLQKSPVLLHPGIRAMIAFVEDQLAEVDRQLHRVVQADATLRDRAAVLQSVTGIGAVTTWSLLAYLSEIAAADWHRNQLVALAGLAPWNRDSGQWKGKRSISGGRGKVRRCLYMAAQSAAQHNPVIREYVQRLIARGKPYKCAIVAAMRKLLIHLQSLLKHHQNALAS

SEQ ID NO: 181507 - protein, 399 aa, unidentified
MGKYIITGCDLSDRSMMLQWACDAEAPRKRAFANDESGRARMMEFLRGRAKAAGGATIVFAYEAGPHGFGLHDAATDQGIVCHVLAPSKMARSPKARRTKTDEKDALAIFETLRGHLLAGNALPSVWVPDPQTREDREVVRARLDAGAKQRRVQTQIRMLLKRSETRAPQGAGKAWSAKHRAWLRGLSAPSSALGPGARTALGSLLRQFDWLEGECAALDRAVADLARQERWRAQAEALDAEKGVGLLTAMIFLTELGDVRRFSNRRQLASYLGLVPSSDETGERADCKGHITRHGSPRLRWALCQAAWTRVRTDPRERAAYERLVAKRPKKKKIAIVARMRCLGIGLWHCAVAAAPGTSVAAPLPSPRWGEAPVGAAGASAEGESPAPPRGERRRRAV

SEQ ID NO: 181508 - protein, 394 aa, unidentified
MRFAGIDIASETHVVAMVNADGAVELKATAFTEDGAGYEKVLALLGTPNEVLIAMEATGHYWKNLFAVLAAAGHTVALLNPLRTHRFADVDLERTKTDAIDAVGIARFAAQKRPPVTPVPDALTEELRELVRLRERLLQDFGDRVRQLHRLVDLGFPEFTRYVRTLESELATAILRDYPTAAAFRGVSVRRLAALRYDGRHQVGVDLARTLIEVARRSVGQHHSATYRLQIRYACDDLDTLRRRLRDIDRDVGAKLREHEVGRLLTTINGIGTNTAACVIAAVGDPAHFRSASALAAYVGTIPALKQSGKRQFARAAITPIGNARLRAALWMPTLSAVRSNPWLRAYYQRLRARGKLPKVALVACMHKLLLAIYSVAKHRRAFIADLPKLRPAR

SEQ ID NO: 181509 - protein, 319 aa, unidentified
MKKIEPTHCEKPFIGIDVAKDSLEVFDDLSSRRTACPNKMRDLERLAKDLKKISPELIVMEATGGYETQAAIAFTKAELPFAIVFPRRVRQLAHGLGIVAKNDEIDARVIAYYGRVANIKPKPLESNELRELQALTTRRTQLVEMRLMEENRLDTTHPSMRKEIKEHIAWLRRRIQKITEDIDHRIEQSEAWNEKRKLLMSVPGVGSVLASTLITELPELGSLSNRKIAALVGVAPFDRDTGKSRGTRFCKGGRNSVRRVLYMATLSAARFNPVIKTFYDRLCEKGKRKKVAHIACARKMLVILNAMSRNNLMFEPSTA

SEQ ID NO: 181510 - protein, 480 aa, unidentified
MRPHIKLMEDAMDKSKKQKRKNKEHRKVNTSHLEQLNINAAGIDIGAEFHYVAVPNGRDPEGQDVRHFATFTADLHQLADWLRQCNIDTVAMESTGIYWIPVFEILDSQGFDVRLVNPRNVKNAPGRKTDVLDCQWIQQLHTYGLLQSAFRPEDQICELRAYLRQRAMLVSYASHHIQHMQKALEQMNVKLTQVISDITGVTGMKIIRAILSGERNPVKLAGMRDARCNNSETIIAKALEGNWRSEHVFALQQAVELYDFYEKQIIECESRIQDHLESFDDRSNGTPLEKLRRKSRGSSNQFHFDARRYLHRMTGVDVTRIEGIEAPTALTIIGEIGIDMSPWPTEKHFASWLGLCPGSKISGGKVLSSKTKPSANRAAHAFRLAAYSLQRSKSAIGAFLRRKKAQKGAPKAITATAHKIARIFYNMLKYGTEYVDLGQEYYEQRYQDRVIANLKHKAKQFGFELVNIKEHKLLTGLPAN

SEQ ID NO: 181511 - protein, 271 aa, unidentified
MICGVDVSSKSLDARIGRDGAAACFTNNLKGIAELAEFCQCHKVHLVAMEATGGYEKKPFALLWAAGIQVAVVNPRAVRNFAHGMGLLEKTDRIDAGVIAWYAQTKGCVAISPASAEQQQLKAMVTRLRQLTELRAAQRNQRLLVTDKVVLKSFRKLLDLVQKQIRDLEVAIAGLIDADAVWHKLDESFRSIKGVADRTVARLMAEMPEIGTLSNKRISKLAGLAPLACDSGQWKGKRSVRGGRRTIREILFVVAAGVSRYNADFGAFRER

SEQ ID NO: 181512 - protein, 356 aa, unidentified
MSGLKHQKEKRSMDHFAGLDVSVKETSVCIVDDSGKIVREAKVASEPEALLSVLKNPAYRFKRIGLEAGPLSQWLFSALAEAELPVVCVETRHMQAVLKAQINKTDRNDARGIAQMMRVGLYRPVHVKTLRSQKLRMMLTHRKLLQSKAIAIENDLRGTLRNFGLKVGIAGKTKFEARIKELVENLPDLAELVEPMLVVRRTLREQIVILHRRLLAIVRDDEVCRRLMTTPGVGPVVALTYRATVDVPARFRKSKSVGAVFGLTCSKYQSGEIDWSGRISRCGDEMMRVMLYEAAQVMLTRTNKWSWLKAWAMQIARRRGMKKAIVALARRLAVILHRIWVDGTEFRWTREQAVAA

SEQ ID NO: 181513 - protein, 326 aa, unidentified
MNLTTVVLGVDIAKLKFDVCLIKENGKVKHKVFANTLQGFEKLTAWLASHQVCSLHVCLEATGTYGESLAVYLHKTGYLVSVVNPAAVKAFAVSRLTRTKTDKVDAELIARFCLAQQPQAWTPPASEVRELQALVRRLESLIEIRVAEENRLSSGVSIDAVRHSLEEHIAYLIEEIKQTERLIREHINNHPNLKEQSDLLDSIPGIGATTAALLLAEITDFKQYKSARQVAAYAGLVPRERRSGSSVRGRTSLSKIGNARLRKALYFPAMTALRCSGFFQQWAAGLRERGKCKMAVIGAAMRKLIHLAYGVLKTGKPFDPNWAKTA

SEQ ID NO: 181514 - protein, 405 aa, unidentified
MDGPIITVDVSKGNCHYQPFLEKGKPLRKPKILYDTIEGFGELYECIEKTKEKAEKDVSVVFEATGVYHRCLQKYLDDNDIPYFIISPLLSATYRKTNLHANKTDALDCSHIAKAYYGDEKLHVFEKQEDRFISLQRLNRMYEDELQHLRKRKVAFRSVLDIIYPRLDRCFNGKASLYDPVVMEILKKYPHPKLLLKHKEETITKAIERKTDHGFLFISKIVHKVYECAMKCYSGCDVDDIEVRKLPDMVEELQDQMERCGSLLSELVKEASRIEYFNNVASIIGIGVNLASRIIAEIGDISRFKNRKAISAYAGLNPKILQSGDKDGIHLKISKKGNRHLRCLLYLGATCNYRLKKGDPLYEFNQKKRQQSQSPLKSKAANIATAHKLLIIIYALCKSGEEYRF

SEQ ID NO: 181515 - protein, 334 aa, unidentified
MQLHWVDSETGEIGRKKLARAKVGELFTQLQPARVAMEACGSAHHWARVLGGLGHQVELLLARQLRAFVRSNKDDAADARAIWLAAQQSDIRRAPVKTMEQQAVMSLQRARSHWVSVRTATLNMLRGLLYEFGVLLPGKKAGLKTMSARRAQVDDQLPPLMRRLVDLQLETLKGIERSIDQLEAEIAEQQRKGDTARTLREVPGIGVLGATALAATLGDASNWRSGREFAASLGLVPAHSGTGGKTRIGHLSKRGDPYLRTLLIHGARAVITQARFKPAWLEQLLRRRPLNVAAVALANKMARTAWALIAHGRAYQAEWKSTPPSGCGAQAQAA

SEQ ID NO: 181516 - protein, 316 aa, unidentified
MTSKRFIGVDVSKDWLDIAVHGSHRSARIANTPQAIAAFLSGLDPDAVGLIAFEPTGGYEQSLRHGLAAAGLPFARVHPNQLAAFRTRSGIRAKTDAGDARLLADFAAVDLARRGLRPLVEGDEVLRELAARRRQLVGLLQAERCRAALARAEDVRASLTCVIAALEGALAAVETALAARIAAQTDLAQRAALLRSLKGVGPVTVATLMAELPELGQLSGKEMAALVGLAPRTRDSGKRRARATTGHGRPGVRRVLFNVARTAIRWNPVIKLFYERLVRDNQRPGKVALTAVMRKMLVILNAMARDNQPWKHAAAP

SEQ ID NO: 181517 - protein, 418 aa, unidentified
MSRAIARRLARIEPGTLFVGVDLALDNNVAVVIDAQAHRLDRFRFPNDADGYDYFHRRLVAIQEREGAPAVLVGMEPTNYFWKLLASDLEQRQVPYRMVNPFTVKKHREGDQLSRSKDDSRDAFMIADLLRTGKFTETQLLQGQYAVLREYVVLRDRLKGDIRRQKTLIRNIAGQLFPELAHEFKDFFGLTALALLRHHAVPGVIRDMSQQALITAVRQDFTGERLPVSKLRRAHALAKRSVGVRHGTVALQEALRVHLDALDLLQEQGRNVEELLLAVFFDLPEAPYLISVPPLGSVTAAIILAEIGDPSRYSNGNQLIKLAATQPVPNLSGRKTRSKTPMSKKGRPRLRTALYFATMRMIQEDDTFARVYRRFLTRERNPLTKMQALGALMNKLLRILWALMKHQTFYDPTYEMNK

SEQ ID NO: 181518 - protein, 342 aa, unidentified
MDEYDGRQFVGIDLHRQRSVIVRQSESGEQLSAVRIVNDPVALKLQLEEAGADPEVVLEATYGWYWAVDVLQACGARVHLAHPLGVKGFRYRRVKNDVRDAADLADLLRMGRLPEAWIAPPETRELRELVRYRAKLVAIRSGLKAQIHAVLAKAGVLIAVSDLFGVTGRQRLAKVPLGPAYAQRIRSLLELIDILDSHEARFAAMIAERLDTHRGYQAIQQVPGIGPTLAAVFVAEIGDVHRFTDSAHLCSWAGLTPRHRESDTVVHRGHITKQGSKAVRWAAIEAVQRHPTTAKIAADKQRIEARRGKNIAKVAAARKLLTLVYYGLRDGQIRALDRARAA

SEQ ID NO: 181519 - protein, 426 aa, unidentified
MNTQNSDPLQTTEFAAYLGLDWGDQKHAFAWCAGSDKTPAQTGSLDNSPEVLHTWLQELAQRFEGRPVALAVETSRGPLIHLFGAYPWLTVYPIHPATSARYRAAFKPSGAKDDLPDALLLLELVRDHRPKLRPLQIPDAATRKLAALVELRRDLVDRRTQVLLQLMALLKSYFPQALELVGHDLTSGLALAFLRRWPDPVALKAARPSTLKSFYYQHAVRSETLVTHRLALVQQARALTTDEAVLMPARLHLAALLEQLRTLAKHIELVQRQSQALFKEHSEAYLFRDLPGAGKALQPRLLVAFGEDRSLYPDPGSLQKYGGLAPVIEKSGRQAWVHWRWHASRFLRQTFVEWAGQTVVYSTWAREYYQHMKAKGKSHHVILRALAFKWIRILWKCWQTRTAYDEARYLKQLLARKSPHAVKISS

SEQ ID NO: 181520 - protein, 355 aa, unidentified
MNGLKHQKEKRSMDHFAGLDVSVKETSVCIVDDTGRIVREVKVASEPEALLAVLKNPAYRFKRIGLEAGPLSQWLYSALAEAELPVVCVETRHMQAVLKAQINKTDRNDARGIAQMMRVGLYRPVHVKTLRSQKLRMLLTHRKLLVSKAIAIENDLRGTLRNFGLKVGIVGKVNFEARIRELVENLPDLAVLVEPLLVVRQVLREQIGILHRRLLAIVRDDDVCRRLMTVPGVGPVVALTYRATVDVPARFRNSKAVGASLGLTPSKYQSGEINRTGSISRCGDEMMRVMLYEAAQVMLTRTNKWSWLKAWAMQIARHRGMKKAIVALARRLAVILHRIWVDGTEFRWTREVLAA

SEQ ID NO: 181521 - protein, 310 aa, unidentified
MDIIAVGIDVSKDRLDVAVRPGGEAFAVERNACGLDRLIERLRQLSPHIVALEATGGFETVVAAALASASLPVVVVNPAQIRAFARALGQRAKTDPIGAAVIAHFAEATKPQVRPLPDEATRLLADLVARRRQIIEMIGAESQRQKRITMPRLRKSIRRVIDMLNKELAELDGDIDDAVRGSPTWREKENLLASVPGVGSIISRTLIADLPELGTLNRKQIAALAGLAPFTRQSGQWRGKSFIGGGRASVRTALFMGALVAKRHNPVLKAFFDRLVAAGKPKMVALIAVARKLLTILNAILRDNRSWQNA

SEQ ID NO: 181522 - protein, 410 aa, unidentified
MEVKYRRCCGLDVHKDTVVACARIVSDGEVVSEVRTFQTTTVSLIALSEWLAENGCTHVAMEATGVYWKPVWHILAGGDFQLVLANASHVKNVPGRKTDVNDATWLADLLAHGLIRASFVPDTQTQELRNLLRTRKQLVREKASHILRVQKTLEDANIKLDSVITDVMGMSGRAMIEALIGGESDPAKLARLANYRLKTSQEKLREALRGRVTNHHRFLLHLHLNQIDGLDASIASIDLQVEAGIAPFRVAVELVTSVPGVGVLGAQVIVSEIGTDMSRFPSDGHLISWAGICPRNDESAGKRRSNRLRKGAPWLKTTLVQCAWAAVRKKDSYLQAQFHRIKSRRGPKKAIMAVAASILTAIYHMLKDGTLYQDLGANHFQSRSKGQQTKRLVKRLADLGYDVALTPVTN

SEQ ID NO: 181523 - protein, 341 aa, unidentified
MDKTLFCGIDLHSNNAVYVITDEQDRQLFSKRLPNDLAVVLEALESYRDRLKAVAVESTYNWYWLVDGLRDSNYPVCLANPAKMEQYDGIKEANDLTDAAFVTHLLRLGVLPTGYIYPREDRPVRDLLRRRTLLVRYRTSLKQSLQNMVVRQTGRSLGWRKVRDLNNEARAELLGDDDCLPFVADQQVELIELLDERIKRFEQKVLQHAHLRSAYECLLTLPGVGVILGLTIMLETGEIGRFQRVGDYTSYCRCVRATRSSNGKKKGSNNSRNGNAYLSWAFVEAVHHAIRGCPQAKQFYDRKVAKRNGALATKALAAKWTKAAYYMMQRQERFDVKRVFG

SEQ ID NO: 181524 - protein, 430 aa, unidentified
MKSNTQNAKIEAITEKTLVLGIDVGSETHYARAFDYRGIEYSKKPFKFSNTEVGFATFKEWILDLKERHEKDKVVPGMEPTGHYWFNLGKFLQDNEMKPVLVNPHHVKKSKELDDNNPTKNDRKDPKVIAGLVREGRYMIPYLPDGVYADLRTASNIRFQLQAELTRIQNRISRWFNIYFPEYKTVYGKPDAKSGMLILKAAPLPEDILTLGIDGVNQIWRDAKLRAVGKARAKTLIKAAEHSIGSKEGTMSARMEIRMLLEDYESQNMRLQEVMVLIEELVRKIPMTEKLLEIKGVGIRTVSGFLAEVGDISRFNNPKELQKLAGLALVENSSGKHKGETTISRRGRKRLRYLLFEVAMSLVAKNPEFRELHNYYTTRRLNPLKKMQSLMAIAAKLIRVFYAMLTKGVDYDPKKMISDIKRPTVYLQAA

SEQ ID NO: 181525 - protein, 423 aa, unidentified
MDQQTFDQFTHFGGFDWARASHHIVIVDRGGQVVLSLGFDDDAQGWATLREKIGQLPRLAVAIETSCGPAVERLLEMNLPVFPLNPKAAERYRDRKSPAGVKDDERDALSFGDALRTDGHGWRQLRPQDPPTAELRLLCRDEMALIAQRTALVNQLRTALHEYYPAALEAFDDWICKSSWEFVISFPTPAALAAAGRRRWQSFLHSHKLYRPQTAEKRLEIFARAAAFASPSAAVTSAKSLLAVTLARQLKTLEHQLDEYRARITRLFKDHPDKDCFGSLPGAGGKLAPRLLAELGSDRQLFDSPDALRCYAGTAPVTRQSGKRHWVCLRQACNKHLRCTLHLWADLSRKSCVWAEAYYQQKKKQGMSHAAALRCLGQRWLKILWKMWQSGQPYDEALHTRNQIKHGSWVIALTSSSPSPAAS

SEQ ID NO: 181526 - protein, 375 aa, unidentified
MKEKLRYLGLDVHAETIAVAVAEPDGEVRSLGTIPNRAESIRKLIKKLGPLDKLRACYEAGPTGYVVYWQLAELGIECEVVAPTLVPVKAGDRVKTDRRDAEKLARCYRSGDLTAVWVPDEGSEALRDLVRAREAAKQDQLRARHRLGKFLLRSGQRPPSGVKPWTRAYLIWVAQLRFTQIAQESTRLDYLHEVEHMRERVARLEQAITEAVKLASPELQQVVNDLQALRGIADISAVTIAAELGQVSRFASARQLMGYCGVVPSEDSSGKRTRRGGITKTGNAHMRRIVVEAAWSYRRPPGIWYGLRRRQESISEEVKEIAWKAQHRLHKRYVKLGAAGKDQRKITTAVARELLGFIWAIGSRAETIVRQQATT

SEQ ID NO: 181527 - protein, 419 aa, unidentified
MAFKILRKNCCGLDIHKTWIFACIGITDSNGRIEYKQARFSSFSNGLRDLADWLAKYSCSDVCMESTGKYWIPVFNILEKTCWVTLAHPKYTKPQKGNKTDRKDAKWICDLYMCGMVKPSFIPPPDIRQLRDLMRYRVKLTNMLTGEKNRAQNCLTVSNLKLDDVFSDVFGKSSRSIIQYILEHPGEQFDVTPFIHRRCKHPVEEIQAAVDGVVSREQAAKLKECLLHIDQLNAHRERIEAEILRLAEPYPYQLELIRTVPGFAAAPLTAVALISEIGVDMSVFPSAKHLASWAGCCPRNDQSNKKVKSTRISRAGCYLKPLLVQIANAVIKSDRHPECRERYRRIKARRGHKKAIIAACRMLLTAIWNVLSKLEPYSAKGYLADKLTEHSVVISKAEGLALLRKRGYIFKDELAVESG

SEQ ID NO: 181528 - protein, 346 aa, unidentified
MMIIGCDFHPSWQQVSWLDTETGETGERKLVQASGDAERFYRQVAAPALIGMEATGNCHWLVDLLAELGHELWVGDAAQIRASYVRQQKTDKRDAAHILKLLVEGRFPRIWMPSSEVRDLRQLLLHRYKLVIMRARVKNELQHLCLNKGVQRKHKLWSQAGQQILRELPLQPWAGRRRDDLLKLMAMLDQQIEPLDQAVKAEAQRDKMALLLQTQPGVGPITALAYVLTLGDVSRFPRGKQVASYLGLIPREHSSGGRQKLGAITKQGNRMLRMLLVEAAQAAVRYDPQFRKEYLHRCHQKPKAVAKVAAARKLAVRLYWMLRTQQPYPAVVRIESSPRVPLVGAS

SEQ ID NO: 181529 - protein, 354 aa, unidentified
MLAELVDHVIGVDPDRDWITAAIIDAHTTGVIATERFGADSAGYDEAISWAEALTVAGERAWAVEGTASYGRGFTAALARAGEWVIEFDRPRGKASKDGAKSDELDAVRAARETLGRNRLHEPRAHDGHREALRVHTVTRAGVVRARTAAINELKALVLTAPNDLRQELRHLTTRALVKRCATFRDTPQRPVAERCARNTMRSIARRIICFNDEVAVHDTAMKQLIDEAAPQLVAEPGIGHVTAAMFYIAWSHPGRCRNETAFARLAGVAPLPTTSGQRQDRHRLNRSGDRQLNNALYVVALTRSRNDQATRDYRDRRRSEGKTDREIRRCLKRYIARRVWRLLEHPPGPKIAA

SEQ ID NO: 181530 - protein, 413 aa, unidentified
MSSNLLLREISGDRLIVAIDPGKVTNRVWLTTGERGLIGEPVSLPVLRDGVDELARLIAGSGVDGAPVIGIEATGALHRAWAGEVERRWPGSLRLFAPSETQAARSQLGSRRFKTDDRDCAALVWLLRQGAGRPSSPSAVDALLGAVRHRRQLVDARRVLQQRLHDQLNVLCPGLSAPAGHGRVLELEDTSGRAVLGCAVAFAGRAPSVRSLRSRSPGRLTEANARFWAGRWKHLLAPPADAELRADRLGRDVERWLALREDITALEDQLAELLARTDGQILTTLDGVAVVRAAAFAAHTLPIERWPTAERLYSATGLAPASYQSASVTRRGRISRQGLAEHRDALMGIAWGLAQHSPAFAERDREYRARGFRPIQARVALARHACRLTWRLMISQQPYDDQRYDRARHRRGR

SEQ ID NO: 181531 - protein, 343 aa, unidentified
MRTITTIGLDIAKSVFQVHGVDADGDVVLRRQLKRRYVLSFFQKLPPCLIGIEACASSHYWSRELQALGHTVRLMPPAYVKPYVKRQKNDAADAEAICEAVTRPNMRFVPTKTPEQQSCLMLHRTRHLFIRQQTALINSIRAHLAEFGIVAPVGRNGVAQLLEVVADANDARLPEIARACVAALGSQLQALKAQILAFDRCIMAWHRSNETSKRLDAIPGVGPALATALVASVADPKAFRSGRDFSAWIGLVPKQNSSGGKDKLGSISKQGDRYLRSLFTAGALAVIRYAKLHGTKHRPWLTALLARRPTKVAAIALGNKMARMAWAMMTRGERYKEPVALAA

SEQ ID NO: 181532 - protein, 359 aa, unidentified
MLTQSNKIDFNGQHFYVGLDVHLKSWKVSIMAEKLTLKTFSQDPNPELLYHYLVKNFPNGIYHSAYEAGFCGYWIHNRLIALGINSIVVNSADIPTTDKEKVNKTDKRDSKKIARSLRNGDLKGIHVSSLKTLEDRCLVRMRGTLAKDLSRNKNRIKSFLYFHGIEMPEAFNKSATHWSKRFMNWLRSIELTESSAKKTLTLLIDESQRLRLTILDAIRGIRELSQSESYANNVRLLRTIPGIGTLTAMIILTEIETINRFANFDQLCSFIGLIPSTNSSGEKEIVGEITHRGNNFLRSAIVESAWIASRWDASLNKSFHDYCKRMESNKAIIRIARKLLNRIRFVLKNNQPYVCSVIK

SEQ ID NO: 181533 - protein, 377 aa, unidentified
MGWTGRAPAPNGFQSAPGACQERSTTMPRTTTLHAVTAIGIDMGKNTLHLIGLDARGAIVLREKVARGRIALRLANLPPCLIGIEAGMATHYVARELAALGHNVKQVPATYAKPFRQGHKNDFRDAHAVAEAVQRPTTRFVPAKTNEQLDLQALHRVRSRLVSERTAVINQIRGFLLERGIVVRQGLRFLRQQLPDILAKRTDVLSPRMARIVADLANDWRRLDERIETVTDEIGTLAKSDDSCRRVMTVPGIGPIISSAMVAAIGNGAAFARGRDFSAWLGLVPKQMSTGDRTILGRISKRGNGYLRTLFMQAARVILLRSANWPKHGFGLWLVRAAQRLHPNVLAAALANKLARIAWTVLAQERSYEARVTKAAA

SEQ ID NO: 181534 - protein, 406 aa, unidentified
MGSFDHRDIDVFVGVDMAKQDHYAQAIAGDSTELFDRLVVNDEAAINALIDDAGRHGRVALVIDMPSSAAQLLLTVARQRQIPVAYVTGLQMRRAAELYAGSAKTDPRDAWVLADFARRHADQLVWLDVSDDLLAKLRILNGRDVDLAEDANRASNRCRDALTSISPALERAVGSRLGHPGVRDLLAAHPTPTALRAAGADTIRATITDRSPRVADKVTAAVTDALNAQTVTLPGEDTWGQVIVGLVADLDRIHTQRHELGKQIETVFLEHPLGQVLVTLCGFGPRTGARTLAEIGDPTRFANGSRLAAYAGLAPIDRRSGKSINSATASRRGNHRLKNAMFIAAFVAVRHDPHARAYYERKRAEGKRHNAAIICVARRRCDLIWTMLTTHTAYDPHRAEKLAPAA

SEQ ID NO: 181535 - protein, 404 aa, unidentified
MDAILQRCAGIDVGKKFSLVCLITDQGRKAPNIQIRTYGTTVAELDQLHEWLKQAGCTHVVMESTASYWKPIFNILEGSMTIVLANPAHLKNVPGRKTDVKDCQWLAELLRHGLIRGSFIPPRSIRELRDLTRRRRRLVAAGSSERNRIQKILEDANIKLGNVLSDLFGVSGQDMLEALLKGSPTAEQVAQFARGVLKRKIPEIIKSLEGHRFNDHHRLLIRQSLAHMEFLESQISDLDGEILRKLEPYRRQFELLQTIPGIKADAAASVLAEIGPDMSQFPTASHLASWAGVCPGNNESAGKQRSGKARKGNAWLRGTLSQSAWAAANAKNCSYKVRYRRLSSRRGKKRAVVALVHALLRTSYYVLRTTTPYKELGENYLDEHRRDALIRYHTKRLHQLNASV

SEQ ID NO: 181536 - protein, 340 aa, unidentified
MQTIRFGIDLAKNVFQVHGVDAAGRVVVQRQLRRGQMLTFFARQPAALIGMEACGSAHHWGRELQSLGHEVRLMPPSYVKAYVKRNKNDARDAEACCEAVSRPTMRFVPVKTVAQQCARAIHRARDLLVRQRTQSANAMRGLLYEMGLTGNKGAAGIAALVLRIEAADPAIPAALAGCLVALARQWRALGTEIAQLDKQILAEVRQDRAASRLMAIPGVGPITAHAVVAAVGEGRQFGSARDFAAWLGLTRKNHDTGGKHRLTGKISRAGDTGVRRLLVLGASSWLRQVRAKPGSASPWLRGILARRPVKVALVAQAAKTARIIWAMLTSGQEYRAPSAA

SEQ ID NO: 181537 - protein, 355 aa, unidentified
MDRTKYIGMDVHQASISIAVRDASGKLVIESLIETKAATILEFLQGLKGTLWVTFEEGTSAAWLYDLLKPHVFKVIVCDPRKNALLKTGNKNDRVDARKLSHLLHAGLLTPVYHGESGVRTLRELARSYLTLTKDLTRVMNRLKALYRSWAIPCVGEKVYSPRHRSAWLEQLSEAGVRRRAEQLYQQLDILLQIRREARRELLRESRKHPAHELLRQIPQLGPIRVALLIALVQTPHRFRTKRQLWAYCGLALQTRSSGEYRFTAGQLQHSNRLPALRGLNTNHNHDLKNVFKSAAMHVSTSPDALGDFYRSLLAKGMKPAMARLTLARKMAAIVLTVWKKGARFDPGELKRQAA

SEQ ID NO: 181538 - protein, 316 aa, unidentified
MNSNQMESFVGIDVAKNTLDLRLEPVGESLHVAYDEAGIAEIRQRLTALVPTLIVMEATGGLETRLACELAACGLPVAVINPRQARDFAKATGQLAKTDQVDAAVLARFACAIRPTVRVQKDADTRDLDGLVTRRRQLIAMRVQETLRLGSADAKALQKNLKKHIAWLDKQITSLDGDLTKRLRTSDAWRTKDDLLQGIPGVGAVTSVTLLAKCPELGQLNRREIAKLSGVAPLANDSGKHRGKRFVWGGRADVRAVLYMAAVSAIRCNPAIKAFADRLKQAGKPAKVVIVACMRKLLTIMNAMVKNNAPWTAKTA

SEQ ID NO: 181539 - protein, 391 aa, unidentified
MEVVAESVAGIDVHQKQITVSILVGLANAKPKKISKRFETITCRLKDCGEWLKQRHVEQVLMESTGQYWRPVWQILEPFGFKMILCNPRIVKNIPGKKTDQKDSEWLSELARYGLVSASFVPPKSIQALRESTRLRKKITQSMTATKNEVHNLLQRSNIKLTTYISDIFNGTGLKLLKLLIDGEVITLQAITKCRHTRIKASVEQLFAAMDGILPRNDRRLLGLNMELLADFRRVLAELDAQIDEQIMEFNDLYLRLQDIPGISQRIAQIIIAEVGSDVSPFPDAHHLASWAGLCPGNYESAGIKHGAHILHGNVYLKSAMVSAALAAKQSKETGLKDYFWRLHGRMTAQKALVALAHKLLRIIYVMIDEGTTYVDYKKDQRKAITLIPQT

SEQ ID NO: 181540 - protein, 437 aa, unidentified
MSEKKSAEIRVSVDVGYRRHSVAIGLSSGEVLEEFEIAHRTEGFAEFFSRIEKHQEVRGCEVAVAMEGYNGCARPLDRMVRQRGYRLYNINNLKLARFKEIFPGAAKSDRIDARKGLELFQLSDHLPLAKEVLQEVKGTPQENEVLKRLTRRRRRLVDERVRVISNLQTDLQAVCPGLLEITKNAGNQWFLNFLVSAATLPQLARLRPSTLLKVPAVGRKYARLIEDWQKRAHFSEEVEWVSEMIQEDAQRCLELDEKIKALKAKIKGVAKDSKIAKTLLSIPGFGTICTAELAGEIGTIERFSKEGSLALYLGMSTLDNSSGKYQGSKQPKHVNRRAKAAMMVALDRHRKYVPESQRYYEKKRREGKKHNQAIRALGRHLCRIIYKMLNDEREYEIRPEKGNTKTKVKSRSCVKTQIRKPKISAKGKITTSTNGAR

SEQ ID NO: 181541 - protein, 428 aa, unidentified
MADYLNNKPYGAWIAIDIAKDFNAVLSETKEGKRQHFRMANSASDHDRFLSYLRTLPSPCIIGFEATGNYHRALGHRLVAAGFEVCFISSVASARYREVMFNSWDKNDPKDAAVLLELLKQGITQRYVDPLIAGHHDLQELSKTYYQVTLSRTRLQHSILTHYLPLYFPEMGKWWNSTRSAWWINYLLHFPIPSAVTKHSQAEFCQIASPVVGRKVNKAAKLIELYETARHSIGLPVEEDSLACKTFQIQLRRYQEINDCRTQLELTAQAVLADNPDSAILQSVPGIGPINALTILAEGGDLRRFSHHRQFLKYCGFDLAKNQSGNYRGQEQISKRGNARLRLALWMSVNRAIQQPENSFQQKYLRYIKNAPQDKDLQRKARTAVAAKMARVVYGLVKSKQMYQGYYEKALPSGSIPLCRAVEAARTS

SEQ ID NO: 181542 - protein, 355 aa, unidentified
MAADETAVIGGIDTHTDLHQAAVIDTVGRHLATEPFPTGPAGYEQLLDRLRSHGEVLAVGIEGTGAYGAEPARFLTARGVTVIEVDRPDRKARRDNGKSDPVDAYAAATAVLSGRASGIPKTRNGIVEAIRTLRVARSSAVKARTQTINQIRTLIITAPAVVREKLRGLATGDLIDTLDRSRPAGDLADPDCAVRVTLRRLARRCRRLQEETAEADADLAPLVTRAAPQLIALPGIGPQSAGQLLTTAGDNPERLRSEASFAHLCGAAPLPASSGRTHRHRLNRGGDRQANRALHTIVLVRMRHDQRTQEYVTRRTAEGMTKKDIMRCLKRFVAREVYRHLPRHRITAEQLFKAA

SEQ ID NO: 181543 - protein, 450 aa, unidentified
MPQGRQVEVEEQEEILARVAAIDVAKASGMVCTRVPHQAKAGKRVTTVWDVAATTSAIMELADRLVCQGIQRVVVESTSDYWRPFVYLLQAHGLLVWLVNARDVKQVPGRPKTDKLDAVWLCKLNERGMLRPSFIPPAEIRRLRDLTRLRVDLTEERSRHKQRVEKLLEDALIKLGTVATDIFGVSGRAMLEALIAGERNPVRLAELARGRLRVKRAALVEALTGQFSDHHARLARILLDQIDGLTAQIAQLTTLIEEAIAAIPAAHPPAGGPEVGPTVGAGDPAQGPLAAVQRLDEVPGIGSKAAQVIIAELGLDMGQFPTPGHLVSWAKIAPQTIQSGAKRRAGPTGKGNPYLRGTLGEVAAAAAKTDTFLGERYRRLVRRRGKLKALVAIARSILVIIWHLLADPTARFRDLGADYHTSRIDTGRKTRSLVRQLEALGHTVTLQPAP

SEQ ID NO: 181544 - protein, 418 aa, unidentified
MIKNKSRKASFVNSKALVVGVDIAKYTHYGRFIFPDGAQTKPFSFVNTRSGFDALVTSIKDSMKAENLDHAVVGIESTGHYWKALAYYLDNFPFIELVQVNPAHVKKAKEIYDSSPGKTDKKDAGIIAMLIQMGKSQNLNLPKKDFLSLRIYARQREQKIVELGIQRNILHSYVDIIFPEYNKIFKKLESKSSLCILEKYSTPDRIIQVGVKRLTSTLRKVSRGKLCECKAVALLNAAKASIGLRDGVEAAVYSIHLAVKNIKRIQLEIRDIEKRQKDLLSNIPYSEQLLSIQGIGPVSLSVILGEVGDIRRYKTAKEPLKLAGLNLYEISSGVHKGRRRISKKGRPLLRKALFFATLRMVKSNGVFRLDYLRLTEGNNMQKTKALVAISRKLMRVLFAIVRDGVNFQRYESELDYAA

SEQ ID NO: 181545 - protein, 355 aa, unidentified
MSQEKYIGMDVHQATISVAVLDSRGKLIMESILETKAATILEFLQGLHGSLSVTFEEGTSAAWLHDLLKPHVTRLVVCDPRKNALLKDGSKSDRIDARKLAKLLRGNQLTSVYHGEHGMRTLKELGRSYLTMTQDLVRVMSRIKALYRSWAIACSGTSVYAPRHRAEWLGKIPEPGVRLRAERLYQQLDLLQPVRQQARRDLLTESRKHHAVKLLRQIPSIGPIRAALLVAQLQTPHRFRTKRQLWAYSGFALETHDSGEYRYVRGKLQRNRERMTVRGLSNNHNPEVKNLFKGAAISASTHPGPLYDFYLALLEKGMRPTMARLTLARKIASITLTIWKKGADFDATQLHRQEA

SEQ ID NO: 181546 - protein, 363 aa, unidentified
MSHYRVGCDAHRRYSQFAVLDQDGQLRQQTRVDHEPGAIRAFLESLPEGTPVALESVGNWYWIADEIEAAGCLPLLTHAAKAKVMMGNVNKTDKLDARGLAKLLHLDSLPTVWLPPGEIRDERELHRTRMALSKVRTALKNRIHATLAKYGITSTEHSDIFAGAGRAWLQTTLFRLPPETGRCVAQEIEALDGLQLQIAQLEERIRERIALTPSIQLLKTLPGVGDILAIVVDREIGSIDRFSTAGQFTSYAGLVPTVHASGGKTRFGHMRKPSNQYLKWAFIEAANVVVRHRHHPAWKVTYVCQIYDQVSQRKGHAVAVGAVARHLAEGAFWILKRQQPYRPPALRQASPKQVRGRAQLVSD

SEQ ID NO: 181547 - protein, 466 aa, unidentified
MKQFYLGVDVSKGYADFMIINSKKQPVVQGFQLDDTFDGHRSLYNILGRFLAEHPDSTLFAGMESTGGYENNWYNSLIEFQGSLNIQTARLNPFGVMHNSKADLKKNTTDKISAQNIAEYLVAHPEKVVYQQHNQMAGLRKQWGFIKMLTKQRTQFLNQLNGLIYSANPELLSCCQDEVPAWVLKLLVKYPSADRLKKAHVKTVAKIPYVSKEKAQQLIAGAKRSVASATDTPTEQLIVATAQQILHLKKTIAEQTKRMLKECSIPEIELLKTFAGISDLSAVGLMIEIQTVKRFAETKKLASFFGVHPVYKISGDGVGGFKMSKQGRKAPRQILYMIALSAIQCNPLIRKIYEKHQKQGKHNMAAIGICMHKILRIIYGMLKHNKPFNPQIDIAHRRRSVRIKNATPTENTNRRFQDYDQKAPITRRQRRKRVEREKSHSVCDTNSGINAPVPLADIIANILPQL

SEQ ID NO: 181548 - protein, 366 aa, unidentified
MQKISTIRMMGDGILKSDKLTIGVDLGDRSSSYCVLNGAGDIVLEHKLATTAEAMKEVFGRMPRSRMALETGTHSPWVSRVLTGLGHEVIVAHAQRVHLITKSRRKNDRLDARTLARLARIDPQLLNPVRHRSAQAQIHLTEIRARAELVSARTALVNAARGLVKSYGERLRKCGTQQVGRELAIGLSPELQAALEPLLREVESLNERIKEYDQRIEKMVKERYQEVELLKQVKGVGDLIALTYVLTIEDPYRFSKSREVGCFVGLQPGRRDSGESEPQMHISKEGDEYLRALLVQGAHYILGPFGEDSDLRRWGNKLSERGGKNAKKRAVVAVARKLAVLLHRLWVSGEVYEPLRNSQKAMSTAA

SEQ ID NO: 181549 - protein, 341 aa, unidentified
MKHDMHVLGIDIAKRVFHAVGMDDRGNIVYRKRLSRHDLIPCIAKLPPVRIGIEACGGAHYWARRFRAHGHEVKLMAPQFVKPYVKSNKNDSRDAEAIAEAVTRPTMRFVPIKDVAQQDLQALHRVRERLIGERTALVNEVHGLLHEYGIVIPKGVAKFRQAVVGKLEAEKDKLTPLSQELFWKLVDEFALLEKQLAYYQEKLDTVATTHPECQRLMTIPGIGPLTATALVAAISDASAFKNGRQFAAWLGLVPRQHTTGGKERLLGISKRGDTSLRKLLVHGARATIRWVGRKTDRRSQWMRQLLERRGKNRTAVAVANKNARIVWALLTSHQDYQPATS

SEQ ID NO: 181550 - protein, 359 aa, unidentified
MLNDSTTFLGLDLGDKHSHLAILDQEGELIEETRMPTSKASFQRKFSGLPPARVAMEVGTHSRWASHLLKELGHEVLVANARKLRAIYSNPRKTDRSDAETLARLARLDPSLLFPIHHRSPQAQADLAVLRSRDALVRSRTLLINHVRGIVKSSGSRLPSCSAASFSKKVTASIPEPLRPALLPLLETIAALTQQVRDYDRQIEALCETKYPKTRSLQQIPGVGALTALAFVLTLEDPARFAKSREVGPALGLVPRRDQSGDRDPQLSITKTGNAFLRRLLVGSAHYVLGPFGPDCDLRRWGLQLAERGGKNAKKRAVVAVARKLAVLLHRLWKNGELYEPLYRSRQHPSATVVVSAVI

SEQ ID NO: 181551 - protein, 353 aa, unidentified
MTRSSRHAAPDFFNSLLDVSVKETSICIVDDTGRIVREMKVASEPEALLEVLMNPSYHFKRIGLEAGPLSQWLFGALAEAGLPVICVETRHMRAVLKAQINKTDRNDARGMAQMMRVGLYRPVHVKTLRSQKLRMLLTHRKLLQSKAIAIENDLRATLRNFGLKVGVVGTVKFEARINELVEDLPDLVVLVEPLLIVRRVLREQVGILHRRLLSIVRDDDVCRRLMTVPGVGPVVALTYRATVDVPARFRNSKAVGAVFGLTPSKYQSGEIDRTGAISRCGDEMMRMMLYEAAQIVLVRSTKWSWLKAWAMKIARHRGMKKAIVALARRLAVIMHRIWVDGTEFRWTRDVAAA

SEQ ID NO: 181552 - protein, 412 aa, unidentified
MELLIERCAGLDVHKASVTATVRIPDQAGGRLQQTRAFRATTAGLVLLGDWLASFGVTVVGMESTGVYWRPVYYLLEDDFQCWLLNAAHLRNVPGRKTDVADSVWICQLVEHGLVRPSFVPPKPIRELRDLTRYRKALIQERTREAQRLQKVLEDAGIKLGTVASDVLGVSGRAMLDALVSGTHDPAVLAELAKGRLRAKLPALREALEGRFRAHHALLLGELLAHLDYLEEAVERLSSEVARVVAPFSPLLALLITIPGVSQRTAEVILAEIGTDMGQFPSAGHLASWAGICPGNNESAGKHRAGTTRKGSRWLRVALIEAANAAARGKGTYLASQYARLKGRRGHKKAIVAVAHSILVIAWHLLSTGQPYSDLGADWFLQRHASEAYRNRLVRQLERMGHKVTLEPADAA

SEQ ID NO: 181553 - protein, 361 aa, unidentified
MFIERTSVGLDVHARSVVAAAIDGVTGEVFRARLTPGNDDVLGWVRALPGPSAVVYEAGPTGFGLSRTLTTAGIRCEIVAPSKIQRPAGDRVKTDARDAMHLARLLRLDEIVSVTVPTVEREAARDLVRARDDVRGDLMRARHRVSKLLLRQGIVYYGGRAWTGAHLVWLQAQHFNAPGLQFAYDAAHEAVLQAEARRGRLDKATTAMAADSEFTPVVHRLGCLRGVSTLTAFGLAVEVGDWDRLTGATIGAYLGLVPTESSSGQSRSQGSITKTGNTHARRLLVEAAWHHRKPYRSPGVAMKARWELAPAAARARGHAGNQRLHQRWLTFTDRKKKPVIANVAIARELAGWCWSLAVMDG

SEQ ID NO: 181554 - protein, 414 aa, unidentified
MDTIYRCCVGLDVHQKTVEATVRRLDEAGRLTTQTRRFGTMTRELLALGDWMAQEGVTIVVMEATGVYWKPVWNLLEGRFELLLVNARHVKQVPGRKTDASDSQWLAQLLQYGLLRGSLVPPRAVRELRDLTRDRTQLVQESARVANRIQKVLEDANVKLASVATDVLGVSGRAMLEAMIAGEQDPVRLAGLARGILRKKDAQLRLALHGGLTDHHRFMLGVHMEHLHDLERYIATIEERIDQKVAEQGWGQAVERLDQIPGVDKRTAQVMLCETGGDMSRFASEHHLASWAGMCPGNHESAGKRKSGKTRKGSRWLRAALVQAGWAATRTKNRYLKAQFHRLARRRGRKRALVAVGHSVLIAAYHMLKEGRDYHELGGDYFERRDAERIKRSLVRRLEALGNRVTLEPVGAPT

SEQ ID NO: 181555 - protein, 327 aa, unidentified
MHYLGIDVAKAKLDCVLLNPESQKRKNKTAPNSIEGVAALLNALQAWGIEAAQVHVVMEPTASYHELAALALCDAGCIVSLVNPAHLRRYAQALGVRSKTDAADSALLARYGAAEKPEAWTPPSPSVRTLRALLARRDAVAEDLQREHNRAEKLEVTEVPASVRQSLLEVMAFLENQLARLQREIDQHIDDDPDLRDKRELLLSIPAVGERVAQNMTALLASRSFASAGQLAAYLGLVPVDWQSGSSIKGRPRMSKAGPAHLRKLLYMPAIVAIKHNPHIRALYLRLIARGKPKMAAIGAAMRKLAHLCFGVVHSGKPYNPHFAEHA

SEQ ID NO: 181556 - protein, 315 aa, unidentified
MMSQEIAHVGVDVAKAMLDVSVLGQPKTWRVNNSPAGWRTLIARLRALECQVVVGIEPSGGYERGPVRALIEAGLEVRWTDPARVRALARALGAPAKTDAIDATMIARFVAQAEGRPVELDDERQRLKDLLAARQASGQIARQLTAQALALDHAPARAALEDLAAAAAREARSLTRQAMALLKDNPGLKAIWVRLQTAPGVGPLVAAELIAHMPELGRVGGKAIAKLAGLAPFIRKSGAWTGRAVCSGGRARPRQALYMAAVASLRAKLGPRPVFQRLIQAGKPVKLALTACMRRLLVTLNAMVRDSTNWRHATA

SEQ ID NO: 181557 - protein, 382 aa, unidentified
MKMAVGMDLHSKMTVVHAVYADNGEVPARHQKFLNDFNREFSEFPSTPKWYKKMASFVEKHECHVLIENSTKTHDVYWFLTNLGVSVTVAQAQDLYRITKSVRKTDKNDAVELAGYLRRRLNGENEFAECYIPSPEWMTKREMCRGLSGEKDYLANTKRKIRSHLLLHGIKLRAEYTDITCDKALRELASFRDPYLMMQIQYAVDARKRISLMERTVEQMFTCHRMYQLIYSIPGFGVLSAAYFTSLIVDIGRFPDRGRFAASFGVVPRMRSSADSNPNCATTHRGDELARYLLMFCVLAHVKHAPDSVVTRMYRRLVANGKKKREALVAAGRKLLTVVFAVLRDDRPYVSDPEELMLSRESEESEREDLGLIDQKEDGQFD

SEQ ID NO: 181558 - protein, 343 aa, unidentified
MQTTTTVGLDIAKSVFQVHSVDADGNVVVRRQLKRRYVLAFFQKLPPCLVGIEACASSHYWSRELQALGHSVRLMPPAYVKPYVKRQKNDAADAESICEAVTRPNMRFVPTKTPEQQSCLMLHRTRHLFIRQQTAIINSIRAHLAEFGIVAPVGRRGVEQLLKVVADANDTRLPEIARACVAALGTQLLALRAQILAFDRRIMAWHRSNETSKRLDAIPGVGPALATALVASIGDPKAFRSGRDFSAWIGLVPKQNSSGGKDKLGSISKQGDRYLRSLFTAGALAVIRYAKLHGTEHRPWLAALLARRPTKVAAIALANKIARMAWAMMTKGERYKEPVALAA

SEQ ID NO: 181559 - protein, 388 aa, unidentified
MEARTVNALPPAAADHAAIRCLLAIELSKKSWVVAINTPLADKISRHTLPGCDWTGLLELIRRVRTRVVRELGRPVEMISCYEAGYDGFWLHRLLEGQGVHSLVVDPASVQVDRRARRAKTDRIDVERLLRSLMAYLRGEPKVWSVVRVPSVAEEDDRRLHRERDRLIAERIQHVNRIKGLCAIHGIYDYQPMRPDRTRRLEQLRTGDGGALPPRHNAEIARELQRMELVLEMLKEIDAERNAIASARMSAHTNAKKIQDLVKLKAIGPEIATVLTGEVLYRPFNNRRELASYVGLTPSHFQSGSTCRDQGISKAGNPKARTTMIELAWLWLRYQPDSAFSVWFRERVGNLKGRIRRITIVAMARKLLIALWRYLETGVLPTGAVLKV

SEQ ID NO: 181560 - protein, 312 aa, unidentified
MEKLLHGGIDVSKDRLDVLLLPDRHCFSVTNNAAGWTELMKQMRGLAIAAIGIEPSGGYERGVIRALLAAGLSVRRINPNKLRQFARARGVLAKNDRLDAQLIAEYVAIMPSRAVLRDVAAERLAEIVTMRRQLCEEHVAVLNQAAHVEDALLRRLNRRRMARLQEDIRLLDKRLAEVVGADPRLAHRYRLLVSMPGVGPTLAFTFLALLPELGRIGRKQIAALVGLAPYDFDSGKLKGHRSIYGGRMPVRNVLYMAALSASRYNPDLKTFSKRLALANKKSKVIIVAVMRKMITMLNAMLRDNREWQPQSA

SEQ ID NO: 181561 - protein, 383 aa, unidentified
MKNTIVHHEGAASLEAVAIKLEPRAAVIKIGLDVHARQYVAVAQYDHLLPKAARRLSPYEFVPWVEGLLRQGHSVHVVYEACGFGFTLYRQLIALGAHCYVIAPRKLDEECSRVKTDPRDATTLCQRLSRYLEGNTRELAVIRVPSESEERARHVTRQREQLVHHRQKLEAQGRSLLISHSLPAPAHWWKKQTWSRLGNHLPRWITTHLEVARPALLSLQGQIESLTSQLEAAAPPNIPTGLGKLTTVMLTREICDWHRFNNRRAISSYTGLCPGERSSGSKRVPGSVTKRGNPRLRAALVECAWRMVRFQPQYPPVKKRLAVLAKGAKTTGAQRKKAIVAVARRLAVDLWRVHTGRLTAQQLGLNIKISEFEGNSYELTTQR

SEQ ID NO: 181562 - protein, 377 aa, unidentified
MQLPKFVIMKHQFTASPKLYIGMDIHKKSWSIHLRTDISDHKSMTIPPNTAILERYVFENFPDHEVHLVYESGCCGFWVARYFLNLGWHVKVVNPADIPTMNKQTYQKTDSIDCRNLSKQLQADQLRGIYVPDEAQDFLKSLLRQRAVVSRQLRSTKNGIKSLLLYHGIVIPTEYDNNNWSKAFVEWIKAIVWKSATVRTAMESKLRTLEFLHREYLSLANELRAYCRKHYKTDYYLLKSVPGVGGYLASAILAEIGDLRRFNKASDFAGYVGIIPMMRNSGGTEKIIGVTPRCRALLRSYIIESARTALRLDPHMQSYYRKHAGKNSKGIIVKIAHKMLNRMLAVIKTGKPYQSNYDLNDGQNNKGTRKRTAKQPW

SEQ ID NO: 181563 - protein, 366 aa, unidentified
MKKISTMQAFSNEILKEQKLTIGLDLGDRWSFYCVLDEAGKIILEQKVGTVPEAMKQTFGKIPRSLIALETGTHSPWVSRLLTELGHEVIVAHAQKVELITKSNRKDDRHDARTLARLARIDPELLGPVRHRSAKAQIHLTVIRARAELVSARTALVNAARGLVKPFGERLPKCGTQQVSRGLAGGLSAELREVLEPLLQEVESLNQRIQEYDERMEKIAKEAYPEVSLLKQVKGVGTQIALTYVLTIEDPYRFPKSRAVGCFLGLKPGRRNSGESEPQKGISKEGDRYLRTMMVQGAHYILGPFGEDSDLRRWGLKLAERGGKNAKKRAVVAVARKLAVLLHRLWVSGEVYEPLRNSQKAMNAAA

SEQ ID NO: 181564 - protein, 457 aa, unidentified
MPRRKRRAKVVPPEEKFEILRPDAAGVDIGAREIWVSVPPDRADEPVRGFGVTTPCLHAAADWLHECGIRSVAMESTGVYWVPLYEILEERGFEVWLVNSREAKAVPGRKSDVLDCQWIRRLHTYGLLRRSFRPTAEIVEFRQYMRQRDTLVHSAGDQVRRMHKALTLMNIHFQTVISDITGTTGMAIIRDIVAGERDPAVLAQHRDPRCRASVEKIEAALTGNYQPEHLFALRHALELYDLHQKLILECDNESARLLDSINKQAGRDAKPMPRKRRKRTTKGAKVDYASRLHALVGVDLTAVPGLSDYSVATLIAEFGTDMTRWETANHFSSWLRLVPRTDITGGKTKNRRTLPRGNRASQVLRMAAVNAGRTRTAIGAFYRNFSRRKGKAEAVVATAHKLARIIYTMIRNQTEFEDVGEMGWEQQRRDRTLRILKKKAKALGFTLLESSDLSSAG

SEQ ID NO: 181565 - protein, 275 aa, unidentified
MSEITRAQIARVGVDLAKQVIQVHAVDAYGRRAVARALKRDQFYDWCAQLPTGCLVAMEACSSAHYWARKLRVLGLDPRLIAANFVSPYRMEGKSGKNDATDAAAICEAASRPSMRFVPIKTCEQQGVMSLHRVREGLKEERTACINQIRGVLTEFGLVFSKSPKALRAVLTDVIEDATNELSSMARLVLQRAFAHWRELDEHMRWCDRQVGQHVRSSPVAKRAAKVVGIGELSASALTAGVGDFKQFKSGHQFGAWLGMVPRQDSSGGKARLVH

SEQ ID NO: 181566 - protein, 439 aa, unidentified
MGTGLPVFNPHAAGIDIGDTMHCVAINDGNGGHEVKTTSAFTCDLHEIVDYLKSNGVTTAAIESTGVYWLPLYIMLEEAGIEPYLVNAKHVKNVTGRKKDDTDSMWIQKLHTCGLLQKSFQPENEIRILRNYTRQRGNLILLSSDAVRRMQKSLELMNIKIHTVISDILGKTGMTMVKAILSGERDAQILSSLCDPRIKASKEDIIKSLQGIWNEEYLFMLEQAVENYEFHQNQIKRCEEKIKQQLLKQVAIVKDGDITCLEENQKKTSKARKNQFDFSISPYLIAITGVDLCKIPGISELTALEFVAEVGTDMSKWKSAKHFAAWLNLVPNTKITGGKIVSSKMQKKKNKAGQILRQGASCLSANKTPIGDYYRQMRKRLGGKGAAITTGHKLARIIYTMLLNKTEYNIELIVDNQEKYREEKIKKLEKQLTRLKQAS

SEQ ID NO: 181567 - protein, 341 aa, unidentified
MKYVGVDLHKQSISVCVMVKDGEKRRVDRRISLQCADEEAIRRQFEELGPFQVVVEATSSYEWFLLLIEDLANRWVLAHPKRLRVIAESKNKSDKIDAHVLAEFLLLDMIPEAYRPTPRIRQHRVLVRHRHAVQRRITAVKCKLRHKAAFYNADTPQLFTARGLKHLAGIAMSSADRFECRALEDQLAFLQGQLQAVDQELLNFAKTAPVAEREARAVLVTMPEVGPVTTDVVLSETGDVRRFRGAKRIVAYAGLDPGFRESAGKGKQLSITKEGSRLLRWALIETAWRLVGKTARWRRLFERLRASTGHKKKAIVGVARRVLCVMYAMLRDGKAYQLAAE

SEQ ID NO: 181568 - protein, 398 aa, unidentified
MTESSDYESVQVFIGVDVGKDTHHAVAINRSGKRLFDKALPNDENKLRSLISDLKQHGQILLVVDQPATIGALPVAVARSEGVLVGYLPGLAMRRIADLHAGEAKTDARDAAIIAEAARTLPHALRTLKLADEQIAELSMLCGFDDDLAAQTTQASNRIRGLLTQIHPALERVLGPGLDHPAVLDLLQRYPSPEKLASLGEKKLAAQLCKLAPRLGKRLAADIAQALAEQTVVVPGTNAAAVVLPRLALQLITLRKQRDEVALEVEQRVLAHPLYPVLTSMPGVGVRTAARLLTEVACRAFASAAHLAAYAGLAPVTRRSGSSIRGEHPSRRGNKALKRALFLSAFAALRDPLSRAYYTRKMSQGKRHNQALIALARRRCDVLFAMMRDGTFYTPQAS

SEQ ID NO: 181569 - protein, 406 aa, unidentified
MEVIYPRCAGLDVHKQTVVACVRIARDGAPLQEVRTFDATTSGLLALADWLESFGVEHVAMEATGVYWKPVWHVLEGHFELVLANAAHVKNVPGRKTDVNDAMWLADLLAHGLIRASFVPPVAVQELRTLTRTRKQFVRERAAHVQRIEKVLEDANLKLSVVLSDILGKSGRAVLQAIIDGQNDPERLLSCIGRVKASRAALLEALRGRISAHHRFMLKLHLGHIDALDKAIADIEKEVGLGLEPFRKAAKLLSTMPGLSSVSAHVIVAEIGIDMSRFATPGRLLSWACMCPRNDESAGKRRSTRLRRGGKWLKTTLVQAAWAAVKVKGGYLQAQFHRLRARRGTKKAIIAVAASMLTAAWHMLRDGTEWHDLGAAHFDRADAHKTAARLIRRLQQIGYTVHATPA

SEQ ID NO: 181570 - protein, 333 aa, unidentified
MEETGECGEQELNHSDGQAEKFYRDLKQRGICVRVGMEATGYSRWFERLLAELGFELWIGDPAEIKAKRVKKQKFDREDARLLLRLLRENNFPQIWIPDPENRDLRQLLWHRHRLVQMRTRIKNQLQALAMNEGYRWKKKLFSEPGRAQLEKLALAPWASRRRQELLELLDRMNPTIEELTAAVEQEARKRPEAMRLMTHPGVGPLTALAYVLIIGTPTRFQRGKQIGTYVGMIPCEDSSARKQRLGHISKQGNSLLRFLLVEAAQAAARIHPDWKRRYIHLAMRRSKSIAKVAMGRRLAVRLYWMWRNGCEYSASLEFGSYAGQLEIGNGVK

SEQ ID NO: 181571 - protein, 350 aa, unidentified
MLIIGCDFHTRYQQIAMLDEATGELVERRLEHETGQARAFYAGLAPPVRVGIEATGHTQWFERLLTELGHELWFGHAAQIRATAVRQQKTDQRDAAHILDLLLTNRFPRIWVPSPAERDLRQLLWHRHKLVCLRTLVTNQLHAVAMSQGLCRKKKLFTAKGRAELASLPLGPWASRRRAELVHFLDQLDPPIAELDRAVLKEAQRRDDAVRLMTHPGVGPVNALAFVLTIGPVSRFRRSKQVASYLGLNPSEHSSGGKQRLGAISKQGNTMMRWLLVEAAQTAVRFDPQLQQDFQRLKFRRGNAVAKVAIARKLAVRMYWMLRSGADYARLVRMQGSPGATLVNASSPSG

SEQ ID NO: 181572 - protein, 360 aa, unidentified
MMCQSGGVEAPLREASVSEVTTIGLDIAKHVFHAHGADATGRAVFSRRITRGKLLDFFSGHPRCLVALEACGGAHHWARELRAMGHEVRLIPPAYVKPYVKRHKNDAVDAEAICEAAQRPSMRFVAVKTEEQQAAALVFRTRDLMVKQRTQLGNAIRGHLAEYGWVAPKGTAHLAMLADLLEGGEIGETLPEAARPMLAMMVDMLAGLDKRVAELDKEIARRAREDEVARRLMTIPGIGPITATAIAAIAPPAETFAKGRDFAAWLGLVPKQASTGGKQKLGAISRMGERTLRRLLIIGSSAVVLQASKRGAPAGSWLDGMLARKPRMLVTVALANKMARTVWALLVKHEDYRAPVVAAA

SEQ ID NO: 181573 - protein, 403 aa, unidentified
MALHVSSVPANCLIESLWNCEPAQLTNDEDGLIAVVTLGSRLAERHGIRRVGPFIGRVLMKYFAGLNVSLDETAICIVDEDGIIVTEGKTASEPDDLARWLAATGLTITRPGLEAGPLSPWLYAGLRVAGLPAICIETRRMKGATAAMAVKTDRNDARAIAQAMRVGWFTAVHVKTPESQELRLLLNNRRTLLVKRLAIDNEIRGTLKAFGFKLGAVAVAGFAARVTELLGERPRLLAMVQPMLAAREVLRQQGAVLHKMLLQIVRASTVCRRPLSVPGVGPVVALTYATGIDDPARFVRSRDIGPHFGLTPRKYASGEIDRNGSITKAGDGAVREALVHAALSLLTRERRWSTLKAWGMAVAKRRGLQRAIVAVARKLAIVLHRIWIDGTTFNWSRETEAAA

SEQ ID NO: 181574 - protein, 342 aa, unidentified
MNLPIRIGMDTSKSVFQLHGVDENEVVVVRRQFRRAEMIRYFERLPPVLVAIESCGSSHHWARLLQSFGHEVKLIPPPYVKAYVKRGKNDAADAEALCEAVSRPSMRFVPVKSKEQQAACMLMTVRERLVSVKSQLSNAFRSYAAEFGIVGPAGRQNVTALIKRVLEDDSLPEMARDLFRLQAEEYAAVQARLAKIEAKLMKWHREDDVSRRIATIPGVGPIGSSMLSMKAPPPETFRSGRDFAAWLGLTPKDHSTGGRQRHGGITKAGDSALRSTLIVGATALLRHIRKGRHKPTPWLASLLERKPPKLVAVALANKFARIAWRLMISGGVYNRPVADMPI

SEQ ID NO: 181575 - protein, 427 aa, unidentified
MLNNDYNKQYERRQRIKKTTLVTGIDIGADFNAVGFMNKEGNVLGRLPKVYNSREGFDKFVRTTEELKAKHGLKDVLIGLEPTGHYWRKIAYFAKDQGYAVRFIRTTSLKHERELNESSSAKSDTKDALTLTNLTREGKYIDTVIEDGASRQLRTLSKVREKILRQNTGAKNTLHAMLDDYFPELKQLFYAMNTKGLWAVLENCPFPEDVLKFEKTAIADIITKASRSKTDGARKAAALYLAAETSIGLKRVGDADRYRLTVCLNEVKRTERMLQEIKKEMKELLKHLPAAQSLLSIPGIGHLSAAIFLGELGNPAYFHHAKQIIKYAGYDPQESDSGKRIGRKVISKKGRWLLRKYLYLMSVSAVNHSKFFRKYYQRRLKIKNRFGQLLKKKEALCAVAIKLIKVIFALLRDKREFQDTVSFALAA

SEQ ID NO: 181576 - protein, 447 aa, unidentified
MPQPILAVGVDPAKRLHRAVAVLFPDQVILDVALPNACDAVANLDDRLTELANQHGAELVYGLEDHRRYGRLFCQVLTERGRELRVVNPLWTSRQRAFYGQDKDDAIDGRSIAAVVLRRHHDLPLATDFGEVAQAVREAERSLQDLDKARTRLINRLHLQLSDTYTATYEGFFGKLRSPLALRFFRHFPLPQDLVGHNVEMLASLLLDLAGGKVGPHKGANRLIAMRSKAQTILESSATMRARPRSLALQLKAELIRQLCDELLANHDRVTRLNRMLRQQLLPATGQTITTITGISTTLAAAIIGETGSITRFRSPAAFAVYNGTAPARASSGGRDRHRARHDCNHRLKRAFYLAARAAVRHDPIAKTYHQCCTSRGLDYCEALKRVARRMSDLVYVLLKSGKAYDRLIVENAIEQRREQAAHAEPRGANKALSAPDQINSNAPLSQ

SEQ ID NO: 181577 - protein, 338 aa, unidentified
MQGYKLTIGLDISKSVFQVHGVESTTGEVITKRLRRSKLLEFFEKLQPSLIGIEACASSHHWARALKTLGHEVKLLPPAYVKPYVKRGKNDAIDAEAIYEALTRPTMRFVPVKTAEQQGALAVHKVRSQLVGERTKLINVLRAQMAEFGIVAPKGIWRIGELKAIVNNDADARLPMMGRVALKVVAAQLEVLETQIGKLDRVILDHCRNSEVSRRLAAIPGIGPVTASAFAASIADAKVFKSARHFAAFLGLTPKQNASGLKNRNGRISRMGNSYLRTLLVIGATCMVRQASRNKAPSLVTRLLAKNKPVRLVTVAQANKMARIVWVLMARGEVYRPA

SEQ ID NO: 181578 - protein, 329 aa, unidentified
MVACPQDNKKFKNKEFQNTTTGIHGLITTLQPDDHCVMEATGNYSYLLLYLLDKAGICTSMENPLKVKNFARTMLTVTKTDKADAQLLSLYGERMKPEPYKIPSEALLLLKQKRAVLRQFKKQLLANNNLRKALEAMPKQDHKAIKTINKVTMTLEKQIKAVEEELNTLTQAEFNQQMSRLTTIKGVGTALAAALIITTGGFTYFDNAKQVSRYLGLCPTYLQSGTSIHVKGHINRNGDPYLRAQLYVASWSMIKYNTACKELYTRLKERGKSGKLALVAVINKSIRQCFAVVKHNTDYQDGFVSEKPQPLPAGSACRQGSVGTLPTRQ

SEQ ID NO: 181579 - protein, 354 aa, unidentified
MSQTLNTSIAVVGIDIGKNSFHLVGQDRRGAIVLRQKWSRGQVEARLANLPPCLIGMEACVGAHHLSRKLQMLGHDARLMPAKYVRPYSKGQKNDFRDAEAIAEAVQRPTMKFVATKTAEQLDLQALHRVRERLVGQRTGIINQIRAFLLERGVAVRQGLRFLRAELPGILATRTDVLSPRILRIIEDLAGDWRRLDERIEGLSNEIETLARQDQACARLMTVPGIGPIISSAMVAAIGSGDVFSKGRDFGAWLGLVPKQISTGDRTILGSISRRGNRYLRVLFVQAAWVVLVRLKQWERYGLKSWIEAAKKRLHHNVLAIALANKLARIAWAVLNKGRAFECVKRDAMASQPA

SEQ ID NO: 181580 - protein, 369 aa, unidentified
MGEPSTYVGIDVHARELHIALLIGDTHQPLQWTSPAEARAVERLRRKLERTAPGVIECCYEAGPTGYTLQRQLTTTRIRCRVIAPSLIPKKAGDRVKTDRRDAYKLAQLLRGNLLTEVHAPTEAAEAVRDLVRARDDARIDLNRSRHRLSKLLLRRGHLYHRTPWTQAHRTWLYQLTWPHTADQHVVRDYCLAIDHLEARLAELDAALTAISQTPPYRAAVAALRCFRGIDTVIAMALLAELYDVRRFPHPRALMSFLGLVPREDSSGDRHRRGGLTLTGNRLVRRLLIQAAWTYHHTPRLSCAVRRRRVGQPAAVIAIAARAELRLAHRYRRLSARLKPKTVVIAAVARELVGFIWAVLQLPESQPHL

SEQ ID NO: 181581 - protein, 353 aa, unidentified
MITIGVDAHKRIHVALALDEAGREIGEWRGPNSQAGWRDLLQWARGFSGERHWGIEGAWGYGRCLAQHLVERGEAVYEINPRWTAAGRQRARKPGKTDRLDARAVALFVRQEAPLLPVVQLEDDSAILGLLSTERNQVLAEIVRLRNQIHALLAHIDPEYQSRLPALKSRSGLAVLEAYDAPGHHPVQLERVAGVRRLARRLALAVAQLDELTERIRAGAQTRFSPLTRLCGVNLLTAGMLAGALGPGRRFANDAQLAAYAGVAPLEASSAGLVRHRLNRGGNRRLNAIVHRIALTQAHHSPEARAYLERRASEGKSRREAIRALKRFIVRAIWRLWLECEPASAALSIATAA

SEQ ID NO: 181582 - protein, 465 aa, unidentified
MKPPKSASKGQRNPSKIEERDLESLPPLHLNAAGIDVGSAEHYVAVPAARDPQPVQKFGSFTGDLHRLAGWLKACRVDTVVMQATGVYWIGLYQVLEDYGFDVQVVNARHTKTLPGRKTDVQECQWLQQLHTFGLLNHSFRPAEQIRILRSYLRQRENLVAAGSTCIQHLQKALTEMNVQLANVISDLSGTTGMAILHAIVKGERDAYKLADLKHSLIRASREEIAQSLQGNWREELLFVLQQNLELYEVYQKKVRECDQQIEAHLKTMPAMVNVSEHPIPPPRRVSWSRKRQPGFDLRGELYRLTGVDLTQVDGLDVQTIQTVLSEVGLDMSAWKTEKHFGSWLGLSPDNRISGGKVLKRGTRKVVNRAATALRLAAWNLIRSQSALGAKFRRLRTRLGAPKAITAMAYHLARLVYRMLKFGHAYVDKGIEYYETKHRQQQFAWLKKQAAALNLQLIPLTEVPA

SEQ ID NO: 181583 - protein, 347 aa, unidentified
MNIIGCDYHPRAELIKMLDLETGEVVEKRLEHESGEARRFYESLKEPALVGIEATGYTRWFADMLQELGHQLVVGEAAKIRAMKTRKQHHDRGDAEHILNLLLRGDFPKIWVPPAEERDVRVLIEHRHQLVELRTRAQNGLQAIALSYGLRRRGRLWSQAGQEELQKIPLREGMGRRREDLTKLVRQLNVWVKELDARIEEEVARREDARRLMTHPGVGPQTALATVLVLGPVERFPDERHVTSSLGLIPQEESSGGRQRFGHLTKQGNRLMRFLLVEAAQTASRYDPRLRRGYRRLAFRKGAAIAKVAVARKLAIRLYIMLRDGIDYEEFCRRGSHAGMLGDVALV

SEQ ID NO: 181584 - protein, 355 aa, unidentified
MDSTKYIGMDVHKEAISIAVLNSSGKLVMESIIETKAITILQFIQGLRGSLHLTFEEGTWAAWLYDLLKPHVREIVVCNPRRNAYLKEGSKSDRIDARKLAELLRSNLLRPVYHGEQGVRALKELARSYLTISKDQARVMTRLKAVYRSWAIPCTGKQVYALRYRLEWLGKIQEAGVRRRAEFYYQELDALRSLRQQVRRDLLLESRKHSASQLLRQIPSIGPIRAALLVALLQTPHRFRTKRQLWSYIGLGIEAHSSAEHCYVAGELQRSKKQISIRGLNRNHNHDLKNLFKSAATIAAAKVGPLQEFYAALVAKGIRPEMARLTLARKIAAIILVVWKKGVGFDAKYLKPQTA

SEQ ID NO: 181585 - protein, 421 aa, unidentified
MGKLIERCAGIDIGKRFLVCCVMTGAAHEEPRSETRRFDTTVPGLKRLRNWLNEERVTDVVMESTGSYWIPVFNLLEGHVRVVLANPEEVKNRKGHKTDRKDAGHLADLLRHNHVKSSYIPAEPVRQLRDLTRRRVQLTQDATRERNRVQKLLEQVNVKIGSVLTDVFGVSGLHMLLALLDGRAAPEEIAGLARGSAKRKTPQLIEAIEGNRMSDHVRFLIRGCLRHLACLEEEVEELDAEILRRMQLSTFQKAFTLLQTIPGVGQLSAATILAETGPDLDSFPTIEQMASWAGLCPGNRESAGIQKGPQTTHGNPYLCTALVQCAWAATRKRDSVFRSRFQRLAPRRGEKRAIIAVAHHMLIILYCMLKRGVPFLGAEHAPKQRRRERRAHHHLRCLRRLGFSVEISLSSESTPPDTISR

SEQ ID NO: 181586 - protein, 482 aa, unidentified
MKKRNIYQNQSQELLSLFEEAGSSAKVMCVPMDYAKKDHLVMFCNGHGDILRKPFSVKNSPEGIEYLLDQMTRSCRRRGIKREHVFLGGEDANSFAENFVSTLRFKGWLVAGVNAHDAKKQRVNLQASTDRIDLMGIATMLLNCRANCCPAATGIYRNLRTLVRHRRKLVVMLTEVKNRAHGIVDRLFPGFLNENKSGIVPFTQSSLYLMENRFSPKQIRRRRRQPLIEILKRFGTSKAQETAFKLQQYAAKVLHTPDEYIDTLQISLAQHVKHIRCLKESIVQLEKEIAVNLAQTQGAFLTSVRGIGIVLAAGVSAEIGDPYEQKPLNNVISYSGIIPRVKQTGGVDGKTYTGHVAKRCNRILKDYVVKSAYHLGLYGPEDLMADYKRRDASGQHADFGIGRRYLRMAMSLMRTSQVYLSPRLRKADTALEERAGHYLTSWPFLRDKWKKAGALEAAFSKDRPLGLWRQIVQKLYDIKLKL

SEQ ID NO: 181587 - protein, 358 aa, unidentified
MRFYTKQHKYYCGIDLHTKKMYVCILDAEGQIRLHQNIKTDPEALLRILAPFREDMVVAVECMFTWYWIADLCTRENIPFVLGHALYMKAIHGGKAKNDKIDSHKIATLLRGGMLPQAYVYPARMRATRDLLRRRNHFMRKRAELFAHIQNTRSQYNLPDPLGCIAKPQNRQGIVERFPDPSVQKSIAINLQIIQAYDRLLTQLERDIITSAKEHDLRSYALLQTIPGVGRILALVILYEIESIERFPQVQDFVSYSRLIKSIQESNGKKYGSHGKKIGNAHLKWAFSEAAVLFLKGNEPAKRYLERLSRKHGKAKALSILAHKLGRAAYFLLKNKEAFNQKQFLGLERWEGMDQPAA

SEQ ID NO: 181588 - protein, 425 aa, unidentified
MSETRSEVRRWYAGVDWGSESHCVFLSDDQGRKVGQKVFKHSGEGLAEMASWLLKASGANEPGQVLVAIEVPHGPVVENLIERGFAVHAINPKQMDRFRDRFSMAGAKDDSRDAEVMSSCLRTDAKCFRRLVCAEPIFVELREWSRIAEELGVERNRLANRLREQLWRYFPALLQLEDDCSAEWLLDLLALASTPAKAVRLREAKLTQLLKQRRIRRLDAATILKAVQAPPPKLAAGTVEAASAHVLSILPRLQLVNRQIKEADRKIGALIDSLTANEDNQESEPGQKKQHDAAILASLPGVGRTVLATLLAEAWEPLQRRDYAALRSLAGVAPVTKQSGKSRFVVRRQACHDRLANALYHWARVAVQHDPRSRAKYAELRKRGCTHGRALRTVADRNLSVACAMLKTGTLFDPALQAEKNKKTV

SEQ ID NO: 181589 - protein, 373 aa, unidentified
MENSITYVAMDTHKKQHRVALVYPNDEEIIEFSVKNTPSEIRKMVRRIKRNAPGKVKFCYEAGVCGFTLQRRIEALGCKCSVIAPSLTPRKPGERRKTDRRDAKKLLGLFMADMLTEVYPPDEQQEAARELTRCREAAQENLKRIRHQMQKMLVRHGYVFIDGQHWTQKHLRWLEAVEFNQPLLREVFDCYFTEMRHCLQRVKMLDRELEKLAQSKDYREVAGILRCFYGINTLTAITIITEVFDFGRFASARDFMSYLGLTPSESSSGENEHKGPITKTGNKRARRLLTETAWHYRHAYTISKALNERREGQPQWAIDIADRAGLRLRKRYHRLVNRGKLPCKAVVAVARESAGFIWSVLIEYEARKKRKAA

SEQ ID NO: 181590 - protein, 315 aa, unidentified
MELTTLYQRVIGLDVHQAQITACAIIQESDGKTRTERRQFGAFKRDRRELAEWAASLKPDQVVMESTGIYWKSPYAALEAVGIRALVVNARHVKNVPGRKTDVGDAQWLATLARAGLLRGSFVPPAKLRELRLVTRQRQKLVGQLSAEKNRLHKLLTDSGIRLGVVVSDIHGQSARAMVKAIIAGKTAHEVLQLASRRLKATREELFDALQGELTANHRFVLDEIMHHIEEIEARIARFDARLLDELKDEHNKLALLQTLPGIDLIGAAMLLVEIGTDMDAFGSADRLSSWVGICPGNNESAGKRNGVSRHFAVR

SEQ ID NO: 181591 - protein, 375 aa, unidentified
MSSTTHRQESTAAALYVACELSTKEWLLTMSTAPDARRQRARVRPGDREALRRAVTEAKARFGLAADAPVRSCYEAGRDGFWPHRLLAALGVVSLVVDSSSIEVSRRLRHAKTDRLDGEKLLRLLLRHWGGERDMWHVVHVPSREAEDARHASRALTTLQAERTRYRNRIHSLLALHGVRRLRIDARFPERLATAPDWADAPLPTGVQARLLATWRLLQGVETERQRARRAERQQVRATAAPSVAQRLAQLRGVAARSATILAQELFSRDLRNRRQVGALTGLVSAPYDSGKIRRDQGLARSGLPAVRRIAVEIAWAWLRYQPTSALTQWYHRQFGGGGPVTRRIGIVALARRVIIALWRYSEHGIIPDGALLKA

SEQ ID NO: 181592 - protein, 312 aa, unidentified
MEKLSCGGIDVSKDRLDVVVLPEGWFFSVSNDTAGWAELVARLRPLAVSAIGLEPSGGYERGIIRALLAAGLSVRRINPNKLRQFARARGVLAKNDRLDARLIAEYVAIMPTRVVQRDDAVERLAEIVTMRRQLCDEHVAVENQAAHLEDAMLRRLSKRRLIRLEADIRLLDKRLAEMVATNAAFAQLYALLTSMPGVGPVLAFTLIALLPELGKMSRKQIAALVGLAPYDFDSGKLRGHRSIYGGRMPIRNVLYMAALSASRHNPALKAFSNRLADANKKSKVIIVAVMRKMITTLNAMLRDNAAWQPQSA

SEQ ID NO: 181593 - protein, 372 aa, unidentified
MTSIIYVGMDVHTTNYTLCCYSMEDDRFFAEVQVEPDAKNILKYLARIEKQQSRDCRIVCGYEAGCLGYSLYHQLHAHGIDCVILAPTTMMTKPGKRIKTDRRDARLISKCLAFHTYSPVYIPTEVDDAVKEYIRMRDDANSALARVKQQIIAFCIRHGKIHDGKSYWTNKHLEWLSSLDLGNKILSEVLQEYLIRYYQLREQVDMYDMRINELAQAEPYRQKVEKLGCFRGIAAYTALSFCVEVGDFRRFATAQQFASYLGLVPGECSSGDKQQYTGITKAGNSHLRKLLVETAQVFGRSATKSGKSVALKERQARCDSLTVAYADKANARLKKKYFKIAMRSKVNIAKTAVAREMACFIWGMMTDNISCA

SEQ ID NO: 181594 - protein, 386 aa, unidentified
MPKPNDCSRSVTAFEQNSTPIAVIEMSLSSWLVAGVVPGIERHPLKKLETDEDALLKLLLRWRDEAVKAGHKIERIAIAFEAGRDGFWLARWLRARGIEAYVIHPASVAVSREHRRAKTDRLDTELLKRVFLGWLRGEPDHCSMSAIPTLEQEDAKRPNRERENLVGQRTRIVNRMKACLIRFGIRNFKPTLRKAPEGLEALRTPEGAPLPPNTRAEMRRDMARLRFVQDQIKEIEATRLQQLEQAPAEGPHAMIRLLARVTGVGIETADMLVNEILARNLRDQKAVARYAGLTGSPDESGKRSREKGLSRAGNARVRRGMIQLAWRFLIFQKESALAQWYRVATKDARGAIRKTMIVALARKLLIALWRMVTIGEMPDGVAMRAT

SEQ ID NO: 181595 - protein, 367 aa, unidentified
MKKISTIGVAQTRNFRDQKLTIGLDLGDRSSWYCVLDESGAVLLEQRLSTTPKAMQEVFGGMPRSRIALETGMHSPWVSRLLSELGHEVIVAHARNVRLIGESRRKDDRMDAQTLARLARIDPQLLSPVKHRSAQAQADLTVIRARAGLVRARTALVNTARGLAKSYGERLRGCNVRNMNPEKAQGLSPELQTALQPLLAAIEELSVHIRESNERIEQLAQESYPQVALLKQVKGVGTLIALTFLLTLEDAHRFRKSRDVGCYLGLQPGRRNSGQSEPQMHISKEGDPYLRTLLVQRAQHILGPFGADSDLRRWGLKLAERGGKSGKKRAIIATARKLAVLLHRLWVSGEVYEPLRNSNPRAMPAAA

SEQ ID NO: 181596 - protein, 382 aa, unidentified
MSRLLKYSVGTDISKEKFDACISVIDEEQRVIIKATRAFMNNQKGFEDFLLWYKKHCKLDLPAFFTMEATGVYYERLAIFLTDNGLSVSVVLPNKSKHYLKSIGLKSKNDKIDAKGLSQMGAEQKLVQWKPYSKSIYKLRSLTRQNENLNKQKSVFKNQLHAIEHSGYINKTIVKQLKQSIKLIDRQLTEITQEVENSINQDFAIKEKVDKICKVKGLGVLTVATVIAETNGFVLFKNQRQLVSYAGYDVIENSSGKHIGKTKISKKGNAHIRRILHMPAFSVAKYEPHFNALYNRVYDRTKIKMKGYVAVQKKILVLIYMLWKNNTIYDSNYHKTSGNDELKLLFSLGFEKSVKKVALEKTKATQDELPCKESPEVLFSLL

SEQ ID NO: 181597 - protein, 392 aa, unidentified
MRKPKQRKPLNDLSRSLTTLDVNQTLIAVIEMGLKSWLVAGIVPGVERQPLKKLDTDEDALLKLLDRWRMEAEEAGHKIKRITVAFEAGRDGFWLARWLRERGIEAHVIHASSVAVSREHRRAKTDRLDTELLKRAFLGWLRGERDHCKTVAIPTIKEEDAKRPNRERDSLVGEQSRIVNRMKAALARLGIRNFNPKLKKAAERLGGLRTPEDEPIPPNTLAELHRDMERRRLVTDHIRQIEDARLERLKQAPKDGPNVMVRLLARVIGVGIETADMLVQEVLSRNLRDRRAVARYAGLTGSPDESGSKRREKGLARSGNARVRRGMIQLAWRFLNFQKDSALAKWFQARTANARGSRKKMIVALARKLLIALWHFVRDGVMPEGVILRPAQ

SEQ ID NO: 181598 - protein, 415 aa, unidentified
MNRLIERCAMLDVHKAQVTACVRVPDGDGGRRQEIREFRTTTAGLITLADWLRSWAVTVVGMESTGVYWRAIYYLLEDEFECQLFNARHLRHVPGCKSDVQDAEWGCQLIEHGLVRTSFVPPRPLRELRDLVRYRKAKIQERGREVQRVEKTLQDAGIKLSSVASEVLGKSARLMLDAMISGTHDPQLLAELAKGALRKKIPALREALEGRFTGHHALLVGQMLAQIDFLDETIATLSERVEELTGPFSREIELLDTIPGVDKRAAEMLLAEIGPDMSRFPTEHHLASWGGMCPGQRESGGKQHSAATRKGSKWLRGTLTECSKAIVRTKGTYLSARYHRIKSRRGHAKATVATGHKILTAAYHVLDKGVPYNELGEEFFYRRDTENTERYKRRLVHQLERLGHQVTLDPLPEAA

SEQ ID NO: 181599 - protein, 333 aa, unidentified
MRHWIGIDVSKATLDVALLDAAGSVVGEEQVTNTAAGLKGLLRRWTKTFGLVKGEYLVCLEPTSYYGHLALGVLVELEVPTWLAHPNDIRASIGMTRGKSDRVDATRIATYAWRFMDKARLVTTDQLKMNKLKQLLTKRQNYVVRKTMHQRQIKDMNKHLDKDLRAVFTRLDKAQIKLLNKAIEELEGMIEDTIYAEPELSRRFELLKTVEGVGLILASHLLAYTDGFTRFATPRQLACHAGCAPFEHRSGTSIRGRSRVSPNANHALKRSLHMSAVGLIRFPGEFQDYYKRKVAEGKHKMLVFNAMRNKLIHRVCAAMKRGTPYIPKPLAMS

SEQ ID NO: 181600 - protein, 340 aa, unidentified
MDVHKNESQICRLTEQGEILEQRILTRRERFAAVLGKMPRARILLEASTESAWVARCLEELGHEVIVADPNFAPMYATRSRRVKTDRRDAQALMDACRLGAYRPIHRASEPQRRVRALLTARDNLVRTRVRQIQVMRALLRREGLRIRSGQTASFGERLAAVELPDWLGSIVAPLRAAMDEGNRQLLRVERAIQQIVRGDPVVQRLCTAPGIGPLTATAFVSTLDQVERFSSAHQVEAYVGLVPCEFSSGERQQRGGLTKAGNTRLRWLLVEAAWSILRSRSSSTEGLRQWAERPALRRGRRIAVVALARRLAGILYAMWRDGTEFGRGAERCDSQAAVA

SEQ ID NO: 181601 - protein, 420 aa, unidentified
MKAWNQITHYAGFDWAKDHHDVIILDSSGKIVADFRFEHTAGGWEQFREKLAAFAGVAVAIETKFGTVIERLQEIDCCIFPVHPQSAKAYRQRKVPSGNKTDHVDAWSLADALRLDGANWKQLAPQEPLIKELRLLCRDEVALIRDRTALITQLRQTLYDYYPAALEAFDDWTMPAAWAFILAFPTPEALVKGGKRKWEKFLHTHKLGRPETYQRRLEIFARADRFAGSPPAIHAKSRLAVTRAKQLQLLQTQINEYRKEIRRLFAQHPDAGLFESLPGAGEKIAPRLLSEIGDDRALFPDAQALQCLAGTAPVSFQSGQIHRVHLRRQCNKSLRNAVHLWANLSREFCPWAETYYKALRAKGKSHACALRALGQRWLKIVWKMWQTRAPYDADLHARNQIKHGSWVLQLVNKTDTSAKT

SEQ ID NO: 181602 - protein, 304 aa, unidentified
MKDTIKYVGLDISKDPRYFGMIPHTPEAVKKLVKKLGDAESLRICYEAGPTGYPLCRLFLSLGVHCNVIAPSLIPQRPGERIKTDRRDSLRLAQLYRAGELTHIYVPTPEDEALRDLVRSREDAKEDELRAKHRLTEFLLRNNIQPPSGVNKWTKKYREWLDALKFESSVLRLVFQEYYHQLKELGQRILRLEKEIGSQANEGVHAPTIQALQALRGVALITATSLVAEIGSFKRFATPKQFMAYVGLIPNEFSSGESRRQGKITKTGNRHVRRLLVESAWSYRYQPAVKGELKKRQNAQEPTN

SEQ ID NO: 181603 - protein, 413 aa, unidentified
MRLFAGDDWAEDHHDVELMDSAGRRLAKARLPEGVAGIARLHAMIGEQLGEDADEDDAGQVAIGIETDRGPWVAALIAAWYTVFAINPLQASRYRERHGVSGAKSDTADAHVLADMVRTDSHQLRPVAGDSAQAAAIKVVTRTHKTLIWERTRCTQRLRHALRDYFPAALEAFEDLDAADTLELLGRAPDPAAAAKLTTAQISAALKRARRRDIAAKAERIQAVLRAAHLGQPDIVAAAYAASVRALIAVLATLNEQVKTLQGQVEAYFGQHPDAEILLSQPGLGPVLGARVLAESGDDPGRYISAKARKNYAGTSPITRASGKKKTVMARHVHNDRLIDALISQAFTALRTSPGARACYDHQRARGAGHNPALRQLANRLTGILHGCLKTRTLYDEATAWPQYTATSEKTAA

SEQ ID NO: 181604 - protein, 355 aa, unidentified
MSQEKYIGMDVHQATISVAVMDSSGKLIMECILETKAATILEFIDGLRGTLSVTFEEGTSAAWLHDLLKPHVSHLVVCDPRRNALLKDGSKSDRIDARKLAELLRGNQLHPVYHGEHGVRTLKELGRSYLTITKDLTRVMSRIKALYRNWAIPCAGATVYAPRHRAEWLAKIAEPGVRVRAERLYQQLDLLQPVRLEARRELLAESHKHSGVKLLRQIPSIGPIRSALLVALLQTRHRFRTKRQRWAYSGFAVETHDSGEYRSVRGKLKRNRERMTVRGLNDNHNRDLKNLFKSAAVSASTRPGPLHDFYVARVEKGIRPTMARLTLARKMAAITLTIWKKGVEFDAKQLNRQAA

SEQ ID NO: 181605 - protein, 400 aa, unidentified
MKTVLSVDVAKNKSMIMLMNNDGEILIDTKEIKHNLGEFEKVKEEIEKINLENLTVFMESTGTYHLPVERYFKENGFNTLVINSLTTKNNFDTIRKTKTDKKDCYRLAKLFFVNEVEYHEISKKDLYANLKAMTRQYFYLTQVNIRCKNRYKRLINICFPEFEGFFARNRIYEDTALNFIKAFPHAYIVREKRIDALYNNLRKVDARHDYYYKRLARQLKDTAMDSFPGVDKDHADVKNLSDMASILQENNRLIDEIRKNMIELAKQSSYFEIVNSFYGIGEVLAAELLGELGDITRFDNHKQLIAFCGLDPAIVQSGKSINVHGAISKRGDKYARWILFNISQMVVKLGHQYPSHPVYNYYLIKKAEGKHYYESLTACSTKILRMLYSMCKNNKRFLEE

SEQ ID NO: 181606 - protein, 382 aa, unidentified
MKTGRYPGCKPAYSKTGQGTAFTERKYTMNEACMCPQTSTAWVGLDVSKASFDAALVCPDQHWPATPLAAIPVRAFARTPAGVADLVRWLETRGQTPESTGAARVVMEATGRYSSELAEWMLDQCPELSPAIAPPHQTAAFIRSLGLRNKTDQLEARALAFYGRERQPVPYEPLTPQDAELRELSRYRDALVRERVAAGNRAQETCASRAVAALQRKRLRLLDADIERIEQEMRRCVAENLALQRDVELLSTIYGVAFITAVTVRLELGDLRRFRKARQLTAYAGLNPSVRQSGTSVRGRAHLGKQGNPRVRQCLYLAAMVVIRGNNDLQRFYLHLRQQGKGAMAALGAVMRKLLVLMRAILISGQPYDPLLKTCSHKAIQP

SEQ ID NO: 181607 - protein, 403 aa, unidentified
MNSVGIDISKGRSTVAVMRPFGEVVISPFEVRHTDSELSELARQLKSLDGETRVVMEATGNYHTPVAKLLHDAGLYVSVVNAKLVHGYGNNDLRRVKTDKKDSVKLANYGLDRWLALTRYVPEEDTRLLLKNCYRQYRQYSKVQTVLKNNLISLLDTVFPNVNRLFSSPAREDGSEKWVDFVAEFWHCRCVSEKSEKAFANKYQRWCRKYGYNFNEAKAHTIHAEASGHIGVMPMSETTKLLVEQAVAQLRATSTALAALKHEMQALTSMLPEYPVVMDMFGVDPTLGPQLIAEIGDVRRFYSKKALVAYAGLDAPPNDSGDVTGRHKSMSKIGASSLRRTLFLVMSVYLQTAPLDEPVYQFMDRKRAEGKPYRVYMMASANKFLRIYYATVKAYLESLEHTA

SEQ ID NO: 181608 - protein, 468 aa, unidentified
MKNYFLGIDVSKGYSDFVLLNEKKQTVLESFQLDDTFEGHNKLFKILSEFFTQQPDTKIFAAVESTGGYENNWYHLLHKYQGQLNLSIARLNPYGVNYNSKADLKRIKTDAISARSIAEYLISHPEKVSYQAEDYFAPLRRQWTFIKMLTKQRVQLLNQLESLLYVANTEILYHCRNKVNLWTLKLLKQYPTAKHLAKARVSTISKIPYLTETLAKELINKAKQSVASETDDTMAEIITATVTQILSLRKTICLQVKKLQSSCNLPEVTLLKSFSGIADYSAVGLLIEIGSVERFSSVKKLACFFGVHPVFSQSGDKISGYRMSKRGRKEPRQILFNVARFAIVHNPLIKEIYIDHLKKGMSKMAAIGAIMHKILRIVYGILKNKTPFNPEIDRANRLRNLSKKKEESLVVNKMLEPIDCKAPVSRRQLKKRKEQEKSHNLKPLNAEQTVSVFAGSDARSFPFASTQT

SEQ ID NO: 181609 - protein, 329 aa, unidentified
MSQIPNTAIAVIGIDIGKNSFHVVGHDARGAIVLRQKWSRGQVEARLANIPPCLVGMEACVGAHHLSRKLASLGHDARLMPAKYVRPYSKGQKNDFNDAEAIAEAVQRPTMKFVATKTAEQLDLQALHRVRERLVGQRTGVINQIRAFLLERGIAVRQGLRSLRSELPGILATRTDVLAPRMLRIIEELAGDWRLMTVPGIGPIISSAMVAAIGTGDVFSKGRDFGAWLGLVPKQISTGDRTILGKISRRGNRYLRVLFVQAAWVVLVRIKDWERYGLKSWIEAAKRRLHHNVLAIALANKLARIAWAVLAKGRAFELTRTDDAGVRPA

SEQ ID NO: 181610 - protein, 388 aa, unidentified
MDQTSSSTLSANTLHCALELSKKSWLLAIQFPDREQPSLYPIEGGDTEKLMAKLTAARNCWAKVSGALPVITLCYEVGYDAFWLARLLKARGIECLVIDPGSLQVNRRGRRVKTDRVDVKVLLRTLIAWCRGERHVWSLVRIPSIDEEDLRRSHRERSRLVRERTAHINRIKGLLFAQGIRGIDVKSQYKTLAVDKLVTGDGHRLPPRLACEIAREIQRLAVVQEQIAKIERERDTAPTPCEATERKRHLLLQLKSIGPAISALLSREVYYRQFANRRQVGSFLGLTPSPYNSGEEERCQGISRAGSGHVRAIMIETAWLWIRHQPKSALTRWFVERTAGQSTRMRKIMIVAVARKLAIALWRYVEHGLVPQGAILNPPNDRERKMTS

SEQ ID NO: 181611 - protein, 331 aa, unidentified
MQSGVPTKLNARVPEGGMTDKRIFGIDVAKDWLDAGLAGESRIERIANTEDAIEAWLDRTGPAMVAFEPTGGYERGLREALRRRGVLFVRVHPNELIAFRKGRGIKAKTDPIDARLIAAFAAEELSRRGLRPSIVGDETMRELAARRRQLIDTLHAERCRLAMAQASAVRASLAVVIDALTASLEVLEAELAERIAADPDMAELAGLLRSLKGVGPITALTLIAELPELGHLSGKQIASLVGLAPHTRRSGKTIGREATGQGRPGVRRVLFNAARSAIRHNAPMKSFYNRLTTDNGRPGKVALTAVMRKMLVTLNAIARDKQPWHLAHCQA

SEQ ID NO: 181612 - protein, 385 aa, unidentified
MTTAVTHHEQRNTTEATLFVAFELSEKTWKLGFTTGHGQKPRERTVTARQHEHVLNEIAQAKRRFGLPETAPVVSCYEAGREGFWLHRFLQAQGITNHVVDSSAIEVNRRRRRAKSDGLDVRKLLSMLLRYAQGERQVWQVVKVPSVEAEDHRHLHRDLETLKQERASTTTRIKGLLSSQGLRVTSLTKLPEQLDALRLWDGSPVPPGLRCRVLRVYAHHTFLSEQIAAVEAERRAQLQASTDAKIDKVRQLMLLKGIGINGAWLLVMEFFGWRAFKNRREVGGLAGFTPTPYQSGESAREQGITKSGNRHVRWMTTELAWSWLRFQPESALSCWFRQRFGSGGKRLRRIGIVAVARKLLIALWRFLETGVVPDGAVFKEGEALG

SEQ ID NO: 181613 - protein, 321 aa, unidentified
MDLCLRSNGKDILYDVIPNDLSSIKSWLTRTFEKFFLSEDSLVVCAEHTGQYTYPLVCATKSIGVYLCLEDAAKIKYCHGIPRGKNDKIDACRIAMYAERYNDCLQPYTASELIIQKLKNLSTERSMLVADRAKYQSQLKDQVDYMEHSIYIAKCNRVEGIINTFTDYIAQIDLEIKELINQAPVIAHQMDLLMSVDGVGERVALKMIMETDAFTSFTDPRKFCCHAGVVPFVYVSGSSQRSKNRVSNRADKSIKHLLHMAALSVSQVKNSPLKKYYDRKVEEGKNKMSVLNAVRAKLVTIMFAVIRTDAFFSRNYQNSLA

SEQ ID NO: 181614 - protein, 326 aa, unidentified
MTHDSSSVTAVCFVGIDVAKHQLDLARTDSSEILTLANDPEGIGRIVDTLRSISIGVIVMEATGGLEQPLLVALLEAALPVALVNPANVRHFARGIGILAKSDSIDARVLAEFARLAQPRLSRKRSAHQSELDALVTCRRQLTHVRTEQTNRRQSTSSARALQAINAVLKVVNQQITDLDRQIKKLIESDDDFNSIDKLLRSVPGVGAVLSATLLAELNELGSTDRRCLGALVGVAPFNCDSGQHKGQRVIRSGRIQVRSVLYMATLAAMRFNPVIRRFAQRLSQAGKPAKVTITACMRKLLTLLNAMVRDRLNWEQLNVVKNLDL

SEQ ID NO: 181615 - protein, 370 aa, unidentified
MSKITTLFVGLDVHKDSISVAYAKSDCPEPPQFVGPIGTRQCDIDKLVRRLQSKASRLVFAYEAGPCGYVLHRHLTSKGLECQVVAPSLIPKRPGDKVKNDRRDALEIARLLRSGDLTPVYVPSVEDEAIRDLCRARDAARVTLKAAKLRLKSFLLRLGLNYTGRANWTDAHRRYLARVVCPTPAQQIAFQEFILAVDEQVERLKRLESQISDFATTWRLNPVVESLQALRGVQHTVAITVVAELGDLTRFDNPRQLAAFVGLIPSEHTSGTKRSQGPITKAGNGRARRALIEGAWAYRYPAKISPHIQKRNERLPKNIQEIGWKAQLRLCKRYRRLVSRGKHTNVAVTAIARELIAFMWAIAREVPIEA

SEQ ID NO: 181616 - protein, 312 aa, unidentified
MARIICGVDIGAETLDAGIGRDGPWQQFARTTEGIAQLARFCQSHQASLVVMEATGGYERLAFAQLWASGLAVALVNPRSVRRFAEAMGILEKTDKIDTGMIGWYAETKRIEPTPLASDQQQRLTALVLRLRQLTDLRVAQNNQRRLVEEPDALASFTAVLATVSQQIRSLEAKIIELIESDPLWLALNAAFREIKGVANRTVARLMADLPEIGTLSSKAAAKLTGLAPIAHDSGKQTGRRQVRGGREAVRSILYVVAELVRRHDADFKAFGERLRAAGKPPRVVRIALAHKLLVRLNAKARDVRKALAQPA

SEQ ID NO: 181617 - protein, 316 aa, unidentified
MQAHEVFIGVDVAKDTLVSCTWGESKPQLVANEERAIKRWLKTLSPLAVIGMESTGRYHQNLARLAHQGGLRVYVLNAKDVYFYAKALGARGKTDPGDAQIIARYIAEHHASLHAWAPGTAAQLRVQELLQRRARVAVHRASLRQVLAGMEELAPAVAQLEQQFEQLLRHIDCEVQALVASEAELSQASALLQSISGIGPQSAAMLAALLNRIEFANANALVAYSGLDPRPCDSGMRSGRRRLSKRGSPSLRRQLYLAALAATRSKALGPTYRAIRAKGFKSTPAVVILARKLLRVAWAVWKSGQPFDAARLQLAA

SEQ ID NO: 181618 - protein, 338 aa, unidentified
MNNNMEACGVEVSARELVVARKGKAGVQLTRFANTAAGHRQLLRTLTRGGQRVRVVLEATGLYALDLALLLSAQEQVQLMVANPRAVRHFAQAMMQRSKNDQLDAVVLLEFAERMPFTPWVRPQENALALWAIARRLQALTRLCTAEKNRAHAMGLSEAIPATVRRDIARSLQFHQRAMKKLRQQALQCIAADAQLQQRYQLLRSVPGLGEISAVQTLAELLLLPEDRDVRQWVAYAGLDPREYSSGTSVRKYTRISKVGNAHLRRALYMPALVASRVEPHMRGFYQHLLARGKSKRQALVAVARKLLHANYGMFRSQRPYDGTRVYLAAAAQAEKFS

SEQ ID NO: 181619 - protein, 349 aa, unidentified
MAEVSTIGLDIAKAVFHAHGADARGQMVFSRRLTRAKLLEFFAAQPRCVVALEACGGAHHWAREIASLGHEVKLIPPAYVKPFVKRNKNDAVDAEAICEAAQRPSMRYAAIKTEAQQAAGMVFRTRDLLVRQRTQLINAIRGHLTEFGWVAPKGPSHISVLASLLEEGEEIGASLPEAARAMFLVMTGQLEQLNDQVALLDKEIARRAREDEAARRLMTIPGIGPITATALLALAPPAEGFARGRDFAAWLGLTPRQHSTGGKERLGAISRMGERTLRRLLIIGSSAVVLQASKRGAPRGSWLEQMLARKPRMLVTVALANKTARIIWAVLMKGEDYREGYRAPVAAAA

SEQ ID NO: 181620 - protein, 422 aa, unidentified
MLTEAQDDEEIIERIAALDIGKAELVCCARVPDEDRPGRRLQEVATYSTMTRRLLGMSDRLRCLGVRRVVMEATGDYWKPVFYLLEAAGFETWLVNAKDVKHLPGRPKTDKLDAVWLCKVAERQMIRPSFVPPPPIRQLRDLTRYRADLVAARTAEKNRVEKLLEDAQIKLSVVATDIFGVSGRDMLAALVAGERNPKVLAQLARRTLRKKIPALEEAFTGYFTDHHAFLLRQMLARVDAITADIAALDARIEEEIAPFTAAVGKLDEVPGINLTAAHAVLAETGLDMGRFPTAGHLVSWAKYAPGVKESAGKKKGKSSTGHGNPYLARVLGNAAAAAGKTDTFLGERYRRIARRRGAKKANVAIGRSILVIIWHLLSDPEARYADLGSGFYTSRTDPDRRRRNHVRQLEALGYKVILERAA

SEQ ID NO: 181621 - protein, 336 aa, unidentified
MRYIGLDVHKNNTTACIIAANGKPVAMMDVKSADSGLQKIVDYMGDQEYCVMMESTTYAYRIFRFFSSHDVEAHVVHAASLKMVTDTDKKTDREDAESIGRMLRLWKKGDIELSMSYLPTVKECELKDLCRLKEENSLKIGDESRRIKSHMARNVEEFRGNTDLKTKYVREQIREDYPKDATLMYRLDEYERLVTDGNVLKHMVESQMIGNRYVELLESIPGVGRQTAVQIMSMIVDPNRFKDEKRICAYFGMAPRVRDSGGKENHGRMTKNGDKMMRSIMERVTSSHVRFCDSSVTRYFKTKEKEMGTKKAMVTASRKMLTMILAILKRRTPFRS

SEQ ID NO: 181622 - protein, 340 aa, unidentified
MEKKSLFIGIDFSKSKFDVTVLENAEQSAIAQATFDNTKEGFDALLKWVPKQTKISGDNWLFCGEHTGLYSRSLAIFLTKKKLFVWLENPLQIKRSSGIKRTKTDRADSLVIAMYACRFQDRAVAYRLACDALETLQMLHAYRARLVKEKVLLEVPAAELRRVVHHDTVSRFIYEESQRKIKNIEKEIKKVETLMHKTIIDSELRENYLLALSVKGVGIVTTICLMVHTNNFTAFENARQLACYCGCAPFPNESGTIKKGTHVSRLANRYLKTLLTSCALSAIKHDKELSAYYHRKIAEGKNKYTVINNVRNKLLQRIVAVVKNKIPYSEFHLNPWMQCA

SEQ ID NO: 181623 - protein, 338 aa, unidentified
MAIVSVGIDLAKNVFAVHGVDDSGKAALVRPNVSRAKLLDLIASLPPCLIGMEACSGAHHWAREFAKFGHTVRLMAPKFVIPYRLSGKRGKNDAADAAAICEAVTRPNMRFVPVKSIDQQGQLLVHRARQGFVEQRTATLNRIRGLLSELGIVLPLKAAVVRREALACLEDLPGWANTVIGDLLSEVSRLDERIAQYDQHIRSMARQSAEAQRLMLLPGVGETTATALLSTIGNGRDFKCGRQLCAWLGLVPGQYSSGGKQRLGRITKAGDPYLRSLLVLGARAVLAAAKNKSDAISRWATALAQRRGYWKAVVAIAAKNARMCWAVLARGEDFRLPA

SEQ ID NO: 181624 - protein, 349 aa, unidentified
MVVLGIDAHKRTHTAVAVDEHGKRLGSKTVAATSAGNLELVGWAGQFGEHTFAVEDCRHLSRRLERDLLAAGETLVRVHPKLMARVRRSAREQGKSDPIDATSIARAAQREENLPTATLDGPERDVRLLVDHREDLVNERTRSQNRLHWHLHELDPSLELTPGSLDRYKVLDQLTEVCAHHEGTVAEIAAELVERIRALTVRINELERRIGVLVKQLAPTLLDLQGCGALSAAKIIGETARASRFSDRSRFARFNGTAPIPVWSSNNVRVRLNRGGNRQVNSALHRIAVTQLRSGAGKEYVERRMAKGNTKTEAIRALRRRISDKVYRRLISDETARSASHTTCELVAA

SEQ ID NO: 181625 - protein, 349 aa, unidentified
MDHFIGIDVHRKFSEVCVLEEGGEVLVRRKLYHDEPETIEAFFDSFPPGTPVTMESSFGWMWLAQMLQDLGMEVKLAHSAKVRYIAEARLKNDTIDAWVLAHLLRTGFLPIAYLAPSSVRDNRMVLRHREALKRSRTRMKNRVHALLARHNIHIDLTDIFGVGGMEILRILQVPEPTRRVLDSLLDTVEFLDEEIAQVQKHIASRLKKDPRVEWLESLPGVGRLTSYYLLAEIGEIERFRCPKKLVSYAGLCPSTRQSGAKIRHGPIGGGRRLLRWVLIEAAHTASRRDGYFGHLFQSTKRRKEKNTAYVTVARKMTKIIWQMLTEGRPYQRKVTTTPRVGPSRAMVAR

SEQ ID NO: 181626 - protein, 373 aa, unidentified
MSEFNKFVGLDVHKSTIAISIASDDGAEVRYFGEIKNTKEALINFANKISQGSLKLSFCYEAGGCGYEVYRHLRNIGHDCMVVAPSLIPKKAGQRVKTDRRDSLNLARLHRAGELTGVWVPDAMNEALRDLTRAREDMKHLQRQAKQRLLAFLLRHGWTYSGKSNWTKDHFNWLETVKFQHAAQQIVFQEYVDTVKYCGKRVESVTQQIEICSRESACWPVIESLMALKGIDLISAATIMAEIGDLTRFDSAPQLMSYLGLVPSEHSSGSSVRRGGITKTGNSHVRRVLVEAAWTYRFPARKTAHTQKRAKVTTEAVQEISWNAQKRLCQRYKELNANGKIKVQTCTAVARELAGFVWAIGQTVPLKQSANVQ

SEQ ID NO: 181627 - protein, 366 aa, unidentified
MSISIACLVERSPPVTSLNGIKRRFKIYLVLQGKVYRRQPYAILQISTQGIALENYIGIDISKATLDVYDGKKSHKFKNDKSGFEQIVSLCEDIKSTVFIFEPTGIYSNALKEFCAKEEIQVVLVGPKESRDFARSLKVRSKTDKIDAKVLYKYQSHIEPGMAKVPVIDHQAAKIQEMINVYESILDARQRFSNQVESTSKENKELLDTLYGLIDDFDKKAQKLLEKIKTLLLSAKETKESYEAILQIPSIGQKSALYLCAFFLKYPEANAKEMTALLGLDPMMKDSGSFRGKQRISKHGGQQIRNLMYLPTLCAIQHNSRIKKFYENLTSRAKSKKLAVIASMRKLILMAFSIFKSKEEYKPLAV

SEQ ID NO: 181628 - protein, 386 aa, unidentified
MRIIGLDIHRVFAEAVALEAGRLIRLGRIEMRRDRLAEFARSLTHDDHVVIEATGNATVVAEVLRPHAGRVVIANPQQVRLIAYAKIKTDRIDASVLARLYASGFLPEVWVPDERTQALRRQVTRRNQLVRQRTRLKNMVQSVLHAQLIPPCPTADLFGPKGRAWLVEQILPADERSAVERHMREYDRLGEDLDAVERDLARGALADEQTKRLMTIPGIHMVVAVGIMAAIGHIERFANPQQLVSYFGLNPSVHQSGNGPVHRGRITKRGRGHARGMLVEAAWVAARVPGPLRAFFLRIRARRGQHVAAVATARKLAVLIWHMLRRNEDYAWLRSALHARKIRDIELAAGHPARRGQRGAAYAYNLSTVRQRELSTPPEFSSRPPK

SEQ ID NO: 181629 - protein, 346 aa, unidentified
MDYFAGLDVSLETVNVCIVDGDGSVLLEQKVGAEPREIVALLKEFGHPLKRVGLEAGPTSSWLFTELRAAGFPALCLECRHVKAGLSAMRNKTDRNDARGIAHLIRLGWFRVVHVKSDEAQQIRMLLVNRNLLLSKLQDIENSVRGSLKVFGLRLGQVTKRSFEARILKLVEGHPSIAAITEPLLRVRRVLLDEFCNLDRMAIKTARRDAVCRRLMTVPGVGVIVALTYRTGVDVPERFTRSRDVGAHFGLTPRRNSSGQVDYDGHISRSGDEMVRTALYQAAHVLMHHGRWSALRGWAMRIAKRSGAKLAKVALARKLAVVLHRMWIAGSDFRWTTSEQVAAPAA

SEQ ID NO: 181630 - protein, 358 aa, unidentified
MQPEASSEMKEMRYVGIDVGKLRCRAAVMDQEGSIIDEFSFNNNHQGIEHLASGLTMDDKIVIESTGSVWTNLYNILDERHIPVVLANPLKTKAIASARIKSDKIDARILAHLLRANLIPESYVPPKELREIRALIRHRASIVKIRTMAKNKIHALLDKHGLTSDCSDIFGKRGMEWLNSLELSSLDRLILNNHLQHIDSLNHQIERVDEEIRIKSSQDEDVKLLLSMTGIDVYTALLIRSEIGSIDRFPDYKRLVSWAGLAPSLHQSGNTEYHGAITKQGSRMLRWIMVETARVAATHDERMKQFYERVKHRRGDQKAIIAVANKMLKIIWFMLTKREPYQSRNPQLYKRKLNFLTE

SEQ ID NO: 181631 - protein, 445 aa, unidentified
MGQRTVGIDLAIRGDHVARILDGGRPHGRAIRFRLTPDSLDGLVARLRDGLAPGATVTAVMEPTGMSWFPVARRLKAAGVTVLRVKGQRVRALRRYLSEHAKTDAADAQVLGAIPLFGGAPADPVYVPDAERHALQRLTRQRERLEDEATAIKRRLLDLVRWACPALEAVLPDLRTNLALAVLHDLLDPACVIKARRPTLLRFVAAHASGNHPHGGPFAENLVDGLKAAAAETRRLHGAAVDFPRLQLEVALEIDRMRLIEGQLSRLGREIQALYAKLHPSDALRTVPGIGDALAPLVLGVLHEAGRFGSLHRLRGFCGLFPRTSSSGGADRPGQAITQSGNNRIKRALYLAADAARRTDPELAAVYWRLMVRKGHHHKQALCAVATRLANRIGKVLRTGEAYELRDTDGTPISVAQGKAIVAERFSVPAEIRNARRRCRPEVPA

SEQ ID NO: 181632 - protein, 412 aa, unidentified
MDVMHPRVAGMDVHEAFVVVCCRIVQPDGQVRKIVQRYSTMTRDLLAMSDWLTEQQVTHLAMESTGVFWKPIWNLLEDQFTILLVNARHVKQVPGRKRDVSDAEWLAQLLQHGLLQASFVPPAPIRELRDLTRHRTTLSQDRTRVVNRIHKVLEDANLKLSAVATDIMGVSGRAMLRAIVAGETDPRRLADLAQRRLRAKLPELVEALTGRVRPHHRVLLTTLLDQVTFLEQHIADYDGHIAQAVAPFAPALTRLQTIPGVKGRTAENLLAEIGPDMSVFPSDAHLASWASLCPGHDETGGKQRSGKTRKGNRWLRGVIVQAAWAAARTKGTYAQGQFRRLVPRRGKKRAVVAVAHSLLIAVYHVLHHNVPYHDLGADHFNRLAPQAATRSLVKRLQRLGYDVTLQPTDTAA

SEQ ID NO: 181633 - protein, 414 aa, unidentified
MEQIHDRVAGLDVHRDSVVACFRRRGPKGGVVREKERFTTTTAGLQVLDAWLAERQVQLVAMEATGVYWKPVLYALEHRFTVWLCNARHVKKVPGRKTDLSDAEWLADVAAHGMVRPSFVPPPPIRELRELTRYRKTQIDARVAEIQRLEKVLQDAGIKLTSVASKVLTQSGRSMIEALIDGERDGARLAGLAKGKMRPKIAALTEALTGHFGPHHAVACHRILAHLDFLEDTIAALTAQIDARTAAFEAVYKLLLPVPGLDRLTIDVIIAETGADMNRFPTAADLASWTGVCPGSYESAGKRRKVSTTGGNPWLQRALIEAARAAVRTKGSYFGAQYRQIARRRGPNKAAVAVAHSLIELVWHLLSTGEVFKDLGDDYFTARRDPERQARRLVAQLEHLGYTVTLAASRAISP

SEQ ID NO: 181634 - protein, 370 aa, unidentified
MNNTTKYVGLDVSKEKIAVAVADEGRSKPRYIGMISYTVEAIRKLIKKLGDPEQLRVCYEAGPTGYGLYRLLKSMDIECEVIAPSLVPNKPGNRVKTDKRDALNLASLYRAGELTPIYVPTEDDEALRDLVRAREAIKEDEQRSKHRLTKFLLRNEIREPEGVKRWSARYWDWLDRLTFKRSASKVTFREYLQQLKEHQQRLKVLEQEIEEQSKDGVHAPMIQALMTLRGVALITATSLVAEIGSFTRFPTAQHFMAYNGLVPSESSSGLSRKLGNITKTGNQHIRKLLVESAWGYRYQPAVKRGLEKRQKGQPTDILAISWKAQTRLHKRFYQLVARGKEKPKAITAIARELAGFIWAIGTELEKAAMK

SEQ ID NO: 181635 - protein, 370 aa, unidentified
MQHSNTVFVGLDVHKEAISVAYIGGEQGAEVVSLGSIGTRQCDIDKLLRKLKGKARKLFFVYEAGPCGYWLYRYLTKQQLTCSVVAPSLIPKKPGDRVKTDRRDAVQLARLMRSGDLTPVYVPAIEDEAIRDLSRARHDAMQDLKAAKYRLKAFLLRQDIRYEGRASWSPAHLRWLAEVICATPAQQIVFQEYVRTVSEHHDRLKRLESELEAAVKTWRWGSVVEAIQALRGVQFTVAVTLIAELGDLTRFNNPRQLMSYLGLTPSEYSSGPMRRLGAITKAGNTHARRALIEGAWAYRYPAKVSRHLQLRLEKLPKAIQDISWKAQVRLCKRYRQLVARGKHANKVVVAIAREMAAFVWAIARVVQQAN

SEQ ID NO: 181636 - protein, 338 aa, unidentified
MNIVFLGIDLAKNVFQLCRLNQAGKPVYTKRTGRKELLQTLANIPACLIGIEASTGAFYWQREFEKLGHKVKVISPQYVKPFVRGQKNDGNDAQAIAVALMQPTMQFVPPKSPEQQDIQALHRARQRIVNHRTATVCQIRGLLLDRGIPIGSAVSRARRAIPLILEDAENGLSSRMRRTIAELYDLFNDLERRIHFFDKEIETVFRQSEACQRIARVKGIGPKTATAVVAAIGKGTEFKNGRHFAAWLGLVPRQHSSGDRQVLMNMTKKGDKHLRTLFIHGARAVVRVATNNNDGYMNQWVNQLKEQRGFNKTTVAVANKNARIIWSMLRNETEYQVV

SEQ ID NO: 181637 - protein, 388 aa, unidentified
MSFTIDPGVRTETTIRPDHATVFVSLELSRSKWLITALLPCSDKMSKYCVDSGDGTALLDRLARLRARAEPRIDTAVHMVVIQEAGLDGFWIHRLLESNGMESHVVEPASIAVPRRHRRAKTDVIDGEMLVRTLMAFKRGERRVCSMVVAPSPVEEDRRRVSRERRTLIRERIEHANRIKGLLATQGIVGLEPMRKDFRDRVEGLQTGEGQPLRPHLKAEIIRELDRIDLVVRQVGVVEAERDALVKSDNIDTTAPAALLMKLRGIGPEFAAVLWLEGLFRNFANRRQLAAYAGLAPSPWKSGSIDREQGISKSGNPRLRTTMVELAWLWLRYQPGSALSAWFRERAGSERGRSRRIMIVALARKLLVALWRYTTLGELPKGAALKIA

SEQ ID NO: 181638 - protein, 420 aa, unidentified
MRNAGIHANSLLEVRRMYNAVGIDVSKGKSTVAVLQPGGTVIRKLFDVSHTSQNLNELADYLSSLDGTTKIVMECTGRYHEPMVKALSEAGLFVSIVNPHLIKNFGNNSLRKVKSDPADARKIARYTLDNWTELRQYSGMDNTRTQLKTLNSQFSFFMKQKVAAKANLIALLDNTYPGVNKLFDSPTREDGSEKWVDYAYSFWHADCVRKIGLKAFTERYKSFCKKHHYIFQQDKPEKLFNASKELVAVFPKEKTYKLLIQQSIQQLNLASEHVERLRREMNELASTLPEYSTVMGIYGVGKTYGPQLIAEIGDVSRFTHREALTAFAGVDPGVDESGQHKSKSNRASKVGSARLRKTLFQIMTTLLQNAPEADPVYRFLDKKRSQGKPYYVYMTAGANKFLRIYYGKVKECLRNLEQTE

SEQ ID NO: 181639 - protein, 390 aa, unidentified
MIFVGIDVAKDKHDCFILNSEGTVLADVFTIANNRIGFETLLSRIQSCSQGESKIKVGLEATGHYSYNLLGFLLDSGLATYVINPLHTNLYRKSLSLRRTKTDRIDARTIAMMLMSDVDLKSYSNTAYHNEELKSLTRYRFDKVKERAKLKSSVARLVNILFPELEKLVSSLHIAVVYALLSNYPGASYIANANTEELAEILCTASKGRYTKSKTAEIQVAAGVSIGSKMPAKSMELKHTIALIRELDKEISEVESAIDKITSQMDSPIFTIPGIGRHMGAMILAEVGDFSNFASADKLLAYAGLSPSTYQSGQLQNCYAHMEKRGSRYLRYALFNAAKYVCLWCPTFSDLEKKRSEGKHYNVAISHAAKKLVRLIFAMQRSGKAFLADY

SEQ ID NO: 181640 - protein, 344 aa, unidentified
MDNHTQYSGFAGVDLAKKVMQIHFVTEDGEITDKSTKRAEFLDFFRNRGKCLIGMEACGSSQDWARKLEAMGHGVHLMSPKAVKPFVSGQKNDHNDAIGIYKAMFNGVRRVPVKSTEIRDLQTLRRIRSQVAKDRIKEINHVRGLLAEYGIVMGRSVAAFNKGISSALVNLKERGGVSPLVAEELRTTVESIKTKTERQKRLDREIEQLARGCKNYENFLKTPGVGPFTAAMLCVLLCDPDIFANGRQFAAYIGLAPRSRGSGGKNVVIGIPSKFNCDSESRAVFVECAQALTRYKNKSPWIEGILRRKPKKVALIAIATKLARQVWAMANKGESFKQMAILTA

SEQ ID NO: 181641 - protein, 412 aa, unidentified
MEIIHRCCCGIDVHAKSLVVCLIKNGKKQIRTYATMTDDLLVMLDWLVSEGCKQVAIESTGVYWKPVFNILEGMLEVVLVNARHVKAVPGRKTDVRDCEWLADLLRHGLLRASFIPPLPVRELRELTRHRHSLVRDQTAVGNRIIKLAESANIKLAQVASNALGVSGRAMLRALSRGEQDPTKMAGLARGRLQAKEGQLRRALRGKLTRSQQFVLRELLDQLEQLEAAVARVSAEIREQIEESRDPFVNEAVGLLQTIPGVGAQVAEVIASEIGTDMTRFPNDQHLSSWAGMCPGNNESAGKRKSGKTTKGSNYLRAALTQSAWAASHSKATYLAAQHRKLARRIGKKRALVAVGHSILVISYHILKNRASYHELGGDYFDRQNVELQRARYIRKLEALGLKVSVEALSEAA

SEQ ID NO: 181642 - protein, 459 aa, unidentified
MYRKESKSKVDRTMPMVHPNAAAIDVGATMHMAAVGPDHALEPVRSFGTFTADLDQLVKWFVECGVETVVMESTSVYWIPIFELLDARGFAVFLVNARDAKHVPGRKTDVSDAQWLQRLHSFGLLRASFRPKGQIAELRAYVRQRERLLEYAASHIQHMQKALTEMNLQLHHVVADITGATGLRIVRAILSGERDPETLACLRHYSCHSSVETIAKALTGSYRAEHLFALDQALALYDAYHEKASACDARIEAVLKELTIHRDHDHGSAPPVSRRRNRTDQANALAFDVRASLFALLGKDVTAIDGLGPYLSLKLIAECGDDLTSWPSAKHFTSWLGLAPSNKVSGGKMLSSRTRRSGGRAAALLRLAAVTVGRTDTALGAFYRRLSSRIGKAKAVTATARKIAVLFYNAVRHGMDYVDPGASSYETRYRTRVINNLHRRAKAFGFVLHPLEPGAGAVS

SEQ ID NO: 181643 - protein, 341 aa, unidentified
MQIHSVGIDLGKTTFHWVALGAAGKVLVRKKFTRKQLLAYTANMQTSLIGLEACSGAHFLGRALRKQGHEVRLIAAQFAKPFVKSNKNDFVDAEAIAEAVERKNMRFVPIKTDDQLDLQAIHRVRDRLISRRTAVINQLRAFLLERGMVFAQKAARLKAADILENAEADLTPQMRNLINILWSEWRLVEQQIEELNNELERVSANDAGCTRIRQIPGIGPVVATAIVAAIGNDAAFRKGRDFAAWLGIVPRQYSTGGKAKLLGISKRGNVYLRKILIHSARAAVLRIKRDRAPIGTWLDALDARAPKNVVVVAMANELARIAWAVLSSGNDYRPTANAMAA

SEQ ID NO: 181644 - protein, 362 aa, unidentified
MIAQEKQRTMFVGIDVHKDTHTAVGLSPFGEKVFEMNIGNEAEDFISLVEKIKVEANKIGLIPSFGLEDVHSWGERLSSFLVEVGLPVRAVSPILVDHRRSKTTHPEKSDSLDAQGVAEVMIQKIDTLPIYTLSEEAKKAKQIRELSLEREWLVKERARLKNQLHILLHRIHNSGYCIKFKDPFSKKALRYWMRGVPKDTDVILEQRMKRAVRRLLDLREEIQEIEEELETIMKENNQTITTASGCGVVIAAEIIGEIGDINRFHSPGALAKYAGCAPREHSSGKTIRWRKTRSGNRRLNRSFRRMALSQISRSGNDAARTYFKRKISEGKTKAQALVCLRRQLVSVVWMMMKHGTEYRRSC

SEQ ID NO: 181645 - protein, 348 aa, unidentified
MRGAVHMQITTIGLDIAKNVFQVHGIDSNEKVVVRKQLRRSQMLAFFKTLPPCLVGMEACATAHYWARELTKLGHRVRLMPAKDVKAYVKRNKNDAADAEAICEAVRRPTMRFVQVKSAAQQSQLMLHRTRDLLMRQRTQVINALRAHMAELGIVAAQGRDGIKELLKIIASEQDARLPVDAHTSLVVLATQLQALQTMIGSIEKRIVVQHRSNEASKRLATIPGIGVIGATAIAATVPDPKVFRSGRDLAAWIGLVPREGSTGGKQKLGPISKQGDQYLRRILVVGAHAVLKRARQQPEKYPWLTGLLARKPFRVVAVALANKMARIAWALLAKGGTYRAPALTAAA

SEQ ID NO: 181646 - protein, 349 aa, unidentified
MRFYSHQHQFYCGIDLHARSMFLCIMDQAGEVLLHRNYRTNPDALLRAIAPYREDIAVAVECIFTWYWIADLCSREGITFVLGHALYMKAIHGGKTKNDKIDSQKIAALLRSGMLPMAYVYPQGMRSTRDLLRRRLYLARQHAELQAHIQNTNTQYNLPYFEKRIDRRSNRASIGLRFTDPVVRTSVEVDATLMDALHEQILAIERQINAQVPEHDPVAVHLLRSIPGIGKTLALVILYEIHDIRRFPAVGNFISYARLVKCTHESGGKRKTSPNNKIGNVHLKWAFSEAACLFLRRNERGKLYHQRLVSKYGKAKALSIIAQKLGRTVYTMLKRRTPYDARQFFETVG

SEQ ID NO: 181647 - protein, 341 aa, unidentified
MSESALIGIDLGKHCFHLHGQDKTGREVFRKKCSRPQMMQLFGNLPACSVVMEACAGAHFVARELIAMGHQAKLISPQFVRPFVKGNKNDFVDAEAICEAASRPSMRFVTPKTEAQQTLAVLHRLRESLVRDRTKAANQMHGFLLEFGISLPKGLVIMKRLANVLAEHELPVRLTVLLQRLHDHFGYLDEQIKALDKELASQLADDDLGSRLLSVPCVGPITASLLAVEMGDGQQYKCSRDFAASVGLVPRQYSTGGRANLLGISKRGDKNLRRLLVQCARVYMQRLEHQKGALADWVRSLLGRRHSNVVACALANKLARIAWALAAHHTQYEAGPDALNA

SEQ ID NO: 181648 - protein, 435 aa, unidentified
MSSRAYRATRVNDVNWEQIARGKEGLGVTLGVDVGKFDVLVVCRWADGRFERPWRIKNPWEIATLVALVRQVKADRRLVVAMESSGTYGDALRQALGDNGIDVQRVNGKAAHDYAEVFDGVPSQHDGKDAAVVAELAALGKAKPWAYQAADSWEEELAYWVEEMVAQRQMVTLWQGRLEGLLARHWPEASQVLKLSSGTLLRILKRYGSPQALALDAEAAQQLARWGRSLLSPEKIEELLAGARSSVGVRMGQWQQRQIQEYAERALAARQQSDRAQRRLSQLAVGHPVLQAQGKVVGVSTACVLWVSTGDPRRFDSAAAYRKAMGLNLVERSSGTYQGTLRISKRGSARARQWLYFAAMRLVQKCGVRPWYEAKKARDEGDARRVLVAVMRKLAVALYHVGVRGEEFQPRRLFGRIGRRGGKSAECSVASKGPA

SEQ ID NO: 181649 - protein, 349 aa, unidentified
MQSKSQIRSIGIDLGKSTFHLIALGTRSQVVIRKKFSRTQLLEYTANLPSSLIGMEAGVGSHFLGRALREQGHEVRLIPAQFVRPFVKSNKNDYRDAEAIAEAVERENMRFVPIKTEDQLDLQALHRVRDRLVARRTSVINQIRAFLLERGISFRKGPASLRRQMPEILENADAKLSTAMRRLLDFLWQEWKGLQMQLESLNTELEQIASSDPSCVRLQQIPGVGPLVSTAVVSAIGNGAAFKKGREFAAWLGLVPRQWSTGGKAKLLGISKRGNPYLRKMFIHGARAAVLRVKREGSSLGKWMSGLETRTARNVVIVATANKLARISWAVLATGNDYQPLHKAAVFSN

SEQ ID NO: 181650 - protein, 387 aa, unidentified
MPINDHLVQNETAIRSDVASIFVSLELSRSRWLVTSLSPGSEKMSKHLVAGGDGAGLLDLLIRLRDKAEQRAGTPVRIVVIQEAGLDGFWIHRLLATDGIESHVVESASIAVPRRHRRAKTDAIDGAMLLRTLMAFKRGEPRVCSMVVPPRPAEEDRRRIARERRTLIKERVEHINRVKGLLASQGITGYQPMRGGCRERLEELQTGDGRPLPPRLKAELGRALDRIELVRRQIAAVEAERDALVQADDVRARSPAVLLMQLRGIGPEFATVLWMEGLFRNFTNRRQLAAYAGLAPSPWKSGCVDREQGIAKFGNPRLRTTMVELAWLWLRYQPDSALSRWFRERVGSERGRIRRIAIVALARKLLVALWRYTTLGDLPVGAALKTT

SEQ ID NO: 181651 - protein, 426 aa, unidentified
MEEYEYRIYVGIDWATEAHQACVLDCTGRMLAERSFAHTGEAVAGFAQWLHEVAGGEPAQAAIAIEVPRGAVVETLIEHGFHLYAINPKQLDRFRDRHSMAGAKDDRRDAFVLGDSLRTDRARFRRIHLDDPVVIQLRELSRVDEDLGRETNRLTNRLREQLHRFYVQALELCPSADEPWLWALLELAPSPAAGSRLQRKTIERLLRQHRIRRLNAQAVIAALHAPALRVAPGVVEAATEHIALLLPRLCLVHTQRQRCGARLDALLDKLAAVEDDGGQPREHRDVEILRSLPGVGRIVAATVLAEASGPLAERDYQALRTHAGIAPVTKQSGKHRAVVMRYACNGRLRYALYHWARVAATCDPASKTYYTALRQRGHSYARALRSVADRLLRVLIAMLKNDSLFDSTRLRHSTGAVAAQEVTCAS

SEQ ID NO: 181652 - protein, 347 aa, unidentified
MRFYNTQHPFYCGIDLHARAMYVCILNQAGETLLHRNMKTTPEAFLKVIAPYRPDIVVAVECMFTWYWLADLCADEEIPFVLGHALSMKAIHGGKAKNDKIDSQKIAVLLRGGMLPQAYVYPAEMRATRDLLRRRMHLAHKRGALLAHVQNTNSQYNLPALGKNIAYKANRDGVAERFADPAVQKSIEVDLSLVSYYAELLRDVELTILKTAKQHDANTLYLLQTVPGIGTILRLVLLYEIHHIDRFPRAQEFASYCRLVTCAKESNGKRSGTSGAKIGNAHLKWAFSEAAVLFLRDNPAGQKFLARLEKKHDKGKALTILAHKLARAVYYMLKRKVAFDMKRFLND

SEQ ID NO: 181653 - protein, 355 aa, unidentified
MDSKKYIGMDVHKESISIAVMNGTGKIVMECVIETKASMILQFIDGLRGDVHVTFEEGTSAAWLYDLLKPHVTKLVVCDPRKNASMREGNQSDKIDARRLAELLRLNHLNPVYHGEHGLRSLKELVRSYLTITKDLGRVMSRVKAIYRSWAIPCTGKQVYAPRHRAEWLGKIGEPGVRRRAEFYYQQLDALRTVRQEVRRELLAEGKKHQAWKRLCQIPSIGPIRSAVLLGILQTPHRFRTKRQLWTYSGFGIETQSSADHRSVNGQLQRVKKQSSIRGLNRNCNHDLKNLFKGAAIVASSKPGPFQEFYTALLTKGIRPEMARLTLARKIATIALIVWKRGACFDAQHLKPQTA

SEQ ID NO: 181654 - protein, 456 aa, unidentified
MRKNSGSKARTQPLPVIRSHVAGIDLGSREHWVCGPARSDGDPNVRVFGTTTPRLNELADWLLEQGVESVAMESTGVYWIPAYELLESRGIEVVLVNARELKNVPGRKTDMKDCQWIQRLHSCGLLRGSFRPDEAICALRAIHRQWENLIAERTKAVQWMQKALDQMNVQVHRAVTDITGTTGMSIVRAIVAGERDPQTLAAFRHARCKKSLGDFAEHLTGTWRQEHLFNLEMAVAFYDSIQAMIATYEARLQSEIEALEPPERKDQPPPSHPNPAKARAIRRNGEQEAWQTLWRFAGVDLTRIDGISTKTAHVVLTEIGIDLSAFPSEKNFVSWLRLSPRTPISGGKLLSKKRKGMGATRVAGVLRMAALSLSRSKTALGAYFRRVARKKDGAVAVFATARKLATYIYRMLRYGQEYVDIGEQAYEAQFQYRRLQGLKASAKSLGFTLVPELAGG

SEQ ID NO: 181655 - protein, 338 aa, unidentified
MPLYAAIDLHSNNSVLCVLDETDRIVFSKRLPNNLAAIEQALRDCPGQITGVAVESTFNWYWLVDGLQDGGFTVHLVNTCAVKQYDGLKHTGDLDDARHLAHLLRLGILPTGHIYPRAERALRDLLRKRSQLVRQRTSQILSMQNLTARNLGAHAKGNDIKRWQDEDIDAMPLLPEQHLALKANLAVMDCLDEQVRLLESAILKQARPRADFQALNTVPGIGKALALTIALESGDMSRFASAGNFASYARTVNSRRESNGKKKGAGNAKCGNKHLAWAFIEAAHFAVRYDETIRRWFQKKCAKTLQVVAIKAVAHKLARACFHVMKGGAPFDAARAFG

SEQ ID NO: 181656 - protein, 418 aa, unidentified
MKRKKTKKVTYVNEKTLIVAVDIGKSVHHGYMRAPYGKEVNPFPFYNNGHSFQDFWNKICCFQREQGLEKVVIGFESSGPYAEPLCEFIRRKHVTMVQINPMHTKRVKELTGNSPNKTDKKDPRVIADIILLGHALTVVVPEGAAAELRRLTHAREREIKNQTADKNRLQHLMFIIFPEFLTILDVSTKSALYLLKHHPAPEDILSLGFESLCAILKKVSCGQPGKERAQELFKVARNSVGITQGKQSILIEINHLVDRIECEQRFIESLEEMMKKHLGQIPYSQHIHSIHGIGTITTAGIIGEVGDFSEFTTSNEMTKLAGFDLFEVSSGKHKGQRHISKRGRSVLRKLLYYAAVNTVKSHGIMHDKYQQMLNRGKSQTKALIAIARKLLKIIYAIARDKTMYGEQYTNDLKRSVAA

SEQ ID NO: 181657 - protein, 355 aa, unidentified
MNYEKYIGLDVHQATISVAVMDSTGKLIMESILETKASTILEFLGGLRGTLSVTFEEGTWAAWLYDLLKPHGAHVLACNPRKNAALNQGNRNDKIDARELANRLRLNDLKSVYHGENGIRMLRELARSYLTIVKDLTRVMNRLKALYRSWAIPCAGRDVYYTRHRSQWLAKIREAGPRRRAEQLYQQLDMLQHLRQQARRELLSESRKHSIIAKLRQIPALGPIRCALAVALIQTPHRFRSKRQLWKYCGLALETRISGEYVYVQGERRRSKKQLSIRGLNKDHNHDLKGLFKGAATRASVMPGPFQEFYQRSLAKGIKPTMVRLTLARKIAAITLTLWKKGESFDVQKLKSQAA

SEQ ID NO: 181658 - protein, 402 aa, unidentified
MPMLSIGIDVSKGKSTVCGMKPGGEIVYTPFEIQHTREGMSELVSLLRSSGEEVRVVLESTGSYHCPVVAALLENGIFVSVINSLRMKRFCSQSIRKVKTDQIDAMQIALYGLAYWQELQPTKLPEDTYRELQLLARQYYQMTSLLIKAKVDFNAICDQVLPGMQELMNDHAGRHKLSDFVLRYRHTTHILEMGETRFRKDYCKWAEKKGYRNCERMAALIFATAQNGIPVLPNAPSTQIVITEAIRVLHTVEASRDAILTQMQALAKTLPEYSLVREMPCIGDTLAPRLIAEIGDVRRFHSKRALIAYAGIDAPPYQSGKFCANNRHISKRGNRYLRKTGYEVMQSYVMHKPANDPIFTFIEKKRGEGKSGKLAMVAGLNKFLRVYYGKVTELYRSLPAIE

SEQ ID NO: 181659 - protein, 345 aa, unidentified
MQITTIGLDIAKRSFQIHGIDKTGAVVVAKALSRGRVLVFFSKLEPCLIGLEACASAHYWGRELGALGHQVHLIPPAYVKAYLRRNKNDAADAAAICEAVSRPHMRFVEVKSAAKQAARSLTRVREQLISQRTATVNSLRGHLAEFGIIEAAGLARARRLRAVIEDGTDRRLPDLARESLSILVEQIEGLDGKILDLDGRIAAWHKSNEVSQRLASIPGIGTLTAATFAQAVPNADFFRSGREFAAWLGLVPRQKSTGGKPRLGRISKRGDRRLRSLLVICASSVLQSLKRRKQGTAGAPWLARLMATKPPLVVAVALANKLARTIWAVMAHGQAYQPERGFLAA

SEQ ID NO: 181660 - protein, 347 aa, unidentified
MSIYCGVDFHSRQQLVVWCDTNDGEIQIIKLDHSEIEKVREFYSSLHGPVIVGLEATGYSQWFEDLLFELKHEVWIGDATEIRKRARSRHKTDRRDAELILDLLLKNEFPRIYRPNAESRAILQKLRHRHRLVQLRTKAINHLHAIAISAGLSIKSKLMTKDGRRQLNALLLSDTHKQQRDEWLALIDHLTPIIQSLEKELVSIASQEPRVARLMTHQGIGLLTGLAIVHTLGPIDRFSNARKVTAYIGLDPVEDSSGDRKRIGSISKQGSRLVRFLLIEAAQTAAQRDPDLKRFYHRVTQRRDRPRAKVAVARQLLVRAYIQLRDEIDYAEFRRRAVKVDVARLTQ

SEQ ID NO: 181661 - protein, 408 aa, unidentified
MQVVHPICCGLDVHQARLTACLRHVNDAGQVTTEWREFGTIYSELLALSDWLVAQHCPVVAMESTGVYWKPIYHVLVGVVEVLVGNAREMRPRPGHKTDPADARWIAELLAHGLIRPSFVPPPETRALRDLTRTRVGLVQTRTQAKNRVQKVLEDSNIKLASVVSDVFGKSGRQMLQALLAGERDAQQLASMALGRLRRKLPELELALTGQFTEHHGRLIALSLELIDLLERQIAELNEQIRLLIEPLLPQIEQLDSIPGVDATAARDILGEIGTDMSRFGSAARLASWAKISPGNNASAGKRRPGRTGKGNRYLRRVLVQCAWAARKTSTFLGRTFRRLEARLGGKRAAVAVGHKILVIVYHLLWQGTYYEEQRYADQRPNQEERDCKRAITALKRLGYDVTVKRIA

SEQ ID NO: 181662 - protein, 370 aa, unidentified
MEKYKYVGLDVHKETIAVSVAEADGGEVRFLGEVPNTADSLVKLVKRLRKEGAKLSFCYEAGPCGYGLHRQLLDLGQDCQVVAPSLIPKKPGDRVKTDRRDSLNLARLHRAGELTAVWVPDGAQEALRDLTRAREDMKHIQLQAKQRLLGFLLRHGKRFEGKDNWTQAHFRWFEEVKFGQPVQQIVFQEYVDSVQAITRRIAALDEQMESAARDSVFWPVIEGLMALRGVKLITATTIVAEIGDLRRFANAPQLMAYLGVVPSEHSSGESKVRGSITKTGNGHVRRVLVEAAWQYRYPARKTAVLQRRAERASEQVQEIAWKAQKRLCARYRLLEARGKLKVQVCIAVARELAGFIWAIGQTLPQPAARA

SEQ ID NO: 181663 - protein, 298 aa, unidentified
MLPEEQSKRYTYDETGIKSLFKVLKKHRPTLIVMEATGGLEISLALGLCTKGFEKVTAVVNPRQVRDYARAMGMLAKTDKIDAFVLARFARDIRPEVRQRMSVAELGIKELISRRQQLVDMRAAEKNRLSRAFTEKVRTGIVEVIKTLDAQIKAIDHDIDDTIKGNPIYEEKLALLTSVPGIAEKTARVLLFWLPELGTMNRQEIAALVGVAPMNRDSGKYRGKRSIAGGRSFVRHALHMPTLAAATRWNRRLMAFYNHLIAAGKKHKVALAACMRKLVIILNAIMKTRTPYRVTATD

SEQ ID NO: 181664 - protein, 371 aa, unidentified
MTMTRTLQNSATLYLAFELSAKKWKLAFTCELGARPRIRNVEAGDFAAVRQEIEAARRHLGIASAKVMSCYEAGRDGFHLHRWLSREGVSNLVVDPASVEVERRRRKRKTDRIDVIKLLNRLVRHAWGEKVWSVVNVPSEQAEDERRVHRERERLIKERTQHLTRIKALLATRGLRPDKLNESALEQLRDWAGAPLPEHLRRELTRELARLHLLTTQIRDVEREFTNLLNQDTPAAQATKALKRVKSVGMVAAQVLAYEFFGWRQFDNRRQVGALAGMTGTPFSSGQLDHEQGISKAGNRRVRSIMTEVAWTWLRYQRTSALSRWYQDKYAGGNKRQRRTGIVALARKLLIALWRFVDQDVVPEGAILRAA

SEQ ID NO: 181665 - protein, 363 aa, unidentified
MIIIGADYHPGFQQIAFVDTETGDCGEQRLQHREEAEKFYRDLAAQGMKVRVGMEASGHARWFERLLAELNIELWIGDAAEIRTKRVRKRKTDREDARLLLRLMREDRFPQIWVASWENRDLRQLLWHRHRMVQARTRLMKQLQAVALNEGLRCKKKLWREHGREQLESFRLAPWASRRREDLLKLLDQLNPTIAELTQAIEQEAENCPEAGRLMTHPGVGALTALAFVLIIGRAERFQCGKQIASYLGLVPLEDSSGERRRLGHITKQGNALLRFLLVEAAQVTVRTIPQWRSKYFHLAMRRGRKIAKVAMARKLAVRLFWMMRQEWNYEQVQKFGSHVGQPENRHGVQENTELLTGASRSS

SEQ ID NO: 181666 - protein, 323 aa, unidentified
MQGKVSPERSATTPVYVGIDVCKERLDVHIHPLGLTLAFANSAEGIKRLKRSLKAHEVALVAMEATGKFHRAAHRSLHADGFAVAVVNPLRSRLFAEAMGALAKTDRVDCRMLAILGESLKPGAATPQSELMETLQELTRCRDAAVAARTALLNQLGATTARPAAVEIKRQLRAAETAIENLEAEIEALIGAEPRLARRLAILTSIPGVGTVTAIALIVGLAEIGSLSAKQAAMIVGLAPIAWDSGQSRGTRHIKGGRAHVRRALYMAAVSAARCNRALKAFYDRLLVNGKTPKVALIAVMRKLVILANTLVCENRTWEPHHA

SEQ ID NO: 181667 - protein, 409 aa, unidentified
MNKVDIAPFEVFCGIDVGKSLNHIVALDRYDDKPLINRKVPQEEAEIRAALEEAGDFGLALVVVDQFGAFGRLVVGVAKSMDIPVAHMSPRRFRQVAETYGEDKFDEKDAFILADASRTTPRNIEFVGNRAESMAEIKVLSSRRDDIVEERTRCYNRLHDFIHQVSPPLEELFSKRKLHNDLEIRLIARYGGPIGFRQAGRARASTWAAELKYHCVDGPKKVEQVFDVLDRQTVMLPGAAVIEEQIRSIASRIIELLAEEKRLNLMIEQRAKMIPEVDLLLSIPGVGPVYAALIAVEIGDIGRFRDSNHLASYAGVAPRKEESGTSVHKRRKRKGGNRRLKNALMQSSQRSVQCDPLARAYYERKRAEGKKHLQALRALARHRVTVIFAMLNEGTFYEPPVEVDENGRG

SEQ ID NO: 181668 - protein, 414 aa, unidentified
MEVVHPRCAGIDVSKKDAKVCVRVQGGRGRKTTSTVTTWGAMTNQVLALKDHLAEQGVTVAVMESTSDYWRPFYYVLESDLEVLLVNARDVKNVPGRKTDVSDAAWLADLGAHGLLRASFVPPEPIRQLRDLTRARTHITQGRTREIQRLEKLLESAGIKLSSVASDITGVSGRLMLQALIDSNGTADPAVMADLAKRRMRSKIPILTEALNGRFTAHHAFMTRLFLDRIDAHTKDIATLSERIDELMKPFLPARVLLESIPGFSQTIAEVFIAETGGDMTQFPTPGHLASWAGVSPGSNESAGRVKSTKTRPGNRYLKGGLGVAALNQARTTKTFFSAKYRRLARRGPMKALVAVEHAMIVAAWHMLTNGEFYREPGPDYYTRHDPTKTKARAVKQLEALGYDVTLQPAVQAG

SEQ ID NO: 181669 - protein, 341 aa, unidentified
MEQYAGIDVSLEQSSICVVDATGRIKREGKVSSDPQGLIAWFASLGMNLTRIGLEAGPLSQWLYVGLKQAGLAVELLETRHVRAAFKTMPVKTDRTDARGIAELMRVGWFRPVHCKSLAAQEIRAQLTARKLVQSKLFDIEMSLRGILRGFGLKVGPTTPKRFAERIQELVSGHATLEAVAAALLAVHAVLLREFAGFEKRVRQAARSDDRVRLLMTVPGVGAIVGLTYASAIDDPGRFKSSKMVGPHFGLTPKKYQSGETDYTGRISKIGDGSVRLALYEAAHVILTRAVKGSALKSWAARLAKRAGLKKATVALARKLAVVMHRMLADGTPFNAAAAAA

SEQ ID NO: 181670 - protein, 380 aa, unidentified
MRLKGGAMNTIYIGVDFHARQQTICYLTIENGELQLHELKHQNKEEVRAFYAQFQGHVIVGLEASGYSPWFERLLEELGCEVWLGHATEIRRRARWRQKNDRRDAELILDLMLHDEFPRLYLPPLQSREVLRMLRYRQKLVKIRTMGKNSLQALALQSGLAKGSHLFTKAGQQELRAAVMSPAMQWQREQWLQLLEPLNQRLTETMLWLKQQSLADPRIARLRTHPGIGLLTSLCLVHSLEPVTRFRNQRKVVAYAGLEPLERSSAEKIRFLGISKAGSRILRYLVVEAAQVAVRKDEELKRFYQRLAERRGRAKAKIATARKLLIRAYIMLRDEIDYAEFRRRAVAARLVREITKASVPEFVIGQPASAEHRVKVTTTK

SEQ ID NO: 181671 - protein, 407 aa, unidentified
MEILYSRCGGLDVHKDVVVACVRCVSTPVQQEVRSFRTTTSGLLSLAEWLNSCACTHVAMEATGVYWKPVWHILEEDFALVLANAAHIKNVPGRKTDVNDATWIADLLAHGLIRSSFVPPAAIQELRDLTRTRKQLVREMSQHSLRIQKVLEDANLKLGSVLSNVLGRSGVAMLEAIIAGESDPERLADLAQGNARKKRAELIEALRGRVTAHHRTMLKFHLDLIRAIQRTLEEVDAAVGKALTSIHERAQLLTTMPGISDIAAQVLVAEIGVDMSRFPDPGHLISWAGLCPRNDESAGKRRSTRVRKGAPWLKTTLVTAAWAAVRTKGSYLQAQFLRIKSRRGAKKAILAVAASMLTAAFFMLRDGVAYKDLGADHFSRHDKTKTIQRLLRRLSDLGCTVATTQPA

SEQ ID NO: 181672 - protein, 427 aa, unidentified
MSGIETGGQEPAFAAFVGIDWADQKHVWCLQGQDSTKRESGELEHTPEAVEAWVAQLCQRFGNRPIAVALEQSRGSLVFMLAKYEPLHLFPVPSTMSASMRKALYPSGSKDDPRDADVLLDLLLQHRNKLRRLSPDTEATRRIQNLVEERRKLVDEKTEHTNRLASHLKIYFPQMLNWFEHLDTELVCALLERWPTLEELQKVPPSKLRKFFGKHHCRNQELAEWRILAIRQSIPAIRDRAVIEAKSAAVKVIVQLIRILLEGIADLDERIEEAAAAHPDFFIFKSLPGAGPALAPRLLAAFGSQRERYRNAGEVQTYSGIAPVMEKSGKKQWIHFRWACPKFLRQSFHEWAGHSIGYSVWARAYYRQQRGKGVDHHGAVRALAFKWIRIVFCCWKERVAYDENRYLAALTRRGSPLVAVVAIAKAL

SEQ ID NO: 181673 - protein, 402 aa, unidentified
MNCVGIDVSKGKSMIAVMRPFGEVVVSPFEVRHTANELSELAGLLKSLDGETRVVMESTGNYHAPVAWLLHDAGLYVSVVNAMLVHDYGNNSLRRAKTDKKDAVKLANYGLDHWLTLPRYVPEEDTRLMLKTCYRQYQQYSKVRTMLKNNLISLLDTAFPDANRLFTSPPRADGSEKWVDFVAAFWHCECVCGLSEKAFTAKYQKWCKKHGYNFSEDKALDIYASACGHFGVMPKTDTTKLLVEQAISQLRATSAALAALKHEMQSLAASLPEYPVVMGMFGVGPTLGPQLLAEIGDVRRFHSKKALVAFAGIDAPPYQSGQIDVRSRSISKRGSASLRRTLFLVMSVILQCAPIDEPVYQFMDKKRSEGKPYRVYMMASANKFLRIYYASVKAYLESLEHD

SEQ ID NO: 181674 - protein, 316 aa, unidentified
MATNVAARIVGIDISKAHLDVYVLSAGESARLDYTDEGLAELTGGLGDPADTLVVMEATGKLEARCAVHCAQAGFQVAVVNPRQVRDYARATGRLAKTDAIDAEMISRFAKAVDLQASPLRSEEEKHLDELVTRRRQIVDMITSKKNRLETTVVKTLRHRIEVHIRWLERELRSADGDISDAIEMSPVWRAKEALFKSVPGVGDVLARTLIAEVPELGSLNRREIAALVGVAPMNRDSGKMRGKQMIWGGRREVRRVLYMAALTASTYNADMSLFHQRLIADGKPWKVAITAVMRKLLVVLNTVAERGTPWEHRIA

SEQ ID NO: 181675 - protein, 348 aa, unidentified
MLHAGLDLSRRRVDYCLLDEGGGRVEVGAAPADADGLGGLVRLIELRHGREPVSAAIESMNGARFVHDTLERCGWEVQIADAQRVKGLAPLACKTDRIDAWVLAELSRRDLVPAIWLPSFAQRGERERARWRMHLVKHRSSLKQRVHAQLMAFGHACPVSDLFGVRGRELLERLDFPDPWRGGVLAAVALIDDLDRQIDALERELRARGADHRYVPLLITVPGVSWVLAYTIAAEIGDITRFASATKLCGYTGLCPRVYQSGDSDRRGPLAKHGPKYLRWALIVAATNASKHPLYRDRYQHTKRRLGRQRGAKVAQIQLARTLTEAIWQMLTRNQPFAPAGAAFPLAA

SEQ ID NO: 181676 - protein, 419 aa, unidentified
MAFKIFRKNCCGLDVHKTWIYACIGITDTNGRTEYKQARFSSFSKGLRELADWLAKYHCFEVCMESSGKYWIPVFNILEKAGLFVTLAHPKYTKPQKGNKTDRKDAKWICDLFMCDMIKPSFIPPADIRHLRDLVRYRFKLTCMITGEKNRAQNCLTVSNLKLDDVFSDVFGKSSRSITEQILAHPGETFDVAPFVDRRCKTPIGEIQAAIDGAVSPEQAVKLRQCLDHIDELEMHIEKVQQEILRLSDKYQAALDLIRTVPGFDKNPMTAIQILSEIGGDMSVFPTAKHLVSWAGCCPRNDQSAGKIKSTRISRAGSYFKPVLVQVASALIKSKNHPEITNRYRRIKARRGHKKAIIAICRMLLTAIWHILSDLKPYTPDGFVEPRPAEKSKVLTTAQALSLLKQRGYVISDSAPALG

SEQ ID NO: 181677 - protein, 409 aa, unidentified
MYDKTKYIYVGLDLHKEQHTAVIMDCFNEKLGEITFENKPSEFTKLITKCKKHCTDSKGIVFALENSYGYGRGLAAWLIERDYIVKDVNPALSYAYRKSVPQYKKNDSYDAQCVARVAINELNKLPDAMSEDMYWTLSQLVNRRANLKTHHIRLKNQLHEQVCVAYPSYKQFFQDIGRPTALYFWEHYPSPRLLRGKTVEELAEELIPVSHNQFSTRKCQIILDAVKADGDTTRDYQPERDEITRGLVKDVRHYVEQLEAVDKSIADFLPRFECPLNTIPGVSDTTVAKLLSEIGDIRRFPNADKVANFAGIAPVNFSSAGKGDDKHSKQGNRRLQGTIYFLAIQMIQLSSKDLPRNPAFYAYYQRQLARGKTKPQALILISRRLISIIYGMLKNKTEYVMPKVQDNLG

SEQ ID NO: 181678 - protein, 355 aa, unidentified
MDRTKYIGMDVHQASISIAVRDAIGKLVIESLIETKAATILEFLQGLKGTLWVTFEEGTSAAWLYDLLKPHVAKVIVCDPRKNALLKTGNKNDRVDARKLSHLLHAGLLTPVYHGESGVRTLRELARSYLTLTKDLTRVMNRLKALYRSWAIPCVGEKVYSPRHRSAWLDQLSEAGVRRRAEQLYQQLDILLQIRRDARRELLRESRKHPAHELLRQIPQLGPIRVALLIALVQTPHRFRTKRQLWAYCGLALQTRSSGEYRFTAGQLQPSNKLPALRGLNSNHNHDLKNVFKSAATHVSTSPDALGDFYRSLLAKGMKPAMARLTLARKMAAIVLTIWKKGERFDPGELKRQTA

SEQ ID NO: 181679 - protein, 322 aa, unidentified
MADRTSYVGLDVHKESIVVAVASGGLRGEVREYGRIANTATALDRLLRKLGGDGTTLRFCYEAGPCGYGIHRRLSGRGHECMVVAPSLIPKRAGDRIKTDRRDASSLAKLHRAGELTAVWVPDAAHEAMRDLVRARLDAVHALRRARQQLSGFLLRQGCHYGRPAWTQLHRRWLAGLKFDQAIHHIVLEDYIQAVEAAAIRRDRLTTQIEAMLPDWSLAPLVAALQTLRGMALVNAATLIAELGDLTRFTDPRQLMAYLGLVPSEHSSGASVKRGGITKAGNSAARRLLIEAAWSYRFPPRLSRELLLRQEKQPKPIRDIAW

SEQ ID NO: 181680 - protein, 344 aa, unidentified
MSHSTIAVDLAKSVFEIAVSNHPGHVSEHHRLSRPRFERFFAERLPSTVLFEACSSAHHWARELQRLGHSVILLPPHVTRPYAMRNKTDRADAKALLEAFRNQDIHPVPIKTLDQHVLATLHRYRSAYIANRTARINTTRGVLREIGIFIPMGASRVVSTVRSLIEDPDSTVPRALRPTLHEACAEISHLESRTHDIEREIQNLARDNPIAERLQTIPGIGLLTSTALVAFVGDIHRFPSGRHFSSYLGITPREHSSGLIRRLGSISKRGDPYIRMLLIQGARSVLWAAKKRKHPNRLEIWALTIERSRGHNKAAVALANKLARIAWAVWSKDCDFEITQEVNE

SEQ ID NO: 181681 - protein, 434 aa, unidentified
MEEVTDEPLYRDRVCGIDIGKAGMVATIRVPSDKDPSRRAAETRSFGTTKREVLALADWLRCWQVPAVVMEATGDYWKGPFYRLEAEGLECVLADAKQAKNLPGRPKRDPSDSRWLAACFERGAVTACFVATPEFRIIRLHTRYRRDLTEERTREKQRAEKLLESAALKISAVLTDLHGVTGRDIMDHLIAGDRDPKALAQLARARARRKISQLEEALEGAEFITAEHAALLTVMLERIDRVTEEIARLTEVTGQLLAPYEEQLAQAESMPGWGRRAAQDAVAETGAGMTRFHTGGHLSSWAGKTPLDNQSGKRRGQSKSKKGNRYLAAITGETAAAVTKTQTREGARYRRLARRRGKAKALVATGNTQLKASQLLADPGMRYQDLGADYYERQRDIRRQISHHVGKLGALGFEVTLCRRPEPDPDETGTTQAA

SEQ ID NO: 181682 - protein, 460 aa, unidentified
MPQKKRNEFRLGSRTRIRVQEVIPVSKSRPYSLVSVKRVEVGVLAVDHRGQACVVGIDVAKLELIGVLRWPDGSFQRPWQIANPGEVGLLVEKLKELSILCPLTVAMESSGTYGDAVRQALGDAQIAVQRVSAKAVKDQAETFDGVPSQHDGKDAAIIADLCGRGKGKPWVMDQGDAVDQEIRYWVRQADWAQRVKQMWGGKVEALLARHWPEVTRLIPGSGATLCKALLYWGSPAALAADPQAAAKLRSFGGHYLADEKIAAIIASAKTTNGVRTNAWAIREIQELAGELTARRKQISDCKRHLRALTKNHKTILAQTPAVGLITACVLWMCLGDPRDYGSAAAYRKAMGLNLVERSSGQYKGQLRISKRGQRLTRKWMYFGALRWMRDAAVKRWTLPKKARDGGKGARAMVGVMRRLALAAWHVAVSGEEFDAGRLFPGAVKRPLDAVKARMMEASVK

SEQ ID NO: 181683 - protein, 331 aa, unidentified
MDEVRRFVGIDVAKVALDVFLGSVGATFSVANDEVGIRELLRQLEPADFVILEATGGLEMPVASALAAAGIAVAIVNPRQVRDFARATGRLAKTDRLDAEALARFGEAVRPEARPLADEQAQALEALVTRRRHLVEMLTAEKNRRARAPKVLHRSIDEHIRWLEKRLAAFDDELGELIRNTPLWRERDELLRSVPGVGKVLSSTLLAQLPELGMLNRKQIAALAGLAPFNRDSGSMRGSRCIWGGRAQVRRVLYMATVAGVRSNPVIKNFYSQLRARGKYPKSALTACMRKLLVILNAMLHNQTPWQTPALTPSISPLSPRLGADTQHGCC

SEQ ID NO: 181684 - protein, 315 aa, unidentified
MYVGLDISKEEIYVGSNLNKSTFKVENNEKGFSKLLEFINSLDSLEAVVMESSGGYEKAVCYFLLENKIPFAVVNPKNVRRYADAMGILAKNDSIDAYVIACFAFAIKPKPVTLLDKDIVELKELLRRREQIIGHISSEKNRGYLTDANIKKSINRVIDFLEKELKIIEYEIDTLLKKRSDLSQKVKVIESIPGVGRVLSSTIIGFLPEIEQISKKQTSSLIGIAPFGKESGKVKKKGKIVGGRFQVRKALYMATISAIRFNKPIKEFYLKLKAKGKPGRVCIVACMNKLIRIIRACLVHNTLWEESYALKQGAA

SEQ ID NO: 181685 - protein, 312 aa, unidentified
MTQIICGVDVSGATLDARIGRDGVAERFAHTTAGIAALAAFCKAHGVGLVVMEATGGYERMPFALLWAEGVPVAIVNPRAVRRFADAMGRLEKTDRIDAGMIAWYAETKRIVPEPPASRTQDRLEALVTRLRQLTELRTAQTNQRRLVKEATVLDGFADLLGCIRRQIRSLEQQVAELIDGDPLWRKLDAAFRSIKGVADRTVARLMADMPEIGTLSSKAISKLAGLAPLAKDSGQRKGPRPVRGGRCQVRSILFVVAEIVRRYDPDFAAFHKRLKDAGKPTKVVRVALAHKLLVRLNAKARECRAQLAIAA

SEQ ID NO: 181686 - protein, 436 aa, unidentified
MTADGATARATKSNKMKDWNEITHYAGLDWARDHHDIVIIDRQGQIVADVRIQHSLEGWKEFGCQIQNYPALAVAIETAQGAAIDQLLQLECTVYPINPLSAKGYRTRKVPSGAKTDRLDAWALADALRLEGQHWKALRPLDPLTQQIQLLCRDEMGLICQRTALVNQLQQALCEYYPAALEAFDDWTRPYCWDFIVRFPTPERLVSAGRRRWENFLHTEKIWRPETASKRLEIFKRAQQFCGSAAVTAAKSLLALSLAKLLQALQLQLDQYRQQIESLFKKHPNHDLFGSLPGAAQTLAPRLLGEIGGDPQRFESTENLQAVAGTAPVSFQSGQIHKVRVRYQCNKVLRQIVHLWAQCSLLRCTWAEVYYRQKRAEGKSHACALRCLGQRLLKILWRMMQTRKPYDADLHARNQKQHGSWVLKLMKPTASVDTTS

SEQ ID NO: 181687 - protein, 320 aa, unidentified
MNQKSFFIGIDVAKTRLDVAVRPTDQQWQVTYTEKGIQELVEQITEFHPTLVLLEASGGLELPMVAALAVANLPVVVVNPRQVRDFARATGKLAKTDALDAQVLAHFAEAIRPLPRSLPDTDTQSLTALVTRRNQVMSMLVAEKNRLRTSRPPVNQRIQLHINWLEQELDEIDQDLKEMLRNSLVWREKENLLRTVPGVGPQLAVSILAYLPELGNLDRKRIAALVGVAPFNRDSGTLRGKRAVWGGRSRIRAALYMATLVASRHNPAISAFYQRSLAAGKAKKVALTACMRKLLVILNAMLKHHSSWQSLNPQLLGPCS

SEQ ID NO: 181688 - protein, 343 aa, unidentified
MEYIGIDVHKREGQVCILDDGAAVMEERRSRFGAVLGTRPRARILLEASTESEWVAQCLEELGHEVIVADPNFAPMYATRSRRVKTDRRDARTLAEACRLGAYRPAHRMSAARRELRAALTARDALVRTRVRYISLIRALLRREGIAVASGSSGAFLRRLETITLPAALQAALAPLVTVLAPLNAAITAADAHITEAMESDAVAVRLCTVPGVGPVTAAAFVATLDDVARFRGAPQVAAYLGLVPQERSSGDRQHRGGLTKAGNARARWVLVQAAWAIWRDRTPRTATLRAWAERIAVRRGKRVAAIALSRRLAGILYALWRDGTAYEPQRVGRRPAMRQVAA

SEQ ID NO: 181689 - protein, 335 aa, unidentified
METLYFLGIDISKKKIDAALTIDGINMYELQAGNDPTAIKTFFSGLKKRFGFPLSQLIVCLEHTGIYCQPLLNYLVNHKVNLCLEPALQIKKSQGMTRGKNDQIDARRIAAYAYKNRQELKFWKPQRTVIQRLKALLVTRERLVNAKVQLEVPLTESQEFIEDSIRRVMVKNCQKTLKALAEDITKIEKTIDLLIKEDEQLNEQMQWATSVPGIGRITAANVIVATGEFQRIREVKKFACYSGIAPFEHSSGSSIRGKTRVSKMANMTIKKLLHLAAMSAIRCSDELKAFYQRKLAEGKNKMSIINAVRNKLISRVFACIKNRRVYQKNYQHALV

SEQ ID NO: 181690 - protein, 469 aa, unidentified
MEKAIGIDPDASGFDCVLVGGETGRPVSKRFSMSAGDLQKFLRWVEEQSPSIVAIEGINGQSGPIEKALREAGVVFHSFRPSDTRNYRRGVLGENKNNERDAEAVALYALSLRERGKLDRWRRVWAVDVELQLLTRRYESVGKQMTAESNRLWKLLRTASPDLYLALQGKLEEVDCEPKKLRNRGFLTLLATRPQIGEWQGLSEDALMEWMGGGEYKGRRAFVRQLQSVAGTFPQLSQPMTLMIRWSAQQLERFGREQTELESMLEKVGQERLTVRTLKRRRGIGTITATGMIGEMVDVRRFPAEDNLASYSGLGKVQDNSGERERMKEALKYNRRLKDLFMSAAMNVVRFDPDSHLAGYHRNLVKRGMQELEATKRVARALVRVIYRELMALIEVDSEATPAAEEQQEGRSGVASGQGRGDKQHLSDTPLRSPRTSKARRQERVNRTTKRRSSGKVVNGRRARLKKSA

SEQ ID NO: 181691 - protein, 344 aa, unidentified
MIYLGMDISSKSFVVHGIDEKKRVLVKGEIEPTRGGLKGLIKGLGSQKKLVIFEAGNQLKWIAKTLKEMEGVEIHVVHPNEIKWINQSSGKTDKIDARKLAHLGRGDMLPRKVHIVEGKIRELRELISARQRLQSKRVALINSIRGQMKQEGHSLPAKFFQGRQWREKIKGIKIGEVQKLIIESFMDSIASLLIAEKKLTDKIGTIKDKGIELLESIPSVGRLSSRVILSALDDVGRFDSKKCVAKYGALTPRIYQSGGITHVGRINRDGRQEVRRVLLQCAHVIVRMRSYGSRPLREFFERIMKRRGKKIAIVAVARKLLTIAYGVLKNKTAYDPLRLTGVSA

SEQ ID NO: 181692 - protein, 404 aa, unidentified
MERPSAGIDWASEEHALCVVDVAGQKLAGEFFAHDEAGIRRLVARMRTLGVERVAIERPDGLLVDRLLEAGFTVLPVHPNALKATRPRYEAAGGKSDGFDAFVLAELARTDAHRLRALQPHFDETRALRALTRTREDLVATRVRLGNELRAQLHAFWPGAAEIFFDVDSSIALAFLERYPSPADARGLGAKRLEGFLARHRYSGRRPAAELLDRLRSAPEGRAGALETEARRGAVLGLVAVLKPIVAQIAELTSQIAGAVRAHPDGQVFLPLFKDPKSTITAARLVAEIGDDRGRYPSVEALAADAGMAPVARESGKRKVAAFRWACDKRLREAVACLADSTRHHHPWAREVYARARSRGLDHPHAIRVLGRAWLRVLWRCWQDEVPYDPTKHGNLRRLQPAGG

SEQ ID NO: 181693 - protein, 418 aa, unidentified
MESERKSRAGEVRYIGLDVHKHYITVGGMNMKQEIVLRPRDVEMERFKIWAEQNLQKTDDVVLEATTNTWDVYDTIAPLVSRVVVAHPAEVKQIANSRVKTDNQDVIRLVRLLIADIVPSVWVPPVEVRELRALISYRWRLVKMSTAIQNRMHSLLHRHNIQAPEGKIGTGENREWWEKLKLSQLETLRLKQEIKTLRLVREHIVEVEAELGKLSTSQRWGDQAVYLMQIPGVGVIVAMTILSAIGDNERFASPKKLVGYAGLGAGVHDSGQMHREKGITKFGRKELRWALVEASWQAIRANPGWRAQYDALCKRKHPNQAIVAIARKLLVTIWYLLNRQEAYDRSSDEELAYKMLTWAWHIEKDALNGMTRQQFAKYGLMRLQRGENLTRIVRGGLPRRIASTEEVLALMPELRELQ

SEQ ID NO: 181694 - protein, 343 aa, unidentified
MQVVTTVGLDIAKSVFQVHGVDAAGQVVIRRQLKRRYVLAFFEKLPACLVGIEACASSHHWSRELKTLGHTVRLMPPAYVKPYVKRQKNDTADAEAICEAVSRANMRFVATKTPVQQSCLTLHRTRHLFIRQQTAVINVIRAHLAEFGIVAPVGRKGIETLLDVVANPTDKRVPVIARACLAALGAQLRRLKEQILEFDRMIMAWHRSNEASKRLDAIPGVGPVLATALVASIADPKAFRSGRNFSAWIGLVPKQHSSGGKDRLGNISKQGDRYLRSLFMAGALAVIRYAKIHGTTHRPWLTALLARRPTKVAAIALANKMARMVWAMMTRGERYKDPIALAA

SEQ ID NO: 181695 - protein, 385 aa, unidentified
MAPPARPEIVIGLDVGKSSHWACVVTREGELLASKPVLNRENAIDGLYAQYPGALVVVDQVRNIGSLALSRARLAGMPRAYLPGLAAHGASRLFAGDAKTDERDAMVIAKTALGIPDALLPVADRPPEIEAARSLAAQRDFLTCENTRSKNRLRSILLESCPEFEAHADLSDPATLKLMAAVGGPWSISEASPQAVGALTRGCGRAKVAALVESVGSSSRPHPAAVACEDRAVRLLARRISENAAEIESLTSEISALLSADETYRCLLTVPGIGPRTASELVISIDIADFPSHDRLASYCGLAPRNRRSGTSISSVSASRQGNKRLKNLLVFSCNCLARSRNRWGGYYARCRDRGMPHGKALKAVARKRLKVIYAIMRDKVPYSA

SEQ ID NO: 181696 - protein, 415 aa, unidentified
MSNRLLVGVDVHRQTNTVCLMDQAGRLLGPRRTIDNNRPGAELLVQQLAQKMAQGDFDAIQIAAEATGWYWWHFFQTLERDPALQPWPLQLYPLNPRLTANFAKTYVDRDHTDVGDAFVIADRLRMGRDLPPPYQLDARYLAVRLLTRYRFHVIHTLAREKAYALSILYLKASEYGRLKPFGNLFGAASRAVLQEFASLEAIAAMPFDDLVEWLDVRGKRRFADPQDNARTLQQVANDSYVLPEALQEPVHQSLGWSLQHVTFLESQVKRLDRAIGEQLECIPHTLETIPGIGPVFAGGIVAELGDVARFEYDQAKVAKFAGFKWKKHQSGDFTAEETHLTRTGNRYLRYYFCEAANAVRMHDREYGAYYDRKFHEVRQHQHKRAIVLTARKLVRLVVRLLTTKQAYQPRRPATS

SEQ ID NO: 181697 - protein, 313 aa, unidentified
MSPNNPNILHVGLDVAKLSLELHLAGHSHALANDAKGHAQLLKRLRPHPHAHVVCEATGGYEQPVARLLQAAGIPVSILEASRVRHFARAQGQRAKTDPIDAAVLSAYGAAFQPRPTPPVSPQQQQLAELAQRRRQLVQLLTNERNHAEHYTDAFRLRQTRRLGKILEQQIAQCDEAIARLIAQDTQLAHKASRLKAIPGVGQVVATTMLAEMPELGTLNRRTAAALAGVAPYNRDSGGQTGRRCIQGGRSAARNALYMATLTAMRYDRILKEFYLRLRAAGKKPLIAMTACMRKLVILMNQLLKNDHFQLAN

SEQ ID NO: 181698 - protein, 411 aa, unidentified
MDVVHARCCGLDVHKKSVVACVLVSESDGLINRQVRTFGTMTADLLALSDWLSSLNVTQVALESTGVYWRPVYNVLEDDERTLLLVNPQHMRAVPGKKTDVKDAEWIADLLRHGLLRGSFIPPVPIRVIRELTRYRKTLVQARADEVNRLQKTLEGANLKLASVATDVLGVSGRAMFAALLDGERDPDVLADLARGRLRAKLPQLRQALVGRVKPHHLVLISQILAHIDFLEQAIAEMQVEIDRCLPPFEKALELLQTIPGIREVAAAAILAEIGTDMSRFPSAGHLASWAGLCPTNKESAGKRMKGPRNRGNVWLRAIMGEVAWASIRTKASYFYAQYHRLARRRGKEKAAVAVAHSLLVVIYHVLSTGRPYQELGVDHFDRLNTAHIQRHHVRRLEQLGYTVTLTPVAA

SEQ ID NO: 181699 - protein, 412 aa, unidentified
MEVVHPIIVGLDVHQKTVVACLRVQKGNRAQRTLRTFGTSTPGLLELQRWLVENGCPCAVIESTGVYWKPVFNILEGSVEVILANAHHVKTLPGRKTDMRDAEWLAELGAHGLVKASFIPPEPIRELRELTRYRKSLIRERSAEVNRIQKILETANIKLASVASDVLGASGKAMLRALIAGEREATVLAGLAKGTLRKKRDQLVPSLTGRFLQRHAFLLGQMLDHVEFMDGQIATIDQELERLCVPFDSEVELLKTIPGAGPRTAQVILAEIGRDMNQFPTEHHLASWAAVCPGNNESAGKRRTGKTRKGNKWLRTALMEAAWAASRSRGTYLQSQFRHLAFARGKGSKKAAVAVAHSILIAAWHILKYHVPYHDLGPDHLRRIDPERTKRNLVKKLEALGYRVSLEEKPAA

SEQ ID NO: 181700 - protein, 433 aa, unidentified
MLKLNYMSTLFVGIDVSSKTNAVYAMDFEENKYISSSFGNNQPGADQLVNMIAECMQKHKNLDTVLIVLESTSVYSVHISNFLSTSEVLMPYKPYVFCVNPKATSNYRKSYIGMEKTDPTDAYLIADFGRVGRTKKLEPWRGGQFIALKRLTRHRMHLSECITREKTYMVSNLYLKFSELQLLEGDDKPFGSLYGATSSAVLTEFLSPQEIIDMPEEELLTFLAGKSRNRISDLSKTSELLRKAARDSYRLDKCMYEPLSISLASSFNCIHAYQKEIKLIEQAIEKCINGMNPNALLILQSIPGIGPIWASGILSEIGDITVFHSSDALAKYAGLYWPKGDSGDFTSEDNKMSKAGNPYLRCYLGEAANSVRKHIPEYADFYARKYAEVTKHQHKRALALTSRKLVRLVFGLLVKNQLYTGEKLDTEYNIESN

SEQ ID NO: 181701 - protein, 457 aa, unidentified
MPARGKQPRSGAGSPAHTIDPNAAGVDIGATEIYIAVPTDRDPHPVRKFSTFTEDLLAAADWLKQCGIMTVAMESTGVYWIPLFQILEAGGMKVCLVNARHVKNVPGRKSDVCDCQWLQHLHSAGLLRASFRPEQQICAVRSLVRYRDSLVQLSAMHLQHMQKALDQMNLQLHHVISDLGGKTGMAIVEAIVAGERDPHQLATLRDPRTRASKETIAKSLVGDYRREHLFTLRQSLTGFRQNGQLIADCDVEIESLLKEFSSGDGPGAEAVPEPQAELKRKPRRNEMNFDLRTQLHRIFAVDLTEIPGIDTLTAHTLFTEVGRDLSKFANVAAFTSWMGLCPDNRVSGGKILHAQTRRVNNRVAKALRMAAQALSRSHGWMGQYYRRMRAKLGGPKAITATAHKLARIIYHLLTTGQAYDETVFAQQEAQNNQRNEKRLRRQARKLGFELTLIPTEV

SEQ ID NO: 181702 - protein, 422 aa, unidentified
MTQSTTRTDIVHSSRALYIAMDLGRDSWQLAISDGGKTIREVKVVRKDVDAAKTEFMSEVAKARVKFSLDADAPVHALYEAGRDGFWIARWLESVGIPCLVIDPSSILVDRKAKQRKNDAIDARALLDLLVRHVTGDREVSIVAVPPAEIDDQRELGRVIRKLGRTRRSLANRVRSVLWRYGIDEGYHADLAKKFPEMRTGDGQPLGPVTRLELETLCGQILGLDADLQRLEDERVAQLKKPVTRAQLQARDLERLIGIGPIGAWTLAHEVFSWRTFANGKKLGAYAGLAPTPFCSGQMQRDQGISKAGPRELRALMVQLAWLWIYHQPESALAKWYKERFGPTAKRSRRVGIIAVARKLLIALWKYTMTGEVPEGARFKPLSHPIVAPLQNGARRVRLSVQRGEPTVKPARVPGPRMKQAA

SEQ ID NO: 181703 - protein, 352 aa, unidentified
MNVMHERCAGLDVHKETVVACRRVMEGARVVREARTFATTTRGLLALADWLREAGCTHVAMESTGVYWKPVWHVLEGELELVLANAAHIKNIPGRKSDVNDATWIADLLAHGLIRSSFVPPGPIQELRDLTRTRKQLVREVVQHQQRIQKVLEDANIKLDSVVSDVLGASGRRMLRAIIAGEENPDKLAALGNEHLKASRQTLAEALYGRVTRHHRFLLKQHLDMVEHLEKSVGEFEAQIEAALQPFRPIIERLVTIPGVSATAASVIVAEIGVDMQRFPTAGHLISWAGLCPRLNQSAGKVKSRTCATARRGSRPCWSNRLGLPAATKTPICARSFSGSNRGADPRRRSWR

SEQ ID NO: 181704 - protein, 444 aa, unidentified
MLRFVGCDVHKRTAVFTILLEDGTLFATYTVPVTREALTAFAERQLTGEDRLAMEATTNTWAVAGVLRPLVKEIVIGNPLKVRAIAEAKIKTDKVDSRVLAELLRCDYLPRVWQPDAETQRLRRLTHRRAALVSDRTRLKNRLHSILHHCLIPLPECDLFSKRGMAWLRETPLAEEEAQARDSDLRLLEQTELEIVQLDERLVREAWQDEKVRLVMSIPGIDYTVAQTCLAAIGDVSRFANGKKLAAYLGLNPSTRQSGGHCYHGKITKQGNAHARWLLVQAAQHLGQYRGPLGQTMRRIIQRKNRSVAVVACARKLAVLLWHVLSSGEPFRYAQPKSLQAKYARLRVRATGRRRRGGVAKGTPRSAQYGHGRTRAVPSLPQVLAENGLREIAPLAKGERVMLERKRMDGFYRELQSSSRIEANTTKPQTEETEEDFKSELTQS

SEQ ID NO: 181705 - protein, 356 aa, unidentified
MTKALMAGIDLHSNNLMIGIVDQAGKRLKHQKLACDFEQVDQFFKPLKSRLKSLAVESTFNWYWLVDGLKERGYPVVLANPAGIEQYSGIKHADDKNDAYFLAELQRLDILPTGYIYDAQQRPVRDLLRRRMSLVQQRTALMLSFKSLYARTTGQPMSLSRLKGLEPGQAGALYEHPANQLIAQLQKEHIEGLDKSIGRIEQTVLQSARQLPYYDQLNTLPGVGRILGMTIAMEVGEIERFKTPGQFASYCRAVDAKRRSNEKNKGWNNRKCGNKYLGWAFVEAANFARRYDERSRRWYDCKAAKTNTIVATKALACKLAKAAWHVMAQKVEYDAERVFGRAAESQRKGLVKALQD

SEQ ID NO: 181706 - protein, 421 aa, unidentified
MKFKAQDKQNQLIENISSFHLVVGVDIAQETHVARAVSFRGIALGSPFEFGSHGEGFRLFKRWIQDLLKSYKLNKIIVGMEPTGHYWLSLARWLLDQGIEAVLVNPHLVKKNKENRDNTPSKSDRKDALVIADMVKNGYYSPVRFNPEAYEELRILMANRDTVTKRLNSAVNQAHRRVDIVFPELRQVFKILTCTSSIATLRLFPLPKEISLLTTEQVITGWKKHVKRHAGLRRAELLITLAKCSVGTTKALRAHKLHLGQLLEEYDLAQRQLEQIEHEVHLVLERIPYAQKLLTIRGVNVTSLAGVLGEAGDLSGYAHGNALLRHTGLNLAEASSGKWRGKMVLSKRGRPRLRRFLYLMTMCMVMTNPDVRALHHHNVDVKKLKKMKSIMKLCGKVARILVGLAKSSEAYRSAKVFPQAA

SEQ ID NO: 181707 - protein, 370 aa, unidentified
MMNATTFVGLDVHARSIKAVALDAMTGEVRSATFGYDACAVAEWARSVDLAARCVYESGVTGFDLQKRLAALGVDCVVGAVSKMIKPAADRRRKNDRNDAEFLARMLSVGNVVEVWVPDDECEAARDLVRALDDARDDLKRCKQRLSKFLLRHGHAFSETTPSGRRKGNWTAAHWAWIKSISFAEKADDDVLAYYIDATRQAMEDKARLERLVEAEASKPRWKRRVDSVRCLKGIDVMSAADLVFEAGEFSRFKNARSFAAWIGLTPSEHSSGESVRQGGITKAGNKHLRRVLVESAWHYLGCSPHSKDLAKGQAPDPGARHHAAKGVRRLVGRRAAMLERGVHKNKANVATARELACWCWAIGCMVENG

SEQ ID NO: 181708 - protein, 330 aa, unidentified
MPTYYLGLDVHKVRTQYCLMDPAGEILAEGSLPTEEVATVVPDDCACVLEATGSWHHTYDALCSCAAEVKLAHPSHVKAIASARVKTDKIDARILAHLLRTDLVPEAWAPPAEVRELRDLVRLRWRFIAQRTSAKNRVSNLLARQCLRFEGSDLFGRAGRAWLASLALDAHSRTLIELLLATIDEADGHVCALTALLRERLRGTPEVALLETIPGVGFLTAATLVAELGDPRRFTRAAQVSAYFGLVPRVRASADVAHYGRITRAGSPHARRALVEAAHVAVRLPGPLRDRYLERARRRGKKVALVAAARELLELSWTLLDRGEVYRAVA

SEQ ID NO: 181709 - protein, 344 aa, unidentified
MQLHTIGIDLGKTVFHLVGLDQRGEVVVRKKFSRSQLLRFTSNVRVELVGMEACAGAHFLGRALREQGHEVRLIPAQYVKPYVKTNKSDFIDAEAIAEAVGRPTMRFVPIKTDDQMDLQSLHRVRQRWMVRRTAVVNQIRGLLLERGITIRKGRSHLEAALPTILENAELNLSAALRSLLAQLKVELDQLTLRLEETDTLIQQISQDNDACQRLDAIPGIGPLAATALIAAIGNGAAFRKGREFAAWLGLVPREHSTGGKQKLLGISKRGNVYLRTLFVHGARAVLQFQHKQSPGLKAWLAQLTSRVHFNVAVVALANKLARMAWAVLTTGEFYRPPLLAAGSA

SEQ ID NO: 181710 - protein, 412 aa, unidentified
MLFIGDDWAEDHHDVELVDDDGQVLARRRLPEGIGGIAGLHALIADHLPEDWIELEPEQVQALVKVGIETDRGPWVAALVAAGYEVFAINPLSVARYRERHSTSGAKSDAGDAHVLAEIVRVDRTHHRPLAGDSQEAEAIKLVARTHQSLIWERSRHVLRLRAALRDFFPAALEAFPDLDAPDALELLAAAPDPARAGRLNRRRIIAALKRANRRNIEARATELVQVFGAEQLCRSEPVEAAYAAIVASQATIIATLNTQIEQMAAVVEAHFGQHPDAEIYTSQPGLGVVLAARVLGEFGDDPHRYTDAKARKNYAGTSPITRASGKKKIVLARYARNRRLGDAVQQWAFCSLRGSPGARAYYQQLRARNIGHQAALRQLANRLVGILHGCLKTHTRYDETTAWSHHLTSAA

SEQ ID NO: 181711 - protein, 412 aa, unidentified
MEVLYPHCAGLDVHKDTVVACVRHMATGSVEREVRTFKTTTKDLLALSDWLAEHGCTHVAMEATGVYWKPVWHILSDGDFVLVLANAAHVKNVPGRKTDVNDATWLADLLAHGLIRGSFVPDEQTQEMRNLLRTRKQLVRECSRHIQRLQKTLEDANIKLDSVISDIMGLSGRAMIEALIAGESDPQRLAQLAHRRIKAPPEALCEALRGRVTRHHRFLLRLHLKQIDAVNVAIDDIDQEVDAQIEPFRTTIQLLITIPGVSELSACVMLAEIGHDMNRFPTAAHLISWAGLCPKNDESAGKRRSTRMRKGAPWLKTTLVQCARAAARKKASYFQAQYHRLRARRGDKKAIGAVAASILTTAYHMLKYGTLYEDLGPDYFDKRGKGKHVHRLINRLQNLGFAVQITPVEAAA

SEQ ID NO: 181712 - protein, 350 aa, unidentified
MENIAFDSHKRYTLCSVMDEKGSFLKETRIEHKRGEIIEFLRRFTPGSPVAVETIGNWYWIVDEIEAAGMHPRLVHARKAKLLMGSYNKTDRLDARGLNHLQRVGSLPDVWIPPGEIRDKRDLPRTRMYLVNQRTCLKNRIHSTLDKYALGITGVSDIFGPKSRDLLNDRLGQLPDHTGYVAHLQLKQIDSLVKDIKKLDEIMKEVFDEMPQIKLLRSMPGIGFVFGIVIWSEVGDINRFCSPQSLASYSGTTPRVHASGGKVRYGSLRPDVNRYLKWAYCEAANTISINRKLWSERHVARLYTRIRQRKGHSKAIGAVARHLAEATYWILKKMELYKDPALKHVTSREV

SEQ ID NO: 181713 - protein, 351 aa, unidentified
MTTMTSSSALVTGGVDTHRDLHVAAALDQIGGLLGTATFATTPAGYRALLAWLVGFGPVAAVGVEGTGSYGAALARHLSVNEVMVVEVGRPNRQVRRRYGKTDVVDAIAAARAVQSGEATATPKSHDGPVEALRALKMVQRSATKARTQALNQLHALVLTAPEELRGKLRGLNTRALITTCAGFRVRSDDDSLPAMLRLSMRELAQRIQLLQAQKKTVTTRMRTITTDLAPELVAKPGVGPDTATTLLITAGDNPDRLRHEKSFAALVGASPIPVNSGQIQDRFRLNRGGDRQANAALWRIAIVRMSSDQATRDYVARRQAEGKTKSEAIRCLKRYIAREVYNALPKQAIA

SEQ ID NO: 181714 - protein, 352 aa, unidentified
MRRPRHQVTTEEELFIGIDLHKHRWHVTIRTFDVELFSGSIPGNWEALHRILARYAGHQLQAVYEAGYFGFRLHDRLVAHGIPCIVTPPSLVPQEYGNRVKTDRRDSSKLAHLLAKGLLKRVWVPSEEELYHRQVIRRRRQLVRDRVRIQSRIKAELRFYGIHLEEPCGRWTEIYFETVRSVRFGNRWMQESFNRLLEQYEFLSAQISKQTRLLRELSETAMYRDRMAILQTIPGIGVISAMELLLELQDVSRFRRAEQLAAYVGLTPSQYSSADKVRMGRITGIGKNTLRSLLVEASWTLIRKDPAMRDKYDRIKIRSGGKRAVVAIARTLLLRMRRMLLDKQAYALQRAA

SEQ ID NO: 181715 - protein, 435 aa, unidentified
MAMKVKYEDRLKQKVIAITTDTLVVGVDIAKNYQWARFVDFRGIEHDRALKFKNSKGGFETILARIREICKKENFAKAVVGMEPTGHYWKAFANWLEKQEGITVVLVNPYATKQAKELDDNSQTKSDKKDALTIAKLVKDGRYFELYLPHDVYAELRGLSTARTGLNKRKSALKNTITAVMDEFFPEYAEVFKCPLSGKASRHILKNCPFPKFTLALGEGGVTDEIRKAVRKTVGRKKAVQLVKAAKDSIGVDYGEEPARLKLRLMLEELELLEKQTEELEGQMSAALQETDYAEFLLSIKGIGIVTLATCLGELGDPTRFDDPRQMSRMAGYNLVEDSSGKNKSGTKISKRGRKNLRSVLYQMALTMVATNDEMKQLYHYLKTREKAPLRKMQALVVVSKKILTLIHTLAKKKESYDPEKVFGHVRREQLKAAA

SEQ ID NO: 181716 - protein, 360 aa, unidentified
MFCERTSVGLDVHARSVVAAAIDGRSGEVFRARLTPSHADVIEWVGKLPGPCAVVYEAGPTGFGLARALSAAGLRCQVAASSKLLRPAGDRVKTDARDALNSARLLRLDEVVPVRIPSAAEEAARDLVRTREAARADLMRARHRLSKLLLRHGIVYYDGKAWTERHDRWLHHQRFDAAPTQSAFEDAYEAVVLATARRARLDEKITALAADSEFSPLTRRLACLRGISTLTGFALAVEIGDWDRFTGASIGAYLGLVPSEYSSGTSRTQGAITKTGNTHVRRLLVEAAWHHRSTYRPGPVLRHRWDQAPAAARARAHAGNQRLHARWVGLNLRRKPAVIANVAVARELAGWCWSLAVLPD

SEQ ID NO: 181717 - protein, 370 aa, unidentified
MLDTTTFIGLDVHARSIKAVSLDVMTGEVRAATFGYDAGAVAEWVRSVDPKARCVYESGVTGFDLQKRLSGLGVDCVVGAVSKMIKPSADRRRKNDRNDAEFLARMLSVGNVVEVWVPDDECEAARDLTRALEDARDDLSRSKQRLSKFLLRHGLVFDERTPTGRRKGNWTRAHWSWIESIRFAEGADNDVLAYYVDAVRRAAEEKARLEGLVEAEARKPRWRKRVDSLRCLKGVDTASAADLVFEAGEFSRFRNARSFAAWVGLTPSEHSSGESDRRGAITKAGNKHLRKTLVEAAWHYLTCSGRPKDLARGQAPDRGARRHAAKGVRRLVERREALLARGVHGNKANVATARELACWVWAVGLMAEEA

SEQ ID NO: 181718 - protein, 343 aa, unidentified
MKEDTVIGLDTGKNVFHVWEANRRGGARVRRKFSRRKLKEYLANHAPSLIGLEACAGSHHLARWISGYGHTVRLMGTQHVKRYRPGEKNDFNDAAGCWEAVQRPGMRFVPVKTVEQQELCVVHRVRSQAEKQRTAISNQIRGILWEFGITVAQGISPVRRRLPEVLEDAENELTPRVREVLAELGEELRRLDERLAGYTQELKTVAREREDCRRLQTVPGIGPMISTAIVGKVGDGKAFRRGRDYAAWMGLVPRQFSTGGKARLGPITKHGDTDLRTLQIHGSRALLQVCHRRPDDALCRWATELKARKPWNKAVVALANKLARVTWAVHTTGIPYDPKRRIV

SEQ ID NO: 181719 - protein, 388 aa, unidentified
MQIAADRPQASTAIRTDLGAIFVSLELSRSTWLITSLSPGGGEKMSKHSVRGCDVAGLLERFAHLREKARARTGQRFPIIVIQEAGLDGFWIHRMLNAEGIESHVVDPASIATSRRRRRAKTDRIDGEALVRALLAYKRGEPRVCSMVKAPTPEEEDRRRLCRERKVLTAERVLHVNRIKGLLFSQGITGYEPLRRDRRERLEQLQTGDGHTLPDHLKGQVRRELDRLELLLNQIKAVEAERDALLAAERAAARTPAAMLLDIKGVGPEFAAILWSEGLFRHFDNRRQVAAYAGLAPTPWQSGSVDREQGVSKAGNPRLRTTLIQLTWLWLRNQPHSALTLWFHERVRRNGGRLRKTTIVAVARKLLVALWKYVTAGVVIEGAVMKPT

SEQ ID NO: 181720 - protein, 394 aa, unidentified
MKLVGIDVGKNSHHFCVMEKETGEFNVTPTSFSNNKEGFDFLINSLKPYSKKSILIGMEDTGHYHVALLKFLLSNGYTVALINPKTTDLTRKMEGGITKNDKLDTITICDVLDTPERKKQYRITKVDRFDLYEQRQLTRHHHNLKEELNVYCNRLQKSIDLVFPEFNTLFSSKYSIVYMNLLKTFGSAEAIASTDIRTIRKCFEIKGRGNRISLTPEKLKECAKNSIGISSEVETIQIKHLVSQITLIKEQIAEIDKKIEEFSITNNSPILSIPGISHFSGTSILAELGDIGNYSKPSQIIKFAGVAPYHYESSQYNAQHTGITKKGSKYLRKTLYQIILTVINNNPVFKKYYLLKISQGKGHRCAQGHCIRKLLRIIYHLLETGQSFDPALLR

SEQ ID NO: 181721 - protein, 464 aa, unidentified
MTAGKKLWRNRKERKEWARRLQSEDPGLEVVHPHAAGIDVGNAAHYVAVRPDRDPEPVRRFECFTVELHRLADWLQSCGVKTVAMQSTGVYWIPLYEILEERGLEVYLVNARHTKNLPGRKSDVQESQWLLKLHTYGLLNNSFQPVSEIRVLRTYWRQRGEHVREAATCIQRMQKALTQMNVQLANVISDISGLTGQAIIRAIVAGERNPLKLAALSDPRVHASREEIAKSLEGNWRPELLFVLQQEVDMYDIYQKRIAECDQRLQKHLASLTHPLPLQPPTQKPKTKKPAAKNAPRFDLSSELQRVTGVDLTRIDGIDVMVAQTILSEVGLDMSRWKTESHFASWLGLCPDNRISGDKVLGRGTRRVVNRAATALRQSANTLMRSRSYLGAQYRRLRTKLGAPKAITAMAHRLARLVYRMLKYGQAYVDKGTEYYEERFRQQQIQLLRKRAAKLGLQIAEIQA

SEQ ID NO: 181722 - protein, 310 aa, unidentified
MAMIVENYIGCDVSKAWLDFFDETSRLHRRIANEEAAISTYVAGLDPSRDFVVMEATGVYDRLLRHGLARAGVAFSRHNPQHTHFYAKSDRQRAKTDRLDAAMLAGYGRRYRPAADPAPCRQTERLQSLARRRDQLVEIRAKQKMVLAQAFEADVVADIEGLIANLDERIAAIEALIKAAIGQAQGQAGAYRLLVSAPGVATVTALTLLAHMPELGRRSPKSIAALAGLAPINRDSGKAVRKRSIRGGRPRVRRALYMAALGAIRANSTFRQAFTAIATRSGSKKLAVVAVARKLLVALNAMIRDQKAFS

SEQ ID NO: 181723 - protein, 334 aa, unidentified
MGKINPKEVLSVWLDVSSKKIDVCFWIESWDIYLQVKNNSEDLMKFTKQMKKLWIKTSIPMVIESTWDLHILAALILTDCWFTVKEINPIITKHYINHNVRGTKTDKTDSKALAKIWIVEWNQLQTFNRPKKFIELWKKISLISSLEKQIHSIKASINSYKKTSENLSMDVWETVKDLGTLVKKFGEQIDKLKKEIEDYEFDDPKSKEIIERLDSITWITKYTATVCFISFAHKKFVSKEAMFAFIWYDPKLKQSWDKNVWVRISKRWNSYVRKKLFQSAFCSIQHCKLFKKIYTSMIEKWKHHFKAVICIIKKMIHIMRSMIKYKTYFNQSVA

SEQ ID NO: 181724 - protein, 327 aa, unidentified
MMFIGIDISKEKIDLSWLRDQLTNKIKTKVFKNKHQDFLAIEKWLLNTTKSAANELVITLEPTGVYHEALMYFLHEQGFNIILANPGKAKKYADALNIIHKTDKSDATMLAHYGCAKHAVVSYWQPDALEVRELKALIRRLDALESNRQREANRLEASEFSNVSARVCQSIKVTIAFLDDEIKQLKSDIDNHIDNEPDLKRNRKLLESIPGIGPVLSRELTYLFAAKKFNKAKEAAAYCGLIPRHNESGKLKGRTSISKLGPARIRCKLYMAAIVAGQWNKTIKRHKLTLINNGKTPMQAVCANMRKLIHICFGVIKNQEAFKLQES

SEQ ID NO: 181725 - protein, 369 aa, unidentified
MSDCITMHVGLDVHKDSIEIATADVRGGEIRHVGRIGGDLPALDAALARLRCPVAGMQVVYEAGPCGYAIYRHLVARGIACAVVAPSLTPRRPGERIKTDRRDALKLARLSRAGELRAIRVPDTEDEAIRDLLRAREDTVRVQRNARHRLKALLLRQDVRYTGKTAWTPAHERWLARVRLPTPAQQIVFQEYVDSVHQATLRIAHFDTVTGDLLPHWTRYPLVRELQALRGVRQLHAAMLVAEVGPFERFDSPRQLMGFLGLTPSESSSDSRRRQGAITKTGNAFARRALVEAAWQYRFPARVGITIARRQGECSETARAIAWKAQVRLCARFRRLQARRMLSTKAVVAIARELSGFVWAIACAEAASH

SEQ ID NO: 181726 - protein, 344 aa, unidentified
MTAISVLGIDLGKNSCGVVGLDKAGAVVLRRRVARDGVATLLAKLPSCIVAMEACCGAHFVGRAAQAHGHQVRLMPPEYVRPYVKARKNDDRDAEAIAEASTRPTMRFVPLKAEEQLDMQALHRARERLVAERTALINQVRALLLERGVVLPRRRRALPLWLDAPVTAGQPDPLSPRLRLLVTDMRAEWAELDRRIGIFDDEFAASARADEAARRVATIPGIGPVNATALVAAIRRRDRVRACARARDLAAWLGLVPKQATTGGKPKLLGITERGSRYLRKNLIHGARAVMPRLAVTDTRLGCWLRALLARAHKNTVVVALANKLARIVWAVLARRDCYQTATG

SEQ ID NO: 181727 - protein, 419 aa, unidentified
MAFKILRKNCCGLDVHKTWIFACIGITDANGRTEYKQARFSSFSNGLRDLADWLAKHGCSDVCMESTGKYWIPVLNILEKTCWVTLAHPKYTKPQKGNKTDRKDAKWICDLYMCGMVKPSFIPPADIRQLRDLMRYRTKLTNMLTSEKNRAQNCLTVSNLKLDDVFSDVFGKSSRSIIQYILEHPGEQFDVTPFLDRRCKRSVEEVQAAVDGAISREQAAKLKECLLHIDQLNEHRENIEAEIIRLAESYPYQLELLRTVPGFSSASLTAIALISEIGVDMSVFPSAKHLVSWAGCCPRNDQSSKKVKSTRISRAGCCLKPLLVQVANAVIKSDKYPECRERYRRIKARRGHKKAIIAVCRMLLTAIWNVLSKLEPYSAKGYLTDKLTEHSVVISKSQGLELLRKRGYIFKDEVATESG

SEQ ID NO: 181728 - protein, 308 aa, unidentified
MKKIITVATAGIGKMQAQGLTVGVDLGDRSSCYCVLNEQGEIVQEEKVATTPKAMRERFAEVPRCRMALETGTHSPWVSRLLSELGHEVIVAHAQRVELIAKSRRKNDRMDARTLARLARIDPQLLSPIQHRSAEAQAHLTVIRARASLVRARTSLINTIRGVTKSTGERLRGCNPRKVGERAQELSPELRHALGPVLSEIDSLSDRIREYDERIRSIAESSYPKVELLKQVHGVGTLVALTFMLTLEDPHRFSKSRDAGCYAGLQPGKRDSGDSEPQLHISKEGNKYLRAMLVQSAQHILGPFGADS

SEQ ID NO: 181729 - protein, 483 aa, unidentified
MAKRKMSTFERLRSGQMNRKQRKQWQLRLNAADPGLAVVHADAAGIDVGNASHFVAVPPDRDEQPIQEFGSWTADLRRMAKWLKGCGIRTVAMQSTGVYWVAVQEVLEQEGLEVYLVNARGTKNLPGRKSDVQECQWLMKLHTYGLLRNSFHPPEEIRAVRTIWRQRDRLVKEAGRAVQQMQKALTTMNVQLANAISDVSGVTGMAIIRAILRGERDPQKLAELRDERIQATEAEIAHSLEGNWREDVLFELRQVVEAYDFHQKQMRACDEQLKKYMKVLPERALPGAEEAEAAKATSGKPRKRRKSKPRRKNQPGFDLAAELQRTMGVDMTAIDGIDVMTIQTVLSELGPDLGQYFPSEDHFASWLELAPRRDVSGGKVIRQRPRKSNNRVANALRMAAESLSRSDSYLGARYRNLRARLGGQKAVKAMARYLACLVYRLLTKGQAYVDRGAAYFEHKRTERDMAILKRKAVELGMQLVPAT

SEQ ID NO: 181730 - protein, 317 aa, unidentified
MVKTSTVVAGIDTAKDKLDVAICGQDLRWQVANSMRGWKQLRAELAKAGVERVGIEATGGYERGVLRHLQAAGFVVLVLQPIQVRAFARLHRQRAKNDTLDAALIAACAAAVERHETAPDQRLTTLADSLTFVEQIEEDIARFKTRLEHIGEPRLKRMVLTDIARLKARRLAQLRLIAKQLRAHHDLAVRLDLVMSVPGIGERTALALIIRMPELGRISREQVSALAGLAPFDDDSGKHRGQRHIAGGRGRLRRSLYAAALPAAFRWNKALISLYTRLTAAGKAHTVALVACARKLLIYANTVVARGTPWLEKTVTT

SEQ ID NO: 181731 - protein, 469 aa, unidentified
MFLTRRSNQQSNSLSKRILRDCLPRLSIRPARNEIQAHSTINFTLRSLKMKAYSVENFAVLIGIDWADKKHDICEHPIDSEKYHYSIIKSKPEALHDWAMDLKKRYPNQKIAVVCELKKGPLIYALTKYDHLTLFTVNPSTVAKYRKAFTPSGAKDDPSDAFVQVEILTLHMDKLSVIEPESASVRSLAQLVEYRRSLVQDNVDLSNKITAALKNYYPQALEWFKEKDTFIFCDFITKWPSLAHAKRAKKQTLLDFFNSHNSHYVHVNEARISSIKSAMPLTGDMGVIEPNQMLVEVLIKQFKVLLKGIETLDKAIKLAYKAQPDKVIFDSLPGAGPQLSPRLLVAFGSNRNRYDNAAELQKYAGIAPVIERSGKKMWTHWRYSCPTFLRQTFVEWAGFTIRYSFWAKAYYEQQKSKGKPHNSIIRSLAFKWIRILFRCWKTNTPYDETKYLEALKRRGSPLLKFAINS

SEQ ID NO: 181732 - protein, 370 aa, unidentified
MKKRITFVGLDTHKNSIEAALADDGRNTEVRLYGTIGGDLASLDKMIRKLQTTGAELRFVYEAGPCGYEIYRHLRAHGFHCDVVAPSMVPKRSGNRIKTDRRDARNLARLYRAGELTAIYVPREDDEAMRDLVRGRQDAIHAQRKARQQLGGFLLRHGSRYSGKCAWTWAHRRWLAGIKMPHPSQQIILEDYIHSVEECTQRVHRLTEQILQLMPDWRMHPLVTALQALRGVAPVVAATAVAEIGSMDRFESPRQLMSYLGLVPSENSSGQSIRRGAITKTGNGHARRALIEAAQAYSYPARISRVILKRQEAVPEPIRQIAWKAQLRLCARFRKLTARGKSRNRVVVAIARELSGFMWAIAKQVPVPQA

SEQ ID NO: 181733 - protein, 356 aa, unidentified
MVQSNKKDFSGQNIAIGIDVHLRTWSVTVLTPSGFMRTHSQKASAKELFEHLNKHYPNGSYHAAYETGFSGFSTYYSLTELGIECTVVHAADVPTTQKEKVSKSDPVDSKKLAKALMRGELGSVYIHSKDSLDDRALVRHRATIVKLSGGIKSRIKHLLYNNGVEYPEEYFRSNRHWTRSFIAWLQNDVRLLSDTRISLDLLIAEILHYRERLLDVNRRLSSLARSDRYAEKYGILMSVPGIGSTIAMSLLTEIDDISRFSNQRQFASFLGLVPMMSSSGDKEYVGEKTFRGNKFLGPKIVEASWIAIRHDAELSAKFGALCARGMKSQEAIIRIARKLSNIIFSVLKSNRRYECR

SEQ ID NO: 181734 - protein, 320 aa, unidentified
MLSFCGIDVSKDRLDVMVLPDEYSSSVPNDPAGWAILVEQLRGFSITAIGIEASGGYERGAVRSLQAAGMPVRQVNPFKLRQFAKASGVLAKNDPLDARMIASFVGIMPTRPAQRTTPAAEQLVEMLAVRRQLSAEKTAAENASRLLEDLMLQRLSRRRIARLAADIELLDKRLVEIMATDATLAHRYRLLTSMPGVGPVLACTLIALLPELGGMSRKQVAALVGVAPYAFESGTLKGRRCIWGGRANVRQVLYMAAMSASNWNPVLKLFHDRLKGAGKLPKVVIVAVMRKMITTLNAMVRDDIAWADRLSGRHSVTTAR

SEQ ID NO: 181735 - protein, 343 aa, unidentified
MEKELYIGVDVSKRWLDLAYYDGVSVDWKQGHIRVDNKESGFLLIGRWLKKIGAGKDSVLFCMEYTGLYCQDLRMWLEKEGFVYGMVNPRKMHRFEPDLGENERALDRIKTDEMDSFRIAMYCEKHCRKIRSQPSHLPAPAYFKLKRLIAERRQYVVQSALYKQQLHDVCDYDTDSSVSRKREELKSLMAHVHQTDAEILSVMEEDAAIKKNYDLLRSVTGIGIVVATETIILTENFTAVTNPRRYACYIGIAPAKKESGDSVRGGCHVSRKGFTQAKADLSMACLKAIQTDANIKSYWQRRKAEGKKGGVVLNAIKFKLVLRMFAVIKRQKPYVEIDGYRKN

SEQ ID NO: 181736 - protein, 341 aa, unidentified
MSIITVGIDLAKKVFAVHGVDDNGKAVLVKPKVSREHLPALVARLPACVIGMEACSGAHHWARLFRQHGHTVKLIAPKFVTPYRLSGKRGKNDAADAAAICEAVRRPHMRFVPVKEEHQQIILSLHRTRQGFVEERTALYNRLRGLISEFGIVLPQKVANLRRDITLRLEELPGYVNQCVGDLLAHADALEVRIGDYDRIIAQAARDDARSKRLMKLPGIGPNTASAMLASLGGGHDFKNGRQVAAWIGLTPGQYSSGGKARLGRITKAGDRYLRSLLVMGARAVLSGLGDKQDRFSRWARSLQERRGYWKAVVAIAAKNARLAWAVLRYGEEFRLKPGAV

SEQ ID NO: 181737 - protein, 356 aa, unidentified
MKYFKDTEEFIKNKKVFCGIDVHKSKWNLCFFSDGEMIERMQINSDYHRLLTHLHTFYHSASSVKLVYEAGFTGFWLCRKLRKAGYHCIVTPPNRVPKTEGKVKTDKRDAAKLARYLCSGILKEVYLPPESIEADRRVERHRLSFVKKKTRIQNQIKSFLYLHDVQRPDFIKRRWSKAYMQWLEALKFDHTADRFVLERMFSNYHHIRDELAAITRQLRRLSRTEPYYKNFKRLTACKGVGLVTAMTYLLELHDLTRFPSADKLSSYLGMTSSQHSSGEKVRLGHITREGNVYARRCLVESAWTVIRFDPHLREKYNRIRAKGTNGKKAIVAVARSLALRLRRCLLDEVPYEVGIC

SEQ ID NO: 181738 - protein, 416 aa, unidentified
MSRFRFGSEVEANLARRSLLLLGQQATLQGDRHMSALPQKSDIIDFMMGWTPRRRHRCAKVEVLSTTLREASVSEVSIIGLDIAKHVFHAHGADERGRVIFSKRIGRGKLLDFFAAQPSCTVALEACGGAHHWARQLTQLGHDVRLIPPAYVKAFVKRQKNDAIDAEAICEAAQRPSMRFVAVKSEEQQAAGLVFRTRDLLVRQRTQLINAIRGHLTEYGWIAPKGPSHVAMLADLIEEDEMANALPEAAHAMFRLMLDLLAGLNGKIADLDKEIARRAREDEVSRRLMTVPGIGPISATAIAALAPPVETFAKGRDFAAWLGLTPLQRSTGGKQKLGATSKMGERTLRRLLIIGSSAVVQQASKRGAPKGSWLEQMLARKPRMLVTVALANKMARIVWALLVKQENYRTPVAAKT

SEQ ID NO: 181739 - protein, 339 aa, unidentified
MYPFYLGIDLHLKRTYMVLMDAKGKVLEKERISNQEITKYLQEKVPRETYAVLEATRNWPFMYDLLNEHVQKVDLVHAKGVRAIANAAVKTDQIDASTLAHLARMNYIPKAYAASKEMRDLRQLLRHREWMVNQRSRAKNRIHAALAAYNLVSPVTDLFGVAGREYLHEMMDKELRPSARQVIEDHLAMIDHLGKCIHSLEKSISLNERQDHIVNLLKSMPGVGRLIALIVLAEIGDISRFHSPKALCSWAGLTPRVRNSDAVVHHGHITKEGSRYLRTAMVRAATVSCRVSPKWYRVHEHLALRCGRRAARVAVARRLLSVIYYMWKRDQPYQENYGQ

SEQ ID NO: 181740 - protein, 332 aa, unidentified
MSNAPSHSPSHSPSTTAVPVHVGIDVSKARLDVCLLPMNHTFSVDNTDDGIARLVETLKRHTVVLTLLEATGRHERRVASELLEAGFTVAVVNPRQARDFARALGKLAKTDTIDAKVLAQFAQLGHARPCEKMPENRLLLDDLVARRRQVTAMLASEKVRWQVPQDKSTRAMIARVIRVLEQQREDLDRRIAQLIESDDDWRNKRELLSSVPGVGETTASQLIADLPELGKLNRQQIAALVGVAPINRDSGMMRGKRSIFGGRASARCTLYMAAFTAVRCNPVIRRFADRLRAKGKPFKVIVVAAMRKLLTILNVMVKENQSWNPRPALQSA

SEQ ID NO: 181741 - protein, 317 aa, unidentified
MSEPVYVGIDVAKETFHVATLPNVLKTQLPNTRKGHRQLSQSLKNHTIALIVLEATGGYERPLTAELLSDSLPVVVVNPRQVRDFAKGMGQWAKTDPIDAQVLARFAQIVKPAPKTHSTPQTAELSELVRRRRQLNDLRTQESNRLLMIHHPKVKKSIQKMIKTLNFQIDEIDRLIREHIDSDANFKNKDRILRSTPGVGPQTSAMLIANLPELGKLNRQEIAALAGLAPWDRSSGKSNSKAHIWGGRKEVRSVLYMAAFTACRFNPVIRALAERLKQKGKAYKVVITACMRKLLIILNTMVRNQTLWTPEKSVKNT

SEQ ID NO: 181742 - protein, 330 aa, unidentified
MKISEVIGIDVGKQALESLMHTNQLPHEFENKPSGLKRLLKWVTNNAKYPKNEILFAFEHTGLYSYPLSVFLTENDFNYIMVPGLEIRRSLGISRGKDDKIDAKKIALYAFRRRDEITPYQLAAKEISEIKRLLSLREKLVKQRAGYQGTLKENERFLKRKDNQVLFSVQEKLINELKKQIAKVEQELNTKINNDQQLKKMYQLITSIKGVGPQTALFVIALTNGFTKFENWRKFACYSGIAPFPNQSGISIKRRTKVSHLANKKMKALLSSCASSSINHNPEMKLYYERRLKEGKHKMSTLNIIRNKILSRIFAVVERGTPYVNTYGFA

SEQ ID NO: 181743 - protein, 274 aa, unidentified
MRGSSLTVFFGIDVAQERLDCAVVVQDRQRPIGQKSFPNTPDGIERAAAWAMKASKSDHFEIHALLEPTAAYHELAARLLAAKGMTVSLVNPAQIRSFAKGMAVLSKTDRIDAVLLARYGCLARPKAWTPPAKPLIELQALLARRNDLEGDLRREQNRYEQARVRGCSSAIKHSFAASIRALKAPWKLLQKAIAEHFAAHEDLEADLKRLRTIPAVGPKTAMRMLALLRSHSFETARQVAAFLGLVPIERQSGRSIRGRPRLSKAGNSRLRAAL

SEQ ID NO: 181744 - protein, 319 aa, unidentified
MQGRENIVKHSFIGIDVSKDRLDVHVHPSGESFSCPNVAKGFKKLGLRLKKLQPAAVVLEATGGYEIRAAYFLYDAGLPVSIVNPRNPRNFARSMGLLAKTDRIDASVLARFAEAVRPKLRPLPGKEAQLLHELVARRCQLIEMRTAETNRLHQARDKRIERSIKQIIKALDKQISNTDEEMKRRIQETPIWRVKDDLLQSVPGIGPATATCLIAALPELGELNRREVANLVGVAPINRDSGRYRGRRMTGGGRPQVRKALYMATLVATRHNRVIRRFYQRLLTNGKKKKEALTACMRKLIVILNAMLKSNTPWRRNIT

SEQ ID NO: 181745 - protein, 419 aa, unidentified
MSFKILKNNCCGLDVHKTWIFACIGITDSHRRTEYKQARFSSFTKGLQELCDWLAKYNCTDVCMESTGKYWIPVFNVLEKNNIWVTLSHPKYTKPQKGNKTDRKDAKWICDLYMCGMVKTSFIPPADIRQLRDLVRYRFKLTCMITSEKNRAHNCLTISNFKLDEVFSDIFGKSSRSITEQILQHPGETFYVAQFVDGRCKTPIEEIQAAVDGAISTEQAVKLRQCLNHIDELEKHQAEIEREIFRLSDKYEEVLNLIRTVPGFDKNPMTAIQVLSEIGGDMSVFPTAKNLVSWAGCCPRNDQSNQKIKSTRISRAGSYFKPVLVQVANALIKSKKHPEFTTRYRRIKARRGHKKAIIAICRMILTAIWHILTDLKPYTTEGFLESRPVNDSKILTTSQALNLLKQRGYVIKDDIVSVP

SEQ ID NO: 181746 - protein, 300 aa, unidentified
MREGLRLARGSDVFLGLDISKISWHVTARAGGETLLSASFPPRKEALSGLLARLKGCRVHSAFETGPFGYGLHDWLRSDQVDSMVVSAAQVPGEIGNRVKTDRRDGFKLARTLEGGLLRPILVPEARQRADRELVRQRHRVQRDRCSAMVRIKSFFLTYDIEVPEEAGEHWSGDFEAWLGGLELSDRSLDRVLEELRGLYFDLDAGVDGLTKELRQMARSSDYAPMVELLSTVPGIGWLTALTLAVEIVDFRRFPDGEALSSYAGLPPPNTPAATGSITVTSPARAIRSFATSSWRAPGS

SEQ ID NO: 181747 - protein, 322 aa, unidentified
MQRKSKSRNKGYNVVGIDVSKASLDICILPEGICLHLANDKQGHDDLIRELLNKTISCVAVEATGPYHVRLHQELDNAGFPVAVINPYRSWKFADICGRLAKTDRIDAEMLARFALHIDPPTMPAPTDLMIEINGLVHAREALITDRTVLKNRIESTSLQQLKVLFKKRIQDLTADIEVLEFDIIALIKNDVNLERRFQVLLSIPGIGVVTAMTLIAAMPELGHATGKEIAALTGVAPMNWDSGLMRGKRSIRGGRHAVRKALYMPALSVATRGETPFSKSYQTLIKKGKPFKVAITAIMRKLIVLANILIRKNVMWDPELA

SEQ ID NO: 181748 - protein, 354 aa, unidentified
MKYFAGLDVSLEETAICVVDEVGRMIKEARATSEPDALHVTLASFNLSFERVGLEACSLTAWLHGELRSAGWPAICIESRHAKAAMGAMPNKTDRNDAHAIAQIMRTGWFKAVHVKTPICRSWRSLLVARRAVLNEMRTIENVVRAILRETGLKLGTPARKDFIVRARELIAGEQTLASMIEPLLEILGTMLREFARLTKQVLTIVRDEPICRRLMSAPGVGPLTALAFRATIDRPERFRKSRDVGAHLGLTPRRYQSGETDIQGHVSRCGDELVRTALYEAAHSLLIRSKKWSSLRAWGMKIAKHRGMARARVAVARKLATILHRMWIDNAEFRFGQEHNIAPTVKAIAGAAA

SEQ ID NO: 181749 - protein, 398 aa, unidentified
MPIAVGIDVAKEFHWVCILDAATGVPLASGRVDNRPEALDLLVQQIAAHGAGGGQARVGMDVVGGIASLAACVLAEAGFALVHVPGLAVNRARQGTTGGERKSDPADAAVIAEQVRVRAELRPIEPLTELDAEIRLLVGRRRDLVKDQTRRISRMRDLLSSIHPGLERVVDPTNKADLVLLGRYVTPTEIRRAGVTRLTQHILGAGHLRRSAAQALATAAANAAAAQHIRVPGEARAAELVRELATEALTARQRIGRLDTELQEALERHPDAALIRSMPGMGVLLTAEFIAETGGIRRFTRPDHLAAAAGLAPILKQSGKVRYLTRARGGNKALKRVLYQSAFCSLQAPESKVFYARKRREGKRHHQALISLARRRVDVLHAILTTREPYRADFRKAA

SEQ ID NO: 181750 - protein, 412 aa, unidentified
MQTLIERGCGMDVHQATVVACLLIVRNDGRVQKQMRTFGTTTRELVGLREWLLSEGCTHVAMESTGVYWKPIYAILEGTLEIVVANAQHIKKVPGRKTDVKDAEWIADLLCHGLLRSSFVPPKPIRELRDLMRYRRKLVESQAAERNRLLKVLETANIKLANVATDVFGMSGRLMLRAMIVGKATPQEMAELAKGLLRKKIPELQLALEGKLEEHHRFLLELQLQRLEAAEKDLVALEQRIRQKLEPYAAQLALLDEIPGVDWTLAAVIIAELGVDMSVFGSVSQLASWAGVCPGNNESAGKRKSSRIPSGNVYLKSGLVEAANAAARAKGTYLRDKFFRLKARRGYKRAVVAIAHKILVAIYHMLSQQVSYNDLGDLYLDKLNQNHLTRNLVHRLERLGYTVTLTLQQKAA

SEQ ID NO: 181751 - protein, 400 aa, unidentified
MKFVGWDWASTTHDITVLDQTGQILERWACAHTEPDLVQALGHLSRHGHASTLPVIIERTSGLVIDRLLAAGHPVVPVHPTAFHAARPRWGASGAKSDPGDSYKLADYLRTDGHRLRRLEPIEAGLRQLQSLVRLRDDHVAAKTAASNQLGALLDAHWPGPKALFYRLSSQIALAFLTDYPTPESAARLGEARMASFLRRHAYRGGKTPTELLARLHAAPTPPTGLPPHVLARLIGAQIQLLRTLLGTIAELEAEIKGIVTTYPRARLLQQLPGIGHINLAQILAEIGPILDRVDNAEQAAAECGATPVTKASGKTSGVYFRWAANTRARKAITAFAHNSRRQSRWAQHLYRDARTRGKRNPHATRIVARSWIRVIWTCWHTNTPYNPLKHTAEQRATAT

SEQ ID NO: 181752 - protein, 345 aa, unidentified
MLYVGLDLSRKRLDWQALDAAGERVAVGAVPPDRDGLAHLPQRLGDAQVLAVIESMSGARFVHDQLEQRGWEVRIADAVKARGLAPLACKTDRIDCWLLAELARRDLVPEIWLPDPRVRAERERARFRLHLVKHRSALKNRIHAILFQHGIPNGHSDLFGAGGRRMLERLRLPEPWASTVACSLELIDSLDQQIAACERELERLGAEHRYMSLLTTVPGIGWVLAYTIASEIGDIGRFHSPRKLVGYTGLCPRVDQSGERDRRGPLRKNGPTYLRWALIEAAHAGLRWHQPYRELAERLRARHGKKRGSKIAVLEIARRDTEAIWHMLTKNEPFAPAGADLTLAA

SEQ ID NO: 181753 - protein, 310 aa, unidentified
MMLGVDVAKDNLVASDPYGKVRTIANSKDAVGKLLSTLDPGATIAMEATGNYHKLLANAAFSQGFKVIVFNPRDVLHYAKSISPRAKTDQVDAKVIARYALARPEYRPYEPTPAVAQKLLNLSRARVSLVKKRTSLENELRECPELSEYLEPAIDGLCRSVAKLNKELSAVTAKVTEHALMVGIPGVGTLVGAYTLALLMSGEFTRSDSFVGFTGLDVRIRQSGKKTGKACISKRGDPEARRLLFLAARTAANRPGPFQELYLRYQTNGLSKTAATVAVARKIARTLWAIYTNKTPYRVDRVLNQNSERS

SEQ ID NO: 181754 - protein, 347 aa, unidentified
MTTIDYIGFDIHKKTISFCAKAPDGTILEEGTIPALRNKLLAWAKSRPGPWIGAMEATLFTGWIYDLLKPLAQELKVAHPPMLKAIAAAKKKNDKVDARMIADLLRCNLLPQCYMAPVAIRDLRRMLRYRNLVVRQTTRMKNRIAGLLMETGTPYTKERLHGKAYFNELLGSLQEVPRSVVELLKLSRGQVEFFVAIQQRLLKGLREHADLSQRVMRLQTIPGVGEILALSWALEVGEVKRFPSIAQAASYCGLTSAQHNSAGKEQRGPISKQRNHHLQTILIEAAKLAPRYNPPLAAVHERELQRGNRNQATLAVARKLVAYLMAVDKINCVGCVRSRRMAPSAAG

SEQ ID NO: 181755 - protein, 601 aa, unidentified
MSIATPLDRIGVGIDTARYGHRVSFLRPDRQPAAKPMTVLESRAGYQALQERLEQLHHQHPQAHFHVRIDAAGQYAANLEHFLRDLTLPLTLSIGEPKRNKDYQKAHFPKRTTDDTESQAMARFAVVELPSATAAVSADMTMLREVAGRLQAKVKQSTQAINRLHNLVARVFPELANLTDDLSASWVLRLLDKYPTAQRIGQARLTTLQKIPHLAPELAEQLHLVAQQSVACLSGTVAETLVRDLAAQVRHTQHAEEQMRDLLSDAYTALPDSAHQQVVTIPGIGVATAAVLIAQTVDINRFATPDHYVGYFGIFPEENSSGVDKFGNPVPPGTLRMSPKGNDLVRHYLWNAARSAIVHNPAIAALYRRLKAKGKRGDVALGQCMRKLLHQVYAVWKTNRPFDDQQGTGETPNADAQTATVAPAAGQEETTPRVVAGAAPNSAAAPAGNETAVGHKRDVPAEKVVTTANPTVAPTPPTVKPAAPANRPARPKVDFAFLRQQVTMEQVLRHLGLFDTLRGRGLQRRGPCPIHGQPHDKQPTFSAHLGKHIFQCFDANCRAQGNVLDLWAAVQKLPLYEAALTMAATFQLPRNREEERVAGTR

SEQ ID NO: 181756 - protein, 342 aa, unidentified
MQITTIGLDIAKNVFQVHGIDAQEKVVVRKQLRRGKLMAFFEALPPCLIGMEACATAHYWARELTKLGHEVRLMPAKDVKAYVKRNKNDAADAEAICEAVRRPTMRFVAAKSAEQQGQLMQHRTRDLMMRQRTQVINALRAHLAELGIVAAQGDKGVKELLAIVTDKGDERLPTDARASVIVLAAQLEAVQTLIGSIERRIKTQHRANEASKRLETIPGIGVIGATAIAATVADPTVFRSGRDFAAWIGLVPRQDSTGGKQKLGPISKQGDRYLRRILVIGAVSVLRRAQENPGKYPWLTQLLARRPFKVVAVALANKMARMAWALLAHGGTYRAPELAQAA

SEQ ID NO: 181757 - protein, 410 aa, unidentified
MRIIALDVHRSFAQMAILEKGKIRDAGRIDLERSRLLQFAMKLKPDDEIVIEATGNTSAIVRLLSPFVGRVVIANPILVRAIAWAKVKTDKIDAAVLAKLHASGFLPEVWMPDEETETRRRVVAERTQLVSQMTRLKNRIHSVLHANLIPPYKGTLFSKRGRAWLEAQPLAEDQRRVVLRHAGELDRLGGELAQVDKSLAQTALQEPRGKRLMTITGVNVTVALSIVAAIGDVERFSSPEKLVSYFGLNPRVRQSGDKPAYHGRITKQGRAHARSMLVEAAWVISGVPGPLRAFFMRIRDKRGKHVAAVATARKLAVIVWHMLTKDENYIWSRSALLDWKLRKLELTAGYPSLRGGKTKGSAADYSNKSVRESERETIGNAEEVYRRFVATWKQQSPKGRSGAAHEVRRS

SEQ ID NO: 181758 - protein, 428 aa, unidentified
MNYNQNQRLNQLDENILIIGVDVSKDFHVARAQDFRGVEFKKGIKFDNTKQGFAEFEEWKEVLQTENNKTKVLVGMEPTGPYWLPFARWLKKEGYWTVTVNLAHVKKSKELDDNNQAKTDYRDARVIAQLLKDTRFSEPNLLEGIYEELRNAKNIRKVMVNDLKRLKNQMANWLIRYFPEYKKGYANWESESFLYVLDKYKLPSKMAKLDANEVYADVRKKFPRGVGQKKIENLINASKGSIGITEGFRMAEKELDYLLKRYKSLVLDIEDIETTIESLCKDLPEVQKIVQIKGIGMTTASGIVAEPGNIKGYRTPKQMIKMAGLSLTENSSGQKKGKMSISKRGRKDLRKILYQAAVGMIRSNEAFRELYKYYRFRAKNQLTGKQAIIVLVNKLLRIIHTIVVKDIDYDEAKMLGAINHPDEFSFAA

SEQ ID NO: 181759 - protein, 274 aa, unidentified
MSHEKYIGMDVHQATISAAVMDAHGKLIMECLLETKAATIVEFVRGLQGPLSLTLAAWLHELLKPHVDRLVVCDPRKAALMKDGNKSDRIDARKLAELLRTNQLKSVYHGEHGVRTLKELGRSYLTLTKDVTRVMNRIKALYRSWAIPCGGTRVYAPRHRAGWLAKIGEPGVRVRAERLYQQLDVLQPVRQQARHDLLLESHKHPAVKLLRQIPSIGPIRAALLVALLQTPHRFRTKRQLWAYSGFATEIHNSGEYRCVRGNCNATESASRCAV

SEQ ID NO: 181760 - protein, 339 aa, unidentified
MDGLTGEVWRQKLSPDPAGILAWVSGLPGPVKVVYEAGPTGYGLYRHLSGHGVSCVVAAPSKLHRPSGDRVKTDLRDAELLARLLKMDEIVEVTVPSATQEAARDLVRAREDVRGDLMRARHRLSKMLLRQGIVYTGGNPWTGVHDRWLRSQKFDHTGQQLAFDSGYETMIMTGDRRDRLDAAITAMAADSGYTAVTRRLCCLRGVSTLTGFGLAVEIGDWTRFTGSTIGAFVGLVPTEHSSGGSRSQGSITKTGNTHARRLLVEAAWHHAKPYRVPGKTMRDRWELAPAAARVRGHEGNRRLHQRWQTFNARKKKPVIANVAIARELAGWAWSLAVLD

SEQ ID NO: 181761 - protein, 312 aa, unidentified
MPCCVGLDGAKAQVDIALHPAGERWAVPNDASGIAPLVDRLQALHPPLIVREATGGLERAATAAVAAAGLPGVVVNPRHARDCARATGPLAKTDALEARALAHGAAVLRPPPRPRPDTQTQEVRALLGRRQPLRLRRTAAQNRLAGTSARLTKAMAAHMTWRNAGIAPRDDDRETRLRASPLWRDNDDLWQSAQGSGPVGARTLRLERPELGPRTRQPSAAWGGVAPRTCDRGPRRGRRPIWGGRAHGRPGFYMGPRVATRDNPQVQAFYERLLAAGKVKKVALTAWRHTFLTILNAMLKQRTPWQPQEVQS

SEQ ID NO: 181762 - protein, 406 aa, unidentified
MRAIGLDIHRGFCEVAIAEDGDVRPARRIGTAPDELEAFGASLRPGDTVTLEATGNALAIARILEPHVRVVHANPKATKAATRLRAKTDRIDARTLAQLLASGFLPDVWQPDPATAILRRQVSRRAHLVKQRTRAKNQVHAALIRNLVGRPPASDLFGRRGRVWLASVELPADERDGVEASLRSIDFLAVEVARLDAVLAKAVLGSPAMRRLMTLPGVSGTTAATLVAVIGDVQRFPAPGRLVAYLGLDPRVSQSGDDAARHGRISKQGAAIARQVLVEAAWVATRTAGPLRAFAQRIAARRGWNVAIVAVARKLAVIAWHLLSRAEEYAYGRPSRLRLKLRELELRAGRERVQGRSIGLTSSEAERRLERERAEQAEAAYRRLVAERSTSGSGAGDATGARISRR

SEQ ID NO: 181763 - protein, 337 aa, unidentified
MDYFAGLDVSLEKTHICILDRDGTVMHEATAPSSPEAIAAALTGAPACTRVVFETGRMAPMLYHGRVALGVPVICIESRQAYQALKTLATHKTDRNDARGLAHLARTGFFKPVHVKSLPAHAVRALIMARKKLVGQRVTLENQIRGLAVVFGVRLPRGLSPAFVEQVLGMSDGIAGLSGAMRGLVAARDAVLGAIAAIDADMKRLVRASDACRRLMTIPGVGQLTALAFTAAVDDPARFRRSRDLGAYLGLVPRRYQSGEIDYVGSISRVGDRRVRTLLYEAANVMLTRYKGELKLKDWAFAIARRSTMRKARIALARRLAIIMHAMLRDGSRFQPA

SEQ ID NO: 181764 - protein, 346 aa, unidentified
MRYIGLDVHQRQTRVALLDVETGEVSSRSVPTAELPTHLSGLAAELRIVLEAGGNSGFVARELLSCGWEVVVVHPPEARRQLGSRGRAKTDRCDAEGLVQALARGNLDDAVIWLPGPWIADLRELTRTREQLVRHGTRLRVQLRQALVRWGETCPYQNLTGKRATVCLDELEARLRPAPRCVLQSLRRALAGVAAEIDALSAVIEAYVRDHPDVQRLCTLVGVGVQSAAVIVAEIGDIGRFATAAQLRSYSGLVPEVRQSGERRFTGPLTKAGNPHLRRTMVLVAQHFAQSQATRELPMRRWHARLVYKHGPNPAKVALARRLLDIIFAMLRDQTSFDAERYELAA

SEQ ID NO: 181765 - protein, 436 aa, unidentified
MFYIGVDIAKSFNVACIIDDKEKVIKSSFKFKNDEEGFSKFLTLLSSVDTDISNFIIGMEATGLLFENLYLCLKSKGYNVILLNPYQTNRFREFDTMKNVKNDNIDAMMIAALLKSGRYSKAHISEEVYANIKALYRHKASLQDELKKHKRQVFTLLAVVFPEMEQVIKDPFNVTSLALLEKYPTAKHYEYASVDRVLKTFRGIKGNNFNKEKAQKLLDLAKHSVYQGNGADERAYVIRSHIRIIKLLNEELNNIENEMLKLFNQAPILERQEEQEIMDIIDNLRTIPGVSDKTIFALMSECGDLSRFSSQRKFIGYLGLYPTLEQSGNTTSYGHLAKRGAKLAKKALYQAAIAAIRHNDELNKLYRDKVSQGRAKKEAVIIVARKLAGIILAIYKNNVAYNPNRVFTQKKASSVIWLLNSKLLKTFGNYNIDTFL

SEQ ID NO: 181766 - protein, 386 aa, unidentified
MDRTNEALSEGANSYPPGVRQIVNHINHNERFIMNDTTTIAWLGLDAHSKNCVLGHLDDHGAEIKSWGFATKPEQLVQHVKAIPATDKRLMLEESNLARWIGHLLKPHVQQLVVCDARRNRLISHDHHKHDKRDAFALARLLRLNEFKPVWQPAEDQRVLFKRIAKSYENAVQRQTRLKLQIKSLFQHWGLFPAGATVFSRPGRVAWLKQLPFDPLRAQASLLYELLDQALAGQAQFRRLMCQTGRQFPEIQRLSTTPGVGLVGSHLFVAYIQDPKRFGKFSRLSRYCRLGIRDRTSDDKPLGYQQLDRQGIGTLKAISYRAYLQAAKRRTGPVWDFHQLSLRHTGSTTHARLNTQRKILLTLWTLWLTGREFDPKEFFRSQPIDV

SEQ ID NO: 181767 - protein, 343 aa, unidentified
MQTVTTIGLDIAKSVFQVHGVDAAGQVVIRRQLKRRYVLAFFQKLSPCLVGIEACASSHYWSRELQALGHSVRLMPPAYVKPYVKRQKNDMADAEAICEAVTRANMRFVPTKTPEQQSGLMLHRTRHLFIRQQTAVINAIRAHLAEFGIVAPVGRKGVEELLRIVADPNDERVPDVVRACLSALGTQLLGLKERILEFDRMIMAWHRSDQTSKRLNCIPGVGPLLATALVASVADPKTFRSGRNFSAWIGLVPKQHSSAGRDRLGSISKQGDRYLRSLFVAGALAVIRYAKIHGTKHRPWLTALLARRPTKLAAIALANKLARMAWAMMATGARYNYPASLRV

SEQ ID NO: 181768 - protein, 309 aa, unidentified
MTDQQQQQQPTTVGIDVSQATLDVAIYPSGEQWQTSNDDGGIAQLTERVRQLEPTLIVLEATGGYELAAVATLASAGLPVVAVNPRHVREFARSIGRLAKTDALDAAVLAHFAAAVRPPVRPLPDAATRELSALLARRRQLVDMRAAETNRLTHAVERVRPDIREHVRFLDKRIRELDRELHDRLRASPVWRDKDNLLRSIPGVGPVLSTTLLADLPELGTLGHKQIAALVGVAPLNRDSGRSRGKRTIWGGRANVRAVLYMAATTAIRRNPTIQALYTRLTAAGKTHQVAITACMHSEDRVGWCSAPI

SEQ ID NO: 181769 - protein, 346 aa, unidentified
MENCTYVGLDLSKTSTMATAVDPLGHRIRQEKLGVSDEELLRFLGEIPGPKQVVMEACNVWEHTYDAAASTGAEVLLANPLKVKLVSKTTLKTDKVDSEKLALLARLNAIPESYAPSPEQRALRRLVRERVFYHAKWKAVASHTYALLLQKGIPYRPEILTRRRLRGELRVHNIVEVNRGLDTLEKIEEISVPLDREIHRAYLASREAQLLATIPGVGEFTSMTLVAFLCPIERFYSLDAVVKYCGLCPSVRQSGERAFHGRLVWDCNVILKWVLIEGQWNVRLRERKGDVSRVARRVARRGAANDGAVAAARKLVRICAAILRRGTPYQPESPGSSSRQVGHAAS

SEQ ID NO: 181770 - protein, 342 aa, unidentified
MKDMLIGVDLAKNVFQLHGASMTGDVKYRKKLSRGQFFRFMSEQPSALVVMEACGSAHYWARELVKLGHAVKLIAPQYVRPFVKRQKNDATDAEAIVIAARQPEMRFVEPKTADQQARAVLFRARERIVHQRTELVNALRAVLYEYGQVIPQGIGHIKRIEAIVENAEIGLPELVQEECRDLLAQIGEKTARIEKKAKKLAELSRQSETARRLQTMPGVGPLIALAVEAFAPAMQSFRCGRDFAAWLGLVPRQFSSGGKERLGRVSKAGQADIRRLLILGAMARVSWAGRKPPAQGSWLSRMLAKKPRMLVAIALANKMARKIWAMLTKQEDYRDPALAVAA

SEQ ID NO: 181771 - protein, 386 aa, unidentified
MKQNSTRRQSAKQTPKQTPKQSLKQSPKQSPKQSQKICAGPITIGVDLGDKTSRYCLLDDRGEVAKEGSAATTKKGMAQTFGPLKRCRIALEVGTHSPWVSRLLKSLGHEVFVANPRQLKLISQSSRKDDRVDARTLARLLRADPELLRPIQHRSEAAQLDLMAVRVRAALVEARTALVNTARGLAKSVGERLPKCDADSLGLGHLASLSEPLQALLKPLLKQVESLTAEIKARDEQIEQIARTKYPETKLLRQVSGVGPLIALTFVLTVADKQRFEKSRDVGCYLGLRPKRSQSGRSEPELRITKEGDVYLRKLLVQGAHYILGRKGPDTDLKRWGARLAVGGKRAKQRAVVAVARKLAILLHKLWSCGEVYEPLRNNPARQAVA

SEQ ID NO: 181772 - protein, 355 aa, unidentified
MNEIKYIGMDVHQTSTSIVVLNASGRVLTSAVVETQGQALVAFIQGLRGTLHLTFEEGIYAAWLYGLLVSHASRLVVCDPRRNALLQAGSKSDPIDAHKLADLLRLNALRPVYHGENGLGTLKELSRSYLVLVQDSTRVMNRIKALYRSRAIPCAGTKVYLPRQRARWVDQLKEAGVHKRAEFLYRHLDLLSLLRREAKLALLAESRKHTVTRLLRAVPGLGPVRIAVLLAMVQTPFRFRNKRLFWAYVGLGLVTRISAEFALVNGQLKRSGKAPALRGLNPNHQRELKEIFKSAATAAVQRPGPWQQFYQQRVQAGRKPELVRLTVARKLAALTLHLWRKGERYDVKHLKPTAV

SEQ ID NO: 181773 - protein, 429 aa, unidentified
MEEVDDAELVVERVAALDLGKAGLQACVRVPHPQRPGRRMQELRGYGTTTAQLLEMVAWLRQWRVQRVVMESTSTYWKGVYYLLEAEEFDCWLVNAREVKNVPGRAKTDRADAVWLAKVAERGMCRPSLVHPPEIRRLRDLTRYRRALVQDRTREQQRVEKLLEDAQIKISAVLSNLHGVTGRAMMDALIVGERDPRTLAQLAKGQARKKIGALEEALRGFFTDHHATILQMMLDNTDRISAQIAALDARIEEAIDPFSDQAARLAEIPGVDAVAAPELIAEIGVDMTRFPSATHLVSWAKFCPQTHQSAGKSKAKGRGKGNPWLAGTLGRIAFANSRSDTFLGTRYRRLARRRGGQKAIVATGNSILTVVYHLLSDPDASFIDLGPGYYESRINKHRRARDLAIQLQALTDQHIVIRDGKAVITDTAA

SEQ ID NO: 181774 - protein, 412 aa, unidentified
MKKHSNSPKMSEPRSKSQGPVQRDTKEVLAELVGQLRKKLDPKARAASTGEEHQQGRPRPNLNRLTVGVDLGDQWSHYCILGLEGETLTEGQLRTTKQDVAEFFETLNAAGIVLEVGTHSAWVREIICSYGHEVLVANSRSMEGSKRRKRKNDRIDAHKLARLGRVDPQSLHPIEHRSAEVRQDLVMLRARDALVAARTQLINATRGLVKSLGTQLPKCSSPSFAQKVEEVVPAELGNALLPLVGLTVALSDCIKEYDEKIEILAREKYGHTALLRQVKGVGPITALAYVLTLENPQRFVKSRDVGPYLGLVPKQEDSGESRPQLGISKAGDRMVRRLLVGSAHYILGPFGPDTDLRRYGLRLCERGGKNAKKRAAVAVARKLAVLLHRLWVSGEVYEPLRPALPAPIAAAA

SEQ ID NO: 181775 - protein, 432 aa, unidentified
MDEVSDEPLYRDRVCGIDIGKAGMVATIRVASEKDPARRAAETRSFGTTRREVLALADWLRAWQVPAVVMEATGDYWKGPFYRLEAEGFECVLADARQVKHLPGRPKRDPSDSRWLAACFERGAITPCFVATEEFRIIRLHTRYRRDLTDERTREKQRAEKLLESAAIKLSSVVTDLHGVTGRDIMNHLIAGETSPKVLAQLARGRARRKITELEAALEGAEFFTPAHAALLAAMLGRIDRVNADIAPLSEAIEHLLAPYEEQLQQAESMPGWRRRAAEDTLAETGADMSRFPTGAHLASWAGRTPLDHQSGKRAGRARHKKGNRYLAAVTGETAVAAGKTATREGARYRQLARRRGKAKACVAVGNTQLKVYHALLSTPGMRYQDLGVDYYDRQRDIRRQISHHVGKLGALGFEVTLCRIPDPAPEGDQAA

SEQ ID NO: 181776 - protein, 347 aa, unidentified
MEATVNQYIGLDVSLKDTAISIREDGKRIWRGKCPSDPKLLAQMIRKKAPRARRVVFETGPLSTWFYHALTSEGMPAICIEARHAQKVLNETLNKTDANDADGLAQLAEAGFYKAVRVKSFDAMLARTLVAAREQLLNMSTQLGNQIRGLMKTFGLIIPKAKGRVFDGDVRKLLDGNTELAKIVLPLLEAWHDIRKRAADLGRQLLIVARGSQATKLLMTIPGIGAVTAVSYVTAIENPENFRTSRSVGAWLGLTTRRYQSGEVDYDGHISRRGDNRLRGLLYEAATVLLTRTSARTESSLKSWGLKLRERLGFKRAAVAVARKLAVIMHSMLKTGEVFNASAGATI

SEQ ID NO: 181777 - protein, 398 aa, unidentified
MTESSDYESVQVFIGVDVGKDTHHAVAINRSGKRLFDKALPNDENKLRSLISDLKQHGQILLVVDQPATIGALPVAVARSEGVLVGYLPGLAMRRIADLHAGEAKTDARNAAIIAEAARTLPHALRTLKLADEQIAELSMLCGFDDDLAAQTTQASNRIRGLLTQIHPAPERVLGPRLEHPAVLDLLQRYPSPEKLASLGEKKLAAQLCKLAPRLGKRLAADIAQALAEQTVVVPGTNAAAVVLPRLALQLITLRKQRDEVALEVEQRVLAHPLYPVLTSMPGVGVRTAARLLTEVACRAFASAAHLAAYAGLAPVTRRSGSSIRGEHPSRRGNKALKRALFLSAFTALRDPLSRAYYTRKMSQGKRHNQVLIALARRRCDVLFAMMRDGTFYTPQGS

SEQ ID NO: 181778 - protein, 418 aa, unidentified
MNMNAVGIDVSSRKSTVAILRPFGEVVKLPFDVSHNAESLAALAEQIKSIEGESRVVMEHTGRYYEGIAKVLHEAGLYVSAVNPLLIKEYGNNSLRKVKTDKADSMKIARYALDNWVELRNYTPMDTIRYDLKTLNRQFQLASKQKTATVNNLIALQEQSFPGIRKLFDSPVRSDGTQKWVDFAHDFWHVDCVRKESQKAFTEHYRKWCKRNRYQFSADKASAIYALAKSSVVLVQKTSVTKTLVQEAANQLTAISRSVETYRNEMNNLASQLPEYSVVMEMYGVGDSLGPQLMAEIGDVRRFERKQSLVAFAGIDPAPNESGDYCSRSNKTTKRGSPYLRKTLFNIMSVYLQRAPADEPVFQFLDKKRAEGKPYYVYMTAAENKFLRRYYGTVMAYFSKLENLPPVDTDSTGLQCSE

SEQ ID NO: 181779 - protein, 400 aa, unidentified
MSQDYAAFCGLDVGKETHHATALTPDGERIFDAPMPQGEAELRELFTALSEHGLALVIVDQPNTIGALPVAVARETGCEVAYLPGLAMRRMADLHPGAAKTDARDAYVIADTGRVMPHALRPVDVGEEALAELTVLVGFDDDLAAEATRLTNRVRGLLTQVHPALERVLGPRVGQKATLALLAKFGGPVGLKQAGKRRLLTAARKANPRGAEDLVEAIWTALGEQSVVVPGTKAADQVLPKLAASLTDTLDQRAEIAAQVEEVLDAHPLAGVLTSMPGVGVRTAARILLEVGDGSNFPTSGHLAAYAGLAPVTRRSGTSIKGEFPARSGNKHLKRAFFLSAFAALRADPISRAYYDKKRAEGKKHNAALICLARRRCDVLHAMLRNGSFYEPRQPQSKAA

SEQ ID NO: 181780 - protein, 312 aa, unidentified
MDAIIVGIDVSKDRLDVAVRPSGESFVVERSGAGIGELATKLAALAPRVIAIEATGGFETVVAAGLAAANLPIVVVNPAQVRAFAIALGKRAKTDPLDAAVIAHFAEATKAIPRRLPDQTMRLLADLVARRRQIVEMMAAEGQRERRLTDKRLRKSIVRLRRAMEKELAELDGEIDDQVRGSPVWAEKEDLLASVPGIGPVIARTLIAELPELGSLDRRQVAALVGLAPWTRQSGQWRGKSFIGGGRKSVRNALFIAAMVASRHNPTLKLFRDRLVAAGKPKLVALIAVARKLLTILNAILRDKRPWQPKTA

SEQ ID NO: 181781 - protein, 334 aa, unidentified
MTMVTLSVGLDYHPGSVQVCVMDPQGKVLANGTRANCAEELNRVARTFGERIRAAVEVSPGAAHLAHELVTQFGWSVEMAHPGYVARIKQSPDKTDFGDAKLLADLTRVGYLPKVWLAPPEIQDLRTLTRHRAELTAQKRATKLRVRALLRNYRLVGPANAWTKAWLAWLRDEAPLPEHARWVMERHLGEIERLTSEIKLVERRMADVTKDDPFVQFLMSQDGIGLVTAVTLRAELGRVDRFRNAKQMSRFCGVSPRNASSGARQADAGLIKASNPELRRVLIEAAQRLIRFDEHWVDFYKRMRERGKPYCVIVAAVANRWLRKMYHELKTLAA

SEQ ID NO: 181782 - protein, 405 aa, unidentified
MTFILAFDVSKGESYKVLYQDEYCLSEGKITHTQQEFHLLLEEIRSLPDTPEIVFEATRVYSRPLEKFCQDNHLFYSLLNPLEAKKQLEEGSLRSWKTDQADAHQLAQTHWKNQRPIKQLQQSHYLDLRDLSRFYQEIEEKIKRIRMDLHNALQLTFPEVEQFFSSRVTLYALSLIELFPHPAFVLSSSRTKIKNRLMKATRKKISENRAWQKADQLLAYASCAYPAVDSDSIQCQKVRYYAYLLQDLLEQKDQLAQQMIERAQPFEAFQLYQSIPGIGELTAVLLLGELGDIQRFSTSNKLNAFVGIDIRRFQSGKYVGKDHINKRGNPKARKILYFTIRNMIRQQRAAPNHLVDYYYNLKKQPAPKKEKVATVACINKLLKCMYSMVRNHTRYAYAYTASNDQ

SEQ ID NO: 181783 - protein, 444 aa, unidentified
MISKAYRATRVNEVDWDRLARGKEGVDIALGVDVGKHTLWPVCRWADGRFERPWRVKNPEEIPALLALTQRMSAGRKLVVAMESSGTYGDALRQALADAQIDLVRVSNKASHDYAEVFDGVPSQHDGKDAAVIAELAALGKAQPWAYQPASPWEQELAYWVEWMVAHRQILTTWQGRLEGLLARHWPEATEVLKLSSGTLLRVLKYYGDPKALAADPEAAQRLARWGRAFLSPEKIEHLLAGARSSVGVRVGDWQRRQIQDYAEHALAARREAERAQRHLRGLAKGHAVLQAQGKVVGVPTACVLWAGVGDPRKYHAAAAYRKAMGLNLVERSSGQYQGRLRISKRGSARTRQWLYFAALRLVQHCGVRPWYEAKKARDEDDARRVIMAVMRKLARALYHVGVRNEAFQPRRLFGQICRRGGHSAGPRSGARNQPEVEGVSARG

SEQ ID NO: 181784 - protein, 360 aa, unidentified
MTAATAPAPETSTGPDVVIGVDTHKHTHMAVALSANGGWLGSLKLEAKRSGYQELMRWTAEFGSNPVFAVEGTGCYGAGLCRSLQTAGLEVVEVNRPDRSTRRRLGKDDTIDAEAAARSFIAGKATVIPKTGDDLVEMIRMLKVAKDSATDNRTAALNQLHAVVVTAPAALRERLQRLKGKELVECCSGLRSGDISTPLAAAKMTLRTLARRIQQLDQELKETVAQLDRLTMQHCPELRNTYGIGVDISATLVVAVGDNQERLKSEASFAALCGVNPLPASSGKVVRHRLNRSGNRQANCALHRIVICRLQRHQQTRDYVERRTAEGRTMKEIIRCLKRFVAREVFGILRGGPAVRTAPA

SEQ ID NO: 181785 - protein, 386 aa, unidentified
MSRPNDLSRSFSPFDQQRTLVVVIEMSQSSWLVSGIVPGVDRQPLKKLDPDENALLRLLQRWRGEAEGRGASVERTVVAFEAGRDGFWLARWLRSRGIEAHVLHSSSVAVSREHRRAKTDRLDTELLKRAFLGWLRGEREHCKMVAIPTLGEEDAKRPSRERESLVAEQSRIINRVKSALARLGIRGFNPKLRNAAGDLVDLRTPEGEPIPPNTLAAIRRDLERRQLLREQIKQIETARLERLGTAARQGPSAMVRLLACVLGLGVETADMLVHEVLSRDLRDRRAVARYAGLTGSPDESGGRRRERGLARSGNARVRCGMIEFAWRFLRFQKDSALARWYEERTAGMRGLRKKMIVALARKLLIALWRLVREGVVPDGLVLRPAS

SEQ ID NO: 181786 - protein, 315 aa, unidentified
METTTPTTEVTYVGLDIAKDRLDYTVDGIRCDHVPNTPSGHEKLLGVLAKLRGVRVICEATGGYERAVVAALLLAKHEVCVTNPGRVRAFAHAEGLLAKTDRLDALLLRRFGEKVQPRLHAPMDQAAITLRELLDYRRQVSEQLVAVRNRLELAGPVLRARLDGQVTFLEKELTATDQLIQDHIDHDDTLSRKAARLRELKGAGPVLAATMLAYLPELGEIESPQLSALVGVAPIARDSGRSHQARHVRGGRGLVRRVLYMAAVAATRHNHVLRAYYTRLVAAGKPKMVALVAVMRKMLHVLNRLLADPNFVLVQ

SEQ ID NO: 181787 - protein, 337 aa, unidentified
MALYCGIDLHSTKSWVAVLDDQLKVVRERGLKNNLEDIVRLLEPYREEIEGVAVESTWNWYWLVDGLMDAGYRVHLTNTWAAKQWDGLKYTDDRHDARWLAHLLKLGILPEGYIYPKEERPVRDLLRRRAFLVRKRTSFLLSMRGAFECRTGMRTNSNDLKRWEAEDVEAYLDDDVSALGITCLLEPVKVLTAQIRAIEKEALKRARLRDEFAPLLTVWGIGKILALTTMYEVGDIRRFRKVGNFASYCRLVNTARLSVGKRKGSGNRKNGNPYLSWAFSEAAHHANRHHDEARKYFQRKKSKTNGIIAIRALAHKLARASYHVMRDQTDFEPAKLF

SEQ ID NO: 181788 - protein, 348 aa, unidentified
MALTIVEDTRAVTGGAGTHAGMHVGAALDLVGGLLGVGEFPATAAGYARLLGWLGGFGTVCLAGIEGTGSYGAGLARHVTAAGIRVVEVDRSDRQDRRRQGKSDPLDAVSAARAAQPGRARGAPKGRDGAVEAIRALMVAKRSARSERTRTINQARALIVTGPDDLRARFARHTAAGLVSELAALRPRPGATVGYATRIALRELGRRAEFLDGQLGRLDELIVPLVTARAPALLALHGVGPDTAALLLIAAGDHPHRLRSEAAWAHLCAVAPIPASSGKRTRHRLNPGGNREASRALWRIVITRMSSHAPTRAYVERRTKEGLSKKEIIRCLKRYAARQVYRHLRPAG

SEQ ID NO: 181789 - protein, 347 aa, unidentified
MRFYTKQHPFYCGIDLHARTMYVCILDQAGETLLHRNMQATPEALLKAIAPYRDQIVLAAECMFTWDWLADLCAEHGIPFVLGHALSMKAIHGGKAKNDKIDAHKIAVLLRGGMLPQAYVYPAEMRATRDLLRRRMPLARKRGELLAHVQNTNSQYTLPAIGKKIAYKANRDGVAERFADPAVQKSIEVDLALIGYDDELLRDLERAIVKTAKHHDANTWYLLRTVPGIGKILRLVLLYEIHDIARFPRVQDFASYCRLVTCAKESAGKRSGTSGTQIGNAHLKWAFSEAAVLCLRDNPAAQKFLARLEKKHRQGKALTILAHTLARAVYYMLKRQTAFDLTQVLHG

SEQ ID NO: 181790 - protein, 370 aa, unidentified
MGKSVLYVGLDVHKMSVDVAIAEAGSGGEVRYYGRIGGDLEALDKVTRKLQAQGAELRFAYEAGPCGYQVYRHLTGQGWPCLVAAPALIPRRPGDRLKNDRRDALTLARLFRAGELTPVKVPDADDEAMRDLSRAREDAISVERRAKQRTGALLLRHGRRYPGKTTWGRGHWRWLLQQVMEHPAQQIVLQEYLDAVREASARVQRLTGQIRELIPQRRRGPLVAAYQALRGVSLIVAVTVVAEVGDLSRFNNPKELMAYLGLVPSEYSSGASVRRGHITKTGNGHARRVLVEAAWAYRLRARVTRPLLQRQEGLPESIRQLAWKAQLRLCARYRRLLARGKAKQTIVTAIARELAAFIWAIGQAVEPVTT

SEQ ID NO: 181791 - protein, 418 aa, unidentified
MCKVIMIGCDLHDATTVLKVADGPDATVRKGFATSNRSAMIEWVKDFASQRGAVRIVFAYEASGQGFGLYDDLTDAGIECHVLAPTHLPHTTHSRKNKTDDKDALMILDEVRAHVLAGRTLPDVWVPNHQTRDDREIVRLRLEVATQRTRLKNQIRNLAKRSRLAFPDDFTSSGDWSKRSVAWLREVAAGKTGALREGVRTALASLVELYQAMSVRIQALDQAIKRLSRTERYAQSYRKLKLLPGVGTLTAMVFLTELGDLARFANRRQLAAYLGLAPSAFESGERDDRKGHITKQGPQRVRHVLCQAAWAALRVSPEWRAKYDRIRRGSKSRSRIAIVAIMRQLGVEMWQTARSPELDALLDERDALASQKTKKTKKTTSARAPQKGAAPSTPPSPRPRRGEAEATATRKGLARHPE

SEQ ID NO: 181792 - protein, 438 aa, unidentified
MSNKFIFNLDELFISVGIDVGADFSWMSIALPNQQFVGKPYKILHNSIDSLTTAVSKIKEAEELYSLESRIFLESTGIYHYPLFCYLRDKGFNCSVINPIITKNSTNINIRKVHNDRFDSKKAALVGLKPDLKVSLMPSDLALNCRNLCREYYDLMDNRSAYVNKLQGELRMAFPQYLGIFSKVTINTSLTLLETYTSPSAFLKADKQEIIDIIKSTARFGLTYAQNKYNAIIQAATDANQFGYIIDSNIKRIRLYIRFIRKYDEEINSILESLHELVDANEDSDFVKQIHLIETFKGAGFLSAVSIMGEIGDFSAFSKPKQLFAYFGLDPAVKQSGKFEGTKVQMSKRGSAIARRVIHTLTLQSISISRNREAKNPVLREYYLKKCDSKPKLVAMGAVSHKVCNMIFAILRDNKPFKIIAPQEHIKQYNSAKCDIAA

SEQ ID NO: 181793 - protein, 372 aa, unidentified
MNYNTVYVGMDVHKESFSLCTYTIEAEKASHYQRTEADYKKVLNYLEFLRTIYGDDANFICGYEAGCLGYTLYHQLTANNVKYIILAPTTMLEQRSKKRIKTDRRDAEIIAKCLAQHNYSPVHIPTAKDEETKEFLRMRDDHKLALKKIKQQILAFCLRHNYRYDGNSHWTAAHLKWLKALTPEALYKEILDEYLLTYQTLSDKIERLDKRIEELATQDEYKEAVKKLCCFIGVKTHTALSVLVEVGDFKRFASAQHFASYLGLVPGEDSSGDDQNRLGITKAGNRHVRLLLTEASQCYARGQVGFKSKELKSRQSGNTPAVIAYADKANERLRRRYYKMVLNKYKKHNVAKTAIARELACFMWGMMTDNIA

SEQ ID NO: 181794 - protein, 322 aa, unidentified
MEEPTVVGIDIAKKKFDVALLREGKEKSGAFQNTPEGFAMFARWLERNGAERVHACMEATGVYGDDLALYLHGAGHVVSVVNPAKVKGFAQSELSRTKTDKADARLIARFCRTMRPEPWQPPTPEIKELQSLMRRAESLNDMLSQERNRLGTTEGMARNSIERTISHLEEELRITRGLIRDHIDQHPDLRGKRELLESIPGIGPVTSAMILAEFGDVARFQDARSMAAFCGLTPRQHQSGSSVRGKTRLSKTGSSRIRKALYMPALVAMTHNPVIAAFCQRLRAYGKCPMVIIGAAMRKLVHIAYGVLKSGRPFDPSIAMAA

SEQ ID NO: 181795 - protein, 351 aa, unidentified
MFHIGLDMHKKFSRVEVVDEGGQAIDQRVLYHHDQEKIREYFSHIGQDGTVTLEATRNWYWLFELLEEEGLRVKLAHPSKVRLIAEARIKTDSIDASTLAHLERTGYLPEAYIPSRDVRDNRELLRYRLSLVRIRTSLKNRIHAILDKLGIDHPFSDLFGKKGREFLRALSLRDVYRKELDGYLSTIEFLDEILKGITKRIQTSLEKDPQAELLMSIPGISYLTAHLLLCEIGDIKRFASAKRLCSYAGIVPGTHQSADHIWHGPITKQGNCYIRWAMVEAVQKALAQDPVLAIFYRKLQREKGAAKARVAVARKLLVAVYYVLKREERYKFNSLTRIHLGKPRSSTGHAE

SEQ ID NO: 181796 - protein, 408 aa, unidentified
MKRYYIGVDWGDRLHQVYVGEEQGNKVREMKVPETVEGLVEIGRWFDEQRAEGFELWAAIEKPAGRIVDFLLDHGVEVYPVNPKAVDRVRDRYRMSGSKSDAFDAYVLAEFLRTDHAHLKALRPSSEKAQELKMLCRDQRRVVRHKARFLNQLTTTLKEYYPRPLEVFDNIETEVALDFLTRYPTPDHLDALKLKDFNRFATKQHHLSKQRCEQLWEELHKPQLGVPEHVVRAKAQLVEVLVDQLRASIKAVKTYQHKVESFFASSPAAELARTLPGGKSGTLVAAIWAELGDATGRWQSAGHLQAEAGAVPVTKASGKSHVVHFRFACNKHLRYSLYWFSFVSLNNSEWAKLYYRSQRDKGHNHPQALRALGAKWLKIIFVMWRDHKPYDEKFHLANIAIQKMRQAA

SEQ ID NO: 181797 - protein, 425 aa, unidentified
MKNNILKTLFVGIDVSSTTNVLCALDFSGNKLLNLKALNNQPGAESILYSLLSCLDSNSLEYVVIALESTSFYSTHIANFLSSNEVLLAYKPLVYCLNPKSVANYRKSFVDMDKTDPLDAYIIADFARCGRITSQPWRGSQFLALQRLTRHRLHLIECVTKEKAYMVSNIYLKFSELAVLDKQDRPFSNTYGVTSAAVLTDFLSLDDITYSSIEELVAFVSEKGKNRFSDPVKTAKLLKKAANDSYRLDKVLYEPLNVSIASPFNVISALECEVKTIDKAIEKTIKGINTSEFQSLISIPGIGPVLASGILSEIGTITSFNSNDSLAKYAGLTWRVNQSGNFKSDETRMTKTGNKYLRYYLIEAANSVKNHVPEYKEYYYKKYGEVTTHNHKRALALTSRKLVRLIFGLLTKNQLYSNDKVGEIQ

SEQ ID NO: 181798 - protein, 345 aa, unidentified
MPIVGGLDIHRKQLTFDYLDTVTGEVKRGQIAPADRVHLRAWLARFAGRDDVAFAMEGCTGWRYVAEELAAAGIAAHVGEPADTAAARGRKRHAKTDRTDSRHIRTLLAEGRLPECWVPPAQILEYRALLETYHDLRRERTAWVQRIHAVLFHQGAPALGEGTLRTEQGLAALQTAAAAHLSPAGQLQVATALDMIAAVEARLQPLRHQLLAAARHLAGAKVLAARLYGVGPVTALALTCWLAGEGRFSSSRKAVRFAGLDITVWSSDRKGPPGRLSRQGPPVLRWAVYEAGKTHARASAPDHGYYAAVKDRKNGKRAALSEARKIVRQACHILTELGDDALAAA

SEQ ID NO: 181799 - protein, 354 aa, unidentified
MSQKLESAIAVIGIDIGKNSFHVVGHDERGAIVLRQKWSRGQIEARFANMPPCLVGMEACVGAHHLSRKLNSLGHNARLMPAKYVRPYSKGQKNDFRDAEAIAEAVQRPTMKFVATKTADQLDLQALHRVRERLASQRTGIINQIRAFLLERGIAVRQGQRFLRAELPRILATPPDVLSPRMVRIIEDLAGDWRRLDERVQGMSNEIEAIARQDAGCERLMSVPGIGPIISSAMVAAIGAGDVFTKGRDFAAWLGLVPKQISTGDRTILGKISRRGNRYLRVLFVQAAWVVLIKPKIWERHGLKSWIEAAKKRLHRNVLAIALANKLARIAWSVLAHGRDFEARKMDQAANQSA

SEQ ID NO: 181800 - protein, 405 aa, unidentified
MEIIYERCCGLDIHKKSITACVIVGRKKEIKTFGTMTDDLLQMTAFLKERRVQMTAMESTGSLWKPIFNIMEVEGISAILVNAAHIKNVPGRKTDVKDAEWIADCLKHGLLKASFVKPRNQRELCELTRYRGSIIEERAREYNRMDKVLQGANIKLTSVASSISTVSGMSMVRALCDGVEDPNVLAAMAKGTMRSKTDELKRALSGLVAPHQKMILKAMLDHIDQLSKLIVDLDAEIEKRMSQDVDLIEALDEITGVGKTSAQVIIAEIGTDMSRFPTAEDLASWACMCPETKESAGKKKPGKTKKANSTLKRTLVQCGRAAANSKDTYLNAQYRRIATRRGVNRAVVAVGHSILVICYHMIKNRTRYNDLGADFFQNRNKESLVRQNVKRLQSLGFIVTLEEAA

SEQ ID NO: 181801 - protein, 350 aa, unidentified
MDKELYIGVDVSKQTLDLAYYDGESIDWKKAHIKVSNNNAGFKKIGSWVAKVSKGVDIVLFCMEYTGLYTQNFRLWLEEKHYIYRMVEPRKMHRFEPDLDDGLRSLDRIKTDELDSFRIAIYCEQNHRKILRNPSKLPPPVYFKLKRLLAERKQTVKQSVLYKQQLHDICAYDTDLSVERKNGQLKTLNDALKGIDNEIDMYIKEDADISKNFSLLTSIPGIGRVVALETIVLTENFMAIDNPRKYACYIGVAPFKKESGTSVRKGSSVSKKGFKQAKADLSIASLVCMQHIPNIRDYWERKRKEKCSGIVFNAIKFKMILRMFAVIKRGTPYVETDNYRNGKNKQPGVN

SEQ ID NO: 181802 - protein, 420 aa, unidentified
MDTEFSFYVGVDWATQTHRVCVMDAQGKILLEQAINHGGEAISNFLQALESITCGEGQRVALGIEVPRGALVEAFLERNYAVFSINPKPLDRFRDRHSVAGAKDDRRDALVAADSLRTDQRCFRRVALDPPAIIRLRELSRTEEDLQGDLRRTVNPLYQLLLRYYPQLLQWASVPDEPWLWALLELAPTSSRGARLTTARLQQLLDKHRIRRWSAEQVREILASPPLPLAPGSAQAVREHALLLLPPLPLLYNQCKQVADQVQLLRGQMTASELDHPDRQLHRDVSLLLSIPGVGRIITATMMAEGSDPLAQPDYHALRAYAGIAPVTRQSGNSKQVTMRRACNPRLRNAFYHWARTSVQNDERSRQYYARLRQAGHSHGRALRGVADRLLAVLIAMLKSGKCYDPGRRSATSTATPAQS

SEQ ID NO: 181803 - protein, 407 aa, unidentified
MDLLKTVFGIDVSSRKSNVCIMVNGQKVNDYAIYNDMVGFNQLLGDLKQVTNPQIIFEATGVYSRRLQAFLDMHELRYVMMNPLEAKRKTKDNLHQNKTDKLDALYLAKLQSEHPQRLAYVQSEEYQELMANNRIYEQASHDLITNRNRLHKAIQLTFPEIEHLMVNPRGKNYWSIVLRFPHPDIVLETKEADIIDFLKGLTGIGKKRANDIAQSLIRLAKVACPAVKKNSAHIRGLKMAINNILSAEEECQTALQEMAKLAPKRDLEILTSIPGIGENTALRIISELGDIRRFNNPSQLNAFVGVDPQVYESGNLTAHLSISKRGTAIGRKVLYLAINQIQSAKKVGNPCHIADYYEKRKRSSETASHKKAAIASIHKLLRTIFALIKNDQLYSYDVAKHNQRLLS

SEQ ID NO: 181804 - protein, 350 aa, unidentified
MDKELYIGVDVSKQTLDLAYYDGESIDWKKAHIKVSNNNAGFKKIGSWVAKVSKGFDIVLFCMEYTGLYAQDFRLWLEEKHYIYRMVEPRKMHRFEPDLDDGLRSLDRIKTDELDSFRIAIYCEQNHRKILRNPSKLPPPVYFKLKRLLAERKQTVKQSVLYKQQLHDICAYDTDLSVERKNGQLKTLNDALKGIDNEIDMYIKEDADISKNFSLLTSIPGIGRVVALETIVLTENFMAIDNPRKYACYIGVAPFKKESGTSVRKGSSVSKKGFKQAKADLSIACLVCMQHIPNIRDYWERKRKEKCSGIVFNAIKFKMILRMFAVIKRGTPYVETDNYRNGKNKQPGVN

SEQ ID NO: 181805 - protein, 346 aa, unidentified
MMIIGCDYHPSWQQVAWVETETGECGERKLVHATGEAKVFYQQLGSPALIGMEATGNSQWFIELVEDLGHAIWIGDAAQIRASYVRKQKTDKRDAAHILRLVVENRFPRLWTPDREQRDLRQLVLHRHKLVEMRSRVKNELQHLAMNKGMQKKATLWSQAGQQRLRELPLKPWASCRREDLLGLLGMLNQQVGTLDQAVQKAAEEHAQARLLMTQPGVGPNTALAYVLTLGDVTRFRRGKQVASYLGLIPREESSGGRQKLGAISKQGNRLLRSLLVEAAQIAVRFDPGFRKQYLHRCHQKPKGVAKVAAARRLAVRLYWMLRTQVAYPEIVRIESSPRVPRVGAS

SEQ ID NO: 181806 - protein, 321 aa, unidentified
MSSPSPINIGIDVSKETLDIVVHETETHWTSKHEFIEFGELLNSLRSLNPTRIIIEASGGVENLLVSYLAAAGLPVIVVNPRQVRDFARATGQLAKTDRIDAFVLARFGATIEPEIRQLKSSETQELEALVARRAQLVNMLTAERVRLQQAQQQRRHSIVSDLKAHISWLEKRLDKCEGDLSQLLRSSPIWRTSEERLRSVPGVGPVTALVLIAELPELGQLPDKQIVALCGLAPHARDSGKWHGKRTTRGGRARVRTALYMAALVATKHNLVIKTFYRRLLRAGKEKKVALTACMRKLLVILNAMFRNQTSWQPRLQEPI

SEQ ID NO: 181807 - protein, 412 aa, unidentified
MKDLLEISCGLDVHKEKIVACILTGPLGKPTRSEIREFTTLIPDMIALRDWIVSQNCHHVAMESTGIYWMPIYEILEDAFSGDITLLVVNARHMKNVPGKKTDMRDSEWISTLLRAGLLNGSFIPEKRIREFRDLNRYRKSVIRDITSQKNRIEKFLQSSGFRLSSFISDIFGASGRNIILHLIEHGQIDKTALDSCLKTKTRNRIDEILMSVNGTLSEHQKAFLRILMTHYDSLKEHLTEVETSLEEDMAPFTLQVEQLNSIYGISTTASCAIIAEIGIDMEPFKTAEHICSWAGLCPGNNESAGKRKSASVTKGNPYIKSMLCEIAWVIAGKRNTYLSAWYWRIKQKKGAKKAIVALARKLLVIIYTMLKQGTLFDESCFETRRKNCEQKQLSRYIRELEKHGYHVEAQS

SEQ ID NO: 181808 - protein, 339 aa, unidentified
MSKHRLIAIDLAKNVFQVCAMSQTHKIVFNKSLKRHQLVDFIAKQDVSDVVMEACYSSHYWGRIFEGMGYHVKLLPAQHVTPFVRGNKSDSNDAIAIAEASLRPGIIPVPIKSIEQQDIQSLHRIRERYVSHRTGLINQTRGLLSEHGIIAPLGHKAFCALLREMNNRSDQSLSILFNSQMRYIADDYYQLTDRIDEITQQLATIAKENPLCRRLLTLPGIGVINATALYSAIGNGSQFKSARELSVWLGLTPRQYSSGEKSTSGGITKRGNRYLRKQLIHGARAAISRGKKRSDGLSRWGNQLVARRGMNKASVAMASRLARLAWVLLQRGEDYRPMV

SEQ ID NO: 181809 - protein, 357 aa, unidentified
MRFYNHTHRFYAGIDLHTRTLHLCVLDRDGSVVLDKNLPASPEPLLHALAPFRDDLVLGAECMFAWYWVADRCATEKIPFVLGHALYMKAIHGGKAKNDRIDAGKIARLLRGGNFPLAYVYPKGMRETRDLLRRRNYLVRQRAALMTHLQILNAQYNLPPFPKKLSFAANRAELNIGQRFDDTSVQQSVAADLAVIDCLDEQIAQLELYLVRTAKVEDVQTYHRLQTIPGVGKILALVLLYEVHDMHRFDNAGQFLSYARLVRCQHESAGKVLGSGGKKIGNAHLRWAFGEAACLFLRASERARQWKQRQTKKRGEGKALAIRAAKLARTVYHLWRKQQAFDEERFWSGQAQATARS

SEQ ID NO: 181810 - protein, 433 aa, unidentified
MPTTHPYDLVIGLDRSDRKADLHLIDTRTGQTQKQTVATSPEALHDWLARLRQDRPQDRVGLCLEQPAANLIVFLETYSWITLYPINPISLQKFRETFVTSRAKDDGKDAEYLAELLLSHHDKLKPWQPDDSQTRQLQQLVLHRRAVVDQRTGLTNRLKALLKQYFPQALDLCGEELWRPLATALLLKWPTLQSLKKARKESLKQFYYLQGSRSQKLIDQRLECIDQAVPLTDELALLQSYTLRVQLICKELQLLLKTLEQFDQQIAKVFEQHPHREIFAALPGAGPVLAPRLLAGMGSERERFAGPANLQAFSGVAPVTKQSGGKRHVHRRSLCPKFLRQSFQEYAKESILHSRWAAAYYGQQRTKGCAHHTAVRALAFKWQRILWRCWQSRTVYKEALYEAALKKNKSPLVGLLDQIELGKSPVKTRAKKS

SEQ ID NO: 181811 - protein, 380 aa, unidentified
MDSMTDAPRGIVVGVDAHTDTHDACVLDDCGRALGTRTFRADAAGYRELLGWVQRFGPVAAFGVESTGSYAAGLTRYLRTEGLDVLEVNQPHPHTRRRRGKSDPIDAEMAARHVLAASPVVIAKDTTGIVEAIRQLRVARDGAVKARSAALNALDGLTVSAPDALREQLVTRKTTRGRATLCSRFKPNQARLHEPIQATKAALRSLARRVIDLDAEIAALDGQLKQLVAAAAPVTTARVAVSTGHAGTLLVTAGQNIQRLRSEASFAALCGASPIPVATGRTDRHRLSYGGNRDANRALHMIAVCRLRYCQRTRAYAERRTAEGKTKTEIIRCLKRYIAREIYHALVADLLPHASAPRRPDPIVSITCGAGTIGQTIRTT

SEQ ID NO: 181812 - protein, 423 aa, unidentified
MMDEERKWFIGIDWGSQEHVVSLCDDRGKKIGQRKFAHGGVGLSDMIAWLLQGSGGEPGKMHAAIETPHGPIVEALLERGFNVYSVNPKQLDRFRDRFSVAGAKDDSLDADVLADSLRTDMRLFRKLTIVEPVIVELREWSRIDEELKVQRVRLTNRLRDQLWRYYPQMLELADDLGADWILDLWEAIPAPEKAARVREAAVARILKTYRIRRFNAAHVISELRKPALSVAQGTTEAATAHIRVTVQQLRLVNRQLANAELQLDRLCKKLAEPVDGDEGENVPRQQQEHRDVTILDSLPGVGRTVLVTMLTEAQDALQRRDYHALRNLCGSAPVTRRSGKSCIVMRRRACSRRLSNAVFYWGRTAIQRDPTSRAKYEALRARGHGHARALRSVVDRLLYVACAMLENRTLFDSSVMEKKNAAA

SEQ ID NO: 181813 - protein, 395 aa, unidentified
MFIVGIDVAKRSHEVCMITSDGQTVQRPFSIRNNCTGYNLMLEKIRKHTNIKSQIVFAMESTAHYWLALFTRLRKDGYHVILLNPIQTSAMRDMFIRKIKTDAKDSFIIAELIRFGRYAESNVAQDRLLALKELCRNRFYLVDMAGDLKRKLIALIDRVFPEYEAQFDTIFCKSSVALLKKYPTPQRLSNAHLDKLTELLWNSSNGHFGEWKARELKDLARNSFGVEDCDGAYSTLILLMLDQIQSLSGKADALEKEISRLFQSFDTTVTTIPGVGPIIGAVILSEVGDISRFSSADKLAAYIGVDPSVNQSGEFQAAHAHMSKRGSPYLRRCIWMASQVAVQRDPMFRAYYEKKAAEGLKYMTIIGHVTRKMTAVIFAILRDHKVYEPILPTAA

SEQ ID NO: 181814 - protein, 415 aa, unidentified
MKVVFPTCCGVDVHKSFLVATIIKTPKDSLQPSYQKKRFSTFNSDLNQFADWLHEKDCLDVCMESTGKYWVPVFNILEKRGIRVVIANPKWVKAVKGNKDDTKDSKWIGDLFRIGLVKSSFIPAKDIRILRELTRYRYKLTSMKSSEKNRFQNAFTVCNVALDSVVSDMFGKSATAITDYLTSDEDFDPQHCVSLLHRSLKKKADDVLASIEGYEITLEQKYRIGIVRDHLHYIEKLIERVDLCINAMVEKYDGAISLLCTIPGIDRSSAITVISEIGVDMAQFGSSKRLCCWAGLTPGNNESAGKKKSVRISRAGVYLKPALVQVAHAAVKDKLNPYYALKYERIAKRRGKKRAIIAIARMILTAIYSMLSTGEIWNPVDLFKVDIPEHLKEQQLQKAMKQAVRFLEAQGLKVS

SEQ ID NO: 181815 - protein, 343 aa, unidentified
MSEYDGRQFVGIDLHRRRTVIVRQSEGGEQLGWTRIVNDPMALAAEIGKAGESPEVVLEATYGWYWAADVLAEAGAQVHLAHPLGIKGFAQRRVKNDLRDAADLADLLRMGRLPEAWIAPPEVRELRELVRHRAKLVAVRSGFKAGVHAVLAKQGLHIPVSDLFGSRGRAELDRAPLDTAYRARVNAYCRLIDTLDIEIELAAGWIAARLATHPGYRAIQQIPGVGPTWAAVFVAEIGDVTRFASARHLCSWAGLTPRHRESDTTVHRGPITKQGATLVRWAAVEAVQKLPPSAGWLVSTRDQIAARRGRNIATVAVARKLLILVYYGLRDGHIRALQQASAA

SEQ ID NO: 181816 - protein, 387 aa, unidentified
MPQSNDLSRSLAALDQDSTLIVVIEMSQSSWLVAGIIPGINRQPLKKLAAAETALLGLLHRWRDEATKAGRTVSRIAVAFEAGRDGFWLARWLRTRGIEAHVIHATSVAVSREHRRAKTDRLDTELLKRAFLGWLRGERGHCNMAAIPTLEEEDAKRPNREREGLVGERTRIVNRIKSTLARLGIRGFKPTLRRAPERLAALLTPEGAPPPPNTLAELRRDMARLRFVIGQIREIEAARLERLEQHPQQGAHTMVRRLAQVIGVGVETADMLVHEILSRNLRDRRAVARYAGLTGAPDESGARRREKGLARAGNSRVRRGMIQLAWRFLMFQKDSALAQWYRARTADARGATRKTMIVALARKLLVALWQLVTTGEVPRGVVLRAAA

SEQ ID NO: 181817 - protein, 465 aa, unidentified
MTPRRGKGFRTSQALEDLAVTQRHAAGIDVHAAVHFVAVAPADVPAGFANPDPRLPAGVRKFGSNTGDLEALAAWLQACGVTTVAMEATGVYWIPLYELLASRGFDVILVDPRQTKHAPGRPKSDVLDCQWIRRLHSYGLLTASFRPADEIVVWRGFQRQREMLVRYAAQHVQHLQKALEEMNVKLTEVVSDVVGQTGLKIIKDIVRGVRDPQQLAKHRHERCRATVAEIAAALQGNWRKEHLFALKQALEMYEFYQRQLRACDHEIEACLRSFADKSGGAALPPGPRRQKPRRHEARFGARALLFRMAGVDLTVIEGISETTALVLLSELGLDRSRFPTVKNFVSWLGLCPQHRGSAGKIRSRHVRRGANRAARALRMAAQGCHHAKNALGAFYRRIQARRGGAKAVVATARKIAERVYRLLKYGHDYVRQAEQAYEEAYRQRTLDGLARKAASLGYKLVAAAD

SEQ ID NO: 181818 - protein, 465 aa, unidentified
MKHHRRRPSPKPRTSPHALERLHPHAAGIDCGSADHFVAVPPDRDPTAVRSFPTFTADLYRLADWLTACRVTHVAMEATGVYWIPIFEILDARGFQVILVNARHVKNLPGRKSDVSDCEWLRDLHILGLLRGSFRPADGIVALRGYLRHRATLIESAGSLVQRMQKALIQMNLQLPLVVSDITGVTGLRILRDIVAGHRDPHQLAAHRDYRCRASEAEIVAALTGHYRAEHVFVLQQNLELFDVYQRQLTACDVAIEAHLAQLAATTAPPASPLPAARRRGKPRENEPRFDLRTPLHQLTGVDLSQIDGIGPYNALRLLSEIGTEMTRWPTEKHFTSWLTLAPHNKVSGGRLLSSRTQPSANRAAAILRLAAMTLGRTQTALGAFYRRLAFRVGKAKAITATARKLAILVYRTLKNGLVYRDPGADTYDAQHRTHVLRRLRQRAANLGFGLVNLTTGELADGTVS

SEQ ID NO: 181819 - protein, 338 aa, unidentified
MELSVIGMDIAKNVFQLHCVDRQTGEIERIKLRRNEVLPYFARRTPALVAMEACGGAHWWARQLQQLGHTVRLLPAKAVRPFVLRNKTDAADARAIWTAVQQPEMKTVAIKTEYQQSILALHRMRAQLLKFRHMQTNAIRGLLLEFGHPLPESYLALRKAFPTVMGTLDKQLPGILIETLREQWARVQSLDNEIALIEGRLKRALAETPTCQMISDIPGVGLMTATAAVAAMGDPASFKTGREFAAWLGLVPRQTGTGGRIRQLGISKRGDAYLRTLLMHGARAIIARRTYSDWVAGLIARRPYSVVIAAIANKLARTIWAVLATGKRYDGAAFAAAI

SEQ ID NO: 181820 - protein, 412 aa, unidentified
MRRVIGIDIHRTFGEVVIWEKGVLRHAGRVDMTRTALEGFGKTLEATDEVVIEATGNAMAAARVLSPFVTRVVIANPLQVKAIAHAHVKTDKVDAGTLANLYAAGYLPEIWTPNAATERLRRLVARRYQIVRHRTRVKNEVHAILAAHLVPKCPHADLFNQRGRAWLARQGVPDDERAAIDRDIRELDRLTEDQVELDREIALSVMGDASVRRLMTITGVNLTVAVAVMAAIGDIARFKSPQKLVSYFGLNPRVRQSGLGVAHHGRISKVGRSHARAMLVEAAWATAKAPGPLHAFFVRIRAKRGHQVAAVALARKLTVLCWHLLTREEDYLWARPALVAKKTRDMELRAGLPQKKGNRRGPAYAYNLKELRAQEGEIARQAERSYEQFVARWKVRPPKAPAGAQSSSKRTE

SEQ ID NO: 181821 - protein, 320 aa, unidentified
MMAQNDLIVVGIDVAKDKVDACIRLLSQRHTFPNTAQGHRKLIAWLHKHKVNKAVMEASGGYERDWAKVLRLAGIEVRIVDPKRVRSFALSAGRLAKNDTIDAEMIAWFAETFSAAPGQPHDAAREELRALVKARKHLLDLQTRLKSQNEHAAPGPVQKSYARILKSLTAEIAKLEAAIAVKIKTTPDFAERAEIIESVPGLAETTSATIIAGMPELGQVSNKICPALLGAAPYDDDSGHRRGERHIKGGRRWVRNAIYMPCLGAATQNNPVLKAFYHRLIAKGKEPKVALIACMRRLIVILNTMIARRQKWDPSRYALN

SEQ ID NO: 181822 - protein, 344 aa, unidentified
MQIVSVGIDLGKTTFHLVALGAAGKVLVRKKFTQRQLLTYTANMQTSLIGLEACSGAHFLGRALRKQGHDVRLIAAQFVKPFVKSNKNDFVDAEAIAEAVERKNMRFVPIKTDDQLDLQAIHRVRDRLISRRTAVINQLRAFLLERGLVFAKTPAKLRAALPDILENADLDLTTQMRNLIDLLWKEWKTVEDQIEGLSLELERISAADPGCTRIRQIPGIGPIVATAIVAAIGNGAAFRKGRDFAAWLGVVPRQYSTGGKARLLGISKRGNVYLRKILIHGARAAVLRIKRDRAPIGAWLDALDARAPKNVVVVAMANKLARIAWAVLSSGEDYRPNNNMATAS

SEQ ID NO: 181823 - protein, 347 aa, unidentified
MAVTIVETRAITGGVDTHADMHVAAALDPVGGLLGVEEFQVTPAGYARLLEWLGGFGTVCLVGIEGTGSYGAGLSRHITNAGVRVVEVDRSDRQDRRRAGKSDPLDAVSAARAAQSGRARGAPKGRDGAVEAIRALMVAKRSARSERIQTINQARSLVHTGPDDLRARFTGHTTVALVAGLASLRPRPGSTIGYATRLALRELGRRAEFPGAQMERPGELIVPLVTAHAPRLLALYGVGPDTAALLLIAAGDHPERLRSEATWAHLCAAAPIPASSGKVTRHRLNPGGDRQANHALWRIVVTRMSSHPPTRVYVERRSKEGLSKKEIIRCLKRYVAREVYPCLRIAD

SEQ ID NO: 181824 - protein, 337 aa, unidentified
MEKNFKYFVGVDVSKNTLDYSVVKENKEVFSFQSENSNKGIKSFIKELKSKGIKDLSEVLFCAEHTGIYNNHLVYFLNEKGGTIWLESAMHIKRSIGLQRGKNDKVDAQRIALFAYKNREDAKIFEVPREVIIKLNYASKLRSHLLKTINGFGVQIKEIEKFEGKEVAKKFKTNCKETLKALKSDLKDVNENIQNIIKSDDRLNQLFTIIKSVDGVGNVIATEVIISTNEFKNINDPDKYACYCGVVPFDHLSGTSVRGKPRVSSMANKVLKTLFHMAALSVIHREGEFKIYFERKIKEGKNKMSVINAIRNKIIHRIFACVRDNRPYQKIYLYKFV

SEQ ID NO: 181825 - protein, 409 aa, unidentified
MQECSAATHRIETASSPVALSAASGKGAAKQYAAYIGLDVHKETIAVAVAEPGRGEPMYRGEIANTPKKVEKLIAQLSEAYDGALLLFCYEAGPCGYGLYRQLIGSGHDGQVVAPSLIPKKAGERIKTDRRDALKLARLLRSGDLTAVWVPDREQERMRDLSRARDDLKAQERTARQQLNAFLLRHGQHWPKGKSRWTPAHENWLAGLKLDDPWEQIVLETYIDAERAAGERVAQLTGQLMRALPQWSLAPVVDSLVALRGIDKLAAIVLLAELGDISRFDSPKQLMAFLGLVPSEHSSGGRRRQGAITLTGNSHARRMLVESAWSYRFPARQTKHLKSKAANASPAAKRIAWKAQVRLCGRYRSMTRTGKNTKLVCVAIARELAGFLWDIVRQEMPRLVPTQAPATSA

SEQ ID NO: 181826 - protein, 409 aa, unidentified
MDVIYPRCCGLDVHKREVVACVVSTEADGTPRKVIRAFGTMTPDILALADWLATQEVIHVAMESTGVYWKPIWNLLEDGFELFLVNARQVKAVPGRKTDVRDCEWLAELLRHGLLSGSFVPDRPQRELRELTRYRTSLVRERTAVANRLQKTLEGANIKLASVATDVLGKSGREILAALVAGETNGVELAQLAQGRLREKIPQLERALAGCIGPHQRFLVAEQLAHVDFLDAAIARVSAEIAERVRPDEDAITRLDTIPGVGRSVAEALVAEIGSDLTRFPNAKHLASWAGLCPGNNESAGKRHSGKTRKGSPWLRACLVQAAHAAARTKGTYLAAQYRRLAARRGRAKAAVAVAHSILIIAYHVLTQGTDYRDLGGNYFDERDRQGVERRLVHRLEGLGYTVSLQLAT

SEQ ID NO: 181827 - protein, 342 aa, unidentified
MKVRAVGIDVAKNVFQIHCVDEQGKVLLRKQLKRSQVASFFANLSPCLIGMEACSGAHHWARKLQSFGHSVRLIAPQFVKPYVKSNKNDVADAEAICEALLRPNMRFVAVKTIDQQALLALHRARQGFVKARTAQANQIRGLLSEYGLVMPQGIGQIAKRVPELIEEASNELPGMLRALVSRLMEHMKALDEQVAQLEAHIKRWHRESEASRKLERVPGIGPLTASALVASMGEAKSFDNGRQLAAWLGLVPRQRSSGGKPTLLGISKRGDSYLRSLLIHGARAVIRAAQRKPERGGWLHELLKRRNPNVAAVALASRNARIAWALLAHERQFEANYAAMPA

SEQ ID NO: 181828 - protein, 347 aa, unidentified
MNSVGIDLHRNRSHIAVIDEHGELSLSRRIVNDRDTFLELLGGLNGESQIAVEATYGWEWLAELLEDAGYDIHLAHPLRTRAIAAARVKTDAVDAKTLAHLLRADLLPEAYVAPRDLRDLRELLRHRIALTGMRSAIKNRVHAILAKHGITRQHTDLFGKGGREFLAELELRDAPRRRLNSLLSLIEDFDREITETTKEIEQRAKADDRVDVLTQIRGVGRYTAMLIIAEVGEIDRFPDARHLCAWAGLTPTVRSSDGKARLGHISRQGSPALRWALVEAAQKCTTGGGPLREQFERITKRRGRKVAKVAVARQILTLSYYGLRDGEIRCLARRSRASAKEKLAVAA

SEQ ID NO: 181829 - protein, 376 aa, unidentified
MKRIVYIGMDVHSTNFTFCSLEPKLGGENKFFGCMQSEADVKNVLKYIEGLKKELGDDVEFLCGYEAGCLGFSLYHQLKKQGVECVILAPSTMMASKGKRIKTDARDAKRIAQCLAYGTYHSVPIPSSDDDAVKEYIRMRDDHKIALKKLKQQINALCLRNGRQYTGTKWTLTHLRWLRDMDWQEAVLKETLQEYLMTFEQMTNKLEALDRRIEELAQGAKYKERVKKLVCLLGVKTRTALASIVEVGDFCRFEKGSTYAAYLGLTPGESSSGDTVRRGGLSKAGNAHLRTLYIEAAQGICKGRIGHKSKELKARQAGSSQEVIAYADRANERLRRKYYRLIQREKRRNVAVTAIARELACFIWGLMTNHTERRVA

SEQ ID NO: 181830 - protein, 418 aa, unidentified
MDVIVERCAGLDVHRDNVVATVRVPGEGRRRWDQQTQTFKSTLAGLAALAGWLADAGVTRVGMEATGVYWKTVFQALEDRFECWLLNAHHMRNVPGRKTDVKDSEWICQLVAHGLVRPSFVPPVEIRRLRDLTRLRAAQTNERARTIQRLEKILQDAGIKLSSVASTTYSKSARAMLEALLTGVTDPEQLAELSKGKMRAKIPELKEALQSRFQIEHHGVMVAQLLAHIDTLDAALQNLSERIELVLVPHTEIVELLSTIPGVQAKAAQVLIAECGLDMSLFPTVGHFASWAGACPGNHQSAGRRRSGRTRPGPAWLTSQLTECARAAVRTKETYLAAHYAQLRGRRGEQKAIGAIRHDLLVAYFHIVRDHVPYRDLGPDWQRKRYSVEHRARRLQRQLEALGYTVTLDQTDPAEQTA

SEQ ID NO: 181831 - protein, 343 aa, unidentified
MENIAEQQKTSNPYLDVEKPFEHYIAVDWSLRTMAIARMTQKSLSPKVIEQPSNVQVLKAYLQVLRGRTILTIEETTSAQWLYAELHNSVDRIVVCDPYRNRLLSDGPKTDKIDARKLCVLLRAGLLKEVYHTLDKEYRLRHLVSAYGDVIKAGVRLQNQRAAFYRGEGIRQNVPLSDPTLRFVVDHIDAGLEWYKQTVAVYETQFENLRRRDIRIRRQTKIPGIGLKGAVKIVASVLNAHRFADKGHYLSYCGLANHPKTSGGRSYGYRKPRFDHGLKEVYKTAAMAVIQGKNPLREYYEHLRTKGIAEHNARHALARKIASISYGILKNGTLYQGITIKTQ

SEQ ID NO: 181832 - protein, 315 aa, unidentified
MDILGIDVGKEYIDCELLGEKRASKRVHNTVRGFEQLQSWLRNRKVRKVHACMEATGGWSEELAYYLQERGHVVSIVNPMQIHAFGQSELSRAKTDKADAALIARFCKAMQPSTWEAPTPAERRLRQLVRRRRALIEMRMQELNRLEAPGIESVEKSIRDMIAMLDNQISELEADIKKTIDDDDDLKGKRDLIESIDGIGPTTSATLLAETPHIEKFESAKALTAFAGVCPQIQQSGRSVSKSRTTNIGNRAIRKVLYMAALAALRSNALIKAFADRLRERGKRNMEIIVATMRKLLVLVFGVLKTRRPFDPNWA

SEQ ID NO: 181833 - protein, 350 aa, unidentified
MSKINSHHSDADIIYMGIDVHEKTYNISLFYQGENILSRQCPAVYDSIRKILKKYSSFSCRAVYEAGAFGYGLYDQLKTDGVNVIVTPPSKVLRSQDDKVKTDKRDAAKLAHHLSAGLLKSVCVPPLQIRYDRELLRTRDQLVDQRRRIYQQIQSKLRYHNLPLRSKGSITALNKAALLQMPLPTPMRIAFSELISLYDFYSQRLRFLRNELIKLAESKPYATAVRLLQSIPGVGLFASLAWVLELPAMKHFLTDDKLANFLGLTPSESSSGSKRRLGSISKSGNPKIRWLLVQSSWILIKKDPVMQQCFSRIKRRRGSQCAIIAVARKLSARIRAVLLHQTPYAIGTIA

SEQ ID NO: 181834 - protein, 343 aa, unidentified
MVHYIGLDVSLKKTSICVVNQAGSVVREGVVDSDPEAIAAFVRSKAPGAVRIGLETGPTATWLWSELKQLGLPVICIDARHARAVLKMQVNKSDRNDAAGIARIMQTGWFKEVRVKDPDSQSVRALLASRALLVKIKRDLENQIRGLLKNVGLVIGRAKFNVFTVRAEELIEDRPELIAVVGPLLKARQAIEQQTDDLDRKVLKLARYDAQVRRFMTVPGIGSITALCFKATIDDPTRFKRSRSVGAYVGMTTRRHASGEIDWTGRISKCGDAMLRSYLFEAAGVLLTRVPKWSALKAWGMRLAKRNGLRKATVAVARKLAVILHRMWIDRTEFNWSKKEVAA

SEQ ID NO: 181835 - protein, 386 aa, unidentified
MNSWEPATALDHESTIVAVVELSARSWLVGAQVAGVPRQCRQKLAPSAEGLLDHLDQLRQRAEKAGKRVSRVVVAYEAGRDGFWLHRLLTAHGILVYVLEPTSILVNRRSRRAKTDRLDAEGMLRVLAAWLGGDRQVCSMVRVPTPEEEDGKRPHRERERLVQEKLRIENRIEALLFTQGIRARPSLRSWERELTELRTGDGRTLPPLLRAELDRLRRRLVLILELIRELEAERAAALAAAPDEAMAQKITSLQRVRGIGANFSAVLVREVLYRSFANRRQLASYVGVAPMPYQSGGMDRDRSISRAGNPRARTTLIQLAWLWLRYQPGSALATWFRERVGTLQGRTRRIAIVALARKLLIALWRYVEAGVLPAGVEIRTGTVPAA

SEQ ID NO: 181836 - protein, 376 aa, unidentified
MDRNVTASPVLYASLELSKNNWLLALQFPDRGQPSLYRIKGGDAETLMAKLTAARDRMTRVSGNGASVVLCYEIGYDGVWLARFLKARGVECVVVDGSSIRVDRRARRPKTDKIDAGMLLRWLIAWSNGERHVWSVVRICTVDEEDLRRSHRERDRLVRERTAHINRIKGLLFAQGIRGINVKKDYKAINVEELVTGEGHRLPPRLASEIKREIARLALIHEQIAELERERDEAPTCCETSEKKRAQLLGLNGIGPAIAAVLTREVYYRAFENRRQLAGFLGLATRPHESGEIERSQGIARTGRTQVRGTVIQAAWLWVKHQPGSAITHWFMGRTAGQSKRIRRIMIVGVARKLAIALWRFLEQGLVPQGAVFARA

SEQ ID NO: 181837 - protein, 344 aa, unidentified
MKEVSIIGVDLAKQVFQLHGATADGEVVFRKKLSRKQFVVFMEAHPRCRVAMEACATAHHWARMLTGFGHEVRLIAPKFVKPYVKTQKNDMADAEAIVEAATRPTMRFVEIKTIEQQGLGMVFRSRDLLVGQRTQTINALRGHLAEFGLIAGKGRENIEKLQSMLNHEDGAADLPAPVRQMAQLCLDQIADLSRRIEEIDAQISAASRRSRFSARMQKMPGVGPVTAMALAAFAPPMENFRRGRDFSAWLGLVPRQHSSGGKQRLGRTSKSGQRDIRRLLIIGAMAVISGCKARPPAENSWLGRILARKPRMLAAIALANKMARMLWAMIARNEEFRGGPLLAH

SEQ ID NO: 181838 - protein, 340 aa, unidentified
MEKRYIGIDLHRNRFTCCIRLENERTYVTEWELEDLGRFVKKLRGSDEIAVEITGNTRLFYDAVAPHVARVVVVNTNQFKVIRQSVKKTDPHDARALALYLSKNMLPEVRMKDKEHAQLASLTQTRDTLVKLRTALKNKVNNILSARGLNLAKEALSSEKQLAEVLELPFDEIVRIELRVIVEQIRGLNKSIAELEKTIGEEGSKLEGHKGLSSIKGIGKITGAILLSVIGEVNDFADEGHLASYFGIVPRVSNSNETERSGRIHKRGTKLGRTALVQSALIAANYSPYLKRFYEQVKARRGAGKAIIALARKFLGIIYRTLKNKWIFEDFPNFVLAEES

SEQ ID NO: 181839 - protein, 441 aa, unidentified
MAMRKREEDEVFPNAAGIDVGGSSHWVAVPRQADDEPVREFGAMTDDLNALADWLLSCGVDTVALESTGVYWIPVYEVLEQRGLVVWLVDARQMKYVPGRKSDVQDCQWLQKLMSLGLLRAAWRPGDEVCVVRAVVRQREVLLPEQADWVRRMQKALVQMNLQLTEVLTDVMGMTGQAIVRAIVAGERDPKVLARHRNGRVKASAADIERALTGNWREEHLFVLGQALAMVDSLAQRVLECDAKIEALLVPLGCHEVELSGPGKRRGKNTPQFDARTALARWAGVDLTRINGLAVTTVMTILSEIGPDLSRFANVKHFCSWLGLCPGTKVSGGKVLSARTRRSTNRVRQALKLAAMSLSRNDSALGAFYRRLCSRMDKPRANTAVAHKLARMVYFMLTRGEAFVDQGQQHYEEQQRQRSIDALRRRATALGFQITPAAQTP

SEQ ID NO: 181840 - protein, 342 aa, unidentified
MKLTTIGIDLAKNVFQVHGADEKGKAVLKKQLKRTQMLPFFANLTPCRIGMEACGSAHYWARKLQALGHTVQLIAPQYVKPFVKRNKNDAADAEAICEAMMRPNMPAVPIKNASQQAILSVHRARQGFVKARTAQANQIRGLLAEYGIAIAQGIGHIPKRVPEILEDGENDLPGSFRLLIERLLDHLKELDRQVGELEVQIQLWHRDNSASQKLAKIPGVGPITASAMAASIGDARNFKSGRQLAAWLGIVPRQHSTGGKSTLLGISKRGDTYLRTLLIHGARAVVRVTERKPNADPWLKNLLARRNKNVAAVALANKNVRTIWALLAHDRDYEPGYARAAA

SEQ ID NO: 181841 - protein, 438 aa, unidentified
MSNKVIFNLDELFISVGIDVGADFSWMSIALPNQQFVGKPYKILHNSIDSLTTAVSKIKEAEELYSLESRIFLESTGIYHYPLFCYLRDKGFNCSVINPIITKNSTNINIRKVHNDRFDSKKAALVGLKPDLKVSLMPSDLALNCRNLCREYYDLMDNRSAYVNKLQGELRMAFPQYLGIFSKVTINTSLTLLETYTSPSAFLKADKQEIIDIIKSTARFGLTYAQNKYNAIIQAATDANQFGYIIDSNIKRIRLYISFIRKYDEEINNILESLHELVDANEDSDFVKQIHLIETFKGAGFLSAVSIMGEIGDFSAFSKPKQLFVYFGLDPAVKQSGKFEGTKVQMSKRGSSIARRVIHTLTLQSISISRNGEAKNPVLREYYLKKCDSKPKLVAMGAVSHKVCNMIFAILRDNKPFKIIAPQEHIKQYNAAKCDIAA

SEQ ID NO: 181842 - protein, 379 aa, unidentified
MKSVCGLDVHKDSVYLCILSEFGELIEKVFGVLTYQLEEMRDLMLHHHVVEVSMESTSVYWIPIWRVLSPHFKLNLANPYFIKQLPGRKSDVKDAQWIAECTMKELIRGSFVPPETIQQLRQYDRRIFDLNEEIVRKLSKLDAVLQRCNIRLSNYVSNVDSKSYKAVVRAISQGITAPEELVKLIHGRIINHHGIDVITASLKGVVSLAEIDMISQLRDELDMAEAHKEKCQARMLEICEREFPEELRRLQTIPGIKERTATSLIAEIGTDMNKFETANHLASWSGLKPRNDESNKKIKSRSITHGNVYLRKTIIECAWAASRTKDCFFSRFSYHQTQVRKKNKMKVLVAVARKMLIAVWHVLHDNTIYIDFTTDRKTS

SEQ ID NO: 181843 - protein, 429 aa, unidentified
MKIIYPRVCGIDVHKQFIVAVICISESVEPIYLKKRFSTFHNDLIRFREWLIQNDCQNVCMESTGKYYIPVYNVLESHISNIVVANPKWVRAVKGEKDDDKDAKWIADLFKFGIVRSSFIPQKDFRILRELTRYRYKLVNMRSSEKNRFQNALTSGNCKLDMVFTDVFGKSASNIIDLILSDNPYTDEDILSKVHKKCKASPDMDLDSINGTDLTPVQKSRIELVNDHIKQLSSNIQRLDKLIDLMIEPYEDYISFLCQIPGVSRNSAITILSEIGVDMNQFTSTRRLTSWAGLTPSSNQSAGKKKSVRISRAGVYLKPCLVEVAHAAVKDTNHPYYANKFNKISKRRGKKRAYIAIARKILVAAYHMLLTGEIWNPADLAEVETPVEQRIKYVKNNLKSDIKQLLDIGLTVEELTLMIQQNANTMTAQ

SEQ ID NO: 181844 - protein, 376 aa, unidentified
MSKSTPSSSVKKGTKGAAKGRAVVVDWTRVTTIGIDVGDRFSSYCAIDASGAIVAEGRITTTVGAIEGALGQVSRKTVAIEAGMHSPWMSRLLTRLGHEAIVANPRKLRLIYENQHKSDRVDAEYLARIARLDPKLLGAIEHRSELGQSHLALIRARDVLVRTRVRLIHHVRAAIKSIGSPVPSGHTDAFHKRVRSAIPELLRPSLEPLVETVEQLTTRIHEFDRKIERLAEDRYPETDVLTQVAGVGPLTALAFMLTVEDHRRFRTSRSVGAWIGLTPGQCQSGQSNPQRHITKQGDHYLRRLLVGSAQYILGPFGTDSDLRRYGLAIAARGGKNAKKRAAVAVARKLAVLLHHLWRTLDVYEPLHNSNSRRKAA

SEQ ID NO: 181845 - protein, 379 aa, unidentified
MRSVALDLGGKITFCEVADGKVLRRATASSFEGLKLVLGPRTPPARVAIEACREAWHIERRLREWGHEPLVVDTTRVKQLGVGQHKRKSDRIDAEVLARAVEMGGVPLAHVLSPHRQALRMQLGIRRGLVETRAGYVTMIRGLARAHGVRLPSCKAEDFARKIECVALGEELRLMVAPLLEIIRVLDPVIVEMDRKVETLCSTEPVVLQLSTAPGVGLIVAAAFVSVIDDPKRFRHAHQVEAYLGLVPSEYTSVHRRLGSITRQGNSYLRSLLVQAAWSVVRTRTEDPLAQWARAIAQRRGKCVAAVAPARRLVGVLWAMWRNGTVYDAERLAHSSVRGLQQQVQTLEQRTVALARAARKTRRCPRPLSSASGGNCMKS

SEQ ID NO: 181846 - protein, 321 aa, unidentified
MTETQKPVSRPFIGIDVAKYRFDGASSSGPIIGLHVRELPRLVDWVESQNPQLVTLESSGGYERDLVAALVEKDIPVAVVNPRQVRNFAKASGRLAKTDVVDAKVLAAFGEAIRPVVRDPKSPELMELRDLIARRRQLVEMRKVEKTRLEGARTPALVKAITRHIDWLSGEIKSADKDLDGAIKANSSFQEDDEILQSIPGVGPILSRTLIGDLSELAFMNQRQAAALVGVAPFNCDSGMMRGKRAIWGGRGEVRSALYMATITAIKKNPIVKTIYDRQRAQSKPFKVALAAAMHQLLKLAQALLKSRQKWNPHLANLTVA

SEQ ID NO: 181847 - protein, 398 aa, unidentified
METQTAATSVSIQYVGLDVHKDSIDIAVADAGHDASHEGRWGEVRHIGQIGGELAALDKALRKLISKGARLHVVYEAGPCGFVIWRHLLSQGIACEVVAPSSIPRPAGERVKTDRRDAMKLARLARAGELNPVRVPDEADEAMRDLVRARDDAVREQRNARHRLKALLLRNGIGYAGKAAWTPAHLRWLADLKLPLPAQQIAFQEYLHAITESTQRIARLEQALRDHLPQWGLKPLVQALQAMRGVQLIAAITLVAELQDFMRFEHPRKLMAYVGLVPGEHSSGGKRRQGSITKAGNSAARRMLVEVAWHYLQGPRVSPIIARRQDQLPKTVTDIAWAAQMRLSAKFKRLLARKVMKTKAVVAVARELVGFIWAIAQQVHASGWKGVPDDNGQTAQAT

SEQ ID NO: 181848 - protein, 343 aa, unidentified
MKTVTTIGLDIAKSVFQVHGIDAAGKVVIRKQLKRGRVLPFFMKLPPCLVGIEACASSHYWARQLTALGHSVKLMPPAYVKPYVKRQKNDAADAEAICEAVQRPNMRFVPIKSPEQQAGLALHRTRHLLVRQLTATTNSIRAHLAELGIVAPVGRRGVDALIALVISDEDGRIPGLMRACLMTLSLQAQALKEQIRILDRRLLEWHRSSELSKRLDAIPGVGPALATALVASIADPKAFRCGRDFAAWVGLVPKQNSSGGRERLGNITKAGDRYLRSLFCAGALAVIRFVKIHGAKHRPWLTSLMDRRPIKVAAIALANKLARMAWAMMAKGESYKEPVALAR

SEQ ID NO: 181849 - protein, 392 aa, unidentified
MPQYTINSKYASIIAMDTHARTTTARGISLETAEVKARCFNDCPSPEEIASWIQKSFPAPHYAAYESGCTGFFLCRRLVGLGIDCEVIAVSSIARSTDDRQHKNDHRDAKALLNDLLTPGKEASAVWLPDEGCEGMRDLLRAYRDATDALKRSKQQLSALLLRHGHVWNEKAPSGKLRKTWGGAHMKWLGSVELGSAAASESLEFYRAAVAADAERAARLMARIEGHAKEARWKPYADALCCIKGVGLYAAMVYACEIGDFSRFRNGQSVSRWTGLTPKSHASGERQQANGHITKAGNAHVRAALVEGMSSASRRSPGMGRLKPGQEAPEHIIAECDRCNHRIHRRYWHLRNELKKEPNVAKVAMANELIRWIWAIGCMVQEGQRAKEGIRG

SEQ ID NO: 181850 - protein, 366 aa, unidentified
MKKISTVQTLRNEILKKQKLTIGMDLGDRWSCYCILDEAGTIILEQKVAMTPEAMKQTFSKIPRSLIAMETGTHSPWVSRLLAELGYKVIVAHAQKVQLITKSNRKDDRHDARTLARLARIDPELLGPVRHRSAQAQIHLTVIRARAELVRARTALVNAARGLVKSYGQRLPKCGTRQVSRELGAGLPAELREVLEPLLQEIESLNERIEEYDEQMEKIARERYPHVELLKQVKGVGTQIALTYILTLEDPHRFPKSREVGCFLGLRPGRRDSGESQPQMHISKEGDRYLRTMLVQGAHYILGPFGEDSDLRRWGLKLAARGGKSAKKRAVVAVARKLAVLLHRLWVSGEVYEPLRNSKKAMSTAA

SEQ ID NO: 181851 - protein, 355 aa, unidentified
MESVKYVGLDVHQATISIAVISAQGRLVMSSVVPTQAAAMVEFVSGLRGRLHVTLEEGSHSAWLHDLLVRRVARLVVCNPRQNALLKAGNKSDRIDARKLAELLRADLLSPVYHGESSTRALQQLVRSYSSLTEDTTRVMARLKAVYRSQAIGCAGKKLYAARRRAEWLAKLEEAGLRRRAERLFEELDLLQKLRRQARQEVMEESKKHAAVKLLRSVPFLGPLRAAVLVARVQTPHRFRSKRQLWSYCGLALETRSSADYGYQDGELVRRRRPVFVRGLNWNHNHDLKNVFKSAATTASAMPGPWRDFYQQRVNSGMAPAMARLTLARKIAAVALVLWKKGVSFDAEYLKQPAA

SEQ ID NO: 181852 - protein, 420 aa, unidentified
MDRVVADIIHPIACGLDVHSAVIAACLVRPGPQGGPHYEERSFSTNLRGLRELRDWLVGHGCQAVGMEATGVYWIPVFAVLEGHVPMVVGNPNHMRNLRGHKTDRKDAKWIAGLIRHGLIRPSFVPTAEFREARELTRCRRQLINARTGIRNEVTRLLAHQGIPLGADGLLANIFGVSGMGILEALAEGRDIQKELPKLLHRSVKHKQELLSAALEAGLGAVARKLLAIHLGRLEAAEEDLQKVEALIAAQLAPYKDRLDLLMTIPGISYLSACVILAELGVDMTRWPTHRHLAAWGGVAPGCRESGGKAHRAATRKGNPFVCTTMVECAGAAVMKKDCHLAGKYRHLCARTGSKMKARVAIARKLLVIVYHVLSTLKPYEEPKPQMASKQAKQRAIKKHVRELQKLGQDVQISPILTSA

SEQ ID NO: 181853 - protein, 381 aa, unidentified
MSSPLPNTIYLGMDVHKESITIAVLPQAAAAPTRVERLPNDAGKLRRFCDRVATQGTLRTCYEASGAGYVVYRLLREWGYACDVIAPSLIPIQPGVQRKHDKYDAVPLARLYRAGELTPVRIPAVAEERVRDVVRCRETFQREILKSRHYILKFLARRGFVYRAGKNWGAKHLVWLRTLAAVQSPLAGEDAMVFREYFALLEYKLTRRDELDRQIALLACSPTWATAVGWLQCFRGIQVQAAMVLATELVDWRRFERPTQLMAYVGLVSREDSSGERERKGSITKAGNAQCRHVLIQVAWSYRHQPQVNPHLKGRQAGQPPSIIAHAWKAQHRLHKLYQHLAYRKHPQVAVVAVARELVGFLWAVMRELPPRATAPVRTAA

SEQ ID NO: 181854 - protein, 387 aa, unidentified
MPKLNDLSRSLVALEQDATLIAVIEMGQSSWLVAGIVPGIERNPLKKLAPDRDRLLQILHRWRKEAVQTGCTIKRIVVAYEAGRDGFWLARWLRAREIEAYVIHPSSVPVSREHRRAKTDRLDSELLKRAFLGWLRGEPKHCSMAAIPRIEDEDARRPSRERESLVKECTRIVNRVKASLARLGIRGFRPALSQASKQLETLRTPEDSAVPANTLAEVRRDIARLLLVKQQIKEVERTRAKRLEQTHGERRTAMVRLLARVVGVGVESADLLVQEVFSRELRDRKAVARYAGLTGAPDESGQKRRERGLAKAGNARVRRSMIELAWGHLLHQKDSPLAQWYRRRTADARGGTRKTMIVALARKLLITLWRLVTTGEAPAGLLLRPAV

SEQ ID NO: 181855 - protein, 398 aa, unidentified
MTESSDYESVQVFIGVDVGKDTHHAVAINRSGKRLFDKALPNDENKLRSLISDLEQHGQILLVVDQPATIGALPVAVARSEGVLVGYLPGLAMRRIADLHAGEAKTDARDAAIIAEAARTLPHALRTLKLADEQIAELSMLCGFDDDLAAQTTQASNRIRGLLTQIHPALERVLGPRLDHPAVLDLLQRYPSPEKLASLGEKKLAAQLCKLAPRLGKRLAADIAQALAEQTVVVPGTNAAAVVLPRLALQLITLRKQRDEVALAVEQRVLAHPLYPVLTSMPGVGVRTAARLLTEVACRAFASVAHLAAYAGLAPVTRRSGSSIRGEHPSRRGNKALKRALFLSAFAALRDPLSRAYYTRKMSQGKRHNQALIALARRRCDVLFAMMRDGTFYTPQAS

SEQ ID NO: 181856 - protein, 369 aa, unidentified
MNERITYIGLDVHKKTISVALADGCGRGAALDHGQIPNTPAAMTRLVRKLSETGSALRFCYEAGPCGYGIQRQLAAAGHDCAVVAPSLIPRKPGDRIKTDRRDAVHLAGLHRAGALTPVWIPDPAHEAMRDLVRARLAAVRSVRQARQQLSGFLLRHGHHYSRPAWTKMHRRWLAGLQFEQPAHLIVLEDGIATIEAATARRDRLTAQIEALLADWTLAPVVQALQALRGLALVSAATVIAELGDITRFDNPRQLMAYLGLVPSEHSSGGTRRQGGVTKAGNSTARRMLIEAAWSYRFPARISREQLLRQETLSKPIRDIAWKAQLRLCGRYRKLNRAGKPATTVTTAIARELAGFVWAIACQLPRPTN

SEQ ID NO: 181857 - protein, 429 aa, unidentified
MEEVDDAELVVERIAALDLGKAGLEACVRVPHTHRPGRRMQELRGYATTTAQLLEMAAWFRHWRVQRVVMESTSSYWKGVYYLLEAQGFECWLVNAREVKNVPGRAKTDRADAVWLAKVAERGMCRPSLVQPPEIRRLRDLTRYRRALVQDRTREQQRVEKLLEDAQIKISSVLSNVHGVSGRAMMEALIAGQRDPRTLAKLAKAGARKKTEALEEALRGFFTDHHATILQMMLDNTDRISAQIATLDARIAEAISPFSDQAGRLTDIPGVDAVTVAELIAEIGVDMTRFPSAAHLVSWAKFCPQTHQSAGKSKAKGREKGNPWLAGTLGRIVFANWRSQNFLGTRYRRLARRRGKQKAIVATGNSVLTIVYHLLSDPDIKFIDLGPDYYESRINKHRRARDLASQLQTLTGQHIAIRDGKAVITEAAA

SEQ ID NO: 181858 - protein, 352 aa, unidentified
MQYIAFDSHKRYTYASVEDHASGRIFDKRIEHERGAIRSFLSAYEPGSPVAVETIGNWYWIVDEIEAAGMQPRLVHARKAKMMMASSKKTDKLDAHGMNRLQRTGTLPTVWIPGATLRDIRELYRTRMVLTRQRTTLKNRIHSAFAKYAIPFEDTSDIFNQKGRKLVEARLAFLPPHTRFAVAQLLEELDMIDLKILSFEKRIDEVAELSPQVSLLRSIPGIGKILSLVITYEVGDVTRFASSSHLAAYAGTTARVHASGGKVRYGRAPADVNRYLKWAFVEAANCVTLVRRRLRYRHIADLYERIRARKGHSVAVGAVARHLAEATYWVLARNEPYREPKRDSKAVSSTKG

SEQ ID NO: 181859 - protein, 375 aa, unidentified
MKNKVRFLGLDVHAQTIAVAIAEPDGEVRSLGTIANRAESIRKMIKKLGSVEQLRACYEAGPTGYVLYWQLAELGVACEVIAPTLAPMKAGDRVKTDRRDAERLARSFRSGDLTAVWVPDAGSEALRDLVRAREASKQDQLRARHRLAKFLLRAGQRPAAGVKAWTQLYMVWVRQLRFAQVAQESTRLDYLHEVEHMAERVKRLEQAITEAVKLASPAIQEVVKGLQALRGIAQISAVTIAAELGNMTRFAGARQLMGYSGAVPSEDSSGKRMKRGSITKTGNAHLRRIAIEAAWSYRLRPGVGPALRKRQEGVPEEIKEIAWKAQQRLHKRYMRLAAAGKDQRKIITAVGRELLGFVWAIGIKAEAAAKQKMAA

SEQ ID NO: 181860 - protein, 367 aa, unidentified
MMPVVRAGLHAAGVPQVTVGVDTHAEVHVAAVVDQVGFELGHASFPTTVAGLRRLWRWAAKHGCVVAVGVEGTGVYGAGLARYLAGQGVVVVEVDRPDRKARRFQGKSDPLDAYAAARAVLSGRARTVPKLRDGRVEMIRTLHVTRRSAVKAAAQAKNQLHAEIKTAPDQLRAELRELTWAKLRDRCAGLRPGEINEVSAAVKFTLRSLARRIIALDTEVAEIDRQLRPLVERTAPTLTALYGVGLDVAATLLVAVGDNPDRLASPAAFAHLCGAAPIPASSGKTQRHRLNRGGNRQANHALWVIAMVRLRHDQRTRDYRDRRTTEGKSPREIVRCLKTYISREAHRAILTDLETSTRAHHPDLEAA

SEQ ID NO: 181861 - protein, 345 aa, unidentified
MGEVSTIGLDIAKSVFQIHGIDANGTVVIRKRIGRAKVVEFFSELPACLVGIEACPTAHHWSRELQALGHTVKLMPPSYVKAYLKRAKNDANDAAAICEAVTRPSMRFVATKTRDQQAVLMLHRSRQLLVRQRTMISNALRGHLAELGIISAKGRNGTAELLELIADPSDGRIPEAARFSLETLARQYVAIASEIGAIEKRIHAWHRSCEASRRLEEIPGVGPIVATALVAEIGDWKAFSSGRSLAAWIGLVPKQHSTGGKAKLGSITKQGNRHLRWLLVAGAMAVIRYAQQHGTKKRPWLADLIARKPTKVAAVALANKIARMAWAMMVRGERYHEPAQPLAAC

SEQ ID NO: 181862 - protein, 412 aa, unidentified
MIKREKIELIKGSDIYAGIDVSCDIHRVRFIDNLGQEIIRGISFSNDRGGFNKLEEHMKKYGIDHNIIFGLEPTGDYWKPIGYYLKNKGYKVVLVNPYHLKRTKEIIDNSQQKDDRKDSYLIADLVKQGKYFFPIIPEGIYGEMREISISWRRTKQQITRLKCYLSNFLAKYFPEYRSIFSDILGKSSFYILSHYPLPEDIKRLGKVRLTRIIKRVSKGKIKQEKIDRLYEIAKDTVGIKEGKETARMFLKEILKELERLIRRREKLKGKMKDLLMRSGYGDYLLSIRGVGVVSACLFLGEIGDPRRYKKSSQIEKLAGYNLVENSSGKRIGEKQISKRGRETLRYVGYLVANVAIAKNKEIRELYRYKVEVLKKNRINAMVGIAAKMLRIMFAVCKNKEYYNSEKIRENFI

SEQ ID NO: 181863 - protein, 357 aa, unidentified
MLAELVDSVVGVDTHRDTHEVEIALPTGTPIATRSISNHTSGYAELLAWILDHAPGPRLVVSIEGTRSYGLGLARAVSAAGLVVVECEQPNRKARRGKGKSDPIDAHLAVLAALRLDGDRLPVPRADGDREALRILLGARHDLTVGNTAQTNRLRALLLSGDDHDRELARNVLADTTLTGLARRRQPREATREQAVRHAEIRRLALAVRASRCALKSNRAQLQTIVDELAPGLTNRRGVGPVTAAQAIVSFSHTGRCRTDAAFATLAGTSPLEASSGRHVRHRLNRGGDRALNSAIHTIAMVRMRSCPTTKAYVTRRTTEGKTPREIRRCLKRYITRELYRALTASMSLTEAPAHAA

SEQ ID NO: 181864 - protein, 349 aa, unidentified
MIIIGCDYHPGFQQIAWVDTETGECSEQRLAHSDGEAEKYYRGLKGHGVRVGIEATGHARWFERLLAELKYELWVGDPAQIWAMRVRKQKTDRQDAQHLLKLLVEDRFPRVWVPSAENRDLRQLLWHRHRLVQMRTRAMNQLQAIAMNEGVRRKKGLWSKQGRRQLESFSLAPWATRRRQDLLELLDRLNPSIQELSIAIEQEAMQRPEVKRLMTHPGVGPLTALAFVLIIGSPERFRCGKQIGSYLGLVPCEDSSADHQRLGHISKQGNALLRFLLVEAAQATVRSDPEWRHQFLHLAMRRERAIAKVAMARKLAVRLYWMWRKGWDHQQMVQFGSHVGQPVVSHGVK

SEQ ID NO: 181865 - protein, 327 aa, unidentified
MTASVSSDNQIFIGIDVGGASFEAAWHRGGCAQYENRPDAIAAFVARLGIEKQIIRIAIEPTGGYEKPLVKALRGAGLPVDMVHTSRFAAYRSLVGAKAKSDTSDARLLAAYAAAPEEVRRRKADHVAIPQDAVREQLAELAARRDQLRRMIHAETCRLATVQSKDIREEIAAHLEALREAERKIHAVMKHLVHQRDDLSHSKRLLQTIKGIGDKTALTSIAGVPELGLISNKAAAALIGVAPFLPQSGTMNAPARIHGGRAPVRNVFYMAAVTASQHNPVLAPFYDRLIAAGKPPKVALVAVMRRLVVYANAVLKSGQPWKGAQIA

SEQ ID NO: 181866 - protein, 386 aa, unidentified
MIKGSIVDEFCGKASVASRAAKHRRREIGRVQTPEVVAERDPRRHCGTSPNSRRNRRRPTRPASSYLQDWERTMNEQIFVGIDVAKDTFFVCSSPAVINLSLPNSVSGIRQLIKTLKPHDVKLVVLEATGGYERPIVAGLLESDFRVVVASPRQVRHFAQGIGELAKTDPIDARVLARFAQIVQPKPKLPFSPETDELADLVRRRRQLTDLRVQELNRSQTVRHPKVSKSVRKMIKTLDYQIAELDELIQQHIKSDDDFRKKDEILRSTPGIGPHTSATLLSQLPELGQLNRQQIAALVGVAPYDFRSGRFAGKSRIWGGRKEIRCVLYMAALTAMRCNPAIHRFANRLLEQGKVFKVVITACMRKLLIILNTMLRNQSLWRPEKN

SEQ ID NO: 181867 - protein, 394 aa, unidentified
MHKDTHCAVVIDCWMNKLGEINFENRPSRFPAFVEDVRKICGTKEIVFGLEDTRGFGRNLAAYLVGRKFEVKHVNPAYTSAVRLANPIIYKDDSYDAYCVARVLRDMVDTLQDAKHEDIFWTIRQIVKRRDLIVKSNVMNKNQLHSQLAYSYPSYRKFFAIIDSKSALCFWENYPSPEYIWNTTPEEIYHTIKPVHQALKIQRIHEIISMIERDGDTRKDYQPERDFIVRNIVKDIRHNKELIAEIDGELRKLIPLTGYKLHTMPGIDLVTEAQIISEIGDINRFPDSDKLARFMDLAPVQFSSAGKGKDQRCRNGNRTLNAIFHFLAIQMVAVSASGKPRHPVFREYFEQKVKEGKNKPQALVCVARRLVRIIYGMMKTRTEYRPFEKADDKN

SEQ ID NO: 181868 - protein, 343 aa, unidentified
MNISRVGVDLAKSVFQLHGVDAQGKAVWKRRLSRNKWIGTLCKALPRGCEVGMEACAGSHHWARVLIGHGYSVKLIAPQFVTPYIKSNKNDANDAEAICEAMSRPNMRYVKIKSIEQQDIQAIHRVRSELKSHCHAKANQIRGLVTEYGLVAPQQLSSLRAAVPCWLEDADNGLTDRFRALLKGLWDDLTYLDQRMDDLNRDIETIAKTDPMARRLQQLRGVGPLVSTALIAAVGNGDQFRRGRQMAASIGLTPKQFSSGGKERLLGISKRGDSYLRSILIHGARSTIHHAKHKDDPLSKWVTGLAERRHPNIAAVALANKTVRMAWAMMQSGEDYNPDRAVA

SEQ ID NO: 181869 - protein, 355 aa, unidentified
MKFYCGIDLGARKTHVCLIDEEDRKLLDMKMDNDLCIIESALRVYKSSLEVVVESTINWEWLVYGLQKHGYEVKLAHTLGLKAITWSKKKTDTWDAFTLAKLLRGRLIPQAYIYPYELRPVRDLVRERIRLVTKRATEYGAINRTLLKYNIQGFDRNAVKHLSEQDMHELYHHPFVRTKATMELQRIELLTEQIKHIEKALFARARQDSMFSLLQTIPGIGDILALTILYEVGNIDRFAHSRAFCSYCRVVPGIHQSSGRSYRSPNSKQGNRYLKWSFSQAALLSIRYYPQIRRLYDRLAAKRKKAARLVARSIIAHKLAQAAFHVMKHQVEYNEELLFRFSGEHTQGKTVTPLA

SEQ ID NO: 181870 - protein, 412 aa, unidentified
MKDLLEISCGLDVHKEKIVACILTGPLGKPTRSEIREFSTLIPDMIALRNWIVSKNCHHVAMESTGIYWMPIYEILEDAFYGDITLLVVNARHMKNVPGKKTDMRDSEWISTLLRAGLLNGSFIPEKRIREFRDLNRYRKSVIHDITSQKNRIEKFLQSSGFRLSSFISDIFGASGRNIILHLIEHGQIDKTALDSCLKTKTRNRIDEILMSVNGTLSEHQKAFLRILMTHYDSLKKHLAEIETSLEEDMAPFALQVEQLNSIYGISTTASCAIIAEIGIDMKPFKTAEHICSWAGLCPGNNESAGKRKSTSVTKGNPYIKSMLCEIAWVIAGKRNTYLSAWYWRIKQKKGAKKAIVALARKLLVIIYTMLKQGTLFDESCFETRRKNCEQKQLSRYIRELEKHGYHVEAQS

SEQ ID NO: 181871 - protein, 324 aa, unidentified
MSSPAPANPVHVGIDVAKASLDVCLLPSGRTLSVGNDDPGIAQIIALLQQQQQQQPIALVLLEATGRYERRVASELLDAGFNVAVVNPRQARDFARALGKLAKTDAIDARTLAEFAQLGHVRLREKEPEKRTLLDDLVTRRRQVVQMLAMEKTRLQVPQNKQTRLMIAKVIRLLEQQREDLDREIAELIESDDDWRNKRDLLSSVPGVGPVTAGGLVADLPELGKLNRQQIAALVGVAPVNRDSGTLRGKRTIFGGRASVRTTLYMATFCATKYNPVIRRFAERLRAAGKPFKVVLVAAMRKLLTILNVMLRENRPWDPKLQTA

SEQ ID NO: 181872 - protein, 406 aa, unidentified
MKQIVSVGIDVSKGKSTVCAMIHPNTIIKESFEVLHTVEEMSMLADYIGSLDGAIRIVMESTGHYHLPVAQFLYQKGFFVCVENAYIIRQFSRIMLHGAKTDPLDAKKLAKYGLAYWSELKPYKFHPSCYTELSLLSKQYQTYIKLLIAAKQNVIHLMDEMLPGFKEALDTASSVQFSKVKYVDFAKEFYHVDMIKSMGKEIFRENYKQWCKEKGYRFQSEKADELFHLAEDGIPTLPTEFPSTRLCMEVATEQVSQLGYALEQILSQMQNLAKTLPEYQTIRQMGGMGEKLCVRFIADIGDVRRFHNGKALVAYAGIDAPPYQSGQYTGTKRRISKRGNSALRKTGYEVMKSLKSHPPKTDTRVYDFIIKKENEGKSRKQAKIAGLNKFLQIYYARVMEIYKNIV

SEQ ID NO: 181873 - protein, 421 aa, unidentified
MVALPVSRRFIMEPILISCAGMDVHEKKVDVCIAHGPFDKPPKFEIRTFSTMTSDLEELTTWLKKYEVTTIGMESTGIYWKPIFNVMEGPFEIVLANAQRLKAIPRKKTDIMDCKRIANLLRYGLLPNSFIPPREIRELRDLNRTRRKFVGMMTSEKNRLVKLLEAANIKLSSVVTRIYGVSSLAMIRSLLEKDKLSREDISKMAKGKLKKKVDLLEKALNGKLTDHHRFLLEMHLQNIDYLAKQIKKLDEEIEKKMVPFQKESKLIQTIPGISEVNASAILAEIGADMSQFPDEAHLSSWAGVCPGNNESAGKKKSGKTQKGNSFLKGALTEAAWAASKTKNSSYNAFYHNLVGRKGKKKALVALAHRMLIDIYFVLKAGEPYQDMGAEAIHERTSKRRERSMIRSLEKAGYSVTKAATA

SEQ ID NO: 181874 - protein, 338 aa, unidentified
MEWTVAIGVDTHKEVHVAVALDALGAELDCREIATTPAGYRCLLTWAQELGVPAFAVEGTGSYGAGLVRFLERAGVAVYECERPRRQERRRGKSDLIDAALAARRLLSGERLSIPRGGGRREDLRLLLLERRSAMQARTAARNQLSALLVTAPEHVRERLGALSGERLAQAAARLRPGPDVLNGVLRRLGKRVERLSKELAEAERALAALLAEVAPDLLEECGVGPVCGAQLLVSSGDPNRMTSEASFAALAGTSPVDASSGKQRRHRLNRGGDRQLNWALHVIALQRIRHHPETSAYYERLLAAGKSTREARRCVKRALARHFYLRLREIPRLPLTT

SEQ ID NO: 181875 - protein, 342 aa, unidentified
MEYGAIDLHKVKSQILVVDGAGTTVLETRIATSRAEFTRVFGRPAMRILLESSTESEWVAQTLEGLGHEVVVADPNYLPMYGARSRKVKTDRRDVAALAAACRTGVYRPAHRVSAAARDLRRTLRVRTQLVRARSGAICVLRSMLRQEGLPLSSGSAERVLMRLDRVALPAALDAIVAPLRDLITHLNTQLLALEATLTATARQDARVQRLMTAPGVGPLVALHFVAVLDTPARFGGSAARASAFLGLVPSEDSSAERRLKGHITKTGPSDLRALLVQASWTLWRSRTAEAAALREWAHALAARRGRRIAVVALARRLSRILYALWRDETVFRAPARPAAAA

SEQ ID NO: 181876 - protein, 412 aa, unidentified
MELLHRRCCGLDVHKETVVACLRLVSDGKVTTEVRTFQTTTADLLRLSEWLAANECTHVAMEATGVYWKPVWRILDDGEFALVLANAAHVKNVPGRKTDINDAMWLAELLAHGLIRASFVPDAQTQEMRNLLRTRKQLVREQSSHVLRVQKTLEDANIKLDSVLTDLMGKSGRAIIEALIAGETNPVKLAGLADRRVKASFEEFREALRGRVTKHHRFLLRLHLNQIDALDAAMATLDAQVEANLGPFRTAVELIGSIPGIKNLGAHVIVSEIGIDMSRFPSAAHLISWACICPRNDESAGKRRSNRVRKGGTWLKTTLVQCAWAAVKKKDSYLQAQFYRIKARRGPKKAIMAVVASILTAIYHMLKDGTMYKDLGRNHFDRRSSDQQKNRLVKRLVDLGYVVEIKPLAATA

SEQ ID NO: 181877 - protein, 473 aa, unidentified
MQRRILGVDLGVATDHTVVVLDETGAQLARRRAQPTRDSLEALEAVALAGADKGVRLEVVMEATGPAWLPVAVFFAERGHRVHRVSTQRAADLRRYFRRHHKTNRIDATTLARMALIEADALREVELARGEAAALDREVRVTERLTEEIATRKTRIRDLARQLMPTSGRAFSKTMGRADLEILRAFGNPKVLAAQGLSALTAWVEQISQHMHGEAKARAWLTAAEEALDLYGDSDAVPFEALAADLATEIALLDALEAARAPHERRREARYAAVDPAGLARSLPGIAEKGGPLVVAVMGRPGRFANADRFASFTGLVPKASETGETDRKSQAMTKAGNRKLRRCLYRAADTARKEDPQLARIYWVQMTERGATHTKALAVVAAHLSRRLWRVLVDERPYVVADVDGRPVDKTEAKAIIAERYTVSEEIRRRRRSRKNAGKAPQQVLEGHDRKCARGAITRRPSPTPIVAAAGR

SEQ ID NO: 181878 - protein, 427 aa, unidentified
MSYKIAGIDVHKRMLHVVVSDVEVDGEYDFTRRIFGSLPEAVRSLAAWLVEQQVQEVVMESTAQYWKPVWGTLERYWKPICQTREGALATSGKLHLAQAQSNRGRRGRKKDFRDAERLVKRLVAHELVLSFVPDVEQRLWRTVVRTKYQLTRNRVQLQNRLEALLEEAHIKLSSLVSDLLGASARRMLAAIADGETNRETLAALADRGLRATQEQLQDALGVCQELHPVYRRLIRMVLDEVASIDKRIEQLNQEMANLLRPHEDQVKRLAEVPGLGVDSAHQVIAEVGATAATFPSEKHLSSWVGACPGDEESAEVNRSRRSPQGNRHMRRILNQAANAAAKHKGSIFEIVYRRYVPRLGHNQTIGIIAHKLCRLVWKILHQGIQYEERGPDVKKASKQKRTRKMIQALRRLGYRIEPSPSQSAVPA

SEQ ID NO: 181879 - protein, 426 aa, unidentified
MNFTQNEKLNQVTTETLVIGVDIGSETHYARAFNWRGIELGKVFRFANNGEGFGQFKAWIDSLSGKTAKSSIMVGAEPTGHYWFSLASYLKDHDIRLVLVNPYHVKQCKELDDNHPSKTDSKDPKTIAKLVIDGRYNIPYIPEGIYDELRIAMNCRERIVRELVVIQNRIERWLKIYFPEYHEVFKDFEGQSSLLILSNMPLPADVVNAGADGINQLWRKNKLRAVGMRRAQTLYDAAKRSMGCSEGSGAARMEIRLLLEDYHTKKAQHDSVMAVVAELCMQIPAVQKLLAIKGIGILTVAGFFAEVGDLGRFQSPKQIQKLAGLAIRENSSGKHRGQSGISKRGRRRLRALLFRAVLPLVATNREFAEIHSYYTNRKENPLKKKQSLIALCCKLIRVFFALATKDEDYDPVRLLGDIRHPAALAA

SEQ ID NO: 181880 - protein, 479 aa, unidentified
MTPHKDYCLDPPPPAPTPLLPESAVLSEALQVCHPHAAGIDIGEAEHWGAVPPGCDPQPVRCFGTFTADLDALADWLIDCGVTTVAMESTGVYWIPLFELLEARGVQVLLIDPRQAKRVPGRPKTDRLDCKWLQRLHTYGLLAGAFRPEAHVCVLRGYLRHRQMLLTYAAHHVQHMQKALEQMHLKLTQVVSDITGVTGMAILKAIIAGERDPQHLAKLRNPHCHHTEDDIAKALQGTWRAEHLFALRQAVELYAFYHQQITQCDQQIKAHLETFADKSAGRPLPPKARRSKKTNEPRFEARTPLYRMAGVDLTTIEGIEEGTALVILSEIGTDMHRWPSVKHFCSWLGLCPQHKISGGKVLSRRVRPGAHRVAVALRLAARTVQHARTALGAFYRRMRSRLGAPKAITATAHKLARLVYSLLKHGSAYVQQGLDAYESQYRERKVKAMARQAQALGYTLVALGTPEVPHFNALAAPTP

SEQ ID NO: 181881 - protein, 340 aa, unidentified
MKSVGIDLHKKTISVCVMNERRDILARRRFDCANIDAIEQFFRSLGEFQMVVEATASYEWLFRLLEPLANRAVLAHPKKLRVIAESTRKTDKLDAQILAEFLVLDMIPTSYRPTPRQREHRRLVRQRAGVQKRITSTKNRLRRVLADYNADIPSLFTREGRKYLEKVKLSGADRFTADQIAAEQDFLMTQLQECDRQLAEFAKRAPAAETESRALLRSIPGVGRVTTEVVLAELADIRRFRSQKKVAAYAGLAPGQRESAGKRKELHIEKNGSKLLRWVVVEAAWQLVRRSIYWRNIYESLKKRLRAKKAIVAVARRLLGVMTAILKTGQPYQHAVAFTN

SEQ ID NO: 181882 - protein, 323 aa, unidentified
MNKDIKYFGIDISALVFDVTDSDGNYHQFKNNEFGFRKFAKLLSDMSHCVMEATGYYHYQLAYHLLESGIKVSVENPLAVKRFIQMKLSKIKTDKSDSKLICEYAKQVELKLWQGNSKDEIECLQIVRALSVYTKQSTMIKNKLHGEDVLGNPSKLVVRSLKRSLSQIKKEIKTLEDKLLVLVKETHQDLLTRLQTIPGIGSKTAIMLVVLTGGFERFTSGSELCSYAGLTPLIRQDGSSVNGRGRISKIGNKKLRNLLFMCSFNACKYNKACRDLYERIVAKGKSKKLALIAVCNKLLKQAFAIAKSGLIYDDAYKSTLAKN

SEQ ID NO: 181883 - protein, 424 aa, unidentified
MTESFEPVVFAGVDWATEKHDACVVDKSGRVLAERAFAADAAGLAAMADWLIAHGDAPPEEIAVGIEVPHGPVVETLLERGFAVHSINPKQLDRFRDRFTVAGAKDDRRDARVLGDSLRTDRRAYRRLVNDDPDVIELREWSRMAGDLTREDNMLCNRARQQLLRYFPQVLALTDDVGEAWIRALLKAVPTPDAAHHRRRSTIEKLLRSHRIRRWKADEVLEILRQPALTVAPGTVEAATAHLRLVALRIGLVRSQLSECHAMLDAICKRLGTDDEREGRKNEPRDVEILQSLPGVGRIIVAVLFAEASRPLRNRDYQALRAHAGIAPVTASSGKRSGRRAKVSMRKACNPRLRNAMYHWARVAAQCDPIWRTRYRELRARGHSHGRACRGIADRLLNVAMAMLKTRTLYDASKIGQRRARTAA

SEQ ID NO: 181884 - protein, 457 aa, unidentified
MKWYLGIDVSKGYADFALLSELLVQQEETFQLDDTRSGHEQLEIWLDALFKRHPNLEIDCGLESTGGFENNWYALIIKLSSSLPVRATRLNPSVVKNASKALLNANKTDAESAREIAGYLKRYEDQIDFAVYDNQYASFRSLQNHLELATKQKTQLINELKQILYSSFPELQRFCKQGIPGWVLELLMLYPSPEKLVRQKPSKLARIKGITDAKAKSLIEKAQTTIASRSNSTYEFLIVQLATEVKHKQEKIKQLKQYLEDHCKGKEKEWLESIKGIGSYSAAAIMIQIEDIRRFASPKELASYFGLHPLIKMSGDKRMVSRMSKQGRPAMRALLFMCANSAIRCDEHMRTIYARHRAKGKNHKQALGVIMHKMTRVIWGVLKHEKPYDSRIDQANQSKNNQNPVQDELKETENKRRMQKFDSDAPVSRIASKKRRVHAASQVGEAELLRDLEHEPR

SEQ ID NO: 181885 - protein, 340 aa, unidentified
MIGSTKFFIGIDVSKPYFDVSLMGVISHVKQAIETARFENTAPGIKVFEKWLKSHSVSFDENSLVVIENTGIYHRLIWSFCSKKHLPIHIGNAAHIKWSFGIARGKNDKIDSIRLCNYAFKESDSLKATAPLDPVLLHLKDFISTRTKLLKQITGLRVSIKELGNVNEKPHQKLIEKTLKSAIDGIAKSIRNIETEIKKIIEVNQAFKNNYRLLVSIPGIGHITAIYLIGCTANFAGSPSGKQLACYAGVAPFEHSSGISIKGKTRIHRMANKELKKLLHLCALSAIQYNQELKTYYHRKKNEGKHSMAVLNAVRNKIILRVAAVVKSQMPFKNNYKIVA

SEQ ID NO: 181886 - protein, 339 aa, unidentified
MTLYCGIDLHSTNNYLGIYDQDDREVISKRLPNDLATVLRSLEPYREELAGIAVESTYNWYWLVDGLRDHNYNVVLANPAANTQYNGLKYTDDHYDSRWLAQMLRLGILKSGYIYPPEERPIRDLLRKRMRMVQSRTAQILSLQNIISRNTGKNLKWRKIEEITDERMDELFNGNKLLVMATRVSSKAISTFNEQISLIEKTVKAEAKVRPEFKLLKSIYGVGTILGLTIMYETGEISRFSEVGDFCSYARCVGSRRISNGKKKGENNTKNGNRFLAWAFVEAANHACWKYVQARAFVQRKSAKANYTLAIKALAHKLARASYYVMRDQVEFDPARLFG

SEQ ID NO: 181887 - protein, 361 aa, unidentified
MTGMVTYAGLDVHARSTHAAAIDVSTGELLRARFGPGVEEPVAWLQGLPGPVRACYEAGPTGFGLYRAASAAGVSVEVIAPGKTPRGPSDRVKTDRKDAELLARLLLAGSLTTVVVPPVEVEAARELMRAHDACRRDLMTARHRVSKMLLRHGRVYPESSTWTVAHRRWLAAQQFQEAVSDLVFADLIASVDGLSARKAAIAERLSRLAEDEAWWPTVARLRCFRGVDTLTAFALHLELGGDWQRFERASALSAWLGLVPSLHQSGESSHQGSITKTGSGFARRLLVESAWHYGRPPRIGVTLQNRQLGQPDHVLQIANRAQHRLHRVYHRMRGRGKPHNVTVVACARELACFLWAAATAD

SEQ ID NO: 181888 - protein, 350 aa, unidentified
MVVVGADVHKRTHTFVAVDEVGRKLGEKVVEATSTGHRQAVRWARTQFGVELVWAIEDCRHLSARLERDLLAADQKVVRVPPKLMALTRKSARTRGKSDPIDALAVARAYLREPDLPIASHDEVSRELKLLIDRREDLVGQRTSTINRLLWRIHELDPSRAPKPASLDLAKHRSLLGDWLSTQSGLVAELARDELADITRLTEVINALAKRIGERVRVIAPALLAIPGCGELTAAKIIGETAGVSRFKSEAAFARHSGVEPIPVWSGNTAGRVRMTRSGNRQLNAALHRIAVTQIRLEGMGQTYYRHRLTEGDSSTEALRCLKRRLARVVFHHLHTDERTRQQPCQPAAA

SEQ ID NO: 181889 - protein, 368 aa, unidentified
MQEGNTTFVGLDVHKDSIAIAAAQSDREAPRFVGTVGPDLRHLRKALGNLGGIENLQVVYEAGPCGFGLARTLRSAGIRCEVIAASRITHSPTERIKTDRRDAMTLARLARSGDLVRVTVPDERDEAIRDLTRAREDAVKACLKARQQLKAMLLRHGHRYRGRKPWTAASDRTLSNISFAHPAQTIAFAEYRQAVRDTHERVERLTEALRVQCEGWRMKPLVAAFSCLRGVDFLAATTLLAEIGDFTRFAHPKELMGYLGLVPSEYSTGSRHHRGDITKTGNAHARRVLVEAAWNYRFPARLSLPITRRQEGQPKIVRDIAWRAQLRLAHRYRRLLSRKLHINKVCVAIARELTGFLWDIARQVDISA

SEQ ID NO: 181890 - protein, 390 aa, unidentified
MIYVGIDIAKDKHDCYIVTSDGVLISDNLRITNTLEGFNTLYSIISSNCQVASDVRIGLESTGHYGINLENFLRTKGYQLTVFNPLAVASFRKSQTLRKTKTDKVDAKFITTLLFNSDQTPTALVSDEIRELKSLTRHRYRLIGQCAKLKVSVSRLLTILFPELGTLIWSIHQKSSYAMLLEFPSAHDISNCHLTKLTNLLSKTSKGKYGKDKAIALKNLASKSIGINSSGTSFELQQTIRIINYYLDEISILDKKIKELLIQMKTPLISIPGISYTLASIMLSEIGNISRFQTPAKLLAFAGLEPSVYQSGKFQATGTSMVKRGSTYLRWAIIQAARLVAMRDPTFKLYQEKKKNEGKHHYVAISHTSKKLLRVIFHLLKNNINFVPQN

SEQ ID NO: 181891 - protein, 384 aa, unidentified
MFAGIDIASERHVLARLDDAGAAIGKPITISEDREGYDALLAALGRAPVLIVMEATGHYWKNLFVVLTTAGHDVALLNPLIARRFQETNLARTKTDALDATGLARLAFEKRPAPTHLHDEIAETLRELVRHRDRLRQDFDDRVRQLHRLVDLGFPEFTRYVRSLDSMLATCLLAEYPTAHAFARATPRRVARLRYDGRHFVGPDLAHSLVEAAKHSVGQHHGPAYKLQARHICQDLDTWRKRLAEIEHDIENLLNTHVTGKLITSIDGIGPQTAARIIAATGDPAHFKSAGAFAAFVGVVPALRQSGKQKGARAGIGHLGHARLRRALWMPVLSAVRLNPWLRAFYLRLRAAGKPPKLAIIAAMRKLLHAVYSVAKHRRPFVTT

SEQ ID NO: 181892 - protein, 344 aa, unidentified
MSKHSIRAGDVAGLLVRLAQLKEKARGRTGRDFPIIAIQEAGLDGFWIHRVLQSEGIESHVVDAASILTSRRRRRAKTDGIDGETLVRTLLAYKRGEPRVCAMVKAPTPEEEDRRRICRERKTLVGERVEHVNRIKGLLFAQGVSDYEPLKRNRRARLEELKTGDGRPLPAHLKAQISRELDRLELVLPQLKGVEAERDALLKPVSEGCPAPAAMLAQLKGMGPEFTAILWSEGLFRSFSNRRQLAAYAGLAPTPWQSGSVAHEQGVSKAGNPRLRTTMIQLAWLWLRHQPTSALSVWFQERVQSNGGKMRKTTIVALARKLLVALWKYSTSGVVIEGAVMKTI

SEQ ID NO: 181893 - protein, 326 aa, unidentified
MRQPGSHTLRLKTQVALDISSKSLDVHFKSDGNAFSVPNTEEGLNRILKSFITYDVSLVLMESTGGYEDLSACFFQSRGFDVAVVNARHARSFSRAMGKLAKTDRIDAAVLADMAFMIDSSRDRDRYIKPLTDEQRKRLSVMTVRRRQVVGLISTEKQRLIHADDWTRSSIKKTIKALTTELRHIEHQISDHVKKNFVDLSKLLLSIPGIGEQAMTVLIGELPELGKADRRTVSALIGVAPFNHDSGNFRGRRRIWGGRQSVRNVLYMGIISATRFNPVIRSFYNRLVSAGKPKKLALIACMRKLLTIINAMMRTGKPFDVSLHGV

SEQ ID NO: 181894 - protein, 281 aa, unidentified
MNFKRIGLDTSKAVFTLHGVDHDEKAVLRRNMNRAEMEAFFAKLPPTHVALEACGGSHHWGRRLAAMGHTVQLIPPQYVKPFVRRGKNDRNDAEAISEAAARPDMPSVPVKSAEQQAEAIVLSARELLVRQRTQLVNAVRGHAAEFGVIAAKTISQLPGLLEAVAAAETVPATAKQMLAFLGAQVAQLDGQIAELECRMKQQHKANPVSQLLAEVPGIGPVSALSLALTIDPGRFTSGRHFAAWLGLVPKEHSTGGLSAWAASAEPATSGCGSCWWSAPWQ

SEQ ID NO: 181895 - protein, 350 aa, unidentified
MQDVSAASGYLGVDAHSATCTLCAVDLKGEIIMRCTVPTNARQLRAAVSGLPPGYWAMIESSNVSIFVRDALASVLGRVILCETRENRLIAKSGDKSDDKDAHRLARLLRLGEFKEVYVPPRSWQEIRELIHVYLKVVGDVIREKNRIRDRYAQHGVHITDSAYGDGRHEALEKLNRPALKPVFDAMYGILDAAEEAKDDLDHALRSRLSQKKEYRLLKTIPGVGPICAALMVAIIVDPGRFPSKKHAWNYAGIGASEDSTGKTVKVKRNKHYNRLLKYAVMTAALVAIKGDNRFARLYQTLLEKFEDPQKPKKAASMARKMVARAILAAALAMWKTGTAYSENTQAKSA

SEQ ID NO: 181896 - protein, 375 aa, unidentified
MKEKLRFLGLDVHAETIAVAIAEPDGEVRSLGTIPNRAESIRKLVKKLGSVEKLRACYEAGPTGYVLYWQLAELGVKCEVVAPTLVPVKAGDRVKTDRRDAEKLARSYRSDDLTAVWIPDEGSEALRDLVRAREAAKQDQLRARHRLSKFLLRSGQRPAPGVKAWTQIYMAWIRQIHFAQKAHESTRLDYLHEVEHMGERVMRLEQAIAEAATLASPELREVIQGLQALRGIAHISAITIAAELGQISRFEGARQLMGYSGIVPSEDSSGTRKQRGSITKTGNSHLRRIAVEAAWSYRLPPGVGPALRKRQEGVPQEIKEIAWKAQNRLYKRYCRLAASRKDQRKIITALGRELLGFIWAIGIKAETAARQRIAA

SEQ ID NO: 181897 - protein, 341 aa, unidentified
MEKYVGLDVSMEETSVCVLDGGGNIVFEGKTSSQPDALSKLLRAKASDAARIVLETGSLASWLWHELRSRNFPVICLDARHARAALSMRVNKTDRNDARGLAELARMGWYREANVKSMESRYTHSLLAARAKLVDLRRDVENQMRGLLKGFGLPPGKGGIKALLEKIVVIMREAPHLHMLFKPMMLAHSALVTQVEFYDVQILKLAKGDETTRRLMTAPGVGPATALAFRSTIDDPNRFKSSNDVGAYLGLTPRRYQSGELDRTGRISKRGDRLTRFYLFEAASVLLTVVKRWSVLKAWGVRLAKRVGIKKAKTAVARKLAVILHCIWVDGTEFQWGKEKA

SEQ ID NO: 181898 - protein, 342 aa, unidentified
MNAAGIDVSSRKSTVAVLRPFGEVVRLPFDVAHNTEGLASLAEQLKALDGETRVVLEHTGRYYEPVAKALHEAGLYVSAVNPLLIKEYGANSLRRVKTDKADAVKIARYALDNWADLRDYTPMDTIRYDLKTLNRQFQLASKQRTASANNLIALLEQSFPGIRKCFDSPVRSDGTQKWVDFVHTFWHVECVRKQSLNAFSERYRKWCKRHGYIFKQGNAVEVYSLAKNAVVLVPKSEVTKVLVQEAANQLTSISRSVETYRAEMERLASTLPEYPVVMAMYGVGKSFGPQLMAEIGDVRRFERKQSLVAFAGIDPMPNQSGDKNVRSNKSSKRGSPISWGYT

SEQ ID NO: 181899 - protein, 386 aa, unidentified
MDESGKRLGSRRLPEGLTGIGQLHELIAQHAEEPDQVVVGIETDRGLWVGALTAAGYQVYAVNPLAVARYRDRHHLSGAKSDASDAKLLADLVRTDRHNHRPVAGDSADAEAIKVLARAHQSLVWTRTRHTNALRNALREYYPAALAAFEDLAHGDALGVLDRAPSPIQGARLPLTAIQSALKRGGRQRNIAARAREIAAALRTQQLAAPAPVAAAFAATTRATVGIIAELNRQISELETTLAEHFETHPDADIYRSLPGLGVVLGARVLGEFGDDPNRYTDAKSRKNYAGTSPLTIASGKKRAVLARHVRNRRLYDALDRWAFCALSTSPGARLFYDQRRAAENTHHQALRALGNRLVGILHGCLRHHTDYDENTAWAHRTPVAA

SEQ ID NO: 181900 - protein, 381 aa, unidentified
MRTAYVEQHSANEPVLAVALELAKASWKVALSDARRAPRLKTVDAPQPLARLEQVVQTIAETRALWALPASARVVVVYEAGQDGFWLQRALQARALEVLVIDPASLLMARRRRLAKTDRLDALRLVEALLAWLRGEQRRFQVVCPPSVEDEDRRHWGRERQQLQRELQQHRNRIEKLLATVGCWTRLDRAGRQQLAEGTLQDWAGQALGAALQARLQRELQRWQEARTQLRRLEHEHAQRFGTRQAEQVARLSQLRGIGTVGARQLVLELFWRQFRNRRQLGACVGLVPSPYDSGTLRVDQGISKQGNPRVRALLVEQAWLWLHYQPNSALSHWFAKKAGGDCRRSRRVAIVALARRLVIALWRYLERGELPAGATLKAVP

SEQ ID NO: 181901 - protein, 397 aa, unidentified
MYIVGIDIAKRKHEAAVIDGEGTVIIKPFSFTNNCSGYNRLLAMLAKAKLPLDEVSFAMEATGHYWLALFTRLQKEGFRVQVINPVQTNSIRSFYIRQAKTDPRDALLIAEVIRFGHFSESTLHPENIYELRELCRGRHAIVSMQADVKRKVVALLDQVFPEYETAFTNLFGDTSMAILQTCPTPKELSEMPFEELCHLIEVSSHKRFRMAKAQELQALARGSFGFAMAGDVFSTMIRLYAKHLDFLKQQVREMDRKIAEIMETLDTPITTITGIGPTLGAYILSEIGDINRFSSAAKLAAYAGIDPTMRQSGEYNGVRNRMSKRGSPYLRHAIWLAASSAVLHDPALKLYFQKKRDEGKPYMASVGHACRKMVSIIYAVMRDNKAYTPCIPNEISA

SEQ ID NO: 181902 - protein, 334 aa, unidentified
MMNEHAVGIDVSKKKLDICVVSANKTKTKVLKNTPAGHGELERWLRQRDLPKTTPVVLEATGPYSERVATMLADAGWAVSVENPARITGFAQSELSRNKTDKADAKLIARFAQKAELQLWQPPSLAVRELRALVDRLQALIDMRQQELNRLEAIDQGSVTSVGDMVREHIDWLNSEIKNVQSEIDDHIDGNPELKHDAELMESIPGIGKRASAQFLAYIGDVRRFKSAKALAAFIGVTPRQKQSGTSLNGRSSLSRAGHTAARKALFMPGMVAKHHNPVIIAMAQRLEQRGLTPKAIVGASMRKLVHLIYGVLKSGQPFKAEIPMAGLEIQEGI

SEQ ID NO: 181903 - protein, 397 aa, unidentified
MRSLSEYRVDEPTVIPSERSESRQYEGASPILVVCKCNLATPEGSSPMSNHKFAAADVHAATTTFAVLDDSGKFVMETIVETKAESLLSVVKSISGAVHLTYEEGTHAAWLYDLLRPHVAELLVCDPRKNRNDSGNKSDRIDARQLARWLRSGDLSPVYHGHDSTKVLKELVRGYENLVADSARTKNRLKAVYRSQGESTSGGDVYRIEKREEWLSKLRSSGLRSRAEWLYSQMETLGELRGEAEKAVLREAKRHRPCSLLKSVPGIGPIRSATIVAHVATPFRFRTKRQFWSYCGLAVVTRGSSDWEISGEELRRSRRPVATRGLNRNHNRHLKNVFKGAVRDAGPFRSHLDSLVESGMRESMARLTVARKIAATTLAIWKKGEKFELSKAIIRSE

SEQ ID NO: 181904 - protein, 418 aa, unidentified
MSEDENTRGWRRYIGLDIHKHYCVIAGVDREGKVVLQAVRVEHADLEGWLKKNLRSTDHVVIESTTNAWHVYDLLEPLVERVVVANPIKVKQIAQSRVKTDVRDTLILARLLAANLVPDVWVPPAHVRELRQLLSQRRQLVETHTQILNRMHSVAHRHHLTHKRGKRFNEKNTAWQKDKRLSKVEQFQLELEMENRAYIEKQINRIGKEVAKMSHRNPWAQDMTYLMQLPGFGVITAMTVLAAIGEVQRFPSAKHLASYSGLTGGLDQSGTKFVEKGITKEGRKELRWALVEVAQRAVKSDPRWTRKFQEMEKRMHRNQAIVAVARQLLELVWHVLTRRQPYRHFSHERIAYKYLTWAWQMDEAARDGLTRQQFARYYLMRLGIGHDLTRIARDPKHPRKLATEEELLALRPELHHIE

SEQ ID NO: 181905 - protein, 425 aa, unidentified
MNSISNKKINQVTDQTLVVGMDIAKKKHYACFVDERGRVLKKPFPVLQSREGLEWLYQCIVKAMEEFEKTEVIVGIEPTGHYWLNLAYFLDEKGIPLVMTNPMHVKRSKELDDNLPTKHDAKDALVIARLVKDGRFSYPRILKGVEAELRTGATFRSKLVEEQGAVRNQMIRWLDRYFPEFTQVFPSFGKMALAVLEYTPFPSDLAGKELEEVLALYRQSEGLQSPQKPKAKKLMELAQHSIGVTEGQQMARIEIATLVRRYRQLEEEIEALTQQLTELVQTSVEYEWLKTVPGLGDATIVELLSEIGSFSHYQDPRQLIKLAGLTLREHSSGQHKGQKRISKRGRRRLRALLFRVMMPMIRHNEAFRQLHEYYTTRPDNPLRKKQSIVVLCGKLLKVLHAVCTKHQAFDAKRMMQDIFGLETAA

SEQ ID NO: 181906 - protein, 452 aa, unidentified
MPQRPRVLRYQRKFIGHFDVVNPDAAGIDAGDESHFVSVPEDRTDEPVREFGTFTEDLHALADWLVECRITTVAIEATGVYWVPLYEILDERGLNPQLIDSRSIGRRNKKTDVVDCQWIRQLHTFGLLDAAFRPPNEILPVRALVRQRGMLIERAAQNIQRIQKALNLMNVKLHVVLSDIVGVTGLQIIRSIIAGKRNPAELASLRDRGCKASEQDFVSALTGNYRREHLFALRQAVESFDFENGLIAQCDTEIERELQQLHKQITVENAKPKKKQRKNQLRFDGKTILHEIAGTDLTAIDGLEASSVLTILSETGSDMSPWQSSKHWAAWLTLAPNNRITGGKPIRKRGPLIHPNRAAQAFRLAAQTLERANCALGAFFRRIKARHGRQNAIKATAHKLAVIFYTMLKNKTAYVDPGVNYYERRYRERRLNSLIRQAADLGCILVPATEVH

SEQ ID NO: 181907 - protein, 466 aa, unidentified
MSTTPPRAKRRRQVGTASKRKVPLPPQLKRINLNAAGIDIGSEEHWAAVAPGRDREGQDVRRFEAFSGDLCALADWLGQCGIETVAMESTGVYWIALYELLVERGFEVLLVDARRVKNVPGRKTDVLDCQWLQELHTYGLLRGAFRPVDQVCILRSYLRQRSMLVAYGSHHIQHMQKALEQMNLKLAHVVSDITGLTGMGIIKAILRGERDPVELAKLRDPRCKNSEATVARALEGHYRQEHLFSLQQAVELVEFYQKQITSCDCQIEACLQQFENKSPKTPLTARPHKRRRSEVAFDARSYLYRITGVDLTQIDSIEANTALTVIGEIGLDMSRWPTEKHFGSWLSLAPGNKVSGGKRLSGRTKPSANRAAAALRLAAQSLNQSQSALGAYFRRLKARLGAPKALTAAAYKLARILYRMLKYGAGYVDQGEAAYEERYRDRLLRNLKRRAAELGFQLTAINSSTA

SEQ ID NO: 181908 - protein, 388 aa, unidentified
MNYIGIDISKYKHDCFILGDFGEILNAEFSFTNDAKGFSELLQTISGYDREHTRIGFEATAHYALNLKLFLEKNGFSFMELNPALVSKFTKGQTLRKTKTDKLDARIIAQYMEQVVYNPHPTSFYHNYSLKSLTRLRDALVRQRSRYLVQLTNVLDCVFPEFKPFFGKRFSATALYILEHYGSPEAIANMNSRSYDILRRKSMGNFTMDKFVQLKQLAANTVGEFNAIYALELDTLLEIYSQLDSKIAGLENEITRIVTDMNPPSLSIKGIGPLSAAIIVSEFGDFNRFSSPDKMLSFAGLEPGFFQSGTSAYTGRMVKRGSGHLRYAIFNCCRVIRLHNEVFSTYYHKKIAEGKPHRVALSHLAKKLVRLIFTLETTGATFDPAKLR

SEQ ID NO: 181909 - protein, 338 aa, unidentified
MKISLVGLDIAKSVFHLFAVSNSGKLIRKKMLRRQQLLSYFARHELCVIAMEACGGANYWARAFQAQGHKVRLLAPQLVKPFVKGNKNDYNDAEAIAEAAQRPCMRFVPIKAVEQQDIQTVHRVRERLVKNRTALVNQVRGLLAEYGIVIKRGVASVRKDLPLILSDSGSDLTEMSRVSFAELLDDLRELDEKVRHYDRKIISINQSHEACQRLDEVVGIGPVTATAVYAAAGTGQDFVNGRHFSAWIGLVPRQHSSGGKPTLLGISKRGNTYLRTLFIHGARAVLRHSAGKSDRFSRWAQALLARRGHNRACVAVANKLARIAWVILAKGEHYRPVM

SEQ ID NO: 181910 - protein, 358 aa, unidentified
MTKYFGCDAHKRYSIFTSVDDAGSTGPYVRVENERSLFRGYLKKIPPRSKIAVETVGNWYWMVDEMEKAGHIPLLANAGKAKAMMGQINKTDKLDAKGLALLLRNGTLPSIWIPPGELRDQRELPRMRMTLVRIRTMIKNRIHATLSKYAIKIDEVSSVFGVAGRKLMNERIRELPPQTQHSVEKQLELLDDVEDQIKESEQQIKAVVQETPAMQLLMTMPGVGMILAVVIAMEVGDVTRFSGPDRLASYAGTVPRVKASGGKIFLGRVRPDVNRYLKWAYVEAANTIVLFHKRWPGRHTVGLYMRLREKRGHAKAVVAVARHLAEATYWVMKKGEPYIERKTKRPVSSTREQARPFA

SEQ ID NO: 181911 - protein, 415 aa, unidentified
MEGLSPLHRRVAGIDVHRMLHVVTVLIEQPDGSVSKHSREFGGFKRDCRALAEWLAGLEVQLVVMESTGIYWKSVYAHLENAGITAWVVNAHFIKHVPGRKTDMLDSEWLAVLARFGLVRGSFIPPKDLRELRLVSRYRRKLNSMCSSQINRLHKMLDDAGIKLGAVVSDIHGVSARAMVRGLIEGQSEAVLLSHARGALKRKTEELAASLDGDLSERHLFVLRHLSESIDALPRQLADIDAYLMRAMQPYAWAHRLLQTIPGIDATAAALILIEIGQDMARFGSPERLACWAALSPGNHESAGKRKSGRTRHGNNTIRFILCECANAARMTKSTLASKYRSLMVRKSHKKAIVAVAHKMIRLIYILLSRRQPYLDQTIDYAAMSAKKNAPRWIKQLKAIGKWPETGATAAHATT

SEQ ID NO: 181912 - protein, 441 aa, unidentified
MEEFTIVNPRAAAVDVGAECHYAAVSPGSDPEGRDVREFSAFTDGLQQLCDWLQRCGTQTVALESTGVYWIPLYELLESEGLQPCLVDARHVQNVSGRKSDVLDCQWLQQLHSFGLLSAAFRPEENICVLRSYMRHRGMLVKSAADHIQHMQKALTQMNLKLQHAVSDLAGQTGLRIIRAIVGGERNPAKLATLRDPRCAQPEAVIAAALKGSYRAEHLFALKQALELYDFYQKQIAECDQQIEAQLQSFEDQSGGGPVPPNGKRARASSGNAPAFNLRESMYRAVGVDLTAIPSLDALSVSKLIAEIGTDPKKWRDSAASFCAWMRLCPGTRISGKKRLSGRMGPAVHRAGQILRVAAQTLHRSKTALGAQYRAMRAKFGPVSANVICAHKLGRIIFAMLKSRKPYREVGEAGYDAGRRKKALRQLERRAKALGFTLQPC

SEQ ID NO: 181913 - protein, 352 aa, unidentified
MTKITTIGLDLAKKVLQVHGVDVEGKVVVARQLRRKEVLAFFAKLSPCLVGMEACGGAHYWAREITKLGHTVKLMPPKYVKAYVKRGKTDAGDASAICEAVTRPSMTFVPVKSIEQQGLSMLHSVRSQLVSQRTQLVNAVRGHLSELGIVAERGVLGLAELAEIVRDKSDERLPVAARSALLVMVNQIETLGAEITRVDTALRKENKATDLGRRLETIPSVGPVIASAFRARVTKPELFKNGRHLAAWIGIVPENDSTGGKPKQKGLSKKGDRYLRALLVSGAMAVVRQARTHPDKHAWVASLLARMSAKQAAIALANKNARIAWVIMVRGGVYEAGHRAPAYRDAALSAVA

SEQ ID NO: 181914 - protein, 319 aa, unidentified
MPETTIGVDIAKQKFDVARLCDNKYRHKKFDNNDQGFAAFLVWMASFGDAQTWICMEATGAYSIPLAEFLVEQGYRVSVVNPAKIHAFAKSELSRAKTDKADAKLIARYCLSMTPGPWTPPPRAIRELQALLRRVEHLLEMQQMERNRLDTADPAIIDSLKIVLDTLQKELDATRQRIKSLIDNDPELKQRRHLLESIPGIGPAASAYLLTALSAHYGFANAKQAVAYAGLAPRIQQSGTWTGKTRISKNGDPALRKALYLPALVAWQHNPVIRNFCQRLKANGKNGKAVACAAMRKLIHIAFAILQSGRPFDANFVLA

SEQ ID NO: 181915 - protein, 520 aa, unidentified
MLEALRGEREAPQLGSLAGGCPATSPCTITTTKSTGRTVSTKTKTRPRRREGHNLPAPRGPSWDLLPGGVDRDVRPVASCASAPKPRAPVQGRQVSRSGRALREEEVQLESDVFWVGIDWATEAHEVCVLRSDGSVLKQTSVKHDGAALRALCDELVKLAGGDSSRVSVAIEVPRGAVVETLVERGFAVFSINPKQLDRFRDRHNVAGAKDDRRDAFVLGDSLRTDTSRYRRIRLDDPVVIKIREHSRIHDDLAEERNALGNRLRDQLLRYFPQVLELGDVYRNKWLWALLERASTPAEAAKLREVTIRLLLKSHRIRSVDSVRVLETLRREPVTVAPGVVEAASAHVALLLTRLRVVDEQDAAVSRRLRELLEALATADAGKAEHRDAAILHSLPGVGTIVCATMLAEAAQILAERDYKMLRALCGTAPVTKQSGKSKSVTMRYACNSRLRHAAHHWARSAVQNDPRSRAHYDALRQRGKSQGHSYRAVADGLLKLLVGALRCGRLFDAERWRPVPAAA

SEQ ID NO: 181916 - protein, 359 aa, unidentified
MIVIGIDPHMKTHTAVALDAATGRTLAERTVTCSDAGHDELLTWARALPGDRYFAIEDCRHVSGRLERHLLPRGERVVRVPPKMMAGVRHSARSWGKSDPIDAECVARAALREPSLPEASLTGPEHDVRLLADHRDTLVDERKRIQKRLRWNCHDLEVGLALPPRVLDRYVWLDRLHAALEALPEGVRRRIALDQLVRCRELTKEIRSLEREIAARMQQLAPDLLQIPGCSALCAAQLVGQTAGASRFSGKAAFAMHVGVAPLPASSGQTNRHRLNRCGNRSLNSTIHMIAVTQARMHPPAIAYMERKQAGGMSYREALRCLKRQLARVVFKTMLRGERSAAGRVVTGRFRAEEVAVAV

SEQ ID NO: 181917 - protein, 466 aa, unidentified
MTPPTDFFLHPRPSTPPPPQPPARTGPLQVFNPHAAGIDIGEAEHWVAVPPDRAPQPVRRFGTFPADLDVLADWLIDCGITTVAMASTGVYGIPLFELLETRGVQGLLIDPRQATRAPGRPKTDRLDGQWLQRLQTSGLLAGALRPEAQGCVLRHSLRHRQRLRTSAAPHIQPMHKALQQMHLTLTQVVSDIPGATGMAIRKALVAGERAAPRLAALRHAHGQHDEDDIAKALQGPWHAAHLFAFQHALSLYACSHPPLALCDQQITRHLATFADTSAGQPLPPKARRATKTTAPRFDARTPLYRLAGVDLTTIEGIEEHTALVILSAIGTDMQRWPRVKPFCRWLGRCPQHQISGGKVLSRRGRPGAHRVPVALRLAARSLPHSQSALGAFFRRMNVRLGTPKAITATAQKLARRVSSLRQHGSAYVQQGLDAYETPSRERKGTAMTTQAKALGYTLVPLAAQGA

SEQ ID NO: 181918 - protein, 337 aa, unidentified
MRYIGVDLHTNSFTACYLEQEKPEYIKTFRLQDLGNFIKNLQETDEVALEATGNSCFFYDEVSPYVKRVVVVAPLQFEVIRRSVNKTDKHDARAIAFFLSKDMLPEAKCKSKQCQQLASLLKTRDQLVKSRVSLINKIHGLFNYHGIKIKKEVLTTKAGFECSLGKHDWSHLEKVEIEVISSNLEVIRESLKKLEKEIIAFAQQLPGFNNLISIKGIGAISAAVFVATIGDINDFSNPEKLTAYFGVVPRVSQSNQQCTIGRITKRGSKIGRTSLVQCTWIAIRYSPYLKSFYERVKKKRGSAKAIIATARKFLTTIFYTLKNNWIFKDFTKYEISY

SEQ ID NO: 181919 - protein, 347 aa, unidentified
MRFYTRQHRHYCGVDLHARSMYVCVLDQEGKVLVSKDIASAPEPFLELIAPYREDLAVAAECMFTWYWLADLCAREGLVFVLGHALYMRAIHGGKAKNDRIDAHKIAALLRGGMMPQAYVYPHEMRATRDLMRRRNYLMRQRAELLAHITNTNHQYNLPALGVRPARPAERAGLAEHFADVPVRKSVEVDLALVEHYDRQLLPLERYLESNAQAHDPVALAIVRTIHGMGKVLGLSILYEVHDVGRFSRVQQFLSYCRLVKPTKESGGKILGHSGKKIGNAHLKWAFSEAAVCFLRANKPAQAPRARLMAKHGKGKSLGIIAAKLARAVYFMLRRSEAFDAERFFAH

SEQ ID NO: 181920 - protein, 344 aa, unidentified
MSQLTRIGVDTSKAVFTLHGVDAADRPVLRINLRRAQMIPFFRKLPPAVVAMEACGSAYYWARELSALGHTVRLVPPQYVKPYVKRGKNDRNDAAAICEAAGRPGMHFVPAKTVEQQAAGMVLKARDTLVGQRTALINTVRGHAAEFGIVAAKGAAKVHELFSAIEHRSDIPPVAKEMFVLLRQQINDINARIAELDVKLNASHKANPVSQRLATIPGVGPITALTLAIEIDPAQFESGRHLAAWAGLTPKEHSTGGKQRLGGISRAGNERLRRLLVAGATAVIQAASKPDSQQMTEWLRALLARKPRKLAATALANKMARIAWKLMTSGQTYRRDATLGVAKV

SEQ ID NO: 181921 - protein, 448 aa, unidentified
MAEAKSKLKTINLDAAGIDIGSTVHYVCVPEGRDEQRIQKFGCFTVDLHNLAKWLKKCQVRTVAMESTGVYWIPLFQILESHKFEVKLVNARHVKNVPGRKSDVQDCQWLQQLHSYGLLQGSFRPDNQMCVLRSYVRQRANLIENAAKHTQRMQKALIQMNIQLHKVISHITGITGMKIIEAIIEGERDPEKLAKFRDARIKNDQSTIAKALAGDYREEHLFVLKQEYAAYTFFQEQITGCDKSIENYYKTFETKSNENRALNKTRKRKQKNSPDFAVDEDLYRITGMDFTRVPGLDVLSVQAIISETGINHNKWRTEKHFSSWLGLSPANKITGGKIIGTRTRKVVNRAATALRLAAHCVSRSNTALGAYCRRLKKRLGIPKAITATARKLACIFYNMLKYGQEYVEKGMNYYETLYKERVVKNLTKKAKEFGYILMKEEPIDEEGS

SEQ ID NO: 181922 - protein, 350 aa, unidentified
MSLKLNSEIAVIGIDIGKNSFHLVGQDRHGALVLRQKWSRGQVEARLANLPPCLIGMEACVGAHHLSRRLQALGHDARLMPAKYVRPYSKGQKNDFRDAEAIAEAVQRPTMKFVATKTVEQLDLQALHRVRERLVRQRTGVANQIRAFLLERGVAVRQGLRFLRTELPIILGSRADVLSPRMIRIIEELACDWRRLDERIDGLSNEIEALAHQDPACKRLMTVPGIGPIISSAMVAAIGNGAAFSKGRDFGAWLGMVPKQTSTGDRTILGPISKRGNRYLRVLFVQAAWVLLVRVKNWERYGLKAWIEAAKKRLHHNVLAIALANKLARIAWAVLHKEREFECKVRPMAS

SEQ ID NO: 181923 - protein, 419 aa, unidentified
MEILYARCCGLDVHAKTVVACRCVEGEKQIRTFSTMTAALLPLADWLLAAGCTHIAIESTGVYWRPVFNVLEDPFAVLLVNAHHIKAVPGRQTDVRDCDWICDLLRHGLLKGSFIPPRHIRELRELTRHRQILVRDRAAVANRIQKLIESANIKLGQVATHVLGLSGRLMLQALADGEEDAEQLAQLAKGKLKAKAAQLKQSLTGHLTPPQRFLLQELLRQYDQLDEAMVRTTTAIQRQLHESPDPFLPQAVDRLQTIPGVGARVAETLVSEIGTDMTAFPTAGHLASWAGMCPGNHQSAGKQLSGHTRKGNVYVRGALTQAAWAATRTKHTYLAAQVRRLTTRLGKRRALVAVGHSILVIAWHLLSTHVSYQELGSDYFDRCNAQAYRLKLIRKLEALGLKVVVEPATTVSVAFSSFS

SEQ ID NO: 181924 - protein, 319 aa, unidentified
MAQNNLVVVGIDVAKDKVDVCIRPLSQRRTFPNSSAGRRGLIAWLGRYKAGKAVMEASGGYERNWAKALRQAGIEVRIVDPRRVRSFARSAGRLAKNDTIDAQMIAWFAETFGEVSGQAYDVVREQLSQLVNARQGLLDLQTNLQNRDEHAEVDAVQKMHARLLKRIVLEVASLEAVIAALIKATPHFAELAEIIESVPGLGEITSAGLIAAMPELGQVSNKVAAALLGTAPYDDDSGRRRGERHIKGGRRKVRNLFYMACLGASTRHNPVLKSFYRRLIAKGKKPKVALVACMRKLIVILNTMITRRHKWDTSLCVPG

SEQ ID NO: 181925 - protein, 430 aa, unidentified
MSYRIAGVDVHKKMLAVVVSDVEVDGEYLFERRRFGANPEQLRSLAAWLVEQEVEEVVMESTAQYWKPVWEALEQYWKPIRQKRKGAGRMSGSLHLAQAQSNRGRRGRKRDFPDAERLVKRLVARELTLSFVPDAEQRLWRTVTRRKYQLTRDHVRLQNQLESLLEEAHIKLSSLVSNLLGASARRMMKALADGETNPAALAALADKQLRATPEQLCDALGACTDLKPVYRRLLKMALEQLQFLEQQIGQLDQEMANLLSQHQDAVKRLAEVPGLGVDSAQQIIAEVGPTAATFPSEKQLSSWVGVCSGDDESAGVNYSHRSPNGNRQMRRILNQSANAAVKAKGSIFEIVYRRTVPRLGHKQTIGAIAHRQCRLIWLILHKGVPYEERGPAVTKRARQKRTAKMIRQLRNLGYRIEVPNPQHLNATQAQ

SEQ ID NO: 181926 - protein, 413 aa, unidentified
MVKTASKGGLMDFYVGIDVSKFKHTIAIIDENGEVRKKSFDISNSREGFDSLLNELGLLGEKEQIKIGMEATGHYMNCLVRCLISNGYQVQIYNPSLIARFRESEAVNLAKTDNLDAMLIAKYIATHPFTSSPQISYLIGEIRKISRAKYFLFGDKTACYNRLLRYLDEMFPEFVPFFKKNEDGTRKNMGRNLFESSTIRWLLSEYTSPQKMARMRSETGETLRRMSKGSISFNRFNQLRELAKNSIGYSTEADEQIIRNLVDQVRTIDEEIDNLNELLEPLMEELNSPILSIPGIGVNLVAMIIGEIGDIFRFDNPEKLIKFAGLDVKVYQSGTINHKGHIRKRGSPILRYALALSVQKLRIHSPVFSEYYYSKLRQGKATNVAIIATTRKLIRVIWKMMTTNQVFEDIKRD

SEQ ID NO: 181927 - protein, 412 aa, unidentified
MSYEKNAVGIDVSNGRSTVSVLRPFGEVVVLPFNVQHTTEELSALADKLLSIDGETRVVMEHTGRYYESIEKVLHNKGLFVSAVNPLLIKQYGNNSLRNVKTDKADSMKIARYALDNWAELRDYTPMDTIRYDLKTLHRQFNLSSKQKTAANNNLVSLTEQLFPVIRKIFESPVRKDGTQKWVDFITTFWHADCVRKQSLNAFTERYRKWCKRHGYLFKVSNAEEVYALAKTVIVLVPKDSITKTIVQEAARQLTAISRSVETYRAEMNRLASMLPEYEVVMNMYGAGESTGPQLMAEIGDVTRFERKQSLVAFAGVDPVPKDSGDKQSRSNKSSKRGSPYLRKTLFNIMSTILQNAPEDEPVYQFLDKKRSEGKPYYVYMTAGANKFLRRYYAKVMEYLKEKEKAETDSTQ

SEQ ID NO: 181928 - protein, 409 aa, unidentified
MKLYVGIDVSSRDLATCIMDHEGNTCARFKVDNHLLGATFLRDQILLWANKRKPTEILIGMEATSVYSWHPAMFFHQQEALQAWNVKVFTINPKLIRKFKEAYVDLEKTDDIDAWIIADRLRFGRLKMTAVLKEQFLALQRLTRMRYHLVHQLTREKQYFLQHLFYKCSSFTQEVDSSIFGHAILELLLESWSLDDICQMDVKQLADFLRQKGRNRFADPECIAKSIQKAARSSYRLSKCVEDSIDLLLGLSIQSIRSLQSQLKELDKAITRHLEGIPNTLQTIPGIGPVYTAGILAEIGQIERFHNQAALAKYAGLTWSKHQSGRFQAEDTSLIRSGNRYLRYYLVEAANSVQRHDATFRAYYRKKYEEVPKHQHKRALVLTARKLVRVIDALLRNGQIYTPRKGEDR

SEQ ID NO: 181929 - protein, 413 aa, unidentified
MEQLIQRCAGIDVGQAESVVCVRVPDTVTGAPAELIATYGTTTPDLLELVDWLRGLGVTHVAMESTGVFWKPIYYLLEDDFTVLLVNAAHIKHVPGRKTDTIDSAWIAQLLAHGLLTASFVPPPPVRELRDLTRYRKALVNEKTAQVNRIHKVLQDSGIKLTTYATDVMGVSGRAMMRALIAGQSDSAALAELAKGRMRSKIPDLRKALTGRFREHHGFLLKQMLDHVEAQEADIAALDERIEAALAPFVDQVELLRTIPGVDRRSAQVILAEIGPDMSVFPTAGHLASWAGMCPGQRDSAGKHGSGKTRKGSKWLRGALVQSARAASRSKGTYLSERYRQVMRRRGDAKAIVALGHEILLAAYRVLVTAEPYADPGPTTLSRLTAQRLTRQAVRRLQDLGYQVTIEPRTDAA

SEQ ID NO: 181930 - protein, 417 aa, unidentified
MRHGPVMWLPRCGERRGQPYGKGITMAEKNATLADRHEAYLELDVGKQSHWAYAVDSAGTVLLSRRVANTEAGLDEVIAECPDDTLVVVDQRRNIGALAIRRARAAGRPVAYLPGSAESELAKGFPGIAKTDAKDAQVIARVALGMPQTLRPVPEGDPALDGARIMSAQVAQVQKDRTACANALRSRLLESCPAFERACEMTAPWCAGMLSELGGPWNMLDAGRERFCAASHKHGASRGQRDRLWDAISGERPHEQAVAAEMRYVKHFAGRIAADNQEEAMLEEAIAESLSGNADFANLQTIPGIGPRTAAQLVVSVDISQFDSHDKLASYCGLAPSTQRSGTSVNYDKGHRGGNKPLKNLLVFSCNSLGRSKSYYGEYLRRCLGRGMKRRCALKATARKRMKVIYAVMRDGTPYSA

SEQ ID NO: 181931 - protein, 313 aa, unidentified
MSSNTSTIIYAGLDIAKLNLQLHLAGRFYDLPNTAAGHRRLLELLKAHPAVQVICEATGGYERDVVEALHQGTIALSILNPARVRHFARAQGQRAKTDRIDAAVLSAYGQAFQPKTTPSRTQAEQHLVELVRRRVQLLEMLVAQRQQAERLSLPSLRRQAKSLVRRLEADIAQIEEQLQELRQQTAALDERAKKLQAITGVGAITALAVLAELPELGTLNRRQTAALAGLAPHPRDSGQWQGRRTIGGGRAEVRRALYMAALVAARSNTILKVFYQRLREAGKPAKVALTALMRKLIVLMNRILKDPNFELQN

SEQ ID NO: 181932 - protein, 417 aa, unidentified
MAVVMIGIDPHKASHTAVAINAAEQSLGQLRVRASAVQAERLLGWAQPWPERAWAVEGAGGIGHLLAQQLLSAGERVLDVPPKLAARVRLLATGDINKNDPNDARSVAVAALRSAEVREVRQDDHAAVLKVWSKRHQDLAQARTQVACRLHQVLCELIPGGVPGQITAGQAGQILAAITPAGAVAAARRELAAELTEDLRGADTRIRETRKKTAAAVRAAGTSLTGLFGVGPVIAAAVIGDVRHVSRFPNRDHFAAYNGTAPIEVSSGGRKIYRLSRRGNRRLNHAIHMAAVTQIRYRHSPGRAYYDKKLAEGKTGKEALRCLKRQISDAIFACLQADARRAATAPEKSPGGQPGNHSSSRAAGSNPEHRRFGQATPGPTSTLRRNPAIHPTPRRRAVHHDGAAALDNKEVSICAFA

SEQ ID NO: 181933 - protein, 357 aa, unidentified
MSEGSWVGLDVHARKVVAGVLDAGSGELQTVWVLPRCEETIGWLLTLPAPVRIAYQAGPTGYGLARACAGVGIVCTVAAPSKISRPSGDRVKTDRRDAERLARLLRLGELVSVRVPEPHEEAARDLVRAREDVRGDLMRARQRLSKLLLRHGLVYDAAAWTLAHDAWLRRQRFVSRPLALAFDECYGAVLQAKTRRDALDAAIAELAAEPPFAEIVDRLCCLRGVATLTALGLTVEIGDWQRFQPQSLGPFLGLTPSEDSTGEKRRLGAITKTGNTHARRLLVEAAWHQRRPLRPSATLERRRHGQPAAVRARADQSARRLHQRWHALERRGKRRTIVAVAVARELAAHCWALATME

SEQ ID NO: 181934 - protein, 352 aa, unidentified
MKTYYVGMDVHKATIVIAVLDAKGKVVSQSIIETSTQAVRDFFKSWRGVHVTFEEGNQAAWLYDVVEPLVGHLVVCNPKHNHLLKQGSKNDRIDARKLADLLRLKALKPVYHGEHGTRTLKELVRCYECVVKDLSRVQNRLKALYNSQAIGNRGRELYQLSQRESWIQKQENAGRRMRAELCFRQMDELKVLKRGARKAMLAESRRHEAQRILSQVPELGLVRVAQIIATVDSPFRFRTKRPFWAYLGLAVETRSSADHELTNGRVRRRKVKIETRGLNEDYNRRLKSVFKSAATHACSCGVYKEYYDQLVAGGMRPEMARLSVARKLAAAVLAVWKKGQSFDERMIMSRAA

SEQ ID NO: 181935 - protein, 391 aa, unidentified
MDKAWAGIDVGKEFHWAHVLDASGRELLSRKVKNDEADISKLMDEALSLAEEVLWAVDQPGGGAALLLVLLWKRDQRVLYIPGLTVNRARDTYRGESKTDARDARVIADQARMRPDVGELRAGEEEIAELQLLLGRRRDLITDQSRTITRLREALLSLFPALERALDLNRRGPLTLLSHYQRPAQLRRAGQKRVAAYLRNRRVKGFNSVAHKALTAARSQSVALPAESVAANIVAELAQGILALKDRIESIDEELGQRFFVRPEAAILCSLPGMGALLGAEFLVAVGDLCAFESADQLAAYAGLVPAANDSGKRAGNNRRMRGGNKVLKRVLYQSAFASLRSAPESRAFYDRKRREGKRHTQALIALARRRVNVLWAMLRDGTTFETRSAA

SEQ ID NO: 181936 - protein, 390 aa, unidentified
MLRTTPWTRWAPRAQTRFTYVSFLTRVVEVDGPTASCANVELLTANERAAHMEFKRIAIDTSKHVFTLHGVDEQEKPQLRRELKRSQMVPFFSKLSATEIVLEACGGSHHWARVLGALGHRVRLIPAQYVKPFVKRSKNDHNDAEAINEAASRPSMRSVAVKTVDQQAQCIILKHREMLVGQRTQAINALRGHAAEFGMVTAKGTSKVAALLALLIAENGIPAAAIAMFEQMGAHIETLNNRILDLDAQLAALHKENALSQSLSEIPGIGVVGAITATLTVDPANFASGRHFSAWIGLTPKEKSTGGKQRMGGISKAGNERLRQLLVVGAMSVIRFAKPGSKSASPWLLKLLERKPRKLAAVALANKMARIIWAMMAHGEAYRRQPMATA

SEQ ID NO: 181937 - protein, 351 aa, unidentified
MIPVASDVHTGRCWMAMIPPGEDVKMLEPIECTREAWRQRLAELPPEAEIAREVSTSGYFVMSVLEEAGWRERAHWVHTAGIDSLRKQKSDRLDTRRLVKKLAVHDVDPLPEAWFPPPPIRELRLLARQRCGIARLRAQTKNRVNSLLEMHGLRPQRCVFTAKGRAWIQQQALSAGAQLCFARMFRLYDFLTAERETSEAELTAAAAAFPQVALLMTIPGLGHMLAAVIWSEMGDLARFDSADALLNYTGLVPSSYDSGEVSMHGPITRQGPVWLRWALVTAANPSADGQQESAGTALLAFAALPQVAQCGQDGRGGFRRPLRLWSFETRSTFPGRTLGPESRQVGTVNLR

SEQ ID NO: 181938 - protein, 341 aa, unidentified
MSLIKAVGIDLAKLVFSIHGVDAHDKCKLRKTIKRNNLLAEIAKLPPCLIGMEACSGAHYWAREFTKLGHDVRIMACKFVIPYRQNEKNDANDAEAICEAVTRPKTRFVSMKSEEQQAVLCLHRIRQGAIKDRTARINRLRGLLAEFGIIMPKGRYPAQKAIGGILEDAENSLPYLARELLDELWKSIKRLNEEILKYDRKLYALANQMKDAKRLMSIPGIGEITATAVVATVNDAKHFDTSRSFAAWIGLVPRQYTTGGVVRLGRISKRGEKHIRTSLIHGARAVIANCKNKTDRTSLWVKDLVERRGFKRATVALAAKNARLIWALLHSEKEYQVDYVK

SEQ ID NO: 181939 - protein, 450 aa, unidentified
MDKKTKQNTALQFALINPCCAAIDVGSMMMMVYYSDEEGNQHLMEVDAFTESLHHLSVTLKQAGVKHVAMEATGVYWIAVYEILEQQGFHVTLVNAQHFKNVNAQKTDVKDCQWLHQLHANGLLRASHIAKEVFRELKSYLHERTVLQNQKSDTLNRIHKLLTQMNIKVQHLISDIEGVSGMKLLRGIAEGKTNPEELLALIDITKLKADKEDLIKSLNGIYKKQFIVILQHSLKAYDFFKDQMKAYEMLIEQVLETMLPGDEHGCKPVIKKKKGYVRKNQYSINLHEYLKHIIGVDITLIDGIDEISGLDIISVTGTDMSKWPTAEHFASWLNLGPRPKKSGGKVIGHERRFTNNKATQAFRMAAQTMWQNKGSLGHLYRRLSAQKGSKKANKATARKLSVIFYNMVKNQTEYDKNKLQINTERQRAKRISFLQKEAIKYGFLLQNAGA

SEQ ID NO: 181940 - protein, 309 aa, unidentified
MKEELVYVGVDIAKAYLDAAIGNEKRRFANDALGHRQLINWIKQMPASVQIICEPSGGYERALVRALVAAQLKISLVPANRVRQFARAAGILAKTDRMDAKVLCAFEEAMQPGTISASQLEQEHLRELESQRRHLTHLLVMEQNRAARMSDLWVCKLNRRLITQIKKQIEQVDLLIQQQIKASRELSSKAEKLTAISGVGARTAALLLAQMPELGQLNRREVAALVGVAPFNRDSGRMRGKRAIYGGRRSVRHGLYMAALVAARHNPILRAFYLRLRAAGKPAKVALTATMRKLLIVLNSSLKPDLTYA

SEQ ID NO: 181941 - protein, 357 aa, unidentified
MRFYTKQHPFYCGIDLHARTMYVCILSQDGEIIVHRNMPTSPEALLKTIAPYRGHMVIAVECIFTWYWLADLCAQEGMPFVLGHALYMKAIHGGKAKNDRIDAQKIAVLLRGGMLPQAYVYPAAMRATRDLLRRRMHLMRKRAELLTHVQQTNSQYNLPEIGKKIAYKANRTGVAERFADPAVQKSIEVGLALIDYDDQLLRDLELAIVTTAKQHDANTLYLLQTVPGIGKILSLVLLYEMHAIARFPRVQDFVSYGRLVKCAQESAGKRSGTSGTKIGNAYLKWAFSEAAVLFLRHNPAGQKYLARFEKKHGKGKALTVLAHKLARAVYDMLKRGTAFAMDQFLHGSGSGAGEPAA

SEQ ID NO: 181942 - protein, 331 aa, unidentified
MFPVGIDVSKNTLDLCMLYDGIKGRIKTRNIQNNRHSVENILRWLRLQHCGPEDVHVVMEATGVYHERLATELHDAGFRVSLANPHRSREFARGMGIMTKTDKVDAYMLACYAFLKKPHYWEPPAPEIRYLGALLRRRDVLLGDALREEKRLEKYLSTDTPADIISSCRRMAQLLREEVSNIERQIKAHIKASPALRRDYTLLTSIKSVGPQLGMHMLVVLRSHNFVSAEQAAAFLGVVPIEKRSGTSVRSRPRMSKIGPPQLRAKLYMSALCGKIYNKRMRNIYDEMCLRGKPKMVAIGALMRKLVHWCYGVLKTGTVFNDEGLKQVLST

SEQ ID NO: 181943 - protein, 355 aa, unidentified
MDSEKYIGLDVHQATIVVAVTDSTGKLIMESILETEAATILQFFAGLRGTLSVTFEEGTWSAWLYDLLNPHVDKLVVCNPRKNALLKDGNKSDRIDARKLAELLRGNQLKPVYHGETGVRMLRELSRSYLTIVKDLSRVMNRLKAVYRSWAIPCAGRDVYYTRNRAQWLAKIREAGVRRRAERLYEQLDMLQYLRQQARRELLAESRKHAITAKLRQIPYLGPIRSALAVALIQTPHRFRTKRQLWAYSGLALETRISAEYRLVEGQVRRSKKLLCIRGLNKDHNHDLKGLFKGAATMASVRPGPFQDFYQAALAKGIKPTMARLTLARKIAAITLTLWKKGENFDAEKLKSQAA

SEQ ID NO: 181944 - protein, 319 aa, unidentified
MTVTYPIAGIDVAKHSLDVAVLDADQNCSTWSLASDQVELKKLARRLLARGVRLVVLEATGGLEVGVMLALEAEGLCVARINPQRVREFAKSIGWLAKTDRIDAKLLALYGERMRPRPTPLTSETHRRLKALVARRKQLVDARAKEKTRAHQCSDDLVRSSIFDLIAHLNAQITTIEAAIDKLIDGEPDLAKKRRIVRSFGGVGPQSANAILAYLPELGAVSHKKASALVGVAPFADDSANRSGKRMTAGGRAELRQMLYMAMQAGYRTNPKLKPLYLRLRERGRSHKCALIACLNKMIKILTAMLKTETPFMAQKLAA

SEQ ID NO: 181945 - protein, 358 aa, unidentified
METLKLTVGIDVSKDDCKCNLSKMTSELTVKVIASKTFLNNEKDLQELLKWVAKNSAGYGPLRTGIVIEASGVYHERFALGLQQAGHRVSVVLPNKEKKYMQSLGIKTKNDHIDARGLAQMGCEQHLEEWSPLSSFFHQLRTYTRLHEDIQQKRTDTSNQLHALKHSATEMRDAVQILEKLIEVFDKELGTIKMLIKKHIDSNREVKEKVEKVCSIKGVALLTTATVVAETNGFELIKNIPQLVSYAGYDIEEDQSGKRVGKTKISKKGNGHIRRILFMPSLQLKSHQVGIFPQLYERTFNKHGIKMKSYVAIQRELLVLIYTLWKKNQKFDEHYYKKISARVEKVETSSRVSLEEAV

SEQ ID NO: 181946 - protein, 362 aa, unidentified
MTTQDKNSITIGLDLGDRRHRFCVLDGNGKVTEEGTLANSRECLTELSSRYPGALMVMEAGCHSPWISRYLKEAGCEVVVSNPRKTRAIYQHERKSDRRDALMLARIARMDRALLYPVRHGSEQAQEDLLRIKLRDSLVRARVGLINAVRFTLKSLGYRITNPSTERFHKVIEGQIPESVKNVIAPSVQAIEELSLRIKVLDREIMTLAHNYTETAWLQQIPGVGPITALYFVLKIGEPARFERVRDVGAFLGLCPRRDQSGESDPQLCITKRGDVYLRRLLVSAAQYILGPFGPPSALREYGLTLAAGGTARAKKRAVVAVARKLSVLLLTLWKNQSAYEAFPGHEDKMRTSDRERLRSIV

SEQ ID NO: 181947 - protein, 433 aa, unidentified
MPTNHPYDLVIGLDRSDRKADLHLITPASGQRRSETIDTSPEALWEWLLELRQTHPQGRVALCLEQPAAHLIAFLEAYPWITLYPINPITLQKYREAFVTSRAKDDGKDARYLAELLLNHHDKLKAWAPEDSPTRAVQHLVFHRRAVVDERTGLSNRLIALLKQYFPQALVLCGEDLWRPLATRFLLKWSSLQAVQKAKPATLKTFYYLNGSRSAKLLERRLALVQGALPVSDEFSLINTFSLRVQLIARQLQLLHQTIQSFDQQIAAAFAQHPDHAIFASLPGAGPVLAPRLLASLGSQRERFAQAASLQRYTGVAPVTKRSGASCHIHRRYLCPKFHRQSFHEYAKESVLWSRWAAAYYLQQRTKGAHHHSAVRALAYKWQRIIWKCWQSRTLYREEIYEAALRKNGSRLVGLLDQIELGKSPFKTREKKS

SEQ ID NO: 181948 - protein, 438 aa, unidentified
MSNKVIFNLDELFISVGIDVGADFSWMSIALPNQQFVGKPYKILHNSIDSLTTAVSKIKEAEELYSLESRIFLESTGIYHYPLFCYLRDKGFNCSVINPIITKNSTNINIRKVHNDRFDSKKAALVGLKPDLKVSLMPSDLALNCRNLCREYYDLMDNRSAYVNKLQGELRIAFPQYLGIFSKVTINTSLTLLETYTSPSAFLKADKQEIIDIIKSTARFGLTYAQNKYNAIIQAATDANQFGYIIDSNIKRIRLYISFIRKYDEEINSILESLHELVDANEDSDFVKQIHLIETFKGAGFLSAVSIMGEIGDFSAFSKPKQLFAYFGLDPAVKQSGKFEGTKVQMSKRGSAIARRVIHTLTLQSISISRNREAKNPVLREYYLKKCDSKPKLVAMGAVSHKVCNMIFAILIDNKPFKIIAPQEHIKQYNSAKCDIAA

SEQ ID NO: 181949 - protein, 469 aa, unidentified
MGEERGQLGRWGAARQDLRPCADRASAHGEGNRAREARWLPATATRSVQPTPEEVYALLPPEIRCVVGIDVAKSAHVVCALEAPGGAPRLKSTPIPATAVGYTQLLEWLGAWGEPATLLLGLESTGSLWEPLYDALTQAGYTVLLLNPHQTASWATSLGLRAKTDGIDAHTLARGLLAGWARASTVPDETVQALRTLTRTRRDLVESQSAARQRVHDELVPVFPELVGHLPEHADLGAPAVLRLLSVYSSAQALAHAPLDDLCRVLAEGSAGRWGRAHAQALQEVARTSAASTRAVAARALVVRTLALHLLDLHARIAELEVALAELLRTDPPSQQLQAEVPGLGPTWTATIRAELGDVSRFSCVDQVVASAGLEPRTHESGRFAGQRRLSKRGPGALRHALYMATLVAVRFRPEWQAPYQRLLDRGRAKKEALTILSRRLLKVIYHLLRTGASYDPACLSPAPAAGQA

SEQ ID NO: 181950 - protein, 449 aa, unidentified
MSRPQVIDDEQHEQVHERVAAIDVAKDSGMVCTRTPHPSRPGARRSTVWTVKARMNAVRALGRQLHKDGIEIVTLESTSDYWRIWFFILEACGLAVQLVNAAQARNLPGRPKTDKLDAQWLARLTEMGLLRASFVPPKAIRDLRDYTRARTRLIRERTRCWQRREKLLEGALVKVSSVASKLTTVSAQDMIKAMIAGERDPEVLAGLARTRMRAKRDDLVQALDGMFDDHHGELAGMLLDQIAFLDGRIAQLSARAAELTAAMPEAWGINADGTTGPDAGAAPGAPVLPAVARLAEIPGISDDLARAIIAETGLDMSRFPTAAHLVSRAGLCPSARQSGPRIRAGKKGQGNGYLRGSLGQAATGAARTATFLGERYHRIARRRGKAKAQVAVARSILVIIWHLLAGPAARYTDLGASYYQTRTDTDRKLRNHIRQIQALGFEVTLTKTL

SEQ ID NO: 181951 - protein, 330 aa, unidentified
MNLIGVDVDSVWLVCRISRRGVVQPIVKFANTAVGHRKFIVWATRRGQSARVCLEATGVYSQAFALELSRAPDLEVMVANPKAIHQFGQATLARGKTDAMDADVMLEYLVRMPFKAWQPPSDEVLEIQALSRRLLQLTTERTREKNRLHAAQRRGSIGRVIAHDIALNVRHLERRLESLRTETLTLIRAVPELAHGYQRIVSATGFGPHTAIKLIGELMALPADMLAAQWVAHAGLDPRPRESGTSLHKPRRISKAGNRYLREALYMPALVAIKNDPNVKGFYDKLIAAGKKPMQAIVAVMRKLLLAIWGMLKNDQNWNGEKFYRLPKTA

SEQ ID NO: 181952 - protein, 391 aa, unidentified
MIFVGIDVAKDKHDCFILNSEGTVLADVFTIANNRIGFETLLSRIQSCSQGESKIKVGLEATGHYSYNLLGFLLDSGLATYVINPLHTNLYRKSLSLRRTKTDRIDARTIAMMLMSDVDLKSYSNTAYHNEELKSLTRYRFDKVKERAKLKSSVARLVNILFPELEKLVSSLHIAVVYALLSNYPGASYIANANTEELAETLCTASKGRYTKSKTAEIQVAAGVSIGSKMPAKSMELKHTIALIRELDKEISEVESAIDKITSQMDSPIFTIPGIGRHMGAMILAEVGDFSNFASADKLLAYAGLSPSTYQSGQLKNCYPHMEKRGSRYLRYALFNAAKYVCLWCPTFSAYLEKKRSEGKHYNVAISHAAKKLVRLIFAMQRSGKAFLADY

SEQ ID NO: 181953 - protein, 369 aa, unidentified
MKGRLAMIVIGADIHKSTHALAAVSGDGGTVAGELEIRADDGGHRAALRWARDLDQERVWAIEDCRHLSRRLEQALIAAGERVVRVPPKMMGQSRRGEREPGKSDQIDARAVARAVVREGVERFPAAFLDERALEIRLLGDHRADLVAERTRQISRLRWHLVDVCPDLEAKIPARQLDSAVTLDRIARRLRREERSARTRVALELVGAIRAISRQAKEIERELRLLILAYRPVLLGEQGLGVLTAATLIGRTAGAERFPTDAHFARHAGVAPIPVSSGRKDRHRLHRGGDRQLNRALHVIAITRARIDPQTRAYMERKRAEGKTNREALRCLKRHVARRVHRLLSMPPTNPDHRPRITLNSAISVPCLT

SEQ ID NO: 181954 - protein, 349 aa, unidentified
MKIIRVGVDIAKSVFHVHGVDRHGKTQWQAKLKRGQWLATMCGRLEPGSEVGMEACASAHHWARELQARGYRVRLMAPQFVKPYVKSNKSDRVDAEAICEAMSRPSMRFVAPKSVQQQDGQATHRVRAELVAQRTAKANQIRGLVAEYGLVAPTGIGQLRRTLPCWLEDAENGLTESFRRLLAGLRQDLQWLDERIEDLNASIDRLVKEDPVAQRLLGLRGVGPLSASALADALGDGRAFDKGRDFAASLGLTPKQHSTGGRERLLGISKRGDPYLRKLLVHGARAVLCHLKDKDDELSQWVRRLSASKHANVVTVALANKTARVAWALVRNDATYDPALTNRETQPTV

SEQ ID NO: 181955 - protein, 371 aa, unidentified
MKKNSSNQQRAHKSSGQDQEKGAFAFHIGIDLGDKNCDVCVMNPAGEVHEQFRLRMKPADLVAYFLTIGRSQVAVEAGGQSQWVAEVIEKCGHRVYVSNTRKVPYISESDAKDDPGDAYKLAELVHFKPRLLHPIEHRSQALQADLSWIRARETLVESRTQLINTIRGISKAFGERLQKCSVEAFTAKLAEQIPAVIRGAVAPLLEMIDHLNEQVHYYDQMEEHIARERYPKYWLLAQVDGVGVHTALSYMLTIGDPERFAKSRMVGCFLGMRPKKQESGESKPQLGITKAGDEYLRKTLVNCAHYILGPHGRDSDLRRYGLRICERGAKNAKKRAVIAVARKLSVLLHRLWVTGEVYEPLRNGKKAAQAA

SEQ ID NO: 181956 - protein, 337 aa, unidentified
MEQRYVGIDLHRRRSVIVTMDRAGEVLSSVRIENDPVAMSLAVAEAGEAAEVVFEATYGWYWLADLLKADGHFVHMAHPLAMAGMTNNRRVKTDWKDATLLADVLRMGSLPEGWIAPPETRELRELVRYRAKLVALRSGLKAQVHAVMAKHGILPTRVQLFGPGGQAQLDHLELPTGYAMRIASLRHLVDVYDKEVAVLEREVHGRLKDHRGYRAIQQITGVGKVIGAIFVAEIGDIDRFPSAKHLCSWAGLTPKHRESDLTKFRGEITKQGSTLVRWAAIEAISGHRGGSLLQADYHRIAERRGVYKARVAVARKLLTLVYYGLRDGEIRCLTQAA

SEQ ID NO: 181957 - protein, 353 aa, unidentified
MTNTKYIGMDVHKESISIAVRNAAGKIVMECVIETKASIILQFIDGLRGDLQVTFEEGTWATWLYDLLKPHVGKLVVCDPRKNSRQGNKNDRIDARELSDRLYMNKLSSVYHGGAGVRTLRELARSYLTISKDLARVMSRVKAIYRSWGIPCAGKQVYAPRHGAEWLAKISEVGVLRRAEFYYQQLDALRPLRQEVRRELLAESKKHPATKLLRQIPAIGPIRAALLIALIQTPQRFRSKRPLWKYSGFGIEMHSSADYRKVQGQLQRSRKQVSVRGLNRDCNHDLKNLFKSAATIASVKPGPFQEFYAALVAKGMRPEMARLTLARKIATIVLIVWKRGVSFEAQYLKPQTA

SEQ ID NO: 181958 - protein, 378 aa, unidentified
MKKIRKDSCGIDIGAKEIFVAIEGKEVRSFFTFTSDILSCSDYLIENGIKSVAMEATGSYWFILYRILEERGLDVWLVDGRETKQVPGRKTDVKDCQWIQQLHSYGLLNRCFVLEEKMQELRSYERLRETHIESKSREILRMQKALLEMNLRIKEVLSQIHGSSGMKMIRAILSGERDKHKLLSLCHISIRKNKSEDVLKSLEGYYTESGLFALQQGLDGYEFYKKQIEACDKKIESIIHELGGNKKDDELEKPRKVIRHNKPKISDLGSNLLSLNQGVDATQIEGITDYTWLKLISELGNDLSKWETEKHFTSWLGLAPGQHWSGKKKRSKKKSSQPRAGLIFRDVAQSLIVSKYSPIGIFGRRIRSKKGPKVNKRS

SEQ ID NO: 181959 - protein, 382 aa, unidentified
MPSIHWQKPWASRASALRSMVEPEYLPESELVSARVGDASDRICGHRSYFGGEMKESESKIKSPSERSHVHVGIDVSKDKLDVCAIPGPQHQQFSNDDDGHQRLVQWLLTLIPTRVIFEPTGGYERAMVASLVAANLPAIAVNPKQARDFIKGIGRRAKTDRMDAEGLALFGERAQPEVRALPDNDQQEIVALVSRRRQLVSMRTGEKNRLKLARGKVRENIERAIVALDQLIAEIDHDLDSHIGGSPTWQGQEARLLAAKGVGPVVARTLLAHLPELGKISSKRVASLTGLAPFARESGQMRGRRTIGGGRGEVRAMLVLAARSAIVHDPQLRAFHHRLIAAGKEPMQAIVACARKLLVWLNAMMRHGTDWNPPQMEVNLA

SEQ ID NO: 181960 - protein, 341 aa, unidentified
MYYIGLDVHKKTISYCVKDVSGHIQQRGTMAATRTELDNWMKTLPQPWTVAMEASIFTGWVYDHLLPHATQVKVAHPLMLRAIAVAKKKNDRIDASKIADCLRCDFLPECHMACTSIRDRRRTLRYRRLLVRQMVQMKNRVSGLLLETGVSHNKERLHQVKYFQELLTDKEVTESIRPLLRLSHETIRRLDKTETALIRSLERDPVLAERIKNLKTIPGIGVITALTWALEMDDVSRFRSVKQAISYCGLCGDERSSADKVLRTPISKQRNKHIQSVLIEAAKFAPQQSHELALVYEKEKQKGNSNRATLAVARKLVAYLLAVDRSRRPFIPAENFSSAVA

SEQ ID NO: 181961 - protein, 338 aa, unidentified
MQAITIGLDIAKQVFQVHGADRVGNAVLRCKLKRSEVARFFYEQPPCLVGIEASGSAHYWARVISGFGHTVRLMAPQFVKPYVKSQKNDANDAEAIAEAVTRPNMRYVPQKTVEQQDLQCLHRVRSRLVACRTQLINQIRGLLAEYGIVLPQHPGQVRRGLPSVLEDAENQLTSAGRELFQSLYEELTELDEKIAAADERIQVAFQSTPNCQRIAAVEGVGPLIATAVVAAIGNGHAFENGRQFSAWLGLVPRQNSSGGKSRLLGISKRGDPYLRTLLIHGARSVVYRAKAKTDKRSLWIADKQQRLGTTKACVAVANKNARVIWSLIAREQEYRRTA

SEQ ID NO: 181962 - protein, 393 aa, unidentified
MQSPIYGGIDVSKDMFDYAAIDTQNTTIKKGSLQMNRDGFQELEKLIQSYPNAVVGFESTGTYHINIMSFLLSITEHVHLLNPALVKKFAEADSLRKTKTDAVDALVIARFLIHRQYNISATTEIDSAYLTQLARLRESITRDVAKTKTHLKQMLNIAFPELLKSANLFTDTLLHILIQFPSAKAIRKATKKGIRKTFYNLTKSRGKNPNLNPDQLYELAKKSIGTADESLEMAIQFDIKHLEFLQKQLDEVTSKLIDNVNKHFANELEILKSIKGIGDTTASHFLSEVKNIHRFSSAKQLIAYSGTDPSVKQSGNMIKKGKISKRGVSSLRRVGYLITCSVIRHDCVFRDYYLRKRAEGMVYRKAVIATWNKLLRVIFAILTKQVKFDHNHG

SEQ ID NO: 181963 - protein, 407 aa, unidentified
MNVLIERACGLDIHKKSITACIMTSKGKEVETFNTKTCYLIEMVDWIKEHGCTHVAMESTGVYWKPVVNLLEAEAIEFLVVNAKDMKAVPGRKTDVKDAEWIAELLRYGLLKASYIPNREQRELRELVRYRRSIIEERARQINRIHKVLEGANIKLASVVSNVVGVSALDMLRAIGNGEEDPEQLANFARKTMKKKKNELKLALKGYIQDHQRFMIKTIIDHYDYLTNQIDKLDKEIAERMSERQEDIDILDSIPGIAPRMAEMLLAELGFDVGEQFPSAPHMCSWAGLVPGQNESAGKRKSSRMRKGNKYLKSGLLEAAHSLRGSKTYLGELYRRKAAGKGKKQAGIIVAHTILRIAYALLTRKEVYVDKGPGYYEKQREKSITQHSIRRLESLGYTVAISKTDAS

SEQ ID NO: 181964 - protein, 343 aa, unidentified
MGEVSTIGLDIAKSVFQVHGVDDTGTVVMRKRINRSKVLQFFGDLSPCLVGLEACPSAHYWSRELQALGHRVKLMPPSYVKAYLKRSKNDANDAAAICEAVTRPSMRFVPIKTQEQQTGLMLHRTRQLLVRQRTMLSNAIRGHMAELGIISAKGRNGTAELLRIIRDVADDRIPPVARFCLDLLARQYLALNAEVSAVDKRIHAWHRSCQESRRLEEIPGIGPIVATALVAEIGDWGAFRSGRNLAAWIGLVPKQHSTGGKERLGSITKQGNRYLRWLLVTGAMAVIRYARRHGTKRPWLTRIMGRRPAKVAAVALANKIARMAWAIMVRGERYKEPKLLLAA

SEQ ID NO: 181965 - protein, 326 aa, unidentified
MVIIGCDFHSDFQQISLLDTDTGEVKELSLLHREPTRAFYSALPPGAVVGVEACGQTQWFEALLAELGHVLRIGDPSAIRAAMPRRQKTDRRDAEHIRVLLQQNRFPAIWVPSPAERDVRQLIVHRHKRVQMRTAVKNQLHALAINQGLRLRWRLWTQAGRRQFEALPLSPYAALRRQELFALLDAMDRDIAALDAAVLREAQARPAAVRLMTHPGVGPVTALAFVLTLGPVERFARARQVASYLGLIPAEHSSAGKPRLGHITKQGSPLLRFLLVEAAHIAARHEPELKRCYARLRHQHAAGVAKVAIARKLATRLYWMLRHGSN

SEQ ID NO: 181966 - protein, 387 aa, unidentified
MKKISSNVACAGMDVHYKFSNVTFRDACGKVVSHQRLYHSDRKQLAERLSHWPKGIPVVMEASFGWGWLSDIVEEAGMEVHLSNCFKVEQMRKARGWVKTNKKDADLVSLLPFELSDWWKVWRAPPDVRNRREQMRFRSDLVKSQTGAKSRIHAVFHRHGVFHEFSDLFGAKGRMFLAELCLHNPVSLPAEALVALRGHVKLLDHLRQQLADVARILHKQMLRTPLTIRLKTIPGIALILAHILAAEIGRIERFKNHKSLASYCLLAPRADDTGEETPGQSPLGRHLGIRGNHVLKWAFIEAAHGAVRSGGKWSAMFDRVTDGGKKNRARGYIKVARELVKVVYVVWAKDVDYQVTPPVRPGRKTNKKKSRSETGQLLHPMVHASTA

SEQ ID NO: 181967 - protein, 405 aa, unidentified
MSRCIMVGWDLHDRPRWLKIAEGGEPAETMSVPNTAAGRARMIERLQVRAQAAGNARILFAYEASGQGFGLYDQLTDAGIQCHVLAPTKIARSAQQKRVKTDEKDALSLLELLKGHVLAGNRLPTIWAPDPQTRDDREVVRARLDAASKLTAVKAQVQCTLKRAGLTRPEGTGRGWTRLFESWLQSCCRNEGLGIGLRELLASILRQLRFLEEEIRRLDQALLRLSESPRYQKTVMKLAALSGVGVLTAMVFLTELGDLTRFANRRQISAYLGLIPNCSESGQANDRKGHITRQGPSRVRRVLCQAAWARVRCAGPDRDAPRRIAKKNPQHKKIATVAVMRRLAIRMWHVAREAQLDPTPLPWHDRPQQPTTTKRPPPAKEKPSGGSKRMRGKSGAKASAMSARP

SEQ ID NO: 181968 - protein, 354 aa, unidentified
MTSVKYIGMDVHTESTSIAVRNSLGKIVMEGVIETKANTILQFLDGLRGDLRVVFEEGTWATWLYDLLKSHVTEVLVCNTRKNAVRKGSKSDRIDARKLAEQLYMNNVKSVYHGERGLRMMKELARSYLTITKDLVRVMNRLKALYRSWGIPCAGTDVYAPRYRAEWLAKISEAGVRCRAERYYQQLDALWPLRQEARRDLLVESRKHKIWKLLRRIPAIGPIRAAILIAVMQTPHRFRTKRHLWTYSGLGLETYDSAEYRTVRGQIERSRKQATVRGLNKDYNHDLKDIFKGAAMRASTAAGPLRDFYDNLLAKGRKPTMARLTLARKIAAITLIVWKKEVRFDANYLKPQAA

SEQ ID NO: 181969 - protein, 392 aa, unidentified
MVISVGIDVSKEKHDCFIVSSEGKVLADVFTIPNTMEGFHCLLQRIRDCTAPQDKIKVGLEATGHYSYNLLGFLLDNGLATYVLNPLRTNLYRKSLSLRKTKTDRVDARTIASMLLSDAGLKPYTNTAYHNEELKSLTRYRFDKVKERAKLKSSVARLVCILFPELEKLVPSLHIASVYALLEEFPGAKQVAAAHLTRLKALLEIASKGRYNRDMALEIRDAARNSIGSRMPAKSLELQHTIRLIRELDDEIEEIEEQIHSIMDELHSPITTIPGLGFRMAAMILAEIGDFTRFDSPDKLLAYAGMSPSTYQSGQLKNCYPHMEKRGSRYLRYALYNATKYVCHWDPTFADYLAKKRAEGKHYNIAISHAAKKLVRLIFAMEKSRRPYCLAT

SEQ ID NO: 181970 - protein, 323 aa, unidentified
MSTKATKKRRSFIGIDVSKKLLEVGVHQSDYHFRCPNDPKNFPALITELVSLRPARILLEATGGLERALLQALQAVGLPVAVVNPRQVRDFAKALGRLAKTDRLDARVLAHFAAATQPAIHPVKAQQETELDALMGRRTQLSDMLAQEKNRRGSAATKGTREDIEAHIEWLEERIQELDEKLKEQLKCSAVWQQKDKILQSVKGIGFVTSMSLLADCPELGQLNRHQIAKLVGVAPLNRDSGQQRGARHIWGGRAQVRCKLYMATLAATRFNPVLKSFYQRLLLKNKLKKVAIVACMRKLLTIINVMVRENKLWNVKAHPVSA

SEQ ID NO: 181971 - protein, 338 aa, unidentified
MDKIHAVAGIEVSKNELLVLVRNGATTSPLRRIENHAAGRQAVVRLLRKAAGRGRVRVALEPTGTYSLDLALQLHAETTVELIVPNPKAVRRFAEALMVRDKRDPQDATVLLEYAARMPDAAWQAPSESALRLRAITRRMASLREQITAEKNRLHADAQTATSPQVVRETTTAVIHAMESALKALAQEAKAMIAADPTLGRRFALLLSVPGIAQRSALRILGELVVLPANMTERQWVSHAGLYPTEHSSGSSVRRPGRIGKAGCRELRTALFMPALVAARWAPPVRAFYQRLIGRGLAKLQALVAVMRKLLHAIHGMFASDTPFDNHRFTPTQLEATT

SEQ ID NO: 181972 - protein, 403 aa, unidentified
MNSVGIDISKGRSTIAVMRPFGEVVVSPFEVRHTDSELSELAKLLKSLDGETRVVMEATGNYHASVAKLLHNAGLYVSVINAKLVHGYGNNELRRVKTDRKDAVKLANYGLDRWLTLPRYIPEEDTRLLLKNCYRQYRQYSKVQTVLKNNLISLLDTVFPNANRLFSSPIRGDGSEKWVDFVAEFWHCRCASEKSERAFTSKYLRWCRKHGYNFREAKAHTIYAEASGHIGVMPKSETTKLLVKQAVSQLRATSTALAALKQEMQSLASVLPEYPVVMDLFDVGPTLGPQLIAEIGDVRRFYSKKALVAYAGLDAPPNDSGDVTGRHKSMSKIGASSLRRTLFLVMSVYLQTAPLDEPVCQFMDRKRAEGKLYRVYMMASANKFLRIYYATVKAYLESLEHTA

SEQ ID NO: 181973 - protein, 357 aa, unidentified
MKIVGCDLHAKQQAIAMVDTETGEFTEKTLAHEGNQVREFYAALEGRVVVGIEATGAMQWFLQLLEELGIECRVGHPAKIRAKETRKQKHDRRDARLELELLIEDRFPTIWMPSTEQRDLRTLLRDRHQWVKMRTRVQNTLQAIALNHALRYGRALWSPAGQKALQALALSRYTSQRRDELLHLYVQLQKRIQELDRQVEEEAKQRPQTLRLLTHPGVGPITALATEVFLGDPSRFANGKNVASYIGMIPCEHTSGKRQRLGKLTKEGNSLLRYLWTEATIHAVRKDPELKRFYRRKLIQKGMGKARIAAAHKLGIRLWIMLRDQIDYKEFCRRGQQRQCGEAHAGMPNYNSGPALQ

SEQ ID NO: 181974 - protein, 374 aa, unidentified
MSSDGITGVGLDAHKKSIHVAMLVPGREEPVSWQEANEESAVRRRARRLNREGPGEVRACYEAGPLGYTLQRELEAQGVICEVVAPSLIPIKPGERIKTDWRDARKLAEMLRSGMLTAVQPPNEADESLRDLCRGRDSVRQDLARSRHRMSKFLLRRGSRYHDTQRHWGVRHMKWLRPLRFEHAAAQAIFDHYLLTIDHLDERQRQVDAQLGLFGSQEPYCQPVAWLRCFRGIDTVTAVSLVAELHDFRRFRSARSLMAYLGLVPSERSSGEQRRQGSITRAGNHHVRRLLVEAAWHHRHRPVLSQPLRKRREGQPAHVIAIADRAQERLHGRFIRMTRRGIHYNKTVVAMARELVGYLWATLYPRETEAPPSA

SEQ ID NO: 181975 - protein, 379 aa, unidentified
MNAVGIDVSKGKSTVAVLRPYGEVVVSPFDVAHTGSDLRALADLIKKLPGETKVVMEATGNYFESIARYLHEQNIFVSVVNPVLISDFGGNTLRKPKTDKKDSVKIASYALTYWLDLKEYTPQEDLRKSLKLLNRQYQQSIKLKTMMNNNLISLLDLTFPGINKLFTSPSRESDGHEKWVDFVLEFSHCDMISKLTIKAFAKKYKKWSNKNSYHFTESSCEKIYAFAKDCVSSVSSDKAIVFSVVQAAKMLISATENCHAIQSEMNRVASKLPEYDTVMNMYGVGKAVGPQLMAEIGDPRRFHSRKAITAYFGYDSENNDSGQKTTRSNPMTKKGSGALRRTLFIIMQVLLQTKPQDNPVYDFLIKRYPRMNFEPIFFK

SEQ ID NO: 181976 - protein, 350 aa, unidentified
MIIIGVDFHPEFQQIALLNTTTGEVEEKRLAHPDEAEKFYRAHASAGETVRLGMEASGHARWFERLIAELQFELWIGDAAEIRAKRGRKQKTDRQDAQHILKLMLKDDFPKIWVPSWENRDLRQLLWHRHRMVQARTRVMNQLQAVALNEGLHCRKKLWRERGRQQLESFALAPWASRRRRDLLELLDRLNPSIADLTQAIEREVENYPAAQRLKTHPGVGVLTALAFVLILGDAERFRCGKQVASYLGLVPLEESSGNRRHLGHITKQGSSIVRFLLVEAAQVTVRSLPEWRSKYFHLALRRGRKIAKVAMARRLAVQLFWMMRKQWDYEQLKKFGSHAGQPGHRDGVQ

SEQ ID NO: 181977 - protein, 341 aa, unidentified
MTEVSTIGLDLAKNVFQAHGADASGAVFFRRKLRRDQVLSFFAAQRGCLVAMEACPGAHYWAREITNLGHEVRLIAPAYVKPFVKRQKNDAADAEAICEAAQRPTMRFVAVKSEDKQASAVVFRTRDVLVGQRTQIINAIRGHMAEYGIIARQGPSYVEQLIAQIEDSSSCIPEAARSCLAVLVETLRGLQTRIAALDAQITARAKRDDVAQRLMSIPGVGPLIATAIEALAPPVGTFRSGRDFAAWIGLTPLQRSTGGKERLGRISRMGERTLRCLLIVGASGVVRWAKRKGAPAGSWLARMLASKPPMLVIVALANKMARIAWALIAKGGIYRAPAAAA

SEQ ID NO: 181978 - protein, 331 aa, unidentified
MQRKEIYVGVDVSKLTLDVAIYGTKNHKKIVNNSEGFKQLLAWLKSLEVELEKCWVVMEYTGGYEYRLVSFCQSKQITYSRIPGLEIKKSLGMQRGKNDKIDSRRIAEYGYQKKEKLKAHKACNEAIPKLKQLLTQRSAFVNDRKRHEHRMKELLSMVDFKANDPLIKHYKEAINFLVRLIQKVELDLHTIIKADEAMKRNFELITSIPGIGNVNGWMTIAYTENFEAFKDGRQYAVYSGVVPYEHQSGTSIRGKTRVSQMANKPVKGDLSMAAKASAVHDPEMKAYYERRAALGKKHMAIMNEIKFKLILRMFAVVNKGTFYVKKLPLAA

SEQ ID NO: 181979 - protein, 405 aa, unidentified
MFMTPQACLEAGTEYPRYKLFVGFDVGKRFHAAHARTGSGRRVLALRVDNDEAAVDAFVARALEAAGCEPGACLVVVDQRRNIGTVVVRRALAAGCDVAYITGKREKKARELFPGVAKNDAKDAEVIAAAAAGMPQSLLPVPREDDGLEGARRLRSQLAFSVKQSTQVKNRIRAALVESNAAFERLVDFSRPWQLDVLERLGGPWQVLDAGKGRLARVARDAGEEELAGLWESLSRATRPTEEQVRSEARTIPMLVRRLRAIEADVDELSDLVAKEVEGDETYRCLLTVPGVGRSTAAQLVAAVQVGAFSGNDKLASYCGLTPRDTRSGATISSTSPSPEGNRCLKNLLIFTCLSLVRSDNEFGRYYRACRSRGMRHTAALKATARKRLKVIYAVMRDVRPYEPR

SEQ ID NO: 181980 - protein, 411 aa, unidentified
MELLREALPMSALVVAVDPGKVSNRVWLASGERGLLGKPVSLPVLREGVEALCQLIMTSGVAGPPIIGVEATGGLHQAWVAELERRYPGSVRLFAPSETQAARTQLGSRRFKTDDRDCAALVWLLRQGAGRPVADKPVDALVGAVRHRRGLVADRRVLQQRLHHQLQALCPGLSAPAGHGRALALDKPTGQAVLGCAAAFAGRPPTIGSLVARAPGRLTQATARFWVERWRRLLPPPADAELRAHRLGRDLARHQALQADITAVEGQLLRLLAGTDGQVLTTLPGVATVRAAAFAAHSLPIDRFPTPEHLYAATGLAPAAWQSASLKRRGHISRQGLPEHRDALMGIAWGLSQYSPSFHQRDQELRGRGMRPIQARVALARHACRLCHALLRTQQPFDEARYRSARHSRGR

SEQ ID NO: 181981 - protein, 365 aa, unidentified
MESMYYIGLDVHKKSISYCVKSGDGCIHAEGSVPATRMDLDEWIKTLPKPWTAAMEATIFTGWIYDHLLPHARALKVAHPLMLRAIAAAKKKNDRIDANKIADCLRCDFLPECYMASTEIRERRRTLRYRNLLVRQVVQMKNKIAVLLMEAGVSYNKQKLHKAGYFRELLATNQDIDEGLRSLLGLCREMLVRLGKTESALVRSLERDPVLRQRIERLMTIPSVGPITALTWALEVGDVGRFSSIKKAISYCGLCGAEKRSADTIQRTPLSKQRNRHLQTILIEAAKLAPRNSPALAMIYDREKQKENANRATLAVARKIVAYLVAVDRRQKDFLVIENEARTAAGKKEDFFSAQPARSRGNATG

SEQ ID NO: 181982 - protein, 411 aa, unidentified
MRRCIGLDVHREFAEVAIWEDGVVRSAGQVETTPEALRLFAESLCIHDEVALEATCNTHAIARLLERHVGRVLVSNPQKTRAIAEAKVKTDKVDARVLAQLLAAGFLPSVWIADEETQSLRRQVARRAHIVRQRTRLKNRVQSILHRNLVPRCPAADLFGHKGRRWLAEQDLPADERQAVEALLRQLDFHGEELKLIDGELARVALRREEVKRLMTIPGVDATVALSIVAAVGDFGRFSSPDRLVSYLGLNPRVRQSGGQPASHGRITKQGRAHARGMLVEAAWAAAKTPGPLRAFYERVRARRGMQIAVVATARKLAVLCWHLVVTGEDYAYGRPSLLAQKLRALELRAGMPSRRGQRGSTHAYNLKEVRARERALSEQGERAYRQLVANWQAKGPRAKAGAGAATGERL

SEQ ID NO: 181983 - protein, 426 aa, unidentified
MKHPKTMFTYAGIDSHKNTHTCILLDCFYDKLGQVVFPNIPAKFGEFLAKAETLKAEGTELIFGLEDVSAYGRALTVFLTNNGKKVKHVNAVLVARERKNQNARQKDDFIDAECAAKILLSKLNSLPDVAPQDKYFILRTLVIRRQSIVKQNTALKNHLHALITSHYPSYHEFFAKIDTNTALTFFKTYPSPSSVIGTTEEELAAMLWKLSNGRVSAEKTHKIYKRIMEDGNTETEYQKTRDICVKSAIRQLEFNTREIESLEENIADFLDNFDCQLTSMKGIDTVSAARLIACIGDIKRFETPAKLARYSGVAPITYASGKTKLQYSNERGNRELNSLFYLLAVRVSMPTGPARRLINPFFHEYYHRKLSEGKTKRQALKSAQRRLINIIWNMMTYNVPYINPPTYLVPKKETEKETEKSTKNFD

SEQ ID NO: 181984 - protein, 342 aa, unidentified
MNEVSIIGLDLAKNVFQAHGAGADGSVIFRRKLSRVQLLKFLTQQPSCVVAMEACASAHHWGRVIGDLGHEVRLIPPAYVKPFVKRQKNDMADAEAIAEAASRPTMRFVAVKSEEQQGAAMVYRTRDLLVRQRTQTINALRAHLSEQGIVAPTGPAHVGRLAAVIDGDDGALPAAVRDLARLLLDQIAGLGEKVADLDAELRRRASVDDTARRLATIPGVGPITAAAITTFAPPMETFSKGRDFAAWVGLTPRQHSSGGKERLGRTSKMGQRDIRRLLIIGAVAVVRWAARKGAPEGSWLARMLERKPKMLIAVALANRMARTAWALMRKGEDYKDPAMATA

SEQ ID NO: 181985 - protein, 453 aa, unidentified
MEQPREVHDEEHERVWERVAAVDVAKGSGVVCTRVPDEDRAGRRRTHIWTVPARAGAVIELGDHLRSRQVQVITLESTSDYWRIWFVLLEAAGLRVQLVNARTVKNVPGRAKTDKNDAVWLAKLTERGMLRPSFVPPPEIRRLREFTRLRAVLVHDRSRYWARMEKLLERALIKISDVMSELNCVSGRAMIEALIAGERSPRVLAGLARAGLRKKTPELIEALTGRFEDHHGELARMLLDQIDALTAQIDRLTERITALLEQIPAAWGTDADGTTGPGAGAGPGAPVLPAAARLDEIAGCGTYAAQAIIAETGLDMTVFGTPGRLVSWAKRCPATRQSGQKTTRGKQDKGNPWLAGTLGEIAASAARTDTFLGERYRRIARRRGKRKALAAIARSILVIIYHLLADPEARYHDLGPGYYDTRTDRDRKIRNHVRQLQALGLDVTLHPQAEPAA

SEQ ID NO: 181986 - protein, 321 aa, unidentified
MQTVLGIDCAKAKFDAALLIGGKYKTKVFSNDARGFGELQTWLNQHGSGTVHACMEATGSYHEALALFLVEAGYAVSVLNPAQIKGFAQSVLTRTKTDRVDAKLIARFCLVSTPALWTPPAPEVRALQALVSRLEALNQMRTQEGNRLATAQPLIRGSIEKVIGLLDAEIAALKEQIRDHVDGHPGLREQARLLETIPGVGEATIAQLLAVVGDLARFKSARQLAAFLGLTPRQHQSGSSVRGKTRMAKMGHAQLRKALFFPAIVATRFNPLVRAFAQRLAQAGKPKMAIVGAAMRKLVHIIFGVLKSGRPFDPTMHAACV

SEQ ID NO: 181987 - protein, 355 aa, unidentified
MKIFVGIDIAKLNHFAAAISSDGEILLEPFKFTNDADGFQLLVSKLESFDKNSIIIGLESTAHYGDNLVRYLVAEFYQVCVLNPIKTCQMRKNNVRKTKTDKVDTFVIVKTLMMQDDLRFITFFDLDMMDLKALGRFRQKTIKQRTRLKIQLTTYVDQVFPEIQYFFKSGLHQHAVYALLKEAPSPKEIASMHMTHLANLLKVNSHGHFTKELAKELRVLAQKSVGANDSSISIQITQTIQQIELLDSQLEKIEAEMTDIMRFNDSVIMTIPGIGYINGGMILGEIGDIHRFSNPNKLLAFAGLDPSVYQSGNFQAKTTRMSKRGSRVLRYALVNAAWNVVRNNATFKLIMMPRG

SEQ ID NO: 181988 - protein, 319 aa, unidentified
MKSDSVHIGVDVSKEKLDIFNPHAKTLTSEPNSPEGFRKIREAARKAKAVVCCEPTGGLEFDMVMFLQKYNIPVAYCDGYRVRHYAISTGEFSKNDKIDARMISRFADNTNVRILSEKDKKQIRLRRLWSLYQTLIDTHVILAQKAAIEPEKDLKAMLRIESKSLRKKAEKILESCKKLIEEDEELNRIFETCILIDGVGQITALAVLAGVPEIGKISDAAIAKLVGAAPMDNQSGKTDKYKHIHGGRKNVRNALYMAAVASVKFNHILGAYYQQVRQRMPGPKASKWALVPVMRKLIHLINRIARDPKFVRVRPHGWG

SEQ ID NO: 181989 - protein, 413 aa, unidentified
MKRIVERCAGLDVHKASITACVRTPGEGGEPHQEIRKFSATTRGLLQLRDWLASFAVALVGMEATGVYWKPVYYMLEDDFELWLLNARHLKNVPGRKTDVKDAEWICQLVEHGLVRPSFVPPKEIRELRNLTRYRKAQIEERTREVQRLEKVLQDAGIKLSSVATRALGVSGRAMLDALISGTTDPEILAQLARGRLRSKIPALREALEGRFSAHHGLMVGRMLAHIDYLDESIAELSIEIERVMAPFSEEVKLLDTIPGVDRRTAEVLIAEIGADMNQFPTHRHLASWAGMCPGNDESAGKRRSGKTRKGSKWLRSALIEAAYAAARSRGTYLAAHYARLKGRRGPKKAAVAVGHSILVICYHILQCGEPYQELGEDYFNRRRSEEACRKRLIRQLERLGHRVVLEALPQPA

SEQ ID NO: 181990 - protein, 371 aa, unidentified
MTEAVKYIGLDVHKGTIAVAVADGERGGEVRYVGTVPNEDDAVRKLVKRLTGAGTKLQVCYEAGPCGYGLHRLLTGLGQSCIVIAPSMMPRRPGDHVKTDRRDAMTLARLLRAGELTAIWVPDEAHEAVRDLIRARRSAKEDATGAKQTVKSFLLRHDRRYGGKGTWTKMYWRWLSEQRFDFPHQQLAFEEMQKRVLEAQARVGRLEAALGEAVEGWRFAPLVRNLQALRGIQLVSAATLVAEVGDLTRFDNPKQLMAYVGLVPSEYSSGARKQRGRITRAGNGQARTMLVEAGWAYRLPAREERRYRERVADLPDEVQAIGWKAQVRLCQRFRRLAATGKPQPKVITAIARELIGYAWDIARRVSPAVAT

SEQ ID NO: 181991 - protein, 309 aa, unidentified
MDQIIVGIDVAKDRLDVAVRPSGEAFPVARTAAGLDELVERLKPLAPHLVALEATGGFETVVAASLAAAGLAVIVVNPAQVRSFAKALGQRAKTDPIDAGVIAHFAEATRPQVRPLPDAETVFLADLMQRRRQIVEMISAEKQREKRATPQLKKSIARLLKALRKELSTINDDIDGTVRSSPAWREQEDLLVSVPGIGKAISRTLIADLPELGRLNHKQIAALAGLAPFTRQSGTWRGRSCIGGGRTQVRCALFMGAMVAKRHNPVLKTFFDRLVAAGKPKMVAIIAVARKLLTILNAMIRDQKPWQNA

SEQ ID NO: 181992 - protein, 415 aa, unidentified
MQALYRCIAGMDVHRMLYVITVLVELADGTEEKHQRSFGGFKRDRRALVAWLVELGVELVVMESTGIYWKSIYSTLEKAGIPAHVVNARHVKNVPGRKTDISDSEWLARLGRYGLVKPSFIPPEDLRELRVVSRYRDKVAQTLAGEKNRLHKVLDDAGIKLGAVVSDIHGVSAQAMIDGLIDGTPIAQLPDLAKGTLREKHELLERSLEGELTPRHLFVLKNIREHIRYLESERASLDAYLIDAMAPYADYWRFLQTLPGLDQISAAMILVEIGTDLQAFDNVRHFASWAALCPGNHESAGKRKTGRIRKGNHMIRHLLCEAANAARRTHSVFRSFYQSLVPRKGHKKAIVAVAHKLLRTIYILFTRRQAYRDPGIDYQAMVVNRNAPRWIQALKKYGFWPKIGTLNAPIAAPAH

SEQ ID NO: 181993 - protein, 272 aa, unidentified
MNTNTLQNINVGVDTGKSQLDIYIRPLDIYFTVPNTDKGISDAIKTIKKHKPQRVVIEATGRLEIPFILACDKAKLPYVVANPLRIKRFAEAIGQRAKNDRLDAALIAHYAERVQPELTKLKSENIRLMSDLVSRRNQLLTMQTMERNRLQILPKNISSTITPILTALKNQLEKVEAKIAKLIESSPEYQAKSTILQSMPGVGKVLAASLISNVPELGFITNKQASSLIGVAPITRESGRFKGKRMIKGGRPQVRTVMYMAMMSAIQCNPRF

SEQ ID NO: 181994 - protein, 347 aa, unidentified
MEETSRIGMDTSKRIFQLHGVDGAERAVLRKKLPRERMIAFFKALPPTEVALEACGASHHWARALGEMGHAAKLIAPQLAKPYVKRGKNDAADAEALCEAASRPTMRYVPVKTVDQQAALMLAASRERLVRARTQLANAIRGHAAEFGLIAAKGASHVAALLETLQADETIPALARDVFAGLAEDHAHVEARLGAVDAALRAWHKGSAVAQRLTQIPGIGPVIASMLAMKTPDPKAFASGRDFAAWLGLTPKDHSTAGKARLGRITRAGDETLRSLLVVGATAVIWQTRRGATKRVMPWLASLLARKPAKLAAIALANKNARVAWKLMASGGAYDIDLARPRMAAAA

SEQ ID NO: 181995 - protein, 415 aa, unidentified
MALKIVYQICCGIDVHKTFVVACIASTNKQGVTTYKRHRFSTFTQGLKELLQWLLDNHCKEVCMESTGKYWIPIYNVLEKDCNIVLAHPKYVKAIRGKKTDKKDAKWIADLFKHDLVAGSFMPPADIRQLRDLMRYRFKLTCFMSSEKNRLQNCLTVSNIQLASVVSDTFGKSSQRILDKILENPDDTSFDIEPLIHGSMKKKLPELELAIDGFITPEQAGKLKVIKKHFEDLESRKAELEKLILALASPYQQELDLILTAPSFKNKFTAIGIISEIGVNMEAFPSAKHLCSWAGLTPTNNESAGKKKSVRVSKAGCYIKPLLVQCANSVVKSEKHPEIRNRYLRLRKRRGHKKAIIAIARMLLTALYNMLKNKEPYNAELYRKSDVLPVNREITIEQAILMAQFQGYKIKSAAE

SEQ ID NO: 181996 - protein, 367 aa, unidentified
MDAPCSGVECAKMEALFTPQQGTPMSEITVIGLDLAKHVFQVHGADPDGRPVLRKRLRRGQVLEFFASLSPCLIGMEACAGSHYWGRELQALGHEVRLIPPQYVKPYVKTNKNDAIDAEAISEALTRPTMRFTAVKSAEQQSVLMLHRTRELLVRQRTMLVNALRGHCGEFGIVAAQGLSRAGDLIKRIEDPADTALPDLARQALQCLTSQIRAIQEQIALIEKKLLAWHSSCEASRRLAEIPGVGLITATAVVASVGNATQFRSARQFAAWLGLVPQQHSSGGKERLGHISKRGDGYIRRLLVHGARAHLSWSRRKKQIRSAWLTGLLARRPTNVVLLAMANKTARIAWAMLSRGERYQEMIAAAA

SEQ ID NO: 181997 - protein, 418 aa, unidentified
MNEEGNTRGTRRYIALDIHKKYCVIGGVNGEGKVVLHAVRVEHADLEGWLKKNLRSTDHVVLESTTNAWHVYDLLAPLVERVVVANPAKVKQIANARVKTDIRDTFILARLLAANLVPDVWVPPAHVREMRQLLSQRRQLVETHTQIVNRMHSVAHRHHLQHERGKRFNQKNTPWQKDKRLSRVEQFQLELEMENRAYLEKQIQRIGREVTKMCHQKPWADSMTYIMQLPGFGVITGMTVLAAIGEVQRFGTPQHLASYSGLTGGLDQSGTHLVQKGITKEGRKELRWAMVEVAQRAVKSDPHWKRKFQEMEKRMHRNQAIVAVARQLLELIWYVLTRRQPYRHFSQERIAYKYLTWAWQMDEAARDGLTRQQFARYYLMRLGVGHDLTRIALDPKHPRRISSEAELLALRPELQHIE

SEQ ID NO: 181998 - protein, 429 aa, unidentified
MPSTVRSCSPAATHSQDGTLFVALELSLSHWLVAVSAPDASKVSKHRVPACDGPALLALLDRLRRQAEARRGGVVGVVSIQEAGRDGFWVHRLLEAHGVQSQVVDPASIAVNRRSRRAKTDRIDAEGLLRALMAWSRGERQVCSMVRPPTREAEDARRLTREREALVTERTRHANRIKGLLATQGVFGFEPTWQARRARLDELRTPEGQRLPPQLMAEILRQIERLELTMRQIASVEAERDAALAAECQAEDQAGAALASPEGPAPAAPVLPPSAALPRATGRETFGSSARDGAGARLLRLKGIGPETASVLRLEAFHRSFGNRREIAAYAGLTPTPWKSGGLDTEQGISKSGNARLRRTMVQVAWFWLRNQPQSALSAWYRERVGDGRGRIKRIAIVALARKLLIALWRLVTQGIVPEGAELKVARAA

SEQ ID NO: 181999 - protein, 357 aa, unidentified
MTQVKKLDFSGETIFCGVDMHRKNWRINIQDSDLELEDFSQDPDGVLLHKHLNRKYPGATFRVGYEAGFCGFSAQRLLSSKGIDCLVINAADVATTDKQKRQKNDKIDARKLCEHLQSKKVNSVYIPELHWEHGRSLVRTRSRIVSNQTRCKNRIWQLLHFSGLKLPGDYEAEQYWSKRFIEQLEEIECRSDALKTALELYIKDYQQTKALLLEATRAIRKLCRAPEYRDYILLLRSIPGIGEINAAVILFELQDINRFKHSDQLSSYAGLIPGTHDSGERKMSKGITERANHFLRTALVESSWTVVRKDPALLIKYKQYCKRMNKNKAIIRIAKHVLSRIQYVLKNQTEYVAGVVG

SEQ ID NO: 182000 - protein, 331 aa, unidentified
MGNVTTVGIDLAKNVFSLHGVDANGAVVLRKTVSRARLMETVAQQPACLIGLEACSGAHEWARRFEALGHTVKLMAPRFVAPYRKNGKNDGNDAEAICEAVSRPSMRFVPIKTLEQQAVLCLHRVRQGFIEERTATINRLRGLLAEFGFVLPQKAAEVRRLATEWLERLPVHAACAIRDLREHLRVLDARVKEYERSIEAHAHDHDAAKLAQQRQGIGPLTASAIVASVGDVREFKNGRQFAAWLGLVPRQHSTGGKQRLGHITGRGDPYLRTLLVMGARSVLQRASSQTDPLSRWALAVRVRRGYHRACIAVAAKNARVVWAMLNQHARA

SEQ ID NO: 182001 - protein, 314 aa, unidentified
MNENTEIFVGIDISKDTLDLGFRPSGQSVSLAHDEGGITEVMHQLSEAKPQLIVLEATGGLELDLATRLMVAGLPVVVVNPRQVRDYAKATGQLAKTDRIDALVLADFGRAIRPEVRPIKDAATRELDDLVTRRRQLVEMRVQESLRLARASKAQQKSLKRHIAWLDKRIAELDTELTRRLRTSPAWRAKDDLLRSIPGVGPTTSATLLAQLPELGTMDRKAIAALAGVAPLANDSGQHRGKRRIWGGRAEVRSVLYMSTVTAIRWNAAIKAFSDRLKAAGKPAKVVIVACMRKLLTIMNAMLKTSSPWTVKIA

SEQ ID NO: 182002 - protein, 340 aa, unidentified
MKPTIAVDLAKSVFEVAISQRPGRVEKRLRLSRKRLLPFFAQQPPATVLLEACSSAHFWGRQLRNLGHDAVLLPPRHVRPYRQGNKTDRADAKALLEAHRNEEIRPVPVKTVEQHALAALHRLRSGWIATRTARINAVRGILRELGLTIPVGAQRVVLCVRALLDDDAIPESLRVSLLEACDEIRSLEEKVRSTERQLEALGRQIAAVGHLRSVPGIGLLTATALVASVGDVRRFPSGRHFASFLGLTPKEHSSGHVRRLGRISKRGDAYLRTLLIHGARSVLWAAKSKKEPDRLRLWALELEQSRGHNKAAVALANKLARFAWVVLNERRNFQTTRRAA

SEQ ID NO: 182003 - protein, 428 aa, unidentified
MSNQEIIRRERYCQIVNEIFGSDAYLVVGIDVAKQKHYAFMGTATGNTLQKRLIFENNIAGFSRLLKTAEQIKAQNGLSKIVYGLEPTGNYYKPLARYIALCEGNVVLVSGQAIKNNRQILDGRWDKNDTKDAANVADLVSRGKCIYYDSSSPEITELRGLLSLRRRLKKNEHSLKMRIRNTLLAQYFPELDKYYSACESEILAIIKWCLNPDKIALMEFDQFFKMVTRTHRGIAQKLRLQKIYQAAIDSVGCPMGHSAEFEAELLVERLEDVRQAIKRTEDWMEDISLDIPEYNYLLTIPGFGPYISARVLASIGDPFRFTNRKQLIKMSGYDLCANRSGKASHKAIPVISKQGNSELRYALYQAAHVAATRTDLFRSYFTKLLRGRERERGIKTKMCVKLAAKMLVLAWTLMKKREVFDPVYLSID

SEQ ID NO: 182004 - protein, 318 aa, unidentified
MANQIAVGIDISKKTMDVAIGHEQSTAIFSNDGAGHQALIEVLKSHQISLIVMEATGQYQLACACALQTAGFAVVVINPRQARDFAKAMGRLVKTDSVDARMLAELAQVLNQRSDRDRFIKSMPDQAQQQLRALVLRRRQLVRLLVSERQRKHMAHPEVVQDIAELMDVLAKQLEALDRRIAEHLAQYQSNLAALLKSVKGVGPAMAATLISELPELGQLKAKQICALVGVAPMNRDSGQARGKRIICGGRATVRSALYMAAIVAMRFNAVIRQCYERLLAAGKPKKVAIVACMRKLLVIMNAMVKSGQPWNDQLAPA

SEQ ID NO: 182005 - protein, 416 aa, unidentified
MKHNTNKFAACVGIDWADQKHDVSVSVGSGDPVHQVIRHTPEDLTRWLGELHQQYPEGKIAVCLEQSKGSLIFHLLGYDFLTLFPVNPKSFARFREAFITSGAKGDSSDADLLRELVTVHNERLRPWEPDDEQTRTISFLAEGRRKTVGERTRLTNRLRSTLKMYFPQAIELVGDSLHSTMTLDFLRKWPQLPDVQQAKKKTVQMFYSSHNSRSPGRIKERLELIRSTIHLTNDQAVIKSCLITVKMLVGQIAQLNSAIVEYDRELKAFYDKHPDHDIFDSFPGAGDVLGPRLLAAWGTDRARYNASDEMQKYSGTAPITIASGKSKNVVRRVACPKFLLQTFHEFANCSRQFSVWAQAFYEMKREQGKNHHMAVRALAFKWIRIIYRCWQDRTVYNEIKYLQALKRSNSPLLKFI

SEQ ID NO: 182006 - protein, 331 aa, unidentified
MLYVGIEVAKYKHDVAVLNDQGKWVLKPLTFSNSRAGFETLLNTLSQLNQDYLVALEDTGHYAFNLLHFLHEQEITTYTYNPLLIKEFAKSLSLRKTKTDKKDARVIALKLLADPKREQFRHDNKHEELKILTRHINRLKKKQSDWKVQYTRCLDIIFPELDKLIGKQSDYAYELLSRYPNPQKISVADFEQLLTIKRLTVPKIQDILKVAPHSIGTTSPAREFELIEIIENIKHYNKLITKAENRVDELMAEINSVITTVTGIGNRLGSIILAEIRNIHTFDSPAQLQAFAGLEPSIYQSGQVDLSGKMVKRGSPHLRWALIQAAKSVAR

SEQ ID NO: 182007 - protein, 358 aa, unidentified
MEYGAIDLHKNESQIRLVTESGETVDRRITTTRDRFTALFGGRGPMRILLEASTESEWVAQHLETLGHTVIVADPTFAPMYSERSRRIKTDRRDVAALTEACQRGCYRAAHRRSASQRTVQMLLNVRRELTDSRTRAISLTRAVLRGAGLRIRSGSAASFLVRVAALDLPSSLAETLAPLQRLIAVLNDELATADDQVAGIAAQDPVVARLTTVPGIGPVTATAYVAALDDAARFGRAAQVASYLGLVPREYSSGEQQRRGRVIRSAHPYVQSLLVQAAWCVWRSKDPRTAGLRGWAQSIAHRRGKSIAVVALARRLARILFAMWRDSVPYDATRTRPTRTHEDTAIAEATAPSAVAS

SEQ ID NO: 182008 - protein, 341 aa, unidentified
MDKIASQPVAWCGIDVSAQQLVVALQRGDRAVQHRTFPNRSVGHQALIRWLARSTGTVRVCLEATGLYSLDLALSVHAVPSIELAVLNPKAVCRFAETLRRSKTDPADAMVLLDYARRMPWQSWQPPSATALVLRSITRRFAALTKQHTMEANRLHAAEASKTVPRCVRQDLKQSLRQIECRLKRLQSEARELVARDAELEQRYTLLRSIPGIGESSALQIMGELEVLAPDLDVRQWVAHSGLDPMQHTSGSSVHRAARISRAGNRHLRRVLYMPAVVGVRFDPYLRTFYEHLLERHKTKLQAIIAAARKILHAIYGMFRSRSRYDGSKLFPLLQPVTKAA

SEQ ID NO: 182009 - protein, 371 aa, unidentified
MEEFFSQGVADRHVPGSYETVGELGSPRRSFNKPEQLRGPRRARILQGRANKEEAVSKASVYVGIDVSKAQLDVAVRPSGEAWSVPHDLGGIATLVARLKALEPALVVLEATGGLEMPLAGALAEGGIPVAVVNPRQVRDFAKATGRLAKTDTLDAQILAHFAEVVRPTPRPLPDEKSQELSAVLARRRQIVEMLTAERNRREGSARAVRRGILSHIKWLERNLKETDGDLSRMIRESPLWREKDDLLKSAPGVGPVVSTTLLANLPELGSLNRKQIAALVGVAPLNRDSGTLRGKRTIWGGRAQVRTTLYMAALAAARHDPLIRSFYQRLLAAGKAKKLALTACMRKLLTILNAMLKHRTPWRENVAQTS

SEQ ID NO: 182010 - protein, 345 aa, unidentified
MVYYAGIDLGKRQSQVRIIGADRKIVEDLRVDNDPKEFVRIFRKYKGDVLVACEACSNAFWVADTLEPLVRKVHVGDTKKIRWIAEARIKTDKIDAGILAELLRADLFPTIAIPPRRIRDLRELVRGIVRLRRQTVRYRNQVHGLLGRHGVAYKRSAVAGPKLSELVKEAELPAPAKLAAESVLRLIDHTAAEERRLDKAIRLELKDEPELNRAVDLVETVPGVGYFSALLFVMELWDVGRFADAGRLASYIGFVPSTHQTGETLRNGRMTKQGNVLARWILVQDAWSAARTHLFFGRLYERHRKRLGKGRAIVPVARTLLSTIFRVWSEGKTYEELFGEKALVG

SEQ ID NO: 182011 - protein, 345 aa, unidentified
MLKIVYPVCCGMDVHKSFVVACIAATNDQGVTTYRSKRFSTFTGDLRRLAAWLRAHSCTDVCMESTGKYWIPVYTILEPSCKITLAHPKYVKAIRGKKTDKKDAKWIADIFKHGLVSGSFIPPADIRQLRDLMRYRSKLTGFSSGEKNRAQNCLTVSNIKLDDVFSDVFGKTASAITTQLLESNAPFDVSPFLSKKLKASAEEIQAAVDGSICTHQAGKLRVIRSHMENLAACKKSLESLIFGLAENYLPTLDLILTVPGIHVFAAVGILSEIGADMSVFPSSKHLCSWAGLTPQNNESAGKKKTTRISRAGAYIKPLLVQCALAAIRKKSNPEIRSRYLNLRKH

SEQ ID NO: 182012 - protein, 409 aa, unidentified
MGIDWAEAKHDVCLQAAGSTKRACFQLEPTPEAIDAWATTLRTRFTGHPVAVCLELNKGPLVCALRKYDFPILFPRNPLTLARYRAACTPSRAKDDPTDAELQLALLLTPRAKLQPLQPHSPTMRALEQLVAQRRRVVGDKVRLTKRLTSTLKNDFPHVLQWFPDQDPPIFCDFRSRGPTLKAAQLARRSTLATFFRDHHGRSADVGAQRLHAIKAAPPWTTDAGVIAPNALLVQALVNQLRGTLEAIETFDNALAQRAQSHPDFPLCQALPGAGPVFASRLLVAFGEPRARSATAAAWQKYAGIAPVTARSGKQAWVPWRLQGPKCLRQPCVEWAAESIRHAFWARVYYQQQRDKGKAHQAAVRALAFTWLRILYRCWPDHTLYDESVYLNALNNRGSSLIHNLAQGA

SEQ ID NO: 182013 - protein, 406 aa, unidentified
MKQFNPNQPMAMCGSTALLNQSSIAPLHYELYIGLDVHKDTIAVSIAHRDGSKPRYYGEIANTPNAVKKLINKLSPTGEVISVCYEAGPCGYGLYRQIIALDHHCIVIAPSLIPSKPGDRVKTDRRDSESLARLHRANELTPVWVPGAEQEAIRDLTRAREDMKHLARQSRQRLSMFLLRHGQNYDSGKSKWTQAYFRWLERIKFTQPVQQIVFQEYIDCVKQQHARVKSLEQEMESALHGWALAPVVEALMALRGCKLNTAMTIMAELGDITRFDSARQLMAYLGLVPSEHSSGKSTRRGGITKTGNGHVRRVLTESAWCYRFPARKTAHLQRRAERTSESVQAIAWKAQKRLCGRYQHLLNRGLLKVKVCTAIARELAGFIWAIACDVMPKPSALMGQQAFITE

SEQ ID NO: 182014 - protein, 398 aa, unidentified
MRWFLGIDISKSSFDTTLLDGKSGKLHHDRFTMDKEGLDALMKHLTPLPKDSLFIVMESTGIYHLPLLAFLLEQGFTCSVINPTLLKHHIQSSTLRKSKTDRKDALAIARFASMHHASLKPANLDALRSIRPLLREREALSKEVAKLKTDIKALVDQLFPELSKNTNIFTRSILHLLLQAPSRKRVRNLKEKKIQRILDKASGNKVRLSAKEILALAKNSIGINNPHLETVLQSKIRRLEHVQSEIETLEKAIEEAVKEERLDDDIHTLTSIPGIGTTTATNFVAEIGSIKRFASVKQLCAFIGFDPAIRQSGSSIDSKGHISKRGHASLRRTLWQMAIGVIRCLPKYKAYYEKKRQEGKTFKQAVVAVGNKLLRLLFTLLKNKMPFHEELAMKGVTA

SEQ ID NO: 182015 - protein, 373 aa, unidentified
MIAGIDTHKDTLAVAVVDDSGRLVAGGDVPNTERGFAQLVDMFTAHHVQRVGIEGSGSFGRAVAVHLALCWQSGQPVAVVEVPTLMTSRERHGQLGKGKTDPVDALAIARITTREQQLPPVRLTVGAAADLRALLDYREDLVRERGALVNRAHAELGGLRPGYQQQIPIMTTRARVRAAVDLLGDDSSIRATLCRRRLERVLAIDAETAELKQQITRLVAAADTTLTDLYGVGPLVAARFLAEVVDIRRYPNRNAFAAANGTAPLPASSGRTVRHRFNPGGNRQLNRSLYTIALTQIRGDTEGRAYYERKRAAGKSKREALRCLKRRLSDIVFTTMRHDAASADASCDQASPPAWPLLVGVGAVDANEARLTA

SEQ ID NO: 182016 - protein, 352 aa, unidentified
MDKESSSQQKLYLGFDVSEKSIEVFGVCGTQSTEKAIRIENSRSSIQSLLTHFKDKEQVCIVMETGTHSTWMSRYIREIGFEVIVAHARDLALIYGASKKNDRIDAEKLARLAQADRKLLHPIEHMSEERQQDLMIIKCRALLIKQRTQLINTIRGMLRTFGIKDHSTSVRNVKNFELSNLPSQVITALSPLLQQIRFTEMQIRYYDREITKLYKKYQVTEILRQIRGVGPAISLTFVLLVGDISRFLDPKRLAAYFGVVPKQDQSGETDKQTNITKAGNSLMRVLLIQGAQYILGPFGTECDLRDYGKRIEARGGAIAKKKARVAVARKLIILMHRLWSNPEKEYIPCFKI

SEQ ID NO: 182017 - protein, 355 aa, unidentified
MCAKKTGSLENLAVVGIDIGKDKFHLVGFDRAGQLVLRKQIKRLALNATFEQLPRCIVGMEACLSAHFVSRTLRGMGFEPRIIPAIYVKPFNKGQKNDYNDAEAIAEAALRPNLRTVSEKDQDQLDLQALHRVRARLVSRRTATINQIRAFLIEQGITVRSGLRALKNSFETILEERRDEISPRMRSILIGLYGDWMWLDKRIEDVSGEIEEISRTEENCANIMTIPGIGPMISTAMVAAIGKGEAFDRGRDFAAWVGLVPRQFSTGGRTILGRITKRGSRYLRMLFVQAAKVIMMRPHRWSDFSFGRWLTEAVARMPRNKAAIALANKLARTAWSLLRHGTRFDAPQDAAMEAI

SEQ ID NO: 182018 - protein, 408 aa, unidentified
MNPLYVGIDVSSKSNVVYFMLPDGSKHSNFSVANSHTGSSQLVKRILSAMTSCSLDTVLIGLEATSVYGDNLVYFLREDAALARFNSKIHVLNPKQVSKFKEAYNDLPKNDLIDSFVIADCLRFGRINKEVYLGDYRYKALQNLTRARFFAVQNLIKEKQRFMNVLFKKYSTMTQEKVFSDTFSTTALAVYDEFESAEALANMDLHELTDFIIEKGKNRFPDPDAVAKAIQKAARSSYRLPKTVNDSVNQVLSISITSMKALESQIKEFDKAIKAQMELLPNVLISIPGIGPVYSAGIMAEIGDINRFDNQAALAKYAGLAWKQHQSGSFEAEVTRLIPSGNRFLKYYLYEAAFSLVRCDKEYSDFYHLKYKEVNRCQHKRALALTARKFVRLVFRLLKDNRLYVPAK

SEQ ID NO: 182019 - protein, 451 aa, unidentified
MSGTRKARRKRDISPTHPHAAAIDIGATLHVAAVGPDQDPEPVRSFGTFTGDLHRLADWFGQCGVRTVAMESTGVYWIPAFEILDQRGFEVILVNARDAKHVPGRKTDISDAQWLQRLHEHGLLRASFRLKGEVAVLRGYLRQRERLLDYAGSHIQHMQKALTQMNLQLHHVVTDITGTTGMAIIRAIVAGERDPAVLAAHRDRRCHASTETIRQALVGNDREEHVFALTQALELYDVYQAKVALCDGRIEAVLKRLREASSSPAGKPPPIQAPKKQSNALTFDVRAALHGLLGCDLTRIHGLGPYLALKLVGECGTNLSAWPNAKHFTSWLCLSPSNKISGGKVLSSRTRRSGSRAAALLRLAAVAVGRSETALGAFYRRLSARVGKAKAVTATARKIAVLFYNTLRHGMEYSDPGASHYEERYRRRVLTNLERRAKSLGYVLQEAPAPA

SEQ ID NO: 182020 - protein, 401 aa, unidentified
MVISIDGVGVFLGLDVGKQTHHGHGLSPAGKTVFDKPLSNSEPKLRAVFDKLKAKFGTVLVVVDQPASIGALPLTVARDTGCQVAYLPGLAMRRIADLYPGEAKTDARDAAVIADAARTMPHTLRSLNLTDEVTAELTMLVGFDQDLAGEANRTSNRIRGLLTQFHPSLERVLGPRLDHPAVTWLLERYGSPQTLRKAGRRKLVEVVRPRAPRMAERLVDDIFTALDEQTVVVPGTNTLDVIVPSPAKSPAAVHEQRRALETRIEALLEAHPLSQVLTSMPGIGVRTAAVLLATVGDGSSFPSAAHLASYAGLAPATRQSGTSIHGEHAPRGGNRQLKRAMFLSAFAALHDPASRGYYDRCRARGKTHTQSLLRLARHRISVLFAMLRDGTFYEPRTPRLA

SEQ ID NO: 182021 - protein, 451 aa, unidentified
MAKVKPQVIDDEEHERVYERVAAVDVAKDSGMVCTRTPHPSRPGARQSTVWTVKARMTVIRALGRQLKADGIEMVTLEATSDYWRIWFYVLEAAGLAVQLVNAAQARNLPGRPKTDKLDAMWLARLTEMGLLRPSFVPPAAIRALRDYTRARIRLVQERTRCFQRLEKLLEGALIKLSAVASKLTTESAKDMIKAMIAGERDPHKLAALARTRMKAKHDDLVEALAGMFDDHHGELARILLDQAAFCDTRIAQLTARITAAVAAMPAAWGVDADGTTGPDAGTGPDAAALPAVQRLAEIPGISPGLACSIIAETGLDMGRFPTAAHLVSWAGLCPRARQSGPRTRSGKKNQGDGWLRGTLGQAATGASRTSTFLGERYGRIARRRGKAKAQVAVARSILIIIWHLLSNPEARFTDLGYGYYQTRTDTDRKIRNHIRQIQALGFEVTITKAT

SEQ ID NO: 182022 - protein, 430 aa, unidentified
MTKLYSTPPDAVLVAIDMSKHRQEVLLERPEGGRRRRMTVMATKADYDRLADDLTAIGRPVIVGFEATGNYHRTLAHRLLSAGCELRLISSVALARTREALHNGWDKNDSKDAQVILHMLKIGATQRYVDPLAAGINDLQEMSKTHEAISKAKTQTWHRILTHYLPLYFPEIERFAGNSRSDWFLALIERFPTPGSITSIGREAFTEQAWPLIGRKVSKARVVNDIYETACASIALPIDEDSTAVAMFRMVIAQARTLIQQRNEIERIAHDALATNSDYQLLRMIPGIGPINALTILAEAGDLRRFSHHRQFLKFCGLDLATYQSGIFRGRTKLSKYGNARLRRTFWMATQVAIRQPNNSFRDKLSRYVDGHADDPDRRRKAMTAVTAKMARVVHAVIKTGTEYRPFVERADTRWKDPSLLCREGATATL

SEQ ID NO: 182023 - protein, 281 aa, unidentified
MESMHYIGMDIHKKIIAFCIKTFNGIVIKQGKLPATRKALSNWLEDLPQPWTAAMEATLFTAWIYDFLKPYAQSIKVAHPEMLKAITAAKKKNDVSDAEKITDLLRVDMLPECYMMPQELRDLRRILRYRNHIVRTATKEKNKISGLLMEVGAQYNKKRLHGEKYFSEFLDTVEHVPDSVINMLELSRSNLEIFTDIQKRLVHSIKGDPLIRGRVERLLSIRGVGEVTALTWVLEVGEPERFHSIRQASAIADFVPPKKNPPAKSTAVQFLKRGTNTFKRY

SEQ ID NO: 182024 - protein, 293 aa, unidentified
MRPKLLMENDYILRQCVGIDVSKETLVVTMCMFSFAEEAHYSDVKTFKNNKTGFNQLVKWSRKEAYTDKPLRYVMEATGVYHEELANHLVKIGCTVIIMMPNKAREFAIWEGMISKNDTIDSRVLALVGCVKRSMRPWQPSKEIYHELRAMTRFAQDTKKLRLALKNHLEALEHSHQAEKSVVKHYEAMVSYLDKRLEMNLKNMKEKVASDEALNKKVENIITAPSLGFTSVITVIAETNGFALIQNRKQLTSYAGFDVKDNQSGNVKGTSRISKKGNSRRTRQTLWSRPCRC

SEQ ID NO: 182025 - protein, 355 aa, unidentified
MNDEKYIGLDVHQATIVVAVLDSTGKLVMESILETEAATILQFFAGLRGTLSVTFEEGTWSVWLYDLLNAHVDQLVVCNPRKNALLKDGNKSDRIDARKLAELLRGNQLKPVYHGESGVRMLRELSRSYLTIVKDLSRVMNRLKAVYRSWAIPCAGRDVYYTRNRAQWLGKIREAGVRRRAERLYEQLDMLQHLRQQARRELLAESRKHAITAKLRQIPYLGPIRSALAVALIQTPHRFRSKRQLWAYSGLALETRISAEYRLVEGQVRRSKKLLSIRGLNKDHNHDLKGLFKGAATMASVRPGPFQDFYQAALAKGIKPTMARLTLARKIAAITLTLWKKGENFDAEKLKSQAA

SEQ ID NO: 182026 - protein, 463 aa, unidentified
MQEEKYSKKRSNNKRKKSGNSMPVLNPDAAGVDIHPTTIFIAVPGRDADTVRKYSTFTGDLLSAVDWLKKCGIRTVAMESTGVYWIPFYQILSDHDFQVCLVNARHVKNVPGRKTDVGDAQWLQSLHSVGLLRGSFRPSQAICALRSISRHRESLLKMGAVHIQHMQKALDQMNLHLHHVIDDIVGVTGLAIIKAILVGERNLKRLADLRNCHIQCSESTMMKALEGDYRREHLFVLKQSLNGWKLIQQQIADCDSELELLTRKLQEKFDPVEVPLSAASRKKTSKNQPKGEWQQLLTQAFGVDLTAVPGVQTATAQTLFMELGTDWSCFSSSHRFGSWLNLCPNTEVSNNKVVHRNRRRVQKRLRSALRMAALSLHRSQTLLGVEFRRRKSQLGPAGAITALAHKLARILWHMVTYKTPYDETIFAETAEKHKKRQEKFLIKRVESMGYCVVAAPLVPAQVP

SEQ ID NO: 182027 - protein, 332 aa, unidentified
MAQTDRVVVGIDVAKDKADACIRSLSQRQTFPSTTEGRRALIRWLRKHKVGTAAMEASGGYERDWAKALREAGIEARVVDPKRVRSFAQSAGRLAKNDPIDALMIAWFAEVFIEAPGQTGDTARDKLVQIVNARQNLLDMQTSLRNRSEHATPDVVQKMQARLLKKIASEIVELEAAITAMVKATPHFAELAAIIESVPGLGKTTSAGLIAAMPELGQVRNEVAAALLGVAPYDNDSGQRRGDRHIKGGRRKLRNLFYMACLGAATRHNPVLKAFYDRLIAKGKEPKVALTACMRKLICIINTMIARRQKWDAARSNLCNPARHLPSACPAQ

SEQ ID NO: 182028 - protein, 314 aa, unidentified
MNALTSVGIDVSKATLDVALAPDAKPFSVGNERGGIDKLHAKLPAPGTCLITLEGSGGYERLVIAELLDRGHHVALANPRQVRDFAKGLGILAKTDEIDAAVLARFGQVVGPRCLEKPSGSQTELQQLVERRRQLISLRTAETNRRQQATSKRTIGSIDAVLKTLQLQIAALEADIAALIEEHADWKQKAEILTSTPGVGAVTAMTLLADLPELGQLNREQIAALAGLAPYAHDSGTSFGARCIRGGRADVRTTLYMAALAGIRCNPVLNAFYKRLRAAGKQTKKALTACMRKLLVILNTMLKTNTPWKTQNVR

SEQ ID NO: 182029 - protein, 347 aa, unidentified
MRLYTEQHAYYCGIDLHARSMYLCVLDQAGSVRLHRNIAADPGALLAALEPFRTDVVVAAECTFTWYWLADLCAEHNIPFILGHALYMRAIHGAKAKNDRIDSHKIAALVRGGNFPLAHVYPKAKRATRDLLRRRLRLVRARSELNVHIQNATSQYNLPALPKRLAYRCNRDGVAQRFADCSARKSIELDLALMDTYDRMLLELERYILHTAKEHDAQTIHRLQTVPGIGKVLALTIYYEIGDISRFPTVGDFASYARLVKPAKESAGRLHGHGGDKIGNPHLKWSFSEAAVLFLRDNPVGQKLLARYERKHGKPKALSILAHRLGRAVYYMLKRKTVFDMQQFIAG

SEQ ID NO: 182030 - protein, 313 aa, unidentified
MDAIVVGIDVSKDRLDVAVRPTGEHFVVARDPQGLRELIARLTPLAPSAIALEATGGYESVVAAGLAAAGLPVVVVNPAQVRAFAQALGKRAKTDPLDASVIAHFAEATRPAIRPLPDADTERLADLVARRGQIIEMMVAERQRLKRLSEPRVRKSIARLLAALQKELSEVDGEIDDAVRGSPTWRDKEDLLASVPGVGKVIARTLIAELPELGTLDRRQIAALAGLAPWTRQSGQWKGKSFIGGGRSRVRAALFMGAMVAAQHNPVLRAFRDKLVAAGKPKLVALIATARKLLTVLNAIVRDHQPWQEAEHV

SEQ ID NO: 182031 - protein, 339 aa, unidentified
MNIVTCGIDLAKNVFQIHGIDDNEDVIERKQLRRNQMLIFFAKREPCLIGMEACGSAHYWSRELSRLGHTVRLMSPQHVKPCIKGNKNDVNDAEGICEAVSRPSMKFVGAKTQAQQDILMLHRIRSQKVKNRTALVNQIRGLLGEFGCVLTKRIEPFRRELVDLLTADNNQKLSELARRNFYQLYEDLLLLDDQIERVEKELQATCKENADCQRLLTLPGIGWITASALVAHIGDISQFKSGRELSAYLGLVPKQHSSGGKNTLLGISKRGDAYLRTLLIHGSRSVLQHVEKKEDNNSLWLKQLAERRGNNKAVVAQANKTARKVWALLTNQTVYQQAA

SEQ ID NO: 182032 - protein, 404 aa, unidentified
MKGPIVSIDVSKGKSDYQAFKDLNVKYTGSRSIKHNKEGFDEIVNLVREMEKKLETEVCVVYEATGVYHRVLKKVLEDNNIKQFIINPLLSAKTRKNDSLRSPKTDKLDPKSIAKTYYSHSLHNSHKQETIYHELRELSRYYEDILVHIRKDKVAFRAQLDIVFPGYDTLFDDLYGPVALAVIEKYPHPEMLQKKKINTVSKVIQSKTCHRQAVSDTMADKAIEYSKTIYSGCDKDDIEVLILQRFIKKLNEDMAEAERTIGEMIKLAQELPDFNIIKSIPGIGDNLAARIIAELGDMTRFKKKNELVAFAGLDPRISESGQNDGDHMHITKKGNKRLRCLLYLAVTCSIRLKRDDNSIKDFYIKKKQQSNPMCSKAAKTACASKLVRIIYSMCKTGELYQYNK

SEQ ID NO: 182033 - protein, 482 aa, unidentified
MKSKPQEKNERATNHPEHHHWHEMNRKQRREMMRKMQSEDLSLEVIHPDAAGIDIGNESHYAAVPPSGDSQPVRRFGCTTAELKAMAAWLKRCGIRTVAMQSTGVYWVAVYDILEQAGLEVYLVNARDTKNLPGRKSDVQESQWLMKLHTYGLLRNSFRPAQEIRTMRTYWRQRNDLVQSAGRHILRMQKALTQMNLQLANVLSDVSGMTGQAIIKAILGGERDPHKLAAFRDCRVKASQEQIARSLEGNWQEDLLFVLKQEQDGYEFCQQQMAECDRRLEQYLQQREDRSQGATLPEEKRKGRLKKKRANKPQFDLRTDLFRITGTDLTRIDSIDVMTAMTVISEAGWDMSKWETEHHFVSWLRLCPDNRISGAKVIGKGRLPTNNPISIALKIAASTLRLSKTYLGAQFRRFRTRLGAPIAIKAMAAKLARLVYRMLRHGMKYVDQGALFYEAQHRQSQIKQLKWKALKLGFRIVQDPAA

SEQ ID NO: 182034 - protein, 344 aa, unidentified
MSHPDLQCVGIDVAKATLDVAGTDGMPPFTVSNDGASFKMITDKLSGVSVSLILMEATGGLEAKVAVHLQSEGFDVVIINPRQARDFARAMGHLAKTDHLDGAALAQLARVIDRHPDRNRYIRLMPDAARQALTALVVRRRQLNQTLVAERNRLYPSHPDGRESISRIMTALEAELALVTRMMNRQLRQHFRDQARQLTSMKGVADITAATLLAELPELGTLTRREISALVGVAPVNRDSGKMRGRRTIFGGRAGVRCTLYMAVITAIQFNPAIRAFYVRSVGAAKAKKVALVACMRKLLTILNAMVKSGTYWKDHFMPPRQFSESKTQSGSEINVIKAVLMPL

SEQ ID NO: 182035 - protein, 352 aa, unidentified
MAGVMIGVDPHKASHTAVAISGAEEPLGQLRVRASAAQTERLLEWAAAWPERSWAVEGAGGLGHLLAQQLLSAGERVLDVQPKLGARVRLLATGNVNKNDPNDARSVAVAALRSPGVREARPDDHAAVLKVWSKRRRDLGSSRTQVVCRLHAVLCELVPGGVPKKIIAAHAARLLGSIMPPDAVAAARWELAAALVEDLRRIDGQMRETRKKLDTAVKASGTSLTGLFGVGPVIAATVIGEVRDVSRFKNRDRFAACNGTAPIEVASGKRKVNRLSRRGNRRVNHAIHMAAVTQVRQKHSEGRAYYDKKLAEGKTHREALRSLKRQVSDAVFTRLRADAQRAQAQVRDPGGQ

SEQ ID NO: 182036 - protein, 402 aa, unidentified
MNSVGIDISKGRSTVAAMRPFGEVVISPFEVRHTDSELSELARQLKSLDGETRVVMEATGNYHAPVAKLLHDAGLYVSVVNAKLVHGYGNNDLRRVKTDRKDAVKLANYGLDRWLTLPRYVPEEDTRLLLKNCYRQYRQYSKVQTVLKNNLISLLDTVFPNANRLFSSPIRGDGSEKWVDFVAEFWHCHCVSEKSEKAFTNKYQRWCKKHGYNFSEAKAHTIHCEASGHIGILPKSETTKLLVEQAVAQLRATSAALTALKREMLTLAAQLPEYPVVMGMFGVGPTLGPQLIAEIGDVRRFYSKKALVAYAGLDAPPNDSGDVTGRHKSMSKIGASSLRRTLFLVMSIYLQNAPLDEPVYQFMDRKRAEGKPYRVYMMASANKFLRIYYATVKAYLESLEQV

SEQ ID NO: 182037 - protein, 354 aa, unidentified
MRRMQDYIVKGKRIFIGLEDSKRTWKLCVRSGGMIVAETSMPAQYDNLRNYLQGKYPQCKITVIYEAGFGGFWLSDLLKRDGIECIVTPAHTVTEAKVNRVKTDKGDARRLALNLENNDYKSCHIPDRDCREDRQISRTLSQIQTKITATKNQIRKLLDWHGLNGDLPSGGWRESDYRKLQSMKLSSMSLQICLDAYFKTIECLEQVSLGLLGQLKELSRKDNYRESVSLKQSCPGIGWLSAIRFTLEWGDLRRFPDGGHLASYIGLTCSEHSSGETVHHGPITRQGSGKVRAWLIQCAWRAIKLDPILLDKFQRVWKNSGSKKKAIVAVARKLAVRIRALEISKQPYVVGVLE

SEQ ID NO: 182038 - protein, 463 aa, unidentified
MAARKPKRMGAQTVEDEDYQLRYERVAGIDVAKGSAMVCLRLPPGPGKVRRTCRTWEVMARVPDIEALAAELKAARVERVSMESTSDYWRIWVVVLEGAGLDVQLVNSSQARNLPGRPKTDKADAQWIARLTEMGLLRGSFVPPPEIRALRQYTRQLVHLSQDRTRYWQRLEKLLESALCKLTSVVSGLAGSASCLAMLEAMIAGERDPQVLAGYARGPMRSKHAALVKAFTGMQFGPEHVFSASSDLRMIKMLDAEITGLEQQVRDHLAAIPAAWGTDADGVTGPGAGTGPDAAVLPAVDRLTEIPGVGPAIAAGLIAEIGLDMSRFPTPHALVSWVGMAPVPNQSGPRKGRGRKGHGSSYARRLAGQAGNGAARTDTFLGQRHRRIRSRPAGGGWKKANVAVGRSIIIIVWHLLKDPAARFTDLGPDHYAKHTDTNRKARNHKRQLEALGYDVILTPREAA

SEQ ID NO: 182039 - protein, 547 aa, unidentified
MEHNDIEQMTSTPAGADADVVCTESCAFGILSADSGKAAACAPNSAGAACPTERLSSARPMFIGRVGAGDCGDVLPRQDFTSIPPRPSPCPGKGEQDMARRTNRFDEVQRYVAGIDLAGHADHYVCGPRKDDGTHDIEHFGTTTNEILRMVAWLKERKVVSVAMESTSVYWIYVYDMLEKAGIGCLLVDTRTVKMVPGRKSDVKDCQWLQKLHSCGLLRGAFRPPEEFNAVRSVIRESENVRQMRTQSIQSIQKSLDQMNVRVHHAVSDIDGVTGMRILAAIVGGERDPRVLAKLRDKRCRKSEAEIAEELTGNWREEHLFNLKQAYDTLCFLDERIADYDRQVRDMYAKIAAKFPPVEPPPGGTGPKKPKDKDDAKAKADLARICGGFDMTKIDGIGYDNAAAILSELGPCLDAFPTESHFVSYVGVAPALGKSAGKNVSSRKKHKNTSRVGLVLKLAASTLTRSESSLGARLRCTRSRTCSRTAIKDVAREMAKRIYRGLRFGQAYVDEGEQAYLERTRERTIKSMKKKILKLGISAKELGIFAA

SEQ ID NO: 182040 - protein, 392 aa, unidentified
MIFVGIDVAKNKHDCFITNTDGESLFRSFTITNNLDGFHDLYRKIASVTENITKVKVGLEATGHYSYNLLGYLLDKGFPTYIINPLHTNLYRKSLSLRQTKTDKVDARTIASMLMSDVNLKSYSDTSYHNEELKSLTRYRFDKVKERSALKISISRLVCILFPELENLVPTLHMTSIYSLLYEFPGASFIASAHLTRLANLLSKASKGHYNKDTAVLFRQTARNSIGSVMPAKSLELKHTIKLIQELTSEIDEIEAAIKQIMDEEIKSPILTIPGISYRMGAMIIAEIGDFNRFDSADKILAYAGMSPSTYQSGQLDHCHSRMEKRGSRYLRYALYNATKYVCLWDKSFGAYLEKKRSEGKHYNVALSHAAKKLVRTIFAMEKSGAPYKSSV

SEQ ID NO: 182041 - protein, 400 aa, unidentified
MNAVGIDVSKGKSTIAVMRPFGEVVASPYDVGHTESELKELARFLKSLPGETRVLMEYTGHYYEPIARYLHEAGIFVSVVNAILAHDYNGNSIRKVKTDKIDAVKLANMAIDRWLQLVEYVPEDEIRQTLKICNRQYNQYNKLKTMLKNNLIALLDQTFPDVNKLFNSPARKSDGHEKWVDFALKFWHCECVCGISERQFKDKYERWCKRNGYHYSTCKAEDIYAKACGNVGLLPMCESAKVLITQAIIQLQAIEETLAAVKCEMQKLASALPEYGTVMALYGVGEVLGPQLIAEIGDVSRFKSKKSLIAFAGIDSPADQSGQVDNKSKAITKRGSASLRKTLFQVMSVILQNSPDDDPVYTYLDKKRSEGKPYKVYMIAAANKFLRIYYARTKLALVNT

SEQ ID NO: 182042 - protein, 355 aa, unidentified
MMMANAGSEVEVLGGVDSHTDTHHAAALDSRGSLLGTQEFSTTPAGYVALLQWLRSFGAITAVGVESTGAYAAGLVRYLSSEGIQVLEVNQPHPHTRRRRGKSDAIDAEMAARRILCGEGIVIPKATSGIVESIRQLRLARQSAIKARSAALVQLSQLIITAPAELRQQLSDRKGIRGKATLCSRLRPDVARTREPLQAAKLALRSIACRIAELDNEIKELDQHLALLVATAAPHTTKLLAVSTGHAGQLLVTAGENIERLRSEGSFAALCGASPIPVSSGRTDRYRLNHGGDRDANRALHMIAVCRLRYCPKTRAYAQRRTQEGKTKREIIRCLKRYIARETYHTLQKDLATQT

SEQ ID NO: 182043 - protein, 343 aa, unidentified
MGEVSTIGLDIAKSVFQVHGVDGAGAVMMRKRVGRAKVLEFFGGLSPCLVGIEACPSAHYWSRELQALGHTVKLMPPSYVKAYLKRNKNDANDAAAIYEAVTRPSMRFVPTKTPEQQTGLMLHRSRQLLVRQRTMLSNAIRGHMAELGIISAKGRNGAAELLQIIGNVADDRIPPVARFCLDLLARQYLTLIAEVSSIDKRIHAWHRSCEASRRLETIPGIGPIVATALVAEIGDWRAFHSGRSLAAWIGLVPKQYSTGGKERLGSITKQGNRYLRWLLVAGAMAVIRYARRHGTKRPWLTRLMDRRPAKVAAVALANKIARMAWAIMVHGERYREPKLLLAA

SEQ ID NO: 182044 - protein, 414 aa, unidentified
MSETSSPTPPPAVLAYVVGIDIGMESCMMCCLTMEKRQVIKPSQFSNEAAGFEWLFAHLEALKSTPDQILIGLEATSRYGENLYYALRSKGYRVCLLHPGQIHAFAQQRGLRAKTDRLDASTIARALLSEEARFGYVPSDQVVTYRELTRLQQQLTEEMVRYKNEIHALLVVLFPEFTQVFADPSRPSALTVLKAYPSAQAMREADPKQLHQLLREQCPGRYGRKTADKLVQLAKASVSSGVGVQGRSSSMRILCDQLDHTQNNLTLLQQEIERLLGNDPKAKGVLAISELGPMTVAVLRAELGDLDRFARMDQVVAYAGLDLQVKQSGKWKGQTKLSKRGSGRLRRILYLAALRSIRLPTSPFGVSYHRLVARGMKKGMAVVAVMRKLLIVAVHLIQTQEDYDASKVGVQALS

SEQ ID NO: 182045 - protein, 345 aa, unidentified
MELHTIGIDLGKTVFHLIGLTQSGEVVVRKKFSRIQLLRFTSNLPAQLIGMEACGGAHFLGRALREQGHEVRLMPAQYVKPFVKTNKSDYIDAEAIAEAVGRPTMRFVPVKTDEQLDMQSLHRVRERWIMRRTAVVNQIRGLLLERGITLRKGRCHLDAALPGILEDAATTLSGAVRFLLLELKRELEQLAIHLEEVEALIQKAADESEACQRLDAIPGIGPLTATALIAAIGNGAAFRKGRKFAAWVGLVPREHSTGGKQKLLGISKRGNPYLRKLFVQGARAVLQFREKQSSGLRTWLAQLTSRTHYNVVGVALANKLARIAWAVLAKGELYRPPALAESSAA

SEQ ID NO: 182046 - protein, 419 aa, unidentified
MSFKILKFNCCGLDVHKTWIYACVGITDSNNRTEYKQARFSSFTKGLNELCDWLAKYNCKDVCMESTGKYWIPVFNVLEQHEIWVTLSHPKYTKPMKGNKTDRKDAKWICDLYMCGMVKPSFIPPADIRELRDLVRYRFKLTCMITGEKNRAQNCLTVSNLKLDDVFSDVFGKSSRSITEQILQHPGETFDVAPFIHGRCKTPIEEIQAAVDGAISKEQAVKLRQCLDHIDELQKHISEVEQEILRLSDKYEAALFLIRTVPGFDKNPMTAIQVLSEIGGDMSVFPTAKHLVSWAGCCPRNDKSDRKIKSTRISRAGSYFKPVLVQVANALIKSKKHPEFTTRYKRIKARRGHKKAIIAICRMILTAIWHILTDLKPYTPDGFLESRPVNKEKVLTISQALNLLKQRGYLIKDDPLPAS

SEQ ID NO: 182047 - protein, 317 aa, unidentified
MNTIGLDISKETIDAVLEKSDGQTYHLKIRNDTQGFEELTKWMKSHKVRKAVIAMEATGIYYERAAEYLTAYQTVYVINPLRIKEYAKSRFSHTKTDKTDAALIADYAKRHQDLLTPYRPNQAADELHKLNSLKNQLKRQLQESRNRLHAATDEYIKATHQAIILLIERKISQTATRIERLIRQQNNLKTHYDNLQTVPGIGKETAAALLAHLTGKDFETANKFVAYAGLSPKIEQSGTSVDKRGRLSRYGNRRLKSALYMPAVVAYRIGTFGKLTANLSNKPKMVIIVAIMRKLAKIAYYLYKTGKPFDKTRYQTA

SEQ ID NO: 182048 - protein, 351 aa, unidentified
MIIIGVDYHPSFQEIAFMDQETGECGERQLKHSDGEAEKFYRELKQRGVSVRVGMEATGHSRWFERLLAELGIELWIGDAAKIKTMRVRKQKTDREDARLMRKLLLENRFPRIWVPSPENRDLRQLLWHRHRLVQMRTRIMNQLQAVAMNEGYRWKKKLFSTQGRALLEKLSLAPWASRRRKELLELMDQLDPKIAELTAAVEREAKQRPEVLRLMTHPGVGPITGLAYVLVIGTPDRFPSGKKIGSYTGLIPCEDSSAGRQRLGHISKQGNTLLRFLLVEAAQAAARCNPDWRRRYLHLMMRREKRIAKVAMARKLGVRLYWMWRNNWQYSQLVEFGSNAGKLGTGHGAK

SEQ ID NO: 182049 - protein, 431 aa, unidentified
MNSSLNNDNTQNNYAAFIAIDWADLKHTFSLKVAGQGKKETGTLEQKPEIIGPWVANLRERFGGRLIAVAVEQSRGALIHALLAYDFLVLYPIHPTTVARFREAFKFSGAKSDPLDTDQILEILTKHMELLKPLKPDSQETRLLGRLVADRRKTVYLRTSHVQGLLACLKEYFPQAIELCNDNLSSRLATDLLAKWPTLEAFQQAKPSTLKRFYYGHNIRSPELIEKVLSLATTAKALTTDPAIVESGRRLAQMHAQLIQTLNPVIEGYDERIEKVFHDHPEFPLFSKLPGAGPVMAPRLLAFFGTDRSRYPNAENVQTFCGISPVSKSSGKTRVVYFRRACPKFQRQSFHEFARLSVASCQWARNYVDHYTAKGKKYNTVIRALAFKWIRILFRCWKDRTPYDDKKYMEILKKRGSIFATLPLEQKNENG

SEQ ID NO: 182050 - protein, 343 aa, unidentified
MQAVTTIGLDIAKSVFQVHGIDAAGQVVIRRQLKRRYVLAFFQKLPPCLIGIEACASSHHWSRELQALGHTVRLMPPAYVKPYVKRQKNDATDAEAICEAVTRANMRFVVTKTPEQQSGLVLHRARHLFIRQQTAVINAIRAHLAEFGIIAPVGRHGVEELLNVVADPNDKRVPEIARACLLAFGAQLRRLKEQILEFDRMIRAWHRSSETSRRLDDCPGVGPALATALVATVADPKSFRSGRNFSAWIGLVPKQHSSGGKNRLGSISKQGDRYLRGLFVAGALAVIRYAKIHGTQHRPWLTALLARRPTKVAAIALANKIARMAWAMMAKGERYKEPVALAA

SEQ ID NO: 182051 - protein, 357 aa, unidentified
MRSKIKQLDFKGEKIYTALDVHKKSWRVTTGCKEFELEHYSQNPDAKLLTRHLKNMYPGAKHIVAYEAGFCGFGIQRSLKEEGIDCIVVNPADIPSSNKEKRRKHDKIDSRKIYKRLAAGDLEAIYVPPTAMEHARSLVRGRNRIVKDQTRCKNRIWGLLMFSGLTADVDKPKQYWSRKFMESLKRLDCGSEPLRQALDLAIDEYLLIRQLLTKATKKVRELSSNKLFAEIQELLRSIPSIGLINAMVIHTEIEDISRFKTLDHLCSYAGIVPDLDSSGDKDKKTGITHRSNNYLREAIIESSWIIIRKDPAMLMLYKTYCARMNENKAIIKIARHLLSRIRFVWENQTKYHTGIAA

SEQ ID NO: 182052 - protein, 321 aa, unidentified
MSESSAYAGIDVSKAELEVAVGEQAWRVPNDVEGIEALVDRLRERSPELVVLEATGGHETAAVAALAEAGLPVVVANPRQVRDFGRATGQLAKTDRIDARVLAQFAERVRPDVRPLPDEDAQALQALLARRRQLIGMMVAEKNRLKTASGAVAKGIRQHIEWLKRQLKSVDSDLDTRIKKSPVWRAKEDLLRSVPGIGPVASRTLIGELPELGQLNRRQIAALAGVAPLNRDSGTLRGKRMVWGGRRSVRVALYMAALTASQCNPVIREFYERLLARGKPPKVALTACMRKLLVILNAMARDGVAWNPELHRSGAKLAHSC

SEQ ID NO: 182053 - protein, 320 aa, unidentified
MMAQNDLVVVGIDVAKDKVDACIRRFTLRQTFPNTAQGHRKLVAWLRKYQVGKAVMEASGGYEREWRNVLHNAGIEVRIVDPRRVRSFAQSAGRLAKNDPIDAEMIAWFAETFSQAPGQIPDAAREELAALTKARKALVDIKIRLQAQDEHAAPEPARKAYARALKSLATEIDKLEGAISAKVKATPEFAERAEIIESVPGLAQATSAILIAGMPELGQVSDEVAAALIGVAPYDDDSGKRRGERYIKGGRRWVRNAIYMPCLGAATQNNPVLKAFYQRLLAKGKEPKVALVACMRKLIIILNTMLARRQKWNPGRYAVA

SEQ ID NO: 182054 - protein, 344 aa, unidentified
MTEVSTIGLDIAKHVFHVYGADERGRSMFSKRISRGKLLDFFAAQPSCKVALEACGGAHHWARQLTQLGHEVRLIPPAYVKPFVKRQKNDAIDAEAICEAAQRPSMRFVAVKSEEQQAAGLLFRTRDLLVRQRTQLINAIRGHLAEYGWIAPKGPSHVAMLADLIEEEEMASSLPAAALAMFRLMLDLLANLNSKIAALDKEIARRAREDEVSRRLMTVPGIGPISATAIAALAPSAETFAKGRDFAAWLGLTPLQRSTGGKQKLGATSKMGERTLRRLLIIGSSAVVQQASKRGAPKGSWLEQMLARKPRMLVTVALANKMARIIWALLVKQENYRAPVAAQA

SEQ ID NO: 182055 - protein, 343 aa, unidentified
MDHFAGLDVSVKKTSVCIVDDTGKIVREVKVASEPEALLAVLKNPAYQFKRIGLEAGPLSQWLYSALAEAGMPVICVETRHMRAVLKAQINKTDRNDARGMAQMMRVGLYRPVHVKTLRSQKLRMLLTHRQLLLSKAIALENDLRGTLRNFGLKVGMVGKVKFEARIRELVETLPDLAVLVEPMLIVRRVLREQIVILHRRLLAVVRDDEVCQRLMTTPGVGPVVSLTYRATVDIPARFRKSKSVGAVFGLTCAKYQSGEVDWDGRISRCGDEMMRTMLYEAAQAMMRSKKWSWLKAWAMQIARRRGIKKAIVALARRLAVILHRIWVDGTEFRWTREQAVAA

SEQ ID NO: 182056 - protein, 338 aa, unidentified
MAIIAIGVDLAKNVFAVHGVDETGKAVLIKPSVRRDALLELIAKQPPCVIGMEACSGAHHWARQFQKFGHTVRIIAAKFVAPYRLSGRKGKNDAADAQAICEAVQRPHMRFVPIKSEDAQGRLCVHRVRQGLVEARTAMINRIRGLLSEFGYVLPLKADVVRRQAGQCLEDLPGWANLAIGDCLSELHHLDERIDQYDKHIAQMAKSDERSQKLMAMPGIGEKTATALLSSIGNGHDFKCGRQLAAWLGLVPGQYSSGGKQRLGRITKAGDSYLRNLLILGARAVLVASKNKTDRLSRWAQSVEQRRGYWKAVVAIAAKNARMAWAMLSKGEAFKPMS

SEQ ID NO: 182057 - protein, 391 aa, unidentified
MRTVFGIDVSKASSEVAILVNGERVHSYTMPNDIIGFSHLLKDLKTVSNPEIIFEATGVYSRRLQAFLEENSYDYTRLNPLEAKKQLDSLRVRKTDKIDAEKLASSQFVLNRKPTYVQEEVYQNLHDLSRFYQNLTEDIVRTKNRLHKVLQVAFPEIENLLSTPTGEQYWNLVSIFPTKHWVLELSEVELKETIRNSTSKRISENRVGNLAEKLVGLAKQSYSAISKTSPMIEEVKYNAQELIRLTNRREQILEQLIELTKPLPEYEILLSIPGIAETTATSVIGELGDIRRFKSAYQINVFIGIDLKHYESGDFLGQEHITKRGNPYARKILHKCIHNIASASHTNLFHISDFYEKRKRQSQTTSTKPHTIASIHRLIRTMYYLIMHNEL

SEQ ID NO: 182058 - protein, 351 aa, unidentified
MDRYIGLDAHASSCTVAVLGPSGRKLQCQVLETNAKALISFLQTIPKNRRLIFEEGTHSNWLYEVLAPHVQEIVVVAVRQSRGPKDDKIDAFGLAEDLRIGNVKVRVYKKQGEFAALSHLARAHGTLVTDTVRCQNRIKSLLRSRGIAASGKQVYSVKSRDQWLAKLPAQAHDHADLLYLQYDALLELRKQAEKQMLSEARKHPVYQVIKTCPGLGKIRTAQLMPVVVTPYRFANKRQFWAYCGLGIVMRSSSDWVRTQGGEWIKAPIQRTRGLNRNFNRTLKHVFKGAATTVIGCAKKDDPLYQHYQQLLDGGTKPNLAKLTISRQIASIVLSVWRSQEVYDPKKLSQKT

SEQ ID NO: 182059 - protein, 435 aa, unidentified
MERIRTNVGGIDIGAKKVFTSIEGHPVVSHFTFTEDFIRLRDFLLEHHVESVAMEATGVYWVILYEILEEAGIDVWLVDGRQTKQVPGRKTDVKDCQWIQELHSYGLLNRCLVVDADIKELRSYLRLREDHIESSSKHINQMQKALTLMNIRLKEVLDQIHGASGMAIIEAILNGERDKEVLVRLCHKSVLKTKKELVLKALEGRYTEAGLFALRQAYDGYKFCLQQISECDQKVNVVINRIGRFGDGQQLKTKRKAIRHHRPVVENLGPNLLNIFDSKDATLIAGITDYTWMQLLAETGPDLTKWPSEKHFTSWLALSPGQHNSGKMRRNARRKGKPKAGQIFRLIGQSLINSKDVAIGSFGRRLRGRKGPKVAVKAMARKVAVLYWRVMVKGLDYAEKGIKNYEEQLILNKMKSFTRLAKELNINTFELQHVT

SEQ ID NO: 182060 - protein, 421 aa, unidentified
MEVMHKRVAGLDVHKQTVVACVRVMAGRKPTRECRTFATTTEGLLALLDWLRASRVTHVAMEATGVYWTPVWKILSEGEFELVVANAAHIKQVPGRKTDMNDAMWIADLQACGLIKASFVPEENVQEWRSLTRTRKQLVREQTRHVQRIEKTLEEANIKLGTVLSDLMGVSGRRIIEAMIAGEDNPHRLAALAARNIKASRQALYEALHGRLREHHRFLLKLHLQQWDGLDRAIREVDRQVAWQIERMDAAAADGQPPFRELIHRLSAIPGVSFLSATAILSEIGRDMSRFPTAGHLVAWAGLCPGQNESAGKRKPARLRRGAPWLKTMLVQCAWAAKRAKDSYYRAQFHRLRSRRGPQKAICAVAASLLTAIYHMLKSGLPHRDLGADYFDRRSPDAKAKRLVAQLAKLGFAAQLQPLAA

SEQ ID NO: 182061 - protein, 470 aa, unidentified
MQVRLGVDIACRAAHRAACADQTGMIVWSGHQFRTRAEELEALWARLPGDATEVLVVMEPTRNAWVPLAAWFRRRGATVVLVPAEQSADLRAYYAKHTKTDRLDAELLARLPLLHPDGLHPETTNGPGDPLKRAVKIRSGLVHRRTACMQRLDALLEILGPDWVAALGSDMTQTAFKFLAGWANPHQVKRLGRARLARWFQRQTRKAWGERRADAVVMAAEATLALWGPTGLDYEALAADIATEASLALELSRQIARLDERLFDLYCDADPDHILLSVPGVGKILAAQIRGRLGDPRRFTSLAAARSFSGLIPHQHSSGLTDATGGPTKHGDACLREALFLAADHARKTDPTLAARYQRLMCQTGRHHTSALCTIATVLCTRIVACLRNNTPYQLRDVDGSPITPAQGRAIVAERYQIPAEIRAARRTISNTRSRHRRRDERIEQGVAKRSTMTPVPPASLTPAASLDNH

SEQ ID NO: 182062 - protein, 342 aa, unidentified
MTLYIGVDIHARQQTLSYLDTSDGTTGIVELNHERDDLREYYGKFQGEVIVGIEACGYTNWFEELMEQLGHKLLVGDAAEIRRLARRRQKNDRRDANLILELLVHDQFPTLFRYSKESRELLRQLRYRHKLVKLRTMVVNSLQALAINAGLSLRAKLLTRDGRRQLRGLSLSPISQQQRDELVSLADELTQRIETVEQWLQTQAKDDGRVQRLQTHPGVGLLTSLCLVHTLGDVSRFSSLRKVAAYAGFDPMEDSSAERKAYGGISKAGSKLLRYLLVEAGQTAAKHDEQLKQFYHRLLPRRGRARAKVAVARKLLLRCFIMDRSEIDYAEFLRRGKEKETE

SEQ ID NO: 182063 - protein, 389 aa, unidentified
MLLDHPSDGPTAIRTQFGAIFVSLELSRSNWLITSLSPGRGEKMSRHSVVAGDVAGLMTLFADLRRKTEVRTGQSYPIITIQEAGLDGFWLHRVLQQEGIESHVVDPASIAMPRRRRRAKTDRLDGETLLRALLAYKRGEPRVCAMVVAPSPEEEDRRRLCRERRTLIEERITHGNRIKGLLFAQGISDYGPLRRDRRARLDALRTGDGRELPSHLKAQIGRELDRIELLLEQIKAVEAAQDALLAAAKKPASEKAAPEPVAMLLALRGVGTNFAAVLWSEAFYRSFSNRRQVAAYAGLAATLWQSGGIRHEQGVSKAGNPKLRTTMIQLAWLWIRHQPQSALTRWFKERSQQGRKRAIVALARKLLVALWKYVTQGVVIEGAVMKPAA

SEQ ID NO: 182064 - protein, 385 aa, unidentified
MHRNDLSRSLVAFDQNSTLVAVVEMSLKTWLVGGVVPGLERQPLKKQGADAEALLKLLHRWRDEAVKAGRKITRIVVGYEAGRDGFWLARWLRARGIEAYVIHPNSIPVSREHRRAKTDRLDVGLLLRALLGWLRGEEKHCSMVPIPSVAEEDARRPNRQREVLVAECTGIVNRMKAILIRFGIRNFNVKLRSAPQRLEALRGPEGELPPNTLAELRREFARLGVLKEQIKEIEKARDARLRQAPQEGAHPMVLMLARVKSIGIETADMLVHEALSRSFRDQRAVARYGGMTGAPDESGSKRREKGLARAGNARVRRGMIQLAWRWLMYQKDSALTQWFHARTHDAKSGVRKTMIVALARKLLVALWRYVTTGEVPAGAVLSPAT

SEQ ID NO: 182065 - protein, 339 aa, unidentified
MIAVKQVVGIDISKDSFDAQFAITDEKQAQRFVALAQFRNTLLGFRKLNRWAKKMVGPSTAPLWFVMEATGVYHEHLAYYLAEQHQRVTIVLPTKMKNYVKSLDTKSKTDRLDARAIAQFGLERMLQPWQAPSTQLRTLKALVREYDAATEQLTKIKNQLHAKDHSYHPAMQTLARLRAQHRLYETQLKAIEDEIRALVEDDDDLHARIGNVTSAQGVGFMTAVRVIAETNGFALITNAKQLTSYAGFDIRIKQSGLRCGKPSISHRGNSHLRRALFMPALAATRCNPTLRRFYLRLVQSKANKMVALIAVARKLLCLIYALWRDNVPYRRNYRPTVVS

SEQ ID NO: 182066 - protein, 362 aa, unidentified
MSKTEETRRLCVGVDLHKTQFTVSALTEDGEVILQDVYRTTSDGYSEFIEEMHRYEEEDGCSIELAVETTGNARFFKNQMEKEFFDVTVVNTNKFKVITYSTKKTDANDALTLAMYLQKEMLPEAHLCSQTSEEIRRMLKTRRILVQSAVKIKNQIHGMLLGYGIETNAAQFQSKRKRQDLINDLADHDYSEFTASSLEVMLNILDVLAEQIKDVEAQIENMVEDNEDVELLKTIPGVGKIGAATIASYTEDLERFDGDFKRFAAYIGIVPSVHNSNETVHLGRITKHGPQELRTAFVQVALGMIRLSKQTSNWRLIEDYRRKKTDKGSGRAIIAMTRKIARIVFVMLENREPFNPELMLSK

SEQ ID NO: 182067 - protein, 397 aa, unidentified
MGRLRKIGLKIRARRRERFVSDDMDSSRDSRGIEVPESPYAAERSAEKESQMQGTTIAVDLAKSVFEVAVSERAGSVSKRHRLSRTQVSRFLAAQAPATVVMEACGTAHYWAREAYARGHRAVLLPPHSVRPYVLRNKTDGADAKGLLEAVRNEAIRPVPVKSVDQHVLAGLHRMRSAWMATRTARLNALRGLLRELGFAIPVGARQVVPFVWALIGDAESGVPDALRPVLAEAAHEIRELEGRVRAVERSLEGLASASPVVARLRTIPGVGLLTATAFVAFVGDAGRFPSGRHLASYLGLTPRESSSGLRRRLGGISKRGDPYLRMLLIHGARSVLCHAKKTTGEPDRLRIWALDRERLRGHNKATVALANKLARIVWAVWRRERGFGDRNSQGAE

SEQ ID NO: 182068 - protein, 369 aa, unidentified
MTSIIYVGMDVHTTNYTLCCYSMEDDRFFAEVQVEPDAKNILKYLARIEKQQSRDCRIVCGYEAGCLGYSLYHQLHAHGIDCVILAPTTMMTKPGKRIKTDRRDARLISKCLAFHTYSPVYIPTEVDDAVKEYIRMRDDANSALARVKQQIIAFCIRHGKIHDGKSYWTNKHLEWLSSLDLGNKILSEVLQEYLIRYYQLREQVDVYDMRINELAQAEPYRQKLEKLGCFRGIAAHTALSFCVEVGDFRRFATAQQFASYLGLVPGECSSGDKQQYTGITKAGNSHLRKLLVETAQVFATKSGKSAALKERQAKCDSLTVAYADKANARLKKKYFKIAMRSKVNIAKTAVAREMACFIWGMMTDNISCA

SEQ ID NO: 182069 - protein, 347 aa, unidentified
MLYAGLDLSRHRLDVHVMNQAGQPLLVTAAPPDADGLRGLARQVAGLGQPVAAAIESMNGARFVHDQLEFAGWQVAIADAQKVKGLAPLACKTDRIDAWVLAELSRRDLVPEIWLPTPGVRAERERARFRLHLVRHRTALKNRVHATLLAFGKPCGASDLFGAGGRRLLDRLEVPAPWAGTLAAAVQLIDDLDERVAGCERELRRLGADHPYVPLLMTAPGIAWVLGYTIAAEVGDIGRFPSPKKLCGYTGLCPRVYQSGDRDHRGPLAKNGPKYLRWALIEAATHAVRHPCYRDHYQATRRRLGKQRGPRVARVEVARKLAEAIWYMLTRQQPFVPARPPAKALVA

SEQ ID NO: 182070 - protein, 369 aa, unidentified
MKKGLPRSDAPRVLKETKGGPAAMLYAGLDLSRKRLDFHLLDAEGATVEVGGAPPDADGLRGLSQRLDRHGAPIRAAIESMNGARFVHDRLELAGWQVEIADAQKVKGLAPLACKTDRIDAWVLAELARRDLVPAIWLPDPLVRAERERARWRLHLVRHRSSLKQRVHAVLLTHGTPCPVSDLFGVRGRQLLARLGLPQPWQGTIEASLRLIDELEREIDDCERELRRLGADHRYVPLLLTVPGIGWVLAYTIAAEIGDINRFPTPRKLAGYTGLCPRVYQSGQRDLRGPLAKQGPRYLRWALVEAATHACTHPAYRDRYQQTKVRIGKQRGAKVAQIDLARRLTEAIWHMLTREQPFAPKGATDPLAA

SEQ ID NO: 182071 - protein, 307 aa, unidentified
MFVGIDVSKDRLDVHVLPSDEAFAVARHGEGLEQLVERLRALPAALVVLEATGGYETVVAAALAAAKLPLVVVNPRQIRDFARAVGRLAKTDRLDAQIIARFAEAVRPEPRPVPSAEAQALGELVARRRQIVEMIGAESNRRRQLTHQRVLRGLERIVAELQAQLSEIEREIDDNVRGTPAWRETENLLTSVPAIGHTIARTLIAEIPELGTLDRRKIASLAGLAPINRDSGTLRGRRTIAGGRGPVRAALFMAVMVSLRHKLPLSHTYQRLRALGKPPKLAITACMRKLLTILNAILRDQKPWKPA

SEQ ID NO: 182072 - protein, 335 aa, unidentified
MKQPAIVRAGLDVGARELVVALLRDGQAESLCTLPNTPAGHRQLLKLLTRRGATARACLEATGVYSLRLALALQRAARVEVMVVNPRAIKDFQRARLTRAKTDAVDALGILEFLQRMEFVPWIPPTDAVLALQQLGRRLVQLRGELTREEARLHAITFTPDRDGLIAGDLHANIRHLQKRIKALQQAAAELAAREPDLAAQVERLCSVPGIGPVSALRLLGELLVLPKDLKAKQWVAHAGLDPRPRQSGATDAPRHISRTGNRHLRLALFMPALVAIQRSPEVKATYESLLARGKKKKVAIIAIMHRLLHAIWGMLHHQQDFNPQLFHASPLINS

SEQ ID NO: 182073 - protein, 341 aa, unidentified
MKSTTIAVDVAKEVLEVAVSVRPGQVSEQKRLSRAAFMKFCTDQPPATVLLEACGSAHYWGRRLQSLGHRVVLLPPHATRPYVFRNKTDRTDTRGLLEAFRNEDIHPVPVKSVSQQALTALHRLRSTWLATRTARLNTVRGLLREFGCTIPVGAHHVLAKTWDLLADPESGLPDALRPGLAAACTEIRDLEGRIRVVEDQLQALADQTPAVARLRSIPGVGLITATALVAFVGDVQRFPSGRHFASYLGLTPRERSSGLVRRLGAISKRGDVYLRMLLIHGARAVLWAAKKRPTPDRLRAWALHLQTLRGHNKAAIALANKLARIVWAVWKHDVDFREEAA

SEQ ID NO: 182074 - protein, 403 aa, unidentified
MFYLGVDVSLKSHRCALLDAEGERVQNSFSIDASQEGFSLLVATLQKRGVPKEDLTIGLEATGHLWENLLAHLESKGFTVKLLNPFQTNRYRELLAKKAKTDDIDAYVIAGLLRCGEARSCYVPDDQIQGLRDLVRLRNTYLDNLQTYRRQATSLLQLVFPEVSSVVKDPFGKAMRTVLQQYPTAADLARVHPRKIEKIARSFQGNTFDRAKAEALVAAAKNSIYAGRAKLSRGKVLASLLSQIAQLESAIEELDATIAASLDDSTKGRSDTDRLTSIPGVGPKTAAVLLAEIGEVSRFHSADHLVGYFGLFPVLKESGGKPLSAPHISKRGPKHFRRALYMASVAALKHNRELRGLYHRKLSQGKAPKQALIVVARKLLTIVYSLLRYQTEYNPSRLFLAAE

SEQ ID NO: 182075 - protein, 401 aa, unidentified
MNAVGIDVSKGKSMVCVMRPFGEVVLEPFEVLHTAQNLHDLAEKLKALDGETRVVLEATGNYHKPVAFVLHDAGLFVSVVNPVLIHDYDNNSLRRVKTDRKDAVKIANYTLDKWTRLRQYLPEDDTRLALKNCYRQYQQAVAIRTMLKNNLISSLGLTLPDANKLFTSPAKNNGCEKWVDFIGDFWHSECVSSLSPDAFSKKYLKWCQKHGYYFTRSKSDEIYACAVNSASLPKSPTSKLLIQQQVAQLKAVSQSVAAFRQEMLRLSQQLPEFDTVMEMYGVGPSLGPQLMAEIGDVRRFSSKKSLIAFAGIEPQPNDSGKVVGNDKGISKVGSAVLRRTLFLIMTVILQTQPQDEPVFQFMNKKRSEGKPYKVYMMASANKFLRIYYARVKAVMDSERSQ

SEQ ID NO: 182076 - protein, 357 aa, unidentified
MVLGVDTHLDFHVAVVLDPLGRRLGESKIPTTVRGYRNLLRWAEGFGPVRCAGVEGTGSYGAGLARHLKAAGIAVVEVERPKRRHLRRNGKSDPKDAEAAARAVLSGEAAGVPNSADGRVEMIRILRGARRSAVKARVQAANLLQAMLLTAPEELRQRLSGLPTKELVAVAARFRPNRDPEDVEVATRFALRSVARRHQTLSEEIAELDAQLEQLVAQAAPELLRLLGVGTNHAATLLVLAGDNPERLKSEASFASLCGVSPLEASSGKVVRHRLNRGGNRDANRALHMICVVRMGSDRRTETYVSRRLAEGKSKWEIMRCLKRYIAREIYRILLSSVVVSISPSGTTNRVVEEEST

SEQ ID NO: 182077 - protein, 347 aa, unidentified
MLADEVDYVIGVDPHRDTHTFAVVEAGSGGLVFDGQVAASVSGYLEALRSAGTHVLGRRAWAIEGTGSYGAGLSRFLAERGELVVEVGRLRRQRRSQAKTDALDALRTARSVLGETRLAEPRVGGERDGLRALMVARESALVAKKACLCQLRALIVTCPEPLRTELAPLTRARLLSRCVSLRPDRHKREDWRATLLALRSLAARAQALTLEERALEREIRTLVTQLAPQLLTEPGVGPISAAQLVISWSHPGRVRSEAAFARLAGAAPIPASSGQTIRYRLDRGGDRKLNRALQTIILTRRRQHPATIAYIERRRAEGKTRRESVRCLKRYLARHLYRLLEAEPKPA

SEQ ID NO: 182078 - protein, 340 aa, unidentified
MMITTIGLDLAKSVFQAHGVDEAGATVLTKRLHHKQMLPFFSKLSRCLIGMEACGTAHYWARTLAAMGHEVRLIPPSYVRAYVKRGKSDALDAEAICEAVQRPTMRFVPVKTVEQQSILVVHRARSLFVRQRTMLANALRAHLAELGLVANPGMANLAKLAQQALCDEDGLPSYARATLEAMVRQIRTFSEEITALDRKLLAWHADSEASRRLVAIPGVGIVTATAIAATVTDPDQFRSGRQFAAWLGLTPQQHSTGGKTQLGGISKQGDRYLRRLLVVGATAVIRHTKDKPTPMANWIRALMTKKPFRVVSVALANKLARIAWVVLTRKETYRPYQLTA

SEQ ID NO: 182079 - protein, 344 aa, unidentified
MKVSVLGIDLGKNVCSIVGFDETGAVVLRRRAKRETLIGLAAKLPPCIVAMEACCGAHHLARLFANQGHDVRLMSPEYVRPYIKAQKNDDRDAEGIAEAATRPTMRFVEVKAQEQLDIQTLHRSRDRLVAERTALINQLRAILLERGIIVPQGKRKLEQYVTALMEGQDPNGLSQRIRTLIADVRGQWLELDRRIAVFDKEFAAFAKENEDARRLTTIPGVGVTIASALIAAVGNAETFEHGRDLAAWLGLVPRQSTTGGKPRLLGISKRGNKYLRKLLIHGARAALPHIAERDTALGRWAKNLLARVHKNVAIVALANKLARIAWAVLRRGEKFTAKGLPLAV

SEQ ID NO: 182080 - protein, 358 aa, unidentified
MIQQENIKLSFAGQEIYVGLDTGKKSWKVTILTKDFEHKTFSQPPNPEVLVGYLRKHFPGARYLCVYEAGYFGFWIHDALREQGVECIVTHPADVPTKDKERSNRNDTVDARKLARSLRNGELAALYVPTRKSLEARTLVRTRMGMVKKQTRCKNQIKALLSFYGYVIPDEMVSSHWSRRFIEWLGSLSFAAESGKQSLHALLEELKYLRQSIAQLTRQIRALGRQEPYRTQVELLDSVPGIALLSAMTLLTEIVDINRFKNLDHLASYVGLVPGENSSGELERNTGISRRRNPFLRVMLVECSWVAVRKDPALLMAFNKLSERMPKNRAIIRIARKLLGRIRYVLKHQEYYETCVVV

SEQ ID NO: 182081 - protein, 343 aa, unidentified
MNTVTLIGIDLGKHCFHLHGQDAQGRMVFRKKLSRSQMLTQLANFPVCRVVMEACAGAHWIARRLSAMGHEAKLISPQFVKPFVQGNKNDFADAQAICEAASRPNMRFVSPRNESQQTISATHRVREALVRDRTSTTNQIHAFLLEFGISLPKGPAIIKRLPAVLAEHEAVLPPRLMAVIEHLRAHFKYLDEQIKAVEGELAQQLAEDERSQRLLEIPGIGPITASVLAVELGDAHQFANARQFAASIGLVPRQYSTGGKPTLLCISKRGDKNLRRLLVQGARTIMQRIQTRSDGLGEWVRDMLCRRHSNVVACALANKMARIAWAILAKGTHYQSRSLAATI

SEQ ID NO: 182082 - protein, 393 aa, unidentified
MVVSVGIDVSKNKHDCFIVSSDGEVLSDVFTIPNTMDGFHCLLQRIQDCTNVQDKIEVGLEATGHYSYNLLGFLLDNGLTTYVLNPLRTNLYRKSLSLRKTKTDRVDARTIAFMLLSDVGLKPYTSTAYHNAELKSLTRYRFDKVKERSKLKCSIARLVCILFPELEQLVPSLHIASVYALLGEFPGAKQVAEAHLTRLKTLLETASKGRYSRDTALKIREAARNSIGTWMPAKSLELQHTIRLIRELDSEIIEIEKQIQDIMDELNSPITTIPGMGFRMAAMILAEVGDFTRFDSPDKLLAYAGMSPSTYQSGQLRNCYPHMEKRGSRYLHYALYNATRYVCYWDPTFSDYLAKKRTEGKHYNVALSHAAKKLVRLIFAMEKSRATYRLTNG

SEQ ID NO: 182083 - protein, 327 aa, unidentified
MKNIFIGIDVSKETLDISIKENNSIAIYTIENSISSCKKFFNKFKNHTGFIYVGMENTGRYNYNLYETLEQFSFLIYVINPIHLKKSLGLVRGKNDQIDAERIVYFIEKNHMDLPQWKPNTLAIKKLKVLQTERNYRIKIKSSLLKQQYDYKLMKSIKMDKELLKLNQNLILNIEKQIKIIEHKIELIIEEDQNLQDQSDRLQTIPGVGKVLTWMMITKTQGFSIISNPRKMACYAGVVPFDHQSGTSLKFKPKISIFADKELKKVLHLAAMRAVRLDNELKVYYLRKIEEGKNKMSILNAVRNKIIHRIFALIKNETFYRKDFVVS

SEQ ID NO: 182084 - protein, 367 aa, unidentified
MKKVSTAAAKPSRNCSEQKLTIGLDLGDRSSYYCVLDEAGRILMESKVSTSPKAMEAGFEVMPQSRIALETGTHSPWVSRLLSGLGHEVIVAHARNVRLIGESRKKDDRLDAQTLARLARIDPGLLCPVRHRSAKAQGDLTVIRARAGLVRARTALVNTARGLAKSYGERLRGCNVRNMNPEKAEGLSPELQAALQPLLEALEALSEQIAEYNERIEELAQQSYPQVALLKQIKGVGTLIGLTFLLTLEDPHRFHKSRDVGCYLGLQPGRRNSGQSEPQMHISKEGDPYLRTLLVQGAQHILGPFGADSDLRRWGLKLAERGGRNGKKRAIIATARKLAVLLHHLWVSGEVYEPLHNSSRVPVPAAA

SEQ ID NO: 182085 - protein, 500 aa, unidentified
MLPSCDIFQLHWSVTLLLCSNKPNLDVNYIGMDVHSDNVVVCVQRNTINSSGQLVGKTIKTKKVVIKSSQEPLVELLSKYADGQQHIMTAESTFNWYWLADIAEDHGWNFRLADPCTVSQANIKATNDETDAEYLADRLRTGSLKSTSVLPRKLRGVRDLMRHRLRVMQEVSEKKVRLSNLYHNHCAHPMHGKLLTALQDAYDEISVDAVLESGICNNGSELIIGDLLTGLREAEARLAKIEAAVYERIDEVDEYKAERLLLKTSMKGCGDVLSAIIVTEIGDISRFRTMGDFVSYCRLAPTSKLSNGKSKGQGNAKNGNAYLSWALTELATLMARFNEPIRRYLERKQDKTGLRVVAVRALAAKLARYVYQVLRKNESFDLALAFDGKPTRAPTAIAEKPATEVVQSPQEPEVPPITAAPEPRLQVPLTEAPIVVKEPSPVKAKRGARTKAVSPASPAPAVNAEGRQTARKADRVKARCALTATPPSCAGTSCVKSRRE

SEQ ID NO: 182086 - protein, 467 aa, unidentified
MSAEQKSKPKAKSKSRDRQDHRAQLKPPDGTLGLQVVHPRAAGIDVGNEEHWVAVPGDRDAHPVQSFGCFTRDLQEMADWLVQCGIETVAMQSTGVYWIALYDILAERGLRVFVVNAQDTRNLPGRKTDIRECQWLLKLHTYGLLRNSFRPEEEILVMRTYWRQRHIADASRCIQHMQKALTQMNVQLANAISDISGSTGQAIPAAIVGGERDPQVLAKLRDPRVKASEATVAKSLEGNWRPELLFVLKQELESYQTFRNKIAECDEQLRQHYQTMEAKADPQLLAPVPRDKRAHGNVPAGFDLRDELFRATGVDLTAIDGMNVLTAQTVLAEVGSDMSCFPTEAHFVSFPGLRPRNKISGGKVVGREKRKSKNRAGLALRLAAGTLLKSETCLGAQYRRLRTRLGAPKARKAMAGRLARIIYRMLKHGDKYVDKGREFYEQRYRQSQIRLLTKRASELGLQLLHSA

SEQ ID NO: 182087 - protein, 517 aa, unidentified
MTASLNGALMPVRQHGSEFPATPLVKYRRLLVRPAVLSRLEDCSIFMPSSGHRPSHDTMKRSSSQKKKTMPKIAMDQNWSIINPNAAGIDLGSREHWVAVPPERDTQTVQCFGTTTPQLEALAQWLKQCRVTHVAMEATGVYWIAVYQYLEKQGFQVLLVNARQIKNVSGRKSDVLDCQWIQRLHTYGLLGGSFRPGDGYCVVRSLMRYRDELIAGRTTQVQHMQKALLQMNLQLRVVLSDICGESGLAIIEAILGGERDPLKLAALAHRRVKSSRDQIAQALVGDYRSEHLFVLKMGWELYHHYQHQINQCEQELTMALERLPERANPQERPLPAKTKGKKLDEALRQSLYRKLGVDLTAIESIGTTVALTALTEVGPDLSAFGTEKRFCSWLGLCPEHRITGGKILSSHTRRVVNRLSDALRLAATSLENSASALGAYYRRMKRKLGSPQAITATAHKLARIIYRMLKHGEAYVRQGLEDYEQQAREQTLNRLRRAAATVGYQLIKCEPLVKVVS

SEQ ID NO: 182088 - protein, 341 aa, unidentified
MNITTIGLDLAKNVSHVVCCNQVGKIVKKKILRRKEILNYFAQLDGCLVGVESCASAHYWARELEKLGHRVKQIAPQHVKAYVRGNKTDFNDALAIAEAVVRPEMRFVRTKTQTQQDIQSLHVLRKKCERDRTANSNEIRGLLYEYGIVIPLGVHNVYKALPELYDREANNGLSELFKELLEQHYKKLSELKAHLDVYTQKVHDLSKDDACVRLQSIPGIGPLIASAFYQYVGNGSEFNNGRAVSASIGLVPRQHSSGGKQNLLGNSKRGDGYLRTLLIHGARAVMRVSANKDTPLAKWIKRIEQTRGRNKAAVALANKLARVGWAILKQGGRYNDDLVTA

SEQ ID NO: 182089 - protein, 349 aa, unidentified
MRFYNRQHRFYCGIDLHARLLAVCILDQAGNIVVRTQLPAEKQLLLDTLAPFRPDVVVAVECLFAWYWVADLCQAEGIPFVLGHALYMKYIHGGKAKNDDIDAEKIGRLLKGGNIPVAYVYPKGLRETRDLLRRRMYLVHKRAELITHIQIVNAQYNLPAFEKKLIYAKNRAELKVAERFDHPHLRKSIEVDLALVDVLDERIAEVELYLERTVKVEDPQNYHLLKTIGGVGKILGLTLLYEIHQIGRFPDVGEFLSYARLVRCAHESAGKKLGSGGKKIGNAHLKWAFSEAVCLLVRNYPAVKGWQARKEKKHGKKKTLGIRAAKRGRAVYHMLRKKEAFDVRRFLGQ

SEQ ID NO: 182090 - protein, 358 aa, unidentified
MAITTIAHADPTRVTVGVDTHGDVHVAHAKDQLGRRLDTVSIPSTPTGYRDLLAWARGLGQVAAFGVEGTGSYGAGLARFLREADQVVLEVNRPDRAARRRQGKSDPVDAEAAARAVQAGEVTITPKARDGHVEMLRSLRVARTTAMRARTQAVNALRSLVVTAPAELREQLRGLSTVRLVRVATTLDPGSLTSPTAAAMLALRILARRYQALDAEITALDSELDRLTAKAAPRLLALFGVGPDVASALLVAAGDNPERLRSDAAFSMLCGSSPIEASSGKTIRHRLNRGGDRQANAALYRIVIVRLRWHQPTKDYMARRTAEGKSKKEIIRCLKRYVAREVFPVLREMNQADPATAA

SEQ ID NO: 182091 - protein, 346 aa, unidentified
MKHYLGLDVSLKLTAICVVDQTGSVMREGVVDSDPETIAEFVTSNAPSVVRIGLESGPTATWLWTELKQLGLPVICIDARHAKAVLKMQINKSDRNDAAGIARIMQTGWFREVRVKDLDSHSVRALLASRALLVKIKRDLENQVRGLLKNLGLVIGRAKLNVFAVRAEELIEGRPELMAAVRPLLAARHAIEQQVDDLDHKVMRLARNNAQVRRFMTAPGIGPITALCFLATIDDPTRFKRSRSVGAYVGLTTRRYASGEIDWTGRISKCGDKMLRSYLYEAANVLLTRVAKWSTLKSWGVRLAKRSGLRKAKVAVARKLAVILHRMWIEGTEFKWSSKEVANQPA

SEQ ID NO: 182092 - protein, 400 aa, unidentified
MLSIGIDVSKGKSTVCGMKPGGEIVYAPFEVQHTREGMSELVSLLRSSGEEVRAVLESTGSYHCPVVAALLENGIFVSVVNSLRMKRFCSQSIRKVKTDRIDAMQIALYGLAYWQELQPARLPEDTYRELQLLARQYYQMTSILIKAKVDFNAICDQVLPGMQELMNDHAGRHKLSDFVLRYRHTTHILEMGETRFRKDYCKWAEKKGYRNHERMAALIFATAQNGIPVLPNAPSTQIVITEAIRVLHTVEASRDAILTQMQALAKTLPEYSLVREMPCIGDTLAPRLIAEIGDVRRFHSKRALIAYAGIDAPPYQSGKFCANNRHISKRGNRYLRKTGYEVMQSYVMHKPANDPIFTFIEKKRGEGKSGKLAMVAGLNKFLRVYYGKVTELYRSLPAIE

SEQ ID NO: 182093 - protein, 355 aa, unidentified
MSDEKYIGLDVHQATISVAVRDSQGNIIMESILETKASTILDFFAGLRGRLSVTFEEGTSAAWLYDLLKPRVAEVLVCNPRKNAALKQGNKNDKMDARKLSERLRLKDLQSVYHGENGVRMLRELARSYLTIVKDLTRVMSRVKALYRSWAIPCAGRDVYYTRHRKEWLDKIQEPGVRGRAERLYQQLDMLQHLRQQARRELLAESRKHAITAKLREIPSLGPIRCALAVALIQTPHRFRSKRQLWTYSGLGLETRDSGEYHIVQGQPRKRKKQAFVRGLNKDYNHDLKGLFKGAATRASVQPGPFQEFYQRSLAKGIKPTMVRLTLARKIAAITLTLWKKGEDFDIHKLNTQAA

SEQ ID NO: 182094 - protein, 426 aa, unidentified
MKVMHDRVAAIDVHKEMVKVAVRVPGAKRGSRKTDVLEFRTFYGVLQEMGRELRRRGVTHVVMEASGVYTEPVYYALAGLDFTEVMVINPAHAKALKGHKTDAKDAIRLLDLYECGLLSGSYIPAPDLKEVRDLARYRMKTVQARTSEIQRLQKTLESAGIKLDSVVSDITGMSSTAMIEALIDGERRGEVLADLARGRLRTAGKMADLSMALAGRFTDHHAMMCRLHRDRIKMSGDAVADLDARIAPPVARYSREADLLKTLPGFGDVVAAGWLGAIGPAPHEHFATAQRLASWATVCPGNYMSAKKSKGGRTGDGGNYIKPLLVQAAWAAVRVPGRLQARYSRLVRRFGGPRSKGAVKRAIMAIAHTLLKIAYQVLKTGKPYEDLGAGFYASRESPQARQDYLIRQLQKLNPGSTITITPQEAA

SEQ ID NO: 182095 - protein, 408 aa, unidentified
MLLVGIDWAESEHAACLISPEGKVLRRLRISHDVAGVERLVHTIGELEPNAAAVLVAIETAHGLLVSALLEAGFTVYAINPKAVERYRSRTRVSRAKTDPADAELLARILLTDRERHRPLRVSSSEREEIRALARDDERAARDQRRLLNRLRQDLLAVFPHALEAFDDLSAPTCLAFLARWPSAAEAAAVDERELETFFRAQRHGWPERTAARVRAAITAPALEVPPHLARAKAGSIRLACEQLLLIHRQRREWERRLRELLEAAHPDGEIYLSLPGLDIRLAARVLAEVGDGAFDFAVPNELQCYGGTAPVTRRSGKQLTIACRLACNRHLRQAAMQWAFCSLTRSDWARDFYDRQRAAGKTHYKALRALANRWLELLWHLLRKRALYDEAIHQRNRSNAGVIACAA

SEQ ID NO: 182096 - protein, 408 aa, unidentified
MQLFVGVDWAEDHHDVCVMDTDGQVRSKGRVSNDLAGIAKIHDLIGRAIPAEFDDDPEVIVGIETDRGLLVRALVAVGYRVLAVNPLGVDRYRDRSRVSGAKSDPGDARVLADMVRTDAHQHRAVAADSDLAEAIKLVARSHQSAIWSRRRLANQVRSALREFYPAAQLAFEDLTHSDAVSVLAIAPTPELGKGLSLSKIASALRRGGRQLNVDKKAAAVQAALRTDQLTQPPVVADASGAIVASLAKAIAAHNTQIAELEEVLEAHFSQHPDADILRSLPGLGVVTGARVLGEFGDDPNRYDTAKGRRNYAGTSPLTVASGTRRVVRARHIRNRRLADALYWWAFNAINRSPGARALYDHRRALGDTHSGALRVVSNRLVAILHGCLRHRTLYDEHTAWAHRNDIAA

SEQ ID NO: 182097 - protein, 457 aa, unidentified
MPARRKKPRSGAVLPAHTIDPDAAGIDIGATEIYFAVPVDRDPHPVRRFATFTEDLIAAADWLKKCGIKTVAMESTGVYWIPLFQILEARGMKVCLVNARHVKNVPGRKSDVCDCQWLQHLHSAGLLRASFRPSSQVCAVRSLVRYRDSLVQLSAMHLQHMQKALDQMNLQLHHVISDLGGKTGMAIVDAILAGERNPHQLATLRDPRTKASQETIAKSLVGDYRREHLFTLRQSLTGFRQNNQLIADCDVEIESLLKEFSSGDGPGAEAVPEPQAELKRKPRRNEMSFDLRTQLHRIFAVDLTEIPGINTLTAHALFTEVDRDLSKFANVAAFTSWMGLCPDNRVSGGKILHARTRKVNNRAAKALRMAAQALSRSHGWLDQYYRRMRAKLGGPKAVTATAHKLARIVYHLLTTGQAYDETVFAQQEAQNKQRNESRLRHQARQLGYELTLIPTEV

SEQ ID NO: 182098 - protein, 412 aa, unidentified
MDVVYQRCAGIDIGKRTAKVCVRVQGRGSQPTVSTVTSWSSMMPQILKLRAKLVNEGVQRVVMESTSDYWRPFFYVLAEELDVILVRASDVKAIPGRKSDVCDAEWLADLAAHGLVRASFVPPQQQRQLRDLTRARSRLLADRAREVQRLEKELEDACIKLAAVVTDLQGVSARLMLQALIEARDDPAAMADLAIGRMRTKIDQLTEALTGRFNDHHRFMVTFRLKRIDAATADLAELDARIDALIVDAGFDPARDLLLSIPGLGPHSADELLAEIGPDMSVFDAPEQLAAWAGVAPGSHESAGKRKNAPARRGNRYVKRALGIAAKSAARKKTGFLAARFRRLAARRGYQKALVATEHSMIIAIWHMLSTGEYYHDLGGDHYHRLIPARIIRRKIAELEAAGYTVTHEVAA

SEQ ID NO: 182099 - protein, 416 aa, unidentified
MHVVYTHCCGLDVHKKTITACLLISGAGGKGQHEIRRFGTMTRDLLELADWLQSQHVTHVAMESTGVYWKPVWNILEGQCEVVLVNAQHIKAVPGRKTDIKDCQWIAELLQHGLLRSSFVPPTPIRQLRDLTRMRASLRQDHTAVANRMQKILEDANIKLAAVASDWLGVSGRAILTQLLAGEEDAEKLAELSRGRLRSKLPAMQLALEGRMTAHHRWMLRVLQEQLVFLEAQIAKLEAKIQDQVSDYRAALELCTTIPGVEEVAAANLLAEIGVNMDQFPSAHHLASWAGICPGNHESAGKRLSGKPRKGSAWLRRSLCQAAWAASHTKETYLAARFRRLAARKGKKRAIVAVAHTILVSLYYMLKHQQPYHELGADFLDQRNAENVKRYLVKRLERLGLQVTVQSSENAAALPA

SEQ ID NO: 182100 - protein, 334 aa, unidentified
MDTHAEVHVAAALDPVGGLLGVREFPATAAGYSRLLGWLGGFGTVCLVGIEGTGSYGAGLARHITAAGIRVVEVDRADRQDRRRQGKSDPLDAVSAARAAQSGRARGAPKGRDGAVEAIRTLMVARRSAAGERTRTINQARALVLTGPDDLRTRFARHTPAALITGLASLRPRTGDVAGHATRIALRELGRRARFLDGQLQRLDELIVPLVTAHAPGLLALYGVGPRTAALLLITAGDHPGRLRSEAAWAHLCAAAPIPASSGKVTRHRLNPGGDRQANHALWRIVFTRLGSDPRTRAYAERRTAEGKSKAEIIRCLKRYVAREVYPHLRPAGG

SEQ ID NO: 182101 - protein, 389 aa, unidentified
MTPLRVMIAVDPHKGSWTAAAVDASLQPLATVRVPVSRDGYRALRRFARRWPHAQWAIEGAGGLGAPLTTRLRTDSIEVINVPAKLAARVRLLSTGHGRKSDDADAVSVGIAALTSRALNTAEINAATTALRAVVEHRDDLVKTRTQTVNRLHVVLTNLVSGGAARELTADHAAELLRGVRARNTADKTLRALVVDLIGEVRQLDRRIAKAAGDIETAVIASGTTLTQLHGVGALTAGKILGHVGAITRFRSAAAFASYTGTAPIEASSGDVIRHRLSRAGDRQLNYCLHVMAITQIRQNTKGRAYYLRKRSQGKSHKEAMRCLKRRLSDVIYRQLVRDASTSQGTGPAGQAGATLMSSAAGSDPFTGTSDRSLTGPANRHHTTEEPNA

SEQ ID NO: 182102 - protein, 415 aa, unidentified
MDKNDDSRLEEFRQLKRDIRGSTQHLVVGMDIAKERHHAFFDTPAGRVLLHRLVFDNTRDGFEKLCFQADILKTQHGLAHVVFGMEPSSDYHKPLGEYLIEHGHGVVLVAGTAVKKNRELLDNRWDKHDTKDAANVADLVTQGKCLFYEFPSLSLRELRSLLSLKRRLKKSEQGYKVRIRNHLIAQYFPEMDAYFNYAEGLVRCLDPKKLAGLQFREFVRMVPGKQEERLGEIYAKAAFSIGCEGHPSVAFEASLLLDGLKSLHLMILETDRRIAEVCKKFPEYPCLLSIPGFGPDVSAKVLGALGNPHRFENHRQVLKMAGLDLSASRSGKKQDVTPVISKKGKADLRYGLYQAAFIASTRNTQFMTYFTNKLKGREREKGISTKMRVKLAAKMLVIAWTLMKKREVFNPACIE

SEQ ID NO: 182103 - protein, 322 aa, unidentified
MNKYKEIFGVDISKDVFDVYGSKSGHNQFKNDAPGFKFFLKSLPKESLVVMEATGYYHYRLAQFLFKQSVLVSVVNPLSVKRFIQMKLAKVKTDKSDAKAICEYGQINEVPLYTALTDVQSECLQLFRLMDSCLKKRTATKNKIHGEDVLGIPSKYVYRSLTRIKKYLDKEISGIEAKLLSLVKQEQQVQFTLLQSIPGIGLKTALFLIVVTDGFNKFENSKQLCSYVGITPTIRESGSSVRGRSRISKVGNRKLRNLLFLCSFTACKHNKGCRDVYERIVNKGKSKKLALIAVSNKLIKQSFAIAKSGNPYDEKYVSILPK

SEQ ID NO: 182104 - protein, 334 aa, unidentified
MIIASHSNETAKHMKKEKTQIEFEQIVERGCGIDVHKSVIVATIMGIGLNIITKTFNGFTGSIEELRDWLKENLITHVAMESTGVYWKPIFNILETDFEIILVNARHIKNVPGHKTDKKDSKWIAKLLLSGLLKGSFIPKRPIRELRDLTRYKRKVVEQIAAEKNRIQKILEDANIKLSSVVSDMDGATATKIINAMISGVEDIDELLKFRHGKIQSSREDLASALKGNITAHHKFMLRTIKMSITEKESIIAMLDKQIDAHLKENEMELDAKLLESIPGVGKEGVSYILAEIGNDMEQFPDENHLSSWAGISPGNNESAGKKKVAALHMEIST

SEQ ID NO: 182105 - protein, 342 aa, unidentified
MFMEIDRVVSQCVGIDVSKKKLVATMCMFSQAEQAVYSRAAEFDNDKTGFNQLVKWSRKEAVKELPLRYVMEATGVYHEHLANHLVRIGCTAVVMMPTKAREFAYWEGMISKNDTIDSRVLALVGCVKRSMRPWNPTNSLYRELRTMSRFSQDAKKLRTEMKNHLEALEHSHEAERSVIKHYESLVASLDRRIEKNLENMKKKVASDEELSKKVENIMTAPSVGFLSAVTVIAETDGFALIQNRRQLTSYAGLDVRDSQSGTVNGVSRISKRGNSRIRAILYMPAVQCRLHNKHLRKAYDRIIAKHPDKKMIAVTAMERRLLLLIYALWKGDRPYSEDYDKE

SEQ ID NO: 182106 - protein, 317 aa, unidentified
MEHYVGLDVSLKQTAICIVDRTGKVQREGIAVSDPEAIAAFIKSYAPNVVRIGLETGPTATWLWTELRKLELPVICIDARHAKAALKMQVNKSDRNDAVGIARIMQCGWYKEVHVKDLDSHAIKAVLVSRALLVKIKRDIENQIRGLLKNLGLVIGQAKMNVFAVRAAELTEGRPELVAAVVPLLKAREAVGQQIADLDQKVMRLARNDVQVRLFMTAPGVGPITALCFLATIDDPTRFRKSRSVGAYVGLTARRYASGEVDWTGRISKCGDKMLRSYLYEAANVLLTRVARWSALKAWGVRLAKRSGLRKAKVAVA

SEQ ID NO: 182107 - protein, 374 aa, unidentified
MRNFSTFIGMDVHKETIAVAIAGEEGGPRYYGDIMNTPEALAKLIKKVAGKKEQTAFCYEAGPCGYGVYRQITGLGYRCDVVAPSLIPKKAGDRVKTDRRDAVMLTRLYRAGELTSVWVPGLEQEAIRDLTRAREDIKGMERHARQRLNGFLLRHCKRYHGKSKWTPGYFRWLATVSFESSVQQIVFQEYVDMVKQLQKRVASIEEEMRKALTGWSLRVVVEALMALRGVNLVTAMTVVAEIGDMSRFESPRQLMAHLGLVPSEHSSGSRQKRGGITKTGNGHVRRVLTEASWSYRLPARKTAHLQRKAEKTTEAVQAIAWKAQKRLCKRYWYLIHKGKLTVQTCTAIARELVGFIWAIACEVMGKNIVCGVAA

SEQ ID NO: 182108 - protein, 315 aa, unidentified
MTTSSGKFVGIDIAKEKLDIAVLGEKKESQVTNDEKGITSLIKKMQKLAPDLIVVEATGGYQRAVVLGLYEAGLPVAVVNPARVRQYARACGLLAKTDKLDAFNLAEFGKQMKPRRFEAKSEAGRYTSALLVRRRQVEEMLKAEKSRLRTVHADMRSSLERMIEVLKEEIKHLEKDLDCFMKEHADWQAQEQILCSAKGVGRVTAATLLAELPELGKLDRKKIAALVGLAPMNFDSGKKRGYRKTKGGRIEVRGVLYMSTLVATRYNPLIKAQYQELLRRGKVKKVALTACMRKFLTILNAMMRDKVPFRQMVTA

SEQ ID NO: 182109 - protein, 330 aa, unidentified
MLVLWFGVDVSKKALDVAYLDGNGKFRVASFANNANGFARLQSWCIAAAQGATLCFCMEATGDYHLELALFLTDLGHHVSVENPAKVKYFAMGCGRLNKTDKADSKLICDYGRLQQPPAWDLASPTKRELFRLNRRRRQLNGLINAEINRRECPSAVGPKVMESIKRVLGSLRAEMREVEAMIQAIIDSAPVLVDQFALLKSLGNLGLATFLAIVAELPDVERCAHAKSYAASAGGNPLTTQSGSSLSRSSFARGGRRHARSAVWMLVLRMRTTLPEIKALYERLRAKGKKHTQAMLACVRKFFMIVYGILKHGKPYKTATKIVTVTAAA

SEQ ID NO: 182110 - protein, 375 aa, unidentified
MKKYNRFIGLDVHKASISVGIADAGRGDAEYYGSIDNRAESYLKLAKKLSKGGGEALFCYEAGPCGYEVYRRLTKAGYDCMVIAPSLIPRKAGERVKTDRRDAVSLARLLRAGELTPIWVPDKEQEAMRDLTRAREDIKAMERQSRQRLGGFLLRHGKVYPGISRWTKTYFCWLEGLRFETAAQQIVFQEYVDIVKDVQRRVAAMEEEMRKALTGWTLKPVVEGLMALRGVDFIAAMTIVAELGDITRFESARQLMAHLGLVPSEHSSGDRQKRGGITKTGNRHVRRVLVEASWSYRLPARKTAHLRKKAEKADKVVQEIAWKAQKRLCSRYWHLVHKGKLHVESCTAVARELAGFIWAIACEVMGKKAVSVSMN

SEQ ID NO: 182111 - protein, 383 aa, unidentified
MVFVGLDVHKRVVQACVVDGAGVVVREARLHGSERILLAFLKTVGECKVALEATSGFELYYDALVSNGFSVSVANPFKVRLIAQNRFKTDRADALALAQLLRTGFLPTSYVPCGEVKELRRLVRERIHLVGLRARTKNRVRYLLQAYKQETKFDPFTKKGMKELTAMPLPSMQRCVRLYDSLSAEIVDVEKELEGHESQHARELELLKSIPGIGRFTSLVIIAEVDDITRFPSAKKLCAYAGLVPSVRQSANTIKTGGITHQGSKDMRWMLVEVAHGAVRRDVFLKQFFTRIKARRGYKRAIVAVARKLLSYAFHVLSQKKSYDEIVAQDRDKKKHAHDSGGEGKGFSVPPAEQNSCSPQGDWIEPLPDNRLNAARYTRHANA

SEQ ID NO: 182112 - protein, 377 aa, unidentified
MDKDSRFVGLDVHAETIAVAVAEPGGEVRSLGTIPNTPEAVRRLVKKFGPPETLRVCYEAGPTGYVLYRQLSALGVPCAVIAPTLVPVKAGDRVKTDRRDAEKLARSYRSGDLTPVWVPDSGHEALRDLVRAREAAKKDQLRARHRLGKFLLRQGRRAPTGIKAWGVKHRAWVQTIRFAHAAQDATLLDYRTEVDHAADRIARLERAIAAAADLAPAPVRAVIAGLQALRGIAKLSAVSVVTEVGPLSRFAKPRQLMGYSGAVASEHSSGPHRRRGGITKTGNAHLRRIVIEAAWAYRHRPAIGGTLRTRQEGLSEEVKALAWKAQHRLHGRYVRLLAKGKAPTQVVTAIARELLGFIWAIGVHIEQPTAGGAPAAA

SEQ ID NO: 182113 - protein, 409 aa, unidentified
MEVMNPRCAAVDLGKDVLVVAIRLQDAGGVRRECRTYGTTGHQLLELSSWLLSQGVTHVAMEATGSYWKSVWHVLEGQFELTLANPAQIRNMPGHKSDVNDATWMADLLAHGLIRGSFVPPAAIGALRELTRTRKQFVREVNRHTQRIQKILDIGNLKITGMITDVLGVSGRAMVKALIAGQTDPEKLADLAHPRLQAKRERLVEALRGRLTVQQRRLLGMHLNLIETIEASIAQLDQDIEKAVDPFRPIVERAKQVPGLSDINVPAMLGEIGVDMTRFKTHRHLISWARLCPRLDESAGTVHSTRTLKGANWIKTLMIQAAWAAIRNKDSYLHAQYLRLRARRGSKKAIVAVAASILTAVYYIIRDGTPYMDLGFRYFDQRDRSRAARRLVGRLQQLGYNVQITEKVA

SEQ ID NO: 182114 - protein, 459 aa, unidentified
MNWLAQVQAKWPERYYVGIDIGYREHVAAGIARSTFLQRGERWQRARAIHFASSSRGLEKLQQYLLSFSPDPQAFLILCEPTGGYYGASLYQGLLKRQYAPLLIDNVTTRPMREKIFGNLPKTDEMEARVMARIAYLHEVVGEEFTLQPLSLPDPDQEELLTLCRNSWKLNVSITRARNQLAQLMAMIFPEMKFFFEGSVSSPVPVRLMAHYASPAEMAAADPDEVAEVLRKARGHLHAKPVKELQELACASSGILPDPGRAWRSAWLTQFILSNTELLAQLDHQIERLCDDHPGYALLVGIPYAGPNTLGTILAATGDCTRFRNYRQYVAYTGYFAGLERSQTIDHTRMSRRGNRNLKRAYFQIVAPMVWFDSRENSYKNLYKRKMAEGRAWFEAMLFACAALARHVYHCLKFQEPYQLEKAFGRAQPLPAQRAAETVIQADLENDFKVMDAYLSPKD

SEQ ID NO: 182115 - protein, 358 aa, unidentified
MAQSKKINFNGQNIYIGIDVHLKSWSVTIMTESGYKRTHSQKPSAKELFEHLKKHYPDGKYQAVYESGFSGYSTYYALKEYGIECMIIHAADVPTSQYDHVMKTDAIDSEKLAKSLKGGLLRGIYIRDKEELDDRSLVRLRKTLQKQLGGYKSRVKHLLYNNGIDYPDCFENSRSHWSNHFIFWLENEVKLLSSTRHSLDLLLEQVKLFRKNLLKATRMVRELSKKSLYTQRYENLISIPGIGIVTAMSILTEIGDASRFHNQREFASFLGLIPSCHSSGESIANAEKTFRGNKHLGTLVIESAWISIRHDRAMAMAYGEYCKRMKAQEAIIRVARKMSNRILSVLKSGKKYQYDKIR

SEQ ID NO: 182116 - protein, 387 aa, unidentified
MIYLGIDVAKNSHVAAAMSSEGEVLLMPFSFANSADGFTLLREKLNNLPKLPLLVGLESTAHYGENLICFLCGNGYHVAMINPLQTAAIRKSAIRKTKTDKVDAFVIAKALMMEGYTELQQSDIQILKLKGLCKTRQNLILMRTRCKIQLGSFVDQLFPELNQFFRSGLHINVSYTLLKAHPRPAEVGALHLTYLSNLLRKASRGKYKKEDAIRLRELARNSIGTDNPALALQIRQAVSQIELFSAQLKQVESEISTIMDSLDSPIMTVPGIGYLNGAMILSCIGNIQRFSSPAKLLAYAGLDPAVVQSGNFSAKSTRMSKRGNSMLRYALINASHNVVRNNETFAQYYNSKIAQGKSHYCALGHTAHKLIRVIFALLTNNIAFDLA

SEQ ID NO: 182117 - protein, 339 aa, unidentified
MMNFSNHLLNRKSKVMKNIIIGIDISSKTLDICIKEDAASHFSIENKVPIIKRFLKKYSKGNVIIAMENTGRYNWNLCEVLEGFNFQVYIINPLHLKKSIGLTRGKNDKIDALRICNFIEKNYQEMTRWKACSQSIKKIKILLTERASRIKLKKQLTTQQHDYKLMKGISLDKQLLSLNMKLIKNIETQIKIIEDDIEDIISNDEKLNKQHKLIKSVPGVGKVLSWTLLSKTEGFTTITDPRKMACYSGVVPFDFQSGTSLKKRPGVSMLADKGLKTILHLAAMSAIRLDNDLRSYYVRKVQEGKNKMSVLNAVRNKIIHRVFAVIKNQIPYQKDLVLS

SEQ ID NO: 182118 - protein, 391 aa, unidentified
MKPGGELVAAPYKVRHSDIEMSHFALDVLCMEPDTRVVMEATGRYHEPVAALLHSEGIFVSILNPLLIKQSGAGSLRKVKSDPKDALKIAKYGLDNWSTLREYTPMEAIRQQLKLCARQCDLYNKNIVMLTNNLISLSDKTFPRVNELFSSPEKADGHLKWVDFYRSFWHCDCINRMSPDAFEERYKKWCKRKGYHFSTDAADALYAASCGSYTTLPRDNNAKLLVTVAADQLIALRENQSKLEAEMLNVCKQLPEYETVMAMYGVGKSTGPHLMAELGDVRRFPHRSSIVAFAGVDPGVVGSGKMQLSSVATSKRGSPQLRKALFQVVSTYVKCKSENEAVYQFYTKKRDEGKPFFVCTTAAANKFLRIYYARVKECLNAAESVTQAEEG

SEQ ID NO: 182119 - protein, 413 aa, unidentified
MEVVYPCCCGLDVHKASITACVLWAESGGRARKEKRRFGTFTRDLLDLADWLRTCGVTHVAMEATGVYWKPVWNILDGGFTEILLVNAQHIKAVPGRKTDQKDSEWIADLLQHGLLRGSFVPPQPTRELRDLTRYRVSLAQECNRIANRIQKVMEDANLKLASVASDALGASGRAMLRAIIAGEQNVTALAEMAKGLLRNKIPALHEALAGRVTDHHRFMLRELLDDLDHAEAKMTTVEQEIDRRLRPFQDDVARLCTIPGVDRVTAWGLLSEIGFNMDQFPSAAHLASWAGMCPGNAESAGKRLSGKTRKGSAFLRRHLCQAGWAVSTKKHSYLSALFRRVARHRGAKRATMAVGHAILVIAYHLLKRKTTYIDLGPDYFDRRNADAVRRSLVKRLQNLGHSVTLAPAPVFS

SEQ ID NO: 182120 - protein, 345 aa, unidentified
MELHTIGIDLGKTVFHLVGLDLHGGVVVRKKFSRKQLLHFTANLKVELIGMEACGGSHFLGRALREQGHEVRLIPAQYVKPYVKTNKSDFIDAEAIAEAVARPTMRFVPIKSDDQLDLQSLHRVRERWVMRRTAVINQIRGLLLERGITLRKGRCHLDAALPGILEDATTKLSGAVRLLLAQLKVELDQLVIRLEEADTLIKKIAQESEVCRRLDAIPGIGPLTATALIAAIGNGAAFRKGREFAAWVGLVPREHSTGGKQKLLGISKRGNCYLRRLFVQGARAVLQFREKQSSGLSTWLTQLASRTHHNVVGVALANKLARMAWAVLAKNEPYRPPVVVGAATA

SEQ ID NO: 182121 - protein, 325 aa, unidentified
MYVGLDLHKNYSEFAVMDVTGNILRQGRIENDLEKMRAFSESIPAESSLVIESSSTWYWAHRLLSERHHVTLSNPIKNKAIASAKVKTDKIDSVMLATLLRGGFVAECYVPSNETIDIRELVRFRANLVRERTKMKNQIHAYLLQNNISIAASPFSNGFVEELRKIENPRVQAYLRLVESLNREIREASITIREKATSNEDAVLLMSIPGISFFSALLIAGEIGEIGRFEGSSSLVGYSGLAPSTHSSGGKTYHGPIMKSGSRYLRWVMGQCARAHMRAEPDGTVAAFYARIRRKKGDQKAIVAASAKLLKIVFWVLKEKRAYHS

SEQ ID NO: 182122 - protein, 341 aa, unidentified
MHPYYCGIDLHARLLYVCIIDNTGLILVHKKIKDDPSALLKLLQPYIGNIVVGVECMHCWYWVADFCKAHNIDFILGHALYMKAIHGGKAKNDKIDSFKIAKLIRGGNFPLAYVYDKEMRATRDLLRRRTKIVRHGADLKAHVANTASQYNLPAHNVNLKNVCDREKMRYYFPDPVVQRSINLDMGILDYYQKELKPLEHYIEQMAKQHNPVHLNILQTINGIGRILALTIIYEVGDINRFPSVQKFASYCRLVKCKAESAGKTYGTQGNKIGNAHLKWAFSEAAVLLLRHNHNATQYLEKLQKRMSKAKALSALAHKLGRCVYYMLKKETVFDETRFLKR

SEQ ID NO: 182123 - protein, 341 aa, unidentified
MDEVTTIGLDIAKQVFHAHGADASGRRVFSRRITRQKLIEFFASQPRCTVAMEACAGAHHWGRELQRLGHEVRLIPPAYVKPFVKRQKNDAADAEAICEAAQRPTMRFVPVKSEEQQASAAVFRARDLLVRQRTQLLNALRGLLAEHGWVAPKGLFHAGAMMAKIEDPACALPPSARDVFLVMIASAKALDERIGLLDREITKRAREDETARRLMTIPGIGPITATALVALAPPPESFRKGRDFAAWVGLTPLQRSTGGKARLGSITRMGERTLRRLLILGSAAVVLHASRRGAPKGSWLEQMMARKPRMLVTVALANKTARIVWAVLANGGVYRAPAVAA

SEQ ID NO: 182124 - protein, 421 aa, unidentified
MQVQLSKFAAFIGIDWADRKHDVCLQVAGVDACERSVLEHRPTVIDSWARDLRKRFDGRPVAVCLELSQGPIVSALLEHDFFVIFPVHPSTLANYRATFTPSGAKDDPTDAAVALEILRRHPDKLAPLRRESVDMRALRRLVESRRDLVQDRVRVTNRLIYALKAYFPQVLDWFRDKETDVFAAFLERWPSLPQAQRARRDTLIDFFHAHNVRRASTIEKRIRAIQSERPLTTDPATIEPALLLVQMLLPQLRALSAGVAAFDKEIARRCQVLPDYRLFANLPGAGKVFSPRLLVAFGEQRDRFANAAAFQKLTGIAPVTERSGKSHWVHWRWACPKFLRQTFVEWCASSIPHSFWARAFYERHKAKGASHNAAIRALAFKWIRVLFRCWVDRVPYDESRYLAALQKRHSPILKFAAQAAS

SEQ ID NO: 182125 - protein, 394 aa, unidentified
MIIIGIDIGKNKHEATLIDEKGNIIGKSIKFENSTAGFNKLISSINNYNISNDKFVFSMEATGHYWLALFSKLVESDYNVQVINPIQTDACRKFYIRETKNDSKDSFLIAQVTRFNGYSKTTLPDEVMISLKELTRFRTFLVDDISDYKRKATVVLDKIFPEYTQIFSDTFGKTSKEILTKYPLPKDILNEDLESLAKVLSTSSKGRLGYSKAEQLQNLAKESFCIKFATEALVMEIKSILSTIEHLQNQVSKLDEKIAVLLRSLGTTIETIPGIGSVLGAIIVSEIGDINRFSHASKLVAYAGIDPTVKQSGEFNATKNRMSKRGTPYLRRALWTASIVAAFNDPNLHEYYLKKKNEGKHHGTIIGAIARKLIYRIFIVLKDNIPYQCNKCEA

SEQ ID NO: 182126 - protein, 340 aa, unidentified
MNEITTIGLDLAKHVFQVHGVDAEGTTVLRKQLRRGQVLAFFSRLPRCLVGMEACATAHYWARELRALGHEVRLMPAQYVKAYVKRNKNDAADAEAICEAVGRPTMRFVPVKTAEQQAAVLLHRGRERLVRQRTMLVNALRAHLAEFGVIAPQGLRNVGRLIAIIRDDDDAHLPGLARQVLQVLAVQIEQLEAAIAALEKRLMGWHKSNPVSQRLATVPGIGPIIATAIAAMVAEPSGFRSGREFAAWLGLVPRQNSTGGKNRLGGISKRGNQYLRRLLINGASANLLRSKATNADPWVIGLRRRRPSLVVAVALANKTARIAWAVMHRQENYQRMATAA

SEQ ID NO: 182127 - protein, 397 aa, unidentified
MLAVGIDISKSKSVAAILNQDGSMHTSPFEFHHTQPELDAFIKYILNSNQSATIIMENTGHYHYPVLKAFREAGLPVCMVNAYQIKKFGDMDLRKAKTDKKDAVRIARYALEKRYSLVPYTSMEQKYEDLKFLARQYNQRMLTLKTNKVFLLNLLDETMPGITNILPLTTRTPETSLSVLFINRFKSYDRIKKMGKSRFLDAFEKIARKSRNRQTKTYGLAIYEAALRNITTRGENEYTLAAQDQRLELVCESQKAADSIILKMQTLAETLPEYAVLRSMAGVGDRLGPLILAEIGDIRRFHSGKALNAYAGNDAPPYQSGTFESHNRHISKRGNAALRKYCFEVMQALKLTRPQNDPVYLFLLKKEQEGKPYNVAKMAGVNKFLRIYYARAMETLK

SEQ ID NO: 182128 - protein, 359 aa, unidentified
MAVIEGRERRIVGGVDTHKDLHVAAVVDDHDRVIGTQSFATTRQGYRQMLAWMRSFGDLQRIGIESTGSYGAGLLRFMQQAGVVVLEVTTPDKQDRRRRGKNDDLDAQNAAHAAFAGQRTVTPRSRDGMIESLRVLMACRKTAVAARRVALQMIHNMIVCAPDGLRDQLRSMTRMQLVRTLASWRPDLTAYRDVEAAYRISFKSLARRYLELHDEIADLDAMIAAIVDELAPNLVARNSIGHTGAAQLLLTAGDNPERLRSEASFASLCGVSPVPASSGKTVRHRLNRGGDRAANSALHIVAIGRLRTDPRTKVYVARRIAEGHSKLDAIRALKRYLAREVFALITQRRKEINATRIAA

SEQ ID NO: 182129 - protein, 414 aa, unidentified
MEIVHTHCAGLDVHKKTIVAAIIVPDGQGGLWKGVRTFDSMTSDLLALSDWLMACGVTHVAMESTGEYWKPVFNILENNFEVLLVNAQHIKAVPGHKTDVKDSEWIAELLRHGLLKASFVPPLGQRELRDLTRSRSTFVRTRATLVNRVHKVLEGANIKLGSVASDVMGVSGRAMLEAIVEGQSSPAEMAELAHGRMREKRDLLTKALEGRVQAHHRFVLTELLAQIDSLDETIERFNEQIEVYCRPFEDAVVLLDTIPGVGRETAEIIVSEIGTNMSRFPTADHLSSWAGVAPGNNESAGKRRSGKTMQGNKVLGAALNQAAHAAARTKNTYLSAQYRRLAARRGKKKAIVALEHTILVIAYHLIQRKEPYRELGGNYFDNRRPEATAKRLVSRLVQLGYTVSLQQAPAFAPA

SEQ ID NO: 182130 - protein, 366 aa, unidentified
MKERGLRSSWVPGGCWGFSRFTKKEAPVSESYAGQRFVGLDLHRRRSVLVRMTAAGEPLETVRIVNDAERLAAVIGRAGEHPEVVLEATYGWYWAADALAAAGARVHLAHPLGVKAFSYRRVKNDERDAADLADLLRMGRLPEAWIAPPAIRELRELVRHRAKLVAIRAQLKAEVHAVLAKCGVSVVMTDLFGLEGTALLDRIKLPAPYRARVESIRRLLTDLDFEVDVFTKLARVRLAADPGFAAVQTIPGIGPVLGAVLVAEIGDVHRFAGPAQLASWAGLTPKHHESDTTVRRGHITKQGSRLIRWAVIESVQILPKTTHIGAVRERVGAKRGRHIGVVAAARKQLELVYWAIPDHHVRALAG

SEQ ID NO: 182131 - protein, 449 aa, unidentified
MPKKRAKAVSLPIVEPNAAGADIGTTQIFVAVPPERDPDPVRCFRTFTADLEKLADWLEECQIQTVAMESTGVYWIPLFQILEKRRIEVRLVNAQHIKNVPGKKTDVEDCQWIQHLHACGLLRGSFRPADEICAIRSLWRHRDNLIELATIHLQHMQKALDQMNVQLHHVISDLAGATGLAIVDAILAGERDPCKLAQLRDWRIRASEETIVKSLVGDYREEHLFTLRQSLESYRHYQDQIQKVDARVKRMMQTVPSKVSECEKPPKEKNPRKTPWRNEPPQLRDDLYRAFGVDLTQIPGINTLTAQMIFTEIGPDFSRFPTAAAFCSWLRLCPDPRISGGQVLSSRTRPTKNRAALALRMGVQGLHRSQSYLGDYFRRMRARMGTPKAMTAAAHKLARIVYYMVTTQREYDASVFQEQERRTQDRKRAKLYAQARELGFQLLPVESVP

SEQ ID NO: 182132 - protein, 343 aa, unidentified
MEQYIGLDVSLKDTAISIRQGGSRIWRGKCPSDPALLAEIIRKRAPLAKRVVFETGPLSTWFYHALTSAGVPAICIEARHAQKILSETLNKTDANDADGLAQLAEAGFYKAVRVKGFEAMLDRTLIGVRKQVAGMSIQLSNQIRGVMKTFGLIVPKSKGRVFEGHVKELLTGNDSLARIILPLLDAWRDIRKHAANLDRQLLAAARNSRATRLLMTIPGIGAITSLSFSAAIEDPANFKRSRSVGAWLGLTTRRYQSGEVDYDGHISRRGDSHLRSLLYEAAVVMLTRTKSRHDSSLKDWGLKLRERLGIKRAAVAVARKLAVIMHSMLKTGEPFNKLASVPA

SEQ ID NO: 182133 - protein, 310 aa, unidentified
MDASFVGIDVSKAQLDVHVRPSGEAFAVARNGKGLNELVERLGRLAPVLIAVEATGGFETIVAAAIAGAHLPLAVVNPAQVRHFAQAIGKRAKTDPIDAAVIAHFAEAVKPEPRELPDEAARLLAELVSRRAQIIEMVVAERQREKRASSVRVRRSLARHIAALEKELPVIDGDIDTMVRGSPVWREKEDLLITFPGIGNTIARSVLADVPELGRLDRRRIASLIGVAPFTRRSGQWKGKSMIAGGRPAARSAVFLAALSAIRCNPVLRAFYQRLLAHGKPKMVALIAVARKIVTILNAMLRDKKQWQPA

SEQ ID NO: 182134 - protein, 365 aa, unidentified
MELTAVYRCVAALDVHQAKLTVCVLSENDLGEVVTEVREFGGFKRDRREMAAWVASFHPELVVMESTGIYWKSPYAALEWYGLNLAVVNARHVKQVPGRKTDINDAQWLAILARSGLLRGGFVPPRQFREYRLIARQLQKLTGIASGEKNRLHKLLTDAGIRLSVVVSDVYGKSAKAMITGLLDGETPEQLLAHADPRLKATPDELREALEGDLSDSHRFVIRELMIPIDELEARILRFRQTLLKHLSDYQVILQNLQTIPGIDEFSAAMLLVEIGDDMSAFGSADKLASWAGVCPGQNESARARKGNPYVRRARHSPMRWGSRVDPGGGSSSGNKTVLPLGNLAPHRLQYAPAETRERQHAVRV

SEQ ID NO: 182135 - protein, 377 aa, unidentified
MNAIYIGVDFHARQQTICYLKTETGELVTDELKHKDKDAVRKFYAEFQGHVIIGLEASGYSPWFEAMLEQLNCEVWLGDATEIRRRARWRQKNDRRDAELILELMVHNEFPRLHRPAVVSREVLRMLRYRQKLTKIRTISKNSVQALALQAGLAKGPHLFSRSGQEELNTTLMSPAMQWQREHWLQLLTTLNQQLLETMVWLKEQGKADSRVSRLRTHPGIGLQTALCIVHSLEPVSRFRNQRKVVAYAGFDPVERSSAERKHFLGISKAGSRVLRYLTVEAAHTAIRYDEDLRRFYKRVAARRGKPKAKVAVARKLLIRAYIMLRDEIDYAEFQRRAVAAALARAIQRPPVPEVLIGQPASPGDHNPSSGRAPRLS

SEQ ID NO: 182136 - protein, 355 aa, unidentified
MKYYTSTTEFNCGIDLHARQMYVCVMDRQGKKRVHTNVKDNDFSFFLKLIEPYKHDLTVCCECMFGWYWLADACQASGLTFVLAHALYVKAIHGGKNKNDRVDSEKLTHLLRSNLIPPAYVYPADKRPLRALLRQRIFYVWRRSELLARIHSHQLAHNRLPARQTRRTRDPWEEQLLGAEDNPLRQIALKNDLTMIRHFDQQIFALEEELQRQTKKVASRDYALLQSVPGIGENLGLTILYEIGDINRFPTVKDFLSYCRLVKGTVASAGKIKGLRGARLGNPYLRWAFGEAAVIAKRDHFRIRPLAQRLEEQMNGNKFKANTVVAIKLARAVYFMLKNKTVFDPDRLVAALARN

SEQ ID NO: 182137 - protein, 410 aa, unidentified
MASAGLTCGIDWAEAHHDVALVDESGAVVAKKRVSADLSGFTELLELIAEHGGDPSGTPVAIETDKNLFVVALAAAGFTVFPINPKALARYRERHSQSGAKSDPADAATLANVVRTDRHVHRPLPAISDQALAVKALARQHQEAIWALHQTISRLRSVLVEFYPQAVKAFPKLQHHAATEILAAAPTPAAGQRLTRRRIESLLRRCGRRNDPSLVEQLLTDLRAPALRQPEPVEHALGITVEGLVRIVVAMRDVVDRLEAELAVAFDQHELAPILRSAPGLGPVLAARVLAEIGDDQARFATAAALRSFAGTAPVTRASGRSRYVKARKIRNRRLADACHWWAFATLTRSPGARAHYDRRRAAGDHHNAALRNLANKLLGRLWWCLHHHEPWDETAAWLLPEHDPATAAA

SEQ ID NO: 182138 - protein, 370 aa, unidentified
MSQSSTLFIGMDVHKDSIAVAYVAQDHGAEVIYLGAIGTRQCDIDQLVRKMQSKAKHLIFVYEAGPCGYWLYRYLMKKGYDCWVVAPSLIPHKPGDRVKTDRRDAMQLARLARAGDLTVVYVPKVEDEAIRDLSRAREDAISDLKDAKFRLKAFLLRQDIRYVGRANWGPAHLRWLSEVVCPTPAQQIVFQEYIRAVQEHTERLQRLEQELQAQVQSWRLNPVVEALQALRGVQFTVAVTMVAEIGDLTRFDTPRELMKFLGLIPSEYTSAERRRQGSITKAGNTHARRALVEGAWAYRYPAKVSRHLQLRLEKLPKVIQDISWKAQVRLCQRYRRLVSRGKHANVVTVAIARELVGFMWAIAKQVPVTA

SEQ ID NO: 182139 - protein, 356 aa, unidentified
MVMVLGVDVHKDTHTVVAVDEVGRADGERTVRATDTGHRQLLDWARRQVPQDRMWAVEDCRHVSTRLERALLAAGETVVRVPPKLMAGARSSARTRGKSDPIDALAIARAALREPDLPLARHDDTSRTLKLLVDHRDDLVIERTKMANRLRWHLHELDPELDIPARGLNRLNQLDRLITWLAQQSRPDRLGQVLARLAAELLTDIRAATVRINALEREINTLARQAAPRLMTLPGAGGLTTAKIVGETANITRFRSEACFAMHAGVAPIPASSGRTQRHRLARGGNRQLNAALHRIAITQVRITASPGQLYYQRRRAQGDTAMEALRALKRRLARVVFNLLQADTTIAINDLSTAA

SEQ ID NO: 182140 - protein, 316 aa, unidentified
MNPQVFIGLDVSKQHLDVAVRPQNRHFVTPNDDRGIKQLVKRLAALKPQLIVLEASGGYEFLVTAALAEAQLPVALVNPQSVRKFAGATGKLAKTDKIDAQVLAHFAEALRPEPRPLPDQAQQRLKAALQRRLQVVKMIGQEKNRLEKTFIPAVRQDIQAHLTWLSQRLEQLDRDLSDQIRQSPLWRDRDRLLRTIPGIGPIVSRAVIAQLPEAGALPGKKAVALVGVAPYNRDSGRFRGKRMIRGGRSYLRRMLYMAAVVASRWNPVIRAFYQRLLAAGKPKKLALTACMRKLVLILNAMVKHNQPWNQFINQVP

SEQ ID NO: 182141 - protein, 417 aa, unidentified
MPAGQQVEVDDHEQIVERVAAIDVAKASGMVCVRVPHATKQGKRLTRVWQVGSTTNQILELAEQLAGEGIERVVVESTSDYWRAFVYLLEARGLQVWLVNARDVKHLPGRPKTDKLDAVWLCKLNERGMLRRSFVPPAQIRQLRDYTRLRADLTQERSRHKQRLEKLLEDALIKLSTVATDIFGVSGRAMVEALIAGQRDPKALAELARGRLRVKHAALVEALTGQFTEHHAFVAQMLLDQIDTLGEQIQRLTTKLEQTIAAIPAATPPAGGPSGGSGAAVHDGIGAARSVPALVDPHTGEVLAALLPVVDRLDEVAGIGRHAAQVIIAEVGLDMGQFPTPGQLVSWARLSPRTIQSGATRRAGATGKGNPYLKAAPGEAATAAAKTDTFPWASATAACSGASVSSRPWSPSPAPSW

SEQ ID NO: 182142 - protein, 310 aa, unidentified
MSTEIFVGIDVSKDSLEVGVYPSQHACRMDNSEQGVEELICTLRSLNPQLIVCEATGGYETLAVGWLAAAGLPVVVVNPRQVRDFAKSIGQLAKTDAIDAGVIARFAEAVRPELRGIKDAASQELSALVTRRRQIVEMITAETNRLSVACRRSRRDIETHVRWLHKRLDQLDDQIKRDIHSGPMWRTKDQILRSTPGVGPTTSAMLISCVPELGQLNRKQIASLIGVAPLNRDSGRLRGRRMIWGGRAQVRAVLYMSALSAIRHNPLIRQFYQRLRVSGKCFKVAIVACMRKLLVVLNAMVRDQATWRHC

SEQ ID NO: 182143 - protein, 346 aa, unidentified
MRYSTTVGVDLAKNVIQVSVVNGRGKETLNRSLTRAKFAEFLGKQKPSLVAFESCATAHYWARAAQRHGHEARIIPAKAVAPFRQGHKTDSNDALAVAEAAGRPNIKEAPIKTVEQQGLQAVLRARDRLIQECIAQSNHLRGILLEFGIAIPQGFASLLRTLPEVLEDGDNELPDFYRPTLQRMYHRMLELREDIDAMTREAGELVKNHPVCSRLTALEGIGPIGAMSLYATLGSGQAFSKGREASAYVGLTPKQYSSGGRANIVGLSKKVGNRKLRSVLIQGALAYVYRMKEPRSCKDRWLKDLVERAGLRRAAVALANKNVRTAWALIAQGTEYQRRLQMEVAA

SEQ ID NO: 182144 - protein, 344 aa, unidentified
MQITTIGLDLAKNVFQVHAINGAGEVAVRKALRRSQIRRFFEQLDPCLVGIEACGTSHYWAREITKLGHEVRLMPPAYVKPYIKRGKTDASDAEAICEAVTRPTMRYVAIKSPDQQAVLALHRTRDLFVKQRTQLVNMIRGLLAEFGIEIRRGIEQALVLAKRIAVDEVPDIPRLAAKMIAGLAGQVLDVQARLGEIERELLAWHRSNDIAKRLATIPGIGTVCATALAASVTDPHQFRSGRQFAAWLGLTPLQHSSGGKERLGRISKMGDKYLRRLLVVGMTSLIRRAKYKPEAVDPWLADLLSRKPARLVTVALANKAARVVWAIMVRGGVYRRPAGVTASV

SEQ ID NO: 182145 - protein, 322 aa, unidentified
MTSSSPTNIGIDVCQDKLDVAVYETNEHFVVCYELAECVDLIERLQRLNPARIVIEASGGVEHFLVSLLAAARLPVIVVNPRQIRDFARATGKLAKTDRLDAFAQARFAAMVEPEVRPLKPKETQALDALLTRRHQLVEMTVAERQRMSQAQQQRRLEVAQDIEAHLAWLKERLAKCEAELACAIRQSPVWREREQLLRSAPGVGRITALTLIADLPELGQLEHKQITALCGLAPHPNDSGKSHGRRSTHGGRSRVRATLYMATLTAIRNNENIQTFYQRLLANGKTKQLALTACMRKLLVILNAMVKSNSPWRSDTNPQIS

SEQ ID NO: 182146 - protein, 325 aa, unidentified
MAKRITVCAGIDTGKRKLDVAIDGSCEQLQVENTAEGHKVLLEWLQRHKVKRIGIEASGGYEQPVVAALRRKRFVVVVFQPAQVRAYAKFHLQRAKNGKIDAALIAACTAAVKQIYPAPDPRLSPFAEQLTMIDQIGEDITKLKNRIETCRNERIRAVWKEDIARLAKRERTELKALVAAIRQCPDLAERLELIHSVGGAGLPTAVAILVRMPEIGQLTREQAAALAGLAPYDDDSGDQVGARHIDGGRERLRRALYLAALPASFRWNPQLIALYQRLRAAGKEHKRALIACARKLLIFVNTVVARGTPWQGEPPAARTANPSTA

SEQ ID NO: 182147 - protein, 534 aa, unidentified
MGREGRQIIGAQCPSQSLVSGVSVFNIGDVFIRQSECDPVKESSSLTPLRPQLLDESMVAKTRKREPIISHARTQSRRQQTQRILQGSISNLPPHLQHINVNAAGIDIGSDRHLVAVPPGRDAVSVRQFGAFTADLHAIADWLEQCGVTTVAMESTGVYWIPLYEILEQRGFEVYLVDARRVKNVPGRKSDVLDCQWLQELHTYGLLEKAFRPAEEICVLRGYLRQKEMLVQTAAMHIQHMQKALQQMNLLLHNVVSDITGATGLRILRAIIAGERDPQVLAKERDPHCRNSGATIAKSLVGNYRPEHLFALRQAVELYDIYQTKIADCEAAIVTYLEQRNHRTEDEPPPPSKPIPARDRLRGGTDVQAQLYKMTGVDLFAIPGLAADTLLTLASEVGLDLSPWQSEKHFTSWLALCPGTKKSGRRVLSRKTRPSTNRAAQAFRMAAATQARAQTALGAFYRRIRARSGGREAITATAHKIARIFYAMLKNGTAFVEIGQAAYEQQFKERRLRSLTQQATALGYQLTPIAAGSF

SEQ ID NO: 182148 - protein, 342 aa, unidentified
MKDMMIGVDLAKAVFQVHGAHRTGEVQFRKKLTRKQFPAFMAQQEPSMVIFEACGSAHHWAREMGALGHEVKLIAPQYVRPFVKRQKNDAADAEAIVIAARQPEMRFVTPKTVEQQCRAAVFRGRERLVHQRTADVNALRALLYEHGHVFPAGILHLDRMTALMEDEASDLPDLIREECRDLLAQIAEKTARIIGRTKKLKMLAAQSDRARRLQTMPGVGPLTAIAVEAFGPDMAEFKTGRAFAAWLGLVPKQHSSGGKERLGRMTKAGQADIRRLLIIGAMSRLNWLGQRTITEGSWLARMLARKPKMLVAIALANKMARQVWAMLTKNEDYKDPALAVAA

SEQ ID NO: 182149 - protein, 358 aa, unidentified
MLERTMVGLDVHARSVLGGVLDCETGEVFSRSLAVSDAAIIDWLRQLPQPVAVTYEAGPTGFRLARALADAGIRCVVAAPSKLERPAGDRVKTDRRDAVRLARLLRIGELTPVRVPGEVEEAARELVRAREDARTDLMRARHRLSKLLLRQGLVWQKSAWSREHGVWLNQLTFDSAPLMLSFDETHWAVQQATSRRDRLNEMIETAAEEEPWRAIVGRLVCLRGVSTLTAFGLAVEIGDWQRFTGNTIGSYLGLTPSEDTTGQRRSLGSITKAGNVHARRLLVEAAWHQRPEYRPSQALLARRVGQPVAVRERADLANRRLHRRWRAFDKRHKRSTIAAVAVARELAGHCWAIATMDA

SEQ ID NO: 182150 - protein, 337 aa, unidentified
MMYSGIDLHSNNSVVAVIDDGDRVVAQKRLPNDIGKITGFLARWQDELAGVVVESTYNWYWLVDGLQDAGLHVHLANTAAVKQYEGLKHSGDETDAQHLAHLLRLGILPTGTILPREHRVVRDLARKRMQLVQSCTTHVLAVENIMARQLGGRMTSNQIKRLTDDTIDSLPLAADVGLAIKANVAVIATLQSQIELLEKRLQERVRPRPQYALLTTVPGIGQTLATVIALETGPIDRFAEVGNFASYARCVDSVHTSNRKKKGEGNVKNGNKYLAWAFVEAANFARRFCPEAKRFHERKKAKTNNIVATKALAHKLARACYHILKEGKPFDVTRCFA

SEQ ID NO: 182151 - protein, 347 aa, unidentified
MRFFNDRHQFYCGVDLHARSMYLCILDEDGQVKLHKNIKAEPDAFLEAIAPFIDHVVVGVECIFTWYWLADLCAEQDIPFVLGHALYMKAIHGGKAKNDRIDSHKIAVLLRGGTFPMAYVYPAEMRATRDLLRRRNYFTRKRADLLSHIQNTNSQYNMDPFPERITYKKHREGIADQFIDPDIRVSIEADLDLIDHLERAKQKLELYILRNAKQHDPQAIYRLRSVPGIGPIISLVILYEIGNIERFARVQDFASYARLVKCAKESAGKRYGHSGGKIGNAHLKWAFSEAGVLFLRNNPEGMKYRKRLERKHGKAKSLSILAHKIGRAVYYMLKRDQAFDLGRFVQV

SEQ ID NO: 182152 - protein, 402 aa, unidentified
MVDGPTRFFGLDIHKEYFVAVGVNLQREVVFGPQRVSNYQLDEWVARVLTIQDSVVLEMTTNTYLFYDTLVPLVHSVIAVHPPNVALVTNVKVQTDKKAALALAQLHAAGLLEGVWIPPQEVRDLRALIARREKMVRLSTMAKNRLHSIIHRNHLILPEKPFDPEQHSWWESLSLSSTEQFLVRSDLDTLEFAQKQVAQAEECLKKASAQDERIPLLVQLPGVAMLTAITILAAIGDVTRFPNAKKLVGYAGLGTRVHDSGMTHNSGRITKTGRKDLRRSMVNAANHAIEHHPHWKKEFERLELHLGRSKAVVAIARKLLVAVWHVLSEKAADRFADPANVARSFFTYAYRVGVRNLPEGRSALSFTREQLDRLGIGQDLLEIPWGSKPHKLPASKLLPEKE

SEQ ID NO: 182153 - protein, 426 aa, unidentified
MINAALERCAGIDVGKKFLAVCIMTGPLDQEPRVERRRFGTITAELESLRDWLQAEHVTHAAMESTGSYWKPVFNVLEGSLKVCLAKPQEVQNRKGHKTDDKDGWWLAHLLRHAMITPSFIPPRPIRELRDLTRRRKRMLGDATAEKNRVQKVLEDANVKLGSVLTDVFGVSGQLMLDALLEGKAQPAEIAQYAKRGAKKKIPEIILALEGHRMSDHHRQMIRYSLKHMAFLEEQIAELDQAIRAQIQAEGLDQDWQLIQTVPGIQERSAASILAETGADPHQFPSAKHLSSWAGVCPGNYRSAGKNSHSRTTGGNPWLRSALTECAWAAAATKNCFLRDKFWSVRSRLGGKQAPALIAVAHTMLTLIYRTLETRQPFQDRKAPLLDEPQRQRMIRHHIRRLGKLGITIHRMASGPATGKAPTPAD

SEQ ID NO: 182154 - protein, 337 aa, unidentified
MSYLGVDLHTNSFTVCRRTKQGKNSIGTFPIVRIADFRKTLRKRDLVAVEATGNTAWFVSQICDRVKKVTVVNPYQFEVIRRSVKKTDKHDARTLAFFLSKDMLPEARMKTKENAQLHSLATTRDKLVKQRTALINKIHNVLNSYGIKFKKESLGSEKGLKSVWAYDWDVIVRIELEALIDQIRSLNKSIKTLDKEMSNHGQKLKGHKNLTSIKGIADRSATVLLSVIGDVNDFANENKLAAYFGIVPRVSDSNETVRHGRITKHGSKLGRTTLVQCTLVAKRYSPYLRQYYERIKSHRGSGKAIIATARKFLAIIYNTLKNDWIFEDFPNFVLVNS

SEQ ID NO: 182155 - protein, 373 aa, unidentified
MTIRQRSTFSTSTGPPARGEVVLGVDTHGEVHVAAVVCSLGQTLGIKSFPAAAAGYRRLLAWVRKLGTVRRAGVEGTGTFGAGLSRYLLAQQVVVFEVNRPDRSARRLLGKSDPLDAQAAARAVLSGRARARAKTGDGPVQSARMFKIAKDSAVKARTQAINQLKAVLVVADPPLRERLSGLGNRELFRTCARLSPCEGEADGSDEDPVAEATLMTLSMLAQRIEQLTGQIDELNQRLTGFVELHAPQLLAPVGIGPDSAATLLITMGDNPERLSTEASFAALCGVSPIEYSSGGRRSRRLNHGGDRQANAALHRIVFTRLRHDRTQAYYERRTQEGKTRREIIRCLKRYAAREVFNLVRTVSTDPRYRGVRD

SEQ ID NO: 182156 - protein, 325 aa, unidentified
MDVLGIDVAKATLVVVLLVGERQQRAEFANTSAGHTKLLRWLAKRGAAPVHACLEATGTDGDDLAQALYDAGHTVSVVNPARIAAYAKVQAARHKTDQADAALIARYCQREQPAAWTPPPPELRELRALVRHLDTLQQQRQAEQNRLGAGGHPSVVTQAIQAHLTFLSEQIATVEQQIAAHFDQHSDLKRQRELLDSIKGIAVRTATRLLAELGDWKQFTNARAVVAYAGLNPRQYRSGSSVQRRTRLSKSGNAAVRAALYFPAIVAKQHNPLVQALCARLTARGLCPKAVSGAAMRKLLQIAYGVLKSGQPFDPKYAQAASGHA

SEQ ID NO: 182157 - protein, 327 aa, unidentified
MFYLGIDVAKAKLDCCLLDMTNGKRSTKVVANSRAGLTDLLGWLDKRHTEPSHVHVALEGTGVYHEMAACGLHDAGLSVSVVNPAQVRAFATGMGVRTKNDIVDSHVLARFAMHARPMRWSPPAPEARILQALMARREALAQDLQRERNRYEKAEITAPTALVLHSILETIEFLERHLASLQREIDDHIAAHPSLKANLMLLQSIPAVGPQVGRTLLAIMHARHFDSAQQLAAYLGLVPVQRQSGSSIQGPSRLSKAGPAKVRATLYMAAVVAKRYNPHIKTLCERLAARGKSTMSIIGAAMRKLVHLCFGVLKTRQPYRANYVAIA

SEQ ID NO: 182158 - protein, 412 aa, unidentified
MDVRYAACCGLDVHKQTVVACLIRAGAGGRRTKEVRTFGTTTDALLALGDWLRDAGCTHVAMESTGVYWKPVHHVLEATCEVVLVNAHHVKAVPGRTTDVADSAWLADLLQHGLLRPSFVPPRAQRELRDLTRTRTKLVDERSAAVKRRQAVLEDANLKVAGVATDIMGAAGRAILAALREGTTDPVALAALAKGRLRRKRDQLERALRGRLTDHPRLLLALHLRHVDFLDEQIDRLSQEITRRLEPVADQLARLDAIPGVGQRTTEVLAAEVGLDMTRFPSAGHLASWAGMCPGSYERAGKRKGGKTRKGSRWLRRALVECAYAAARMKDTALAARFRRLVVRRGPKAAAVAVGHTILTLVYALLAHGELSQEPGPAYLDQRRRRRAQQRAVDQLRALGDEVALTAAQTVA

SEQ ID NO: 182159 - protein, 324 aa, unidentified
MLPTLGIDISKDSFHVELSVNEKLRHRKFSNRKEGFAELRAWLTKHKVAQVHACLEATGPYSEALAHYLHEQDHIVSVVNPAQIKAFGQSELLRNKDDRPDAGLIRRFCEKQQPARWTPPPAHLRELQALTRHLENLHETRQQQQNRLEATSAKSVVKSLRKLVTHLDAEILRTEQQIADHIDSHPDLKQQCQLLESIPGIGQRTAAKLLAEIEGISHYQSARQVAAYAGLTPKNKRSGTIRGRTRLSKTGNSRVRKALYLPAIVATRHNPIVSAFCHRLAQRGKTKMQIVGAAMRKLIHIAFGVLKSGKMFDPNHELLLKSVS

SEQ ID NO: 182160 - protein, 425 aa, unidentified
MTYRIAGIDVHKRMLAVVIADVAVEGEYQFERRKVGTSPSDLCRLAEWLVAEQVEEVVMESTAQYWRPVWATLEQRWRPKLRESAGARSGQLHLAQAQSNRGAAGRKKDFPDAERLVKRLVAQELKLSFVPDVEQRLWRTVMRRKHQLTRNRVQFQNRLECLLEEAHIKLSSLVSDLLGKSARYMLQAVAEGETNPETIVALADHRLRATAPQLRDALGACRDLHPVYRQLLKMALEELKLMEEQIDKLEQEMASLLSAQQDVVQRLAEVPGLGVDSAQQIIAEVGPEATAFPSAKHLASWVGVCPGEEESAGVNYSHRSPKGNRQMKGLLNQASNAAVKTKGSIFEFIYRRLVPRLGHAQAIGAIAHRLCRLIWMILHQAIRYEERGPAVSRSTTERRAAKMIRELRRLGYRIEPVACKAGGSV

SEQ ID NO: 182161 - protein, 368 aa, unidentified
MKEQQNTVPRFVGIDLGKRTYEMAIVGKGGKVTKSNGKTFVAGRQSLYRKLRPADKVALEAGNLAFIMAKEIEAAVGCRVYVLNPSQLALIYGSMKKTDKEDSLKLAHILEDCREERLPVVPVPDEREMRRRKLIASYRRAQASRNRAINQLHGLFVAQGITTKVRKDLSTAEECGKAIQELTGIERQEAGYLVESLVLCEKQLAVLEQQMEAESAGDERIELLQSVPGVGPKTALAFMAHIAVERFSNASQVSNYLGLVPRVYISGETVRYGRITKRGNGYLRALLVQAAWALTRTKAGGTLKARYEYMTKEKSVSKKKAIVAVARRLAELLYTMLKEGTRYEARPFQPERKKVETGETLAQLAISA

SEQ ID NO: 182162 - protein, 409 aa, unidentified
MEIVHPRCAGIDIGKRSLTVCVITGDPSGEPVKETRTFRTLTRDLLALADWLDERGVTAVAMEATGSYWKPIWNLLEDRFELLLANAAHIKAVPGRKTDVRDAEWIAELFRHGLLRASFIPPRPERELRELVRYRTSLIRERASEINRLAKVLEGANIKLGSVSTNIGGVSGRAILAAITEGTDDPDTLAQLAKGRLRNKHEVLVEALAGSVGAHQRFLLAAQLRHLGDLDALIESLDTEIKERLRPAQKLIERLSTIPGVGGRTAEVILVEIGQDMARFGSSRQLASWAGMCPGNYESAGVQRGGKTRRGSPWLRTALVGSARSASRTKTYLGAQYRRLAARRGAKRAFVAVGHTILGMVYAVLTSGRPFDDLGVTYFDRRDADHVRRRLTRRLEALGYVVTVAPRAA

SEQ ID NO: 182163 - protein, 353 aa, unidentified
MKQGTQLDFSGQKIFAGIDVHKKSWKVSIRSEHMELKTFSQNPSAQELSNHLKQNYPSAIYQVVYEAGFCGFSYQREFSKAGINCIVVHPADVPTSDKDKHRKSDTVDCRKLGKTLSEGSLSGIFVPDVEQQDDRGIIRFYQQMVKDQTRSKNRIKGWLHFQGITIDGDNKHWSNNFIKWLKELALTPMARLHLDLLLESYGQVRNMVLTATKQVRILSMQGRYQKRIEMIRTIPGVGQITALLFITEIGDINRFKELDQLCDYVGLVPNMHGSGDTEAVLGLTHRGHHQLREKLIEASWRAIRLDPALTLAYNDYLKRMNKNKAIIKIARKMLNRIRFVMKNQKDYVTAVVK

SEQ ID NO: 182164 - protein, 468 aa, unidentified
MPAGQQVEVDDHEQILERVAAIDVAKASGMVCTRVPHATRAGKRVTKVWQVASTTNQVLELAEQLAGEGIERVVVESTSDYWRPFVYLLEARGLVVWLVNARDVKHLPGRPKTDKLDAVWLAKLNERGMLRPSFVPPAQIRRLRDYTRLRADLTADRTRHKQRLEKLLEDALIKLSTVATDILGVSGRAMLEALIAGQCDPKMLAELARGRLRVKHAALVQALTGRFDDHHAELARMLLDQIDALSGQIDQLTSRIEQTIVAIPAAQPAASSPGGGPGAAVQAASQSTRSAPGAVDPETGEILAASLPVVDRLDEVAGIGRHAAQVIIAEVGLDMGQFPTPAHLVSWARLSPRTIQSGTTRRAGATGKGNPYLKSVLGEAATAAAKTDTFLGERYRRLVRRIGKRKALVAVARSILVIVWHLLADPTARFHDLGADYHASRIDRDRRTRNLVHQLQALGHKVTLQPAA

SEQ ID NO: 182165 - protein, 483 aa, unidentified
MKDRRLVGIDLGIASAHTVRVLDGEGTMVAKRKAVPTMESLREIETVALAGAAAGTRLEVVMEPTGPAWLPIAVFFTARGHLVYRVSSVKAADLRRFLSRHTKTNGIDADTLARLPLFHPAGVVPLELPNAERAALDRRVRATDRLTRAVAQHKVRVKDLVRQLLPMTPLTGEVGVADLAVLERTGGDPNALVKLGEKRLTALIAKASHNHQGAERAQQWLDAAKASLALYADHPAVAFSDLAAEVNTEVRLLRAAQSELTVHADERERCYRWVDPLGLARTVPGLAEVGGPALVACMGDPHRFARGKQFRKFTGLVPKASETGDTDRKGQPMSKAGSSLLRTTMVRAADHARKQDPQLARIYYVQMVERGKGHLGALCVVAASLAERAWAVMHRQMPYVICDTDGRPVNPQEAKTIIAEHWTVPTETRARRRHKKAGKAPQKALTGQSNPHARSAGTRGDLPHPASSPPPRGTVKQHAATTP

SEQ ID NO: 182166 - protein, 381 aa, unidentified
MSAATRRDEFSEETVLFMALELSNKTWKVGTTVSPAQKARTKNVAAGDLEGLRKEINRSKRRFGVAEDSPVVSCYEAGRDGFWIHRWLESEGVINAVVDPASIDVNRRKRRAKTDRLDVFKLISNLMRWWAGEKKVWSVVVVPSVEDEDARHFHRERQTLKKERTAHINRIKGLLKLHGIGLDRIEKDFESGLCELRCADGGLLPPQLQQRLAREYQRLVVIESQIELLARQRREALRGSSDGRIAKVRKLTELRGAGEVGAWILVMEIFGWRFFQNRRQLASLVGLTGTPSDSGDSNQEQGIDKAGNALVRKILIEMAWSWVRWQPNSEITIWFNRRFGGAGKRHRRVGIVGVARRLLIAYWRYLELEVEPKGAIIVKNS

SEQ ID NO: 182167 - protein, 459 aa, unidentified
MGKAKACKGGKNQLQVIHPRAAGIDVGSKFHVVAVSAEYDPDPVRKFNSFTTDLHRLADWLKAVGVTTIAMESTGVYWIPVFEILESRGFDVILVNAREAKRVPGRKTDIKDAQWLQQLHQYGLLSASFRPGEKIASLRSYLRHRERLTEYAAAHIQHMQKALMQMNLQLQHVVSDITGDTGMRIIRAIIEGERSATKLASYRDPHCKQSEKTISAALTGNYRPEHVFSLKQAVALYDFYQKQIKECDQEIEKALAALNSDKNPPSEPLPKARRTQKQKNEPGVPIREMLYTLTGVDSTQINGIGPYTTLRLVAECGTDMAKWPTSKHFTSWLTLSPGNKISGGKVLSSRTRRTKNRATTLLRIAAVNIGKTQTALGAFYRRLAARVGKAKAVTATARKLAVLFYTLMRYGKAYVEPGADYYERQYRERVLRALSRKAAALGYRLAQKQETSPVTGNVS

SEQ ID NO: 182168 - protein, 334 aa, unidentified
MQTATLIGIDLGKYSFHVHCQDRQGNALLRKKFSRSQLATFLATYPACTVIMESCAGAHYMARTVSQLGHRVKLIAPQFVRPFVKSNKNDFVDAEAICEAASRPSMRFVTPRTEDQQAMSALHRVRSSLIRERVKTTNQIHAFLLEFGISLPRGSAVIKRLPSVLEENGIPPDLERLLARLHTHYGYLSEQIKEIDNELKTHLNEDETAQRLLTIPGVGPVTASLLATRLGDGKNYASSRDFAASTGLVPRQDSTGGKPTLMGISKRGNKVLRSLLVQCARAFMRRLEHNSGRLAEWVKKQLASHHSNVVACALANKLARIAWAVTAHQTEFSK

SEQ ID NO: 182169 - protein, 425 aa, unidentified
MRAIGLDVHLEFCEVAIAERDEVRSAGRIETKPEEIELFARSLGADDRVALEVTGNAWEIKRLIEPHVAEVIVVSPTDTGIRGARAKTDRLDARTLAKLLASGELEAVWMPDRATQVMRRRLQRRNQLIWGRSKAKNQIHAVLMRQLIGRPPFSDLFGKQGRHWLAELELQVEERESVDSALRQIEFLDAEIEAVERLIATDALNSAEIRRLMTAPGVNVICAATFVAAIGAIGRFESPRRLVGYLGLDPRVRQSGTSPATHGRISKQGSSAVRHALVEAAWSVVRQPGPIRAFYQRVRSRRGHQVAITAAARKLAALFWCLLTREEDYAYGQPSLTAKKLRLLEIRAGSKGHKGIYTGTFVTRQRMRAAEKELASQAEAAYRRSVRDWHAAQTKKGAGATPGRASCGPSSGQAARQETAPNPAL

SEQ ID NO: 182170 - protein, 401 aa, unidentified
MKKFKPERHCIETASALEVVSSAGPQESHAAYVGLDVHKDSIAVAVAEPGRAEPVYRGEIANKPKSVEKLVAKLGEAYDGGLLQFCYEAGPCGYVLYRQLLACGHDCQVVAPSRIPRAPGERIKTDRRDALKLARLLRAGDLTAVWVPDREQEMMRDLSRARDDMKGQERKARQQLNAFVLRHGHHWPRGKSRWTPTHYNWLESLRFEQPWQQVVLQEYIDATKAASARVAQLSDHLMQALPEWSLAPVVDSLIALRGIDKLAAIVLLAELGDISRFNSPRELMAFLGLVPSEHTSGARRRQGGITLTGNGHARRMLVESAWSYRFPARQTMHLKRKAAHASEPAKAIAWAAQKRLCARYRTLTRAGKNTKVVCVAIARELAGFIWDIVRHEMPRLGLQEG

SEQ ID NO: 182171 - protein, 353 aa, unidentified
MHTHQRSANPIATIGLDIGKNTFHLVGLDKRGAIAMRFKVSRSQLIRRLVNLPPCLIGLEAGSGSHHIARQIQPLGHDVRLIPAQYVKPFLKGHKNDYRDAEAIAEAVQRPTMHFVAIKTPEQSDLLSHHRVRSRLVRQRTAIMNQIRAFLIERGITVRQGPRALRKVLPEVLSSPPEALSPRILRLIAELDQDWRRLDERIQVVSAEIESLSQNDAACQRLMTVPGIGPIISSAVVAAIGTGSGFKQGRDFAAWLGLVPKQESTGDRTKLGRISKRGNKYLRTLFVQAAHVVIERRPAAAMRALWPWIHQASKRLAHRNLLAIALANKLARIAWAVLARGRDYQPRITPNAA

SEQ ID NO: 182172 - protein, 364 aa, unidentified
MVLTNQKAREKSSRYVDYRCDYHPSFQQIAFVDTDAGELQERRLEHREEAEKFYRELAVQGMKVRVGMEASGQARWFERLLAELNIELWIGDATEIARKRERKQKTDRQDAQHILHLLLKEDFPQIWVPSWENRDLRQLLWHRHRMVQARTRIMNQLQAVALNEGVRCKKRLWREKGREQLESFRLAPWASRRRHDLLEWLDRLNPTIGALSQAIEQEVEKCPEAQRLRTHPGVGPLTALAFVLIIGKPDRFQGGKQIASYLGLVPLEDSSGNRRRLGHITKQGNSLLRFLLVEAAQVTARSLPEWRSKYVHLTMRRGRKIAKVALARKLAIRLYWMMRKGWDYEQLKKFGSHAGQPGNRDGVK

SEQ ID NO: 182173 - protein, 356 aa, unidentified
MKNSKLDFRGQTISVGIDTHKKNMVITPRCQGMQLKTISMDPEPAQLVRYLHKNYPNARYESVYEAGFSGYWMDRKLREAGIKNIIVNPADVPIKQKEKRKKTDKIDSRKLARELSAGNLEGIYIPSEEHEAIRALSRLRKQITKDQTRQKCRIKSLLNFVGITLPENSELKHWSGKFIKYLSEIEFKHKAMKITLERLLESLINGRQILLGIVKNLREIVKEDTEMKKITEYLQSVPGIGFITAITLYTEIMEIKRFGKFDELSSYVGFSPSTDSSGEKDKVIGLSKQQNKYLRNMLIESSWLAIRTDPALLQAYGNLVRRMSKQKAILRIAKKLLSRIMYVWRNEKHYVCAVVS

SEQ ID NO: 182174 - protein, 347 aa, unidentified
MNFYHSTHRHYCGIDLHARSLYVCILDQQGEVLLHKEIKAQPELLLATLEPFRDDLVVGVECMHCWYWISDLCEEHGIHFILGHALYMKAIHGGKTKNDRIDSFKIAMLMRGGNFPLAYVYPKEMRATRDLLRRRTRIVRHGAMLKAHAVNTLGQYNLPPSKANLNNPGGRSQLTAAFSDPDVQRNIDLDLAIVDCYQHELKKLEWHLEQQAKQHDPASLNVLKTIPGVGRILALTILYEVGDIQRFESVQKFASYARLVKCKAESAGKVYGTQGNKIGNAHLKWAFSEAAVLFIRNNDKAKRYVEKLQRRMNKPKALSALAHKLGRAVYFMLKDKRVFDEERFLRG

SEQ ID NO: 182175 - protein, 405 aa, unidentified
MTSPRRVVIGVDTHLDTIHVAAITDTGQLLGDAEFRTNPTGYWAAITWARSFGEVVSVGVEGTSSYGAGFTQALHANGIHVVEVNRPDRAARRRQGKSDPLDAYSAARTVLAGHGLAVPKDPHTGALRALQTARRGAVKARTAAIQQIKDLLITAPADLRERYRRYSTTFRLVQALLKCRPSAHDDPTTVSVLIACKALAQRIEFLEHQTNELTDELDTLTTALNPALRAAYGVGPDTAAQLIITAGTNSHRLRSEAAFAMLAGVAPIPASSGKTTRHRLSRGGDRAANNALHRIALVRMSHDPRTRDYVARQLTAGRSKKDILRLLKRAIAREMFKHLTAPCPIDDYSDLRPTRQAKNITLTAAANHFGVWPITISRLERGLKRDDTLAANYRHWLNTHLIDAA

SEQ ID NO: 182176 - protein, 340 aa, unidentified
MKIIGCDLHAAQQTIAMLDRETGEIVEKTLRHQAGAVREFYAGLPAPVVVGLEATGSMGWFLQLLDELGVTYRVGHPATIRKAEPRKQKHDRRDAALLLQLLADNRFPAIWIPSTELRDLRALLLHRHQWVRLRTRVQNALHAIALGYGVQRGHALWKRDGQTMLASLPLPPHASHRRDELQALYQHLDEQVGGLDDRVKHAAAQRPRATDLMTHPGVGHVTALATEVFLGDPSRFSDGKTLASYVGMIPSEYSSGNRQRLGGLSKQGNPLLRFLWGEAAMHAVRRDPELRRFYQRKLHQKGLGKARMAAARKLGIRLWIMLRDQIDYLEFCRRSPRRQP

SEQ ID NO: 182177 - protein, 354 aa, unidentified
MIIIGADYHPGFQQVAYVDTDTGELQERRLEHREDAEKFYRDLAAQEVKVRVGMEASGHARWFERLLAESQFELWIGDAAEIRTKRVRKQKTDRQDAQLILRLLLENRFPQVWVPSWENRDLRQLLWHRHRMVQGRTRIMNQLQAVALNEGLRCKKKLWRDAGREQLESFRLAPWASRRRHDLLELLDRLTPTIAELTQAIEQEAENCPAAQRLQTHPGVGALTALAFVLIIGRADRFECGKQIASYLGLVPLEDSSGQRRRLGHITKQGNSLLRFLLVEAAQVTVRNDQEWRNRYFHIVLRRGRKIAKVAMARRLAVRLYWMWRKGWIYEQLKNFGSHAGEPGHPDGVQSSTE

SEQ ID NO: 182178 - protein, 338 aa, unidentified
MVLFQFFVGVDMASETFMACVGTTPWKLTVKPVQFDNHEEGFVSFLNWLKKHNLTSERTVVCMEATGVYSEGLAYFLYASGYPVVVEPPLNIQRKFPANASKTDELDCQYIAEYACRYADKLSFWKPRAEILEQVKLLLTTRQHFSVQLTGHKNALHAINRKKVSSDLAKHVHQNMIEQISKHIKAIDQEIRRLIDSDPTFKQTLLLLLSVPGIGLQLAAHLLIAMQETLDPRVLAAFIGICPIKHESGSSIYSAPTSRHYGPPAIRKLLYLAACSVRTHKMPFRLYFFRKAAEGKHKKLILNNIQNKILKIACAVVRSQKPYVSNYVSVNPLVLKKA

SEQ ID NO: 182179 - protein, 412 aa, unidentified
MRLFAGDDWAEDHHDVEVMDQAGKVLARKRLPEGAAGMAQLHALIGQFVPEDDTDGTEVVIGIETDRGPWVAALIAAGYTVYPVNPLQASRYRERHGVSGARSDAGDAHMLADMVRTDSRQLRSAAGDSPEAAGIKVLARTHKTMIWERTRAVQRLRHQLREYFPAALEAFDGLDAADTLELLGRAPEPARAARLTRAQVSAALKRARRRNIKDKTDAILAALRSEQLGQPEALTLAYAATVRSLIAVITVLNEQVKALQGQVEEHFGRHPDAEIYLSQPGIGKVLGARVLGELGDGPARYRDGKARRNYAATSPLTRASGKKKVVAARFIHNDRLVDALNAWAFSSLNASPGARAYYDELRARGIEHNDALRRLANRLVGILHGCLKTRTLYDEAIAWGHRQNLPQSSVAA

SEQ ID NO: 182180 - protein, 338 aa, unidentified
MFSQLIIGCDISKDHINFCVFLNGTVIQNIQIDNELKSLRCFVKRASSFSNDLDLGLDSVDPIFIMEFTGIYNNLLLEVLHNQSKTCYVVNAIEIKNSLGLTRGKNDIVDAQRIAEYAYRFHDKLSIWVPLEANILKLRGLRTHRSQLIKVRKQLTQGAQDNKKFLGSDVFKVIDKSNSKIEKILNEQIDAVDQKILETIKADLKLKTNYDLLTSVPGIGPITASALICVTNNFTRFDSAKKLSCYCGVVPFEKSSGNKIGKPRLSHAANKDLKALLHLGAGSILNSKHFLGQYYRRLVADGKHKTLARNNLKNKMLNTAFACVKKQIPFQIDYQYSA

SEQ ID NO: 182181 - protein, 361 aa, unidentified
MNTSALKTIGVDLHKSSLTATVLDPSGAVLERREIPTKCRHQIANYFTAHGPEVQVAVESVGFYHWFWDTVKPRVRKLHLADPAGVRACAGRRTKTDRNDSLLLAELLRDDRLPMAYVPEEPIRALRELCRHRHRLARQLALARRHLRWIGLKNNLPGPDTFTSDRAQKWLLSQDAKLNPAHRLSGRQFVDQITSLERQLADVETVLKDTIATHADLAPTLALLQSVPGIGFITALTILCECGDITRFDSIDQLSSYAGLCPRVTQSGESAHHGHISKQGPPQLRWVLQQAAWVAIRCDPQARKIYARIAKRAGSKKAATALARKLLSYSWSVCRRGQPFVWPNTETKAGTGPVPVWSYDI

SEQ ID NO: 182182 - protein, 402 aa, unidentified
MTLYMGIDVGKRKHTALVINEHGQRVVKAFTFANDRRGIEQVLAPLRTLTEPVEVALEATGHYWLALFAQLTQAGYHVHVFNPLQVHAYQRSGIRQCKQDRIDAFWIADYLRIGGVGSNTDQLETHLQLRQLARFRASLSDQIGDAKRRILAVLDQVFPEYATLFSDVFVATARQLLAEAVLPQEFASFDLEELRQRLHAASRGRFGADKAATLQATARASIGVAFLADAARVQVSCLLEQIALLERQLADLDAQIARLVATLPDQYLTTIPGVSVVTAATLLGEIGSVDRFDTLEQLVAYAGIDPSVYQSGAFEAEAAHMSKRGSPYLRRALWVAATAARVHDPELRAYYAKRRAEGKAHGTVMGAICRKLLARIYAVLRDGRPYIIRVAQHSHPEPLDFS

SEQ ID NO: 182183 - protein, 316 aa, unidentified
MTPSGTFVGIDVSKAQFDVAVRPTGEHWTSAHTEAEITMLVARFVSLRPTLVVLEATGGLEISLTGACATAGVPIVVVNPRQVRDFAKATGHLAKTDTLDAQVLAQFAEAVRPTPRPLPDVQTQELAARLTRRRQLVEMLVAEKTRRGQASSPIQKQIQVHLTWLQRRLRALDEELATAIRSSPLWREKDELLQSIPGVGPVLATTLLASLPELGLLSRQQIAALVGVAPLNRDSGTIRGKRTIWGGRAHVRATLYMAAIVASRCNPMIRVFYHRLCAAGKAKKVALTACMRKLLTILNAILRTRRPWQDRWAPEA

SEQ ID NO: 182184 - protein, 406 aa, unidentified
MIFVGIDIAKRSHVASAVDEDGGTVVESFKFNNTASGFAKLLKRLRKADATPENSLVGMEATGRYWVALFDFLSSHGYEAAVINPVQTDAFRDVWTVRKVKTDALDAAMIADLVRYKRYSPSALGDEATEELRNLARYRLSLVERSTALKNRATAILDRTFPELAGLFSNAYCPTHRELLQHCATPDQVLGTDVGTLERILREASRGRCGRAKAERLKALAKESVGVGFGSKTLAFEARLLMEELDFVQDQVKEVERELARLLERTQGKWLVTIPGIDVALASVIAGEIGDPNAFDDPHRLMGYAGMDPTRSESGETVRSDGHMSKRGPGALRWAFMQAADCARKNDPYFGDYYDRKRGVDGKHHYVALSGVARKLMGVALAVMKEGRPYEPAPPRNHRPGHLKEA

SEQ ID NO: 182185 - protein, 382 aa, unidentified
MHKDSVYLCILRENGEKIERVYGVLTPQLDSMRDFMAENEVSEVAMESTSVYWIPIWRVLVDSFELKLVNPYFIRQLPGRKSDVKDAQWIAECVMKELIRGSFIPPPLVQHLRLYDRRMFEINTELVRKYSKIDAILQRCNIRLSNYVACTDCKSYKAVVKQISEGVTSPQELLRHVHKRIINKHGEDTILAALTGVVSEAEIDMLAQYVAESALLENNKNKCIEKMREICNREFEEQMKNLQTIPGVSERSAMTILAEIGPDVNAFPSAKHLVSWCGFNPRNDESNKKIKSNKITHGNRFIRIASVQCAWAASRTKDCYFSKFYAFHTQVRKKFKLKVVVAVARKVLVCIWHILKFNVPYKDFVPQKPAIEDCTQLAYSKL

SEQ ID NO: 182186 - protein, 388 aa, unidentified
MQTVADRPEAPTAIRTDLGAIFVSLELSRSTWLITSLSPGGGEKMSKQVVRGGDVAGLLERFARLREKARARTGKVFPFVVIQEAGLDGFWIDRALQNEGIESHVVDPASIATSRRRRRAKTDGIDGEVLVRALLAYKRGEPRVCAMIKAPTPEEEDRRRLCRERKVLIVERVRHVNRVKGLLFSQGISGYEPLRRDRRRRLDTLQTGDGRLLPVHLKAQVCRELDRLELLLEQIKAVEAERDVLLAAQQVAAPAPAAMLLDIKGIGPEFAAILWSEGLFRHFDNRRQVASYAGLAPTPWQSGSVDREQGVSKAGNPRLRTTLIQLAWLWLRHQPHSALALWFEERVRRNGGRLKKTTIVALARKLLVALWKYATAGVVIEGAVMKRT

SEQ ID NO: 182187 - protein, 412 aa, unidentified
MTHYKQNYIYVGLDLHKAHHTAVIINCWNERLGEIQIENKPSAFDDLMKFIKKYCSKGLTPIYGLEDTGGNGRALAIYLVEKKHIVKEVNSALSYSERMSHATTQKSDSWDAFCIAKVLLSRLDELPDANPQDIYWTIGQLVARRNALVKNASSLKNQLHQQLSYHYPSYKKFFCDIDGKAALAFWKNYPAPHHLKSVEKEDLAAYLREESNNTCSTRKAEYILELVKKDGETRRNYQDSRDFLVMNMVTDMKRSRKLIKDTEGQLRQIMSQLDYKLETMDGIDIVTASQLVAEIGDIRRFSNANKLARFAGIAPVRFSSGSKGKDQASGQGNRMLNSIFHNLAVQQIQVCKGSRKQRNPEFYDYYRRKLAEGKTKKQALICIMRRLVNIIYSMMKNKTEYRAATLTKHQVS

SEQ ID NO: 182188 - protein, 370 aa, unidentified
MMGWTPRPTASMCQSGGVEHHLREASVSEVIIIGLDIAKHVFHAHGADERGRAIFSKRISRGKLLDFFAAQPSCMVALEACGGAHHWARQLTQLGHEVRLIPPAYVKPFVKRQKNDAIDAEAICEAAQRPSMRFVAVKSEQQQAAGLVFRTRDLLVRQRTQLINAIRGHLTEYGWVAPKGPSHVTMLADLIEEEEMARSLPEAAHAMFRLMLDLFASLNGKIADLDKEIARRAREDEVSRRLMTVPGIGPISATAIAALAPPVETFAKGRDFAAWLGLTPLQRSTGGKQKLGATSKMGERTLRRLLIIGSSAVVQQVSKRGAPKGSWLEQMLARKPRMLVTVALANKMARIVWALLVKQENYRAPVAAKA

SEQ ID NO: 182189 - protein, 366 aa, unidentified
MEFNTIAIDLAKNVFAVCGANAAGRVLWRRELRRAQLLGFMRKIPPCLIGMEACGGAHYWARQLISLGHQVRLVSPALVAPYRKGNKTDRNDAEAILEAVTRPSMRFVAIKALAQQDLLALHRVRSQLLKHRTALCNQLRGLLRERGVAIRAGATALKRALPTILAEENSEISGEVRDLLIEMGGWLRSLELRIASCDEKLARKFRTDERCKRLAQVPGIGQLAATALVAAVGNACEFRNGRELSAFLGLVPRQHSSGGRRVLLGITKRGDRYLRTLLIHGARASLRWSGSKTDSYSRWANRIRAERGPNVAAVAMANKNARILWALLNRGDRFRLDNSPQRAVSRPGSPNSIERARSAKLRLAQD

SEQ ID NO: 182190 - protein, 460 aa, unidentified
MKREDQVHRLADRNGGGVEPLRIVHPDAGGIDVGSRQHYVAVPADRDREPVRCFGCLTPDLQAMAAWLQACSVTTVALESTGVYWIPVMQILEECGIEVYLVDARQAKNLPGRKTDVKDCQWLQQLHTHGMLTRAFRPADAICTLRSYWRHRQGLVEMASMQIQLMQKSLEQMNVQLHKVLSDLTGVTGMKIVRAILAGERNPVVLAQMRHPLVKSSEDTIAKALTGDWRSEHLFTLRQAVELYDIYQQKIEACDGEIERYMQGLEARGDPKDLEPRARGTRRKNQVHFDLRSQLHRLTGADLTRIDGIDAMTAQTVISECGIDMSRFATERHYSSWLGLCPNHQITGGKIRRRRTRKVCNRAARALRVAAQSLHRSQTALGAYYRRLRGRLGPAKAITATAHKLALLVYRTLKYGLRYVDQGQQVYEKQYQQRMLQGLAKRVKQMGYALVDPRSGEVVS

SEQ ID NO: 182191 - protein, 309 aa, unidentified
MGVSVGIDVSKDRLDVHVLPQNEAFSVERNGKGLAALVERLKPLAPSLVVVEATGGFEMTVAAAVAGAGLPLAVVNPARIRHYAEALGKRAKTDPIDAFVIARFAADVKPEVRPLADETTQLLAELVTRRRQIVDMLQAERQRAMRVTVKRFKKSIARVVATLEKELAELDRDIDDMIRGSPVWCEKEDLLASVPGIGKQTARTLLAELPELGTLSRKRIAALAGLAPYTRRSGKWQGKSMIGGGRAFVRKALFIAALVAGRHNPVLKAFRDRLVAKGKAKIVAAIAVARRLLTILNAILRDRRPWQPA

SEQ ID NO: 182192 - protein, 414 aa, unidentified
MTEEEIISWFAGVDWGSERHQVCLLDARGTTVGEREFPHSGEGLAELGDWLLSMASAASTVAVAIEVPHGPVVDALIDRGFVVYAINPKQLDRLRDRFSVAGAKDDRRDAYVQADSLRTDRRLFRRLQVADPRLIELRAWSRLAEELRAERVRLSNRVRHQLWRYYPQMLKLTDDLAAPWFLELWAIASTPAKAGRLRKSTVERLLKQHRIRRMDAETVLRILREPAIKVAQGVAEAASIHMRSLVARLRIVNRELREAERKLDELCTTIGEIEQTSGEGLQRRDVAILRSMPGIGRINLGTLLSEASGPLSRRDYEGLRTLSGAAPVTKRSGKSLIVVRRYAAHVRLRDTVYHWARVATQRDPKCRARYTALRKRGHSHGRALRGVADRLLALACVLLQRQTLFDPYFGRPTA

SEQ ID NO: 182193 - protein, 367 aa, unidentified
MKKISTRAAAQGRNISQQKLTIGLDLGDRNSWYCVVDEAGQIQLEQRVRTTAKALQEVFSTMPRSRIALEIGTHSPWISRLLRELGHEVIVANARKVRLIGESRKKDDRLDAQTLARLARIDPELLYPVKHRSGQAQADLTVIRARAGLVRARTGLVNSARGLAKSYGERLRGCNVRNMNPEKAESLSPELQAALEPLLNAIESLSERIVEYNERIEQLAQQSYPQVALLKQVKGVGTLIALTFLLTLEDPHRFRKSRDVGCYLGLQPGRRNSGQSEPQMHISKEGDPYLRTLLVQGAQHILGPFGIDCDLRRWGLKLAERGGRGGKKRAIVATARKLAVLLHHLWVSGEVYEPLHNSRRTTVAAAA

SEQ ID NO: 182194 - protein, 367 aa, unidentified
MKKISTAAVKQNRNFSEQKLTIGFDLGDRSSWYCVLDEAGSVLLEQRVSTTPKAMKEVFGGMPRCRIALETGMHSSWVSRLLSELGHEVIVAHARSVRLIGESRKKDDRMDAQTLARLARIDPQLLCPVKHRSARAQADLTVIRARAGLVRARTALVNTVRGLAKSYGERLRGCNVRNMNPEKAEGLSPELQRALEPLLAGIESLSERIGECNERIEQLAQESYPQVARLKQVKGVGTLIALTYLLTLEDAQRFRKSRDVGCYLGLQPGRRNSGQSEPQMHISKEGDSYLRTLLVQGAHHILGPFGADSDLRRWGLKLAERGGKNGKKRAVIATARKLAVLLHRLWVSGEAYEPLRHSQPRELPAAA

SEQ ID NO: 182195 - protein, 380 aa, unidentified
MLLTANSAVGVDGPQRHRLCQNEVVADLRQRRPSVEQISRVGMDTSKRFFQLHGVNAAEEVVLRKKLRRKEMVEFFQALAPTVIGIEACGSSHHWARLLRSFGHEVKLIAPQLVKPYVKRGKNDGADAEALCEAMSRPTMRFVPVKTAEQQAALMLIGLRERLIGNCTQLSNAIRGYAAEFGFTAAKGMAHLDPLLERIQADESLPLAARELFAVQSKEYAQLRGQINEVEAKLKAWHKSDECSQRLIKIPGVGPIGAVLLKMKTPAPEQFRTGRQFAAWIGLTPQDHSTAGKVRHGGITRAGDEALRAVLVAGATAVIQQAVRYGGRASPWLDALLKRKPPKLAAVALANKMARVAWKLMVTGDSYSTKSAPAALASRI

SEQ ID NO: 182196 - protein, 482 aa, unidentified
MKSKPEEKTKKAANHSTPHHWDEMNRKQRREMMRKIQSADLSLEVVHPNAGGIDIGNESHYVAVPPDRDRQPVQRFGCTTAELKAMADWLKQCGICTVAMQSTGVYWIAVFDILESAGLEVYLVNSRDTKNLPGRKSDVQESQWLMKLHTYGLLRNSFRPPQQIRTMRTYWRQRNDLVQSAGRHIQRMQKALTQMNIQLANVLSDISGVTGQAIITAILAGERNPRKLAELRDPRVQASQDEIARYLEGNWQEDLLFVLKQEQQGYEFCQKQMAACDEQLKQYLQQREDCSQGASLPEETRKGRLSLKKGNRPQFDLRADLFRMSGTDLTQIDSIDVMTAMTILSEAGWDMSKWATEDHFVSWLRLCPDNRISGEKIIGKRRLPTNNRITIALKMAASSLRKSQTYLGAQFRRLRTKLGAPIAIKAMAAKLARLVYRMLRYGMKYVDQGTEFYEAQHRKLQIKQLKWKAAKLGFRVVDASAA

SEQ ID NO: 182197 - protein, 362 aa, unidentified
MEKYIFAGIDLGDKNSVTRIAVDREKGERLGFVNTRGGRARLFKELNRRADQAGGAKIVLAYEASSCGFILRDEAQARGMSCWVLAPTRMEKSVEQKRNKNDDRDAVDVLEKLRGHVLAGNRLPTVWVPDVETRDDREVLRTRLALSEKQTQVKAQIQMLLKRYGLEKPADLGSTRSKQYGQWLEQLSVSASLGWGTRQSLASLLRQLRGIEQEMENLDKLVRQLGSQPRHKPIVEALMKEKGVGLLTALVYRTEIGQARRFRRGRHVGKFVGLTPTSHESGQQQDRKGHISRQGPPRLRKVLCQASWVHVRYDPHSRAVYQRLVAKNPKKKKIALVAVMRRLAVRLWHRMREVELEQQTQP

SEQ ID NO: 182198 - protein, 421 aa, unidentified
MTPPNEVVWAGIDTHTDTHTIALLDERGRPLGAETFTADPDGYDRLIGMLPGPGRVAAVGVEGTNSFGAALARRLTAAGYEVREVLRPRRSVRRRDGKSDPLDAVAAARSVMAGDGTSLPKSSDGWVEALRHLNARRSQLVSAMTAIPDSTNGLLAAAPEPIRERYRGLRSETRMNRLAECRPAGGLVERSVLAALKSAAKAWKALKRQAGLLEERMRLILEEHARPLLDMYCAGAVIAATLAIVAGDNPERIRSEAAFAKLRGACPIPASSGRTNRHRLNKGGDRQGNMALHRIAIVRLRYHKPTRDYMAKKTREGKGKLEIIRCVKRFVAREAYRALISIRNGEVGRGTPAERGAKLRELRVSRNITQQQIGEALCVPSSRISEIERGARDLPELEQRAIQWIHSTTNPKQHTQTLDNV

SEQ ID NO: 182199 - protein, 343 aa, unidentified
MTNNPANTPTESLSRLFAGIDVGADELVLVIRKNGKSFDPQKYANTRSDRARLVTKLIKLPGIKVCLEATGIYHFDLAIALHDAGIPVMVVNPKASHNFAKVLMKNSKTDVVDADTLAEYVERMDFVAWTRPSNQVLALRGFARRIDALTGQKAAAKNHLHALSATQETPKALLRDAKLAISQLEKRIDALAAEAMILIDAHPELKRVFELLTGIKGIAQTSAIALMGELLLLPPNLSHREWVKFAGLDPKAFESGKSVHKKMRLSKAGNRHIRSALYMPALSAKQHDPHVRAYFQHLIDNGKKPLQAVCAVMRKLLHAIHGMLKHDQPFDNTRFYAIPAAAK

SEQ ID NO: 182200 - protein, 490 aa, unidentified
MKRKVSTFERLQSGKLRRKQRKELARKLDSENPQLEVVHRDAAGIDIGNESHFVAVPTGRDEQAVREFGSWTADLRRMAEWLVGCGIRTVAMQSTGVYWIAAYDILREHGIEVYVVNAHGTKNLPGRKSDVQECQWLMKLHTYGLLRNSFQPSEEIGKIRTVWRVRDRHVKEAGRAVQHMQKALTKMNIQLANAISDLSGVTGQKIIRAIVKGEREPRKLAELRHGTIQASAEEIANSLQGSWREDLLFELEQALKDYDHERKQMGACDEELKKYLAAMPTRVVARDEEGETKTAAPVEQTRKRRRTKARKARANQPEFDVTAELIRILGVDLTRIDGIDVMTAQMVLSEVGPDLSAWKTEAQWASWLNLSPQREISGGKVIRHTRGPGASRLGQAFRMAASSLIRSDSYLGAQYRHLRARLGGIKAVKAMARRLACLVYRLLTRGQAYVDRGVAHFEAKRQDRELNALKSKAAVHGMRLVPTGPTAGSY

SEQ ID NO: 182201 - protein, 359 aa, unidentified
MTATLTWVGLDVHARSTHAAAIERESGELRRARFGAGSEEVVAWLRTLPQPVHACYEAGPTGYALYRLCSEAGIHIDVVAPTKTPRAATDRIKSDRKDAELLVRCLLAGSLSPVCVPSAQVEAARDLARAREQVRADLARVRHRVSKLLLRYGRVYDAGGTWTQAHRRWLSAQRFPESASELAYADYLAAVDGLVARRAALDERLSRIAREGEWWPTVARLRCFRGIETLSAFALTLEVGDFTRFRRSAELAAWLGLVPSLHQSGETETRGSITKTGSGYARRLLVEAAWHYRREPRLGATLAARHQGQPDHVLQIAWRAQHRLYRLRQSLRQRGKPGNVCVVAVARELSCFLWAAAIA

SEQ ID NO: 182202 - protein, 332 aa, unidentified
MNMHPQGGVANRDQGPNAGIDVSKQHLDACWGSQEQRVVNGAIGWDALIAIFKEAEVDLVVLEATGGYERGLVCALQRADITVARVNPRQARDFAKSMGALAKTDRVDARILRDFADVLAHHKDRSTYITPMLDEQRQELAALMTRRRQLVDMRVAESNRLEHAGKRAVRSIKSVLKTLDRQLAFIDRDVDEHLDRHFKDQRTLLDGVKGVGPVTILTLAAALPELGHLGRRQIAKLVGVAPLSDDSGPRKGKRRIWGGRAEVRTVVYMATLAAIRSNPVINAFHTRLIASGKPKKVAIVASMRKLLTILNAMLRDQSKWDAAKHLPTTKTA

SEQ ID NO: 182203 - protein, 369 aa, unidentified
MKEVTTIGLDLAKAVFQVHGVDAAGAVTLRRAVRRRQVVAFFAKLPPCLIGMEACATAHYWARAITKLGHDVRLIPPAYAKAYVRRNKNDPADAEAICEAVSRPSMRFVAIKTEVQQAAAGIHKVREMLVKQRTMLINALRGLMAEFGIVVAEGPHHVGELVAILADPADRRIPTPLHEGLLAIVETLRGIERRIEIVEKQIVGWGRGNQTCRHLITIPGYGPILSSAMAALAVDPAAFTSGRHFSASLGLVPRQDGTGGKVKLGPISKRGNGYLRRLLVNGAMSVLCSKRAKEDPWLVRLLETKERKVAACALANKMARIGWAVMMRQEDFRNRRHDQPCPDLGEPGTVLTAVKTAARAPAAVAFGQS

SEQ ID NO: 182204 - protein, 344 aa, unidentified
MQITTIGLDLAKNVFQVHGVDASGQVVVRKSLRRSQMLPFFSKLPPCLVGIEACGTSHHWARELIELGHEVRLMPPAYVKPYVKRGKTDAADAEAVCEAVTRPTMRFVPVKSPEQQAALSMHRTRDLLVKQRTQLINMIRGLLAEFGVDIPRGLERALLMARQIVDGKALEVPMEAARIVATLSRQALDTHIRLREIDRDLAVWLRGSDVARRLMTIPGIGPVGATALAASVTDPHQFRSGRQFAAWLGLTPLQKSSGGKERLGRITKMGDKYLRKLLVVGMTALVRRARHNPATVDPRLAELLARKPTRVATVAMANKAARIIWAIMARGEIYRIGHRPALAA

SEQ ID NO: 182205 - protein, 339 aa, unidentified
MEHVAIDLGSRKSQICVRNSDGQIVDERRWATAELKGYLATRPTSRVIVETCAEAFGVAEAAKQLGHEARVVPATLVKTLGVGARRTKTDQRDARALSEVSCRIDLPTVHIPTRASRERKTECGMRDALVGARTKVINTVRGWLRGQGRRLGAGSRATFVERVRAACGPDLPSYVERQLGVVDALTTQIDEADATVKAQAEADEICRRLMSVPGVGPLTAVRFVAALDDIGRFTNAHQVESYLGLVPGESSSSERQQRLGITKAGPPALRWVLVQAAWALRTRCRQSAAVPLQLWAHRIELRRGKRTATVALARKLAGLLYAIWRDGTVYEGSRGAKMI

SEQ ID NO: 182206 - protein, 374 aa, unidentified
MRRLAPCIKKRPRRSRVIGAVSVESPCAPGAAKPVPELGASAVDFVIPNGRLGRTASPHAQGWEPKSMFVGIDVAKDRLDVHLKPSGEAFDVARDGEGIDELVKRLAAVSPTLVVLEATGGFEAIVAAGLAAAGLAVAVVNPRQIRDFARATARLAKTDTLDAAVIAHFAEAVKPPPRPLADPQARLLGELMARRRQLIEMIVAEGNRRRLLTARRALKSVDRVLATLKAQLALIDDDIDTAVRGTPAWREAEDLLLSVPGIGPRIARTLIAEMPELGRLDRREIASLTGVAPFNRDSGTMRGRRTIAGGRPVVRSALYMSILVSIRRKLPLAETYHRLRAAGKPAKVAIVACMRKLITILNAILRDKKPWAPA

SEQ ID NO: 182207 - protein, 384 aa, unidentified
MFKHNILFIGLDTHKVATEVAYIEDQRGAEAIHLGRILSNKQSIKKLVRQMESKYPHATLHFVYEAGPCGYWIYRYITSLNHCCYVIAPSLIPKKPGDKIKTDKRDALKLAKLLKSEDLTPIYVPEPEDEAVRDLSRLRQTAMEDLKDAKYQLKAFLLRNNIQCKTKDNWSLKHLRWLTELILPTPCQQIVLQEAIQTISERTNRLKRLDNEREHHVKKWRYYPVVKAIQALRGVRLLVATGVIAELGDLTRFDHPRKLMSYLGLVPSEHSSGGKRRLGSITKCGNSRARRLLVEGAHGYRYEANISKEMQIRQEGLSKEIIDIAWQSQWRLCRRYRGLMHKGKHRNVVVTAIAREMIAYIWAISREVVLSPVNPKLRIARMPS

SEQ ID NO: 182208 - protein, 343 aa, unidentified
MKHTTIAVDIAKDVFEIAVSRKPGKVDKAHRLSRAKFLGFFANRESATVVMEACGSAHHWGRALENLGHRVVLLPPHTVRPYVQRNKTDRADVKGILEASRNDDIHPVPVKSVTQHSVTALHRFRSTWVATRTARINLLRGLLRELGVFIPVGARKVVPRVLELVEDGDSPLPDAVRESFHQTCTENRELDKRISQMNWQLELLCRQIPVCTRLRTIPGVGVLTATALVAFVGDVQRFRSGRKFANFLGLTPREHSSGNVRRLGRISKQGDTYLRTLLNHGARAVLWHAHKTNPPDRLRAWAMKKATQRGHNKAVTAIANKLARISWAVWKHGTEFRSYPQAA

SEQ ID NO: 182209 - protein, 314 aa, unidentified
MAHQSVVVGIDVSKDILDVALLPSGECLQFSNDRSGLRALVSVLKRKKASLVAFEATGGYEKGLLTALTKAKLAASRINPQRVREFAKACGVMAKNDRIDAVMIARFAATLAPRLTVSNVRIEALAELVTTRRQVVEDLTGVGNQSAQTTQALIKRLALRRLRQLTIHLKALDLAIAKMVADDPDFARDDDLMRSMLCIGPVVSHTLLALMPELGKLDNREISALAGVAPFTRDSGKFKGQRTIFGGRQPVRDVLFMAAMGASRLNPTLKVFYDRLIAKGKLPKVALVAVMRKIITTLNVMLREGQKWRRPATA

SEQ ID NO: 182210 - protein, 413 aa, unidentified
MIDVMFPYCSGLDVHKKTVVACVLTPDDKGGGVQKQIKSFATTTAGLEALAAWLVQNGVTHVAMESTGVYWKPVYNVLAPEFAIWVVNAHHLKQVPGRKTDVKDAEWIAQLMRLGLLERSFIPDVEQRDLRDLTRYRTRLIQEKSAAANRLHKTLEDANIKLTSVLTDIQGVSARLMLEALIADEQDVPQIAELAKGRLRNKIPQLVEALTGQVRSHHRFMLQEVLTHLDELNARIHTLDQRIREATTPYEAIIERLDAIPGVNRRTVECILAEVGTDVAAFPSAKHLASWACLCPGNHMSANKRRSGKRRKGQKWLVSTLVEAAWAASRTHGTYLRAQFQRLAARQGGKRAAVAVAHSILVIVYHLLADPDATFQELGGDYFHKRNQEQEERRHVRSLESLGYTVTLSPAAA

SEQ ID NO: 182211 - protein, 327 aa, unidentified
MTLSTLGIDLAKDKLDVALFHQERLTHQVFPNTAKGIAALLDWLQAQGLSQVHACLEATGTFGDDLAVKLHAAGHIVSILNPAVLKAFRQSTLTRTKNDRTDASLLARYAALYHPRPWTPPAPEVRELQALVRRLEGLHQMHQQEHNRLTSNGRSRMVAESVQTILAALETEIERVEQLVRDHIQQHPRLKAQHDLLCTIPGIGAKTATTLLAECGDLHTYSDARAVAAFAGLTPKQHQSGSSVHGKPRLCKIGSDRLRKAMYFPAIVAQRYNPIIKAFCETLLQRGKHKMTVIGAAMRKLLHLAYGVVKSGKAFDPNYLKAKPLAA

SEQ ID NO: 182212 - protein, 389 aa, unidentified
MGVTIGIDPHKGSHTAVALDEHEVVLGQLRVRSGPEQLARLTDWAEAWPARTWAVENASGLGYLLSQQLVAAGERVVDVPPKLAARARLLDNGDMNKNDPNDARSVAVAALRAKRLSEVTKEDHTAVMRLWARRRKDLTATRTRVANRLHAVILELVPGGCTGEIYASKVARLLEAFEPVGAVAAARKELAEELLGDLRRLDSQLGEVKERLAAVVAASRTTTTKIFGVGPVVAAITVGLTADVGRFADKDHFASYNGTAPIEVSSGPKKLYRLSMRGSRQLNHAVHMAAVTQVRHRHSEGRAYYDRKITEGKTHKEALRALKRRISDALYAAMVADARREREVASGGPGGQTGNGSVACAAGSHPAKPALRPSHSRANTKPRPPRRAA

SEQ ID NO: 182213 - protein, 402 aa, unidentified
MNCVGIDVSKGKSMIAVMRPFGEVVVSPFEVLHTDSELSKLAGLLKSLDGETRVVMESTGNYHAPVAWLLHDAGLYVSVINAMLVHDYGNNSLRRAKTDKKDAVKLANYGLDHWLTLPRYVPDEDTRLMLKTCYRQYQQYSKVQTMLKNNLISLLDIAFPDANRLFTSPPRADGSEKWVDFVAAFWHCECVCGLSEKAFTAKYHKWCRKHGYNFSEDKALDIYASACGHFGVMPKTDTAKLLVEQAISQLRATSATLAALKQEMQSLAASLPEYPVVMGMFGVGPVLGPQLMAEIGDVRRFHSKKALVAFAGIDAPPYQSGQMDIRSRSISKRGSSSLRRTLFLVMSVILQCAPIDEPVYQFMDKKRSEGKPYRVYMMASANKFLRIYYASVKAYLESLEHD

SEQ ID NO: 182214 - protein, 361 aa, unidentified
MPAQINKLDFKGQNIYAGLDVHLKSWQVTLLNDQLTLKTFVMPPEPEVLSNYLQSNYPGASYYSAYEAGFSGLWTHHRLCNLGVNNIVVNAADIPGTQKDQIQKEDKRDSRKIARSLREGSLTAIYTPLESTLNDRSLIRSRKALVRDMVRFKLRIKSFLYFYGIQLPEQFKDSNKHWSKRFMTWLEAIPMKESSGHLALKALVDEARSQKELLKNIIREIKLLSEKDTYRDRIKLRCSIPGIALINAMFILTEVEDIGRFQSAERFASFIGLIPMTHSSGSKEKVGEITFRSHNYLRSAFVESAWIAIRRDPALLMAYQNLVKRMEPNNAIIRIAKKLANRTYTVLKYNKPYEYNKTDNL

SEQ ID NO: 182215 - protein, 378 aa, unidentified
MQTTAAHREYSEERVLFLALELSNSKWKLGSTLGMGQKPRERTIAAGDLGGFHEEVSRAKRRFGLASSARVVSCYEAGRDGFWLDRHLRQSGIENIVVDPSSMEVSRRRRRAKTDRLDVGKLVRDLMRWWGGESKVWSVVSVPSVEAEDQRQLHRELEALKRERTRYTNRMTSLLITQGIRLKVSKDFLARLSAVRLWDNSPVPRGLRTRLEREYMRWVLVQEQILELERERRCALRTARDRGAQTARRLFRLRGIGENYAWLASMEAFAWRQFANRRQVGAMAGLTPTPFSSGNLDRDQGIGKDGNRRLRAATVEIAWGWLRFQPDSELSKWFQERYGPGSRRSRRVGIVAVARKLLIALWRYLETGVVPAGAVLKT

SEQ ID NO: 182216 - protein, 324 aa, unidentified
MQGHLGIDIAKSKFDVVFLVGDVKRHRVFGNDEGGFEALLGWLGEHADSVQACMEATGGYGDDLALFLHEHAIPVSVINPLRIKAFGQSELVRTKTDKVDAGVIARFCRTQQPPPWVPPSPRVRELRALVRRCAALKEMRVKELQRRAQGSASETVTASVNRTIAWLNTEIDLIAQVVIQVIETDEYLRRGYALLMSIPGLGAQSAAVLLAEVPDFRVFGHNKQITAFAGLAPQDRVSGSSVRGRSHISKIGSSRLRAILYMCALSARRYNPVLKTFADRLSEAGKPPKVILVALARKLLVLAYGVMKTGRPFQSPAPNTACCG

SEQ ID NO: 182217 - protein, 437 aa, unidentified
MAKKGKKNKPTPENMPMIHPHAAGIDVGAEEHWVCVPTDRDAQPVQKFSAFTCDVHRLADWLTTCRMTTVAMESTGVYWIPLFQILEARGFEVALVNARHVKNVPGRPKTDRFDCRWLQKLHTYGLLAPSFRPPEDICQLRSLLRHRDNLIRMTVKHIQHMHKSLDQMHLHLHHVMSDLTGVTGMRIIRAIVAGERDPRTLATYRDYRMQSSEDTIAKALEGEYRPEQVFTLTQSLALYDFTHQHIAACDQEIERVLSTFASLVDPDEHPLPPPTTAHRQPQRNEPAFDLRTHLYRITGVDLTQVPGLQAPTIHIVLAEVGLNRHKWPTDKHFASWLGRCPDNQIRGGKVLSTGSRRVQNRASRALRMAAQSLRTSPSSLGAFYRRMRSKLGPAKATTATAHKLAKIISHMLQEKTPYRERGAEHDMHKDQERKIRQ

SEQ ID NO: 182218 - protein, 308 aa, unidentified
MAKNFIGIDLSKARLDIHDPQTGKDSCCPNARTGLRRFVRGLGPDDIPVFEATSGCDRLLIEELTLGKRRFVRVNPLHAWHYAQSLNLPKTDRVDARMLARFGTERQPAPTPLRDPARDELAELTGRRDHLKRMETEEKNRLARTANPIAARDIRASIKTLAQRIARFDAEIRACIAHNPKLSETARLITSVPGIGPVVAAGLMAWMPELGTLDRRAVASLGGLAPKARESGMYKGHRRLGQGRCHVRKLLYMAALSLWRNPGVVGDMVPRMRERGKPNKVILIALARKILTFANAVLRDRKPFQSNA

SEQ ID NO: 182219 - protein, 343 aa, unidentified
MHVNTIGVDLAKNVFQVHGVDSAGKVVITRQLRRKQVLEFFSKLPGCLVGMEACGTGHHWAREISKLGHTVRLMPPSYVKGYVKRSKNDAADAAAICEAVTRPSMRFVPIKSTDQQALLMLHRTRDLLIRQRTQLINALRAHLAEFGLVAETGREGLAQLGAIITDESNHEALPSAMKQALQAIVDQLAALELQVGALDRAIHAHHRANDMSCRLETVPGIGVIGATAIASTVADPSGFKSGRDFAAWIGLVPRQHSTGGKERLGGISKQGDRYLRRLLVIGATAVVRQARLHPQKHPWIMKLLAKKPAKLVAVAVANKMARIAWAIMAKGGHYRAPQLAAAT

SEQ ID NO: 182220 - protein, 383 aa, unidentified
MKKTQETLRLKDTIKEVILYIAFELSNSKWKLAFSDGSKIRYKTITAGNLNQLQVEIDLAKRKFKMNEDVRVVSCYEAGRDGFWIHRYLESQEIENLVVDSASLEVNRRKRRAKTDRIDAGKLLRMLIRYWGGEKKVWSVVRVPSEQDEDARHLHRGLEGLKKERTKHRNRIKGLLIQQGIKVSNPSQKKFLDVLKKLRTWNGQKIPPGLKSQVVREYERLQMVEEQIKALEQEKTEKLKNPDTDSLEQVVKLASLYGIGAVSSWTFVMEFFGWRQFQNRREVGGLAGLTPTPYDSGKSLREQGISKAGNQRIRALAVEIAWSWLRFQPQSKLSQWYLNRFAGGGKRMRRIGIVAMARLLLIDLWRYLEYDKLPEGARLKSVA

SEQ ID NO: 182221 - protein, 341 aa, unidentified
MKKAEYVVGVDIGAESLSIAALKGPDGSGLAELSITNDPEGFEELNGWLTKHRITVENAVFCLEATGVYGEALCYYLCSRGFRVAVEPPLKVKRAFQQSAHKNDTVDARQIAEYGHRFYDELSWWTPPAAVLEQVRVLLTAREQFTSQKIANVNALKALERKIITTRIAIQAYEQAIARLTQNIKEIDQEIKRLVKQDDSFNRMITAITSTPGIGMLLAANLLVMTSGFARTRNHKKIASYTGISPIEHTSGTSVYRRSRSRRFGPSRMRKLLYLAAMSVSTHDPDFRRYYLRKVAEGKPKRLVLNNIANKLLKIVCALVRSQSAYIPNYRSIQPLLLKTA

SEQ ID NO: 182222 - protein, 354 aa, unidentified
MQNDRQSSETVILGVDTHLDIHVGAVISQAGKLLGTHIIQTNQAGYLELLDWARSFGSLERAGIEGTGTYGAALTRYLIKNSIYVVEVNRPDRSKRRLEGKSDPLDAENAARTVLSGSSKAIPKMQSGACEALRIISVARRSAVKACTQAINQLRALLVSAPQDVRDKLWKSKPHECVTACINSEVSEHSPLRIALCSTLRSLAKRWMALTEELNELDESLDKLTRKYASNLRSQFGVGPQTAATLLAVAGDNPERLKNEAALASLCGVNPLPTSSGKTVRHRLNRGGSREANNALWTIALVRMRSDPRTRIYVDRRTGEGLSTKEILRCLKRYIVRELYPLILSDLAYANRRS

SEQ ID NO: 182223 - protein, 463 aa, unidentified
MKSKKQAKQKNRPRHKQVDWKALDIVHPDAAGIDIGGSEHWVAISPDRDEHPIRCFDCFTADLQELADWLIAKGVRSVALQSTGVYWIPVFEVLQQRGLEVYLVNARHTKNLPGRKSDIEECQWLLKLHTFGLLNNSFQPTDEIRITRTLWRQRGGLAEQARSTIQRIQKVLTEMNVQLSNVLSDVSGASGMAIIHGILKGERDARVLAALADAQVKASKEVIAKSLEGNWRQELLFVLAQEVELYGVYQDKIAECDRQLQTQLRTMAPKVDLESNPLGPRPKGKRAQGNAPKFDLRTELYRLTGVDWTQVNGIDVTVAQSVIAETGVDLSPFPSEGNFTSWMGLCPANDSSSGRVIRKSTPHVTSRAATAFRQAASSLIRSQSYLGAQYRRLRTRLGAPKAITAMARKLACLFYRLLRYGQQYVDKGMQFYEEKYRDQQIKSVTRRAQQLGLQVIQPKASLA

SEQ ID NO: 182224 - protein, 422 aa, unidentified
MNTVSNKSFSAFIGIDRADAKHDVCVQAAGDERREFSCMPHKVEAIDNWAQSLYRRFGGQMAVALELSKGPLVYALQKYDFFVIFPVNPSTLAKYREAFTPSGAKDDPSDAELALDLILRHADRFTPLNPQSVEMRTLVSLVEQRRRLVNDRVRITNRLRNTLKQYYPQALEWFDRIDTLLFCDFIERWPTLLQVKRARRTTVQSFFYQHNMRSAGVLDARLNSIKSATPLTLDKAVITPNRLQALVLVDLLRATLAAIKRFDLEIAELAPQHPDYALFDALPGAGASLAPRLLVAFGEQRDRFNNAAELQQYAGIAPVTERSGKKHWVHWRWQCSTFLRQTFVEWAAQTINKSFWAGVYYRQQRDKGCNHQAAVRALAFKWIRILYRCWQTQTPYNEAVYLKALKRRGSPLLNQIEATIST

SEQ ID NO: 182225 - protein, 386 aa, unidentified
MQKLNDLSRCLTPFEPDSTLIVVIEMSLSNWLVAGIVPGVERQPLKKLTVDESALLKLLHRWREEAEKAGHIIKRIAVAFEAGRDGFWLARWLRARDIEVHVIHASSVAVSREHRRAKTDRLDTELLKRAFLGWLRGERDHCKMVAIPTLTDEDRKRPNRERESLVGEQSRIINRIKATLVRLGIRGFNPKLKKAAELLASLRTPEGEPIPPNTLAELHRDMERRQLLRDQIRRIEVARLERIEQAPNDGPHAMMRLLARVMGIGIETADMLVQEVLSKNLRDRRAVARYAGLTGSPDESGRKRREKGLARSGNPRVRRGMIQLAWRFLMFQKDSALAQWFRARTENARGTRKTMIVALARKLLIALWRLVREGVVPDGIVLRPAQ

SEQ ID NO: 182226 - protein, 412 aa, unidentified
MQALIERCCGLDVHQETVVACLMIGAPGVRPSKEVRTFRTVTRDLEALRDWLAAEGVTHVGMESTGVYWRPVYAVLEEHFDLIVGNARHIRNVPGRKTDVKDAEWIADLVRHGLIAKSFVPPRPLRELRDLLRYRRKLVESQTAERNRLLKLLETANIKLASVMSDVFGVSGRAMLKALIDGVASVEAMADLAKGQLRRKRADLVLALEGRMEEHHQFLLATQLRRLEAIEHDIAALDLRIVERLEPYQAPHALLMQIPGVDWLVAAVIIAEIGVDMSVFLSVYHLSAWAGVCPGNHESAGRQRSGRARKGNIHLRTILVGAAVSAGRTKGSYLRDKFHRLKARRGPLRAALAIAHKILVAAYHMLAKGVGYRELGEAYLDQIGQTRTVANLKRRIERLGYHVTLQPIAEVV

SEQ ID NO: 182227 - protein, 412 aa, unidentified
MEVQRNKVCGADVHKKFLVATILSRDGTKQTQRFRMNPEELSEFRTWVVDNGCEQVAVESTGIYWIPVLNAIEGFVDLILANAYKIKNTSRPKTDLTDSEWMAELCLNGMIKPSRIFPKDDRDLRSLTRARERYVNDTTREKNRIHKLLDSCNIRLSSVLSNIFGKVGRYILDGLLEGKDIDAIIEGIPVKRLMKKADQIREAVKDGLDITKILLIRGSLELMAALKKRIDELEAEIRRRVVHQKENIRILMSVPGIGFISAVTILAEIGDFRDFEKPEKLAAWCGLVPSVYQSADKLITGKITKHGSRHLRWILVEVAQTVARCGGPKLKRFFSRIMERREFKVAIVALARKILCILHHLLMNQETYEDEVTKKEARIKLAAPETSMGIEEMIEYMIKAGYEVKKKSGVGG

SEQ ID NO: 182228 - protein, 350 aa, unidentified
MNVNHYIGFDVHKKTVSYCVKTVDGKIVEEGKLRATHDALRQWAGKRLEPWRGAMEATLFSGWIYDTLQPFAAELQMGHPALMKAIAASKKKNDKLDARKIADMVRCDLLPACYVAPVEIRELRRMLRYRNLVVGQATRMKNKMSGLLMEVGAEYNKERLHGKQYFTELLDTVAEVPESVKDLLRLSRGAMEMFETTQQQLLARLRKDSLLAKRVILLESIRGVGEVTALTWALEVGDPQRFSSVAHAVSYCGLTSALVSSADKQQRGPLSKQRNAHLQTVLVEAAKLAPRWNPQLAALHARELARGNRNRATLAVARKLVAYLLAVDKSGQPFEVRNPLVAETEAQEVA

SEQ ID NO: 182229 - protein, 408 aa, unidentified
MNAVGIDVSKGKSMVAALRPMGEVALLPQEFLHTEVGLEQMAYTIIALGEDTRVIMEATGRYHEPVAAALHEYGIYVCVLNPLFIKQSGGGSIRKVKTDKADAMKIAKYGLDNWVDLREYTPMDTVRQQLKLCSRQYNLYMKTVISLQNNLISLTDKTFPGVNELFSSPERADGHQKWVDFVMTFWHCDCICGVSEKVFTERYQKWCKRKGYHFSPEKALDIYAGICGHFTTLPKNDNTKLLITTAAQQLLADKMTLAALRAEMTRLAMQLPEYDIVRAMYGVGETTAAQLMAEIGDVRRFPRRSSIVGFAGVDPGVDESGKHSAKSVPTTKRGSPHLRKTLYQIVCTYLRKAPANEPVYQFLDKKRAEGKPYFVYMTAAQNKFLRIYYARVKECLEAFDAQQSISQG

SEQ ID NO: 182230 - protein, 349 aa, unidentified
MTLVGCDLHTRKQQVAVLDTETGAMYERHLSHAGDAVEQFYRALPGPVTVGIESTGYALWFHELMQRLGHTLLVGEAAKIRAMVVRKTKTDRRDALHLLDLLKHERFPLVWIPDPATRDLRALVTHRMRLVRMRTMVKNGLHAIAMNRRLTLGPSLWSQRGLAQLRDLALSPHTTQRRDESLQLLTWLTARIEALDDRVAAAAQADPGARLLLSHPGVGPLTALTTVVVLGPVARFPDSKHVVSYTGLAPAVHASADTCRLGQITKQGSPLLRFVLGQAGLIAAHAEVDLTRHYRTLLRRRGRPKAIVAIARKLLVRLYIMLRDQIDYEEFRRRGRTPRGQEVPPPALA

SEQ ID NO: 182231 - protein, 354 aa, unidentified
MRKVQQAILEGKEIFVGLEDSVRTWKVCVRADKMIVHEASMPAKYEDLKGYLRNRYPRCKVQVMYEAGFSGFGLYDVLTRDGYTCVVTPPNKVTEEKSNRVKNDKVDARRLAKNLENQDYCACFVPDVELRTDRQVSRSIMQVDKVLKATKNRLRSMLYFHGLQVQPEGNRWNVSDYKRLRELHLQSALQFCFDETLKQLDESLRAKKAFRAMLFQLGKKERYQQTVAIISSIPGLGKYTAIRLALELGNVPERFRTGRSLANFMGLTGSESSSGDQVHRGSITKQGQGFYRHWFVEGAWVAIKYDAALMDKFQRVWRHSGSKQKAVVAVARKLAVRMWGLLCRNEMYVCDIAA

SEQ ID NO: 182232 - protein, 351 aa, unidentified
MMIIGVDYHPSFQTIAFLMEETGECGEQELNHSDGQAEKFYRDLKQRGISVRVGMEATGYSRWFERLLAELGFELWIGDPAEIKAKRVKKLKYDRYDARLLRRLMLENNFPQTWVPSPENRDLRQLLWHRHRLVQMRTRIMNQLQALAMNEGYRWKKKLFSEQGRAQLEKLSLAPWASRRRQELLELLDRIHPTIEELTAAVEQETRKRPDVLRLMTHPGVGPLTALAYVLIIGTPERFHCGKQIGTYVGMIPSEDSSAGKQRLGHISKQGNSLLRFLLVEAAQAAARSNPEWRRRYMHLAMRRNKSIAKVAMGRKLGVRLYWMWRNGCAYSPSFEFGSYVGQLGTGHGVK

SEQ ID NO: 182233 - protein, 342 aa, unidentified
MQVITIGLDIAKNVFQVHGVDNAGNAVLRRKIRRDQLIPLLRDMQPCLIGMEACATAHHWARELIALGHVVKLMPPAYVKAYVKRNKNDAADAEAICEAVTRPTMRFVAVKSADAQSILMLHRARHLLVRQRTAQISAMRAHLAEYGVVAPKGRAHVRGLIEALDKGDGPLPAMARQVLILLARTIEGLGAQIRKIEIELLAWYRTNQVCRRLSTIPGIGFVTATALAATVVDAKVFRSGRQFAAWLGLVPKQHSSGGKDRMGGISKMGDRYLRHLLVVGATAVVRYTRRKATTVSTWASQLLERKPARLVTVAVANKVARIAWAVMAREENYRATPSMAQG

SEQ ID NO: 182234 - protein, 361 aa, unidentified
MKTLNNTQGKQFRSIIGVDLGDSKHAICVTDKQGNILKEYTISNTRPHLQKLTSSYPDALIAMEVGTHSPWISRLLTELGATVIVANARKLRAIYTNTRKCDKLDALMLAKLVRVDPELLHPVHHSKEDTQVDFLPIKMRESLVRQRVNVINSIRGALKALGIRVPGATSRGMAKAAGQYLKKHHPEIHPLILPQLEVLEQLKAQICVYDKQIDQLIATKYPAAQRIQQIGGVGPLTALTFVLTIERPERFESPRDVGAYVGLVPKRDQSGDTDKELSISKAGNKYLRKLLVQCAQYNLGHFGQDSDLRRYGENLYKSKGSKAAKRKAVIAVARKLSVLMLTLWQRESDYEPLKNTTKRAA

SEQ ID NO: 182235 - protein, 368 aa, unidentified
MWYIGIDVHKKMCNACIKDLEGNIQKELEFPNKSTGTDKLLEAIEGREAKAVIESTGNMWLRLYLGLEEAGVDVVLANPKKTKAIAEAKLKNDKVDARTLADLLRAKLIAHCYVPPESVRELRSLVRHRITITRDMTRVKNRIHAILDKYELEFTGTDMFGKAWMMWLRGITSKLTELDQFIFDAELRHVETLKGLIKEVETRIAKESAESEDVKLLMGIPGVNYYTALLLTSEIGDFSRFSSANKLVSWLGLAPRVHQSANTIYNGRITKEGSPRVRWALVQAARSAVRWDDHYRTKYQRIKERRGDGKAIVAIAREITVAMYHMINRKEGYRFSTDSFKTKKLKKLEGESNKWAKMMEVPTGGMKA

SEQ ID NO: 182236 - protein, 457 aa, unidentified
MRQRGRRTKGIEEAHPFAGMSRVNPNAAGVDIGAEEIVVCVTGNESTQIVKAFGNYTVDLQALGKWLQEHEVKTVAMESTGVYWIPLFEELERQGFECLLISSRSLRRVSGRKSDIQDAQWIQTLHSYGLLESSFRPQGELVALRTLLRHRGQLLEHRSPHIQHMQKALLQMNVQLSQALSDVTGETGLTIIRAIVSGERDPQKLAAMRDRNCKKSAEEIGKALTGTWRTEQLFIVKQSLELYDFYTKQVEECDAEIDRMYALTRPNWAGGEVKPLAQKKRNSHSKNAPQNREEIRRHLKRISGVDLSVVDGFGVSLAQTVIMEVGTDMSKFPSEKHFCSWLGLAPKHEISGAKVLKNRTLKTKNRAGQAFRMAAQSVKRADCVFGSLYRRLKSRLDKAQATVATAHAIARVVYRMLKYKVEYEKINVEEYEQKYKDAQIKYMKKKAEKFGFQLVPA

SEQ ID NO: 182237 - protein, 412 aa, unidentified
MQNTDRRCCGMDVHKETVVVCVLPADGEQGKSIKKVYGTFHKDLGRMRGWLKQLKVTHIAMESTGVYWRPVWNVLEGHGFELLLANPMQVKALHGRKSDKRDAERIAQFLQDRRLDGSFVPPPEIRRLRDMLRYRLNLLEQRNETHNKIRDLFETAGYKFTCVAADLMSVTGQNIIKALIAGETSPDKLSWKVRGRLRKKEKQVRQAMAGCFDEFHRKMLGLLWKQYGFLSEQIAEMESSLRIAMEPHRELVELLDAVPGIDEMIAWTVIAELGTHMDVFPTAAHVCSWAGMCPGTNESAGKQISSKTRKGNRYLRRVLLQGAWAATKKKDSYLRAFFYRLQYRRGWGKAIVALGHKLLTIIYEILKTKTPYYELGANYYDQLNPQKTIAKLTARLARLGVEVIVPPKDVKA

SEQ ID NO: 182238 - protein, 438 aa, unidentified
MSNKVIFNLDELFISVGIDVGADFSWMSIALPNQQFVGKPYKILHNSIDSLTTAVSKIKEAEELYSLESRIFLESTGIYHYPLFCYLRDKGFNCSVINPIITKNSTNINIRKVHNDRFDSKKAALVGLKPDLKVSLMPSDLALNCRNLCREYYDLMDNRSAYVNKLQGELRMAFPQYLGIFSKVTINTSLTLLETYTSPSAFLKADKQEIIDIIKSTARFGLTYAQNKYNAIIQAATDANQFGYIIDSNIKRIRLYISFIRKYDEEINNILESLHELVDANEDADFVKQIHLIETFKGAGFLSAVSIMGEIGDFSAFSKPKQLFAYFGLDPAVKQSGKFEGTKVQMSKRGSAIARRVIHTLTLQSISISRNGEAKNPVLREYYLKKCDSKPKLVAMGAVSHKVCNMIFAILRDNKPFKIITPQEHIKQYNAAKCDIAA

SEQ ID NO: 182239 - protein, 406 aa, unidentified
MQVFIGVDPHKRSATIEVLDEHETVLATGRFPTDKAGYAAMRKTVAGWSDRAWAVEGSGGAGRPLAQRLLADGEHVVDVPAKLSARVRLFDTGHNRKTDAHDAHAVAVVAVRTPGLRVLAYDVELEALRMLADRREELTRHRVQTINRLHRLLSELTPGKAKKDLTALQAKAILAGVRPRDLAGKTRRRLAAELLADLVAVDKKIKASTKELKAMVAASGSSLMDLPGVGPVVAARVLADVGDVARFADRNRFASWTGTAPLDASSGEQIRHRLSRAGNRKVNHMLHIAAISQIRCDTPGRAYYRRKIAAGKTPLEALRCLKRRISDAVYRQLLADARRAEHSNQAGAGETGPGGHCRASLTSSAADSHLLIDTSDQPLPDPPQRRYADPAPPRKRHLAPPLKSTG

SEQ ID NO: 182240 - protein, 349 aa, unidentified
MNRTTYGLDIAKNVMQLHWVDGETGEIGRKKLGRAKLSEFFAQRQPARVAMEACGSAHHWARELGGLGHQVELLPARQVRAFVRSNKDDAADARAIWLAAQHSDIRRAPVKTVEQQGVMSLHRARSHWMSVRTATVNMLRGLLYEFGVVLPGGKKAALKAIAAKRAEIDDKLAPLMRGLLDQELEALKGVELSIDQLEAEIAGQQRQLDKARTLREVPGIGVLGATALAATLGDASGWRSGREFAASLGLVPAHSGTGGKTRIGHLTKRGDPYLRTLLIHGARAVITHAKVKPASLEELLRRRPLNVAVVALANKMARTAWALLAHGRAYRSEWKSTPPSGCGAQAQAA

SEQ ID NO: 182241 - protein, 389 aa, unidentified
MSEAPVEASVSATSKTILHCALELSKSCWLLAIQYPDRSQPSQYRIKGGDAEGLMAQLLISRDRCANSTGEVPSIVLCYEVGYDAFWLARFLIARGVECLVVDPASLQVNRRGRRAKTDRIDVGMLLRALIGWCRGERHVWSVVHVPSVDEEDVRRSHRERGRLIHERTSHINRIKGLLFAQGIRDLNIKAHYGKLQLDQLVTGDGRRLPPRLVNEIAREIARLALLQEQIAVIDRERDEAPTPCKATEKKRIQLTQLKGIGPAISAVMSREVYYRQFNNRRQVASFLGLATSPYDSGDMERSQGISRTGRGQVRAIMIQAAWLWTKHQTKSTLTRWFVERTKGQSGRVKRIMIVAVARKLAIALWRYVEQGLVPQGAVIELPRTKSAR

SEQ ID NO: 182242 - protein, 392 aa, unidentified
MVVSVGIDVSKDKHDCFIVSSDGEVLADVFTIPNTLDGFTCLLQRIRECTTPQDKIKVGLEATGHYSYNLLGFLLDNGLATYVLNPLRTNLYRKSLSLRKTKTDRVDARTIASMLLSDVGLKPYTDTAYHNEELKSLTRYRFDKVKERAKLKSSIARLVCILFPELEKLVPTLHMVSVYALLEEFPGAKQIASAHLTRLKALLESASKGHYKRDMALEIRDAARNSIGSRRPAKSLELQHTIRLIRELDVEIAEIEEQIQSIMDELHSPITTIPGLGFRMAAMILAEVGDFTRFDSPDKLLAYAGMSPSTYQSGQLKNCYPHMEKRGSRYLRYALYNATKYVCHWDPTFAAYLAKKRNEGKHYNIALSHAAKKLVRLIFAMEKSRAAYRLTA

SEQ ID NO: 182243 - protein, 337 aa, unidentified
MTAVHILAIDLAKRSFQVCATDRGGAVLFNRVLSRARLQQFLSEQSPCIVAMEACATSHFWGRFAQSRGHDVRLIPPIYVKPFVKRQKNDAADAAAIAEAVLRPNMHYVEVKSAEHQARAVAFRTHQCFVRQRTQLINALRGHLAEFGIIVAQGPANLGAVAGILADKAVDLPAEVREVGHLYLEQIKLLTEKIDGLTLRLREATKANEDMRRLCTVPGVGPVTAGAILAFAPDLRAFRSGRNFAAWLGLVPRQHSTGGKTRLGSVSKMGQTDIRKLLIVGAMSLIRWIVRKGVLPDNWLGSILGRKPRMVAAVALANKMARIIWAMMTREQNYRMA

SEQ ID NO: 182244 - protein, 373 aa, unidentified
MHQEDTKLDFANQPIFIAIDTGLKSWKTCIMTQHLEHTTFTQPPQTKVLVKYLHRNFPGGRYHCVYEAGYQGFWIHRELLDEGIENIVVNPADVPTKHKEQRRKTNGVDARKLCRSLRNGELTGIYVPSASACEDRSLIRNRYCFVKKQTRCKNQIKASLAFSGTTLPEEFVTSHWSRKYIGWLQQRRFKQSSGTEAFHALVDELLFQRQMIARLTKQIRILAMTEPYSRLVDHLRSITGISTLSAMVFLTELIDIDRFGSLDHLASYCGLVPDEHSTGEEQTLTGITHRCNGLLRGVLIECAWMAARKDPQLLMDFTKLSNRMPKNKAIIRIARKLLNRIRFVLKNEKPYEGTLTQGSRLSGEPCEAFHSKN

SEQ ID NO: 182245 - protein, 347 aa, unidentified
MKRIAVDLAKSVYQVAESIHVGRVDRRRRLDPEAFRRYVQEQPEPVEWVMEACGTAHYWGRVAQVQGHRVVLLHPRYVRPYRRRNKTDRNDCDAILEAARCAGIHPVPVKSHEQQQVQQLHNLREAWKKTRVQHINLLRGILRELGVAAPSGTQAFLRQACELIERPEVCALRGALQMVLGEISLCEQSMRDSEEQLARWHADDDIVHKLDEVSGIGLLTASALKTAVGKPERFASGRHLSAWLGMTPNEYSSGERRRLGCISCKGNTYVRTLLIHGARAALLAAKRCQTRTPERLTQLQRWALQTAERIGHNKAAVALANKLVRICWAVWCHERRFSGDWQSARPA

SEQ ID NO: 182246 - protein, 412 aa, unidentified
MQRVIGMDIHRTFGEVVFWEDGKLRHGGRVDMTRTALEGLGKSLLATDEVVIEATGNCMAVARVLSPFVKRVLIANPLQVKAIAHAHVKTDKIDAGTLASLCAAGYLPEIWTPDAATERMRRLVARRYQVVRHRTRIKNEVHAILHAHLISKCPHADLFNGRGRAWLMCQPVPNDERAGIERHVRELDRLAEDLAILDREIAESTMDDPAIRRLLTITGVNLTVAAGLMAAIGKVTRFKSPQKLVSYFGLNPRVRQSGLGAAHHGRISKVGRSHARAMLVEAAWAAAKTPGPLHAFFVRVRARRGHQVAAVAVARKLAVLVWHMLTKEKDYLWARPSLVAHKVRGMELQAGKPQRKGNSRGSTYAYNVKELRNQETHIARKAQESYENFVEAWRQRSPKEKARGRLNPARLE

SEQ ID NO: 182247 - protein, 412 aa, unidentified
MDVIVQRPAALDVHKEQVTACVRIPAADGTRAQEVREFKTTVGGLLVLHDWLQAHGVTQVAMEATGVYWKPVWAILEDDFECILVNARHVKNLPGRKTDVKDAEWLCQLLEAGLLAASFVPPKPIRELREFTRYRAAQIKERQREANRLHKALEPAGIKLDCVATDILGKSGRDMLDALCSGTTDPEVLAELARGRMRTKIPQLKEALQGRFDARRALLIGAILAHLDFLDEQIERLSDAIEEQLRPFQPAVELLRSLGGIETRSAQNSIAEIGTDMSIFPTADHLCSWAKQCPGNNQSAGKRKSGKSPKGPKWLDDALKNVAMAAIRTNDSYLQAQYKRLKPRLGHGRALGAVKHSILYAIWHMLTNGELYRDLGGDYFRKRDPERQTKRLIAQLERLGHKVTLEALPEAA

SEQ ID NO: 182248 - protein, 407 aa, unidentified
MEVIYPRCAGLDVHKQTVVACVRIAGDGAPLQEVRTFASTTSELLALADWLESFGVEQVAMEATGVYWKPVWHILESHFQLLLANAAHVKNVPGRKTDVNDAMWLADLLAHGLIRASFVPPVAVQELRSLTRTRKQFVRERSAHVQRIEKVLEDANLKLGVVLSDLMGQSGRAVLQAIVDGQDDPHHLAALVSVRVKASRAEVREALRGHIHAHHRFMLKLHLDHIKALDAAITTIEQEVGSTLKPFRTAAKLLTTIPGLSAISAHVVVAEIGVDMSRFATAGHLLSWACLCPRNDESAGKRRSTRLRRGGNWLKTTLVQAAWAAIKVKGSYLQAQFQRLRARRGAKKAIIAVAASMLTAVWHMLRDGTEWNDLGAAHFDHADAKKTANRLIRRLQQLGYVVDAKPA

SEQ ID NO: 182249 - protein, 315 aa, unidentified
MTSMIAQCVGVDISKDTLDVHLHPAAAARRFSNDAKGCSALIAWLADFVIARIVFEPTGAYHHTFERRLAQAGLPLAKINPRQARRFAEAIGRYAKTDAIDAAMLARFAALLEPPVHAPVSATLDDMKELQVARRALVKDRVAALNRAHTHRSALLKRQATERLRQIERQIAAIDTALRALLASDPALKTRFDILVSIPGLGETTALIMLVEMPELGSLEHRCAASLAGLAPMARDSGQQRGKRIIRGGRAHLRQALYMPALVAVRFNVELKAKYEALRSAGKPPKLALTAIMRKLIILANALIRDGRTWTAKLA

SEQ ID NO: 182250 - protein, 340 aa, unidentified
MTTLYAGIDLHSNNSHLAIQDNDNKRIFHKRLPNLSDVILAELECFKNQLSVIVVESTFNWYWLVDCLMDHGHKVILANPAAMQQYSGLKHLDDKHDAFWLAHMARLKLIPKGYIYPKDERPFRDLLRKRSQLVRYRTSMINSLQGIIHRNCGSYLSSNKIKQRRENHVTPLLDDQEDLALSGEISKEVIDFLGLQISRIETMAEQHVKLKEAYQCLRSIPGVGKILALVIMLETGPIERFKKVGNYSSYCRKVPTSWTSNDKRKGQGNAKNGNKYLSWAFSEAAEFARRHSKEAKAFFNRKAAKKNKSIAYSALAHKLARAAYYMMRNRTEFNPNLLFN

SEQ ID NO: 182251 - protein, 449 aa, unidentified
MKKHDLKQRGLPVIHDYAAGIDIGSRFHVVAVPADLAKESVQTFQAFTADLERMANWLVSLGITTVAMESTGVYWIPVYEILEAHGLQVVLANARDARAVPGRKTDVNDAQWIQRLHACGLLRASFQPDREISALRSYLRLRERHLDYAAAHIQHMQKALTHMNLQLHHVVADITGLSGMRIIRAIVAGERSPSSLAALSDKRCKAGVDVIEASLVGNYQPEHVFALTQALSMYDAYQAQLLVCDQQIAQTLIKLSQEKTLPAEPLPKPRHNTRQPNALNFDVRTLLYQLVGVDLTQIHGIGPYLALRLVAECGTDLSRWRTCHHFTSWLTLAPGCRISGGKVLSAHTRKTKNRVTAHLRLAAVTVGRTNTALGAFYRRLAARIGKAKAVTATARKIAILFYNAMRFGMNYQDPGADHYEQKYRERVVKGLHRRAAEFGFTLQPEESVS

SEQ ID NO: 182252 - protein, 451 aa, unidentified
MVMREPQEICDVEHEQILERVAAVDVAKASGMVCVRGPQAGRPDRRRSLVWEVPATTNAVLELAEHLARERIQKVTLEATSDYWRIWFYLLEAAGLDVQLVKAHDVKQAPGRPKTDKLDAVWLAKLTERGMLRPSFVPPAEIRNLRDYTRLRTDLTRERTRHYSRLEKLLEDALIKVSAVASKLDTVSVRDMIEALIAGERDPQVLAGLARGRMRVKHHALVEALTGQFDDHHAELARMLLDQIDSLTGQIGRLTARIEQLIAAIPAAQGVDPDGTTGPGAGLAEGAPVLPAIDRLDEITGIGRDTAQQIIAEIGLDMGRFPTPGHLVSWAKLTPRTIQSGAKSRSGRTGKGNPYLKGALGEAAAAAARTDTFLGERYRRIVKRRGKLKALVAVARSILVIAWHLLSDPAARFRDLGAGYYASRTDKDRKARNHIRQLEALGFTVTLAPAA

SEQ ID NO: 182253 - protein, 347 aa, unidentified
MKVLIGVDPHKASVAVAAVDEAKGELLERASFPQDRAGLRALERWVSRFPERRWAMENARGLGRHLAMRLAGSGESVVDVPPKLSARVRVLSTGNARKNDGLDALATALAASRNERLAPVGPEAASEVLRLLSERREDLVAERTRALNRLHVLLRDLLPGGVAGKLSADRAARILRGMRPKGGNSDRLRRRLASEVLRDVRMLDRKIADLNGRVEAEVEASGTTLTEIFGVGPILAATILGTVGDVARFPTKAHFASYSGTAPVEASSGKVVRHRLSLAGNRKLNYALHMVATSQARSDAPGGSYYRKKLAEGKSPKEALRCLKRRVCDAVYKSLVADTQAPSRSAA

SEQ ID NO: 182254 - protein, 346 aa, unidentified
MTIVEAGRTVIGGVDTHLDVHVAAALDPIGGVLGVESFDASPRGYKAMFEWLGAFGTLSKVGVEGTGAYGAGLGRFLAKAGVEVVEVDRPNRQVRRKKGKSDPADAVEAARAVLSGRATGTPKTRDGNVEAIRALLVAKRSARDARLRALHQMRQLSYTGPDQLRSRLKDLSITELVAETAAMRPRSSGDPVVYATKVSLAALGRRVVSLEDELVGIDELLTKLVTTCAPKMLELFGVGIDTTATLLVTAGDNPERLRSEAAWAHLCGVAPIEASSGKVTRHRLDRGGDRNANQALWRIVMTRLACDPRTREYMERRTKEGRSKREVIRILKRYVAREVFKYLPRA

SEQ ID NO: 182255 - protein, 421 aa, unidentified
MSYRIAAIDIHKSVLMVVVATAAEEVVETAGEALEFECGRFGTGQAERARLVKWLQERGVTEVVMESTAQYWKPVWLDLEPHFPKLHLAQAYSNRAPKGRKNDFRDGKRLARRLLAGELMLSLVPNAQQRLWRTLTRSKHQLVRDRVRLQNQLESLLEEMRIKLSAVISDLLGVSGRRILQALAEGESDPEKLADLGDDRLRCGRAALVDALSGSPTPTHTAVLKLFLERVKLLDKQIGDLDKLIGQELKPHEEVVARLAQVPGFGVDSAQRVIAEVGPEAETFPSAKQFSSWVGVCPGSNVSAEENQSSRSAKGNRFVRGLLIQAAQAAVKKKGSRFQSLFRHFLPRLGYKGAIWAIAHRLGRLLWKVLHHGVVYIEQGNETTPSAKKRHAQKLVKALRKLGYAIPDALISSPPNVGAQA

SEQ ID NO: 182256 - protein, 366 aa, unidentified
MKKVSIAAVRQSRSISHAKLTIGLDLGDRNSWYCVLNEAGQIQLERRVGTNAKALREVFGSMPRSRIALETGTHSPWISRLLSELGHEVIVAHARKVRLIGESRKKDDRLDAQALARLARIDPELLCPVKHRSAQAQADLTVIRARAGLVRARTALVNTARSLAKSYGGRLRVCNVRNMNPEKAEGLSPELQSALEPLLAEIESLSERISEYKDRIEALAQHSYPQVALLKQIKGVGTLIALTFLLTLEDPHRFRKSRDVGCYLGLQPGRRNSGQSEPQMHISKEGDPYLRTLLVQGAQHILGPFGVDCDLRRWGLKLAERGGKSGKKRAIIATARKLAVLLHHLWVSGEAYEPLHNSSRATAAAA

SEQ ID NO: 182257 - protein, 355 aa, unidentified
MDSIKYIGLDVHQSTISVAVLDADGKLVMQSVIATHATTILDFLHGLRGTLHVTFEEGTHSAWLYDLLVRRVAKLVVCNPRKNALLKAGNKSDTVDARKLAELLRAGLLSPVYHGQNSTAAVKHLGRSYAALTEDTTRVMGRLKALYRSQAIACAGKKPYGARHREEWLAKLSESGLQRRAERLYQQLDLLQELRREARHDLILECRKHSEAKLLRTIPWLGPIRAALLIGRVQTPHRFRSKRQFWAYCGLALETRSSADYGFVNGQLERKKKPVFIRGLNLNHNHDLKNLFKSAATTASGSNGPFRPFYENLLIKGMKPELARLTLARKIAAITLHVWKKGEPFDAEYLKPQAA

SEQ ID NO: 182258 - protein, 414 aa, unidentified
MDRIVERCCGLDVHKASVTACVRVPGEEAGERHQELREFATTTPELLQLRDWLAAFGVEVVGMEATGVYWKPIYYLLEEDFECWLLNAHHLKNVPGRKTDIKDAEWICQLLEHGLVRPSFVPPKEIRELRNLTRYRKTQIEERTREVQRLEKILQEAGIKLSSVASQVLGVSGRVMLDALIEGTTDPEVLAELARGRLRSKLPALRDALQGRFSSHHALMAGKMLAHIDYLDESIAELSGEIERVIAPFSEKVELLDTIPGVNRRLAETIIAEIGVNMDQFPTHCHLASWAGMCPGNEESAGKRRSGKTRKGSKWLRSALVEAAHAASRSKGTYLSAQYARLRGRRGPRKAAVAVGHSILVIAYHILERGRPYHELGDDYFDQRRSKEAYTKRLVRQLERLGHQVALEPFPQPA

SEQ ID NO: 182259 - protein, 428 aa, unidentified
MNYNTQNAKIASITEKTLIVGIDVGSETHYARAFDWRNYEYSKKPLEFSNTEAGFLTLKAWVEDIAEKHGKTAVIPGMEPTGHYWFALGKFLQDSGMKPVHVNPHHVKKSKELDDNNPNKNDRKDPKTIAALVNEGRFSYPYIPAGIYAEIRSLSNLRFQTQEELTRIKNRTARWFSICFPEYKNVYKDLKAVSGRMVLKAAPLPEDIIKLGAEGVNRIWRDAKLRGAGMKRAKTLVSAAEHSIGSKEASEAARIELKNLLNDMDVYTARLEELIRSIEEKLKEIPYIDKLMAIQGIGLVTVSGFIAEVGDIGRFDNPKQLQKLAGYAIVANESGKHNGESRISYRGRKRLRYVLYEAAISLIGKNAEFREIHEYYRSRKENPLKKMQSVAAIACKVIRVFYAILTKGVDYDAKKLMGDIRRPQIQAG

SEQ ID NO: 182260 - protein, 342 aa, unidentified
MDEVSIIGLDLAKRVFQAHGMCSKGSMLFRKKLTRSQLLEFLAKQPGCIVAMEACASAHFWGRAIRDLGHDVRLIPPIYVKPFVKRQKNDAADAEAIAEAAARPNMRFVALKSSSQQAGAMVFRTRDLLVRQRTQLINALRGHLAEHGVVAPQGVANVRVLETAIEGAEQTLDLLVIEMARLYLQQIATLTENITTLEKVLRQEAANADNTARLLTVPGIGHVTAMAIEAFAPPMEIFRRGRDFAAWLGLVPLQHSTGGKQVLGKTSKMGQRDIRRLLITGAMTVVRWASRKSPPEGSWLFRMLARKPRMLVAIALANKMARVVWAMLTKGEVFRNPATVAA

SEQ ID NO: 182261 - protein, 375 aa, unidentified
MSTNLRNVGLDVHADTIAVAVAEPGGEVRPLGIIPNRPEAVAKLVRKLGPREHLRVCYEAGPCGYLLYWQLTKLGVHCDVVAPTLVPTKPGDRVKTDRRDAAKLARCYRAGDLTPVWVPDAAREALRDLVRAREVAKHDQLRARHRLSKLLLRRGIRPPAGVNPWTERHRRWLDTVQFEAPAQQATLGDYLQEVDHAAARLERLEQALDDAVQAAPASLRAVIAALQTLRGIRLVTAATIVCEVGPLSRFTHPRQLMGYSGTVPSEHSSGAAIHRGGITKTGNAHLRRVLLEAAWAYRFPPKCTKGLRQRQRGQADAITDLAWKAQQRLCGRYRRLLARGKPTPHVITAIARELLGFIWAIGVAVERAGTAAAAA

SEQ ID NO: 182262 - protein, 345 aa, unidentified
MQLQTVGIDLGKTVFHLVGLNERGEVVVRKKFSRKQLLHFTANLKVKLIGMEACGGSHFLGRALREQGHEVRLMPAQYVKPYVKTNKSDYIDAEAIAEAVGRPKMRFVPIKSDDQLDLQSLHRVRERWVMRRTAVINQIRGLLLERGITVRQGRRHIDAALPGILEDASAKLSGTLRALLAQLRLELDHLQMRIDEADAVINKAAGENEACRRLVAIPGIGPVTATAIIAAIGNGAAFKKGRGFSAWLGIVPGEHTTGGKQKLLGISKRGNSYLRRLLVQGARAVLQQRAKQSSGLSAWLAQLTTRVHSNVAAVALANKLARMAWAVLAKNEPYRPPVVVGAVPV

SEQ ID NO: 182263 - protein, 411 aa, unidentified
MKTLHKRCAGLDVHKTEVVACLRVVNRGKASYELRRFPTTTRALIELGDWLEQAGCTHVAMEATGVYWKPVWYILEGRFQQILANAAHIKAVPGRKSDTHDATWISDLLAHGLIRASFVPPQPIQEVRDLTRTRKQLTREIVQHTQRIQAVLEEANIKLTSVITDILGTSGRRILKAIVAGQTDPTKLAELGGPRLAATKSQLADALLGRVRPHHRFLTDQNLKTIEQLEETITAFDARIEAALEPFREAIERLKEVPGLSETSVQILLAEIGTDMSRFPTAGHLLSWAGLIPRLDESAGKRRSTRVKKGAPWLKPVLVQCAHAAGKKKNSYFEAQYLRLKARRGPKKAVIAVAASILKTAYHMLADGTCYQDLGADYFVRRDPRRVVAKLASRIRSLGYDVVVKVPEVAA

SEQ ID NO: 182264 - protein, 350 aa, unidentified
MLIIGCDYHPGFQQIAYVDSETGEFQERRLQHPEEAEKFYRDLAEQRVSVRVGMEASGHARWFERLLEELSFELWMGDAAKIRAKRVRKQRTDRLDAQHILKLMLKDDFPKIWTPSWENRDVRQLLWHRHRMVQTRTRIMNQLQAVAINEGVRYKKRLWREAGRKQLESLSLAPWASRRRKDLLEVLDRINPTIAELTQAIAEEAEKCPEARRLMTHPGVGALTAIAFVLIIGEAHRFGCGKQIAAYLGLVPEEDSSGERRRLGHISKQGNSLLRFLLVEAAQATARCDQRWRNQFFHLAQRRGRKIAKVAMARRLAVRLYWMWRREWNYEQLQSFGAHAGQPGHPHGVQ

SEQ ID NO: 182265 - protein, 351 aa, unidentified
MNLAGDADLVIGVDTHLDTHTAALCDARGRALSRLQVPATAAGYAQLLAWARSAAAGSRAVWAVEGTRHYGLGLARHLVSQGEQVSEIDASHHAGKRRAGKSDAIDAVRAARELLARPHPAQMRADGDREALRLLMTGRDNAIQSCKTARTALAAILVTAPAPLRERLRQLPRERRARECAALTCPEAADRQTRILHQTLIRLGQRIAALAETAADLEAQITEIVEEMAPGLVAAEAGLGALSAAQILLSWSHAGRIHSEAAFAMLPGTAPVPVSSGRTGRHRLNRLGDRQLNRALHIIAVTRMRCHPQTLAYVQRRRAEGKTDQEIRRCLKRYLARHHYRTLNSQISRPA

SEQ ID NO: 182266 - protein, 358 aa, unidentified
MSKNNQLDFTGETIHCGVDVHLKQWRVNIHDSNFELEDFSQDADALTLYKHLSMKYPNAKFKIGYEAGFCGFNAQRILSSLGVICYVVNAADVPTTDKEKKQKKDKLDARKLCDYMQSSKAKSIYIPTVSWEHARSLVRTRDQIVNNQTRCKNRIRQLLHFSGLHLPEQYAAGRYWSKKMIEHLEQMDCDSSEHLHTALQLLIKDYNQTRLLLLEATRAIRRLCKETVYQPGIFWLRSIPGIGLINAATILFEIQDINRFKSLDRLYNYAGLVPDTGDSGGRRITKGITARRNEYLRAALVESSWTVVRKDPALLMKYNELRKRMHYNKAIIRIAKHLLARIRFVLLHQKEYVTGVVA

SEQ ID NO: 182267 - protein, 408 aa, unidentified
MSGKTAGIDVHKKVLMAVVINGAAPEEKPERRRFSTMPTELHHLSTWLRDRGVEEVVMESTAQYWRSVWLELEPHMSLHLAQAFSNRAPRGRKHDFKDAERLARRFIAKELILSFVPGEEQRMWRNLTRMKLQLIRDRVRLHSQIECLLEEMRIKLSVVVADLFGASGLRILAALAHDETDPNNLALLGDERLKCSKEQLLDSLSGRSHPTHRQMLALQLDRLRQMNEQISTVNTLIAQAMKPHQDAVVRLAQVPGLGIDSAQQVISEVGPTAATFSSAAEFASWVGTCPGKEESAEENRTSRSAKGNKYMRRILNQAAHAAARSKGTSFQAVFRRLLPRLGYKSAIWAIAHRLCRLVWKILHEGVSYIEQGIASQPSLLIHRAKYLAQQLRKFGYDLRVTAANPVPE

SEQ ID NO: 182268 - protein, 365 aa, unidentified
MVSNTSNNQKAQNSEFSSQSSYEGKTVYVGIDVHKKTYSVVAIIEGVVVKKWRTLASPTNFAQQLLRYYPLADIYTVYEAGFSGFVLHRTLIDAGIDNIIVNPASIETEAHNRVKTDKRDAHKLATLLSVGRLRGITIPTFDNEQQRLLTRTRQQLVSSQTCVKNQIRMKCHQMGLIDPHDSRKMSHKLLDELLSKSPSSEFTFVIQALNEVWKTLETQIKILEQQLKQLAKKSATEPIYRSAPGIGAIAAMVLSHELGNLSQFRNERQLFSYTGLTPSEYSSGDKIRRGQITRQGNYRVRHILTQAAWRAIKEDASLKDFFERLFPRTGKTKAIIAVARKLIGRIRAAFRQSTQYQIMPIITRV

SEQ ID NO: 182269 - protein, 366 aa, unidentified
MKKISTVAIEGMQIFKENQLTIGLDLGDRTSYYCILDEAGQVIWEQELPTTPKGFEQVFGKIPRSRVAMETGTHSPWISRQLTQLGHEVIVAHARNVRLIGESSRKDDRLDARTLARLARIDPALLGPVRHRSAKAQIHLTVIRARAALVSTRTALVNAARGLTKSYGARLPKCGTEQMTREIAKELQPELRQALNPLLAEIESLNERIAEYDTRIEQIAREKYPEVARLKQVKGVGPLIALTYVLTLEDPYRFRRSRDVGCFVGLRPGRRNSGMSEPQLHISKEGDRYLRTLLVQGAHWVLGPFGQDSDLRRWGLKLAERGGKNAKKRAVVAVARKLAVLLHKLWVSKEVYEPLRNNRKGMAQVA

SEQ ID NO: 182270 - protein, 438 aa, unidentified
MSNKVIFNLDELFISVGIDVGADFSWMSIALPNQQFVGKPFKILHNSIDSLTTAVSKIKEAEELYSLESRIFLESTGIYHYPLFCYLRDKGFNCSVINPIITKNSTNINIRKVHNDRFDSKKAALVGLKPDLKVSLMPSDLALNCRNLCREYYDLMDNRSAYVNKLQGELRMAFPQYLGIFSKVTINTSLTLLETYTSPSAFLEADKQEIIDIIKSTARFGLTYAQNKYNAIIQAATDANQFGYIIDSNIKRIRLYISFIRKYDEEINSILESLHELVDANEDSDFVKQIHLIETFKGAGFLSAVSIMGEIGDFSAFSKPKQLFAYFGLDPAVKQSGKFEGTKVQMSKRGSAIARRVIHTLTLQSISISRNGEAKNPVLREYYLKKCDSKPKLVAMGAVSHKVCNMIFAILRDNKPFKIIAPQEHIKQYNAAKCDIAA

SEQ ID NO: 182271 - protein, 404 aa, unidentified
MIYLGIDWAEDHHDLCLLDEAGSRLAGARVPDGVEGLRRLHELVAAHADNAESVVVGIETDRGLLVQGLVTTGYTVYAINPYAASRYRDRHTTSGAKSDRGDAKVLADLVRTDRHNHRRIAGDSDLAEAVKVLARAQQNILWARQRHINQLRSALREFYPAMLEAFGTDLASRDALVVLGLSSTPQAGARLTRAQIRAALARAGRQRNLDTTSTAIHTALHSPQLLSPARLTAAYGLTVQASVALLRQFNAEIDHLEAELVASFEGHPDAEILCSLPGLGSVLGARVLAEFGDDPTRYKDARSRRCYAGTAPITRASGTRNVVLARTARNRRMAQACYLWAFSALRPSPGARGFYDRQRANGKTHHQALRALANRLVGVLHGCLSSGQFYNEQVAWPTPHEVAA

SEQ ID NO: 182272 - protein, 409 aa, unidentified
MELTPIYKRVIGLDVHQAQVTACALIEQADGTLIVERREFGGFKKDRKALAEWARGLAPDLVVMESTGIYWKSPFAALESVGIVAWVVNARHVKAVPGRKTDVADAQWLATLARSGLLRASFIAKADMRNLRHIARQRQKLGGMLASEKNRLHKLLTDAGIRLGVVVSDLHGQSARAMVKAMIAGKSISAVLDLASTRLRANREEIFEALQAEELTAAHRFCLDEIMKHIEEIEARMTRFDQELLRCLIEAGHEWSLQLLQTLPGVDVIGAAMLLVEIGDDMNVFCSAQRLASWVGLCPGNNESAGKRKSGRIRKGNAWVRRLLCEFAQAASRSRCALRGKFQALTVRKGHKRSIVALGHKMLRTIYAMLSKKTHYVDKTVDYEALMVARNAPRWLQMLVKHGFITATA

SEQ ID NO: 182273 - protein, 358 aa, unidentified
MDYYAGIDVSLELASVCIVDANGKIVKETKVESCPDALVAFFNDLRLPMAQIGLEAGPLSQWLHAGLTQAGFETVLLETRHVKAALSAMTVKTDRKDARGIAQLLRMGWFRPVHPKSVRSQEVRALLVARKLLQNKLKDVELSIRGILRGFGLKVGEVTRKKFESRIRQLVTGHAMLERIADAMLSARAGLLIQFNKLDKSVRQIARYDKVCLQLMTVPSVGPLTAITYKSAIDDPQRIKKSKSAGPLFGLTPRKYQSGETDVTGGITRVGDEMVRTALYEAANSLLSPKTRFSALKRWGLEVAQRRGLKRAKVAVARKLAVILHRMWVDGTPFRWSKADGAHTDPSRAKTSGSGSCR

SEQ ID NO: 182274 - protein, 372 aa, unidentified
MGHHTEAFVGIDTSKLRNAVAIADGGRGAEVRYLGEFPATEAAIQKLVAKLAAKYGHLTFCYEAGPTGYGLYRLLKSLGHESLVVAPSLVPKKAGDRVKTNRRDAVSLAKLLRAGELTAVWVPDERHEAMRDLSRARLAVKKDLQGKRQQISSLMLRLGRIYPGKTTWGPAHMKWLMAQKIEHREQRVALEELLEGIRQESERMERLENAIREVVPEWSLAEVVAALQAVRGIDLIAAVGVLAEIGDLSRFQNPRELMGYLGLVPSESSTGDKVKRGGITKAGNGRARRILVEAAWSYRYPPRVSRDKQPKVEAAPRRVREIAWKAQTRLCGRFRSLERKGKRRTVIATAIARELSAFIWAINRELMAHREA

SEQ ID NO: 182275 - protein, 439 aa, unidentified
MILIREVADAPVIMGISKPAGLKSPCGEVKIVNPLFVGIDVSSKNNVAYLMKPDGSKHSSFSVQNNLGGAKLLSERIVSALGSMQLERVVIGLEATSIYGDSLVYALREDGRLGRFQRKIHVLNPKQVRKFKEAYSDLPKNDWVDAFVIADHLRFGRINREVYMDDYRYKALQTLTRARFDVIQNLTREKQRFANYLFLKCSGMAQDKDIQNTSATTIALMEHFETVDDLANADLEELTAFITETGRGKFADPDATAKAVRAAAKGSYRLPKTVNDTVNQAMAVSIASMRALKGQVKVLDKAIEQQFEIIPNTLTSIPGIGKVYSAGIIAEIGDIHRFDSQASVAKYAGLVWNRSQSGDFEAEHSRMIKSGNRYLRYYLLEAANSVRRCDSEFRRYYDLKFKEVNKYQHKRALALTARKLVRLVFRLLKDNRLYIPPEG

SEQ ID NO: 182276 - protein, 388 aa, unidentified
MRRSNQDRIVGLDVHPDSFAGAILQGTDPWKARVVSTSTRVALPLLEKWALRHTREEDILVMEASGNAFCVAERLRALKRKVVILDSHRAGKVGKTYCATDRVDAIKIARIYLSALSPVVWQPDAKTRERREVFSAYQAVVKEGMRLKQQLKSMLNEHCVRLEKGFRLSHPSAIGRLLQRRKWSEAQKMLLSQLHAGLVGARVRRQRLRHYMAQELLAEKELLRLTRLCGINLITLYGLIAAIGEIKRFATARKLSAYFGLNPTVEQSGNYEGSGALKRHGRGAIRALLVQSAKKLLQVDNPLQKWGLALAARRGRNKAAVAIARKLCVAVWHVMQGHVIGAIERMDTLHTKLHKLATELGVPTIKQLGYETKEAFVQKKLYLLRSYA

SEQ ID NO: 182277 - protein, 354 aa, unidentified
MKKNFIGIDFSKEKFDATLIKAEGLKECAPSVHEVFDNKTSGYRRLVKWVKAHTEGFAADAWLFCGENTGGYSIGLSNYLYASGYDMWLECAYKIKHSAGIQRVKNDKADSRAIAEYAMRNYDKMTLHKPQSASLTCLREVFLYRHSLVRQKVALTVRRDEKRLTQEKSDARAFMSFTSKHLITEVNKAIAKCDEKIKEIIASDDELREVFDIITSMPGIGIQNATCLMVYTDNFQKFDLDSRKIACYYGIAPFGRQSGTSVNSRPQVSPFANRMIKSLLSQAALAAIKFDMNVHNYYQRLIERGKHPLLVHNNIKNKMLHILVAMVRDRVKYNPDNVYRKSNEVSLAPQVLNI

SEQ ID NO: 182278 - protein, 336 aa, unidentified
MTIIRIGLDTSKHVFQIHGVDENEQAVLGRQIRRSEVAKYFAKLAPTRIGMEACGASHHWARALRALGHEVVLLPPQYIKPYVKRGKNDKIDAEAICEAMSRPTMRFVPVKTTEQQAGLTMLGVRDLLIKQRTMLINAIRGHAAEFGVTVAKGPKQVAELLRRLASDDGVPALAREMIGVLARQLDGLDIKLTAVDKRLIAWHQQDQTSQCLATIPGVGPISGVSFALKVPDPRAFRSARHFASWIGITPREDSTAGRHKLGRISRAGDEDLRRLLVIGATAVMRAAKPGRSSPWLLALLARKSKKLAAVALANKMARIVWAMMVSGETYRQPAQA

SEQ ID NO: 182279 - protein, 326 aa, unidentified
MQNILGIDVSKDTLDVVLVTEKGCFHKVISNSFQGYQSLGNWLKAKRAEQVHTCLEATGQYGEGVATYMFDQGYEVSVVNPARIKRYGESKLHRNKTDKADAELIAEFCQKEKPSLWQPLSLEIKHLRALVRRLADQKTNLQQEINRLKSGEKDAWVKQDLQTHIEYLRERIKATKKEIKNLIDQTSNLKFQHKLLTTIPGIGDLTANTLLAEIGDFSAFENAPQLAAYAGLNPRGHRSGSSVLKKTQVSKQGRAELRRCLYMPAIVALSCNPVIQSLAERMTKTNHQKMEIVIAAMRKLLHLSYGVLKTQLPFDPDYGAQFNYPS

SEQ ID NO: 182280 - protein, 348 aa, unidentified
MNFYTQQHRYYCGIDLHARSMYVCILDAAGTIVVHKDLRAEPESFLRVIAPYRDDLAVAVECIFTWYWLADLCATERVPFVLGHALYMKAIHGGKAKNDKIDSHKIAVLLRGGMLPTAYVYPAAMRATRDLLRRRCHLMRKRAELLTHIQNTTSQYNLPALGKKIAYKANRAGVAEHFPDPAVRASIEMDLALINHYDALLTAVELTIVRSAKQHDASVFHRLRSVPGIGKILALVILYEIHDIARFSRVQDFVSYCRLVKCAKESAGKRLGSSGRKIGNAHLKWAFSEAAALFLRQNLAGQRYFARLERKHGKGKALSVLAHKLARAVYHMLTRQQAFDLQRFLSAP

SEQ ID NO: 182281 - protein, 443 aa, unidentified
MSRKKRTHLRGERGQAFADKIRGIPLDQILCVSLDVHKYFHVVIIHNALGEIVTPTFEIDIFQTGFERLCQAVDEAIVRTKAQVVLTGMEPSSHYFENLARHLWQRPQPVTLVNSYAVKRNRDQQMMQYEKDDEIDTASIGDLLRRGEGSPFNPPTGIYLQLQHLDRMRISKVKMRTSLQNQIIGHLDRIFPGLIIMGDEAKERYEPLFATDFWECQTMQHLIRVCPNPHMLAAMSPHDLIGTFHAHNYAMGPVRAAKIIAYANKVLLPDPELVAIRCQLLPHDVALLEDVQCHIVQLENRLRTLLAQTPYPVWTKLKGLSDIQVASLAAAIGDPANYKYAAQVFRRSGLVPGRNDSGTRQRKGKGKKVVKVGDVYLRRALMNALATLILHQPILRDYCNKLKVSKPAGVARVATARRAMGILWAVLRDRHSETLILKKGVKM

SEQ ID NO: 182282 - protein, 381 aa, unidentified
MTRATRTAEYTGATTLCLYLAFELGSNEWKLGFATEPGATPRVRTMPARDLARLTREIADAQQWFGVQAATPVRSCYEAGRDGFWLHRYLTSSGIANVVVDSSSIEVNRRLRRAKSDALDARKLLGMLLRYHAGERAVWSVVRVPTVEEEDRRQLHRELRTLKQERTRVANRMNGLLANQGLWLPPGTNIGAAAKTVRLWDGSPGPAALRARLEREWEHAQFLRTRILALERERQRAIAHGRGETIDKVRQLLRLRAVGPTGAWVYVNEFFGWRRFRNRKEVGAAAGLTPTPYQSGDERREQGISKAGSRHIRAVAIELAWGWLRYQPRSRLSQWYQARFGRGGTRARKVGIVALARKLLIALWRFLEFGVVPEGASLKTA

SEQ ID NO: 182283 - protein, 330 aa, unidentified
MKQYDHVFGVDVSKKTVDITHVINQQFTHRQFTNDNAGMNQLMEWFNELTPVLDKALFCMEATGLYCFTLTHFLASHSIDMWIEHAAQIKKATALARGKNDKVDSQRIAVYATKNLDRIRLWKPVNATLEKIRHLASLRERLVDTKKRLATPIKEFEEVGNLAMAKLLTKTIKSSLAAIDKDLKNIETKIIDVINEDDNLKLLYKLITSVVGIGFVTAVNLIVHTNGFTMLKDTRKLACYCGVAPFEYSSGSSIRGRTKVHYMANKKLKCNLHMASLTAVKLDADLKAYYERKVAEGKSKMSVLNAVKNKLLARVIAVVNKQELYVKKTA

SEQ ID NO: 182284 - protein, 421 aa, unidentified
MTPPNEVVWAGIDTHTDTHTIALLDERGRPLGAETFTADPDGYDRLIGMLPGPGRVAAVGVEGTNSFGAALARRLTAAGYEVREVLRPRRSVRRRDGKSDPLDAVAAARSVMAGDGTSLPKSSDGWVEALRHLNAQRSQLVSAMTAISNSTNGLLVTAPEPIRERYRGLRSETRMNRLAECRPAGGLVEHSVLAALKSAAKAWKALKRQAGLLEERMRLILEEHARPLLDMYCAGTVIAATLAIVAGDNPERIRSEAAFTKLCGVCPIPASSGRTNRHRLNKGGNRQGNMALHRIAIVRLRYHKPTRDYMAKKTREGKGKLEIIRCVKRFIAREAYRALISIRNGEVGRGTPAERGAKLRELRVSRNITQQQIGEALCVPSSRISEIERGARDLPELEQRAIQWIHSITDPKQHTQTLDNV

SEQ ID NO: 182285 - protein, 373 aa, unidentified
MPKYSTAFGMDVHLRSTTVCALDADTGEAVTRRFPGNPWGEIAGWMDGFPGPSLAAYESGYLGFAPQRELAGLGVECVVAAVSKIPRSAADSASKNDRNDAARMAKAILAHDISPVWVPSPEVEGIRDLAGAYDGATARLATAKQRLLAFLARRGFVYGGTTPAGNPRKYWTYDFLRWLDKARPEDDGGVRALAALRNEVEAAAEARADLLSEYRAAVDASPIAAEVAALQSIKGCAFALAAAFSAEVGDFTRFRSGRQVTAYFGLAPSQRSSGDSVRLGGISGAGNALVRKLAVEGSWCYAAARHQPKLMPRDTGVPLEIRMHGRKGSERLLRRREEMLARGMPAAKANAATAAELVRWLWALGMMCREGAE

SEQ ID NO: 182286 - protein, 311 aa, unidentified
MDQIYIGVDVAKAWLDIYHPARGAERIENTPASIRSFARLVVREGAWVIFEASGGYDRALRDGLEVNKASFSRVNPRQARDFARAMGVIGKTDRVDDRMLATFGQKLQPTQTPPIAATRQVLLAQITRRRQLVEMRKQEATRLQQTTDSVSRSDMKSLILVLERRIAKVEARIAEIIQSSPAMAEMDRMLQSVPGVGMIVSATLIAELPEIGTIDRRKIAALAGLAPIARDSGQRQAKRVIGGGRATVRTVLYLAALHASRHSATFRAFRRKLQDSGKPVKAALTATARKLLTVLNSMIADGAYFREIVPA

SEQ ID NO: 182287 - protein, 459 aa, unidentified
MRKAKKNVEDRFEKMPIVHPFAAGIDVGSRSHFVAVGQRKEDVKEYGVYTEDLHRLCKDLLNAGTTTVALESTGSYWQPLFVMLQEYKLEPILVNGKFTKNVKGRKTDVQDCQWIQKLHLMGMLEGSFIPDLFTEAIRQYYRHREYLLENAAGYVNKMQQALRLINIRLDAVLRDVVGLSGKDIIEAILKGERNPAALASLVQPGVKKSQAEITAALTGDWREEYIFELRQCYELYQYYHQKIDECDEEMKKIITKEIDRKQKEEGLAKVTEVKIKKKRVQKNAPNINMQQLMVDMTGGVDISTIDGVGIGLLLCLVAETGVDLNAFETDKHFASWLCLCPDLKKTGGKVISNKTRKGKNRLSRAFLHCANAIGNMKEGSYLVHFFKRLARKKDRSVAMVATARKLAVIVWNMLVKKKPYNPDPPAEYQNKIRNNQIKNIQRKIRELNITENELIFATA

SEQ ID NO: 182288 - protein, 308 aa, unidentified
MSKAHLDAAWGERFERVSNDAGGWDALVAKFQADGVDVVVLEATGGYENAAACALQAAGLAVGVLNPRQAREFAKAMGQLEKTDRVDAYSLRDFAGVIARHPKRARYIRELPDAERAHLAALVMRRRQLLDMRTEEANRLHTAHPAARKSVQAILKAIDKQLATVDDDIDRHMQQHFKELRTWLESANGVAEVTSSTLVGLLGELGRLPRRSIAKLVGVAPLARDSGPRKGTRAIWGGRAEVRAVLYMATVSATTHNPVIREFYQRLLTKGKPKKLALVACMRKLLTILNAMARDHAVWDDSKHVKTA

SEQ ID NO: 182289 - protein, 307 aa, unidentified
MENIALIGIDLGKNSFHIHCQDRRGKAVYRKKFTRSKLIEFLATCPATTIAMEACGGSHFMARKLEELGHFPKLISPQFVRPFVKSNKNDFVDAEAICEAASRPSMRFVQPRTESQQAMRALHRVRESLLQDKVKTTNQMHAFLLEFGISVPRGSAVISRLSTILEDNNLPLYLSQLLLKLQQHYHYLVEQIKELESQLKRKLDEDEVGQRLLSIPCVGTLTASTISTEIGDGKQYASSRDFAAATGLVPRQYSTGGGADNIVGHQQARQQEDTNLAGSVRQSIYTKTGIPVRQVGRLGPGVTVPEK

SEQ ID NO: 182290 - protein, 332 aa, unidentified
MIKMNLQDRVANGDRPNCGIDMSKQHADACWGSNELRISNDPEGRKELIARLLVDQVDLVVIEATGGYERELVCEMQQAGLTVARLNPRQARDFAKSLGYLAKTDRIDARALRDFADFLSRHRDRHKYITAPTDAARDELAALMTRRRQLVDMRVQELNRLDLAGKRARRSIQSVIRMLDKQIEGIDQDVQRHIDDHFDGQRNLLDSFKGVGPVMILTLLAALQELGKLNRRAIAKLVGVAPLADDSGPRKGKRRIFGGRSEVRSVTYMATIAAIRHNPVLRAHYHRLVAAGKPKKVAIVACMRKMLTILNAMMRDETVWDMTKHATPAPTA

SEQ ID NO: 182291 - protein, 350 aa, unidentified
MAVTIVEEARAITGGVDTHADVHVAAALDPIGGLLGAGEFPATAAGYARLLGWLGGFGTVCLVGIEGTGSYGAGLARHVTAAGVRIAGVDRSDRQDRRRQGKSDPLDAVSAARAAQSGRARGASKGRDGSVEAIRALMVAKRSAAGERTRTNGQARALVLTGPDDLRARFAAHTPAALVAGLGSLRPRPGGDVAGHATRVALRELGRRAQFLDTQLERPGELIVPLVTAHAPGLLALYGVGPNTAALLLIAAGDHPGRLRSEAAWAHLCGAAPIPASSGKVTRHRLNPGGDRQANHALWRIVFTRLGSDPATRAYAERRTAEGKSKAEIIRCLKRYVAREVYPHLRPAGG

SEQ ID NO: 182292 - protein, 339 aa, unidentified
MKIVVMGLDQNRAQITAEWLDTETGELSRRRIRPADRVGFRRFLGEFKGKQVQAALEATTGWRFVVEELQAAGHVAHLAEPAETAGLRGPKKRAKSDRADARHLRELLQQGRLPESWIPPAHILELRSKVRLRHTLVEQRGEWQQRMQAQLYHHGAPQRAGLLAAENRAWLEGLELPEAAPTQIEVGLSMVDHLQERIAPLDRELRAYARRQAGCRALQAHYGIGELSSVTILAELGDVRRFSSSRKAVRYAGMDITVAESDRRRAPGRLSRQGPPALRWALYEAAQVTRRPNAPDRDYYEQAAERLGGNRACLAVARKLLKRSFHTLRELGEEALQPA

SEQ ID NO: 182293 - protein, 419 aa, unidentified
MSFKILKNNCCGLDVHKTWIYACIGITDSFKRTEYKQARFSSFTKGLQELCLWLAKYNCIDVCMESTGKYWIPVFNVLEKNNIFVTLSHPKYTKPQKGNKTDRKDAKWICDLYMCGMVKPSFIPPADIRQLRDLVRYRFKLTCMITGEKNRAHNCLTVSNLKLDDVFSDIFGKSSRSITEQILQHPGEVFDVAPFVDSRCKTPIEEIQAAVDGAISHEQAVKLRQCLKHIDELEMHKAEIEREIFRLSQKYESVLDLIRTIPGFDKNPLTAIQVLSEIGADMSVFPTAKNLVSWAGCCPRNDQSSRKIKSTRISRAGSYFKPVLVQIANALIKSKKHPEFTTRYRRIKARRGHKKAIIAICRMILTAIWHILTDLKPYTPEGFLESRPVNKEKVLTISQALNLIKQRGYIIKDNAVPVT

SEQ ID NO: 182294 - protein, 441 aa, unidentified
MSFEKMKIVNPYAAGIDVGSKSHFVALGQEKNEVFEFGVFTKDYKKLIEFLHLHNVETIAMESTGSYWQTLFFALQDAGFEVLLVSGHQTKNVRAKTDVKDSQWIQKLHSLGLLRGSFLPSEETARIRILYRHRISLIEEAAKMSNKMQKALRLMNLRLDNVISDITGKSGMTIITAILNGERKGDALSMLADSRVKKTKKQIADALQGDWSEEYLLELKDCYDIYFLLQEKIKNIDKNIEKLLSDFTAKSHHTIDRKKLTTKQIKGKNQPRIDLPYLSYLYYGVDLFAIEGVSVGTVLTLISEIGDGIYKFQSAKQFTSFLRLAPNNRISGGKIISSRTPKGSNRLTLALRNAANTIDNRKSGALYLFFKRIAYRKGRAAAITATARKLAVIIWNMIIKKQAYNPPNNDEYLLSMKQRRIKIIKNIMMKNKIAMSELSVN

SEQ ID NO: 182295 - protein, 426 aa, unidentified
MKNREVLSTLFVGIDVSSKSNEVCAIDFDETPYLQACFNNNHPGAIALAHKLAAILMKHSELSRIVIAMESTSCYSTHIATFLSSTDILMPFKPYVYCLNPKTTANYKKSYIAEGKSDPIDAFTIADFARVGRIKTEPWRGSQFLALQRLTRHRLHLVEAITREKSYMLTNVFLKFSELAISSNDNRPFSHNYGATAEAVLTEFLSPEEIVSTSSDDLVEFICKKSKNSFDDPSKVASLLKKAAVDSYRLDKCLYEPLTVSIAASFNCINAFEGEVKKLNKAIEKAIKGFNTNEYLSLVSIPGIGPVYASAILAEIGSIKAFKSHDALAKYAGLVWNPNQSGNFEAEDTYMSKAGNSFLRYYLIEAANSVKNHSATYNDFYNRKFVEVKKHQHKRALALTSRKLIRLIFGLLDKNQLYSNCVEHTS

SEQ ID NO: 182296 - protein, 338 aa, unidentified
MTIVMGLDQHRAQITAEWIDTDTGEVSRSRISPAHRAGVRKFAERFRGQELEVALEATTGWRFVAEELRRVGAVVHLAEPAETAARRGNKKRAKSDRADARHVRELLMIGRLPESWIAPDHLLDLRSRVRLRHTLSHQRGEWQQRIQAVLYHHGCPHRRNLMTAEGLQWLKAQPLPAGAREQVTVALGMIDALDAQLAPLDKELRAYARRQLGCKALMKHFGVGELTAVTILAELGDVDRFSSSREAVRYAGLDITVHQSDQRRSPGHLSRQGPPALRWALFEAAQSAARQGSPDRDYFAQAAQRLGANRACLSVARKLLKRSYHTLRELGEEALQPA

SEQ ID NO: 182297 - protein, 355 aa, unidentified
MTDKRQKIIIGIDTHKDFHHVAVISALGESLTDRKFDATPDGYANLIEWVTEQGDVLRAGVEGTGSYGAGLTDRLRRAGITVVDVLAPDKQERRLRGKTDQIDAYSAARAVLARRATTVPKTRDGDVEAMRVFRTTRRMVVKQRTETMNQLHSLLVSAPEGLRVKLAGLKAKELAKASSRLRDLPGDDVVTAATKDAARSLGRRFIELTVESDRLERRIRTLVTAYAPELMTVYGVGPDVAATLLTVAGENVDRITSEGALAHLAGTAPIPASSGKTNRHRLNRGGNRQGNAAFHRIVLVRMKRHPETRAYVEKTLARGKTKRDTMRLLKRYVAREIFPILINVQQRHATTQIAA

SEQ ID NO: 182298 - protein, 356 aa, unidentified
MTTLHYIGFDVHKKSISFCVKTAAGEIVEEGVMAAQRPALQRWAVARRHPWRGALEATLFSGWIYDTLKPYGEQLEMAHPAKMKAISAGKKKSDTIDARTIADLVRCNLLPACYVAAPRIRELRRLLRYRSLVVSEAVRMKNKMAGLLMETGALYVKEKLHGKKYFASLLEELEEVPESVIDLLRLSRGALEMFESTQRRLVRELLADPELAARVERLMTIPAVGEITALTWALEIGDPQRFRSGSEAMSYCGLTAALKSSAGKQQHGPISKQRNHWLQSALIEAAKLAPRWNPQLAALQARELERGHRNRATLAVARKLVTYLLAVDKSGQSFQLRVPWPEDRAENEGAQKIKTA

SEQ ID NO: 182299 - protein, 358 aa, unidentified
MESVKYVGLDVHRDTISVVVLEESGKTVMQTILATHAAALLDFVGGLRGSVHVTLEEGTHSVWLHDLLVRRVARVVVCDPRQNALLKAGNKSDKSDKIDARKLAELLRAELLSPVYHGETSTVTLKHLCRSYAALTEDTTRVMGRIKALYRSQAISSAGQKPFGRRHRGQWLAQLTQEGMRRRAERLYEELDALQSLRREARRELIVESRKHDAVKLLCTVPFLGPIRAAVLVGRVQTPHRFRTKRPFWAYCGLALETRSSADYHFQEGQLVRAKKPVFIRGLNVNHNHDLKNLFKSAATTASAMPGPFHVFYENLLIKGMQPAMARLTLARKIAAIALCVWKKGEPFNAEHLKPQAA

SEQ ID NO: 182300 - protein, 316 aa, unidentified
MARKHRKSFIGIDVSKQWLEVAVHENDYQFRCLNKASAFGELIAELIALRPALIVLEATGGLERAVVAALHAVALPVVVINPRQVRAFAKALGQLAKTDPLDARVLAHFAAAIKPRPRPLKSQDELELDALTGRRKQLVEMLADEKNRRASAATDRVRDEIDEHIDWLSDRIAELDEQLKKLLKCSAQWQARDEILRSTPGIGSVVSFSLLADLPELGTLNRQQISKLVGVAPLNQDSGKQRGQRHIFGGRAHVRRVLYMAALTATRCNPVIKEFYERLRARQKPFKVAITACMRRLLAIINFMVRAHSPWKSAQA

SEQ ID NO: 182301 - protein, 387 aa, unidentified
MTVQSQVSAFIPRHYEIFAGLDVDKHSIAVTFTDHSRLLKSLRLPYSSEQLLNYARKHFPDRRLAFVYEAGPTGFGLYDDLMAEGHPCLVVAPSMVPTAPGQRVKTNRLDSRKLSEGLRGGQLRSIHVPSPTYRQLRHLVQLRDTHVRQLTATKCRIKALLLYEGIAFPEAPAGGQWSARVLRQLEALPCTEAVCFKLNHLIGTLHFHFLSAAAVQKQIRRFCQNDPELRQVIGLLTSLPGVGWIVAAHLIARLGDWREITSVRQIAAFLGLVSSEHSTGDQENRGAITRSGDSRLRNKLIQSAWTTIGKDPELRAFYRRIYQRHPKKLAARKAIVAVARKLTTRIYAVLKQQRPFVLRPDSSSAPLTAEETAGPRGRLDAAQNEQP

SEQ ID NO: 182302 - protein, 407 aa, unidentified
MELPALFQRVVGLDVHQAKISACALIEQPDGTVTVEHREFGAFKRDRRALAEWVRTLGPDLVVMESTGIYWKSPYAALEQVGIAAWVVNARHVKNVPGRKTDVADAQWLATLARAGLLRASFIPPADIRHLRLIARQRQKLSGMLASEKNRLHKLLADAGIRLNVLVSDIHGQAGRAMVKALIEGQPLPEILDLAGRLRASREELFEALQPEQLSDAHRFVLSEIMAHIEELEARMGRFEQTLLAGLAAWEPQLVLLQTLPGVDRIGAAMLLVEIGTDMASFASAEKLASWVGICPGNNESAGKRKSGKIRKGNAWVRRLLCEFAQAASRSRCGLKEKFKALSIRKGHKKAIVALAHKMLRIIFAMLKNHTPYQDQAVDYEALLVQRNAPRWIKMLAKHGFISPAST

SEQ ID NO: 182303 - protein, 371 aa, unidentified
MKSILSVGMDVHKNSFSLCAYDGYTGEIVSESTFASDVKLVIKFIETLKSRYENDVEIKCGYEAGCLGYSLYKSLTARGVDCVILAPTTMQVSAKNKMVKNDRMDALNIAKNLASGSYKSVYVPDEEDVEIKEYIRMIHDFKKELKRVKQEICAFVLRHGYQYDGKSKWTIRYMNWIRELEMSEIQRETLNEYIAEMENLNDKINRFMNRVDEMYQSERYHEKVSKLRCFKGIETFAAMTIQVETADFERFPSAKAYASYTGLTTGEHSSGDKNNRIGITKQGNTVIRKTLVECAQSLVKGNVYAKKSQGLKSRQKGMDVNIIAYADKATERLKKKYQKLIERNVPRNKAIVAVARELACFIWGMETGNIH

SEQ ID NO: 182304 - protein, 347 aa, unidentified
MSKIKLVAVDLAKRCYQLGAIDVEGKVLFNRKLSPRKFAVTIAQLEPTVIAMEACAAAHYWGRRLMRLGHEVRLVPPQHAKAFRRVHKSDAHDTISIAEASQRPNLHFVPVKSVAQQDLQTLGRIRERLVAQRTAIINQARGLAREYGVDFPKSRPALLELLPIALADADNELSPIAREALGELLQQIRQTSHAMTDVMQRITALASEDPAYERLCTIPGIGPTIAPALLASVGHAQQFQNARACAAWLGLVPRQCSTGGVTHLGGITKNGNRSLRVMLIHGARTVIRWADKHDHAQSRWIKQLVARVGKNKAVVALANKMTRMSWAVLTHGVDFDMHKAYRPQTAR

SEQ ID NO: 182305 - protein, 272 aa, unidentified
MEHELHYIGIDTAKEKLDVDVLRPDGRHRTKKFANTTKGHDELVSWLKGHKIDHAHICIEATGTYMEPVAECLYDAGYIVSVINPALGKAFAQSEGLRNKTDTVDARMLAEFCRQKRPAAWEAPHPLERALRALVVRHQALTDMHTQELNRTETAREVQRPSIDAHLLWLEAELKRLEKQIKDLTDDDPDMKHRRKLLESIPGIGEKTSAVLLAYIGLKDRFAHARQFAAFAGLTPRRYESGSSVRGASRMSKAGHVSLRRALYMPAMVATK

SEQ ID NO: 182306 - protein, 413 aa, unidentified
MYIVGIDIAKKSHQAAIMKPDGTLVGRSFRFTNTKQGFEFLMDKLAAVDSSLENFEFGMEATGHYWLNLYTWLADNHATVHVINPLQSDALRNLYIRKTKTDSVDAKIIAQVIRIGQYSETKLADDRMLMMRDLCRQRFFLVDMVANLKRKIIVMMDRIFPEYQGFFSDTFGKSSTAILKHCTTPEEITLFGEDNLAQLLQVASNGKFGLKKAQELISLARNSFAARLSSKTLSLLVKQMMEQMELLQNQIGILENHISSHFKSFGTKITQIPGIGPVLGASILSEIGDISRFANPKKLCAYAGIDPSVKQSGQFLGNENHMSKRGSGYLRRCLWMASFVSVNHCREITIVYKSQVSKGKTHFQSMGFVCHKLLNIIYTVLKNDIDYSPMLCINPAITARTSRRIARAALKAR

SEQ ID NO: 182307 - protein, 319 aa, unidentified
MRSVALDVHLDFCEVAIVEDGEVRSAGRIDTKPEKIELFAGSLGPDDRVALEVTGNAWEIARLIEPHVAQVLVVSPSDTGIRQARAKTDRLDARTLARLLAAGSLDAVWMPDRMTWVMRRRLSRRGQLVWARSRAKNEIHAVLMRQLVGRAPFSDLFGVKARKWLAALELAPEESETVDSAMRQIEFLDTEIAEVERLIAQDALHSQEIKRLMSVPGVNVIVAASFLAAIGDIGRFENPRKLVGYLGLDPRVRQSGTGPATHGHISKQGSVRARHVLVEACWTAVRQPGPLHAFYERIRARRGHSVAIVAAARKLACLF

SEQ ID NO: 182308 - protein, 409 aa, unidentified
MRLFVGLDVSSFDMKVCFLDGEGNKLDRFSVSNDLPGAMTLKEKLLQRVTDKGIETLKIVLESTSVYSFHPSMFLHHDEDLQRFGTKVFLLNPKQIANFKKSYSDMNKTDEIDAFVIADYLRFGRNQMSIVKESQYVALQQLTRSRYQLVKMLTKEKQHFLQHLSFKCNTFSQEVDSSVFGTAMMELFLEKFSLEELADMPLEELAEFLQKKSKNRFGDPTCVASTIQKAVRTSYRLDRVVEDSIDVLLGTSIEVIRAYQKQIKELEKSIKRIMAGLTQTLESIPGIGPVFAAGIIAEIGQIERFDDETKIAKYAGLYWRKHQSGRFTAENTSLSRNGNHYLRYYLVEAANSVRKHVSDYQEYYVKKYNEVPKQQHKRALVLTARKLVRLVDALLRSHQLFTPERCVKV

SEQ ID NO: 182309 - protein, 347 aa, unidentified
MTQAQIYIYGIDLGKNWFHLVAMDRMGHVLTKQKLTRSQLKQFISTTPPCRVAFEACPGSQYWGRQFQQAGFEPKIIPAQFVKPYLKSNKNDFNDATAIAEAGSRGTMRCVPLKSHEQLALQATHRVRQRFIVERTATVNQMRALLLEYGLTVPVGRKVFERSLPTILEDAENGLPDFIRALVLRLRERWQQLDIQIDDMSLMLGQASSASGLCQKISTVPGIGPIVSTALIAAIGNGSQFKKARDLSAWLGLVPRQYSTGGKSSLGGISKRGNSYLRQMVIQGAKALKIHMKRDKSSLGEWVARLEVGHHHHMVLIALANKIMRICWKVLTSGRDYQPYPNASAAV

SEQ ID NO: 182310 - protein, 391 aa, unidentified
MPMYFVGIDISKYKHDCCIISAADQKVVSKVTIKNNKAGFNELLTIIHSLANPADIRIGFESTAHYALNLELFLENSLLTFMEVNPVLISEYKKSKTLRRTKTDSVDCESIARWLMTVEYKPHSKGFYHAYSLKSLTRLRDKLIRQRSFYLVKITNVLDHTFPEFKPFFNERLSKTALYLLENYGSAEKMARMNSASYEKLRSLSRGKFSPQQFLRLKELAANTVGVNNSIFDVELNSLLSLYKSLVKEINTIEKEINKLIEEVHPHYMSIPGIGPISAAVIYAEYGDISNFSNPGQMLAFAGIEPGINDSGTESHGGRMVKHGSSQLRYVLLNSCLPLIRFDLTFATYYAKKRAEGKKHRVAITHVAKKLIRVIYALERQDVDFNVQKLR

SEQ ID NO: 182311 - protein, 408 aa, unidentified
MPHHTIVLETEWGLAAKLQADWNTLPIRLSAKRIKTEVIMTFFIGVDLHKTQFTVHVRTEEKIESLDQIKQYPTTVAGYAEFLTRIETYKASGAAVKIGVESTGNTRFFKNQVEKAGAEVTVINTLKFKVINESTKKTDKHDASTISEFLSKDMLPESYLCGKETENIRRLLKSRERLVRSVVGQKNEVHALLVSMGLPDELRCLQSKKGRRKVLDTLESHSDLVLEAQSVQLMFQIIDRMTESVKTIEKQLAELTKDDEMVNRLMTIRGCGKITAWTIRAYTEDISRFASAKKYAAFCGLVPWVQDSNETIHHGKITKRGPQELRTCFVQLVLGIRRCKDTSEWRMMQRYEYMKKNKGSGKSIVAAARKMAEIVWAMLSAKQDFNADKMKGIYKPMTLADEALSAMN

SEQ ID NO: 182312 - protein, 362 aa, unidentified
MNATTVAVDLAKSVYQLAVADANWRVIEKHRLTRTQFERFFANRDVKLVVMEACGSAHYWARRIQALGIEVRLLPPRYVRAYVRRNKTDAADAAALLEAARCADIVPVRIKSVEQQALQCLHRTRQQWMRTRTARINGLRGHCREFGLFVAQGARVGLAQIARLVADPRTALPQILLSTLRSLLDEIRLLEARIHELERQLGELARQSAPCATLLSIPGVGLLTSTAMVAATSGEVGHFRDARHFAAWFGLTPKEHSSGNTRKLGRISKRGDTYVRMLLTHGARSVITAAAAKARTGAPLDRLRQWALDLEKRSNRNKAVCALANKMARLCYATLRDCEPYAASKLTRESPLRLTHVSLNCT

SEQ ID NO: 182313 - protein, 395 aa, unidentified
MFIVGIDIAKRSHEAIIIAEDGQVVRKAFSFRNNCTGYNLLLEQVRRLTLVKSQIVFAMESTAHYWLALYARLLKDGYAVMVLNPIQSHSLRELYIRKAKTDARDSLIIADLVRFGRCKASNVPQDKILALRELCRSRAYLVDMAADLKRKLIALLDRIFPEYESLFDSVFSKASIAVLSKYSTPQKVKNANLRKLTDLLMESSNGHFGEWKAHQLKEAACSSFGIDDSGGVYSTLLGMFLEQILSLTAQADSLEKQISVFFQEFNNPLTSIPGVGTVLAATILSEIGDITRFSSADKLLAYAGLDPSVKQSGEFKSNQNRMSKRGSPYLRRAIWLASTVAVHRDPMFQTYYEKKISEGLHYMNVIGHVSRKMTAVIFAVLRDGQPYQPILQSAG

SEQ ID NO: 182314 - protein, 357 aa, unidentified
MDKVLKQCLGIDVSKSRLSLSLGFLTDKLVKEFLIHPDVCNDSPGYKELLNWLKASVDTSTELLIVMEATGVYHQGIAHFLYDKGYSVCVMQSGRVKRYAQSLDQRSKTDALDCRMLSMLGLERELRLWSPPSAELQQLKMLSRERSSLLKDKTVETNRQSAIVSGVYKDKSASKRHKQRMKLLKDQIVSIEEEMRELISNNEFLKKKLVFLESIPGISFISAATVIGETLGFESIGNAKQLTSYAGYDVVLRESGNFKGKTRISKKGNSHIRAALHMPSMTCVRCNPTLKQFYNRLKPNKAKPLVALIAVQRKLLILMFTLWKNEEVYDADFEKKKQQKHKTLAAQDNKLINQYVS

SEQ ID NO: 182315 - protein, 324 aa, unidentified
MTQASSQPVSPLFIGIDVAKDKLDLARSDTGELLAFSNDDRGIRQIVQLLTTARPRCIVVESTGGLERPLIEALLDANLPVAMVNPGRVRYFAIGCGILAKTDPIDASVLMKFAQLAEPRLTQKRSENQSELDALITCRRQLCATRAQQVNCKQSTRSKSAITSIDAVLVALDKQIEKLDKKIRQLIDSDDDFKHLDRQMRSVPGVGPVLSSTLIAELPELGKTDRQQISALVGVAPFNHDSGKFRGKRSIRGGRSQVRCVLYMATLAAIRFNPVLRRFADRLTRAGKASKVVIVACMRKLVALLNVMLRDNLLWSQLEVVKNP

SEQ ID NO: 182316 - protein, 345 aa, unidentified
MQTMYYIGLDVHKRTISYCVKDGSGAIHAEGAIPATRFDLDRWMKTLPQPWTAAMEATVFTGWIYDHLQPHAAALKVAHPLMLRAIAAAKKKNDRVDASKICDCLRCDFLPECYMASTAIRERRRTLRYRNLLFRQLVQMKNKISGLLMEAGVNYNKQRLHRAGYFRELLATNPGIDEGLCSLLRLCRETVVRLQKTESALVRSLERDSLLMDRVERLMTVPAVGPITALTWTLEVGDAQRFSSIKKAISYCGLCAAEKSSANTVQRTPLSKQRNKHLQTTLIEAAKMAPRYSPNLAMLYDKEKQKGNANRATLAVARKLVAYLMAVDRGQRNFQVAETSNCIAA

SEQ ID NO: 182317 - protein, 401 aa, unidentified
MKRLSGGIDVGSESHHIIILDEEDNFLYNQKVAHKINEFTENIKLFKRLEKQEGGKLSFALEGKNGYSAPLDKILLDQGFTLYNVDNFKLKRFREAFAGEWRDDERDSLMLSKMLKLKDYINSEREKVFIKIEKPSFVTESLKLLSRHQQTLIDEKVRLTNRLRKKLLEVCPQILELGKAKSKKLIAILTKYPDFSKYKRITLCSLLKIRGIGERQAPFLLKRLHNIEYMPGLTDIYKTIILSCAKRILELQEEIKDIDKSLDGIGEKNKEVNHLKTIPGVATKLASRLIGEIGDIIRFPSEKQLAIYCGIACVNNDSGKVTKAKAVYKANKICKQTLITMAGGSIRLSSQCKAYYLKKRTEGKSHNHTLRCLARQMIKVIYKMLTEDRDYIIRKELKKVA

SEQ ID NO: 182318 - protein, 339 aa, unidentified
MAIVCGLDIHRSQVTYDWVDVDTGEGGRGKLAPANRVTFRRWLEQFAGHDVDVVVEGCTGWRFIVEECRVAGVTPHLADPAEASVRIHGVKRRAKTDKVDAKGLRELGVQGRVPESWIPPAQVLEIRTAVRLYHDLMTDRAAWLHRIHATLFHQGAVAQTQLLRGDRDRLHDSELLSPAGKEAVRSILRVVEVLDGEINRIRQQLQRFATKQPGCRELQKEYGIGKLTSVIIWSEIGDCRRFSSSDGAVRHSGLDVTVYSSNGKRSAPHLSRQGQPLLRWALYEAGRCGSRATSPDHTYWQQVANRLGRKRAGISVGRKLTRRCHHRLRALGDEAFAEV

SEQ ID NO: 182319 - protein, 340 aa, unidentified
MDINVIGLDIAKQTFHLVGLDSTGKQMLKKKLSRTKLLAYFANLTPCKISMEGCAGAHYWARELSKFGHQVRLLPAQHVKAYVRGNKNDYNDALAIAEASRVPQMRDVAVKTIEQQSIQALHRLRQRAVADRTGLSNQVRGLLSEFGIVLNQGIATLRKCLPEILEDGENHLHPLFRNALALKYQQLCELDQLVKDFTSAIEADAKQHAEIKRLQSIPGFGGIVSSAYYSVIGDGRAFGNGRDAAASLGVVPRQHSSGGKNTLLGISKRGDKYLRSLLVHGARSVVIHAHKKDDALSRWVTRLVERRGKNKATVALANKLARIAWAVTTSGKPYTENYAI

SEQ ID NO: 182320 - protein, 456 aa, unidentified
MAGTKSTRGRSSGQLATINPNAAGLDVGSTFHVVAVPADRDEQPVQTFRTFSGDLHRLADWLEASGITTVAMESTSVYWIPVFEILEARGFEVLLVNARDVKHVPGRKSDVQDAQWLQQLHQHGLLRGSFRPRDGVVQLRAYLRHRERLIEYAASHIQHMQKALMQMNVQLHHVVSDITGATGMRIIRAIVDGNHVPEQLAEFRDVRCAASEATIRAALTGNYRAEHIFALRHALELYDFHQTKIAECDAEVEQVLRTLNEVRPTPTEPLPAMRHAKAKNEPEFDARSELYTLLGADLTQIHGFGAYTVLRLVAECGDDMRKWPTAKHFTSWLSLAPRNKVSGGRLLSSKTRRSSNRAATLLRIAAVNVGRTQTALGAFYRRLAARTGKAKAVTATARKLAILFYNALRFGMSYVDPGASYYEQRYRQRVIQHLQRRARHFGFTLVEDPAATGGVS

SEQ ID NO: 182321 - protein, 398 aa, unidentified
MDLPVYYELETNNGNRDYRIQIGGHYMNYNTVYVGMDVHKESFTLCSCKYEDEKASHYQRTPASYKNVLRYLAFLRTIYGEDTRFVCGYEAGCLGYSLYHQLENFNVECVILAPTTMLEQRSKRRIKTDKRDAEIIARSLAQHNYSPVHIPTETDNQTKEFIRMRDDHKAELKKIKQQILSFCLRQGYQYDGSGNWTAKHVKWLRSLKPAGLYKEILDEYLLTYTILTDKLNRLDQRIEELASKEEYTESVSKLTCFLGIKTHTALSVIVEVGDFQRFVSARKFAGYLGLVPGQHSSGDDRNGLGITKAGNAHVRRLLVESAQSYTRGKIGYKSRVLRSRQAGNSPQVINYADRANERLRRRYYKMVLKDGKKYNIAKTAIARELACFIWGMMTDNIY

SEQ ID NO: 182322 - protein, 422 aa, unidentified
MKNTAARKLKQVPERYLIIGVDPHKKKHAAVAITQDLTIHDRFKFDNTREGLEFMLQRVKTVMVKSGCRGIMFAIETGGHYWRNIAYYLDERGIPFRFINQYTLKRRREGKDLNKRKNDYRDSEVAAQLLCTGEFVESGIPQGVYAELRTAHNAYRRLVKERTRITNLVKGLLDSLFPEFVHVFKDPCALTALSVLSTCSTPGIIAGMTEDQFIAVIEAQHHGRRLMRMKLGELRNLAKTSIGIEAGARSVAAEISFLVEKFELIREHIQTIERTLIKLVDASEEGKYLLSIRGLHYIAVAGLIAELGCFKSYRSAKQMIKMAGSNPTESESGGKRRSRTPMSKQGRPVLRYCAWTSVIPMLRLNPDFRAWAKERRERPAHANPLSGREVVGAALNRLLRLCFAMVKNQTYYRSPQLVEVTE

SEQ ID NO: 182323 - protein, 482 aa, unidentified
MKKKTIFPYQSQELNTLFEEAGNNAKVMCIPIDYAKKEHVVMFCNGHGNILRKPFPIKNSPEGIEYLTQQVLSSCHHRGIDPRYAFFGGEDVGSYAENFINTLRSGGWIVAGVNAHDAKKQRANVQASTDKLDLMGIASMLLNRRANCSPAQTGIYRNLRGLTRHRKKLVDMSTEEKNRIYTVVDQIFPGFLDEKNTGISPFSNSSLYLMADRFSPAQIRRRKRQKLIETLRKYGTVKPEVGADKLQLYAAHVLNTPTEYLSALQISLAQHIKHFKCLQESIEQLEKEMALWLAQTQGAFLTTLRGIGIVLAAGATAEIGDPTKQKPVANLVSYSGIIPRVKQTGGPEGQTRTGKVSKRCNRILKNYVVQSAHHIGLHGPEDLMADYKRRDANGQHADFGIGRRYIRTAMCLMRNSQIYIPKRLCSKGINPEERAGYFLMIWPSLRDKWAKLGALETAFTNDNPLGRWRNMVQELYEIKLKL

SEQ ID NO: 182324 - protein, 356 aa, unidentified
MKYIGVDCHKQYDHATMIDTETGEMTIRKLNHIKEEFQEFIGNKADTRMVIESCRDWSKTYELSQDLVEEVVLAHPLKVKAIASAKVKTDAIDSRILAQLLMADLIPQAHLRQSENRLKQRVIRHRAFMVVMRTRVKSRIHGLVDSQLLPVDVMQSKPVNLFSKKGMSWLTSLEWAKEEDKKLVESHLRVMEAINQEISLTNGMVKEIFEKDEDAQLLATIPGIGVTLATLISTEIDGIYRFPSVAKLCSYAGIVPSTHSSGGKTYHGKITAEGNRWIRWALVEAAVPASYGDIEVRNRLDSFRKRKGANVAKTAMARWLLKVVFHVLKERRPYISGYRPLSQSMTSSTAMSGAAF

SEQ ID NO: 182325 - protein, 401 aa, unidentified
MTTMKDNVQRVKRFRELKATLRTNRARLLVGLDIAEAAHEIQVRHAHTRIVVPQLTIPNSTRGFTQLWARIQQAQRATGCREVVCGLEPTGTYHQAVAVFLEAQGADVVLLSSSVAYWNRRTQDGTYDKNDRKDAANCADLLEQGKVLFYSQPTGPLAELRRLVKVLRRARAELAACKARWRTTLRPTLGPMAEPLPNRLRAELPAVLQAWEPAALGRPAVAKGRLPLGLATACADLGAQVTAVQARIAAIEQALTPLAERLPAYALLRTIPGVGPTVGAILLAEIGDIAWFTQFSQLRKLAGLDIIRVQTGNFAGQWRISKCGRGLLRWALYHAAMGMARTAAGRARLAALKTKRHGDRYTGFKAVVELAAKVLRVVWGVWRSGTPYDPRRAGGLQRQPR

SEQ ID NO: 182326 - protein, 341 aa, unidentified
MTHYIGLDAHSNTCTAVVMNSTGELKARATFDTSEKNLLELIKSVERPRFLAFEETNLAQWLYLLTKQEVDDLAIAHAAALPKQRGPKNDYRDAIRLAEEHRAGRIIRVYHEESKLWDLRTLVNSYSDITADLVRSKNRYKALLRSLGLFTEGSTVYNDTEILKSIEKEHDRFVAVNCFELIRSQQEIKDSYEGRFEKIAKQWVTISKLRSIPGIAAIRACIITSIICSPHRFVNKHKLWAYAMLVRYIDTSDGKVYSIRKPHGRTELKSTFIGAANTVLCGTSSLRKYYDRLRSRGISHNDAKMALARRIAAISLMVMKTGKKYDDKYEEKRRRLEKSET

SEQ ID NO: 182327 - protein, 365 aa, unidentified
MATMRMAREGAVHVTVGVDTHKDAHVARAKDQLGRRLGEKIVPTTPNGYRALLGWAKSHGEVATFGVEGTGSYGAGLARYLRSEGQVVIEVIRPNRQARRRHGKSDPADADAAASAVLAGDATGQPKAADATVEMIRALRVARQTAIKARTQAGNAMKALVVTAPDDLRECLRELSTIALVRTCARLRPGKLVDPTTATKVALRSLALRHEALETEVKVLEAQLTRLSAGVAPELLAVFGLGTDSAGALLVAAGDNPRRLRSEAAFAMLCGASPVEASSGKVARHRLNRGGDREANCALYHIVMVRLRWHQPTKDYMARRTTEGKSKREIIRCLKRYVAREVYAVLRSMQMSDVATAGQAPGEVA

SEQ ID NO: 182328 - protein, 323 aa, unidentified
MTVYLGIDIASKKFDVAELCDGNYRCKAFENTSAGFLALYKWLGQSTMPDIHACLEATGDYGTSLATFLYENKIKVSVVNPARIKGFGASELSRTKTDKADSKLIARFCKAAVPDGWKPTPAPVRKLQALVRRISALNGMLRMECNRRENAEANIQASLDRIISLLKTEIEVVRQEIKDHVRSDDELKKQDALIQSVPGIGEVSSNLILSFMSGKGFRKAKEVTAYLGLNPRHHQSGSSVRGKTRMSKMGDTRLRSALYMPALVALRYNPDIKAFGQRLLLAGKPRMLVVGAVMRKLIHIVFGVLKSGTAFSSRIAVHSVVTS

SEQ ID NO: 182329 - protein, 444 aa, unidentified
MPTRTIGIDLAIRGAQIATILDAQGNIIGTPIRFRLERKDLEQLVQQARAGLSPEDQVVAVMEPTGMAWFPIAHWLTRAGCRVIRVKGQRVKALRRYLSEHAKTDVLDAKVLGSLPAFGGHGLTPLYLPSADKHALTRLTKQRRRYQEEIGSILRRLRDLMRWAYPALEKALPELNTMVSLAVLERYFNPLAMRRLAHGRLVAFLDRHVGGKHPAHGPFTQNLATRLHEAARSTILLYPNGEVDYELLQLEVRQEVQRLYSYQESIRVLDERIEQLYRRLHPQDHLRTIPGLGTVLGPAFLAVIHGPDRFPAQKQLRGFTGLFPRRSESGGVESRSQRIVKGGNDRLKRDLMLASDIARKFDPELGRVYYTMMVEKGKHHMQALCAIATRLTNRIHAVLKQDRPYVLRDFTGRPITIAEGRALVDINFRVPEKVRNARRRIQIH

SEQ ID NO: 182330 - protein, 400 aa, unidentified
MVYVGVDIGKTRHAVAAVDDAGSVVLPPEYFAQDAEGFAALLRRLQTLGDPSSVVVALEATGPYWKVLHHFLQQHGYRADVINPLITAHEAAADVRGRKTDKLDAVAIAQVARRGGYSSVPATDPAGAALKSLARHHRHLVNRRTEAKLRLANCLDVLFPEAHRFFDDLYSVTALAVFERFPSARQIADAHPRTLTALVARASRGKLGSAFAQQLRQAARRSIAYSLRNEGEEFVCVQLIAEIRSLNELIAQTEERLNANPPPPAAQMLQTIKGAGPTLPRLVAAELGNLERFRGPRMASRILAFAGAEPRVRESGRWRGQTKMSKRGSGALRHALYLMAGTVRLHNPSFNAIYQRQIARGKHHKVALSHVVRKLVEVLCGMYKSGTRFVPPSPATAPCS

SEQ ID NO: 182331 - protein, 509 aa, unidentified
MNFEKAIDLLHPRIEHAGSGRRIPCSNARRFNGDFRSETLRPVAKECSEPFACQFKAGSDELYKPFRPTGTACSTKPKHTDQTMNAITNFAATIGLDWADQKHDLWLCPADGSKAEHLSLLQTPEALHEWVAKLRERFGNRPVALGIETSRGPVISALMAYDFIVIFPVNPKALKDYRAAFSVSGAKDDRTDAMLLEEFIRLHRAKLKALVPDTELTRKLAGLVENRRRLIDERTRLVNQLHSLLKTYYPLAEILLEGQMTQPMAADFLTRWPDLPSVQKAELKTLRAFFHQHNSRSAQKMEARLSAVKEAKALTTDEAILAPARCLVTALAGMLKSLHQAVARMDKEIQKAMAEHPDAALFESFPAAGPALAPRLLTAFGTQRDRFESAAEVAQFFGLAPVVKQSGNTKTVHMRHRCPKFGRQTFHENAACAIRQEPWAKAYYDQHKQRHHDKHHQACRALAYKLIRIYFACWKHRKSYEPNTYTRALEKHGSPLHKKLQIPLQKSGE

SEQ ID NO: 182332 - protein, 370 aa, unidentified
MLNITTFVGLDVHARSIKAVALDAMTGEVRSATFAYDAAAVAEWVGSLDPAAKCVYESGVTGFDLQKKLTALGVDCVVGAVSKMIKPSADRKRKNDRNDAEFLARMLSVGNVVEVCVPDDECEAARDLVRALDDAREDLKRCKQRLSKFLMRHGYAFSETTPTGRRKGNWTAAHWAWIRSIEFPEKADDEVLAYYIDAVRQAMENKKRLEKLVEAEASKPRWKKRVDSLRCLKGVDAMTAADIVFEAGEFSRFKSARSFAAWLGLTPSEHSSGESARQGGITKAGNKHLRRVLVEAAWHYISASPHPKDLAKGQAPDPAARRHAAKGIRRLVKRREEMLGRGVHKNKANVATARELACWCWAVGRMVENG

SEQ ID NO: 182333 - protein, 341 aa, unidentified
MSESALIGIDLGKHSFHLHGQDKLGRKVFRKKLSRQQMMTLFGNLPACTVVMEACAGAHFVARQLMAMGHEAKLISPQFVHPFVKGNKNDFVDAEAICEAASRPSMRFVTPKTEAQQTLSVLHRLRESLVRDRTKTANQMHGFLLEFGISLPKGLAIMKRLASILAEHELPVRLTVLLQRLHEHFCYLDEQIKALDKELASQLADDDLGSRLLSLPCVGPITASLLAVEMGDGQQYKCSRDFAASVGLVPRQYSTGGRANLLGISKRGDKHLRQLLVQCARVYMQRLEHQKGALADWVRSLLGRRHSNVVACALANKLARIAWALAAHHTQYEAGPDALNA

SEQ ID NO: 182334 - protein, 375 aa, unidentified
MSKSTVFVGMDVHAETIAVAVAAGRDQVRSVGTIANRPEAVRRLVGKLGKPAKLKVCYEAGPTGYALYWELTRLGVHCEVIAPSLVPTKAGERIKTDRRDAEKLARSYRSGELTPVWVPDARHEALRDLVRAREAAKEDQLRAKHRLGKYLLRNGQRPAEGCRAWTAAWWQWVRALELPYADQNTTLLDYIMQVDHQAQRIELLEGAIDRAVAAAPAELRAIVDALQALRGVAKVTAVTLATEFGSFSRFERAAQVMSYTGVVPSEHSSGPKTRRSGITKTGNSHLRRVLVEAAWHYRHKPRICQRQHALQAALPPKVAAIAWRAQERLHRRYWALAQKSKPAGKIVTALARELVGFVWAIGIETEQQLHRSKTG

SEQ ID NO: 182335 - protein, 344 aa, unidentified
MDKSITVIGLDLAKSIFQVHGINAEGEVVVRRKLSRSRVLAYFNQLEPCLVGMEACATAHYWGRELSALGHDVKLMPPQFVKPYLKSQKNDMRDAEAICEAVTRPTMRFVPIKTPDQQALLALHGVRDHWVRLSTRLINTLRGYLAEFGIVAARGRMGVEAILDTLADDQDDRIPDLARECLMPLANELRHVKRQILEMDRKILKAHRANSICQRLETIPGVGPVIATRVVAEVPDPKIFKSGRAFSAWVGLVPKQNSSGGRERMGQITKKGNPELRRLLVAGAISMIIRAKRSDFTRHPWLSRLLERKPTMVVAIAMANKIGRMIWALMVKGEKFDPAKLMPA

SEQ ID NO: 182336 - protein, 367 aa, unidentified
MEDCSKVAGMDVHKKNTVEAVLSLGTNRVEEKLTLENRPSQVESMIRRLAEKGPVKFVYEAGPCGYEIQRQITALGHKCTVIAPGLTPVKPGERVKTDRRDAEKLARLYRAGELTEVRVPTREEEAARDLVRIREDAVSDRLRARHRLIKLLLRQGRVYRDGNAWTQAHQRWLSAQRFEHEAQQQTLEGYLRALVEAEARLETLEQQVMDLAQTERYRKLVNDLRCLKGVETLSAMTFAVEAQDFGRFGKARDFMGYTGAVSSENSSGERVRRGRITKTGNAHIRRALIESAWSYWGRNITSHVVAVRRKGCAPEVVQLARRAQDRLHRKFQRMVARGKPVQVAAVAVARELSGFVWAIARASMQAV

SEQ ID NO: 182337 - protein, 490 aa, unidentified
MARLLEHSPRPESTYRPTWAVVFGKAEKMQDSDQRKNNADSSKQIAGLPVVRHKVAGIDLGSERHWVCAATVEGSGREVTDFGATTCELIRMGQWLKARKVESVAMESTGVYWIAPHEVLEAEGLEVMLVDTRQLARVPGRDKKSDPFDCEWIQRLHSCGLLMGSFRPKEAVCMLRTLVRDKGNLVAEAGDWLRRMQKSLDQMNVRVHRAVSDIDGVTGMAILRAIVDGERDARQLAKLRNPRCHKSEEEIAEQLSGHWREDHLFSLRQGLKMYDAIQERITDYEKEILQKLAKMEREECRGQEVPKSKKPQKGRAIQSRGAEPMRQALYRMSGVDLTGIDAIGVETVQVVLSEYGPDLSRFPTEKQFVSHVTLAPHKPTSAGKPVKKKKRNSASTRVAAALRMAASSLRHSETALGAYYRHIARRIGGDVAVFATARKLATIIYRLLRWGQPYVDEGAQTYEQRYRENRIKSLTARAKELGYQLTPTTA

SEQ ID NO: 182338 - protein, 425 aa, unidentified
MTEGAMLPSAEPPWAAFLAIDWADRKHVWKLQPAGNEPCEQGELEQTPEVIEVWASQLATRFAGRPIAVALEPSRGAVAFALTQYSHLYLYPVHPATRAHFRQALVPSGAKNDPGDTGLLLELWVHHRARLRRLRPDSEETRERQFLVEVRRKLVAEKTRFTNRLTAQLKLYDPQILRWFYKLSAPVTCDFLSRWPTLEAAQKASPRIPRNFFRLHNCQDEEGRLEQIRQAVPATHDQAVIQSSILMVQAAVRVIQNLKADIARCEERIAQLTKAHPDFIIFDALPGAGDALVPRLMAALGTQRERFESAAEIQAYTGIAPVVRQSGHTQSTHCRRAYPHLLRQTFHEWAAHSIMKSEWAREYYEPQLARGHKHPAAVRLAGLQMDPCPVPRLERQGTLRGEYSPALPEKPACAGSCRRRAACES

SEQ ID NO: 182339 - protein, 409 aa, unidentified
MPSTAHPLAATAAGEQDDLLFAALELSLSRWVVVASAPGEGKVSRHTLPACDGPALLALLDELRRRAERRCRRSVAVVTIQEAGRDGFWLHRLLEAHGVRSHVVDPASVAVSRRSRRAKTDRIDAEGLLRALMAFARGERQVCSMLRPPSREAEDARRLTREREALLAERVRHTNRIKGLLATQGVFGFEPTWQARRVRLEALRTPQGHELPPRLKAETLRQIERLELILRQITEVEAARDAALAAERQTAPVAAAPAPEADATPVALPADEGAGARLMRLKGIGPETASVLRLEAFQRSFGNRREVAAYAGLAPTPWQSGGLDTEQGISKAGNGRLRRAMIQLAWFWLRNQPQSELSTWYRERVREGRGRIKRIAIVALARKLLVALWRFVTQGLVPSGAELKPAKAA

SEQ ID NO: 182340 - protein, 398 aa, unidentified
MLSIGIDVSKGKSTVCGMKPGGEIVYTPFEVQHTREGMSELLSLLRGSGEEVRVVLESTGSYHCPVVAALLENGIFVSVVNSLRMKRFCSQSIRRVKTDQIDAMQIALYGLAYWQELQPTRLPENTYRELQLLARQYYQMTSLLIKAKVDFNALCDQVLPGMQELMSDHAGRHKLSDFVLRYHHTAHILKMGETRFRKDYCKWAEKKGYRNHERMAVLIFATAQNGIPVLPDAPSTQIVITEAIRVLHTVEASRDAILTQMQALAKTLPEYSLVREMPCIGDTLAPRLIAEIGDVRRFHSKRALIAYAGIDAPPYQSGKFSANNRHISKRGNRYLRKTGYEVMQSYVMHKPANDPIFTFIEKKRSEGKSGKLAMVAGLNKFLRVYYGKVTELYRSLPQ

SEQ ID NO: 182341 - protein, 467 aa, unidentified
MKLKRRRWPGKPRVSPTLLAHINPDVAGIDCGSAEHFVAVPPDRDPHPVQAFSTVTTDLIRLADWLTACRVTSVAMEATGVYWIPIYEILEARGFAVLLVNARHFKNVPGRKSDVSDCEWLRELHSVGLLRGSFRPPAGIVALRTYLRHRQTLVETASTFIQRMQKALVEMNLQLPLVVSDITGTTGLRILRDIVAGHRDPAHLAQHRDPRCHATAAEIAAALTGHYQPAHLFVLQQNLEAFDACQAQIAQCDTTIEAHLRTVTAPIPAPAAPLPAARRRRKAPKNNDLPFDVRTPLFHLTGGVDLTQIDGIASLTALKLISEIGTDMTRWPTEKHFTSWLTLAPKNKITGGRLISSRTQPSANRAAAILRMAAMTLGRTQTALGAFYRRLATRLDKPQAITATARKLAILVYRALKGELLYQDPGAAHYDAEQRSRVLRRLRQRASTLGFELVNRTTGEVLAAGVS

SEQ ID NO: 182342 - protein, 456 aa, unidentified
MEAKQNQGVLSMDIINPHAAGVDIGSRSHWVSIGQSEKEIREFGVFNDDLYDIAKWLKENNIKSIAMESTGTYWQSLYAVLIAEGFEVVLCNGKFTKNIKGRKTDVQDCAWIQKLHSIGLLSGSFLPDEQTEQLRTYCRHRANLLDMAASTQKKMQKYLRLLNLRLDIVVNDICGLTGLAIIKAICRGEQNPETLSDLRHGNCRKSKEEIAKALHSNGRKDYLFALQQELEIYEQLQIKISTCDKEIEKMFTHIIENDDEKRQHQIGPKSHKRINKNTPKNIDLNLLGYQYFEGVDLMEIEGFSHSTLLTLISEVGLEGIKKFPTAKHFASWLRLSPNNKISGGKVLSNRIPKGSNRLKIALRNAANAIGNLKESTPLRDFFQRISFRKGRVSAISATARKLGVIIWNMVTHGTNYINPAGYLFLDQKRKLGIVKRIQKQIDKFGLTNEDVVFATV

SEQ ID NO: 182343 - protein, 345 aa, unidentified
MKITTVGLDLAKNVFQVHGIDAAGEIIVAKALRRRQMIPFFGKLEPCLVGLEACATSHFWARQLIALGHEVKLMPPAYVKAYVKRGKTDAGDAQAICEAVTRPVMRFVAIKSAEQQSILAVHRTRHLLIGQRTQLVNMIRAQLAEFGVVLAKGIHHVLRLVGQLLDGEALDIPALATTVMITLAAQVRDLQARIGELEEELVAWFRGSEMAKRLKTIPGIGVITASALAATVTDPHQFTSGRQFAAWLGLTPRANCSGGKARLGGISKMGDQYLRRLLVNGMTSQLRWTRLHPDAHPWAAGLLRRKPAKLVAVAMANKAARIAWVVMTRDEIYGAPQPSTREAAA

SEQ ID NO: 182344 - protein, 311 aa, unidentified
MELVNERCCGLDVHKQTVVACVIVPANGRQPHKEVRTFGTMTTDLLELADWLSAEHVTHVAMESTGVYWKGIWNLLEGQVELLLVNAHHVKQVPGRKTDVKDCEWLADLLRHGLLRPSFVPDRPQRELRELTRYRTSLVRERAAEINRVQKTLEGANIKLGDVATNVLGVSGRQILTALVAGTADPTILADFARGKLRAKLPQLERALVGQFGSHQRFMLAQQLAHLDGLDELIEQLNTEVEQRLRPFADALDRLDSIPGVGRRTAEILVAEIGIDMTRFPTAAHLASWAGMCPGNNESAGKTQERQDSHR

SEQ ID NO: 182345 - protein, 333 aa, unidentified
MKPNSQMTLGEFFRQCIGIDISKNKFTACLYMYDRASDVGCCTKSIDFDNTKSGFNQMVKWSRKEAVKGYPLTYLMEPTGVYYERLAYHLHKIGQTVYVVLPNKARKFCESEGVKTKTDAIDARCLALMGCASRKLKPWVPPAAIYRELRQMTRFHADLCVIRRSVANRMEALDHMEGVSKTVRKHCEKLIEEIDTLTEKNDKDIMKKAAEDKELLERVKRIATARGLGVTTIVCVIAETEGFHLIENRKQLTSYAGLDVKAKQSGKEDPKHRISKEGNAHIRAALYMPALVAVRHNRQIREAYGRICQKHPKEKMIGVAAAMRRLLMLIYTL

SEQ ID NO: 182346 - protein, 461 aa, unidentified
MVSKRIIEKKVKQSKVDAMAQINSNAAGIDIGSEEVYVAVPPGRDEESVRSFPTFTVDLQSLADWLKSCQIETVAMESTGVYWIPLYEILEERGFQVCLVNARHLKNVSGRKTDVLDCQWIQQLHTYGLLSPSFRPSDQIVAIRSMVRHREMLVQYRSAHIQHMQKALTQMNLRLTNVLSDITGVTGLKIIRAIVAGEHNPEVLASYREPGCKKSEAEITKSLEGHYKREHLFALKQALELYDFYDHQLRECATELEDLYQQFGPPEDPGTPPPTPRRNKPRKNQAHFDLAPALYRMTGVDLTQIDGLDALTAQKVLSEIGTDMHKWPTEKHFASWLHLCPNNKITGGKVIHAGVQPTQNRASTALRVAASSLTRSDSALGAYYRRIRARHGAPSAVTATAHKLARIIYFMLKERKPYHDFGADYFEQQHRTRFLRNLNRQANRLGFRLEPTSQPTLQEVS

SEQ ID NO: 182347 - protein, 399 aa, unidentified
MLAVGIDISKSKSVAAILNQDGSMHTSPFEFHHTQPELDAFIKYILNSNQSATILMENTGHYHYPVLKAFQEAGLPVCIVNAYQIKKFGDMDLRKAKTDKKDAVRIARYALEKSYSLVPYTSMEQKYEDLRFLARQYNQRMLTLKTNKVFLLNLLDETMPGITNILPLTSRTPETSLSVLFINRFKSYDRIKKMGKNRFLDAFEKIARKSRNRQTKTYGLAIYEAALRNITTRGENEYILAAQDQCLELVCESQKAADSIILKMQTLAETLPEYAVLRSMAGVGDRLGPLILAEIGDIRRFHSGKALNAYAGNDPPPYQSGTFESHNRHISKRGNAALRKYCFEVMQALKLTRPQDDPVYLFLLKKEQEGKPYNVAKMAGVNKFLRIYYARAMETLKQQ

SEQ ID NO: 182348 - protein, 346 aa, unidentified
MNQIIRIGMDTSKHIFQLHGVDAAERPVLRRKLRRNQVLAFFAKLPPAVIGMEACGAAHYWARELRKLGHEVKLMAPQHVKAYVKRNKNDGRDAEGLCEAMSRPTMQFVPVKTEEQQASLMLAGVRQQLIARRTQLSNAIRGYAAEFGLTAAKGLDKIEPLLAQIAQDESLPALAREMFAIEGREYAQLQVKLKAIEAKLMAWHRANAASRRLAQIPGVGPIGATTLVMKTPDPGAFPSGRHFAAWLGLTPKDHSTAGKTRLGKITRAGDEVLRSLLVAGATAVIQQVRHGRGHPSPWLVALVKRKPPKLAAVALANKIARIAWKLMTTGESYDSARMPGASAAAA

SEQ ID NO: 182349 - protein, 323 aa, unidentified
MNKDIKYFGIDISALVFDVTDSDGNYYQFRNNGLGFEKFTKLLNNTSHCVMEATGYYHYQLAYHLLESGIKVSVENPLSVKRFIQMGLSKIKTDKSDSKLICSYAEQVDLKLWKGNSKNEIECLQINRALSVYTKQSTMLKNKLHGESVLGNPSKVVLTSLKRSLRQLQREIKLLEDKLLVLVKEVHQDLLTRLKTIPGIGPKTAITLVVLTGGFDRFTSAGELCSYAGLTPVIRQSGSSVKGRPRISKIGNQKLRNLLFMCSFNACQYNKACRDLYERIVAKGKSKKLALIAVCNKLLKQAFAIAKSGLIFDQEYKSKLVRN

SEQ ID NO: 182350 - protein, 487 aa, unidentified
MHPRTTNKFLETFDVYRFSFESAGALALDNEYSGFAVLPAHYIAFAERKRARPWTSIYHCGRYDVKPLATQQFTAYVGIDWADTKHDVCLQVPGNELREFDCIRHQLADIDQWAQSLHQRFGGPIAVALELAKGPIVYALQKYDFFVLFPINPLTLAKYREAFMPSRAKDDPTDAELALDLLMRHPERFTPLRPQSVQMRTLLSLTEHRRELVGDKTRFTNRLTNTLKQYYPHALDWFEQHDTLLFCDFLTRWPTFPQVKRARRASLEAFFYAHNGRRPNVISARLGAIKAAIPLTEDMGVIAPCRLQVLVLIEQLRTTLQAIDRFDREIAQLAPRLPDYCLFQDLPGAGPHLAPRLLAAFGEDRQRYQHADELQKYAGIAPVTERSGKKSWVHWRLRCPTFLRQTFVEWAGQTINKSFWAGAYYRQQRDKGRSYQAAVRSLAFKWIRILYRCWQTRTPYDESRYLNALRKRGSPLLKHLESNAQNA

SEQ ID NO: 182351 - protein, 349 aa, unidentified
MNKHKIIGIDLAKRVFQVCVVDTHRPRVQVNKELKRHQVLDFMRRQPACRVFMEACGGSHYWARQLQALGHTVALISPQFVTPFRKGHKTDANDALAIVEAGLRPDMRFVPLKSVEQQDIQSLHRIRERYIHQRTQLINQVHGLLQEYGVISGRGQKALKQRVWLALEDADNELSMLMRDLIAEQMAELDRLNERIQSLDKRVEQMSRAVMPCRQLLAIEGVGPVVATQLYSALGNGDAFKKGRQASAYLGLTPTQHSSGGIAKIKGIGRTGQISLKAALIRGAHSVINTVGDKQDAKSRWLRSLVARVGKNKAAVALANKTVRTAWAVLHSGQSYCREFNDGSALMVS

SEQ ID NO: 182352 - protein, 386 aa, unidentified
MIYVGVDVAKNTHYACITDDKQQLLAKSFAFTNDEAGFAKFRGSFQKYPKAKVIVGLESTSFYGENLIAFLAGLGYRVALINPIVISDSRKNRIRNAKTDPIDAKLICKYLATEEYRLLQPRELQMLSLRALCRFRQTMKKSKNRLKTQLVSYLDLCFPEYATAFSNVHGKGAYAALLEYPSAGEMAKASVIRLSNVLRSASHGRLGRERADLLKRLAKHSVAAKSNDMSVQIRHTIPQIQLIESQLAEVERRIEKTFDELDSVIRTVPGIGAINGSMILSEIGDIRRFSTPGQIIAFAGLDPVVRQSGKFRAKTTRMSKRGSSTLRYALMNAAWNVSLNNQTFGDYFAEKLAQKNRHYAALGHVAGKLTRVIFKMLKDNVAFDLP

SEQ ID NO: 182353 - protein, 368 aa, unidentified
MIVQNTTYERSTLVNDEKYIGLDVHQATIVVAVMDSTGKLVMESILETKAATILQFFAGLRGTLSVTFEEGTWSAWLYDLLHSRVDKLVVCNPRKNALLKDGNKSDRIDARKLADLLRGNQLKPVYHGETGVRMLRELSRSYLTIVKDLSRVMNRLKAVYRSWAIPCAGRDVYYRRHRAQWLAKIREAGVRRRAERLYEELDMLQHLRQQARGELLAESRKHAITAKLRQIPYLGPIRVALAVALIQTPHRFRTKRQLWAYSGLALETRTSAEYRFVEGQVRRSKKLLSIRGLNKDHNHDLKGLFKGAATMASVRPGPFQDFYQAALAKGIKPTMARLTLARKIAAITLTLWKKGENFDAEKLKSQGA

SEQ ID NO: 182354 - protein, 343 aa, unidentified
MEQLTIGCDLGDRWTQICVLAGGGESIEEARVRTTPAGFRRYFSKRPTARVVIEVGTHSPWVADLLAELEHDVVVANPRVVRLIYANRTKHDRLDAEALARVGRIDPNLLSPVQHRGRQSRADLALIRARDELVQTRSALVNHVRGVVKSAGERLAGCETATFHRKVREAIPPSLGPALNPILVVLEQLTEQIRHYERLIEDRAERAYPETSRLTQVHGVGSLTALAFVLTLGDASRFEKSRTVGAFLGLARRQRQSGESDPALGITKHGDRYLRRLLVGSAQRILGPFGEDSDLRRWGLEIAKRGGRGGKRRAVVAVARKLSVLLHRLWISGEEYVPIGYTG

SEQ ID NO: 182355 - protein, 360 aa, unidentified
MSFNGTSVGLDVHALSVVAHAVDEETGQVERARLCPDHGEILGWLRQRRGPVRVAYEAGPTGFGLARALAEAQIDCVVAAPSKLIRPSGDRVKTDARDAAHLTRLLRLGEVTAVSVPEADVEAVRDLVRAREDARADLMRVRHRLSKLLLRQGRVYSGGHAWNAVHETWLRRQRFDDSHTAAAFDHHFDAVLHATAARDRLDEQIAAVAASPRWADPVNRLGCLRGISALTGLALSVEIGDWTRFTGSSIGAYVGLVPTEYSSGACRVQGSITKAGNAHVRRLLIEAAWHHRAEYRNPGPTMRARWANVDPALKARGHAGNRRLHQQWCRFNERNKPHVVANVAVARQLAGWCWSLATLN

SEQ ID NO: 182356 - protein, 375 aa, unidentified
MTKSNILFIGMDVHKESIEIALADDGAHGEVRRYGRIGGTLDALKKTLRKLVSEDKTLHFCYEAGPCGYELYRYLTDEGHVCIVVAPSLIPKKPGDKVKTDKRDAVQLVRLFRAGELTPVYVPDREDEAMRDLSRAREDAMIIQKAARQRLKAFLLRHNIRYPGRANWSEKHLRWLADEVRLPIPAQQVVFQEYVNTVTEAACRMERLVGEIHHYVKAWRLYPVVQALMAMRGVRMIVAVTVIAELGDLTRFENPKQLMSYLGLTPCEYSSGERQRRGAITKTGNHHARRILIEAAWSYRFFAKVSPEIQKRQEHQPLPIRDIAWKAQLRLTKRYRTMIQRGKSPNVVVVAIARELAGFMWAVAQAVPISNTSST

SEQ ID NO: 182357 - protein, 344 aa, unidentified
MEHTTIAVDVAKSVFQVAVSSRRGSVDIERRLSRDRFLTFFAQQPPANVLLEACGSAHHWARQLQELGHTVRLLPAHDVHRYVRRNKTDRTDAKALLEADHNEDIHAVPVKTVEAQAIASLHRIRSAWVATRTARLNGLRGLLREFGISIPLGAHHVVPRVRELLGEPTPLPDLVRTALANACDEIACLEANMKAVEHQLLTIGRTMSDVALLQTVPGIGLLTATALVALVNDIRRFRSGRRFASFLGLTPKENSTACHRRLGAISKQGDVYLQMLLIHGARTVLWHARAKVHPTALQRWAVHTAQHRGPNVAAVAVANKLARIVWAVWARQRPYEAEPRTVGA

SEQ ID NO: 182358 - protein, 366 aa, unidentified
MKKISTVAKNRNEIFKEHKLTIGLDLGDRSSHYCVLDEAGNVILEHNLPTTPKGIHQVFRKIPRSRIALETGTHSPWVSRLLTQLGHEVIVAHARNVRLIGESSRKDDELDARTLARLARIDPGLLGPVRHRSAQAQIHLTVIRARAALVSTRTALVNAARGLTKSYGERLKKCGTEQIRRESSQGLSPELRGTLDPLLREIESLNERIAEYDRRIEQIAKEVHPEVALLKQVKGVGTLIALTYILTLDDPYRFRRSRDAGCFLGLRPGRRNSGRSEPQLHISKEGDRYLRTLMVQGAHYILGPFGQDSDLRRWGLKLAERGGKNAKKRAVVAVARKLAVLLHKLWVSGEVYEPLRNNHKVVSAVA

SEQ ID NO: 182359 - protein, 391 aa, unidentified
MKRLRFVGLDVHAKKISVAVAEAGGDGEVRSLGEIFNREDSIRKLVQQLGPVEQLRVCYEAGPTGYVTYWQLVKLGVSCEVIAPSLIPVKPGDRVKTNKRDAQKLARNYRAGDLTAVWVPDQQHEALRDLVRAREMAKKDQTRARHRLSKFLLRQGQRPPLGVLAWTQKYMRWIQSVQFGPVAQQVVLSDYLHEVEHSSARVRRLEVAISQAVQAAPAEMRAVIEALQSLRGVAEVTAATIVSEVGQLSRFEGARQLMGYSGAVASEDSSGERQHRGAITKAGNAHLRRVVVEAAWAYRHKPAVGSTLRRRQAKVSPEVVEISWKAQHRLHQRYCRLTGRGKHQGEVVTAVARELLGFIWAIGVKAESVSGSASMVMNNLKSNSNTNSKTF

SEQ ID NO: 182360 - protein, 355 aa, unidentified
MEATKYIGMDVHKDSISIAVLNVSGKLVMECVIETKAITILEFVHGLRGSLHLTFEEGTWAAWLYDLLKPHVAKLVVCDPRRNDYLKHGSKSDRNDARKLAELLRSDMLRPVYHGEHGIRALKELARSYLTITKDQARVMTRVKAIYRSWAIPCVGKQVYGQRHRLEWLDKIQEPGVRRRAEIYYAELDSLRSLRVVALRELLLESKKHTVSTLLSQIPSIGPIRAALLIALLQTPDRFRSKRQLWAYSGLAIVTHDSAENQFVNGQLQRSKKKQSIRGLNSNHNHDLKNIFKGASAVAVIKSGPLREFYAAQISKGIRPEMARLSLARKIAAITLTIWKKGANFDASYLNPQTA

SEQ ID NO: 182361 - protein, 334 aa, unidentified
MKNYLFHVGVDVSKLTLDFNLLNTSTLKSEHFIIGNNPKEIKKFLQKLNDRKIDLNSVLFCCENTGIYTNNLSLVSIDLSLDLWIVPALEIKKSKGIVRGKNDKTDAKDISFYSYRNIDKLKLFQPIEKDIQKLKLLYTEREKVLKSLLLLEKTKENYSFTSKDVYKEIASVNQSLINTLKKAISKLEQKIKEIIKSNEKLNKQYQLIKSIAGIGEQTSVYLIIATKGFTAFKNWRQFACYSGVAPFEYSSGTSIKGRTKVNHMADKKMKSLLQMCALTALKYDAQLKEYYINKKNEGKNSMLVLNNIRCKLISRVFAVVNRETPYINTYKFAS

SEQ ID NO: 182362 - protein, 330 aa, unidentified
MSDHPPTPTTIMGCDVSSTEIVMACANANQAVKTVANNRKAITAWLKQLPTDVVIGMEATGRYHDVLADCAARRGHRVYVINPKHLSLYAKGVGQRGKTDPLDARVIARYVAREGDRLHPYTVPTPTQRLLRNLLSQRAGVVKHRGAIQQCLRATESMGCATLKRAHRKALRGLQALIAEIDAQLKASVQTDAALEQKRATLQTITGIGLLNSLALTHRFDRTPFTNSDAVVAAYGMDPRPKDSGNKVGQRRLTKQGNAEDRRLIYLAAQSAAKTKTFKPIYLALRAKGFATTEAIVIIARKLLRIAFAVWTSNKPFDPKKIGFQACKKP

SEQ ID NO: 182363 - protein, 351 aa, unidentified
MIMVGCDFHTRFQQVAMLDPTTGEVIERRLEHETGEARSFYASLCEPARVGIEATVNAQWFEKVLREYHHELWVGDAAEIRAMRVRKQKTDSRDALHILDLLLTDRFPRIWIPSPAERDVRQLVRHRHKLVRLRTSVMNQLHALAIGQGLCRKQKLWSKVGRLELEALVLDRWASRRRHELLQLLDQLNPWIADLDRAVMQEVRSRPEALHLMREPGVGPVTALAFVLTIGPVGRFQRSKQVVSYLGLNPSEESSGGRQRLGSISKQGNSMLRHLLVEAAQAASKFDPELRRDYQRLKFRRGNSGVAKVAIARKLAVRLYWKLREAAQPNTAARMQGSPANPVADESLSPK

SEQ ID NO: 182364 - protein, 414 aa, unidentified
MIEVINKACGLDIHKIFFIATILSRSGEKQQQRFNRDDEGILSLKNWVVSEKCNVVACESTSDFWVPIYDSLIKHLPVIVGNARDMKVFTHKKTDKIDSEVIAQLALNHMIQPSRVFPNDHRDFRSYVRLRLTLVQKRTDLKNKAHSVLSSEMLNLKNVLTDIFGKNGTMILSGISSGKSVDQIMASLSPNVRKKAAQIREILDREISQSAALRLQICLKLIKSLDDEIEALEKEIFNYAYKKHKREMEILMSVPGIGELGAAILLAEIGNFKDFSSGDKLASWLGLVPNVYQSADKYYNGRITKRGSKGARWILTQISQAAARKNNSKLKEFFNRKKKSIGHAKAIIALARKIATIIWHLIVNDEIYEDETGYKKGEIQKRKIVETEIFSVDERIKIINEIFAIMEKEGEEST

SEQ ID NO: 182365 - protein, 414 aa, unidentified
MSSTLPKKLASVKPGTLYAGVDLALDGNVVVVLDEGAQQLARFRFPNERGGYDFFYGRLERLRERHQAPEVLVGLEPTNYFWKLLAADMESHQYRYRLVNPYTVKKHREGDQLDRSKDDPRDAFTIGDLLRTGKYTQTQLLHGDYAELRQLATLYDRLQHDRRRQMTLVRSGAGQLFPELAREFKDLTGATASALLHRHAAARVVRQLSLTAFLAEVRADFHGQRLLVSKLRRIHTGAAQSVGLTDGVQGLQLSLRQQLDTLDLLQGQLKEAETALIEVFLTLPEAPYLLSLHGLGLITAAMILAEIGDPRHYRHGRQLIKLAGTQPVQDASGRKSRSQTPMSHKGRPRLRTALFFAVLRLVQVDDAFAQDYQQLQQRDKNPLTKMEALGVLMNKLLRILWALMLHRTFYHANA

SEQ ID NO: 182366 - protein, 338 aa, unidentified
MNIVFPGIDLAKNVFQLCGLNQAGKPVYTKRTGRKELLQTLANIPACLIGIEASTGAFYWQREFEKLGHKVKVISPQYVKPFVRGQKNDGNDAQAIAVALMQPTMQFVPPKSPEQQDIQALHRARQRIVNHRTATVCQIRGLLLDRGIPIGSAVSRARRAIPLILEDAENGLSSRMRRTIAELYDLFNDPERRIHFFDKEIETVFRQSEACQRIAKVKGIGPETATAVVAAIGKGTEFKNGRHFAAWLGLVPRQHSSGDRQVLMNMTKKGDKHLRTLFIHGARAVVRVATNNNDGHMNQWVNQLKERRGFNKTTVAVANKNARIIWSMLRNETGYQVV

SEQ ID NO: 182367 - protein, 366 aa, unidentified
MNKISTEAMNRIENLKGDQLTIGLDLGDRFSHYCILNASGEVIAEHHLVTTAKGIDEVFGRIPRNRIALETGTHSPWVSRQLTRLGHEVIVAHARNVRLIGDSSRKDDQFDARTLARLARIDPGLLGPVQHRSAQAQIHLTVIRARAGLVGARTALVNTVRGLTKSYGERLPKCGTQRMNREVAQGLSQELRDALDPLFREIESLNERIAEYDRRIERIAKEVYPQVALLKQVKGVGTLIALAYVLTVDDPYRFRRSRDAGCFVGLRPGRRNSGMSQPQLHISKEGDVYLRTMLVQGAHYILGPFGEDSDLRRWGLKLAERGGKNAKKRAVVAVARKLAVLLHKLWVSGEVYEPLRNNHKVVAAVA

SEQ ID NO: 182368 - protein, 343 aa, unidentified
MGEVSTIGLDIAKSVFQVHGVDGTGAVMMRRRIGRSKVLEFFGGLSPCLVGLEACPSAHFWSRELQALGHTVKLMPPSYVKAYLKRGKNDANDAAAICEAVARPSMRYVAIKSEQQQCVLMLHRARQLLVRQRTMLSNAIRGHMAELGIISAKGRNGTAELLQIIGDVADDRIPPVARFCLELLARQYLSLVAEVASIDKRIHAWHRSCEESRRLEEIPGVGPIVATALVAEVGDWDAFRSGRNLAAWIGLVPKQHSTGGKERLGSITKQGNRYLRWLLVAGAMAVIRYARQHGTKRPWLIRIMDRRPTKVAAVALANKIARMAWAIMVHGERYREPKLLLAV

SEQ ID NO: 182369 - protein, 348 aa, unidentified
MDHYAGIDVSLECSSVCVVDASGKIVREGKVASEPEAVIAYFGSLRLPVVRIGLEAGPLSQWLYAAMKQAGLAVELLETRHVHDAFKAMLVKSDRNDARGIAQLMRLGWFRPVHCKSLAAQELRAMLTARKLVQSKLRDIENSLRGILRGFGLKVGHTTARSFAVRIRELVEGQANLETIAQALLAVHAVLLREFNGFEKRVRIMAREHVKARLLMTTPAVGPIVALTYACAIDDPARFKSSKQTGAHFGLTPKKYQSGNTDITGRISKIGDAAVREALYQAAHVMLTKPLKGCAQLKSWAMRIARRAGMRKAKVALARKLAVIMHRMLADHKPFNPAAGTIPVAAEA

SEQ ID NO: 182370 - protein, 421 aa, unidentified
MKQQAHAEFAAFVGIDWADSKHDVCLQAAGSAKRECLILPHTPEAIDAWITTLRTRFNGQPIAICLELTKGPLVSALRKYDFLTLFPINPLTLARYREAFTPSRAKDDPTDAALQLELLLTHRDKLQPLKPQSPAMRALEQLVEHRRRVVDDRVRITNRLTSTLKNYFPHVLQWFQDKDTTVFCDFLRRWPTLKAAQLARRSPLETFFRDHHVRSADVIDKRLQAIKTAMPLTIDDGVIAPHALLVQALVSQLRVTLHAIEDFDTAIAQRAQSHPDFPLFEALPGAGPVFAPRLLVAFGEQRERYASAAALQQYAGIAPVTERSGKKSWVHWRLQCPKFLRQTFVEWAAESIQHSFWARVYYQQQRDKGQAHQAAVRALAFKWIRILFRCWQDRTPYNESAYLQALNSRGSSLIQNLGTRS

SEQ ID NO: 182371 - protein, 309 aa, unidentified
MTAIHPIGIDIAKDTLELAGDAPAQIANQPAALRAWLRKLKTRQPAAHLVCEATGRHHHALQVAAAEAGVPLTIVNPRQARDFARSLGRLAKTDRLDAETLRRLGQSLQPKATPVPDKALRELQDLLMIRAALVDEQTAWKNRAALLRPAAARLCTRHLRTLEKELARVEHALDALLAQPAAEELGQKAQTLCLVCGIGLRTALVLVAWLAELGRCNRRQIAALAGLAPLNRDSGQYRGQRHIAHGRAPVRKALYQAAVVAARYNEHLKPFYERLRAHGKPARLAFTAVARKLLVFLNRLLAPHTNSPS

SEQ ID NO: 182372 - protein, 338 aa, unidentified
MQVYVGLDVSDKSTHVCVVDGAGATVWSGACASDPQVIARTLKTRAPGVERVILETGPLSTFLYHGLFERDVPVTCVCARHAKGVLSARVNKSDPHDAEGLAQMARTGWFKAIRIKADATHMDRARLKIREQLIGARQAIAGQLRGLLKLFGLRLGQVTTPAKRTERLQMLFAQRPDLEPILLPLIESLVALEAQIARSSKQLAAQAAADPVTARLMTAPGVGPITALVFKSSIEDPERFSRGEDAGAFAGLAPRRNQSGERDYKGRISKAGDPMLRRALYEAANVLLGRVKRPCALRDWGLRLAETKGPKRARVAVARKLAVLLHRLWLSETDFRWA

SEQ ID NO: 182373 - protein, 523 aa, unidentified
MATSFKSRSRRSGRFLNVAKPSGSLHPRVQKVGPEHFGIVAVDCAKARSKWMLADFYGRILVEATIVEHNKQGFAAAISQIRRAIKRHSLADVIVAIERTGIYHLSVKRVFSSNGFDTRIVHPLTTRQCRLPADPGNKTDDTDLLAIHRATTNGFGLIEPPLDEVHEPLRLLARYRRCLVRKNASSRNQIIVLIDVALPGYTGLFNIFENQAALTIARNVTSAAQVKSLGIEELAQLLESHKVRYQRRTLSKILDWANGVEETTEHSSMYNTIIVSLDDERCARLQQIAMIEQKMAGLLARTPYVVLLSIPGIGIVTAAEFAGEMGPITNYASDQAITGRAGIYPSRYQSDKVDRCDGPLVRRANHSLRGIIMLIAENLLLLNKFFQGLKARWQAKGLDHRDMCVHAAKRFCRIAYRMVAGGQVFRHPSCQGRDAILRKLARFHADHGTSMAQVMIDLQAATEYLPKSEHLPEAKSLFEAMQPSTTRRQRLGPRQLGEILPVVLAKLGVTAVELRSKGENDLT

SEQ ID NO: 182374 - protein, 326 aa, unidentified
MAVIGIDISKQKFDCLWLRDVRSLKVKTKVFANRPTGFAELIDWCCAQTGETVEQLQVFLEATGVYHEPLALYLHDRGVQVFVLNPARVREYARSLGIQGKTDKQDSLVLARYGATQPVRLWTPERREVRELKALIARHEALQEDLQREHNRREKAEVSGSPAVLASIDNLIQALQQEAERVRQDIDDHIDRHDDLKRDRALLQSIDGIGEVLSRHLLSLLHSRDFSSARQCTAFVGLVPPPWQSGKTMDAPTRLSKAGPPRIRAKLYMGAVVAKGCNPDVKALYERLLARGKPRMSALGAAMRKLLQIAYGVLKTQRPYQPRQAL

SEQ ID NO: 182375 - protein, 317 aa, unidentified
MAQKGTIVGIDVAKGKIDAAIRFGAEASFANSAEGRRELLAWLKEHGVCKAVMEASGGYEKSWATLLRRAAVEVVIADPNRVRHFAKSAGQLAKNDPIDARMIAWFGEVFGHVSGQPHDEERQELDQIVTARLGIGRLKEQIENWGEHEQPKAVQKAQQALLKAVATQLAKLETIIASKIDKIERFAQRAEIIQSVPGLAGTAAAGLIAFLPELGLVDRQAAAALLGVAPFDADSGKRRGERHIQGGRHKLRKLLFMPVLSAATQHNPVLKACYQRLIAKGKKAKVALIACMRKLIGILNTMLARGEKWDPARHAIA

SEQ ID NO: 182376 - protein, 353 aa, unidentified
MDGSPPPSGSLEAVRELGFPSVFSLNPDSRLGRKASPDAQERVMEQVFIGVDVAKDRLDVHVLPSNEAFAVARDGEGLASLSERLKELKPGLVVMEATGGFERIAAAALVGARLPVAVVNPRQIRDFARALGKLAKTDAIDAAVIATFAERVRPEPRPVPDAQAEALGELVVRRRQLIEMMVAERNRKHQLTQRRLLKSVERLLAVLQKELSALEADIDDAVRGTPAWRENDDLLQSVPGVGDTVARTLIAELPELGRLDRRKIAALVGVAPMNRDSGSMRGKRMIRGGRASVRSALYMAALSAARCNPPIAAFYRRLRAAGKPPKLALTACIHKLLTILNAILRDRRPWQNA

SEQ ID NO: 182377 - protein, 504 aa, unidentified
MPKASLSKALQEPLSVKNPHAAGIDVHSRHHVVAVPPGTPGDQVRTFGCYTPDLHDLLAWLRTCGVTTVAMESTGVYWIPLFQMLAHASIEVILVHPEYTKQAKRAKPHDVADSIWIQMLHAYGLLPASFRPDDAICRIRALWRLRATLIEESATWIQRMQKALEQMNLHLHKAITDITGKTGMLILHSIVAGQQDPAHLASFRDRRIKCSREELIKALTGDYRPEHIYALKTALEIYEFLQQRIVDCDRQVEADLKALAAQQAASATGGSPPTWSPQSTEALAATLAPSVSASTLPPVTPPASEAASPVPLPPPAPSSAPITPRGPKTSRKNCNPAVNYSQLLIQLCGVDLTQLYGISVTIALTIIMEIGLSVSAWPTELHFASWLGLSPNHRKSARKLLSRHTRKGNRRVAWAFRMAALAASKGHGPYADFYRYLRGRKGANVAITATAHRIAIDFYRLMKYGPQYMEIGRETLKKRQLDRKRRHLRRLATELDCTITENAA

SEQ ID NO: 182378 - protein, 256 aa, unidentified
MFANKSTGWQELLDWATKNTGLAIEHLHVVMEATGIYHEQLALFLFNKGARVSVVNPAQVKCYAQSLGVRSKNDKKDSVVLARYGLKENPTPWQPEAQEIRTLKALLARFDSIEKDLQREKNRQEKATIGLAPEEVISSITQMIGLLETEQQRLDKLIEEHINQHKQLKENKALLESIPAVGKVIATRMLMVIGSRQFDGAWQCAAYLGLVPVQHESGSSIKGRSKLSKAGNPVIRAKLYMAAVVAIRYNPDIKAQ

SEQ ID NO: 182379 - protein, 475 aa, unidentified
MIKSVGIDFHQGKHIVRCLDEKAQLCDSFNFETTAEGLAILEECVFKDGSNPVIVFEPAGLTWLILAICLRAHHPECRLVRAKGQKVAALRRYLRGSSKSDRLDALTLAKMPFIDPEQLDEVYLPPAKIYALQRLARQRKRLESEIGGRKMRIGAIVDGYLPRVRQAFSNPWSCQARAFLRCRLNPMAVVRDGEKALHSFLARARHSNKANVVESHQVYVACESAAVLYQLSSPAGVVDDEFFSVLQEEIARELKLMEAEEAESEAVAKRMQDLYQELHPSDNLRTIPGVGEITAPVFLATVGDPGHFHNQSAFANWTGVVPRARQSSESEAKGLRMTKAGPAVMKWALFQAGDIGRRFDPQLASVYYREMVYHGKNHKQAMGAVMSHLGARVLRVLQDDRPYQLRNNEGKPISRAEARKLILLNYQVPENIRRERRRRNPAKRGLIRTGGMAVRRTNEAAIAPQPVKTAAIPEN

SEQ ID NO: 182380 - protein, 430 aa, unidentified
MKSNTQNAKIEAITEKTLVLGIDVGSETHYARAFDYRGVEYSKKPFKFSNTEAGFVTFKAWVLDIKEKHGKDKVIPGMEPTGHYWFNLGKFLQDNEMKPVLVNPHHVKKSKELDDNHPTKNDRKDPKVIAGLVRGGRYMIPYLPDGVYADLRTASNIRFQLQAELTRIQNRINRWFNIYFPEYKTVYGKPDAKSGILILKEAPLPEDILTLGIDGVNQIWRDAKLRAVGKARAKTLIEAAEHSVGSKEGAVSARMEIRMLLEDYESRNIRLQEVMGLIEGLVNQIPMAEKLLEIKGVGIKTVSGFLAEVGDIRRFNDPKELQKLAGLALVENSSGKHKGKTTISRRGRKRLRYLLFEVAMSLVAKNPEFRELHNYYTTRRLNPLKKMQSLMAIAAKLLRVFYAILTKGVGYDPKKMVNDIRRPAAYAQAA

SEQ ID NO: 182381 - protein, 453 aa, unidentified
MEKKKEKQKKKNIEHQKAVLERIRLNAAGVDIGSEEIYVATTNGPVKHFSTFTQGIRKSLEHINAQGVDSVVMETTGIYWWPIYEAYTAEGLEVYIVNACHAKNVPGRKTDVLDSEWLRELHTFGLLRSSFIPETSTCKLRSYMRLRQDHIGMAASHVQHMQKNLDVMNIKLHNVISSLTGKSGMLIIEAILAGERDTTRLAALCDNRIDKKKLPDIKLSLEGQYKEEHLFGLRQALNLWRDYQSKIKECDVKIELFLKEMTKNKPKPKELIPPKPISNPNKLKIEGLHEMLMAYTDGRDAGQLPGFNDYSLIRVISETGTDMSPWPTEKHFTSWLNLAPWPNNSGKKKKTRRRKIQNRAGQMFREMARSVGNSKYQALGGFYRRIKSRHGARVANKAAARKIAVLFYRLMKYGFDYVEHGLEEYEKKYQERILKSITKKARQFGMKLIPEVA

SEQ ID NO: 182382 - protein, 372 aa, unidentified
MKQNIIHIGLDVDDTQYHGTAFNKATGEVVNFKSRPTLKGLLQQLDRMARHFKGHKIKLCYEASYVGYCLQRDLISNDIHCDIVSPSSIPSPRGKAIKTDRIDAGYLAQFYANDLLTIVQPPDEKQEQDRDLLRSRQKVMQQRNQLRKHLQSVLRRSGLHYKAETGNKSHWTKHHYCWLERTIDGLSGSLKVNLELLLRQLKALNEVLTEYGQQIDMLANSPRYLSAVQSLTCYKGIKNVFALTIITEIGDIKRFSHPRKLVSWIGMDIREYSSGGKYNRFGITKHGNRYIRTAFVEANQRGYRTAKIGQDLKSRRKHIAPELVNIADRCLRRLNKKGNRLLLAGKHPNKVKVACAREMVGFVWESLNKAAA

SEQ ID NO: 182383 - protein, 432 aa, unidentified
MEKIHSHAAGIDIGSRQVFVGLEEGPVRSFETFTSSLADVGKYLLENKVTTVAMEATGVYWYVLYDILSEAGLEVWLVDGRETRQVPGRKTDVKDCQWIQQLHSYGLLKRCYVSEGLIKELRSYQRLREDHLRTASMHVQHMQKALIEMNIRLPEVLSQVHGKSGIALITAILAGERDGHKLISLCDKRVREKKGDDLLKALEGHYTDYGLFALSQAYQGYLFYQTRMRECDKKMQVLLEKINQDKDLPKGVETGHRKPIRHNKPQINHLGEHLLKVFDGRDATKLPGITDYNWLQLYSELGADLSKWPSEKSFTRWLGLSPGQHDSGKRKKNKNKGKPTVGQIFKEMAHGLLNSKYIGLGAFAKRLRGRKGPSIAIKATARKLASQYWRLMVKGSDFVEKGAIAYEQMLKDNKNRQLKRLALELNMQLIPV

SEQ ID NO: 182384 - protein, 319 aa, unidentified
MAQNDLVVAGIDVAKDKVDVCIRSLSLKRTFAGTEEGRRELTSWLRRRKVGKAVMEASGGYERDWAKVLRNAEIEVRIVDPKRVRSFAQSAGRLAKNDTIDAEMIAWFAETFDEARGQAYDETREQLHQMVNARQALKGMQAKLESQGEHGLPAAVQRMHARILKTITVELVKFEAAIAAMIQATPRFTELAEIIESVPGIGRTTSAALIAAMPELGQANNKIVAALLGVAPYDDDSGLEASGRHIKGGRRRTRNVFYMACLGAATQHNPVLKAFYDRLVAKGKEKKVALIACMRKLISILNIMIERRQKWDASRYAVS

SEQ ID NO: 182385 - protein, 369 aa, unidentified
MDDQGEVFVGIDVAKLRNAVAVAEAGRQGEVRYLGEFDADEASMRRVVKRLAAKHERVTFCYEAGPTGYGLHRLIRSMGFESTVVAPSLIPRRPGDQVKTNRRDAIGLARLLRAGELTAVWVPDEGHEAMRDLVRARGAAVETQRVHRQHITSFMLKHGRIFPRKRAWSMRYLRWLQEQRFDHPAHQIALQEMVDALRLASERIKRLEAAIEEFLPNWSLEPLVRSLQALRGVDLIVAVTFAAEVGDVTRFESPRQLMGYLGLVPSERSTGASVRRGGITKAGNSRVRHMLVESAWTYRHPPRIGVKKLYIHERVSPIVREIAWKAQSRLTARYRRLTATGKRTTVVCTAIARELAGFMWAVGRVAQPA

SEQ ID NO: 182386 - protein, 339 aa, unidentified
MSKVYVGIDLHANNSFVGVINQENQRVFGKRFPNNLDVILAALDPFKENLAGVVVESTYNWYWLVDGLQENGFRVHLANPAAIQQYNGLKHTDDQSDGFWLAQLLHLNILPEGYIYPKEQRPVRDLLRRRLLLVRQRTAHILSLESMLARNLGLQIGGSKIKSLTETDLEQKLAHPCLLMAAKSSRALIHYLTENIRLIEKEVKQRVKLMKSFEALLSIPGIGDVLGVTIMLEVGDIGRFPQVGNYSSYCRCVKSERISNGKKKSENNRKNGNKYLAWAYVEAANFGRRFCPGAQRFYQRKLAKTNSIVAIKALANKIARASYFLMRDQVPFDEAKLFG

SEQ ID NO: 182387 - protein, 411 aa, unidentified
METIIPRCAGLDIHKQSVEACVRRMDPHGRLRQDTRHWGTMTRDLLAMADWMAAQGVTHVAMESTGVYWKPIYNILESRFTVLLVNTRHLKQVPGRKSDARDCQWIAQLLQHGLLKGSFIPPRPQRELRDLTRHRAQLVEARTRTVNRLHKVLEDANIKLASVAADVLGVSGRAMLERLMEGESDPVKLADFAQGQLRGKIPGLEKALQGHVTKHHRFMLRLLWRQLAQQEELIAELDEKIDEQTRPFADEIERLDHVPGVDHRVAQVVLAGVGTDPKAFPSHQHLASWAGMCPGYEDSAGKRQGRRITPGNRWLKRTLVQAAWGVSHAKNTYLASQYRRLAGRRGRKRALIAVGHSMLVIFYHLLKECTTYADLGGDFFDRLEPQRLTRYYVRRLEALGHKVTLESRVTS

SEQ ID NO: 182388 - protein, 432 aa, unidentified
MYPPEATVPNPAIAAYVGIDWADQKHDVILCPQAEPAVLEHQVITHSPESLLDWVGNIQQRFGAKGKILVCLEQSRGALIYHLMGYECFELYPINPNQLASYRASFKPSGAKDDRPDAELLCELVRYHRERLVAWKPDTELTRKLATLNEGRRQAVDRRSALANEIKSTLKIYFPLALQVLENDTITALAADLLLHWPTLEALQRQSPSKLRKFFYGHNSRGEQKMLERLKLIREALALTQDAAVIEPAALRVQMLAEQLKSLLPYIARYEKQIAQLFDSHPDSFLFRDLPGAGSALAPRLFTAFGSDRSRFQCAQELASLSGIAPVRRASGQKSGKKGEKKASIHFRHACPKFLRQSFHEFAACSIRYCSWAERFYEAQRARGKTHHMAVRALAFKWIRILFVCWKERIPYDESRYLHALQNRASAHAQPG

SEQ ID NO: 182389 - protein, 398 aa, unidentified
MTESSDYESVQVFIGVDVGKDTHHAVAINRSGKRLFDKALPNDENKLRSLISDLKQHGQILLVVDQPATIGALPVAVARSEGVLVGYLPGLAMRRIADLHAGEAKTDARDAAIIAEAARTLPHALRTLKLADEQIAELSMLCGFDDDLAAQTTQASNRIRGLLTQIHPAPERVLGPRLVHPALLDLLQRYPSPEKLASLGEKKLAAQLCKLAPRLGKRLAADIAQALAEQTVVVPGTNAAAVVLPRLALQLITLRKQRDEVALEVEQRVLAHPLYPVLTSMPGVGVRTAARLPTEIACRAFASAAHLAAYAGLAPVTRRSGSSIRGEHPSRRGNKALKRALFLSAFAALRDPLSRAYYTRKMSQGKRHNQALIALARRRCDVLFAMMRDGTFYTPQGS

SEQ ID NO: 182390 - protein, 445 aa, unidentified
MAVSPQSVEPGEPFVRCFSAFTEGLDASVEWLKACGITTVAIESTGVYWIALCQKLEAAGIQVFLVNARHVRHVPGRKTDVKDCQWLQRLHSFGLLSASFRPEDAICRLRSLERHRLNLTWTAGAEIQHMQKALQQMNLHLHHVVSDITGLSGLRIIDAILAGQRDAVQLTKLRDYRVCKSTVAQMQAALVGDYRPEHLFVLGQNLQAYRFYQARIQECDVQIESHLQQLAQRFESSSALPAKLPEPEVHNDAQAQNPQPAKRKVKRKPQANEPKIDLADYLRRICGVDLTQVIGLNVLSVLLIVSEIGVDMSKWRSAKAFSAWLGLCPRNKISGRKVLDTRTCKVINRVATTLRLAAQSVGRTDTALGIFYRRKRAHLGPAKATTATARKLACLVYHLLKYKDQYREPDPTTYQLKVEKAILARIQKQAAALGYKLLPTALVPA

SEQ ID NO: 182391 - protein, 388 aa, unidentified
MIYAGIDISKYKHDCFILSDFGEVVNDGFSFTNTAKGFTRLQKELEGYERANVRIGFEATGNYAVNLKLFLEKIGFDYMEINPFLVKEYIRSTSLRRTVTDKLCAKHIAGYLYERAYNPNPTDFYDRFALKQLTRFRHSLVSGRSRYLVQLTNILDCVFPEFKPLFDNKFSVTALYILAHYPSPEAIANMNTRSYDILRRKSHGHFSMDKFVRLKSLAKNTVGVFNEYYRTQLETLSELHSQLDSKINEVETQIIKFIRTINPPTLSIKGIGELSAAVIVSEYGDFSRFVNPNKMLSFAGLEPGFFQSGTLESYGKMVKRGSPHLRFALMSCANTVRLHNEVFANYYRKKINEGKTHCVAMNHVAKKLVRVIHALETKGVMFDPDILR

SEQ ID NO: 182392 - protein, 390 aa, unidentified
MILVGIDVAKDKHDCCIINSDGEFPEEVFSILNNREGYETLYKRICSLAVDFTKVKVGLESTGHYSSNLLAFLLDKHLTAYVINPLRVNLFRKGQSLRRTKTDKIDSRNIAHLLMADSSLKPYSLSSYHMEELKSLTRYRAFIVRERTKLKTSIARLVTILFPELEQLVSSIHIHSIYAMLEEFPGSAYIAAAHLTRLTALLLKASRGRFGRETAIRIRDTARQSIGAVSPAKSMELQHTIAHLRVYDQEIGEVESEIEKIMDDVNSPITSVPGIGMQMGAVILAEIGSFRRFDSPDKILAYAGMSPSMYQSGKLTGSYSRMEKRGSRYLRYALFNVTRYVCHYDPGFTAYLSKKRKEGKHYYVAISHAVKWLVRVLYAMEISGNRYQMA

SEQ ID NO: 182393 - protein, 393 aa, unidentified
MIYVGIDVAKSKHDCFITNSDGEVLQGGFTIQNSMAGFLELYETICSFEPNPSSQNIRIGLEATGHYSNNLIDFLLAKNLNPVVLNPLSTNLFRKGQSLRKTKTDKSDARFITMMLITEDIKPYSPVSYHISELKSLTRHRFRLVQERTRFKISYSRILDIVFPELQGVVWATTQKSMLFMLLELPNTKAIGQCHLTRLTGLLEKNSHGRYNRNKATQIRELARNSIGSSSPALAFELQQIIRSILFLQDEIALLDKQIKSVVQEMDSPIMSIPGISYTLAAMILAEVGDVERFESPAKLLAFAGLEPSTYQSGNFTASHATMVKKGSKYLRWAVLNAARLVCMRDSTFKAYRDRKQLEGKHYFVASSHTAKKLIRVIFYMLKNNQQFVAQSA

SEQ ID NO: 182394 - protein, 338 aa, unidentified
MQVTTIGLDIAKNVFQVHGIDANEKVVVRKQLRRGKLIAFFEALSPCLIGIEACATAHHWARELTKLGHEVRLMPAKDVKAYVKRNKNDAADAAAICEAVRRPTMRFVRIKSPEQQGQLMQHRTRDLLMRQRTQLINALRAHLAELGIVAAKGDSGVKELRAIVADEEDTRLPIDVRASVIVLAAQLGAVQTLIGSIEKRIKTQHRANEASRRLETIPGIGVIGATAIAATVADPTVFRSGRDFAAWIGLVPRQDSTGGKQKLGPISKQGDRYVRRILIVGAHSVLRRAQENPEITQLLARRPFKVVAVALANKMARMAWALLAHGGTYRAPELAQAA

SEQ ID NO: 182395 - protein, 325 aa, unidentified
METRPLFVGIDVSKGQLDVAQQPAGTGQVSPHTESGIENLVTQMRTLKPAAIVLEATGGLEVPLATALAVGGLPVAVVNPRQVRDVAKATGRLAKTDTIEAQVLARFAEAVRPASRHLPDAATQAFSALISRRRQLIEMRVAEQNRLASAPRRIQPPIRKHLTWLDRQVAAIEEKLAHHIKSTPIWRERDDLLQSVPGVGPILSRTLVAELPEPGTLTRHQIAALVGAAPLNRDSGTLRGRRTTWGGRAVVRAALYMGTLVAVRCNPVLRTFYQRLRTAGKAPKVTLVACMRKLLTILNAMLKHQRPLVSSSSDDLTFETVAFVT

SEQ ID NO: 182396 - protein, 462 aa, unidentified
MRTIGIDLAIVGDHKAVILDDQGNTVGKVFRFRTNPASLETLLRRAREGADENEPLRAVMEPTGLAWLSVASYLIQRGVTAYLVNTQQVSDLRRFYKKHAKSDRIDARVLARLPWVNPEALHPLQLSPADYLSGQRWCKQQEELADLMTAIKNRVQAWERGFWPGLEEEVGNLWAPWVRRWREEWYDPWRLQTVETRQLAAFLAEAGADPEEVDSLATGLQTVARRVVALFGTPDGEASPYVDYDTLRDQVLRELRLLAFYEAEHRALRHKVQQLYRQIQPERHLESLKGVGEDGAAVYVFFLGDVSRFATQRKFRGWHGLVPASKQSSDAETKGLRITSAGPDPVKKYGYINGEVARQWDPQIAAIYHEQMVHKGNHHCQAVCACATHLLDRVRAVLRDGRPYELRDVDGTPVTWQEARAIIAERYHVPDEVRKRNSKRARKARRDRRAERKRKRKSPPGR

SEQ ID NO: 182397 - protein, 410 aa, unidentified
MNPVVGLDVSKGESEVQGFLDKGKPYRKSFSIWHDLEGLLLLKFLKEIKDITGQQPPVVLEATGHYHAPVVQYLEDRNYLLIIVNPLVSHRAKSSSLRKVKTDAVNAYRLCELYYKEELEPYKKRGIRLLNLRNLTRQHANITEIYVQTKLQFQAVLDQVFPEYKGVFGELHSVVSLLTLQKYPTSKDILAASEDELANGINESYKHGSKTWVKEKAQKLKSAAARNPFQETLYRSHLLSMRMYIDMLLQYKEHLSKLETEIDTLAKEIEEYKIIQSIPSIGEKIPATIISEIGEIDRFNHPKKLVAFAGVDPEVFESGKFKATLVRITKRGSSRLRHALYLAVRAGIRDARKKKTSDEIIPRNKRLRKFYDKKRSEGKLYKVAVIACVNKLLHWIYAILKNKTTFQDIA

SEQ ID NO: 182398 - protein, 313 aa, unidentified
MSQNNIAILYVGLDVAKSSLQLDLAGTAHTLTNDAKGHAQLLKLLSAQPGAHVICEATGGYEKPVVRVLHGAQSPVSIVEAGRVRHFAKAKGLRAKTDPIDAAVLSEYGRTFKPPVTPAPTAQQSCLAELATRRRQLLDHRIAETNRAEHYIERVCVRQSRQLVKLLEQQIAACDTEITALIAADDALKTKAQRLEAIPGVGQVTAATVLAELPELGRISDEAAAALVGVAPYNRDSGNQSGVRSIAGGRKPLRCALYMAALSAVKHDAILKAFYTRLRAAGKKPKVALVAAMRKLVILMNRLLKNPDFQLAN

SEQ ID NO: 182399 - protein, 342 aa, unidentified
MAKIIGCDFHPRFQQIAFLEQETGEFGERRLSHPEEAERFYRSLAGQAVRIGVEATGNFGWFQRLMQELGHEVLLGDATEIRASNPRKQKTDKRDARHILSLLVQDRFPAIWQPPVENDEMRQLLLHRCRMVRMRTRIKNQLDGMAKNEGWLSPRVWSARRREQIEGLPLTGWRAERRRDLVALLEDLNRRIGPLDEAVRAAAEANGEARLLMTHPGVGPVVSLAYVLVIGDWRRFARGKQVGSYLGLIPVEESSGSKRRLGQVSKQGNSLVRWLLVEAAATAQRYDASWHRQYVRLSMTKHHGVAKVAIAHKLAVRLYWMLRSGENYEQVVERGSHAGRSE

SEQ ID NO: 182400 - protein, 362 aa, unidentified
MEFFCGLDVGMDETAICVVDATGKVMLETAVVTDPDAIKVALTPYLGRLRRLGHEAGSLSPWLHPELLRLGLPAVCLETLHVRAALKAQRNKTDRADALGIAHIMRTGWFRRAHIKSEACYRLRLLLTHRRNLKRKFVDLENAIRHSLKVFGIRLNRVGRGGFAQVVREAVAHDALVSELIDAMLNARAALWKEYCRLHDLVVRLVAGHELCRRFMQIPGVGPIAALSFMTAVDDPSRFRRSRDVAAYFGLTSRRWQSGSSIDVKGRISKAGDGDVRRALYEAASALLTRYKKKDKVKAWGLALAKRSSHRKATVAVARKLAVIMHAMWTSGTLYCGDPDASAAEMHAETTAKQRKLLGPYA

SEQ ID NO: 182401 - protein, 366 aa, unidentified
MKKISIEQTFRDDILKEQKLTIGMDLGDHWSCYCVLDEAGNIILEQKVAMTPEAMKQTFAKIPPSLIALETGTHSPWVSRVLTELGYKVIVAHAQKVQLITKSNRKDDRHDARTLARLARIDAELLGPVRHRSAQAQIHLTVIRARAELVSARTALVNAARGLVKSYGQRLPKCGTQQVSRELGAGLHAELREVLEPLLQEVESLNERIQEYEVRMEKIAKESYPHVELLKQVKGVGTQIALTYVLTLDDPQRFPKSREVGCFLGLCPGRRDSGESQPQMRISKEGDRYLRTMLVQGAHYILGPFGEDSDLRRWGLKLAARGGKNAKKRAVVAVARKLAVLLHRLWVSGEVYEPLRNSQKAMRTAA

SEQ ID NO: 182402 - protein, 454 aa, unidentified
MGNFGYLGIDISKGYADLFITTSDKRPLEPTFRLYDVPESHLQLGVLIDKWLSEQKFNTLFCGVESTGGYENNWVNYLQDLSASRPIKVTRLNAQGVKSLSDAALKRTITDSVSAENIAMYLIDFQHKIRWLDSSLPSQVYRDGRRHNSLIRMLKKQRIQLSNQLEKLLYQEFSPLLCYCRHGIPAWFLAMLEKYPTPQAIKKAGTVRLTKIKGITEDKALALLKKLPSDLRPTSDHIGAVIKSTATQVLSLQASIKAEKTSLIKQFTNLADVQLLTSIVGLGEQSAIEILLEIEDITRFEDAKKLSAYFGLHPVFKQSGDGKWGNHMSKKGRSDIRAVLYMSSLTAIRYSDLFKQIYANARTKGKNHFSAMGIVMHKLLRVIFGVLKHRLPFDSSKDTANRQKAKEKQMEKEAEAKLSKKEQATRLERYDQAELAASPISKRHAKKRKKEAAP

SEQ ID NO: 182403 - protein, 459 aa, unidentified
MEQALAQRNPAVSLKPRKSRAAALSITHPNAAGIDIGSASHFVAVPPDRDDEPVREFASFTADLNAMADWLKACRIDTIAMESTGVYWTVFELLESRGFTVMLINARHVRNVSGRKSDVLDCQWIQQLMTYGLLRGAFRPADQVCVLRSLWRQRGMLLRSQSRHVQHMQKALTQMNVQPANVISDLVGVTGQKILRAIVAGERDGHALAGMKDARIPASVEEIAKSLQGTWRAEHLFALRQAVDAFDFIGTQLAEGDREIQRQLQRLQTHEGEPARGKQRGRTRNAPKFDLRTQLVRMCGVDLTRIDGIDVTTALAVISEIGADMSRFPSAAHFASWLGLCPGTRITGGKVMSGKTMRCANRAAQALRLAATALRTSQSALGAYFRRMCSRMDKPKAITDVAHKLARLIYTMLTKGEEYTDQGQDYYEERCRERVLRQLSQRAQKLGMKLVATEQPQPV

SEQ ID NO: 182404 - protein, 438 aa, unidentified
MSNKVIFNLDDLFISVGIDVGADFSWMSIALPNQQFVGKPYKILHNSIDSLTTAVSKIKEAEELYSLESRIFLESTGIYHYPLFCYLRDKGFNCSVINPIITKNSTNINIRKVHNDRFDSKKAALVGLKPDLKVSLMPSDLALNCRNLCREYYDLMDNRSAYVNKLQGELRMAFPQYLGIFSKVTINTSLTLLETYTSPSAFLEADKQEIIDIIRSTARFGLTYAQNKYNAIIQAATDANQFGYIIDSNIKRIRLYISFIRKYDEEINNILESLHELVDANEDADFVKQIHLIETFKGAGFLSAVSIMGEIGDFSAFSKPKQLFAYFGLDPAVKQSGKFEGTKVQMSKRGSAIARRVIHTLTLQSISISRNGEAKNPVLREYYLKKCDSKPKLVAMGAVSHKVCNMIFAILRDNKSFEIITPQEHIKQYNASKCDMAA

SEQ ID NO: 182405 - protein, 325 aa, unidentified
MQASTVVTPTAGHCGTIFVAIELSQKTWLVTLHSPERDRISRHKLAGGDHGGLLALIGQVRARAAGKLGAVPAVTSCYQAGYDGFWLHRLLEADGIRNFVFDAASIAVEQRARRAKTDRIDGELLLRTLMAHLRGEPRVVRIVRVPSLAEEDARRASRERDRLITEQTAHTNRIKALLRLQGMAVGNPRRGDWLAWLQRQRDRQGQSLSPQLLAEVTREHVRLMLVRQQLAALEQAQAARTLPLPAPMAERQDRLLRIKAIGTTFGANFRNRREVASYCGLTPSPWKSGSIDREQGISKAGNHRARHKAIAKGAFAPCHRQMLGS

SEQ ID NO: 182406 - protein, 372 aa, unidentified
MSAAFKPTIKMEVKVEVSVYVGVDVHKRFCQAALMSEDGTILDETRFENTLDGAMNLVNLARSYSPNIKAVVEPSANYWIKVYDKLEDEGVEVKLSNPSKTKAIAEARVKMDRLNAKTLAYLLRGNLVAESYVPTKKNRERRTLIRHRASLIKIRVEVKNRIHALLDKHDLSYSYTDLYGKEGLEWLHSLNLPATDEHILKSNLQILEALNEQIHDADIQIAKDAVNEEQAKLLMTMPGVDYYAAMILLSEIGDVKRFPSPEKLVSWVGLAPQVHQSGETHWTGHITKKGSKRTRWILTQCAQSTRQHDPKMRTFYERIERKHGSSKATVAVARKMLAIMHAMLTRNEPYHGENRQLTMQKHKRLERIANSA

SEQ ID NO: 182407 - protein, 478 aa, unidentified
MGRSRLGDYCVEHARAACYRQGETMPKQKSRKPHSSPSARVLEPNAAGVDIGASEIYVAVPQDRDPQPVRCFRTFTPELEQLADWLKQCRIESVVMESTGVFWIPLFQMLEDRGFRVCLVNARHVKNVPGRKTDVADCQWLQYLHSVGLLRASHRPPQAICALRSLWRHRESLVQLAVVHIQHLQKALDQMNIQLHRVISDITGTTGMAIIEAILAGERNPQRLASLRDPRIVASEATVCQALIGDYRPEHLFALRQSLQAYRQYQTWISHCDLEIERQLGKLDSRLQPSQKPLARPKDQHKPRRNEPRFDLRAYIYRAFGVDLTEVPGVSSLTAHTFLAEVGPDLRRFPNAAAFASWLGLCPDNRISGGRILSVHTRKVVNRLAVALRMAAQSLHRSQSYLGQYFRRLRARLGTPAAITAAAHKLARVLFHIITTRQPYDESVFSLMEARSRYRSFQRLQKQAAALGYRLAATGSVP

SEQ ID NO: 182408 - protein, 396 aa, unidentified
MALIWAGTDIGKTHHHCVVLDADGKRLLSRRVLNDEPELLALFADVMAIDEDVVWAVDVADGMAALWINILLNHGQQLVYIPGLAVNRAAAGYRGTGKTDAKDAVVIADQARMRRDLTTLRPDDEHAVELRVLTGRRADISADRTRRINRLRGQLTSIFPALERVLDLGNVGPLVLLTGYQTPAALRRTGRKRLETWLRNRQVRGAESLAEAALSAADRQQTALAGEKITAQVIHTLAKEVMGLNEQLAEIDKLIAARFREHELAEVIESMPGIGPLMGAEFLAATAGDMSRYGSADRLASMAGVAPTPRDSGSVNGNLHRPRRYHRGLQRVFYTSALISIRNCDASRRFYERKRAEGKRHVQAVLALARRRVNVLWALIRDGRCYQDRLPVTAAA

SEQ ID NO: 182409 - protein, 432 aa, unidentified
MSNYYFKPVVGIDISQGFHVVSILNPMSKLHTKTFKIYNTLDGFSYLLSQIEKVEREYNMKTAIFMESTGVYHLSLFHFLKKQNLEVNLINPLVTNSNKNKDIRKVKNDKKDSFSIAKLAQLDDIKYSDYFDLHVFNAKSLCREYYKHVDTRSSYKRKLSADIHVLFPNYNSVFKNMTCDTSIVILKKYPTPSGLLAADSETVVQLIKTTSKKGLNWATNIYHKLKNVALDAIEIGIPSISLELRISLNLNIIETLDKNLKTILNKIKNIVNSNDFPQYLKDCIEFVDSIPGFDFFSAVTILAEIGDYRRFKKPKQLIAFLGLDPSVNESGKFKGDKNSMSKRGSKAARRTLYSAALVSIRKKRSGEYFNPVLFTYFHENLVNKKPKIALGAIMHKLVNYIFSVLRDQKNYELRSPKLHNQMFLNNKSKQCA

SEQ ID NO: 182410 - protein, 411 aa, unidentified
MEAAVITAVGIDVSKSKSTVAVRRPGGEIALRPFEVHHTNSDLKKLASTLKKLGGDIRIVMEHTSTYWRPIALTLKEAGFFVSVVNAMLIHDFSDNTIRKLKTDRADALKIANYALTFWDTLPPFNNEEETRLLLKMQSRANERITATATALRNGLIALADQTFPGVNIAFDPNTKNANGHEKWVDFFLRYWHKDCVCQYSMEAFTESYRGWCKRKNYKFRTDTAHKIYLLAQEGVATLPKCESTKMLITQACKSLNAVCEAKQSTQLEMQRLAAMLPEYEVVMQMEGAGPITGPALMAEIGDVRRFKNKKALVAFAGIDAPPFQSGAFESKSRHVSKRGSPHLRRTIFIVSNIILTRSNTENAVYCFMDKKRSEGKHYYVYTVAGSAKFLRVYYARVTEFLRSQSSPDAC

SEQ ID NO: 182411 - protein, 382 aa, unidentified
MRNVCGLDVHKDNVFVCIDKRNGEKIQFKCGILTRDLDVLRDKLVENDVGEIAMESTSVYWMPIWRVLESDFKLYLVNPYAIKQLPGRKSDVKDVEWIATCLRKDLIRGSYVPDATIQQLRQYNRRIFDINKHMVYIQNKMDAALQRCNIRISNYVSNVDTKSYREVVTKITEGEARAEELVKVIHGRTIKRCGRDTIVASLDGVVRQADIDLLKQYKEELDMLRRHKAECLLKMREICKEHYQRQLELLQTIPGVKDQSAMQIIAEAGVDMKTFITAAMLIGWAGLKPRNDESNGKFKSRKITHGNKYLRKVLIECAWAASRTQGCFYNKFSYRLCVVRKKSGLKVRVAIARKMLVAIWNMFTKNETYKDYQLENEEEKPS

SEQ ID NO: 182412 - protein, 352 aa, unidentified
MLIIGCDFHPGFQQVAIFDNRTGEIQEKRLQHRAEAEQFYGWLAGQEVRVGMEACGHYPWFERLLAELGIELWFGDAARVRASVVRKQKTDRRDAEHLLDLLREDRFPRIWVPSLEVRDVRQLLVHRHKQVQARTRSKNQLQAMALSCGVQKKRKLWSKAGREELEQLPLLPYAAQRRKRLLEALDSLEAEIVELDQRVHEEARQRPEAVRLMTHPGVGPVTALAMVLTLGPAERFGSGKQVGSYFGLIPSEDSSGGKQRLGKISKQGSSFLRFLLVEAGQTAARYDPQLKRFYRRLAVRKNRGVAKVAVARKLATRLYLMLREEWTYAQLCQGVMQVSPSHSVAGKQEPSA

SEQ ID NO: 182413 - protein, 307 aa, unidentified
MNSKNYIAIDIAKDSLAVISDSFSGSFDYDNKGLKTLLEQLRRIESALVVCEATGGYERKLMELLFSHEIPVALVNPARVRAFARSEGAKAKTDPIDALMILRFAQSKDLSPTPVPSEQQRTLQALMDRRSQLTESLAREKNRLQKSPKCVIKSVEKMIRIIERELKALEQKMEKLIDEDESMCWQDSIMQQVCGVGATTSWSILAYLGEITALKRNQLVALAGVAPYNRDSGKFKGKRRIEGGRAKVRKCLYMAAQSAAVHNPHIKEYVDGLRSRGKPYKCAIVAAMRKLLIHLQSLLKKQELELA

SEQ ID NO: 182414 - protein, 384 aa, unidentified
MKLVSGLDVHKDSVFMCILQENGEKIEGKYGTMTPDLNKLRETLLLHKVEEVCMESTGVYWIPVWNILVDFFELKLVNPYFIKQLPGRKTDVKDAEWIATVLQKELVRGSYVPCGIIQEMRQYERGQADLRKRIVYLEQRIDMQLQRCNIRLSNYVTDIGGVSMRKVVKAIIQGETRPEVLSVLVHGRITNKHGHQTITDSLSGIINSVDVFMLKQYMDQLELLEKQEQECLETLSDISDHYFKNEMALLMTIPGVQKQSAMTILAELGADMKMFATAAALVGWAGLRPRNEESAGKIKSRKTLHGNKFLRIILVQCAWAASRTKKGRLGDKYRQLASRMRAQKALVAISRKLLVIIWNVLSKKEAFDPNRGIKSRTRIKTSLS

SEQ ID NO: 182415 - protein, 400 aa, unidentified
MRCADHPVRLRAAVREEDSSLFVALELSKSAWLIATSAPGSEKVSKYRVAAADVAALVALLARLKSQAERYRSGSVQVVSIHEAGLDGFWVHRMLEANGVESHVVDAASIAVNRRSRRAKTDRIDVEGLLRTLMGWARGERRICSMVRPPSPADEDERRLTRERGTLVTERTRHVNRIKGLLATQGVFGFEPLHKNRRKRLEELQQWNGQPLPARLKTELVRELDRLELVMSQLGALEAERDRALQARRTVVGNTTKAPSSGTASAGEVGSRLLRLRSIGPEIASVLTLEAFYRNFSNRREVAAYSGLAPSPWKSGGIDVEQGISKAGNARLRTTMIQLAWLWVRHQPSSALSRWFHERVGDKRGKIKRIALVAVARKLLVALWRYVAQGVVPAGAELKA

SEQ ID NO: 182416 - protein, 474 aa, unidentified
MNNKPRKSKKQVEVNIFEQQEIISKAESIMSSLKASTWHELETNGKFDKNKKLSFITDDMLIVGCDIGSETHYARAIDTRGKELCKTAFPFSNSMEGFQSFKDWAVKLAAANNKNQIVLGLEPTGHYWFCLATWMISNGISVVQVNPYAVKQSKEIEDNSQLKDDMKDPKTIANLVKDGNYGMPYLPEGLYSDLRSLSMLRDQLAEDRIRCINRLHRDMKIYFPEYKDAFGKVDGQFCLKVLEVAPFPEDLISLGPDGIKEIWHNAKLRGCGYNRVTSILEYANKSVGLKSGTEGAKAAVKWFVKEIIKLDEKLSWIEEQLNQKCMQIPNAMKLLDISGVGETILSGILAQMGDITRFDDVKEIQKLSGLHLVACSSGKHKGETKISHRGRKRLRYWLFQAAKSAVAHTEEFHELHVYYTTRSVNPLKKMQSLIVIACKILRVIYAILRKGKKYDPEKLLSDIKRPESLKTQVA

SEQ ID NO: 182417 - protein, 348 aa, unidentified
MSKGNQYVGLDVSLKQTSICVIDDADKIVWRGEVDTTPEAIVSAVTQHAPHAVRIGLESGQLSNWLFHGLKQAGVPVICVDARHAKAALSLKVNKTDANDALGLAQIMRVGWYREVTVKGLDCQAVRALLVARAQIVSQITTLKNCVRGILKTFGRVLPKGLRSQFPARVRAAIEGHPVLGAIIEPTLQVLEAARAQLLVYDRAVIQRARSDDTARQLMSAPGVGTVVALAYMTGVEDPARFKRSSSVAAYFGMTPRRYQSGEVDHAGRISKCGDGMVRGLLFEAAKVLLGRSSRPNALKTWGEALGKRIGLKKATMAVARKLAVILHRMWTTGATFQWNAGTTSSVA

SEQ ID NO: 182418 - protein, 404 aa, unidentified
MWYVGLDWADTHHDVEVPYLAGKRVGVRRFAHSHQGLNELKQFVLSIATDPEQLACIVETNHGLLITFLLEAGIPVYPVNPKTANHLRKAAGAKTDQIDAHLLAKLGRLDLGELRRLEPDSAIVQELKTLTRDQDALIQAQTRLVNQLTACLKEYYPVALKLFTKLQQRSTLLFLQAYPTPEAVQAASLDEITATLRAGKHTNPSQVAPSIFAEVHRPQLVASEIIVRAKSRLMLSLVKQLLVVLQEIASYDKAIRPLFLSHPDHELWSSLPRAGKHLAPRLLAEWGDERTRYANATSVQTLAGTAPVPFQSGHYAKAHKRFACVKPLRNALYQFAWQSTRQEPWALAYYQRKRAEGKSHSMAVRALANVWVRIIYRMWQSKTNYQTVTFEAARLAHAPRQHVA

SEQ ID NO: 182419 - protein, 315 aa, unidentified
MDAQAPVVIGIDVSKAELAIAVHPSGEAWTSGTTPVALERCVARLAARQPHLIVVEATGGYEVTLVAACAVAQIPVAVINPRQVRAFAQALGRTAKTDAIDAGVLALFGARVQPLPRALPDAETQALAALVARRRQLLEMLHAERLRLTHVATGPVARDLRNHIRWLERRVADVDDEIGGAIQRSPIWRVQDDLLRSVPGIGPTVARTLLADLPELGHLDRRAIAALVGVAPFNRDSGQWRGRRMIWGGRAPVRAALYMAALVATRHNAVLRTFYQRLRTAGKPAKVALVAVMRKLLTIVNAMLKNQTAWHDQVA

SEQ ID NO: 182420 - protein, 339 aa, unidentified
MENFVGVDLHKKVSQLATLREPKPASQVRFPNHTVTVEKVLKKLPQGSKIALEATGSWWWFVDLAQRTGHEVVMWHPKQTKAIASARLKSDKVDALMLAKLLKADLLPTVWIPPAAQRYVRELLTHRARLVRQRTSVINELHALYAKRNIDAGMIFHRVRPPAFRAEDLSGYGPRIVEEDVALLGFLNRQVQGLDKELKAIAEKDPESKRLMTIPGVGPVNAVAGSCWIGTIERFSNSKKLSSYFGLAPRVRQSGERERHGHITKEGNRMVRSLLIQAALWHIRRGPMSSRRHYLGVCKRRGKPIARVAAANKLLGIIFQMMKEKIDYEEFLRRGGNAQ

SEQ ID NO: 182421 - protein, 337 aa, unidentified
MTLYCGIDLHANNSVISVIDDHDNVVYEKRQANDLPLIHDVLAPFRDDLLACVVESTYNWYWLVDGLMDAGFDVRLAHTGAIPQYAGIKHSNDQTDARHLAHLLRLGILPQGHIQPREQRAVRDLLRRRLLLVRQKMLYHLSLQSLIVRHTGERLSANQVKALDTDAIADKLDDPIRLGGQLTHLARCWHERAIAMLEEEVLKQLTPRWDYQLLSSIPGVGKILASTIALETGTIERFPGPGHYASYARCVNTERVSNGKLKGRGNKRNGNKYLAWAFMEAAHYAAIWSPEIKRFYQKRQAKRHILVAKKTVANKLAKASYHMLKRQEPFDVNRAFG

SEQ ID NO: 182422 - protein, 419 aa, unidentified
MSFKIFKFNCCGLDVHKTWIYACIGITDSNNRTEYKQARFSSFTKGLNELCDWLAKYNCKDVCMESTGKYWIPVFNILEQHSFWVTLSHHKYTKPMKGNKTDRKDAKWICDLYMCGMVKPSFIPPADIRELRDLVRYRFKLTCMITGEKNRAQNCLTVSNLKLDDVFSDVFGKSSRSITEHILQHPGEKFDIAPFVDSRCKTPITEIQAAVDGAISKEQVVKLRQCLDHIDELNKHISEVEQEILRLSDKYEAALNLIRTVPGFNKNPLTAIQVLSEIGGDMSVFPTAKHLVSWAGCCPRNDQSNQKIKSTRISRAGSYFKPVLVQVANALIKSKKHSEFTSRYKRIKARRGHKKAIIAICRMILTAIWHILSDLKPYTPEGFLESRPVKEGKVLSTSQALNLLKQRGYIIKGEPLAVS

SEQ ID NO: 182423 - protein, 347 aa, unidentified
MRFYTQQHKHYCGIDLHARMMYVCILDGSGTVLVSRNIDCSAKSFLFAVKAYRDDLVVAVECMFTWYWLADLCAKENIAFVLGHALYMRAIHGGKAKNDRIDAHKIAALLRGGMIPQAYVYPPEMRATRDLMRRRNHLMRKRSELIAHIQNTASQYNLPPFEHRISKKHQRVGLLEHFPDPQVRNSVALDVAVIDHYDELLPKLERHIRACAKGHDPKAFVLLRSIHGCDLIIPLIILYEVHDIARFPRVQEFLSYCRLVKPTRESAGKIQGHSGRKIGNAHLKWAFSELATTFLRTNPRAQGLHERLKKKHGKGKALSILAAKLARAVYYMLSRQKVFDADKFYPN

SEQ ID NO: 182424 - protein, 457 aa, unidentified
MTGTNKPVQSRAMSPIHPRAAAIDVGAKMHVAAVGPDRASEPVRTFGTFTDDLHRLADWFQECGIETIAMESTGVYWIPVFEILEQRGFEVLLVNARDAKHVPGRKTDVSDAQWLQRLHEFGLLRASFLPKGEIAALRAYLRQRERLVELSASHIQHMQKALMQMNVQVHHVVSDIMGVTGLRILRAIVAGERDPGVLAANRDRRCRADVETIQRALTGTWRAEHLFALEQALALYDACQEKVVACDRKIEATLKRIEAQSAKPVGELPPARTTTRQPNAVDFDVRTALHAVLGVDLTQIHGLGPYLALKLVGECGTDLSAWPSAKHFTSWLGLAPSNKISGGKVLSSRTRRSSNRAASLLRLAAVTVGRTDTALGAFFRRLSGRVGKAKAVTATARKIAVLFYNTLRHGMDYTDPGASYYEARYRQRVLTNLQRRAKSLGYVLQQADAAPATNGVS

SEQ ID NO: 182425 - protein, 441 aa, unidentified
MGRKRGQQRLTIVHPNCAGIDLGSRAHYVAVDPSRADEPVRRFGTFTDDLQAMARWLHECGVKTVAMEATGVYWVPAFELLDREGFEVALVNPRAAKQIGGRKSDVLDCQWLWQLMSYGLLKGAFRPADRICELRSFVRQRATLTRDAARAVQHMQKALVQMNVQIDQVLSDITGKTGMLILRAIVAGERDPRVLASYRDTRVKADEATIARSLQGNWRREHVFALAQAIGRYDFYQQQILACDAQILETMAGLEQDIELPDVPVAGRTTAERELAVALRRMLGVDLTAIPTIGVGTALVLAAEIGPDLSRFPSCEHFCSWLSVAPGTRITGGKPLPGRSPRVLNVAGQALRQAASTARHSKSFIGAAHRARLARMDTAKAVKATAHHLARLIYAMLTKGHEYVEQGIQQFESEVQDRRLKNLQRQAHRLGLELVALESAA

SEQ ID NO: 182426 - protein, 428 aa, unidentified
MNSVVAPYISVGIDVAADDSIVCLMLPSFETIGKPFKVIHTDLNSLERAVSAIKKAEDKFQMKSQIFLESTGIFHFPLFCFLKNEGFEVFILNPLITHSTKNADIRKVKNDKFDSIKIAKIGLDPKTKKSVIADEFVLNLRLQTRQYYVLTDDRTALINRLSNHVRIAFPAYIGIFSDLAGGASLKILRSINSLDDLLAANHDDMLALISKSARKGKAYSNKKFDAIIEAVHISKKLSFILPDVFSVIHAFIDQINLIDKQLDDIIKRVRDIVKNNDGHPFIKQIKLIDSIPGAGFFSAVTLMCEIGDFSVFSNPKQLFAYFGLDPSVNESGKFKGTKNHMSKRGSRLARRIIYTIALASIRNKRNEQPFNAVLQSFYQDKAKSKIKKVALGAVMHKICKIVFAVLRDGVSFTLITQEEHIQRYSNLA

SEQ ID NO: 182427 - protein, 357 aa, unidentified
MYGLKHQKEKRSMDYFAGLDVSVKETSVCIVDDSGKIVREAKVASEPEALLSVLKNPAYRFKRIGLEAGPLSQWLFSALAEAELPVVCVETRHMQAVLKAQINKTDRNDARGIAQMMRVGLYRPVHVKTLRSQKLRMMLTHRKLLQSKAIAIENDLRGTLRNFGLKVGIAGKTKFEARIKELVENLPDLAELVEPMLVVRRTLREQIVILHRRLLAIVRDDEVCRRLMTTPGVGPVVALTYRATVDVPARFRKSKSVGAVFGLTCSKYQSGEIDWSGRISRCGDEMMRVMLYEAAQVMLTRTNKWSWLKAWAMQIARRRGIKKAIVALARRLAVILHRIWVDGTEFRWTREPATAAA

SEQ ID NO: 182428 - protein, 332 aa, unidentified
MDKFYFIGIDVSKKKLDICVMYGSKVLIEEQVTNSTKGVTQAIKHIKKELDITNDMFIICAEHTGQYTYPLICATKAIDCKLWLGNPTQIKYSCGMTRGKNDKVDARRIATYAFRFFDKMKCYTRPSEAIIQLNQLQAERSMYVTDLAKYKAILTDQPDFIPKDIYIQKAKRIKVLMASLQQAISALEKKMNEIISTSEMLSRQMSLLTSIDGIGRVIAMNMIIATEAFTRFENARQFCCYAGVAPFSYTSGSSLRSQNRVSLRADKSIKSLLHLAAVAIAHRKDGELKEYFLRKVEEGKNKMTVINAIRAKLVSRMFSVIKNDRYYLPVLA

SEQ ID NO: 182429 - protein, 339 aa, unidentified
MAKTITIGLDIAKNVFQVHGVDESGQVVLQRRLRRAQVEAFFAQLAPALIGVEACGSAHHWGRVLTGMGHEVRLMPPAYVKPYVKRNKTDGRDAEAICEAVGRPSMRFVAIKSVEGQAVGSLHRARDLLVRQRTMLANALRGMLAEFGIVAAQGHKGLAELIAGVDTAPIPEAARVAAGVMARHWTELDAQVDALERRIVRAAKENEAARRLMEIPGVGPISASAIVTAVADPHVFRSARGFAAWLGLNPRQNNSGDKRRSGPITKQGNRNVRRLLILGASSHMRQVRARRATDPWLTALLARRPIKVASVARAAKTARVAWALLARGERYRAPTAAAA

SEQ ID NO: 182430 - protein, 344 aa, unidentified
MDHFAGLDVSVKQTSICIVDDTGRIVREVKVASEPEALQKVLGNPAYRFKRIGLEAGPLSQWLFSALAEAGLPVVCVETRHMKAVLKAQINKTDRNDARGVAQMIRAGLYRPVHVKTLRSQKLRMLLTHRKLLQSKAIAIENDLRGTLRNFGLKVGMVGTVRFEARIQELVENFPDLAALVEPLLIVRRALREQIVILHRRLLAIVRDDEVCRRLMTTPGVGPVVALTYRATVDVPARFRKSKSVGAVFGLTCSRYQSGEIDWSGRISRCGDEMMRVMLYEAAQSMLRSKKWSWLKAWAMQIARRRGMKKAIVALARRLAVVLHRIWVDGTEFRWTREQAAAAA

SEQ ID NO: 182431 - protein, 523 aa, unidentified
MVTKTRKRKVAGSKKRFVGKPTGQIQERVQAVGPEHFGIVAVDCAKRRSKWMLCNFYGKVLIEPTSVEHTTGGLRSMTQHVAEVCQAEALTDTMVAVEMTGIYHKPAQRAFRKAGFDTRIVHPFASNHYRRPLHPDAKTDDHDLEAIFHAAVKGYGLATLPVGEIYQSLQAVSRHRHNLVKQRARLKVQMRRLLHQTMPGFADLFEDDHLFHKSIALAIAVQFSSAEAIRRAGVGGIASHLSETKVRFQSRTIERIVAWAGTAAEPSELAAMHTRQWQQLNDVRRLFDEQIVASEREMAGFLVKTPYVLLLSVTGINVVSAARLAGEAGPIEHYASARAINGRAGLYPSRYQSDEVDHADGALVRQCNRKLRGAAMLVAENLIKCHPYYRGLSALWMHEKVDPRDRRCRIANRAMRMVYQLVGGRQLWRGKGVDREYLLAKLQEFHRLHASPLDQAIRDLHEAFAWLPKSAYAEEAKPLAELARKKRRGLKHVGDLMIPLLIRLGVAIPDEVKSNSSEARSSG

SEQ ID NO: 182432 - protein, 335 aa, unidentified
MIKENFIYVGIDLHKETHTAVMIDCYNQKLGEITFPNRPADFPKLVTKVKKCNTDGKEVVYGLENAYGYGRALAVWLIDKGYLVKDVNTAISHRQAKHRGAMYRKSDSDDVEAIALATLNMLDKLPDACPNDAYWSLGQLVHRRDNIMKQRTRLVNQLHEQLCIAYPSYKSFFNDISRPTALYFWEHYPSKKYLKGKSVEDLRAELVPVSHNKCSTKTCEKILDAVASDKVKNNAYQDARDMVTLSIVSDLQHYDSQLTEVDKMLEQMYKMLGCTLTTIPGVNVITAVKILAEIGDIKRFANANKLAQFAGIAPLHLSSSGKGKDVATKQGNRRL

SEQ ID NO: 182433 - protein, 412 aa, unidentified
MIFVGIDVAKDKHDCFILNSEGTVLADVFTIANNRIGFETLLSRIQSCSQGESKIKVGLEATGHYSYNLLGFLLDNGLTTYVLNPLRTNLYRKSLSLRKTKTDRVDARTIASMLLSDAGLKPYTSTAYHNEELKSLTRYRFDKVKERAKLKSSVSRLVCILFPELEKLVPTLHMVSVYALLEEFPSARKVAAAHLTRLKALLETASKGHYKRDMALEIRDAARNSIGSRMPAKSLELQHTIRLTRELDREIDEIEEQIQSIMDELHSPITTIPGLGFRMAAMILAEVGDFTRFRSGRQVTAYFGLAPSQRSSGDSVRLGGVSGAGNALVRKLAVEGSWCYAAARHQPKLMPRDTGVPLEIRVHGRKGSERLLRRREEMLARGMPAAKANAATAAELVRWLWALGMMCREGAE

SEQ ID NO: 182434 - protein, 343 aa, unidentified
MQIRSVGIDLGKTTFHLVALGDNGKVLLKKKFTQKQLIAFTANLQTCLIGMEACSGSHFLGRALREQGHDVKLIPAQFVKPFVKSNKNDFIDAEAIAEAVDRENMRFVPIKTDDQLDLQALHRVRDRLMARRTSLINQIRAFLLERGMVFAKSPIRLREALPEVLENVNENLTPRMRNLVAMLWSEWKDLELQIVQMNDEVERIASSDAACRRLRQIPGIGPLVATAIVASIGNGAAFRKGREFAAWMGLLPKQHSTGGKARLYGISKRGNSYLRKILIHGARAVVLRSKRDRIAMGAWMTSLETRAPRNVLIVATAHKLARIAWAVLSTGQDYRAVPEALTV

SEQ ID NO: 182435 - protein, 322 aa, unidentified
MDAQSLASPSAVGIDVAKGHCDVKFPDRSGTVTFQFDDAGFKSLLEQLARVPNAMIVLEATGGYERRLVAELVAAGHHVAVVNPRRVRDFAKAMGQMAKTDRIDAHVLALFGERIQPRESEKTSEKQQELQQLVVRRRQLVALRTAESNRFEQTTSRFALKGIRQVLALLDKQRAQLDAEIARLIEDDDDWKAKDEILQSVPGIGPGTSATLLAELPELGQINRQRVAALVGLAPFNSDSSTIKGRRTIKGGRRSVRCALYMAAISARRCNPVFQSFAKRLEQSGKRFKVVITACMRKLLVMLNSMIQNKTIWQRNIIPSSP

SEQ ID NO: 182436 - protein, 336 aa, unidentified
MKKNYEFVVGLDVSKDKLDYCIINQSTLHQDFGQLANTAKGIAAFLNSVVKKLKGKREGILFCLENTGVYSMPLCYWLQASQFDYWVVSALEIKRSKGIVRGKTDKADSRDIALYAMSHLHQLKLSSLPEKDFVELRLLLTEREKVIKAINLFNMTNESKNFLPNSVLKTTLQHNKRMMTFLKKQLKQIEQSIENLVQSNPVFKQQDDLLQSIPGVGKQTSVLLIAYTQAFTLFQNHRQFACYAGVAPFEYSSGSSIKGRTKVSNLANKKLKTALNMAALSAKKHDTQLKVYYEKKVSEGKNKMLVLNAVRCKIISRAFAVISRNSKYVDTMKAVA

SEQ ID NO: 182437 - protein, 333 aa, unidentified
MDLCERIRTRVARETKRRVEIVSCYEAGYDGFWLHRLLEAHGIRNYVIDPASLQVDRRARRAKTDHVDVERLLRSLMAYLRGEPKVWSVVCVPSVAEEDDRRLNRERGRLINERIQHVNRIKGLLAIHGIYDYQPLRRDRMLRLERLRTAADGQTLPPRLKAEILRELQRLELILGMIKTIEAERDAIASPKTEVEHTNAKKIQDLAKIKSIGPEFATTLIGEVLYRSFDNRKQLASYVGLTPAHFQSGAMCRDQGISKAGNGKARTVMIELAWLWLRHQPDSPLSVWFRERVGKLKGRIRRITIVAVARKLLIALWRYLETGLVPKGAILKA

SEQ ID NO: 182438 - protein, 375 aa, unidentified
MTKNLRYLGLDVHAETIAAAIAEPDGEVRVLGVIPNRADAVAKLIRKLGPPERLRACYEAGPCGYVLYWQFVRLGIPCDVVAPTLVPTKPGDRVKTDRRDAAKLARCHRAGDLTAVWVPDAAHEALRDLVRAREAAKQDQLRARHRLGKFLLRRGIRSPAGAKPWTQAHRRWLDTLQLELPALNATLSDYLQEVDHGAARVRRLEEALDVAIAAAPPALRVIIAALQCLRGIRQISAATIVSEVGPLSRFTHPRQFMGYSGTVPSEHSSGASVQRGRITKTGNAHVRRILIEAAWAYRFPPKCTSALRTRQRGQPEAVIEIAWKAQHRLSSRYRRLLARGKPTPHVITAVGRELAGFIWAIGVAAEHSSTAVAAA

SEQ ID NO: 182439 - protein, 443 aa, unidentified
MINPDAAGIDIGHREHWCAVPAARSTKPVQPFGTFTEDLEKLADWLKECGIKTVAMESTGVYWIPAFQILERRGFEVRLVNARAAKNVSGRKTDVLDCQWLQRLHSYGLLNASFRPADEMCVLRSYLRYRDELICARSVQCQHMQKALQQMNVQLHQVLSDITGVSGLRIIEALLAGERDAQKLAHLADRRVQASKATIQRALKGDYRTEHMFLLKVAFELHGIYEKKIQECDEKIVAQMAKLPTRIDPQQEPLPPRKPGRAPVLDMVCGTDMRVELYRWTGVDLTAIEGIGVLSAQVILSEIGTDMSRWRTEKHFTSWLGLCPDHRISGGKILSSHTRHVVNPVADTLRMAATTLQRSKTALGAFYRRMKARLGPASAVTATAHKLARLIYRLLKHGEAYVRQGMEAYEQKYRERLIYNLRKTAASFGFQLTDAKELTKCVS

SEQ ID NO: 182440 - protein, 461 aa, unidentified
MKRQGRSKKGIPQKGGSSSFPIINTNAAGIDIGSEEHWVAVPEDRDENPVRPFGCFTSDLHAMARWLKACGVTTVAMESTGVYWIPPFQILEEHGFEVKLVNARHVKNVPGRKSDVSDCQWLQRLHTYGLLSGSFRPDDQICVLRSYWRHRANLVRYASDHIQHLQKALTEMNLHLHKVLSDVTGVTGMKIIRAIIAGERDREKLALMREPGVKNTPETIAKALEGDYRQEHLFALRQAVELYDFYHQLIEACDREIERHLHTFEAKVDPVQNPLPKQKRRKEMRSQSFTDLRTELYRMSGVDFTQIPGLDVVSVQTILSEIGLDPGKFPTEKRFVSWLGLCPNNRITGGRVKSSKTRKTVNRAANAFRMAAQALASSNTGLGGFYRRIRARLGSPKAITATAHKLARIFYRMWTTSQAYTDLGSDYYENRYKERVLRNITKRARELGYDAILQPIEQRVA

SEQ ID NO: 182441 - protein, 392 aa, unidentified
MNRIVYIGMDVHTSNYTLCSLDPGYGVEKDNYFAEVQFTNDFIKNVVNYVTNLKKKLKDCEFVCGYEAGCLGYSTYKDLTKVGIKCVLMAPSTMAVQKGGKKVKNDRRDARVIAQCLAYQTYKEVYVLSEHDEAVRGYLRMRDSHNKALKRIKQQIIAFCTGHGLFSPTKSNWTVAHLKWLKDLKFNDPVEQEILNEYLSSLTFLSDKIKAMDVRIEELASEKQYCENVKKLRCIKGIETNVALTLLAEIGDFNRFSKPTDFAAYLGLIPGEQSSGDKVRGTGITKAGNSTLRRKLTESAKGYWRGRIGIKSATFKKLEKELPKEVTEYALKANTRLQRKFFNMTHVKGKNMNVAASACAREMACFVWGLITNHYDKAPAVPKTDEELLDLN

SEQ ID NO: 182442 - protein, 344 aa, unidentified
MAIVGALDIHRQQITFDWVDPDSGESGRGRISPADRVGFRKWLGQFGGKPVELVVEGCTGWRFIAEECQAAGVTVHVADPAEAAGARNRKMRAKTDRIDARKLREQLEKGEVHDSWIPPRQVLEIREKVRLYADLSEDKEAWQKRIHATFFHQGVPKPDGRLLHCDRVHTGLADPDLSPAGEQAVDVAMRMIAAIDADLTPLRAELTAFGRRHPGPRELSREYGLGALLATVVWEELGDTRRFSASKQAVRHTGLDISIYDSDGKSRGRPRITRQGQPVLRWALYEAAVHASKKTSPDHLYYLRLAHKIGRGRAKLAVARKLARRCHHRLRALGDEAWVELATS

SEQ ID NO: 182443 - protein, 407 aa, unidentified
MTITCGIDWAEKHHDVTLVGDDGHIIVHRRISTDAAGFTTLIALLTEHAGDPTQVPVAIETDKNLVVVGLQAAGVTVYPINPRACARYRERHSQSGGKSDPGDAFVLASILRTDQHMHRQLPQLSDGSKGLKALARQHQEAIWALHQTQSRLRSVLLEFYPQALDAFPNLSHKAAHTFLAALPSPATAQKLTIAKTITLLRRSGRGNRVGLADKIRAALTAPGIRQPAPVENALAVTVQGLIAIIVTMQASVEALEHALDEAFRVMPSARIVQNIPGLGTVLGARVLAEIGDDPTRFTTASGLRAFAGTAPITRASGKSHYVKARKVRNKRLADACHWWAFNAITRSPGARAHYDRRRAAGDYHNAALRNLANKLLGRLWWCLAHDQSWDENAAWTSLETVPKLLVA

SEQ ID NO: 182444 - protein, 380 aa, unidentified
MEYCMPVYPGYPTRRKNEERVFTYNNIKNHLFMTRKFLKQVAGIDVAQNELVVSLGRMHEDITVEIYAHKTFPNTEKGFMTLVLWVKKLAWEAIPVHFVMEATGVYHEPLAYFLDDKGFLVSIVLPSKISNYFKTLDVKTITDKTASEAITRFGLERKLDTWKRPKAIFKKLRQLTRERDQVLEERTLSKNQLHAEQAEAEPNKSSVARIKKRIEFLNKQEKEIRDEMGQLIENDEDVKNIIIIICSLPGVGLLTAATVLAETNGFDLVRNKRQLTSYAGLDVKEKQSGTSVKGKPRISKKGNKHLRKAMHLPALSAIRHDELFKALFERLVAKNGIKMKGIVAVQRKLLEMIYTLYKNKQEYDRDYIAKKLENQNKKAA

SEQ ID NO: 182445 - protein, 392 aa, unidentified
MVVSVGIDVSKDKHDCFILSSEGEVLVNVFTIPNTMDGFNCLLQRIQDCTTPQDKMKVGLEATGHYSYNLLGFLLDNGLPTYVLNPLRTNLYRKSLSLRKTKTDRVDARTIASMLLSDAGLKPYTDTAYHNEELKSLTRYRFDKVKERAKLKSSISRLVCILFPELEKLVPSLHIASVYALLAEFPGAKQIAAAHLTRLKTLLKTASKGHYKRDMALEIRDAARNSIGARIPAKSLELQHTIRLIRELDAEIHEIETEIENIMDEIHSPITTIPGIGYRMGAMILAEAGDLSRFDSPDKLLAYAGMSPSTYQSGQLKNCYPHMEKRGSRYLRYALYNATKYVCLWDPTFAAYLAKKRAEGKHYNVALSHAAKKLVRLIFAMEKSRQPYCSAA

SEQ ID NO: 182446 - protein, 320 aa, unidentified
MQTRLVINTFIGVDVSKASLVTCVHDSSTHCTLGNERSAITAWLKSLPAGSAMGVEATSTYHELLADLAHRLGLLVYVLNPKDVRHYAKGVGMRGKTDRVDAALIARYIAHEHAKLHLYCPASPEQRQLQRLLTRRAKLSRARVSVQQSLQGLPGLKVPLRNLLERFDALIAVIDARIQALVNACPQRQRACQRLRSIKGVGPVVGPALLNTLERFVFERADSFVAYTGLDPRPDDSGKRTGRRRLSKHGPSELRRLLYNAAMAAVTSSVWKPLYQHYLDKKLSRTEALVIIARKIARTAWSVYTHNTIFDPQRLTSGLT

SEQ ID NO: 182447 - protein, 362 aa, unidentified
MSKKVINNQTILRQCVGIDISKDSFVACISHKTSTDEIIVKSTKKIPNSLSGYNTLQEWVTKFTSPELPLIYVMEATGVYYEPLAFDLLERGKSVSVQLAKNVKFFMQSHNIKSKTDDIDAQAIAQMGLERKLKLWQPGSIQMRLLKHLCRERIMLQAEQTTVKNQSHAWKHTYKPEKSILKRLENRLSFIKEQIQEIEQEIKSIVENDQDLAKRVANVCTIKGVGLLSAIVIIAETNGFALFNNKAQLISYAGYDVVRKQSGNTEAKTRISKKGNKNIRKALYFPATSACRFNPKMKNTYENITQKTAIKMKGNVAVQRKMLVLIYTIYKNNIPYDENYQYDKERNDTQKNKAESIINCPA

SEQ ID NO: 182448 - protein, 389 aa, unidentified
MIRDHESVDVFIGVDVGKTNHHAVALDRSGRKLLDKALPQDEAKLRAIIDSLTKHGTLLLVVDQPATIGALPVAVAQAAGILVGYLPGLAMRRIADLHPGEAKTDARDAYIIAEAARSMPHTLRSIAVADEQAAELSMLCGFDDDLAKQATAASNRIRGLLTQIHPALERVIGPHLDHPVMAELLRKYPAPDALRRAGQTRVAGFMAKWAPRAGKRWAEEIFTALGEQTVVVAGTGAAGVVLPQLAAQLVQLRTSRAEIFAQVEKLVEAHPLHQLLTSLPAVGVRTAARIITEVVGKEFKTAGHLGSYSGLAPVTWRSGTSIRGDHSSRKGNKILKRAFFLSAFAALKDPVSRDYYDRKRAEGKRHNQALIALAHCAWSWLLVTPFSFL

SEQ ID NO: 182449 - protein, 390 aa, unidentified
MKEDRELLVQNVGVDVSKDTLDVVLATMNFAREIKIKGSRKFPNTVQGFREFIKWVEAKRTKSCELRVLMEATGIYYEQFAWYLHEREYAVSVVLPTKAKRYLQAIGNKSKNDKIDAKGLSRMGLEQNLSPWRPLSKNIYRLRLLTRQLEDFNNQRTVFLNQLHALSHSAYPVKEVEKNLNKLIGELEKGIANINTAIEKLIKDDEKLANRVDKILKIKGVGIKTIAVLLAETNGFETFENQGQLVSYSGYDIIENQSGKHNGKTKMSKKGNAHIRRAMHLPAFGVVRYQQGTFNNLYNRLIAKGKTKMQAYVAVQRKLLVLIWALWKKDQEYDQNYHLSTQKYSGNDEPKPFFSLGSVGDTKKVGPASTGPTVDELPCNESPEALFSLM

SEQ ID NO: 182450 - protein, 324 aa, unidentified
MMYVGLDVHKRVCHGTVMDKEGHVVKRERFSNDPVSLRSFMKDIGEAKVVMESGYCWQPIYDRLEEAGYDVRLAHPLKVKAIAEAKIKTDEIDSETLAHLLRADLLPESYVPPKEIRDLRELVKRRAFLVGMRTRLKNRIHAELAKRDIDPGSPLFTKRGRALLASLGVDAVSQLLPVMETLDRQIGEISAVLKRAAVEDGRARILTTIPGVGYYTALLLVAEIGDVNRFPDAERLCSYAGLVPSVRRSGGSTVYGHITKEGSRWMRWALTEAVHSHLRYDTELTRFHKRLALRKPGQVATTATARKMLKAIYCMLKAGEPFQP

SEQ ID NO: 182451 - protein, 348 aa, unidentified
MNKITTVGLDLAKQVIQMHGVDGHGKAVLKKQLKRDQVLTFFGNLEPCLIGMEACGGAHHWARKLEALGHTVKLMAPQFVKPYVKTMKNDAADAEAICEAVARPNMRFVPAKTVEAQALLAVHRARQGFVKARTAQANQIRGLLLEFGLVIPKGITYIAQRLPSILEDAENGLPDILRPLMARLAAHLQALDREAVELEAQIVRWHRQNAESRRLAEIPGIGPITASALVASVGDAKSFKNGRQLAAFLGLVPRQHSSGGKPTLLGISKHGDVYLRTLLIHGARAVVRVNEGKAQPDLWLTRLLARRNKNIAAVALANKNARTAWALLAHPERNYAAGYRLHPLTTAI

SEQ ID NO: 182452 - protein, 342 aa, unidentified
MKIIGCDFHPSFQQIAMVDTETGEHEKKRLTPSEAVLFYSQLQGPVVIGMEASGNTLWFERLLADLKHQVRLGDASKIRAMEVRKQKTDRRDAELLLKLLLEGRFPEVWIPSLEMRDARQLLLHRHKLVGMRRQVKNQLQHLALNQGVQKKRKLWTTAGRQLLEELPLIGWTARPRSDLLRWLDELNQAIAELDRAVEQEASQHAVARLLQTHPGVGPVTSLAFVLTLGKIERFQHSRQVVSYLGLNPAENSSGGRQRLGAISKQGNPMLRSLLVEAGQSASRQDKELKRAYQRLKQRKHSAVAKVMVARKLAVRLYWMWRTQQPYSATRMQGSPCHLVVAV

SEQ ID NO: 182453 - protein, 360 aa, unidentified
MNLSFDDSGCVSPHTRKVKTMNENAVSTDAVVGIDVAKQKVDLYAVNNGKGKSKVFDNTHAGHKDTQNWLRERGFVPAQTHVCMEATGPYSESLATALVSGGWKVSVVNPARIKGFAQGELVRNKTDRADAALLARFCAAMKPSLWEPPPAAFRQLRGWVDRLQALKDMRQQEMNRIEALEASEQPDVLAHVNTHVIWLDNEIAKLARDIDDHIDRHPALKADAELIASIPGVGKTTVAKVLAYAGDVRRFDSAKALAAFIGLSPRQRQSGTSVRGRTMMSRAGHKALRHALYMPGLVARRHNKALKIFGDRLSAAGLAPKAVIGAVMRKLAHFIYGVIKSGKPFDLKKAMPTLDFQDGN

SEQ ID NO: 182454 - protein, 387 aa, unidentified
MYFIGIDISKYKHNCFIATEAVQVKAFQFENNRLGFDLFLKTLKSLDQSQEIRIGLESTGHYGMNLKQFICASGYTYLEFNPYLTHQFSKAMSLRKTKTDKVDAKTISSMLGPVDYKTLHTSFYHINELKQIVRYRETKMKLRSKTLVELTNILDRTFPEFKAFFNHRLAGSAMHILKRLKSRSRIAKMKPSDYEAIRSYSKGKFTYVKFQKLKLLASNSVGYETASDTLLMLETIHTYEHLSSIIETVEEKIIEIMKDIPQTLTSIPGLSLISAANIIAEIGDFKNFSNPAQVISFAGLDSSVNQSGMMETRGHLVKRGSGLLRMTLWQVTFSALKYIPTLYDYYLKKKVEGKHHKVALTHCTRKLTRTIFNLGLNHLVFDQSQFR

SEQ ID NO: 182455 - protein, 453 aa, unidentified
MGKSKRSSRRLLTIRNPNAAGIDIGANRHYVAVPNDRDPNPVQSFKCFTPDLHRMAKWLKACDIETVAMESTSVYWIPVFQILEKYGFEVLLVNARHVKNVPGRKTDVKDSQWLQELHSFGLLRGSFRPNDAICVLRSYIRQRDNLIKSASKHVLRMQKCLTEMNVQLHRAISDITGVTGTAIIEAILSGEYDPKKLAKHRNHRIKCTENDLIEALTGDYREEHLFVLQQEHSLYKIYQKKLIECDEVIEAYYHKLEQELPQKELPVLEQKSRKKSSQKNAPNYDLRGMLYRITGNDFTVIPGLDALSIQTIIAEVGLDPTKWRTEKHFVSWLGLSPANKISGDKVLSSRTRKVVNRAAIAFRIAANALSRTQTGLGAFCRRLKSRMGATKAITATARKIAILFYQMLRYDQDYVEKGVEYYEKKYEQRILHNMEKKAKIMGYSLVKNGGAMT

SEQ ID NO: 182456 - protein, 420 aa, unidentified
MAPLSNQQFKAFVGIDWADTKHDICLQQAGDDRREFDCIPHQVTRIDEWAKALHQRFGGPIAIALELARGPIVSVLQKHAFFTLFPINPAMLAKYREAFKPSRAKDDPTDAELALDLLLRHPERFSPLRPQSAGMRSLLSLIEQRRELVGDKTRFTNRLTNALKQYYPQALEWFDDIDTVLFCDFLTRWPTLPAVRRVSRKTLETFFHAHNCRRAQLIEGRLESIRCAVSLTDDPGIVAPHRLHALMLVAQLRTALAAIDVFDKEIATVARTLPDFDLFDSLPGAGPHLTPRLLAAFGEQRDRFKGADELQKYSGIAPVTERSGKKCWVHWRWQCPTFLRQTFVEWAGQTINKSFWAGAYYRQQRAKGSSYQAAVRALAFKWIRILYRCWQTGTRYDESVYLNALRKRGSSLLRNLELPG

SEQ ID NO: 182457 - protein, 343 aa, unidentified
MTIVARFKVFVGLDYHSGSVQVCVMDGQGKVLLNRSYANDWREIVAAVERCCGGSVVVQAAIESCCGAANLAEELISKAGWSVDVAHPGYVNRMKQNPDKTDFSDAQLLADLERVGYLPRVWLAPEEVRELRRLVRYRQDLAKDRRSVKLRIRAMLREARIADPSCHPWTQAWLRWLRETAPLSVQSRWVADRQLRRLELLQESIKEVELRLRDLAVTDTQIQKLLAQPGIGLITAVTIRAEIGRFDRFRSGKQLSRFCGLSPRNASSGEKQADAGLIKAGNRELRAVLIEAAHRLARYDERWSKFNLALRSRGKKGSVVAAAIANRWIRWLFYRMQPQELAA

SEQ ID NO: 182458 - protein, 438 aa, unidentified
MSNKVIFNLDELFISVGIDVGADFSWMSIALPNQQFVGKPYKILHNSIDSLTTAVSKIKEAEELYSLESRIFLESTGIYHYPLFCYLRDKGFNCSVINPIITKNSTNINIRKVHNDRFDSKKAALVGLKPDLKVSLMPSDLALNCRNLCREYYDLMDNRSAYVNKLQGELRMAFPQYLGIFSKVTINTSLTLLETYTSPSAFLEADKQEIIDIIRSTARFGLTYAQNKYNAIIQAATDANQFGYIIDSNIKRIRLYISFIRKYDEEINSILESLHELVDANEDADFVKQIHLIETFKGAGFLSAVSIMGEIGDFSAFSKPKQLFAYFGLDPAVKQSGKFEGTKVQMSKRGSAIARRVIHTLTLQSISISRNGEAKNPVLREYYLKKCDSKPKLVAMGAVSHKVCNMIFAILRDNKPFKIIAPQEHIKQYNAAKCDMAA

SEQ ID NO: 182459 - protein, 346 aa, unidentified
MDQFVGLDVSQEMTHLCVIGSDGKLVWQGKCLSTPEDIAGNIRSKAPDVLRIGLESGPLSTWHWHALKAMGLPVLCLDSRHAQATMSGQVNKTDKNDAYGLAQIVKAGWYREVGVKSLDSHAVRSMLGARAQLVGMRVEVTNQIRGILKTFGVVLSRRTGEPFERLVDEACDNSDPMLNQTVRSMLCVHSCLKEQIRQLDRQLMSRARGSAVCRQLMAIPGVGVLTALAFVTAVDDPSKFAKSRSVGAYFGLTPRCYQSGEIDRNRGISKCGDGLVRTYLFEAAGTLLTRVEKWSALKAWGLRIAKRSGLKKAKIAVARKLAVVMHRMWVDGVSFRWSAAEAEAVA

SEQ ID NO: 182460 - protein, 339 aa, unidentified
MKHTTVGVDIAKNVMQLHYIDAETGEIVNKPVKRAAFLEHFANLTPRLIGMEACGGSQHWARKLIAMGHQVKLMPGKFVKAFAMGNKNDATDARAIWLAVQHAGKAVAVKTETQQAVLGLHRMREQLVKFRTMQVNSLRGLLTEYGEVMAKGRAALDKAIPSVLERLVDRLPSILIDTLREQWSGLSELDRQIAEIERRLQAWQREDKACKAIVAIPGVGLLTATAAVATMGDAKTFRSGREFAAWIGLVPRQTGTGGKVQLLGISKRGDTYLRKLLIHGARSVLCLAKEPGLWAEGIKKRRPLNVAVVAQANRMARTIWAILAHDRQYDKDYVSVKPV

SEQ ID NO: 182461 - protein, 357 aa, unidentified
MLQRILALDLGKYKTAAHLHCSDGRRDFRTKVATTHEELHDLIVSTDPTLVIMEACSTTWWVYDLAVDLDKEVIVTANNGPGWRWKNVRNKSDRADAAKLIKMYQSDQLEPVWAPPPEIRQMRGLLRYRKKVMEERNRQGNRIKSLFTVNGIDLPKQGAWTQRWLKVVRAHARPFSQCAPDELWRGRLSHLLVLWESLEEQLKETERVLRQIDRRHEAVELLQRENGVGPCLSEAVVAAIGDPLRFRCGKQVGCYAGLTPRQWSSGTIERSGKISKQGNSLLRTLLVEVSWIGIRTQPWMREVFERVQRGVKQRSKIAIVAVARRLLIHLWAKWRDMERARLAATPPAPELAATGMT

SEQ ID NO: 182462 - protein, 354 aa, unidentified
MRIVGKMERVSVVGKRVYVGIDVHKESWQVTMRTEGEEIFNGRIPGQYQSLKRLLERYQGSWMKVAYEAGPFGFWLSDKLVEDNIEVMVVPPSLIPVESGNRVKTDKRDSRKLTRLLARNMLKQVYVLTSEEREHRDLLRTRRQIVDHRKDVARQIKSKLLFYGIASPFSATPYWSLKYIEWLKALSFATDYLKESFHLLIDLYEYLTRQIARINRKVVLLCREAKYLDRIKLLCTAPGIGKLTAIEILVELQDISRFENGEELASYIGLTPSEYSTGEKTRQGRITRCGNARVRTCLVESTWTLIKKDPVLRAKYLKLKNARGGKRATIAIARKFILIIRRMLLDNTPYRMAA

SEQ ID NO: 182463 - protein, 319 aa, unidentified
MAQNDLVVAGIDVAKDKVDVCIRALSLRRTFASTAEGRRELASWLRRQKVGKAVMEASGGYERDWAKALRDAKIEVRIVDPKRVRSFAQSAGRLAKNDTIDAEMIAWFAETFDEARGQAYDATREQLHQMVNARQALKDMQAKLENQGEHAMPAAIQRMHARILKTISVELVKLEAAISAMIQATPHFAELAEIIESVPGIGRTTSAALIAAMPELGRANNKIVAALLGVAPYDDDSGRRRGERHIKGGRRRTRNVFYMACLGAATQHNPVLKAFYDRLVAKGKEKKVALIACMRKLISILNIMIERRQKWDASRYAVS

SEQ ID NO: 182464 - protein, 313 aa, unidentified
MSQNNTSILHVGLDVAKASLQLDLAGQSHPLTNDAKGHARLLKLLRAHPAARVVCEATGGYEQPVVRALHAAQVPVSVVEAGCVRHFARAKGQRAKTDPIDAVVLSEYGRVMKPVPTPAPTALETRLAELSTRRGQLIQMLSAEMNRAEHYADPFCIKQSGQMRRTLEKQITQCDQAIAELIAADKVLQAKAERLDAIPGVGEVTAATVLAELPELGAISSQAAAALAGVAPYNRDSGGSQGVRHIAGGRAGVRCALYMATLSAVKHDRILKAFYLRLRTAGKKPKVALVACMRKLVVLMNHLLKNPDFQLAH

SEQ ID NO: 182465 - protein, 318 aa, unidentified
MGKNNKNFGIDISKDVFDVYNPDKGHLQFSNNPKGFKQFLKLLSADNHCIMEATGYYHHLLSVFLFENNIKVSVENPLKIKRFIQSKLTKIKTDKADAKLIYQYSLTNQLTDFKIPNAEIRQLLSLLDMYQKQSTQLKNKIHGEEVLGKPSKTVLKSLKASLKNLKEQIDLPENKLEEIVKKEQADLLAKLQTIPGLGRKTALFLIVITNSFENFETASQLCCFAGLTPIIRRSGSSVRAKERISKMGNAKLRNLLFMCSFNACKCNKACKEVYLRIVAKGKSKKLALIAVSNKLLKQAFAIAKSGLCYDVNFVSKLK

SEQ ID NO: 182466 - protein, 397 aa, unidentified
MYIVGIDIAKRKHEAAVIDGEGTVIIKPFSFTNNCSGYNRLLAMLTKAKLPLDEVSFAMEATGHYWLALFTRLQKEGFRVQVINPVQTNSIRSFYIRQAKTDPRDALLIAEVIRFGHFSESTLHPENIYELRELCRGRHAIVSMQADVKRKVIALLDQVFPEYETAFTNLFGDTSMAILQTCPTPKELSEMPLEELCHLIEVSSHKRFRMAKARELQELARNSFGFAMAGDVFSTMIRLYAKHLDFLKQQVREMDRKIAEIMETLDTPITTITGIGPTLGAYILSEIGDINRFSSAAKLAAYAGIDPTMRQSGEYNGVRNRMSKRGSPYLRHAIWLAASSAVLHDPALKLYFQKKRDEGKPYMASVGHACRKMVSIIYAVMRDNKAYTPYIPNEISA

SEQ ID NO: 182467 - protein, 365 aa, unidentified
MGVPTMAQARTFVALDVHVSGTVAASIERESGELRRRRLSGRAAEVVEFVAGLPGPVRVTYEAGPTGFALARRLEAAGVSCVVCAPGLIPRGPSDRVKTDRRDAERLVRLLIAGELHAVAVPSIEAESLRDLVRAREDLRGDLMSARHRVSKLLLRHDVRFEGTERNWTGAHLRWLAGVRFAQPGTQAAFDDYRGAVEALIVRRTELERLIAEQLPASPCAQTARRLMCLRGVDTLTAAGLCAEIGDFGRFAHPEQLMSYLGVVPSEHSSGTRRRQGSITKSGSRHARRLLVEAAWHYRQPPRVSEPLRRRQAGADPMIVALSWKTQRRLHRVWSRMEQRGKRRTIIAVAAARELAGFCWAVATA

SEQ ID NO: 182468 - protein, 343 aa, unidentified
MDIVVLGIDLGKNSCSLAGLDASGRVILRRRMRRSSVESFVNGLGRCIVAMEACCGAHHLGRVFVAQGHSVRLMSPEYVRPYVKAQKNDELDAEAIAEAATRPTMRFVTVKSQYQSDVQALHRARERLVSERTALINHLRALLLERGIVAPQGRRKLQEELAVFADEDGIEALSPRIRLLIEDLRSEWRALDERIAAFDAEFVRMAREDEAVRRLTTIPGIGTINATALAAAVGNARAFRRGRDMAAWLGLTPRQMTTGGKPRLLGITKRGNRYLRKNLIHGARAVLPYLVERETPLGRWARGLLARAHKNIVVVALANKLARIAWAVLARGCTYEAAGEAAA

SEQ ID NO: 182469 - protein, 431 aa, unidentified
MDRVIIGVDPHKLSVTIEARDSREILRATGQFRTDARSYRQMLKLARQWPERIWAAAAANGIGRPVTQRLIASGEQVLDVPAKLAARARVFDTGQGRKTDAADAHAIVMVALRDKGLREVRADPDLAVLRMLCDRRDELSRARAQALNRLHRLFLDLIPGGAPVKKSTSQYQALLAAVRPRDLAGRTCRRMAAEELEDLHRLDAKLKAMKAELKTAVQALGSHLMDIHGIGPAGAARILADVGDIARFPDRNHFASWTGTAPIDASSGQHLRHRLSRAGNRRLNHVLYMAGFVQLRHDTPGRAYYRRKLAAGKTPMEAMRCLRRRLSDAACRQLVADALSQEEASPGGHPGASLTSSAAGLSPDTGTSDQPLPGPAHPTLPPPGHAPQAMAPAGATPRRRARGVNAERPTGRTALTPTSAGTHSKSPGPSS

SEQ ID NO: 182470 - protein, 401 aa, unidentified
MNAVGIDVSKGKSMVAILRPLGEVVSKPFEVVHSASGISSLIDRIKSMVGETRIVMEHTGRYYEALANELSRANLFVSAVNPKLIRDFGSKSLRKVKSDKADALKIARYALDSWNDLKQYCLMDELRSQLKTMNRQFSFYMKHKTAMKNNLVGILDQTYPGANAYFSSPTRTDGSQKWIDFAATYWHVDCVRKMSPGAFTNHYQKWCRRKKYNFSSSRAEEIYREAQEIVPVLPKNDLTKLIVKQAIEQLDIASKALEELRALMNETASKLPEYPVVMEMNGVGPSLGPQLMAEIGDVMRFNHKGALAAFAGVDPGVNQSGTHEQKSVHTTKRGSATLRKTLFQVMDVLIQTKPQDDDVYMFMDKKRSEGKPYFVYMTAGANKFLRVYYGRVKRYLNSETQ

SEQ ID NO: 182471 - protein, 371 aa, unidentified
MKEYSTFIGMDVHKNSIEIAIAQRGRNGEVRHYGKIDGTLEALDKVVRKLVSKGGPLHFVYEAGPCGYEIYRHLTAKGYDCSVVAPSRIPKKSGDRIKNDHRDACMLARLDRAGELTPVYVPFAEDEAIRDLTRAREDAKIDEKRSKQRLLSYLLRSGLRYTGKKTWSKAHMRWLSDIKMSHPSQQIVLQEYIDTITERSLRVQRLTDQIRQMLPQWRMFPVVKALQALRGVALIVSATTIAEIGDLKRFENPTELMSYLGLVPSEHSTGEKIRRGSITKSGNGHVRRVLVEAAWAYRLPAKISRLLLKRQEGLSKEVCEISWKAQVRLCSRYRRLWAKGKPKQVIVTAIARELCAFMWAIANEIQISAAT

SEQ ID NO: 182472 - protein, 450 aa, unidentified
MSTLNSAEEQKPAYAAHIGLDWADQKHFWTMLTADGKRTRGELKHTPEAIEVWAVELARTFGGRPVALALEQARGALVAVLSKYAHVHLFPLHPTKLAYYRMSVCPSGAKGDPSDADLILDYLVKHPERLRCLEPDTVETRSLQFLVEERRKLVNQHTCQLQILLHWLKQIFPQMLVWFDNMSTPLVGDLLIRWPELPKLQKASAKTLRKFFDQHNCRSEERIQQRLEEIGQAVPATTDAALLRTGNLCIQLSVQLLAGLRAGIAEFDKQIEAIYQTHPDRFITASLPGAGPALEPRLLAALGTNRERFESASNMACCFGIAPVTESSGKSRWVHWRWACSKFVRQTLHEWANCSIRTCGWARQHYDRQRSKGKGHHASVRSVAFKWIRILFRCWRDRVPYSEQRYLEALRTHGGAPSAPAAIVDEPTPVLSGTQWESCGDFSKLAKVSS

SEQ ID NO: 182473 - protein, 385 aa, unidentified
MKIFVGIDIAKLNHFAAAISSDGEILIEPFKFTNDADGFQLLVSKLESFDKNSIIIGLESTAHYGDNLVAEFYQVCVLNPIKTCQMRKNNVRKTKTDKVDTFVIAKTLMMQDDLRFITFFDLDMMDLKALGRFRQKTIKQRTRLKIQLTTYVDQVFPEIQYFFKSGLHQNAVYALLKEAPSPKEIASMHMTHLANLLKVNSHGHFTKEQAKELRVLAQKSVGANDSAISIQITQTIQQIELLDSQLDKIEAEMTDIMKFNDSVIMTIPGIGYINGGMILGEIGDIHRFSNPNKLLAFAGLDPSVYQSGNFQAKTTRMSKRGSRVLRYALVNAAWNVVRNNATFKAYYDAKRAEGRSHYNALGHCAGKLVRVIWKMLTDEVEFNLE

SEQ ID NO: 182474 - protein, 408 aa, unidentified
MNAVGIDVSKGKSMVAALRPMGEVALLPQEFLHTEVGLEQMAYAIIALGENTRVIMEATGRYHEPVAAALHEYGIYVCVLNPLFIKQSGGGSIRKVKTDKADAMKIAKYGLDNWVDLREYTPMDTVRQQLKLCSRQYNLYMKTVVSLQNNLISLTDKTFPSVNELFSSPERADGHQKWVDFVMTFYHCDCICRVSEKAFTERYQKWCKRKGYHFSAEKALDVYAGSCGHITTLPKNDNTKLLIATAAQQLLSGKMTLAALRAEMTRLAKQLPEYDTVRAMYGVGETTATQLMAEIGDVRRFPRRSSIVGFAGVDPAVDQSGKHSAKSVPTTKRGSPHLRKTLYQIICTYLRKAPANEPVYQFLDKKRAEGKPYFVYMTAAQNKFLRIYYARVKECLEAFDAQQDTSQR

SEQ ID NO: 182475 - protein, 370 aa, unidentified
MDVHTSNYTLCIFEPSFEHDGTVHCITQVKPEVKNIIHVIETFKKKHENEELNIVCGYEAGCLGYSLYHELKEKGIECVILAPTTMKTEKGGRKLKNDYRDAKMIAECLAYGGYSAVHIPTELDNSVKEFIRMRDDIKENLKSIKQQIIAFLTRNGKQFEGKSFWTRKHIDWINTVSFSEPLLQDTLKEYMIEYNHLCNRIETLDRQIEEISLKEEYVEKVQQLQCLIGIKTHTALSLIVETSDFNRFKKGNMYSAYLGLIPGDDSSGGHENKVGITKAGNSHLRRLLVEAAQGYTRGRVGFKSKDLKSRQEKCSSEVVAYADRANERLRRKYYRMTLRGKKFNVAKTAIARELACFVWGIMTDHIDLCN

SEQ ID NO: 182476 - protein, 489 aa, unidentified
MAKRKMSTFERLQRGTLKLSREQRKELAERLHAADPGLTIVHPDAAGIDVGNESHFVAVPAGRDAQPVREFGSWTADLQRMAAWLKACGIRTVAMQSTGVYWIAVQEVLEEAGLEVYLVNARGTKNLPGRKSDVQECQWLMKLHTYGLLRNSFRPAEEIRTVRTIWRQRDRLVKDAGRAIQQIQKALTTMNIRLANAISDVSGVTGLAIIRAILKGERDPRVLAKLRDRRIQASEEEVVHSLEGHWRDDVLFELQQVVEGYDFYQGQIGACDQELQKYLAVLPDRRREREVEVVDTGEAKGSKKRRKSKAERKGKTRRKNQPGFELGVELHRIFGVDLTRIDGIDIMTSQVILSEVGPDLTDFPDEDQFASWLELAPRRNITGRKVISQRSRESKNRVANALRMAAEALSRSDSYLGARYRQLRGRKDGKVAVKAMARHLACLVYRLVTKGQDYVDRGAAYFEKKRSQRELDGLRRKATELGMKVVPAT

SEQ ID NO: 182477 - protein, 338 aa, unidentified
MTIIATGIDLAKNVFAAHGVNDAGKVELRQPKVARAKLNALVAALPPGVIGMEACSGAHYWARLFQSHGHTVKLMAPKLVTPYRMSGARGKNDAADAAAICEAMQRPNMRFVPVKSEDQQARLMVHRARQGFVTERTACINRIRGLLSEFGIVLPLKAEVVRREARNHLEDLPGFANLVIGDLLSEVTHLDERVKQYDIHIRTMARDCNAAQQLMQLMGIGETTATAIVAMVGNASEFTCGRQFAAWIGLVPGQYSSGGKARLGRITKAGDPYLRSLLVMGARAVLNAAKGKQDSLSRWAVSVAERRGYWKAVVAIAAKNARMAWAVLTRGAQFKLPA

SEQ ID NO: 182478 - protein, 370 aa, unidentified
MNTTHAVAGIDPHKRTATVAIVDVLGVKVTSLSFPITKSGIDALIALLTDSGLTIDRIGVEGSGGLGRPVMLALAAAGYDVREVQANRTAERRKRRRRAKTDLDDAEAIARETLADPDLPPAGKDHTPTPATNQLAAVRDWRESLVLQRVRLLTEAEAVLVSLPLHLREQLPGSSRVSASLNRLAELDDIRADLSAADRVKLDRLAQARVDVAGIGARIKELDAQIPALLKVLDCTLTEIHGVGVVTAMTLLTEIGDPHRFATEGRFARWCGVAPVALSSGEGDGPPQHHRLDLGGNRRVNSMLHIVHITQARCHPPAKAYMARREAESKTKRAARRAHKRQLANVIIRHMWNDADRLARARSSSSITAA

SEQ ID NO: 182479 - protein, 465 aa, unidentified
MSYRIAGIDVHKKMLAVVVADVEVQGEYQFERIRYGSNPEPLRLLAAWLIEHEVEEVVMESTAQYWKPVWGALERYWKPSCQKREGAGPMSGTLHLAQARSNRGRRGRKKDFPDAERLVKRLVADELILSFVPDAEQRLWRTVTRRKYQLTRNKVRLQNQLEALLEEAHIKLSSLVSLGVSARRMLKAIADGGTDPAALAALADKKLRATQAQLCDALGACTELQPVYRRLLKMFLEELHLIEQQIGQLDQEMAALLSQHPESVQRLSEIPGLGVDSAQQIIAEVGATAATFPSGKHLSSWVGACPGDQESAEVSQSHRSPKGNRHMRRILNQAANAAVKAKGTIFEIVYRRLVTRLGHNQTIGAIAHRLCRLIWIILRQGVRYEERGPSVNTKSRRQRTSRMIRELRNLGYRVDLRLTGVPECEAASAGSVSSNPAVRTGVSPLTTPVTTKLKHSAMKPGFKPW

SEQ ID NO: 182480 - protein, 347 aa, unidentified
MAFIGVDLHTNSFTICRIEAEGPESFATFDLSAAGMDRFCQSLDADDSIAVEATGNSAWFREQVLCCVGRFVVVNPKQFQVIRNSVNKTDRNDARALAFFLSKDMLPETRVKTKAEGELASLVHTRDLLVKQRTRLLNKIHALFNRHGIKLKKESLSSKKALEQLKIEPFSAVEQVELTIVRDQALSLSAAILKLDGEIETFAQKLDGYEGLTSIEGIGPRSAAVFLSAIGNVNDFGSADKLAAYFGIVPRVSQSNETDHRGRIAKRGNKLARTTLVQCTPIAIRYSAYLRTYYQKVKAHRGAGKAIIATARKLLTIVFNTLKNKWVFEDFAQFKIIGKSVPYGQSS

SEQ ID NO: 182481 - protein, 405 aa, unidentified
MNAVGIDVSKGKSMIAVVRPFGEVVVIPYEVRHTASELGELAHSLKSLDGETRVVLEHTGRYYEPVAQSLCSAGIFVSAVNPLLIKEYGNNSIRRVKTDKADALKIARYGLDNWSELREHSAMDKMREQLKILNRQYSLYTKNKTALKNNLIALLDQSFPCANTFFDSPVRENGRQKWVDFAASFWHVDCVRGLSCHAFTDRYQKWCKRHGYNFSAVKATAIHETSKELVPTLPKNDSTKILITEAIAQLNSAARTVEVLRTEMNRLAGQLPEYPVVMAMYGVGSSLGPQLIAEIGDVRRFAHRGSLTAFAGVDPMPNQSGKQERQSNPSSKRGSPYLRKSLFLLMTVLLQKSPPDDAVYQFLDKKRAESKPYYVYMTAGANKFLRVYYGRGREHLSSLDGVALS

SEQ ID NO: 182482 - protein, 449 aa, unidentified
MSRPQVIDDEQHEQVHERVAAIDVAKDSGMVCTRTPHPSRPGARRSTVWTVKARMNAVRALGRQLHKDGIEIVTLESTSDYWRIWFFILEACGLAVQLVNAAQAKNLPGRPKTDKLDAQWLARLTEMGLLRASFVPPKAIRDLRDYTRARTRLIQERTRCWQRLEKLLEGALVKVSSVASKLTTVSAQDMIKAMIAGERDPHVLAGLARTRMRAKHDDLVQALDGMFDDHHGELAGMLLDQIAFLDGRIARLSARAAELTAAMPEAWGINADGTTGPDAGATPDAPVLPAVARLAEIPGISEDLARAIIAETGLDMSRFPTAAHLVSWAGLCPSARQSGPRTRAGKKGQGNGYLRGSLGQAATGAARTATFLGERYHRIARRRGKAKAQVAVARSILVIIWHLLADPAARYTDLGASYYQTRTDTDRKLRNHIRQIQALGFEITLTKAP

SEQ ID NO: 182483 - protein, 319 aa, unidentified
MSEPSFIGIDVSKGNLDVCWSDGRVEQVINAPAEITAFAERVKSAGVSLVVMEATGGYEQLALLTLYRSGVPAVAVNPRQVRDFAKALGQLAKTDRIDARILCEFAERVRPEVRIVPEDDVLELDALLQRRRQLIEMLTAEKNRLQQAHATRIRANIQENIHFLSKQLKKLNVDLDDRMNRTPIWKAKIDLLTSVPGVGRVLAMKLLASLPELGKLDRKKIAALVGVAPLNQDSGKHQGKRSCWGGRADVRATLYMAAMVGSRSNPVLRSLYNRLVTAGKAKKSALVACMRKLIVILNAMAHSQVPWRILPAAAPGSAA

SEQ ID NO: 182484 - protein, 369 aa, unidentified
MDKDTTYVALDDSKRKIVAGILRPRDAEPELREIVNDPRQIRRLLERLKREGPVAACYEAGVSGYDLHRQLTALGVECAVIAPALTPRRPGQRIKTDRRDAAKLVRLFRAGELTAIHVLDESEEAVRDLVRCRDDLRRDVLRWRHRVLKLLARHGRAYLSGKNWSQGHWRWIREQRFDLPPLQRAFEATVFALEQALARQAELDKELEAVAGTAPYREPVGWLRCFRGIDTLSAIILLAEIVDFQRFRRPRELMAYLGLVPSEYSSGESQRRGALTKAGNSHARRVLVEAAWHYRHRPTIGRALASRSQGQPDEIVGQAWRAQQRLHRRYRHLVGHGKRPPIAVAAIARELVGFIWAAMTRPENRRQAA

SEQ ID NO: 182485 - protein, 359 aa, unidentified
MTATMTYVGLDVHARSTHAAAIDVASGELRRARFGGGSDELIAWLQALPQPLKGCYEAGPTGFALYRAAEAVGLPIAVVAPSKTPRAPGDRIKSDRKDAELLARLLLAGQLKAVAVPPPPFEAARHLARAREQVRGDLMRCRHRVSKLLLLHGRVYEASAWTKTHRRWLEQQRFDEAATELAYLDMLAAVDGLAARKAALEERLSRLAREGEWWPTVARLRCFRGIDTLSAFVLCLEIGDWTRFPRPAKLAAWLGLVPSLDQSGESRRQGAITKTGSGYARRLLVEAAWHYLPRPSVGPALAERRAGQPDHVLQIALRAQRRLHRLYHRLRERGKPGNVTTVAVARELACFLWAAAVAD

SEQ ID NO: 182486 - protein, 354 aa, unidentified
MKRTTKHVALDVHQATTLASVRDDRGRVIARTILPTEEPALVEFFRGMRGTIHVAFEEGTQAQWLHQLLAPRVDRVVVCDRRGERGPGNKGDQVDADALSERLRRGSLRAVYHGSAPHATLKELTRSYENLVEDATRVMLRLKALFRARGIRTPGARVYHPATQAQWLAQLPDRGARLRAAALYAELDVLRALRPNAKAAMVAEARRDPAWAVLQTIPFFGPVRVARLLATMQTPWRFRTKRNLWGYAGLAVVTRSSADYVLVDGQPIRRRRAPLTRGLNRNHNRVLKDVFKGAASAATAQPGPLQDWYQGRLAQGMREELASVTLARKLAAIALHVWKTGERFDPTQLTMPAR

SEQ ID NO: 182487 - protein, 379 aa, unidentified
MKLVHSRCCGIDVHKDSVTACVLIIEPDGRRIVRKKEFDSYLRGLENLRLWLFANKVTQVAMESTGVYWKPVWHVLEGHFGLLLTNPYHMHNIPGHKTDAADSEWIADLLAHGLLKPSFVPGTEIQDLRDWTRYRVNLVEERNRVHNRIAKVLEDTNLKLGSVVSDILGMTGRLILDAILKGQQDPGWLADYARGRLRCKKEQLRKVLRGRVRQHHRDLLTELLEDLRHTEEKIARVEQKLAVLMEPYSAQVTLLLTIPGVDVLTAWTIVAELGVDMSKFPSPRHAASWAGLVPASKESAGKRKRAGVRPGNPWLRRGLCQSAWVVSRKKDCYLTAVFRRRARKGGAKKAIIATAHQILVIAYCMLRDESVYKELALLC

SEQ ID NO: 182488 - protein, 391 aa, unidentified
MLYVGIDVSKDDFSVCFLRPESKNKKEKLPVFKYEQTRKGFKSFLSKLKSFGDKEPLAVMESTGTYHENLRKFMDDEGINVVVLNPASVKKHMDVLSKSKTDEIDARNLAKIAYHFMETVETSNIPQDKQLALRELVRFRQNLVEECSSYKKRLRNYLRLTMPEVLKEFSSMGSVVLLHLLKEYPTKEKMLADPEGVVELLRSHRWKEEDARDLLNNLKESIGGKKDQYGSYEKVILLCVKKISENEEEAEALKKEIEKLLKDYPDHPAGSIPGVGTISLAVIIGEAGDIFRFVTKKHFVSYTGLEPKLRESGRWRGNTRISKQGNAHLRHVFYQIASRVIGRSDKYKAIYNNLRDRGKTHKKAVTAIARKMAELAYVLTINDTTFSEEHS

SEQ ID NO: 182489 - protein, 346 aa, unidentified
MYSIGIDAHKRYSQITIMQEDGKIINRCKVNNDRKSIKRALSPYAQDGLKAVLESGWNWGLLYDMLSDGDLEVKVAHPLKVKAIAEAKIKTDKISADILAHLLRADLIPECYVRGKSSRRIQQVLIQRMFLVRLQTMVGNKIHNLIDRQEEAREPAQSFTDLFGVKGMQFLRSTPLPLLERKLLDGQLELLEELRTRISWVESILTQLKENDEIAERLKTIPGIGEFFALLIRHEIDKIERFPTSNKLCAYAGLVPSTYSSGGKTYHGRIIKQGNKYLRWALIEAVIPAIRKDAQISSYYYLMKAKKGSNSAKVATARRLLKIVYQVWKENRFYRIKTSRTALIHT

SEQ ID NO: 182490 - protein, 337 aa, unidentified
MRSISVLGIDLAKKNFQIHGINDKFQKIAKKSLKRDEFFQAVINLKPAKVAFEACGSAHYWGRRFQGAGIKVMMIPAQFIKPYVKTNKSDAADAEAIAHAAMNPSVRSVPLKSEWHLDLQMLHREREQLVAHRTQITNQLRAFLYERGQIANLGKHNAIELARKVLLDELFSSEFRFCMERMLNQYANCEKMIKGVEERIHDIADRNPDIERLMEIPGVGIFTATAIAAAIPDKTEFQNARHLAAWIGLVPKHTGTGGKIKILSTSKRGNSYLRRLFIQGAGAVINQLREKPDRVSKWARDLKEKKGPNKAKVALANKNARIVYAVFCKGLDYQKAA

SEQ ID NO: 182491 - protein, 436 aa, unidentified
MPDVPWAHRKKGGASMSKKKSSLAGLAALYARVCGLDVHKKLVVACVRILDSKDGTVQSTLRKFGTMTADLLELRQWLAEFRVTHVAMESTGVYWQPVFNLLEGHFQVWVVNAQHIKKVPGRKTDMKDAEWIAQLLQCGLLRPSFVPDRQQRELRDLTRQQTKLVQQRNAVDNRIQKVLETANIKLGSVASDVLGVSGRKMIEALIAGEKDVTVLADLAKRQLRGKIPELKRALEGELTEHHRFLLRQLLGQYDFLEKEIASVSERLGAVAPPSFRAAVVQLDAMAGVGERGAKALLAETGTDMSRFPTHKHFASWAGRCPGNHESAGKRRSGKTPAANRHLDAVLTEMAHAAVRTKNSYFKSQYHRLAGRRGKKRAIGAVKHSLLVTVYFMLRDNKPYKDLGADYFDKLNPQQRIRYHVRRLQELGQEVELKPAA

SEQ ID NO: 182492 - protein, 372 aa, unidentified
MLIALPHHHQAAMAKTTLTQPTLAEQHDVVIGVDTHKSFHVAVALSANGGRLAECRIPAKQQGYSNLRSWALELGTKPIFAIEGTGSFGAGLCRELMASGFPVLEINRTDRSTRRRLGKDDAIDAEAAARAFIAGLATIEPKGGHQVVEMIRLLKGNKDSATNSRTRAINQIKAILVTAPALLREQLEPMANINLIATCAAFRIAVVDCPFAAAKKALRYLARRVLQLEKEISELLEDLDQLTQQACPGLRKTYGIAVDGAATLLVAAGDNPARLRSDAAFAALCGVSPLPASSGKTNRHRLNRGGNRQANATLHRVVVVRLRWHEKTKAYAARRMEEGRSKPEIMRCLKRFIAKEVFHTLFGRPAIRTAAV

SEQ ID NO: 182493 - protein, 353 aa, unidentified
MTPLVIGIDPHSRIHVAAAVDEHGRPVDTCEVGASPTQLVQLLTWIDSLAVIKVAVEGSKGYGLPLARLLVAAGHTVVDVSSNLTADERKRSRRRGKDDEGDAVAIARIALREPDLPVMDPAHLDADLKLLVDARDQLVQEEARVRNRLHALLLNMAPGYHDTTGPLNSRPAFARARSLALRARKIDPTRAKLALAAIRRLNALRDEQADLETDIYSELSQRPTTHLQAIPGVGPLVAAKILGEVRDVRHYPSAAAFAAHAGVAPVPASSGNTQRHRLARGGNRQLNRALFTVAMVQARWHPPAREYLSRKRAEGKTSAEARRCLKRHLANVVYRALQADLATGQGAAISTAA

SEQ ID NO: 182494 - protein, 344 aa, unidentified
MHITSIGIDLGKTTFHLVALGDRNKVLLRKKFSRAQLLAYTANLPSSLIGLEAGAGAHGLASVLREQGHQVRLIPAQFVKPYRKSNKNDLLDAEAIAEAVTKENMRFVPIKTEEQLDVQALHRVRDRLVQRRTALINEIRGFLLERGITFAVRPIHLRKNLLAVIEDAEQNLSSRLRWLLERLWQEWKQVEVDVKTITDEIERISEQNPLCRRLRQIPGFGPLVSSATVAAIGNGAAFRCGRDFAAWVGVVPRQYSTGGKQKLLGISKRGNIYLRRILIHGARAVLFRVKYDTGGFGQWILGLTQRAPRNKVVVAIAHKLARMAWAVLSSGKDYQHQRLQMTAA

SEQ ID NO: 182495 - protein, 373 aa, unidentified
MFHFTTLFIGMDVHKESFSLCYYDMMANQFKHSTKVGPNVSYIVNYVNELRRLYGQDAEVLCGYEAGCLGFTLYHQLQAHGIPCIVMAPTTVMKEGSKRVKTDKKDAAQLAKALAFRSYRPVHIPTVEDEQVKEYIRMRTDHKVALKKIKQQILAFCLRHDFRYTEGSSNWTQKHVRWLRSLNPDGLYAEILTEYLLTYEKLVDQIERYDARIEQLGQSDSYQEKVSRLSCFIGIKTLTALSIVTEIGDFNRFATAQHFASYLGLTPSENSSGDKERRGAITKAGNSHVRRLLIEAAQSLAKGTIGYKSKELKRRQSGNRVEVIAYADKANERLRRRYRTLVLGKNKKQNVAKTAIARELSGFIWGMMAGRIA

SEQ ID NO: 182496 - protein, 429 aa, unidentified
MKIIYPRVCGIDVHKKFIVAVICISESVEPVYLKKRFSTFHNDLIRFRDWLIQNDCQNVCMESTGKYYIPVYNILESHISNIVVANPKWVRAVKGEKDDDKDAKWIADLFKLGIVKSSFIPQKDFRILRELTRYKYKLVNMRSSEKNRYQNALTSGNCKLDMVFTDVFGKSASNIIDLILSDNPYTDEDILSKVHKNCKASPNMILNSINGTDLTPVQKSRIELVNNHIKQLSSNIQRLDKLIDLMIEPYEDYISFLCQIPGVSRNSAITILSEIGVDMNQFTSTRRLTSWAGLTPSSNQSAGKKKSVRISRAGVYLKPCLVEVAHAAVKDTNHPYYANKFNKISKRRGKKRAYIAIARKILVAAYHMLLTGEIWNPADLAEVETPVEQRIKYVKNNLKSDIKQLLDIGLTVEELTLMIQQNANNIATQ

SEQ ID NO: 182497 - protein, 350 aa, unidentified
MSETLYVGLDLGSRNCEQLGMLSDGTVKIKSRFQTSEANLIKAFKEGKGLGKELGWEIQVHLEAGELAPWVREVIKPYVKSVDISHSRDNAWIANDPNKNDRADAYKLAELLRMNRYRPVYYSEDQSRREFKQLVQHYDDLTGQEVKLKLKIKSRLRVQGVIIHKGWVYTEKGFKKALEQVKSPEIRKSIEQLHKGLKNTLEIREEALKLIREAGKKFPEIKLFEEGVPGVGFIGAVHFSAYVQTPHRFSNKRKLWRYCRLGVCQRTSDGKILTHPKLDRAGCGRLKAVARTAFNVSVKSKKDNQFKRAYESALEATHDQTHARLTVMRKIVSVLRAIWLTNTPYQDDLG

SEQ ID NO: 182498 - protein, 409 aa, unidentified
MKFFVGVDVSSKDLKVCIMDCDGNSLKRFTVQNNPAGASFLRDQVISLADKHSCQEIHIGMESTSVYSFHPAMFLNEDEALHRYQTKVYLINAKLINKFKEAYPYLDKTDDIDAWVIADRLRFGRLPYTAVMQEQLLALQRLTRMRYRLVNNMIREKQYFLQNLFLKCNAFKSEVESSAFGNAMMELFLEQYSLDEISSMDVSVLADFLREKGKNRFPDPEGVAKCIQKAARSSYRLSKCVEDSVDVLLATSIECIRTLSAQIKQLDKAIERLLDGIPNTLQTIPGIGPVFCSGILAEIGDINRFKGEASIAKYAGLTWSKYQSGKFEAEETRMIRSCNHYLRYYLVEAANSVKKVEPEFRDYYQKKYREVSKHQHKRALVLTARKLVRLIYALLRNDQIYTPKRKVNR

SEQ ID NO: 182499 - protein, 403 aa, unidentified
MFHLGIDVSKKAARYFILDESGSKLKAFTLDNDKESLESLPGRFEALSIRAENLLIGIEATGSFWENIFSFLKDKGFKIVLLNPFYTNKFREALAKKAKTDDIDALVIAQLLRTGEYIQSQVAEEDIQALRELTTLRYEFVKEKKNLQRKVCSLLSVVFPEYEKTVIAKPFSQASMHILSEYPTAKHLSNAKPKHIEKLVRKIVGNNFNIDEIQSLIDAAKNSIYSGRAKEARATTLSMLLGHIENLANSIEELEAQMKAILSPSEDDDSFPGQNLLSIKGVGDKTLAAIISYLGSDGSNFPDSTSVIGYVGFYPKIYESGQTRRANKISKRGPKVLRWALYMAAVASLKHNKEMRSLYHKKVSQGKSSKQALICVSKKLLQIALSLLKSGELYDPAKVFVSR

SEQ ID NO: 182500 - protein, 385 aa, unidentified
MQKLNDLSRSPSPLDPDGTLIAVIELSLSSWLVAGVVPGVERQPLKKLAVDESALLKLLHRWREEAAKAGHRIKRIAVAFEAGRDGFWLARWLSARDIEAHVIHASSVAVSREHRRAKTDRLDTELLKRSFLGWLRGERDHCKMVAIPTTKDEDAKRPNREHESLVGEQSRIVNRMKAALIRLGIRGFNPKLKKAAGRLADLRTPENEPIPPNTLAELHRDMERRRLVRDQIRQIEDARLERIERAPSDRSHAMVRLLARVIGVGIETADMLVQEVLSRTMRDRRAVARYCGLTGAPDESGTKRREKGLAHSGNARVRRGMIQLAWRFLMFQKDSALAQWFRARTENARGTRKTMIVALARKLLIALWRLVTTGEVPAGVVMRAA

SEQ ID NO: 182501 - protein, 350 aa, unidentified
MVVVLGVDVHKDTHTVVGADQAARKVGERVVRATDAGHRQLLGWARRQFPDERVWAVEDCRHVSARLERALLAAGERVVRVPPKLMAGVRGSARTRGKSDPIDALAIARAALREPDLPVAEHDDVSRDLRLLVDHREDLVGERTRIQNRLRWHLHELDPELDIPARGLDRLVVLDRLTDWLTEQPTTVVTRLAGELLADIRALTARINALEAEITTRVRRIAPALLALPGAGALTAAKIVGETANVTRFRSEACFAMHAGAAPIPASSGRINRHRLARGGNRQLNAALHRIAVTQIRLDGLGRAYYQQRRENGDTTMEALRALKRRLARIVFNLLKDQQPVTPDVLPAAA

SEQ ID NO: 182502 - protein, 461 aa, unidentified
MRNNRKSGDRPGSTRPIAGLPIVRAKVAGIDIGSERHWVCAPGLEGSGREVADFGATTPELVRMAEWLKERKVESVAMESTGVYWIAPHEVLEKDCEVLLVDTRQLARVPGRNKKTDPSDCEWIQRLHSCGLLNGSFRPQEQVCMLRTLVRDKANLVAESADWVRRMQKSLDQMNVRVHRAVSDLNGVTGMAIVRAIAAGERDAQKLAQLRDRRCRQSKEEIAEQLSGHWREDHLFSLRQSLQMYDAIAERITAYEQEILRKLATMEIGEYPGGVVPPVKNLEKGKAIKKRGQEPKRQALYRMSGVDVTQIDAIGVETVEVVLSEYGPDLSRFPTEKQFVSHATLAPRVPKSGGKPLKHKKRNSASTRVAAALRMAALSLRHSATALGAYYRRLARRIGGDVAVFATARKLATLIYRLLRWGQPYVDEGAEAFEKRYQQQHIKGLAARAKELGYQLMPTTT

SEQ ID NO: 182503 - protein, 400 aa, unidentified
MLSIGIDVSKGKSTVCGMKPGGEIVYAPFEIQHTREGMSELVSLLRSSGEEVRAVLESTGSYHCPVVAALLENGIFVSVVNSLRMKRFCSQSIRKVKTDRIDAMQIALYGLAYWQELQPTRLPEDTYRELQLLARQYYQMSSLLIKAKVDFNAICDQVLPGMQELMNDHAGRHKLSDFVLRYRHTTHILEMGETRFRKDYCKWAEKKGYRNCERMAALIFATAQNGIPVLPNAPSTQIVITEAIRVLHTVEASRDAILTQMQALAKTLPEYSLVREMPCIGDTLAPRLIAEIGDVRRFHSKRALIAYAGIDAPPYQSGKFCANNRHISKRGNRYLRKTGYEVMQSYVMHKPANDPIFTFIEKKRGEGKSGKLAMVAGLNKFLRVYYGKVTELYRSLPAIE

SEQ ID NO: 182504 - protein, 345 aa, unidentified
MEDGGVAYQVYVGIDVAAETFVAAWLAPGGKPGTPVTGEQTPTGFAALAHRLRATGVPSAATLVVLEATGNYRVALAVALHEAGYRVAVVNPRQAHHFAKAQLRRAKTDALDARDLAQLAAALRPAPWTPPPAVYHEVRQRLVARDGLLTMRTQARNQRHALLQWPVVVATVHQHLDELIADLDRRVAALEAAIAVVLQEGAWAESLACLTSAPGIGLVTASWLLVSTLNFALCAGPESLTAYVGLAPVPRESGRTIRGRRAIGHDGNGRLRTALYMATLSAARYNPAIKAFYQRLRAAGKPMKVARCAAARKLLHQAWALGSKQQRFDPDHKQQQHEVSPDLAA

SEQ ID NO: 182505 - protein, 332 aa, unidentified
MNYIGIDIAKKTFVAAFPKEKGFKVKSFPNNVDGIRDFLKGLDPGQDRCVMEATGNYCFLLLYLLDKKGISACMINPKQTKHFARMMMEVTKTDTKDACMIAMYGQKMEPPVYKIPTESIMRLKQKRTVIRQLRKQYTALNNLKESLSVMPKMDKSCEKSITKTMEFIGKQLNKLEDEMAELTNVEYQKQMELLTSIRGIGPVCAAALIIATSGFTCFDNAKQVSRYFGLCPTYQQSGTSIHVRGGISHMGDSQIRGALYMASMTAIRTNTSCKEFFQKLRKNGKPGKLALTAVSNKLIRQAFAVVKSGVPYIDGYVSPNPMTAQERMLNMC

SEQ ID NO: 182506 - protein, 429 aa, unidentified
MDVEDRIRLEEFRQLKKEIRGSQEHLIVGIDVAKDKHNAFFGTATGKTLLKRLVFENNIEGFNKLLTYTEAVKVKHALHEQVFGLEPTADYHKPLGEHLIRRGLKVVLVSGNAVKNNRELLDGRWDKNDAKDPANIADLISQGKFMYYDYPVPPLRDLRNLLSLKRHLKRQEHGIKVRIRNHMLAQYFPEFDRYYGQCESVGLSVVRWCLAPCGIAGLEYDEFVQLVAPGSRISIGQGECLKAIWEKAARSIGCEVGASMGFEAKMMVEGLKHVREAIRKTDEKIKEVCLHFPEYSYIITIPGFGPDVSSKVLAAIGNPFRFDTEKQVLKMAGWDLSAKRSGKKSANVVPVISKKGKADLRYALYQAAFIASTRNQYFIMYFTNKLRGREKEKGIKTKMRVKLAAKLLVIAWSLMKKEEPFNPDYLNIE

SEQ ID NO: 182507 - protein, 316 aa, unidentified
MNPNNHTEVNIGIDTSQSQLDIYIRPTGEYFSVENNPKGAKEAASRLRSYQPTRVLIEATGRLEMHFVCAAHKARLPVVVCNAGQVRQFARASGRLAKTDKLDAQDIAHFGEALHPALTELQPERLRQISDLITVRRQCLDISTMQKNRLLRMPRSVQKPIQRILNAVRKEIERIDRQLDKLVEAIPQWRNQRDLLMSVKGVGKVVAYTLMSELPELGQLNRKEIAALAGVAPMNRDSGSYRGKRRVSGGRGKVRTALYVSMLSAIQYNPKIKSMYERLVAAGKPKKVAIVACMRKQLVILNTMMRNGTYWDEKLA

SEQ ID NO: 182508 - protein, 408 aa, unidentified
MQVLYERCGGLDVHKKSITACIITPEGKETRTYSTMTRSLVNMADWLLTKGITHVAMESTGVYWKPIYNLLEETGIQALVVNARDIKNVPGRKTDVKDAEWIADLLRHGLLRGSFIPPRSQRELRELVRYRRSLIEEQSREANRIQKVLEGANIKLGDVATDVLGKSGREILASLVQGETNPEKLAELARGRLKKKREQLAEALEGILGPHQRMMLASQLRHIDFLEQEIARLDREIEERMRPFAQALARVDEIHGLGRRNAEEIVAETGVDMSRFPSQAHLASWAGICPGNNESAGKRLSGRTRKGNLHLRAALVRAARSAARTKGTYLSALYHRLAARRGANRAAVAVGHAILVIIYHMLNKGTRYQDLGPNHFDKLNERATVSRAVARLEALGYKVILERRETAA

SEQ ID NO: 182509 - protein, 387 aa, unidentified
MDPILECCCGLDVHKDMIEACIIQGFENPKKLQQQFLTTPAELQRFNEWLTAADCRYVAMESTGVYWRPVYESIESYFGGDCFLLVANAHQMRNLPGRKSDVKDAEWIATLFQHGLLDPSFVPERTIRDLREFSRTYKNAVSERSRCINRLEKFLQTHGFKLSSVLSDITNDSGIRILTTLSEKGSLSVDDVEKARSRNTKHSATEIQSAVCGTLTENERFLLADFLEQYQAISRHIEKILNKMKSMVEPYQKLIEQMDSIVGIDITASILILAEISDKPQAYFANSAKLCSWAGLSPRNDQSAGKIKSKKIMPGNPYLKSVLCQCARIAVRARKNNFSVWYWSHRAKVGDKKCIIAVSRKMLSTIYYLFANNVFYNTDVALSHLRI

SEQ ID NO: 182510 - protein, 342 aa, unidentified
MSLAIVGIDLGKNWFHVIGLDEGGATVLRKKLNRTQLAEYAATAPRCIVATESCPGSQYWGRVFTAAGHEVRILPAQFVKPYLKANKNDFNDAAAIAEAAGRASMRYVPLKTTEQLELQALHRVRRRLIVERTAVINQMRAWLLEHGMVIPVGRAAFVHRLPTIFAEAEHRLSPRLVELLHRLRHRWLALDGEIVQATRDLVDWAGQSPLCCRAATVPGIGPIIATAVVAAVGDGRMFARGRDMAAWLGLVPRQHSTGGKPTLGSISKRGNTYLRELFIQGAQSSFVHLKRDQSSLGQWLRQVEMRRQRQVAIVALANKMVRICWKVLTSEQVYAPYPAPVM

SEQ ID NO: 182511 - protein, 325 aa, unidentified
MHILGIDIAKASFEAGLTEDNQHFEQESFNNDSKGFKRLAKWLEAHQVKELHVCLEATGCYGDALAHFLHSQGHQVSFVNPVQIHAYGRSKLRCNKNDRLDAQLIADFCFTQKPTLWTPPSQIQRKSQQISRHITTLKEDRQRKRNQLASGLTSSRLHRSITQTISFLDNEIELLEQDLYELLCQDPDKAEDIKLLISIPAIGLLTACRFLAEVDVSRFAQASQLAAYAGLIPTEHSSGTSVHKKPRLSKVGNRHLRTLFFMPALSAHRFNPIIARLRTRLTERGKPKMSVIAAVMRKLLHLDYGVLKTRKPFDPNFMRSIPVGG

SEQ ID NO: 182512 - protein, 419 aa, unidentified
MSFKILKNNCCGLDVHKTWIFACIGITDSNKRTVYKQARFSSFTKGLQELCHWLAKYDCTDVCMESTGKYWIPVFNILEKNNIWVTLSHPKYTKPQKGNKTDRKDAKWICDLYMCGMVKPSFIPPADIRELRDLVRYRFKLTCMITGEKNRAHNCLTVSNLKLDDVFSDIFGRSSRSITEQILQHPGETFDVAPFVHGRCKTPIEEIQAAVDGAVSKEQAVKLRQCLNHIDELEMHKSEIEREIFRLSDKYEDILTLIRTVPGFDKNPMTAIQVLSEIGGDMSVFPTAKNLVSWAGCCPHNDQSNHKIKSTRISRAGSYFKPVLVQVANALIKSKKHPEFSTRYRRIKARRGHKKAIIAICRMILTAIWHILTDLKPYTAKGFLEPRPVSKEKVLTASQALNLLKQKGYVIKDEPIFIS

SEQ ID NO: 182513 - protein, 414 aa, unidentified
MPETAYALYVGIDWGTVTHQVAVLDAQRVLLGERAIAHEAVALHALTEWLTQLARGEPARVAVALEVPRGAVVDTLLERGFHVFALNPKQLDRFRDRYTVAGAKDDRRDAFVLATALATDQPAFRALAPEDPLLIELREWSRVEDELREEWGRLASRLREQLHRFYPQALTLCPAADEGWFWALVELAPTPAAALRLRRAAVVTLLRAHRIRRLTADQVLAALQSPPLRVAPGTVQAASAHVALLLPRLDLVDRQRRDCARRIERLLDALATTGEHQGHRDVTILRSLPGVGRVVAATMLAEASRLLAARDYHGLRTQAGVAPVTRQSGKRLLVGMRYACNPRLRNALYYWSFISVRYDVHSRQHYQLLRGRGHSHGRALRGVVDRLLTVLMAMLAAQTTYDPARRSAMLALVP

SEQ ID NO: 182514 - protein, 499 aa, unidentified
MRAIGLDVHRDFCEVAIAENGEVRSTGRIAATHEQLELFGASLAPTDQIALEVTGNCWEIARILNKHVAHVLVVNPADTGIRQARAKTDRRDARTLARLLAVGSLTGVWMPDDRTRVMRRRLARRQQLVQSRTRAKNEISAVLIRCLKARPKISDLFGVKGRAWLAQIQLPFEERESIDAGLRLIAFLDGEIIAVEQLIAQDALQWPEVARLMTVPGVNVIVASTFLAAIGDIRRFPSSRKLVGYLGLDPKVRQSGSTPAAHGHISRQGLRPSPPRPGRGELEHNPPARPDARLLPARPRPPRTPDRRRCVRAKTRRAVLVSAQTRRGLCLPAAVADQEEDAPPGTHRRPPQGSRQDRHLGHQRRHARRRTRAGRAGRTGLQTQHRRLASHQAAKGGRKRDNAARIYRALKGLSRAANHSPRRPRFATSITRARTHLPTPPRRQQQDLTFIPRAKHKLPSCARVGRDPRPGRSFQFERAPRGRGRCTRPDSNPGGAAAG

SEQ ID NO: 182515 - protein, 430 aa, unidentified
MKSNTQNAKIEAITEKTLVLGIDVGSETHYARAFDHRGIEYSKKPFKFSNTEAGFVTFKEWILNLKEKHEKDKVVPGMEPTGHYWFNLGKFLQDNEMKPVLVNPHHVKKSKELDDNNPTKNDRKDPKVIAGLVREGRYMIPYLPDGVYADLRTASNIRFQLQSELTRIQNRISRWFNIYFPEYKTVYGKPDAKSGMLILKEAPLPEDILTLGIDGVNQIWRDAKMRAVGKARAKTLIEAAEHSVGSKEGAVSARMEIRMLLEDYESRNIRLQEVMTLIEELVKQIPMAEKLLEIKGVGIKTVSGFLAEVGDISRFNSPKELQKLAGLALVENSSGKHKGETTISRRGRKRLRYLLFEVAMSLVAKNPEFRELHNYYTTRRLNPLKKMQSLMAIAAKLIRVFYAMLTKGVDYDPKKMISDIKRPEVYLQAA

SEQ ID NO: 182516 - protein, 443 aa, unidentified
MKPKRRTHLRGPRGQAFADRIRGVCPEHILCVSIDISKDFHVVLLHNGLGEIVTASFEIDIFRSGFDRFCQAVNEASARTQAQVILVGLEPTGHYYENLARHIQATGQDVTLINSYAVKENRNQQMMAKEKDDDIDSAAIGDLLRRGEGSPFRPPTGIYLQLQQLDRARLGEVKIQTMVKNRIIGHLDRIFPGLILTKAAAKERYQPLFATDFWECQTLQHLVRVCPDPRALAAMSPAELRAAFHEQAYRLGPVTAQRIIAYAQKALWPDPEVVAIRRQVLVTDLQTLDEVSGRVAHYTEQLHRLVAQTPYHILTHVKGLTPTQVASLAAAAGDPANYIHAGQLFRRSGLVSGRNDSGARQRRGKGQSIIKSGDVYLRRALNAMLNGLVLHQPVLGRYYHRLKQSKPVGVARVATIRRITGILWATVRDQRADTLIWRGDNMT

SEQ ID NO: 182517 - protein, 372 aa, unidentified
MSKTENRPTRFIALDVHKHYIMAGGVNAGQEVVLKPRKLSLKQYEEWYPKEIKASDAVVIEATSSAWHLYDQLTVHGTTVVVANPLLVKWIGSAPVKTDRHDTLKLARLLASDLVPTVWVPPAPVRALRKLIAQRRRLIRQRTQARNRLQSMLQEHQIEPPAGNLYGGELRGWWVSLELSPVDQLLIQQDLSLLERVAPLIAEVDGLLACESTCEPWASQVPYLIQQSGVGLITAMTLLSAIGDISRFHSPKQLVGYAGLGGRVHDSGQSHHGGGITKQGRRELRTAMVEAAWSAVTHNDHWRAKFTRYARRHGESKAIVAIARQMLVSVWYLWHNRVVDRYSDPLTIARSFWTWAERGDKTMRHGLSCGMG

SEQ ID NO: 182518 - protein, 346 aa, unidentified
MLKADTRTVIGGVDTHQDLHAAAVVDDNGTVLGSDSFSTTRAGYRAMLRWFRSYGDVVRVGVESTGSYGAGLTRHLALAGIPVLEVTGPDRSMRRAKGKDDEIDAIAAAQAARTGQRVQVAKDRSGAVEALRVLRTTRKTAIKCRRATLQQLHNTIVASPDELRDQVRNLTRMQLLRTCASWRPDTLGYRDPVVATRIALKSLAHRILDLNDEVADLDRLIDPLVEELGAKLTQLEGVGTHSAGEFIVTAGDNPDRLRSESSFAKLCGACPIPASSGKIQRHRLNRGGNRQANSALHIIVLSRMRIDPRTKKYVERRLKEGRTKREIMRCLKRYVAREIYHVLVAT

SEQ ID NO: 182519 - protein, 449 aa, unidentified
MNKVTTLNVLDERAAFVDVGSEKLHVSIAGGQPEVFGTVTAELQRLSEWLKQRDVRSVAMEATGVYWLPLYSVLEAAGFGVIMVNGKQTRNLPGRKTDMQDCQWGATLHAHGLLRAGFVPPAQIRRLQDYLRLRCDHITNAAGCVQLQQKALERMNVKLHDVISSLSGVSGQRVIGAILAGERCPERLVKMCDQSIQDKKRDRVIESLRGNWQEEHLFALRQAVESWRHYQGQIEACDREIEKVLREISGPPSALQDKVDRPLRKPGINAPDIDDLHALLVRWCGGKDLTVLPAHTDYSWLQLLGEVGTDLSAWPTEKHFTAWAGLAPGSYQSGKYRRSVGRKRNRTGRLFCVMARSLARSKHLALGGFYRRMAARRGGLLAIVALARKLAVWFWRLMVRGLTYVEEGLAKYEEQVLETKRRTLARLAKQLGHLVIPNFKAFQEPKTNS

SEQ ID NO: 182520 - protein, 413 aa, unidentified
MSLKIVYPICCGIDVHKTFVVACVASTNSSNITSYSSRRFSTYTNGLRELASWLEAHNCHDVCMESTGKYWIPVFNILEPSCNLVLAHPKYVKAIRGKKTDKKDAKWIADLFKHDLVAPSFMPPADIRQLRDLMRYRFKLTCFSASEKNRFQNCLTVSNIQLGNIVSDTFGKSSQRIISQILEHPGEPLNLPSLIHGSMMPKLPELTLAVDGVFSPQQAAKLKIIRQHYDDLEIRKAELEQLILALAMPYQQEIDLILTVPSFKNVFSAITVLSEIGTNMEAFPSAKHLCSWAGLTPTNNESAGKKKSVRISKAGCYIKPLLVQCANAVVKSDKHPEIRNRYLRLKKRRGHKKAIIAIARMLLTAIYHILKNKIPYDAELYREADIIPVNREITVEQAILLLQSQGYRIKNAS

SEQ ID NO: 182521 - protein, 367 aa, unidentified
MNKNPISAPAGQVTKNNTQEEKKAKRIVLGIDVHLRGYQVASKEDNQAIGAVHNFGNQSEVWLWIEKLKRRVEPIEVVYEAGPLGYSLYRALSAQGISCRVCAPDSSVQKRTRRKTNAIDARELAGRLFNYLNGNQQALRLVRIPSIEQERRRLKSRQHDQLVKERKRLAAQGNSILLSQGWGSMKNWWRPRIFERLSQVVVPEITELLEVWLELLHRLDEKIQQAKAQQKRSQKGPRPKGLGAGSLEQLESELLDWKRFSNARKIACIAGMVPSEWSTGEGQRLGSITKVGLPAVRRILVEAVWRMQRLQPDYEPFKKWRAALEGKNAVSEKKAVVAIARQLIVDLWRLKTGRVSAQELKLVMVGG

SEQ ID NO: 182522 - protein, 400 aa, unidentified
MLSIGIDVSKGKSTVCGMKPGGEIVYTPFEIQHTREGMSELVSLLHNSCEEVRAVLESTGSYHCPVVAALLENGIFVSVVNSLRMKRFCSQSIRKVKTDRIDAMQIALYGLAYWQELQPTRLPEDTYRELQLLARQYYQMTSMLIKAKVDFNAICDQVLPGMQELMSDHAGRHKLSDFVLRYHHTTHILEMGETRFRKDYCKWAEKKGYRNRERMAALIFATAQNGIPVLPDAPSTQIVITEAIRVLHTVEASRDAILTQMQALAKTLPEYSLVREMPCIGDTLAPRLIAEIGDVRRFHSKRALIAYAGIDAPPYQSGKFCANNRHISKRGNRYLRKTGYEVMQSYVMHKPANDPIFTFIEKKRGEGKSGKLAMVAGLNKFLRVYYGKVTELYRSLPAIE

SEQ ID NO: 182523 - protein, 364 aa, unidentified
MNKCHSNTELSSHEGTRRQFNGGKADIKLGIDVHQDFYVVVMQEGGSNPKPPQRFQKEAFLYWAAKLAGSGAQVHAVYEACGFGFGLQRNLTALGIDCYVVCPQKLDEQNRRVKTDGLDAKALCLKLDRFVQGNRDAMALVRVPTEQEEQQRAIHRQREQLVKARKQLEAQGRSLMVNHGLEPVKSWWKRGNFGALQVPEWMKELLGNSQPLLLALQEKISALTLQLQVAAASKQPRGLGAMTSVVIDREIGDWYRFNNRRQIASYTGLCPGEYSSGNTRLQSCVTKHGNPRLRAALVELAWRLVRFQPDYKPVVKWRQILAKGALATGAARKKAIVAVARQLAVDLWRVRTGRCKPEVLALEI

SEQ ID NO: 182524 - protein, 366 aa, unidentified
MKRKVYVGMDVHKETIQIAYLTSNSKEILKEQQIKHNEVQIKKFIKKLKTEWNEIYCCYEAGVTGYPLYRYLKSLGVNCILVAPGKIPRQNTDKIKTDKRDAIKLARLMRSGELESIHVPSEEDEAVRDYLRSRDSLRLDLGRNRQRLMKFLLRKDIKYSTTKYWTVSHYKWLNNLHFNNEILQETFNDYYSRVRVQEENLKAMDKKIQEIAESEPYREKVGILRCFRGVDYLTAMFLLCEVNDFKRFKTAGSFMSFLGLVPGEYSSGSKRKQTGITKTGSPRLRRILTEAAWQHRFPGTGSKIITARRSGQPALVVALAEKASLRLHKKFRNLQRKNSSSDDNGSFKRVIRISLGGNESCSLKLE

SEQ ID NO: 182525 - protein, 343 aa, unidentified
MTCFVGLDVSQKMTAICVVDNAGHRLWRGQCPTNPEQISILVRRHAGDDARIGIETGAMTPWLVHELRNLGLEVICLDARHARAALEMQINKTDQNDAEGLAQIVRTGWYRSVHVKSFDSHRARALLGARTQLIGMTTRLSNHIRGVLKTFGLLPGAMRGLPFDRKVEALLLDRSDVALIVRPMLVAWRQLREQIAVFDKAIRVLVRSNSVCGLLMSVPGIGVFSALAYVSTVEDPGRFSRSRSVGAHLGLTPRQYQSGEVDRSGRISKCGDTLARTLLYEAAVVILTRLKKASSLKDWGHAIARRSGNGKARVAVARKLSVILHSVWRSGQPFLWQDHANAA

SEQ ID NO: 182526 - protein, 416 aa, unidentified
MNAAGIDVSSRKSTVAVLRPFGEVVQLPFDVAHNTEGLTSLAEQLKSLDGETRVVMEHTGRYYEPVAKALHEAGLYVSAVNPLLIKEYGANSLRRVKTDKADAVKIARYALDNWTDLRDYTPMDTIRYDLKTLNRQFQLASKQRTACSNNLIALLEQSFPGIRKCFDSPVRSDGTQKWVDFAHTFWHVDCVRKQSFNAFSERYRKWCKRHGYFFKQSNAEEVYALAKNAVVLVPKSEVTKVLVQEAANQLTSISRSMETYRTEMERLASMLPEYPVVMEMYGVGKSFGPQLMAEIGDVRRFERKQALVAFAGIDPMPNQSGDKNVRSNKASKRGSPYLRKTLFNVMGIYLKCAPLDEPVFQFLDRKRSEGKPYYVYMTAASNKFLRRYFAKVRDYLATLENLPPVDMDSTGLQEHN

SEQ ID NO: 182527 - protein, 316 aa, unidentified
MAENFVGIDVAKAKLDVFVNGEAWQVNNDLPGINELVVRLKAGAVSLIVLESTGGYESFALGELYAAGLPVARVNPGRVREFAKSIGQLAKTDTLDARILARYAEMVRPALAKLPNEEEQQLAALVNRRRQLVEMSVAEQNRFGTAPKKLRASIRTHIDWLKAEIHRIEGEMDDFIKQSPLWREKDALLKSVPGIGDVTARTLLSELPELGQLDRKEIAALVGVAPFNHDSGRMRGKRRIRGGRTSVRNVLYMATLAATRFNPTIQTFFNHLVQCGKEKKVAIVACMRKLLTILNAILRTRQPWHPPLFLCQALDS

SEQ ID NO: 182528 - protein, 355 aa, unidentified
MPAWTCTRAMCSVVSKTKRASRSTVRRRLPAELPAILQALDVCRPRLKAVAVESTFNWYWLVDGLQEADYPVHLAKPAEMQKYSGLKQTDDETDALWLAEMLRLGILPTGYICPKAERPVRDMLRRRMLVVRQATQTLLSLQSMVTRHTGQSVSAAKLQNWTLQEVRATFVDPYSQQTAAAMVELLGEQRRIQHRLEKQALAVVKLTEPFQRLLTLPGIGPILGLTITLETGPIARFASAGDYASYCRAVNSRCESDGKKKGENNRKNGNAYLAWAFVEAAHFAQRYSPRAQAWFASKAARTNRVVAVKALACKLAKAAYYVLRDDVDFDENKLFGAVDGGGRKPGKGLANNPPN

SEQ ID NO: 182529 - protein, 382 aa, unidentified
MECTDLEVWIGLDVGERETQLCAIGMDKTLLLEMNIPTSAEGFAAAIDNLPCMAIKSVVMEAGLARGLAHSLRDLGFPITIVDGRKAHRFLSIRHHKSDRNDARGLAELGMMDLDAVRSVHLKSPETQYLRTQLVLRNQMLKQKNALQAAMRSLIVDHGIFPKMPPPTQLRSALERHPISDLPNKAYLNEIVAILAVWDAMRDYLRVMEIRLRRIASDHPVMSGFMEVPGIGYICAISFFTAIEDPSRFQRSADIGAYLGMVPKVKQSGATVIKSRITKAGNKLTRTHLVMAARVVISRSIVESAITVWGRELAARIGHSKARVAVARKLAVILLSMWKSGRAYQPYPQNYDLPNGSDRLGHRPHVESADSGSEYGGKPVAI

SEQ ID NO: 182530 - protein, 418 aa, unidentified
MDVTDESVQLVERVAALDIGKATLMACIRVPDERTVGRRRQEVAEYDTTTGALLRLADRLRQLGVTRVVMEATSDYWKPAFYLLEADGFECWLLNASHVKNVPGRPKTDKLDAVWLAKVVERGMCSPSFVPPKPIRRLRDLTRYRRSLIHDRTREKQRVEKLLEDAQIKLSVVASDMFGVSGRAILTALIAGQRDPVVLAELARGRLRTKIHALREALTGHFDDHHALICAKMLDRIDALTTDIAELTAAIETQISPYAAQVAQLDEVTGIGAVCAQEIIAEIGVDMSVFPTAAHLASWARFAPRANQSAGKTKPATTGKGNPWLASALGEIAAVLARSDTFLGERYRRLSRRRGKLRAIVATGNSLLTVIWYLLADPEARYRDLGSNYHDTRYHQRHQHNLIRELERISGQRVILSA

SEQ ID NO: 182531 - protein, 389 aa, unidentified
MPKPNDLSRSLSPFEQNSTLVAVIEMSLSTWLVAGIVPGLDRHPLKKLGTDEDALLRLLQRWRDEAVKVGRSITRIAVAFEAGRDGFWLARWLRARNIEAFIIHSTSIAVSREHRRAKTDRLDTELLKRAFLGWLRGEPDHCHMAAIPTLDQEDAKRPNRERENLMRERTRLVNRMKACLVRWGIRTFNPMLRQASERLEALRTPEGEPLPPNTQAEMRRDMARLRVVREQVKEIERERLLKLEAAPPAETGPQAMVRLIAQVIGIGIETADMLVNEILSRHLRDRRAVARYAGLTGAPDESGRRRREKGLARAGNARVRRGMIQLAWRFLRFQKDSALSQWFRARTADGRGDTRKTMIVALARKLLIALWRMATMGEIPEGVALRAAA

SEQ ID NO: 182532 - protein, 391 aa, unidentified
MTILVGIDVAKDKHNCFFMNSEGEVLAKPFTIFNNKEGFDFLYEKIQSVSSSDNIKVGLEATGHYSYNIIGFLLNKGLATFILNPLHTNLYRKSLSLRKTKTDKIDSKTIAMMLLSDVSLKSYSDISYHNEDLKSLTRYRFSKVEERAKLKTSLSRLAQILFPELEKLVPTLHMTSIYQLLEEFPSASAIASVHLTRLTNLLSKASKGHYDRETAIKIRDAAKNSIGSNMPAKSLELKHTIKLIRALTIDIGEIEAEISKMMDMIASPITTIPGIGRNIGAMIISEIGDFSRFSSPDKILAYAGFSPSIYQSGKLDNCYAHMEKRGSRYLRYALFHAAKLVCHWDKTFADYLAKKRAEGKHYYVAISHAVKKLVRVIFHIEKTKQAFLKAS

SEQ ID NO: 182533 - protein, 361 aa, unidentified
MRKIQDFVLKGKEVYVGLEDSKKSWKVCVRSGRLVAHETTMPAEYENLRNYFHNKFPECKIRVMYEAGFRGFELHDRLVADGWECVVTPPHTVTEEKCSKKKNDRNDCRRLAKNNENDDYRVCHVPERQLREDRQVSRLYGQLQRDINRVCNRIRKTMDFHGLDRHFPAGNWDRHKYKAAEEKITTMEMSESLRFTFNSLFLELKQLRSLQKDVVRQMRTLAKTDRYRRTVDLLKSVPGIGIQTAIRLALEWGDMSRFKTKEAFSAFLGLIPSDYSTGDQDHKGHITRQGNRNVRSWLVECAWLAIRHDPVLLEKYQRVVSHCGSGKKAIVAVARKLALRLRAMLLNGETYQVGLIECSNA

SEQ ID NO: 182534 - protein, 479 aa, unidentified
MTPSKDAFPEPCPPVPTVPEPLVLRPSSSLPLYNPHAAGIDIGEAEHWVAVPPDRSPEPVRRFGTFTADLDVLADWLLDCGVTTVAMESTGVYWIPLFELLEARGVQVFLIDPRQAKRAPGRPKTDRLDGQWLQRLHAYGLLAAAFRPADQVCVLRSYLRHRQMLLTYGAHHIQHMHKALQQMHLKLSQVVSDLTGVTGMAILRAIIAGERDPLPLAQLRNPHCQHSEDEIAKALQGPWRAEHLFALQQAIELDHFYPQQLTVCDQQLQAHLGTCADKSDGQPLPPKPRRHKKANEPRFDARTPLYRLAGVDLTTIEGIEEGTALVILSEIGTDMSRWPSVKHFCSWLGLSPQHKISGGKVLSRHVRPGAHRVAVAMRLAARTVQQARTALGAFYRRMRSRLGAPKAITATAHKLARLVYSLLKHGSAYVKQGLEAYESQYRERTVKAVARQAKALGYTLVELAVPATPGNDAVAPATP

SEQ ID NO: 182535 - protein, 482 aa, unidentified
MKKRSIYGQQSQELLRIYEEAGTSKKVLVGAIDYAKQDHVVMFCNGNGDILRKPFPVKNTPAGVDFLLAQVAGTCCYHKINPKHVFFGGEDCGSYTENFVECVRDHGWLVAGVNAEDAKKQRENLQASTDRLDLLGIARMLINRRGNCAPSQCGPYRNMRTLVRHRRKLVSLATEERNRMHGLVDRLCPGFLDEKKSGLTPFHKPSLRIMEDRFSAKQIAKRKRSTLAGLISRAGGQRPEELASKLQSYAATVLHAAPEYVPTMQLSLAQHVALYQCLQDNIDALERETAVWLAQTQGAFLMTVKGIGMVLAAGVAAEIGDPATQRPVNNLVSYAGIIPRVSQTGGPDTETYIGAVAHRCNRILKDYIVQSASHIGLHGVADLMEDHHRRDAAGQHANYGIARRYLRIGMHLMRHSTIYLPPALRGPNVPAETRVEFYQIFWPYLLEKWKKYNAHKIAFAPENPLGQWRNMIQELYGIDLKM

SEQ ID NO: 182536 - protein, 334 aa, unidentified
MNRLIERCAMLDVHKSQITACVRVPDDAGGRRQEIREFQSTTSGLLLLADWLRSWSVAVVGMESTGVYWRAVFYLLEGEFECRLYNARHLRHVPGRKSDVQDAEWGCQLVEHGLVRASFVPPRPLRELRDLVRYRKAKIQERTREVQRVEKTLQDAGIKLSSVASEVLGKSARLMLDALISGTHDPEILAELAKGSLRKKIPALREALQGRFTDHHVLLVGQMLAQIDFLDETIQTLSERVQELTAPFSRELELLDTIPGVDRRAAEMLLAEIGPDMSQFPTEHQLASWAGLCPGQRESGGKKGTSCMNRGLCHRPGRGGQSPPRASIASAIAA

SEQ ID NO: 182537 - protein, 349 aa, unidentified
MELDTIGIDLGKTVFHLVGLNRAGEVVVRRKCSRQQLLRFTSNLRVRLIGMESCGGSHFLGRALREQGHEVRLMPAQYVKPYVKTNKNDYIDAEAIAEAAGRANMRFVPIKSDEQLDMQSLHRVRDRWVARRTSVINQIRGLLLERGITFRKGRRHAEACLPSILEDADNRLSGLLRMLLIQLQGELRQLQSQIDEADARIAKAAREQEPCQRLMAIPGVGPLTATAVVASIGNGAEFRKGRSFAAWLGLVPKQESTGGKQKLLSISKRGSHYLRRLFVSGARAVLQCRDKQPLGLSAWLGQLASRVHSNVAAVALANKLARFAWAVLAKSEAYRPPLSVVSTEALACN

SEQ ID NO: 182538 - protein, 385 aa, unidentified
MSQLNDLSRSLTSLEQDNAIIAVIEMSQSSWLVAGIVPGIERHPLKKLEPNEGELLRLLMRWRAEATKMGCTITRIAVAYEAGRDGFWLARWLRAHDIETYIIHPTSVAVSREHRRAKTDRLDTGLLKRVFIGWLRGEPDHCHMVTIPTLAEEDAKRPNREREGLVRERTRIVNRMKSCLARFGVRSFKPTLRKAPERLATLVTPEGVPLPANTLLELRRDMARLRFIMDQIKEVEEARAQRLEQAPQEKSHAMVRLLARVIGVGIETADMLVHEILSRSLRDRRAVARYAGLTGAPDESGSRRQEKGLAKAGNARVRRGMIQLAWRFLLFQKDSALAQWYRTRTESAGKKRKTMIVALARKLLIALWRLVTIGEVPTGVVLRAA

SEQ ID NO: 182539 - protein, 356 aa, unidentified
MAKKEDNMITIGADVHLKTTTFSVMEKYQRIKKKKVNNSSGEILEFVRQFEGPKRYSMETSYNWPVFYELLKDEVGEFNLLHAKKLKSIIESQGKTDGKDADELAYLTEIGYLPRAHIAKIETRANRNLLRLYLRVSSSIAAMKNRIHAIINANVFYYERPGTFKDIFCERGKRYLREVELPKTYRYMVDELMQQIEFMQGVKGRLLKKIEELHVENEDLTILRTAPGMGGKVLSYVVMSEVDNVLRFRNARAAIAYAGLVPKERSSGEKIRRGRLRTECNWFLKWALIEAVTGAIFKDRNLRKIYKEAKVRTNTSSAKVKIARILMRTIYHMLKEKVKYDTNKVMGNSVAPIAGK

SEQ ID NO: 182540 - protein, 381 aa, unidentified
MLKGYDEVAVFLGLDVGKEGHHAVAQDRSGKKLLDRALPNDEAKLRELYGRMKAHGPVLLVVDQPATIGALPVAVALDEGVTVAYLPGLAMRRIADLHPGAAKTDARDAAVTANAARTMPHTPRALQLDDETIAELTVLSGFDDDLAGQITATSNRIRGLLTQIHPALERVLGPRLDHPAVLDLVETWPTPATLAAAGKTRVRTRLLKKAPRLGGRLTEEIFAALAAQTVVVTGTNAAGLVLPRLAAQLAALRQQRAEVAEKVEELVAAHPLSKVLMTMPGVGVRTCARILTEVVGKDFPSAGHLASYAGLAPATRRSGISIRGEHPPRGGNKVLKRSLFLSAFAALSDPVSRAYYDRKRAQQKKHNEALIALALRRTDVL

SEQ ID NO: 182541 - protein, 449 aa, unidentified
MLEPQEIEDEEYEQVLERVAAVDVAKASGMVCTRVPHSSRPGKRRTMVREVAAATGAVLELAEQLAGERIEMVTLEATSDYWRIWFYVLEAAGLRVQLVNARDVKNAPGRPKTDKLDAVWLAKLTERGMLRPSFVPPAEIRRLRDYTRLRTDLTRERTRHWSRLEKLLEDALIKVTAVASKTGSKSVRAMVEALIAGQRDPQVLAGLARGKMRARHDRLAGALAGRFDAHHGELARMMLDQIDALTTHIGTITSRVGELIEAIPGAWGVDADGVTGPGAGLGPGAPVLPAVARLDEVTGIGAAAAQVIIAGVGLNMGVFPTPGHLVSWAKLSPRTIQSGPKNRSGPAGDGNPYLKGVLGEAAASAARTATFLGERYRRIARRRGKLRALVAVARSILVIVWHLLSDPAARFGELGAGYYASRIDTGRKTRNHVRQLEALGYTVTLAQVA

SEQ ID NO: 182542 - protein, 351 aa, unidentified
MVETTTIGFDIAKQIFQVHGVSADNKVTVKRQLRRSEVLGFFGKLARCIVGLEACGGSHYWAREISALGHDVRLMPPSYVKPYVKRGKTDAVDAEAICEAVSRPTMRFVPIKTEECQAAVMVLKTRDLLVRQRTQVINALRGHLTELGIVAARGVAKVETLIEIVRDENDSRLPPAGRTALKTLADQIEALTERVDSLEREIVAEVRRNATMRRLATIPGVGPITAATIQALVPDPGVFTSGRHFAAWIGLTPKMQASGGKERLGKISKMGNPTLRSLLVVGATAVLRHARRGATLSFWLTALLARRPAKVAAIALANKMARIVWALLTKGGTFIRKNVVAEHAAADANMV

SEQ ID NO: 182543 - protein, 319 aa, unidentified
MTPAQVYIGIDVAKRRLDVALWPTGELRTVANDATDINELVTWLQTQRPALIVLEATGGYERAVVASLGAAALPVVVVNPRQVRDFARAIGRLAKTDTLDAEVLARFAQAVRPSPRPLPDAQMELLRALVTRRHQVVEMLTAERQRFASARPAIQGLIQKHIAGLEKELAHLEEEMDRTIRQSPLWRAKERLLRSVPGIGPAVAAVLLAEMPELGQLDRRQVAALVGVAPLNRDSGQHRGRRCIWGGRARVRAALYMAALVATRRNPVVKNCYQRLLAAGKAKKVALVACMRKLLTILNAMLRDGTAWQEVPAVHAIPA

SEQ ID NO: 182544 - protein, 415 aa, unidentified
MDVIVDRCAGLDVHKNTVMAAVRSPDGAGGRAEVVREFSTFTADLARLRDWLVEAGVTQVVMEATGVYWRPVWHVLDDHVGYELMLVNPRHVKNVPGRKTDAGDASWLTQLLECGVLRGSVWPTKDMARLRDLTRYRTKLIQERTREIQRVQKLLEDADIKLDSVITDVMGKSAREMLDALIAGQDDVEAMAQMARTRMRPKIPELRLALDGRFDDHHRLMLSMHLEHIDHLIAMITGLYAKEDELMAPFDEPAPRLLSIPGVGKRTVETIVAEIGVDMSRFPTSGHLASRAGLCPVNYESAGKRRSGKARKGNEALRTAMCEAAWAASHTRDTYLSAQYRRFKRRMGTKSEGKAIFAVAHTMIVIVWHLLHDETVYAELGPDYFDKRNDADARRRYLVRELEKLGNAVTLEPAA

SEQ ID NO: 182545 - protein, 355 aa, unidentified
MDSTKYIGMDVHKETISIAVLNSSGKLVMETIIETKASTVLEFVQGLRGSLHVTFEEGTWAAWLYDLLKPHVTEVLVCDPRKNALLKTGNKSDRIDARKLAELLYLNKLKPVYHGEHGVRTLKELSRSYLTISGDLARVMTRLKALYRSWAIACAGKQVYAPRYRSQWLGKISEAGVRRRAEFYYQQLDALRALRQQVRRELLAESGKHKASKLLCQIPSIGPIRAALLIAILQTPDRFRTKRQLWAYGGLAIETHSSADHRYVEGQLRPSKRPVSLRGLNRNHNHELKNIFKGAAIIAATKAGPFQEFYAALVAKGIRPEMARLTLARKIAAIALIVWKKGVCFDAQHLKPQTA

SEQ ID NO: 182546 - protein, 361 aa, unidentified
MNATTVAVDLAKSVFQVAVADANWMLIESHRLTRTQFERWFANRDVGLVVMEACGSAHHWARWLNRLGIEVRLLPAAYIRAYVKRNKTDAADACALLEAARCADIVPVRIKSVEQQALQGLHRVRSLWMSTRTARINALRGFCREFGLAVPAGARTGVEAMSRALVDPESPIPILIRGSMKLLIEEIRLLELRIAQLEKELTALAKQSPACTTLLSIPGIGLLTATAMVAATSGNVSHFKNARHFASWFGLTPKEYSSGSTRKLGRISKKGDRYLRMLLTHGARSVLRMASLARQAGRRLDGLRAWALEVQGRTNHNKAACALANKLARICYATLRDGTPFGEPVSRPNKKLERTAFAIAA

SEQ ID NO: 182547 - protein, 428 aa, unidentified
MNSMNERITRITPTTIIVGIDVAKEFHCARITDYRGVDLMKPIKVNNNIDGFDSLLTKIEKMRVKHSCSQVIIGMEPSGHYWRALGWYLKLHESKPILVGVNPYHTKQAKELNDNSQTKSDPKDALIIAHLIRNGNYFDTYLPADEFAELRILNTERQRIMKQLSRANNTLIALLDEYFPEYSTVWGNVTCPTSLELLKTYAFPTDILSATKEQLLEDIRSASHGNEGAKLMGEMIKAAERSVGVTEGQEVTRLRILSLIDELAYFEGKKTAVEAELKTVMDTLQLGEILQSMLGVGPIIAAAFLGEVGDISRFSTWKQVRSLAGLNLVENSSGMHKGKTKVSKRGRPYLRHMLYMAGESGILHNPEMRGFYRYLRDRKNNPLKSQQAVVAVGLKVMRILFHLAKTGEKYDPNKALGSFRLEQIASLA

SEQ ID NO: 182548 - protein, 358 aa, unidentified
MRIIGCDLHARQQTIAMLDSDTGELEEKTLENVGDTVREFYSALPGPILVGIEATGSMQWFLELMEELGIECRVGHPAKIRQAETRKQKHDRRDARLLLTLLAENRFPTIWMPSSEQRDLRTLLRHRHQWVRLRSRVQHTLQSMALNHGLRRGHALWNQAGQHALWTLPLAPHASERRAALLTLYPRLQGSIEELDKEVCEEVQQHPQARRLLTHPGVGPITALATEVFLGDPMRFSDGKALASYIGMIPSEHSSGGRQRLGAMSKQGNTLLRYLWCEAAMHAVGRDPELKRFYRRKLVQKGLGKARVAAARKLGIRLWIMLRDQIDYQEFCRRGKARQESGSVRAGMPDLNSGPAEA

SEQ ID NO: 182549 - protein, 344 aa, unidentified
MTYFAGLDVSLRSSNICVVDDQGELVAEGKTDAEVADIVAFLDELDVAIDQVGLEAGTLTQYLTYGLQFAGFEVICMEARQVKSALSAMRNKTDKHDARGIAQLLRSGWYSRVHIKSMASHRVRALLSSRRAVLAKCIDLEQEIRGIFKVFGIKLPPKLGHGSFDPKVRSVIEADETLSQSLLPMLDARLVLYHTFRELDNRTRKLARGDTICQRLMTAPGVGFITALTFKAGVDDPSRFRRSRTVAAHFGLTPRRFQSGELDLEGHISRCGDAAVRSTLYTAANAMLTRSSKWSPLKAWGMKLAKTRGHRRAVIAVARKLAVILHRMWIDDTQFRWGTEVARS

SEQ ID NO: 182550 - protein, 402 aa, unidentified
MITCGIDIGKGKHAVAVIDESGRQLVRTRFYDNTKAGAERMLAELLRHAEPSQIHVGMESTGNYWRAYYDFLKGRGCVVDVINPIVTSASSAGDIRGRKTDKRDAESIAEVVLRGKYACRRDEGLQERKLRALTRQRGFIVEERSAAKLHLASLVAEAFAEFESLFEDPYGALALAVLSKYPTASHLARARKSSLAKIVRANTRGKDADAEALRLIGGAKDSISLSCEITDALARCVTSSIRTIMDLDERVKDVEEAIKGFDPPDLASKLMAIKGSGKVMPMVVAAEFGDISRFRNNPKDGSEAGMHKRLLAYAGCEPRIRESGKWKGRKFISKRGSRQLRTALYLLANNIRQWDPYFKVVYERKIGSGKHHNVAVFYVVAKLIEVLCALYKSGRNYAAIQP

SEQ ID NO: 182551 - protein, 314 aa, unidentified
MDVSPLTVGLDVSKTEIAIATWPEGEAWTSATTSDALEQLVTRLVGLHPELVVVEATGGYERAVVAAGVAAGLPIAIVNPRQVRAFAKAIGQIAKTDAIDARVLALFAARVRPAARPLPDADTQALAALIARRRQLQDMLVAERQRLERATAKPVCRDLRQHIRWLGRRVDDVDADIDRTIQRSPAWRVKDDLLQSMPGIGPTVARTLLAELPELGCLDRRAIAALVGVAPFNRDSGRWRGRRVVRGGRPSLRKALYMSALVAARHNPALRAFYQRLRHAGKPGKVALVAVMRKLLTILNAMMKHQLKWRDAAA

SEQ ID NO: 182552 - protein, 426 aa, unidentified
MADTNHPIAALHWVAIDVARYWNAVLVETASGQRHRFRMANSAADMQRLIDFLLGLGGRCRVALEPTGDYHRPIAHRLLRAGFEVVSISSVAQSRFREAMFNSWDKNDPKDAAVILEMLKQGRTQRYVDPMLAGHHDIQELSKTYYQISRARTKVQHAIINHHVPLYFPEMHKYWTSTRNEWWVKFMIEFPTPAHVRQHTCQEFIELASPVVGRRVHRVAKLTEIWECCADSGALPHDPQSVAVQTFLFTLHHYQHLNDMRRQLEEQAQNLLASDADYINLMSLPGVGPINALTILAEAGNLRRFGHHRQFLKYCGFDLAKSQSGVQRGREQLSKRGNARLRLAFWLAAVVAIRARENSFREKYDRYVSSNPKDPDLKRKALTAVAAKMARVAYGIIKKNQPYRRFFEQSLPSGSIPLNRAVGAPT

SEQ ID NO: 182553 - protein, 390 aa, unidentified
MPKTTTGDRLELKPVNFGAAAIDIGSKMHMAAVNPARTEVPVRTFGTFTRDLHDLADWFKACGVTSVAMESTGVYWIPVYEILEQRGFEVILVNARYAKNVPGRKTDVSDAAWLRQLHSYGLLRGSFRPDAEIATLRAYLRQRERLVEYAAAHIQHMQKALMEMNLQLHHVVSDITGATGMRIIRALVAGERNPDVLATYRDVRCHSSIETIRAALVGNNRDEHVFALGQSLELYDVYQAKMLDCDRKLEALIAAMDNTGVKPFGKLSKPRIKTKQVNTPTFDVRAALYGLLGVDLTEIHGLGPSLALKLIGECGTDLRAWPSAKHFTSWLCLAPGNKISGGKVLSSRPRRSSSRAAALLRLAATTVGRSDTALGAFYRRWPHVPANPRP

SEQ ID NO: 182554 - protein, 457 aa, unidentified
MTKRKKIEMEIINSNAAGIDVGSKSHFVAVGQSLEDVKEFGVYAEDLTELCLHLKEYGITTVAMESTGDYWQNLYVELINHEIEVVLCNGKFTKHAKGKKTDVKDCRWIQKLHALGLLSGSFLPDETTEILRTYCRQRSNWIDLASSASHKMQKYLKLLNFRLDVVVKDICGLTGTRIIEDICKGNLDPEALSEHRHSNCRKPKEEIAKALHGNNRKDYLFGLKQEYESYQFYQEKKKDCDKEIEELVNQEINRDPDKVKLNTTDKPHKRINKNSPEIKDFNQVAFRYFGGVDFMAIEGLGHSTVMTLMSEVGVEGLFKFPTGKHFTSWLRLAPNNKISGGKVLSHRVPKGSNRLKIALRQSANAIGNLKDTHLSDFFNRIAYRKGRQAAVSATARKLAIIIWTMATKKVPYSPPTEYLFLDQKRRLKAVQRIKKNIAKFDIKPEDIGFNNSLNFSC

SEQ ID NO: 182555 - protein, 344 aa, unidentified
MDISVLGVDLGKNVCSVVGLDASGAVVMRRKVRRETLIALAEKLPPCVVGMEACCGAHHLGRVFAAHGHDVRLMSPEYVRPYIKAQKNDDRDAEGIAEAATRPTMRFVELKSQDQLDMQTLHRSRDRLVGERTALINQLRAILLERGMVAPQGKRKLEQFLAVLMDEQGGAGLSPRMIALVADARAQWAELDRRISAFDAEFVRWVKENEEARRLTTIPGVGAIVASALVAAVGQAESFDRGRDLAAWLGLVPRQFTTGGKPKLLGISKRGNKYLRRQLIHGARAALPYVAERDTPLGRWAKELISRAHRNVAVVAFANKLARIAWAVLRRGERFAAIGIPMAA

SEQ ID NO: 182556 - protein, 408 aa, unidentified
MDVMVERGCGLDVHQAMVVACLLTGPPGRRPRKEIRSFRTLTAALREMRDWLRENGCTHVAMESTGIYWQPIYAVLDGGFELVVGNAHHIKNVPGRKTDVKDSEWIANLLRHGLIRSSFVPAKPVRELRDLLRYRRKLVDACAAERNRLLKLLETANIKLSSVASDVFGVSGMAMLRALIAGTETPAEIAGLARGRLRRKLAELELALEGCIEDHHRYLLGMQLRRIEAAEHDIEELDARITAKLEPYDEQHQRLMQIPGVDWFVAAVIVAELGVDMTVFPSAAHAAAWAGLCPGNYESAGKRSGGKARKGNRHLKTALVTAAVAASRKTGGYLKDKYFRLRARRGPLRAAVAVGRKILIAAYHMLATGTVFKDLGADHLDKAYRQRTIRTLVRRLNHLGYKVALIPA

SEQ ID NO: 182557 - protein, 387 aa, unidentified
MYYIGIDISKFKHDCAVIDDSGEIVTPSWSFTNDAKGFSQLKLLLNSLDTETRIGLESTGHYGMNLKLFLESNNFSFMEFNPLLINRFVKSKSLRKTKSDSIDCMMIAHYLMTVEYKPYPSSFYHTEKLKSLTRFRDSLIRLRSRQLVELTNILDKVFPEFKPFFGSRFSVTALYILSNYSSPEKIANMNSKSYEALRKLSRGRFSTVDFAKLKQLAKNTIGTTEDYLLLQMQIVLDIYRQLDSKVDETGVSIKECVSDMNPPMLSVPGIGIESAAVILAEFGDFSKFKNASQMLSFAGLEPGYFQSGTSETTGKMVKHGSSYLRYALMNCAQTVVNYEPTFAMFYSKKRAEGKPHRVALSHVVKKLLRVIYTLQTKNIAYDADFVR

SEQ ID NO: 182558 - protein, 340 aa, unidentified
MPNDIALIGLDIAKTIFHVHAADEEGRVIFRRRLRREEVEPFFRDLPPCMVGLEACPGGHYWGRVIRDLGHDARLMPPQYVRPYVKTNKNDAADAEAICEAMTRPTMRFVPIKEERQQQILVIHRVREMLMRQRTHLICAIRGHLAEFGVVGPERAHRIGHLTDIIEDEDDPRVPPVARSALLFLVRQLRDTKEKLERIDEQLAQVARTVEPCRRLMTIPGVGVITATALVASIRDPSDFKSGRHFAAWLGLVPRQHSTGGVDRLGGISKRGNGYLRRMLIHGSRSIMRWRGKSWTWLARLRGRRPANVAAVAIANKTARIVWAILRYGGTYGAPAPRMS

SEQ ID NO: 182559 - protein, 421 aa, unidentified
MKSLTDPEFTAFVGLDWADKKHDICLQAAGCEEREFDRFAHQVTAIEKWALSLQQRFGGRIAVALELSKGPIVYALQKYEFLVLFPINPSMLAKYRDAFTPSGAKDDPTDAELALDLLLRHRERFTPLQPQSEQMRTLAYLVEQRRRLVNDKVRFTNRVGDALKQYYPQALDWFANRDTVLFCDFIARWPTLMQVKRARKTSLVAFFRAHNMRFPKLIEKRICAIKAAAPLTQDGAVITAHKLQAQVLVEQLRVTLKAIDRFDQEIAATAAKLPDYALLFKPLPGAGPVLAPRLLVAFGEQRDRFAGADEFQQHTAIAPVTERSGNKTWVHWRWQCSTFLHQTMVEWAGQTINQSFWAGAYYRQQREKGSSHNAAVRTLAFKWIRIVYRCWQTRTPYDESRYLEALRRRGSPLLKLLGETM

SEQ ID NO: 182560 - protein, 367 aa, unidentified
MAKAMASRGVGGELAAATVYVGIDWSYRRAAWCSLNQAGVIVGEGAVPADADGLARLVIERGTEVRAVVEMMSGAIWVRDQLVAAGWRVQVAHARKVRDVAPLACKTDKVDARVLAELARRDLVPELWIPSLDDRALRERLRRRMHLVRMRASAMNRIFGLQTQWGLRISLQRLRAPDAMTLLERQGMPAVWRRSIAEALEVIELLDARITPLDHELRPLARADARVVLLDTIPGIGDLLALTLASEIGDIARFSSPRKLIGYAGLAPKINQSGDRSRTGALSKAGSRTLRWAAVEAAQHAWRPANPWHQLYTDLAKRAGKNPAKAAVARKILIAAWHVLSRQQPFKPAGARRPDPASASSRCLLAA

SEQ ID NO: 182561 - protein, 444 aa, unidentified
MARKSKQHRLKIIHPHCAGIDIGSREHWVAVDPDKATDPIRCFSSFTDSLNDMADWLESLGVKIVAMEATGVYWIPLFELLDQHGFEVQLVNSRSTRQVTGRKSDVLDCQWIWQLMSHGLLKGAFRPADAVCRLRSVVRQRGTKVQEQARCIQHMQKALTQMNIQLDTVVSDLMGKSGTAILRAIIAGERDPHQLACLRDKRLRANHETVARSLHGHWREEHLFALTQALEHYDFLSQQIQQCDQLIAHQLIDLPQLADNPPKPTKILRNPQRTMSQQTALHQALYAVMGVDLTAIPTIGIETALVLASEVGADLSRFPSEANFCSWLNVAPPTCISGGKRLHGHPPRLCNRAGQALRQAASNARNSNSFIGASHRSRLARMDGASAVKATAHQLARLIYAMLTKGQPYVEKGMEAFETRTQERQLRALQRKAHKFGLALVEAA

SEQ ID NO: 182562 - protein, 355 aa, unidentified
MDNAKYIGMDVHKETISIAVLDSAGKLVMESVIETKAITIVQFIRGLRGELHVTLEEGTWAAWLYDLLKPYVHEVLVCDPRKNALLKAGNKSDQIDARKLAELLYLNRLTTVYHGEHGVRALKELSRSYVTISGDAARVMTRLKAVYRSWAIPCAGKQVYAPRYRAEWLGKIREAGVRRRAEFYYQQLDELRSLRQQVRRELLAESAKHQASKLLCQIPSIGPIRAAQLIAILQTPNRFRSKRQLWAYGGLAIETHSSADHRYVDGQLRASKRPVSLRGLNRNHNHELKNIFKGAAIIAATKVGPFQEFYAALVAKGIRPEMARLTLARKIAAITLIVWKKGVSFDAQHLKPQTA

SEQ ID NO: 182563 - protein, 352 aa, unidentified
MAVYSGVDLHVRTQTVCWMDSADGEQHEVTLDHERDDLRAFYSQFAAPAIVGVEASGYSLWFHRIIEELGHRLLVGDALAIRQFARRRQKNDRRDARLLLDLLCHHEFPAIHIPAPASREVLALLRYRHRLVRIRTMLRNGLQAVALSHRLRLGPKLFTVVGQQQFAALPLTPAFAIQRQHSLALLAALAQQILAVEQALAVRAHLDPRVARLRTHPGVGPLTSLAVVHALEPVARFDRARRIAAYCGLDPKEHSSGDTQRFGHISKQGNRLLRFLLIEAAHNAIRGDQDLRRFYFQLATRKNHAVAIVALARKLVLRLYRMLRDEIDYHQFRRRGRDARRARETHSQAASG

SEQ ID NO: 182564 - protein, 342 aa, unidentified
MLALLDCCCGLDVHKDVIHACILKGSPDEEPISIHAEFKAIQSDLQAMCSWLLENQCFNVAMESTGVYWRPVYEACEEFLDGYKCLMVVNAHHMRNLPGRKSDVKDAQWIATLLRHGLLEPSFVPERLIRNLREYSRLRRTLVAERTRYSNRLEKFLQAHGFKLSSVLSSILGVSGRRLLATLSQKGVLSPIDVSDAMDRRVKKSMEEIRSTVTGKLDYSERSYLKILLDKIDTLDGEINDILLLMQHLAEPYKIQLEQLDSIPGIDIAAALTIIAETSATPQDRFDSAKKIVSWAGLSPRNDESAGNIKSRKVTKGSPYIKAILCQVAWAGVKGNSFLRAG

SEQ ID NO: 182565 - protein, 355 aa, unidentified
MKDKYIGFDIDSKKTVACVVQQGRKDQYTTLATDLPQMQQYLQQQRQDGSRVHLTFEISGEAGYRYDALRAYVDTLTVSNPRKMTWIYRTSKKNDRIDSRKQAVLLSIGEVPKVHIPRREVRQWRVTIQQRRGIVNRIVSVKNRIRALLTANGLTRPLHKGSWWKTMNLLWMWQQAQGWDEATADHMWRVHLMNLLEELKLLTCQLQHVTRCLDRYLDAHPGGTLLMSIPGVGPRTAEAILAYTDDVQRFKRSKQYGAYFGLTPKLDESGQTRRLGHISKEGPSVVRWLLVESVWRAIQKSPALKAFYERIVGGQNQRKKVAVVATARKLLTIMRAMLRTGELFNEQLVSGGNAG

SEQ ID NO: 182566 - protein, 342 aa, unidentified
MKIHTIGIDLGKTNFHLVGLNERGEVVVRKRFSRAQLLRFTANRKVHVIGMEACGGAHYLGRALQEQGHAVRLIPAQYVKPYVKTNKNDYVDAEAIAEAVGRPTMRFVPIKSDDQLDLQSLHRVRERWVARRTAVINQIRGLLLERGITLRKGRRYLDEALPGILEDAEAKLSGTLRLLLTQLKLELDQTALRLEEAEALIEQTVQESEACQRLMQIPGIGPVTATAVISAIGNGAAFRKGREFAAWTGLVPREHSTGGKQKLLGISKRGNRYLRKLFVQCARAVLQQKTKQAPGLKVWLERMTSHTHRHVAAVAVANKLARMAWAVLATGEAYRAPLLAAA

SEQ ID NO: 182567 - protein, 400 aa, unidentified
MTGSRLWAGVDVGKEHHWICVLDTSGAVVLSRRCDNDEATIRAVITEIDALGETVSWTVDLTTAYVTLLLTVLADAGKPVRYLSGRSVWQASSVYRGGEAKTDARDARVIADQSRMRSDLPVLRPDDELIRELQMLTGHRTDLVADRTRTINRLRQQLVAICPGLERVAQISSDRGWVVLLARYQRPKAIRRVGAARLAAMLTGAGVRHAESIARAAVTAAKAQTVRLPGEDVAAELVAELAQAVIDLDARIRAVDAEIEARFRRHPLAEVILSLPGMGFRLGAEFLAAVGDPALIGSADQLAAWTGLAPRPRDSGKRTGRLHTPQRYSRRLRRVMYMSALTAVRCDPASGVYYQRKRAEGKRPVQATICLARRRVDVLYALLRDHRTWQPTVPVTAVAA

SEQ ID NO: 182568 - protein, 415 aa, unidentified
MVASYEKHKEEKVLISVGIDVSKEKSTICILKPFGEVLMPPRDFQHTKSDMKGLQSILKRYDEEIRITMEATGNYHLPIALFLRENGYYVRIINPLEMKRYRCQGIRNPKTDNIDAMMIAQYGIDFWNRPVKDYNVDAIRADLKLLGTQYASFMKTRQDRCLALGNIMDRTLPGMYGILDDFNKYTGKDKQSDFVYDFYHADKISKYSEGKFCEKYEEWSKKKGYIFKDKEARQLYSIAKDSIPTLKMSDNTKLIVREIISVLREVDDSLYRILNQMNELAKKLPEYETVLSMAGVGKSIGPRLMAEIGDPRRFHSAKALIAYAGIDAPPYQSGKFIGTERHMSKRGSRIMRKLGYEIMDSVNKHQKTYAEDPVCIYFLKKRAEGKHYRVAMFAAYNKFLRVYHSRVADVLNRAE

SEQ ID NO: 182569 - protein, 362 aa, unidentified
MRIIGCDLHARQQTLAMLDTTTGEVVKMTLAHEGNNVREFYSTLPRPVRVGIEATGSMQWFVNLMEELGIECQVGNPAVIRAAEPRKQKHDRRDADLILTLLVENRFPAIWLPSKELQDLRALLRHRHQWVRMRTRIQNALQAIALANGLRRGPSLWSRDGQNTIASLPLAPHTAHRRSELQAMYVKFESDIEKLNQRVEEQAGQRSGARLLMTHPGVGPITALATDVFLGDPRRFTDGKALASYVGIIPREYSSGGRQKFGGLSKQGNPLLRFLWGEAGTHAVRRDPELQRFYRRKLVQKGLGKARVAVARKLGIRLWIMLRNEINYNEFCRRGQKQQNSGVACAGMPGTRYGATSHRPVD

SEQ ID NO: 182570 - protein, 403 aa, unidentified
MFKFGIDWSENHHNLCIRNDKGAIVSQIEFKHTLDGFQRFDDERRKLGVPPSECLVAIETAFNLLVDFLLDRGYLVYLIPPQSTKAYRNRRRTSGAHSDDSDAALLSSILHTDLDSHRRLLPNSPLTQHILAQVRLIDLLRRSIQRQANQLRAILFRVYPQALGLGKLTAHINLHFLMAFPSAQEAQALSLPAFEAFCREHRYSRADFISRRYAHLMDPAPQANPIAVAAYRDQIRILAELLLPQVHRRTEALSSLTQLFSQHPDAFIFDSLPGVGQLLAPALLAKFGDHRDRFPTPASVQALAGTCPVTEQSGKRKIVFFRRGCDREFRRIAQHFARASIRQSGWALAYWRDVRPRCHSDSDAYRRLANRWLAIIWKMWQDGKAYDESYHIQQRAQRRRPKS

SEQ ID NO: 182571 - protein, 341 aa, unidentified
MNHPTTIAVDLSKKVFEVAVSWKAGRVAERARLSRGQMTRFFSQRPPATVLLEACGSSHHWARQLEGLGHRVLLLPPQHVRRYVLRDKTDRADATALLEAHRNEQIVPVPIKTLHQQALASLHRLRSGWLATRTARINAIRGLLRELGILIPQGPRHVLPGLTTALSDPSCPVPESLHEALLSAGREISELDTRIRAVERQLKTLADCLPATARLMTVPGIGLLTSTALVGFVGDPSRFPSGRRFASYLGLVPRERSSGLQRHLGAITKRGDAYLRTLLIHGARSTLYAAGRSRQPDRLRRWATAVRQRRGNNRAAVALANKLARIAWAVWTRNTTFRSPA

SEQ ID NO: 182572 - protein, 382 aa, unidentified
MDSTCSWSRIIGLDLSKATFKGCILYGEGFVQRKNFSGEMRQDESGYVLIKNTIRDGDIVLMEAGSSTFNLARYLLRNSGAVDVVVLNPANLRIIWDSQKKNDKADAMKIACIARDMRPEAWPRVAVPSEQEQSERAVITHWVFLKRQETMLLNRFFALFNSLGFPEIDKGRMRSSADFRVQTVNDLLSFNELSFTDALMLEQQISIVQNQLGLMEDRLRAICLNHPRQALSWLSIPGIGLINAATLIAYINDGSRFSRPDQLLNYAGMVPKQNQSGTVDVKGRITKRGCTAIRRSIVQGAQVVMMQPPTCDLTRYAYRRKKECPFNGKVAVAVANRMLRTGLALLHHDDLYRPMIENGFDRLRRKLAEYKLQALAAYLTRN

SEQ ID NO: 182573 - protein, 357 aa, unidentified
MEKLYLGVDLHKRSCWVTVLDADGHLLESRKLGTEKWELLEFFGKVKKPAALAVEATFNWYYFLNVVEPLGLELHLVHPWKTRAIASARIKHDKLDSRVLAELLRTGFLAEAWIAPHEVREQRQLLRYRVHTVQWATRAKNSVHGILNRNGIRSPRRSPFGAQGREFLGEVELPATDRWEVDGQLARLDLLEGQLSKLDREIRRRCGINPVAQALQQIPGIGPFIALLLLAEIGDVQRFPTAKHLASYTGLVPSLYASGEHRWGGAITKQGSSVLRWALVQAAHRAALSPRFQEFYQRQRERHGAGKATVALARKLAVITYYRWRQTLHAAGPPKVEKVRERSCAGAWSEDRPYRSD

SEQ ID NO: 182574 - protein, 454 aa, unidentified
MGKKKQPPRNLKQNKEVLGQINHNAAGLDMGSDSIWICVGEHMATPRVRTFGTTTAQLRASAAWMKEVGVDTVAMEATGVYWVPAYEIYEEQGLRPILINSRSIHSVNGMKKSDFIDCQWIQLLHTFGILQPSVRAERAMIELRAYMRQRRTLTEQCSEQILRMQKALTLMNVRLDQAVSDITGATGMLILRAIVEEEQRDPIELAKLRNPGCAKTEPEIVEALTGHWEDEQLFTLRQTLELWDFCQKLIRECDVKIDELVRKLPAKTEVDAAPSKAKPRKNQVSIDMRTVLHERLGVDLTLIKGLETLTILTVISECGIDLSRFPSEKHFVSYLGLAPGTRKSGHRVLSTRSRRTTNRAATALRLAAQSLLRSKTELGAFGRSLRARIGAEKAITAVAAKLARRIFLSLHTGRLYLDRGVDYHDEQHRNRSLASLRKRAQQFGLQLVPLENHA

SEQ ID NO: 182575 - protein, 432 aa, unidentified
MERIRANAAGIDIGARKVFVSIEGQEVKCFFTFTEDFEKLRDYLIEFAIVTVAMEATGIYWNILYDILEEAGLDVWLVDGSQTKQVPGRKTDVKDCQWIQQLHSYGLLNRCFVAESDIKELRIYQRLREDHIRSAAMHINHMQKALIEMNIRLPEVLNQIHGASGLAIIEAILKGERDKEKLLSLCNARIIKNKKDEVLKSLNGRYTKSGLFALKQALDSYNFYQIQIKQCDAMLGEVLKRIGKGKSDQTTSSERKLIRHHKPDIDNLGITMLKIFDGKDATTLSGITDYTWLRLLSESGTDLSRWETEKHYTSWLGLAPGQHTSGKMKKNKRKSGRPKAGQIFREVAQSLLSSKHIALGAFGRRLRSRKGSPVAIKAVARKLAIMYWRIMVKGTGFVEKGIQNYEDQLMAQKQRSLLRLAKELKMQVVNYV

SEQ ID NO: 182576 - protein, 351 aa, unidentified
MEGKYIGLDVHAASRTFAVIGESGKRQGSHVVETNGQALVEQLKTITGKRHVVFEEGTQSRWLYEILSPHAEEIVVAMVSESRGQKSDERDAFRLAEQLRTGAIKTRVFKEVGEYKTLGELGRTHAMIVQDVVRVQNRIKALLRSRGVAVAGKSVYSEQGRGEFLEKLPNASRAAATMLYAQYDAVEAVRRRAEKGLVAEAHRHPMSRVLESCPGLGPIRVAQMMPIVVSPARFRTNRQFWSYCGLGIVMRSTSDWIQNKEGGWRRAEVQKTRGLNLNHNRTLKNVFKGAATTVITQLPNEPLQQDYQRLIDAGTKPNLAKLTIARKIAAIALSMWKSKEKYDLTKHRKQG

SEQ ID NO: 182577 - protein, 357 aa, unidentified
MKERRDYILRNENVFVGLEDSKKTWCLCVRSGGVIVHETSMPAQYEVLRNYFHNKFSECQIQVMYEAGFRGFELHDQLVADGWECVVTPPHTVTEEKVQRKKNDRTDCRRLAKNLENGDYRKCFVPDKELREDRQISRTYGQVQADIKRVRNRIRRMLEFHGLDNGLPAGRWSGSAYTRLRQHLAEIEMSDSLRLSFETMFKELEYLRQLKKGLLLQLRKLARSDRYKRSVELLKSAPGIGMLTAIRLTLEWGDVSRFGRKEEFASFLGMVPSDYSSGEQERHGHITKQGNRAVRGWLVESSWVAIRHDPVLLEKFRRVLRSCGSKKKAIVAVARKLALRLRWALLSGQPYTVGVVE

SEQ ID NO: 182578 - protein, 411 aa, unidentified
MGRRCIGLDVHREFAEVAIWEDGIVRLAGQIATTPEALRLFAESLCELDEVAIEATCNTHAIARLLERHVGRVVVSNPMKTRAIAEAKVKTDKVDAQVLAELLAADYLPSVWIADDETHALRRQVARRAHIVRQRTRLKNRVQSILHRNLIPRCPAADLFGHKGRSWLAGQELPLDERQAAEALLRQLDFHGEELKLIDAELARVALRREEVKRLMTIPGVDATVALSIVAAVGDFGRFRSPEKLVSYLGLNPRVRQSGGQPASHGRITKQGRAHARGMLVEAAWAAAKTPGPLCAFYERVRARRGMQIAVVATARKLAVLCWHLIAKGEDYAYGRPSLLAQKLRRLELRAGMPSRRGQRGSTHAYNLKEVRARERALSEQGEIAYKQLVADWQAKRPARAGAGAATGVRL

SEQ ID NO: 182579 - protein, 372 aa, unidentified
MDERIKFFIGLDTHKDSTSVAACEASRDPARFVGTIGPDVRVLLKLLAKAGDPAQVSVVYEAGPTGYGLYRELCQRGYRCEIVAPSLIPRRPGDRVKNDRRDCARLAELSRAGELKPIWVPDESHEAMRNLWRAREDAVGMRLKSRQQLKAFLLRQARRYPGKTSWTKSHERWIADQRFDHQADRIALAEYQLAVQSAEQRVQRLTIALTEATQGWRFEPVVAALRALRGIDTVSAIGLVSEIGDINRFTSARQLMGYLGLVPSEHSSGNSIHRGSITKTGNAHARRLLTEAAWNYRFPARLSRNLRDRSDSVPEAVRSHAWKAQVRLCGRFARLSSRGVQVNKVCVAVARELAGFVWAIAHQVSPAASSIH

SEQ ID NO: 182580 - protein, 344 aa, unidentified
MDHFAGLDISVKDTSVCIVDDTGKIVREVKVASEPDALLPVLTNPTYHFKRIGLEAGPLSQWLFSALAEAGLPVICVETRHMRAVLKAQINKTDRNDARGMAQMMRAGLYRPVHVKTLRSQKLRMLLTHRKLLQSKSIAIENDLRGTLRNFGLKVGIVGKLKFEARIKELVESHPDLAALVDPLLIVRRVLRQQLAVLHRRLLAIVRDDEVCRRLMTVPGVGPVVALTFRATVDVPARFHNSKAVGAVLGLTPCKHQSGESERTGAISKCGDEMMRVMLYEAAQILLVRSTRWSWLKAWAMQIARRRGMKKAIVALARRLAVIMHRIWVDGTEFSWSRQEAAAA

SEQ ID NO: 182581 - protein, 319 aa, unidentified
MQETVELNVGVDVSKERLDVAVRPMGERFSVANDPAGHAELVRRLRGRPIARVVLEATGGYEAAAALALSRAQLPVCVVNPRQVKDFKRSTGQLAKTDVIDADVLAHFGEAIRPDVRPVPDEALRELSGLVARRQQLVEMRTAEKNRLEKKPARIVARRIQSHVDWLDREIERIEEDLDKTIKGSPLFSEKSGLLKGVNGVGPVVSSFFLAHLPELGRLNRKEIATLVGVAPFARESGKVKDGHRHIWGGRAHVRRLLYMGTVSAIRCNPVVQAFYARLLAAGKPKKVAITACMRKLLTILNAMVRDGAAWNPTFATAA

SEQ ID NO: 182582 - protein, 347 aa, unidentified
MLHAGLDLSRKKVDVCLLSERGEQLDQLAVPPDADALRSLARRIEESYRESVSAVIESMTGARFVHDTLEQAGWAVEIADAQKVKGLAPLACKTDTIDSRVLATLSQRDLVPAIWLPGPRVREERELARFRLHLVKHKSALKCRVHSTLINFGKPCPVTDLFGAEGRRLLARLRVPEPWRGNITASVALIDDLEDQITEINRRLKAGHADHRYIPLLMSAPGIGSVLAFTIAAEIGEIERFPSPEKLAGYTGLCPRVNQSGDKDRRGPLTKHGPTYLRWALLEATMHALKHPAYAQRYQRNKRRLGKQRGAKVAQIDIARRLSHAIWHMLSRNQQFAPRGAAFRLAA

SEQ ID NO: 182583 - protein, 410 aa, unidentified
MGLYCGIDWASDHHDVAVVDGDGRVLARGRVGNDAAGFGQLLTLLAEVADSARDPIPVGIETDHGLWVAALRETGRVIYPINPLAASRYRARYAVSGAKSDATDAVLLANIIRTDPDAHRPLPADTELAQAIRVLARAQQDAVWARQQIDNQIRDLLKDFYPAALAAFAKLPSGGLARADARTILAAAPTPAQAATLTPARLRRLLVKAGRRRDLDRDVSRLRAVFTDTYLHQPPVVENAMGIQLTALLRQFEAACAAVDDLAEAATAHFEQHPDAKIITSFPGLGNLAGARVLAEIGDDRTRFADARGLKAFAGSAPITRASGKKTVVTQRHIKNRRLAAVGSIWALTALRASPGARRHFDARRAAGDWNRQAQRHLFNKFLGQLHHCLQTGQLYNEHRAFPPPLPLAA

SEQ ID NO: 182584 - protein, 358 aa, unidentified
MQKYKISFKGQKIFIGIDVHKKNWDVAVAPEVGFVKRHSQKASAKVLIDFLKKNYPDGDYLAVYETGFSGFSTYYALKEVGIDCIVIHAADVPTTQYEEVMKTDKIDSVKLVRSLKAGLLKGIYVRERENIDDRSVVRVRKAIQKDLCRYKSRVKHILHCNGVEMPECFDNTNTHWSNAFMNWLKDEVTLLSSTRNSLDLLIKQVETIRMNLLAATRMLRNLSQTERYKSNCKRLVTIPGIGVIVAMSILTEIYDVKRFRNEKEFAAYLGLIPTCHSSGEKVVHGEKTFRGNKQLGPMIVEAAWITINRDAGLGSQYLRYRERMKPQEAIIRIARKLSNIILAILKSEKEYIPYHMGS

SEQ ID NO: 182585 - protein, 417 aa, unidentified
MEGLQPIYRRVAGIDVHRMLHVVTAVIENPNGTIEQTSREFGGFRRDCRALAAWLVELRVELVVMESTGVYWKGLYAHLERANINTWVVNAHFVKHVPGRKTDLNDSQWLAVLARFGMVHGSFVPPQDLRELRLLSRYRRKLSQMHASEINRLHKVLDDGGIKLGGVVSDINGVSAREMVAGLIEGVGIDQLLDMSRGALKLKRDDLQASLDGDLSARHLFVLKHLHAHINALEHELAELDAYILAAMKPYEWAHRLLQTIPGIDQIASALILIEIGDDMTRFGCADRLAAWAALCPGNDESAGKRKSGRTGKGNAIIRYILCECANAASKTKSTLAAKYKSLIIRKTHKKTIVAIAHKMIRLIYLMLTRKEAYHDPHVDYEAICAQKNAPRWIKQLKLIGKWPDKKTTIASDTVRS

SEQ ID NO: 182586 - protein, 296 aa, unidentified
MLYAGLDLARKRICFDARRPDGEIVDRGASPTDADGLDRLAQRLLAHDREVLAVVESMNGARFVHDQLELQGVEVQICDAERAKGLAPLACKTDKIDAGVLAELARRDLVPEIWLPDPGTRADRERARFRLHLVRKRTALKNRVHSTLITWGKPCPVSDLFGRQGRELLQRLSIPEPWRSTLQASLELIDALDGEITAQERDLRALGANHPYVPQLTTVPGIAWVLGFTIACEIGDIARFPSPKKLTGYTGLCPKVNQSGEHDWRGRMKKNGPKYLRWADRGSPARRPLGPLPRSL

SEQ ID NO: 182587 - protein, 360 aa, unidentified
MVKHIFVGIDLGDKNSVARIAVDREKTERFGFVNNRRGRARLFEEVKRRAQEVEGKIVMAYEASACGFVLRDEAENRGIPCWVLAPTKMEKSVEQRKHKNDDRDADDVVEKLRAHVLAGNRLPTVWVPDPQTRDDRELIRTRLELADKQTQLKSQIQMLLKRHGLEKPSGLGAGWTIRYWQWLEGLTELESFGWGGRQGLASLWRQLNSIEAEMQRLQKPVEQLADEPRHKRIVEELTKESGVGVLTAMVYRTEIGQAGRFRRGRQVGKFVGLTPTSYESGEQNDRKGHISRQGPPRLRKMLCQASWVHVCHDDGAKRIYEQLVSRNPKKKKIAIVAVMRRLAVRLWHRMRKVELELGMA

SEQ ID NO: 182588 - protein, 345 aa, unidentified
MTNMNYIGLDVHKKTISYCVKDAAGQVHREGKIGSTRRELDCWIKTLPQPRMIAMEATIFTGWIYDHLLPHAEKVKVAHPLMLRAIAAAKKKNDKIDAGKIADCLRCDFLPECHMVSTEIRDRRRILRYRHLLVRQMVQMKNRVSGLLMETGVEHNKQRLHKLGYFHELLSTNQEVHPCIRPLLKISRETIERCQKTEYALVSSLQRDPMLAERIKRLRTIPGVGPITALTWALEIGDVSRFQTIKQAISYCGLCGEEKSSADKMMRTPLSKQRNKHIQHVLIEAAKLAPRQCYELALVHEKEMQKGNRNRATLAVARKMVAYLLAVDRQQRDFVPAEERQAGAA

SEQ ID NO: 182589 - protein, 401 aa, unidentified
MESPIVSIDVSNGNSHYMCFIKNNKRFGKVKKIDHDIEGFKRLLEDIQKLEAETNEKVCAVFEATGVYTKPLERFLSKNSIKTYIINPLESARKRKEEIHNKKTDKLDPISISKVYYDKEEMMELKKKDETYNWLRKKNRLYEDQLNHLRKYKVTFQNQLSICFPGYLDLFKDGYSDIPMTILKKYPHPDLLKNKKAETVARYLEKNTCHTHRVSLEYALKIIEFAKKTYPGCEKDDVEVEIFKILLDKVIETQRECEKTLNEMITVASTLEEYRYISSIDGIGPNLAARIIAEIGDIEEFKSREALVAYAGLDPHIYQSGDQDGKHLKISKKGNKYLRCLLFLAVGCSIRGAKDNPVNRFYQKKKQQSNPLNSKAAKTACTAKLLKIIYGICKNKTTYER

SEQ ID NO: 182590 - protein, 351 aa, unidentified
MLIIGVDYHPSDQYIAFADTETGECGERRLNHSDGEAEKFYRELAARGVSVRVGMEATGYSRWFERLLAELGIEIWIGDAAKIKTKRVRKQKTDRNDAQLLLQLLLENNFPRIWVPSPENRDLRQLLWHRHRPVQMRTRIMNQLQALAMNEGQRRKKKLWSEPGRAQLEKLSLGTWASRRRKDLLELLDRMNPTIEELSAAVEQKAKRWPEVLRLMTHPGVGPLTALAFVLIIGTPERFPCGKQIGSYVGLIPEEDSSAGHQRLGHITKQGSSLLRFLLVEAAQAAARCDADWRRRYMHLALRRQRNIAKVAMARRLAVRLYWMWRNGWEYAQWVKFGSHAGQLGTGHGVN

SEQ ID NO: 182591 - protein, 468 aa, unidentified
MSEVRLGIDVACRADHRASLADGRGEFIWSSWKFRTTTTDLERLWAKIPDGTSVTVILEPTRNAWVPLSAWLQARGATVILVPPEQSADLRDYYNKHTKTDRLDSRVLARLPLLHPEGLRGIDNLGPAGSLRRAVRHRFSLVKRRTAASLRLDALVELLGPGWADSLGSATASKTALVILEKYADPRALKRLGRSRLAALLIRSSAGLWREDKADELLAMAQETLELWSCGGIDFAELAHDIASEVRVLRQLDDEITAADKRIAVLYDEADPKGIVASAPGLGPVLSAAILGNAGDFNRFANLAGVRSFTGFVPKIDQSGLVTGHKGITKAGDAVLRQALYMAADHARHIDPTLAQRYYRLVMVEGKHHNSALCSVSAVLITRIAACWRKGELYELRDEDGEAITEAEGKAACTVRFKIDPKVRAARRRNTPAKTLKNRVAGRGRKESARKVAPATDPPRKETSENVA

SEQ ID NO: 182592 - protein, 360 aa, unidentified
MTIVAHAHPFVIGVDTHARTHTLAVLVAATGELVATEQFPATDAGMNRAVAWAARRTDGELTALWVIEGVATYGARLTSAVKRSGFEVVEAAAMDARAHRGTGKSDPLDARRIAASVLSLEAEQLRRPRSDDGTRAALRVLVTARAHMTTERTAAVNALTALLRVAALGIDARKPLTTSQIGEVARWRTRIEDLATITARAEAVRLAKRVVDLNGELAANQVQMVDLIHASKAAVLLDTTGIGPVTVAVVYAAWSHAGRVRSEAAFAALAGVNPIPASSGNTIRHRLNRGGDRRLNRALHMAVITRMTHDPETRAYVERRRAEGRTTKEIRRCLKRYLARQLYRTLERLHTEPSAYPQAA

SEQ ID NO: 182593 - protein, 387 aa, unidentified
MSQTVAALTPAAVDYERTLVLAIEVSNQSWVLAAQVPGLPHTKAKRTVNPEAEALLAGIAGYRARAAATGCSIERVIAVYEAGWSGFWLARWLMRHGVEVHVIQPSSVPVDRRMRRAKSDGIDAELLLRTLLAWLRGEPRVCSMVPVPDEADEDARRCVRERSELIAERVGLTNRIGAVLATLGVNDYNPLLRNRKRRLTELRTGLGEPLPRNAHAKIDRLLARLELVLAQIAELERERDAVVETEASDKASKMIQQLASLRGIGVQSATVLVREAFVRRFANGKALGSYAGLASSPFNSGGIEREQGIGKGGNRRVRTVMVELAWLWTRYQPDAVQVCWFRERVGTTGRRVRKIMVVALARKLLIALWRFVTDGTVPEGAVLKPAA

SEQ ID NO: 182594 - protein, 402 aa, unidentified
MLTHLSLTLNEKQPNGRLNVGIDMGKRRWVANVLDTATGRHHSHNFTGTDCAGSARSLVERLVKTGREVDVIYEAGRNGFTPARELTELGARVTVLPVNKLEVVKAGKAAKTDRLDAHTLSERDARAAGFPRVWVPSVEDECRRRMIRERERLQKEIKRNNNQILGILERWPIGYTGGHRSAATWRAQLRTWQRSGAVPKELPESECSAIAAMVRELEVFEKNLAAWERRMEKELKNQRQTAEESGTHCAVDILRQYKGIGEEMAMALCWIVGDFARFGNGKKFSSLLGLVPMPWDSGKMRKCQGISKAGPADLRSLMIEIAWLWVRYQPDSVITRKWLPRLAEKGRSRKKAIVAVARQLAVAILRLLNEGIEIEGAVKNLPLVPPPARLGSPMHQNGRSGD

SEQ ID NO: 182595 - protein, 400 aa, unidentified
MGQPLWAGVDAGKSDHYCVVIDADGKRLLSRRVANDEAALLELINAITALADGGELTWAIDLNAGGAALLIALLIGAEQRLLYIPGRTVHHASGGYRGEGKTDAKDAAVIADQARMRRDLQPLRPGDDIAVELRILTSRRTDLVTDRTRAINRLRAQLLEYFPALERAFDYSASKAALILLSGYQTPDGLRRAGAARLAAWLRKRKARNADAVAAAAIEAAKSQHTVVPGQQLAAAMVARLAEEVMTLNTEIGDTDAMIEERFRRHRHAEIILSMPGFGVILGAEFLAATGGDIAAFGNTDRLAAVAGLAPVPRDSGRISGNLKRPRRYNRRLLRACYLASHNAIRTDTASRIYYDRKRAQGKRHTQAVLALARRRLNVMWAMLRDHKPYQPAAPNAAAA

SEQ ID NO: 182596 - protein, 463 aa, unidentified
MAKKAQKIKKKNRSELLIVNPDAAGIDIASNEYQVCVPEDRDSDHNRRFEAFTCDLEAIALWLYQCRIKTVAMEATGIYWVQLYIVLEKHGFDVVVCNAKHIKNLGEKKTDYVDAGWIQLLHTYGLLTESFQPENQIREIKDLSRHRERLIDKNNQSILRIQKSLDMMNIKVHKVLSDIKGVSGLAILQAIIKGERDPKALAKHVQPGVKASGEEIRKSLEGNWSVSQVFILKQNFDAYHYTLQQIKELDHQIEELLASYAQIREINSKQDGSDNATQTRELVRSKKKKDANNALHFDAEKYTFGIFGVNLTRIPGISGLTAFKLAAELGANFTDKFPTVDKFCAWLNLVPNNKGSGGKIISSKLPKRKNYAGQIIRVAANTLKNHKGYLGDVFKTKKARLGYNQAVIAVAHKLARIIYVMVDQLVEYDESLEQRKTQNNLEKKLDYLRRKLLLTEKQLSLCA

SEQ ID NO: 182597 - protein, 370 aa, unidentified
MKKDTLFVGLDTDKKHIDVAVAEPLPRGEVRYWGRTANMPASVDRMVKKLGHGGRELVVCYEAGPCGYGLYRQLTGKRGVRCLVVAPSMTPQRPGDRVKTNRRDALKLAKLLRAEELTEVWVPDAAHEAMRDLVRARSSVVSALTRCRQHISSFLLRQGIPYAGKPWTNKHRAWLGTLKFEHAAHRLLLAELLLALDQAQAQRDRLTDHIRELVPTWSLAWLVEALQALRGYDLINAAVMVAELGDPRRFAKPRQLMGFVGLNVSEASSGETVRRGRLTKTGNKRARKALIEAAWTYSRPAATTSKPATARLPAAVQQIADKARHRLSRRYRHLVRRGKLKQVAIAAVARESLGFIWAIAHAAAPLPAQS

SEQ ID NO: 182598 - protein, 347 aa, unidentified
MNYCGIDLAGVSSYAFVTDEKGTKLWSGPIATEKVAFERLVKKFAGGGLSIAIEAGNQTAWVHEELVKLGAEVTVVHPTKVKLIAESRRKTDKIDAKILCELLRLNALPHPVHMPGPEARELRGLLVARRQLVSARSKLSNVARGMLRQTGVRLPAGGLSSLAAWKRLLAGGFEQEHLLLIVSAYYDSFLALTKSIRELDRQLAQREKNEPRVQRLKTIPKVGRIASLTFLAAVDDVKRFSSSRKLVGYSGLAPTVRQSGERTEYGAISREGRSELRAVWVQIAHLVARDKTKATQPLRSWFNRVAKKRGKKTALVALARRLLVIAYQLLRTEQDFDVGRLKKKRAA

SEQ ID NO: 182599 - protein, 360 aa, unidentified
MFTERTSVGLDVHARSVAAAAIDGVTGELFQARLTPSHEHIQAWLADLPGPVAVAYEAGPTGFGLARALDAAGIRCVVAAPSKLQRPSGDRVKTDTRDAVHLARLLRLDEVTAVTIPTPATEAARDLVRAREDCRGDLMRARHRLSKLLLRQGIVYSGGKAWTGGHEVWLRRQRFDAPATAMAFESDFEAVLAVRARRDRLDAAITALAADSEFTPVVHRLGCLRGVSTLTAFALAVEIGDWHRFTGNTIGSFVGLVPSEHSSGASRLQGSVTKTGNGHARRLLVEAAWHHRARYVAGKTMRDRWDLASPAARARGDEGNRRLHHRWVVFTERRKRHTVANVAVARELAGWCWSLAVMDD

SEQ ID NO: 182600 - protein, 341 aa, unidentified
MHVVVVGIDLGKNCCSVAGMDASGRVLFRKRVSRSGVVLLVRKHAGCVVAMEACCGAHHLGRVFAEAGHEVRLMSPEYVLPYVKAQKNDDRDAEAIAEAAMRPTMRFVPIKTLAQSDLQSLHRARERLVAERTALINHLRALLLERGVIIAQGRRKLEKEVRELLGGDTSGLSTRIRALVGDLVDEWTRLDERIAAFDAEFVALARSDETTRRLATVPGIGPLNATALVATVGDASAFAKGRDMAAWLGLVPRQATTGGKPRLLGISKRGNRYLRKNLVHGARAVLPRLAERDTPIGRWLRALLSRQHKNVVVVALANKLARICWAVLAGGRGFSEAAALR

SEQ ID NO: 182601 - protein, 339 aa, unidentified
MELYSAIDLHSNNSHVAIIDDQQNRVFYRKLANDAKLIASAFAPYRERLKGIVIESTLNWYWLADLLIEKGYSVHLANPCGIQKYSGLKHADDKHDAFWLAQMLALNILPEGYIYPKEDRPLRDLLRKRAHLVRVRTSLVLSLQNIVMRNHGVKIRSNDLKKLTQDPVAELLKDQEELALAGRASKETIDFLTRQIQRIEKAVQSKAVWKEPFSKLLTLPGVGDILGMTILLETGPIERFKAVGHYVSYCRKVSSRWTSNEKTKGKGNTKNGNRYLSWAFSEAADHARQTHGPSRDFYNRKLNQTNASVAHNALAHKLARAAYYIIKDHVEFMEDKMFR

SEQ ID NO: 182602 - protein, 381 aa, unidentified
MVVPEQPLEPGLAPEFACARQGESMAPAFYVGIDVSKSQLDVALGQSTTRSFRNTTAGIDDLIAWLGQQEVARIVIESTGIYSSLAATRLTRAGFAVCVVQPGRIKQFARSQGQLAKTDRIDARIIARFGEASPELVVYQEPRLQQARLRALVDRRDQVVEDRVREEGRLEACQDAIIRKRLETSIKRLRKETVSLEKQIAALVGKDPDLGSSSACLQTQTGVGACTAAVLMAHLPELGRVNRQEIAALAGLAPYNNDSGSRNGKRSIFGGRERARGALYMAAVTAARSDEHLSGFYRKLRAAGKAAKVALIAVARKLHRPSQLADGSASCLPARRTGDPRMNTRRESGPARRGPSDPGERRGQTEPRSRAGPDGHGPEIP

SEQ ID NO: 182603 - protein, 355 aa, unidentified
MNKVNSNFEGQTIFVGMDIHKSSWNLGIHLGDMFVKNVHQKPNPHIMASYLKQHYPGAQYKAAYEAGKFGFWIQRQLMALGIECLVVNPADIPKSQKDTLQKTDPRDARNLSLRLQSGVLHGIFIPDEQQEADRLFFRHRKRIWKDLCRCKNRIKGMLAFSGIDIPGQYDNASWSHNFINWLKALDCKQTSRRRALDYMIAQMEYLRKELLSLSNELRKMMREKRYNKNYYLLRTIPGIGPLTAASILVEIGDVKRFETFYHLNSFVGLLPMEHSSGEVDNKLRLTVRKHRQLRSDLVESAWTARRTDPAMALYFQEQIKRKDSKIVIVKIARKLLNRIRFVLINQQPYEMGIVK

SEQ ID NO: 182604 - protein, 381 aa, unidentified
MRIVALDLGAKKIAYCEISDGKVIDRATVRSLEELETRLGPQAENACVAIEACREAWFVHAVLTKWGNKVLLVDTTRRKQIGIGQHHRKNDRIDAEALARAVEEGRIPLAHLLSPHRQNLRRELSVRRALVETRAQYITTIRGLIRERGELIRSCDTEYFLANVRKSRLSDEVRATIKPLLAILEPLEQQLADVEQRIEQLCAEEPAINLLATAPGVGMIVAASFVSVIDEAKRFDNAHKLQSYLGLVPSEDTTGGKRRLGSISKQGNGYLRALLVQAAWNILRRDDQNDPLRRWADAVVKRRGKRIAVIAVARRLAGVLWAMWRDGTVYDPELVARAGARGLRVASQKLEFRAATLERGAAKIHRRRTRPARKKGGASSR

SEQ ID NO: 182605 - protein, 444 aa, unidentified
MIRKVMEAIYQSVGGLDVHEETVVACRRRLISDGQAELEIETFRTTSAGLRELLDWLKAWGVTHVAMESTGIYWIPVWNVLEGQFKLVLENAQHLKKVPGRKDDQIDAEWIAQCMQCGLLRGSFVPGAEVRQWRQLTRHRTKLVDQRTSVVNRIHSVLEQGNIKLSNVATDIMGVSGRAMIAAMSKGESDPARLAALAKGRLKAKFEELSEALDGQLNENQRWMLKRLLEQVGALEKEIEVYSERIGEQMLSYRGQLERLDTISGVGQRSAENILAEIGPDMDQFPTDDDLVSWGALCPGKNESGGKQRSSRTPKGNKWLKRTLTEAGWAATLERDSYLAALYRRLAPRRGKKRAIIAVARTILQSAWHILKKDVDYKELGGDYFEHLNEEKSTKYFVKRLEKFGYEVVLKPKQAEKARVEPKPKKIKKAAVGPKLKKAQEATT

SEQ ID NO: 182606 - protein, 427 aa, unidentified
MSCRPPAPALNEQRRRSRHGIIGLDIHRAFAEAVAWDDGKLKRLGRVDMRRHLLEAFAKKLSKEDVVVVEATGNAASVASVIAPHVKKVVIANPKQVRIIAHAKIKTDTIDASVLAQLYASGFLPEVWIPDEPTQALRRQVTRRNQIVRQRSRLKNIIQSILHSHLIPSCPHADLCGAGGRAWLFHQVLPEDERLAVERHLREFDRLGEDLKVIERDLARSALGNEGVKRLMTIPGVDMVVALAIAAAIGEVRRFDRPEKLVGYLGLNPSVRQSGPGPAYHGRITKQGRGHARGMLVEAAWAAARTPGPLRAFFLRVRARRGQHVAAVATARKLAVIIWHLLSKGESYAWARPALHARKLRDLELKAGYRAERGQKGAAHAYNIKSHRDQERRWVEQAEAAYARFVAGWNPRGPKRARTGAVNEVRG

SEQ ID NO: 182607 - protein, 419 aa, unidentified
MGETITWVGIDAHKKTLVVAIRYPGKDDAEELEIANDERSIRKLVHKLERDARGREVRICYEAGTCGYTLQRRLESSGRVVCEVIAPSLIPRKPGERIKTDRRDARKLAELYAAGVLTAVKPPTPEQEAVRDLCRCREDVRADLGRCRHRLVKMLVRRGHVFNSTSRLWSEAHRRWMAGIAFDDEVDRVVFAEYKLAIEQAERRLRAMDSEIEKAARLPLYRDHVAWLRCFRGIDTTIAMIFVAELHGIERFESPRALAAYLGLVPSLYASGESARRGAITKTGNGHIRRALVQACWQYRHRAHVGPKLRERQKGQPERVLTIADEAQRRLAGRYRRLAARGKHHNKIVIAIARELVGFMWAALRDDHELARHGARNSARLEGPTRAPRRAQPETATRTTLRGPKQASDARHERRKRAS

SEQ ID NO: 182608 - protein, 299 aa, unidentified
MVLTNQKAREMAAEKFYRDLAAQGKKVRVGMEASGQARWFERLLAEMNFELWNGDAAEIHRKRERKQKADRQDAQHILRLLLKDDFPQIWVPNCENRDLRQLLWHRHRMVQARIRIMNQLQAVVLNEGLRSKKRLWREHGREQLEWFRLAPWARRRRQDLLELLDRLNPTIAELSQAIEQEVEKCPAAQRLMTHPGVGPLTALAFVLIIERADRFQCGKQIASYLGLVPLEDSSGNRRRLGHITKQGNSLLRFLLVEAAQVTVRSLPEWRSKYFYPAMRRGRKIARRDGAKNWRFAFTG

SEQ ID NO: 182609 - protein, 370 aa, unidentified
MLYLAIDQHSKQITVCVRNEEGDTVLSRQVSTRPEKIRAFFQHLIEMDSEFMALLEVCGFNDWLIAELRQWKCREIVLIHPDKPSKKKTDRRDARKLADLLWLNRERLAAGQTVHGLRRVYIVTQRERENRQLTALRRTLGQRRTRTLNKIHRIVNCHNLIWNYPTKTFQTQLGRRWLEKLELPEIDRLEMDVLLQEWKAWDEQIVQVDEKIAERASQPDSGEVFSATQILMTAPGVSHYSGLTLASRIGPVERFPRPRSLANYFGLTPGCRNSGNNQDRLGSITKEGSKIARFILGQLVLHFLKKDPKMRSWYRRIKTRRGSKIARVAVMRRITCVFWHMLTYREAYSIGGPPPRLRQPHPPAASCDAA

SEQ ID NO: 182610 - protein, 457 aa, unidentified
MQVIYQRCCGIDIHKKMLVACLLICTAQGVQKEIQTFSTMLQDLYRLRDWLKAKQCQAVAMESTGVYWKPIWNVLEGELELLLCNAQHIKAVPGRKTDVKDAEWIADLLQHGLLRASFVPPCPQRELRDLTRYRSSLAADRARLVNRIQKTLEDTNIKLTSVASDITGHSGRAILKAMLAGEQNPQKLAELARGRMKEKREQLAQALQGTLGEHHRFLLESQWRQLDFFDHQIRELDQEIAHRLGVPSGSEDPDPADPSGDLPAKEEGRETPVPSASCESEAPLSVQLEAPKPLSSAEAIRILDEVTGINVRIGEIIVAELGLQMDRFPDEAHLSSGAGLCPAANISANKRLSTKTGKGNRWLRQALIEAANAAARSKGTFLGAYYQRLRKRMGHKKAIVAHRILVIIYHLLKEQQPYRELGPDHVDEKATEVAKRRALRTLEYLGYDVTLQSTEVA

SEQ ID NO: 182611 - protein, 350 aa, unidentified
MNNSLIPFDPCGIEVSHLTLVVAWRCGDHDEPPREFPNTAEGHQGVLRFLARSGRRVQVAVESTGLYGLDLALALHQAGVAVMVANPRAVRHFAQALLQRSKNDQLDAVVLREFAARMPFQPWRPPSAAALKLVSVARRLEALTAMRAEEKNRLHAASLSEALPALIRRDIQRSIQTQQRAIDRLTRAAQEFIAEDPELARRYELLLSIPGFGATSAVHVLAELNLLPANMDVRQWVAYAGLDPREYSSGTSVHKKVRISKAGNKHLRRALYRPALVVVRCQAQVRAYYAHLQARGKTKMQALVATMRKLLHAIYGMFKHDQLFDGHKVYAALDVTLTALAPDPQEVLCP

SEQ ID NO: 182612 - protein, 411 aa, unidentified
MKDSRKRYIGLDVHKHYLIALGVDEDLNVVLPARRVELSHLESWMKKTLTKQDAVVLEMTTNTWQLYDELCVHAGSVLVVHPPHVALITRSLVMNDKIAASILARLLAKGLLVGIWIPPQEIRELRGLVAQRKKMTGLATQAKNRLHAVLQRHHLAPPAGNPFQEAQSAWWLSLPLGKLEKVNVQSDLETLRFAESQRDRLTSMMEEMASQEEQVTRLLQIPGVGVVTAVTVWAAIGDIQRFADPQHLVGYAGLGTKVHDSDMTSRSGRITKAGRRDLRVVLIEAAQVAANSHPHWKAELARLQPRLGRNKAIVAIARKLLVTAWYILAQHKTDRFAQPEAIAQKFLKFAYQLGKENRPAGQSAAQFVRQRLDALPLGQELTRIAWGSKKPIPLPPSTNKVSDVPNGALAP

SEQ ID NO: 182613 - protein, 458 aa, unidentified
MPKNSSKKAKSQRSRKRALLNKVHLNAAGIDIGADTHWVAVPEDRDQKPVRSFGVFTNDLFALCQWLKECGIETVAMESTGVYWIPLFQLLEREGFEVCLVNARHVKNVPGRKSDVKDCQWLQQLHTFGMLRGSFRPQAQMCVVRSYLRLRDTLSKDCNSLVQRMQKALIEMNLQIHRVISDITGLTGMNILRAIVAGERDGVKLAQLRHPQIRSSAQQIAKALEGDYCPEHLFALQTELELYDSYQLKIMQCDKRIEEALESFEPKVQVAVPDLNRLHSAQKRLEALRRHHLEQMTGADLTKLPGLDVLAVQRILSEVGLDMSRWPSEKHFCSWLNVAPNNRISGGKILSTKPRKNANRAAAALRLAAQSAMQSKTAIGAFIRRIKLRLGAPTAINAGAHKLARLLYRMLKYGKAYVETGQQTYETLFKERTIRNLQRKARELGFHLTPAVPSAVVS

SEQ ID NO: 182614 - protein, 410 aa, unidentified
MQTLVERGCGLDVHQATVVACLLIVLKNGRVQKQVRTFGTTTRELMGLREWLLSESCTHVAMESTGVYWKPIYAILEGAFEIVVANAQHVKKVPGRKTDVKDAEWIADLLCHGLLRPSFVPPSPIRELRDLTRYRRKLVESRTAERNRLLKLLETANIKLASVATDVFGVSGLLMLHALVEGKATAQEMAELAKKQLRKKIPELELALEGKVEEHHRFLLRVQLRRLRTVEEDLGILEQRIQEKLKPYAAQFTLLQEIPGIDETLAAAIIAELGVDMGVFESVSQLSSWAGVCPGNNESAGKRRSSRIPKGNVYLKTALVEAANSAAKAKGTYLRDKFYRLKARRGYKRAAVAVAHKILVAIYHMLSHQVCYNELGDVYLDNLNKHHVTRNLINRLERLGYAVTLQQKAA

SEQ ID NO: 182615 - protein, 355 aa, unidentified
MSQEKYIGMDVHQATISVAVLDSKGKLIMECILETKAAAILEFIQGVRGTLAVTFEEGTCAAWLHDLLKPHVSRLVVCDPRKNALLQDGSKSDRIDARKLAELLRGNQLSAVYHGDHGVRTLKELGRSYLTITKDLTRVMSRIKALYRSWAIPCSGTTVYAARHRSEWLAKISQPGVRLRAERFYQQLDMLQALHQEARRDFVVESHRHPAVKLLRQIPSIGPIRAALLVALLQTPQRFRTKRQLWAYSGFAVETHDSGEYRYVRGKLLRNRERISVRGLKDNYNRDLKNLFKSTAISASTRPGPLHDFYLALLAKGMRPTMARLTLARKIAAITLAVWKKGVDFDAKQVDQQAA

SEQ ID NO: 182616 - protein, 461 aa, unidentified
MLSPKSRHLHVGVDIGSRCHAVAIGLSDGRLLEEFEIPHSAAGFEEFFSRIETQAKDHPFPVAVAMEGYGGHARPLDGLVAERGWLLFNVNNLKLARFKEIFPAAAKSDRIDTRKTLELLQLREHLPLAADVLQEVMARPEENDILKRLTRRRRRLVNERVGLTSVLQSDLQAAAPGLVEITREVANLWFLNFLTCRKDLRKLAGVRRASLLKLPAIGVCYADRIQTWQTSACFSRDAGLVGEMIHQDALRVLELKRQIKALDDKIARVAETSSSARQLASIPGFGDVCSAELAGEIGTIARFKSEASLALYLGMATLDHSSGKRRGSKSPKHVNTRAKAAMMTAVDRHRKEVAQSQRYYEKKRSQGKMHNQAIRALGRHLCRVIFKMLSQDRPYRIDTQGDLPGAPDETIHPQSCPDNCHRTGDPPAVDRENGPSKDEPFKVIPSPLAAKGSPACTAGPP

SEQ ID NO: 182617 - protein, 399 aa, unidentified
MNSVGIDISKGKSTVAIMRPFGEIVASPFEINHTEEDFEKLVSQIKSLKGESRIVMEYTGRYYEPLANYLYNSGLYISVVNAILIHDYDNSSIRRVKTDKKDAIKIANYGLNRWLDLPEYIPEEELRQALKIYNRQFTQYTKLKVALTNNLIALSDQTFPGIDGLFGKTPRKDGHQKWIDFIKDYWHKDCITTKTIKSLERSYQKWCSKNGYHYQSNKVNDIYQLANQTVASMPANSNTKLIITETAKELISLIDALEKIRQEMNRIASQLPEYPAVMSLPGVGTALGPQLIAEIGDIRRFHSRKALIAYAGIDSSPHQSGTIDIKSRGISKRGSSALRKTLFIVMDCILRHQQIDDPVYQFLDKKRAEGKHYYVYMIAGCNKFLRIYYARISAYLNSI

SEQ ID NO: 182618 - protein, 356 aa, unidentified
MVTTRVASIQGFVKGFEAQPFSIGIDVHKRSYHVAIRRVDGKAMSWVCPSDPEGFVEQIHRLSIRVSAVAYEAGPTGFGLARTLRSAGIETLMAAPSRIPRGVSAGAKTDRLDCLRLADYAAKGMIRSIAIPTPQQEAQRSLERRRHDIVDSLRRSKQRIKGFLLFLGLPEPEETERWRRGAVEALLALPLDPHARLTLESHLRELTFYQSELSEVEEQLRQMVRQHSHVLTCLQSVPGVGEVVATTFMLELFGPERFHRAEEVTSYLGLAPMVRHSGDKAPPGRLRPVGQSRLRSLLIEAAWMWRQYDPYARNLYNHFLSRMGIAQKAIAAVARKLAVILWRLYVERRPYRPAVV

SEQ ID NO: 182619 - protein, 349 aa, unidentified
MNTTPIGLDIAKSYFQVHGVDAHGKPTLQRQLRRAQVVTFFANLPACLIGIEACGGAHHWARKLAELGHQVKLMPPQFVKAYVKTNKNDARDAEAICEAVTRPNMRFVAVKTVAQQELLMLHRVRQRLVVERTAKANQLRGLLAEFGIVLPQGLHRLRGVMPEILGDAENGLSCLLRERFSHLFSHLRELDATVIEWQRQIVLWHRENPLSRELEKIPGIGPLGASALVASIGDVRTFKSGRQLAAWLGLVPRQESSGGKTRLLGISKRGERYLRTLFILGARSVLRQSKRNPAQAASSWLGKLSARRHPHIAAVALANKNARIAWALLTHGREYRANYRSTRPAMAAG

SEQ ID NO: 182620 - protein, 403 aa, unidentified
MKRSEIARYDAFLGIDVGKSSNCAVLLDRDCDGPLMRREVAQDEGEIRALIRDAAELGELLVTVDQHGAFGRLAVAVARDMGVAVAHITPRKFKQVAETYGEGKSDAKDAFVIADVSRSQPRNIDPVPERAEVLAEVKVVTSARDDCVRERTRLYNRLHDLIAQACPALEALFSKDKLHNDLEIRLVAKYGGPSGFRRAGRARASRWAGSLKWHKTDGPAKVAEVFGAISSQTVALPAGEAIERQARKVAARIIELEAEEAELNAELERLSGSIPEVAILRSIPGVGPVYGATIAAEIADVSRFRDAAHLASYAGVAPVRETSGTSVDKKKRRKGGNRRLKNAVIRSAQCAVQLDERAAAYYERKRAEGKGHKQALRALARRRVDVIYALLSNGTFYEAQHTA

SEQ ID NO: 182621 - protein, 343 aa, unidentified
MEYFVGMDVSMASISICEIDAKGTVIREGKVSSTPEAVATWLEESGRGFARIGLEAGPLAPWLYAGLSSRGLPVICIETRQMKAFASASPVKTDRRDARLIGQAMRTGLYRATHVKTARSQELRMVLTHRETLVHQVRQLSNTVRGTLKAFGLKVGMARGRLFAARVRELTADNPHLSAAAEPLLLARQALLEQLDKLDRQVHAAARDDSVCRRLMTVPGVGPVTALAFRTGLDVPERFQKSVMVGAHFGLVPRRYASGEQDRSGPISKCGDAMVRWLLFEAANALLTRTRRWSWLKHWGLAVAKRRGMKRAKVAVARRLAVIMHRMWIDGTDFQYRKEETAI

SEQ ID NO: 182622 - protein, 368 aa, unidentified
MAKRSTFVGLDVHKESIAVAIAESGRFGEVRAYGTVGGELEALEKVLRVLRAPGRTLHFVYEAGPCGFTIFRHLRQLGEDCAVVSPSMTPKRAGDRVKTDRRDAMTLARLHRAGELRAIYVPNENDEALRDLVRAREDAVEVTREAKQRLKAFVLRHGLRYRGRAGWTIPYRRWLAGLTMSEPAPQMALQEYLATVDEAEQRVTRLTEQLRQLVPAWRWAPVVTALQALRGVSFITATGLVAEIGDIRRFAHAPELMAYLGLVPSERSSGPLTRRGRITKAGNPHARRLLAEAAWAYRSIPRIGRVMQQRQEHLSAPVRALAWKAQLRLCGRFRRLSARGKPRVVIATAIARELTGFVWAVAREVPAP

SEQ ID NO: 182623 - protein, 341 aa, unidentified
MSDYSYFCGIDLAKNHFSLHAVDQNGKVILHKSVTHSKLLTTITNMPLMRIGVEACGGAHYWARTLNKLAHDARIMAVKYVVPYRTKGKNDLNDAVAICEAVQRPSTRFVPVKSPEQQAILSVHRMREHWVSERTALMNRMRALLSEFGLIIPVGRSSLMKQIPLMLEDAENELPHLARTVIADAYHHLGELNQRIADTEQVFDSFAKVSANVQRVMKVRGIGPQTATAILASIGNGSQFDKSRDFSAWLGLVPKQYSTGGKPRLGRITKHGDKYLRTLLVHGARTVIANLGDKQDKLSQWCRGVLERRGMNRAIVALAAKNARIIWSLLHNQTEYENYAA

SEQ ID NO: 182624 - protein, 391 aa, unidentified
MVCVGIDVAKDKHDCCILDSDGMVRADCFTIPNNMDGFKQLLQTIRNCTKKSDKIKVGLEATGHYSYNILGFLLDNGLPTYVINPLHTNLYRKSLSLRKTKTDRVDARTIATMLLSDVDLKSYTNTAYHNEELKSLTRYRFDKVRERAKLKQSVSRLVTILFPELEKLVPSLHIASVYSLISEYPGAKQVSEVHLTKLTNLLTTASKGRYGKDKAIQIRDAAKTSIGSVMPAKSLELKHTIKLIKELTSEIDEIEDSIQQIMDELHPPILSIPGVGIQSAAMILAEIGDFSNFESPDKILAYAGCSPSTYQSGKLTNCYAHMEKRGSRYLRYALYNATKYVCHWNPVFAKYLAKKRAEGKHYNVALSHATKKLVRLIYALQKSGKAYLTAA

SEQ ID NO: 182625 - protein, 359 aa, unidentified
MSTITLGVDLAKSVFSACEMDGAGHVRRRQDLRRDAFIAWLPQLPAGTVVAMEACSGAHHWARRCQAYGLQPKIMAAQFVKPFRKSSRSKNDRADAEAIATAARQGNMRFVPVKDIDQQVRLSWHRVREGYKAESLAIGNRIRGLLAEFGVIVAQSDRALRRRLADLDAQLALPAEFKELLRDLADHWTQVRLHFDACDARIEAHARQDARCVRLRAMVGIGPITADAAVATVGNAREFKQGRQMSAWLGLVPTQHSSGGHAQLGGISCRGDAYLRTLLIQGARSSLQRAKAVATEKATPEQLWIRSLDGRLPFGKVIVAIANKHARQIWAVLAHDVDCDPHACLNHPMHRQSYARYMA

SEQ ID NO: 182626 - protein, 405 aa, unidentified
MDAIYQRCCGIDVHKKLIVACLRVGRKEEIRSFGTSTDEICQMITWLEENRCEITAMESTGSFWKPLYNLLELCGLTTIVANAQHIKNVPGRKTDAKDSQWIAELLQHGLLEPSYIPSRDQRELREISRYRKSLTEERARELNRLQKVLEGGNIKLSSVVKDINGTTSRELLELMLKEGVNETNIDEHLYGSLREKRDELLKACKGFLTPLQCRLIRAILDHIDDMTKRIAEISRIIDDYMHDYEDAVKRLDEIPGISKQSAQVVLAEIGLDMSRFPTAGHLARWIGLAPGNNESAHRRKSGRTTKGNMTAKTAMIQCAKSAKRNKDSYSKAQFDRLAVRRGKNRAVVAVAHSMIIAIYHMLRDGEEFKDLGVNYYMEHNPERKIRYHLKKLASLGWVMPTVPAA

SEQ ID NO: 182627 - protein, 319 aa, unidentified
MSEIVLGIDVSKRTLDAALIFEGRVLCKQFQNSFEGFKLLAAWLASLKITRVHACLEATGIYGEAVALFLHECGHLVSVVNPLRIKGYASANMQRNKTDRLDARLIADFCLIQKPESWQPPSQEVKQLQSLVRRVEVLAEMRQAEENRLANAAPGIKPSIERMIGLLKEEIKELEEQIKRHIDRNPHLKEQSQLLQTIPGIGARTANLLLAEIEFERYGSARALAAQAGVVPRQKQSGTSLKQTSLSKLGNARLRKALYFPAIVARQHNEIVKEFAKRLKKNGKTPMQIVCAAMRKLLHIAFGVLKHKRPFDSSLAFSA

SEQ ID NO: 182628 - protein, 416 aa, unidentified
MDQMETLYERVGGLDVHKKSVVACRRRLMPSGRVEKEVATFGTTTPQLWVLLTWLHEWEVTHVAMESTGVYWKPVWNILEGHVELVLVNARHVKTVPGRKTDVTDCEWIAQLMQYGLLRGSFVPSPQVRQWRDLTRHRTKLTGQRTSVVNRLHKVLEDANVKLSSVISDLLGVSGRQMLRAMVAGETDAAALSQLGDPKLRASQEALQESLQGKLTEHHGFLLEGLLDQVAFLDAQITRVDSRLEEQLRPFEAQLRRLDTIDGIDRVGAQSLLAELGPDMAQFPDADHLSSWAGMSPGNDESAGKRRSGKTTKGNKWLRRTLSQAAWAATKRKEGYLSAQYRRLASRRGKNRAIVAVGHTILVAAYYILRDEVEYHDLGSDHFDQLRRERTVSNLVSRLQRLGYHVALEAIESDAA

SEQ ID NO: 182629 - protein, 358 aa, unidentified
MKYVGVDLHKNQFTAYDSSTGRYRNYGSNAIGIMSFIRDCKDTTTGEQIVVGVESTGNTRYFKRLLEAERIQVKVINTMKFKVITESVKKTDKHDASTIAEFLGKDMLPEAWLCSEYSERLRRLLHVRKTLVKAIVTTKNQIHGMVTAYGYEDKKSSLQSKRGRHMIMNTLASTEIGLVVQLLMDTIESLSENVKNIEKKIEELVEGDTRIELLMSIPGCGRITAWTIRAYTDDMNRFKSAQQYAAYVGVVPYVHNSNTLIRHGRITKHGPEPLRTAFVQLVMGINRMRALHNYRIMKRYRFIKENKGSGKAIIATARKLTHIVWHILTNNEPFNPDLQLRSSWESNRHVQFEEKRFA

SEQ ID NO: 182630 - protein, 417 aa, unidentified
MIRTAYLGVDVASRENQFALLSQEGNLICPSFRLPNSVLGVEELLLKLRPFLKEHDIQKLLVGTEATSMYDWHLLEYLAQSTLAQELTLVLYRLNAREIRNFKKALPNKGKTDRLDAVAIAERLRFGNLKEPYQAQSPYMPLQRLTRFRVHLVETLVREKSFFTANLFLKFSSFKPVKPFGESVFTKTSLAAIHEFHSPEEIARIPLEDLIGFLTRHGKNRFREPEKVAEALKRVGRESYRLRPEIRPTVDLILAETLNNIRALEKSVKHTSAAADHAFKAFPSTLTSIPGIGPVIASGLLAEIGDIRRFEKEAQLAKFAGLVWNPFESSDFKAEERRLSKNGNRYLRYYLIEGANLVRMHAPEFRAFYELKHREATKHHHKRALVLTARKLVRLVFALLKKGKLYTPKEVLSTNTF

SEQ ID NO: 182631 - protein, 381 aa, unidentified
MSKYDFEVGLDLHKEFSMLALLDKQGECLGFDKLENNTLLLDKYFSQLTGSYRVTFESSRNWYWLADYFHERGIDCILSNPFLNRAIAHVHAKNDKYDARTLAQLAQCELIATCYVPEKPIRHLRELISHRSKLVNMRTKLKNRIHLMVDKYNFKAPYDYIFGPHGIKWLDGCDFPEPIKQIVCDLLKTIEILNPQIEEYYYRIKDRIEKHPYYKLLTTVYGIGVLHAASIIARVADIKRFPTVEGFIRYSGLSVNTRASADRLTYGHLNRQADTHLRTTFVEASYLVIKHDPGLRAFYEYLRAQKGHGCAICGVARKLARSVYFMLRNSTPYRVRKVQPQYIQQQTITLKVKRLYRQYKPETESFRAVIDPIPHQRGRSG

SEQ ID NO: 182632 - protein, 316 aa, unidentified
MTLYNNFIGIDIGKFNFIVALHGNKKVVEYENNLTGINSFLEDYQQLFPSSLCILEATGGYELELLFTLSQRSVAVHRANTRKVKNFIRSFGNSAKTDALDARALALYGYERSNQLELFVPQSSQALELYALVQRRSDLKQILVAEKNRLKSPKLGTTAMIIKDSHNSVIKVIANQIDSITLKINAIITESPILAAKKKELKTIAGIGDIVANELLALLPELGRLNRRQIANLTGLAPKANDSGKFSGYRPTGHGRSLVKPLLFLAAMAARNSNSSFKIFYQDLINRGKKKMVALTALMRKIIVIANAKLRDLYAQ

SEQ ID NO: 182633 - protein, 282 aa, unidentified
MEAYDGPQIVGMDLHRRRSVLVRMAEDGHKLSTARIANSPARLMAEIKRAGLHPKVVLEACYGWYWAADTLTAAGAEVHLAHPLGVKAFSHRRVKNDELDARDLADLLRMGRLAEAWIAPAEIRELREITRYRGKLVQLRTSCKDQVHGVLAKLGIEVTCSDIFGAWGTQWLDELVLPQPYSWKVASLRQLIGWLSAEITVLEQVTADLLAGHDGYRAVQELPGIGPVLGAVIVAEIGDITRFRHPARLCSWAGLTPRHRESDTKVVRGRITKQGSRPLRWR

SEQ ID NO: 182634 - protein, 399 aa, unidentified
MNPQTIRVGIDVGSARHRVAVGLPDGKLIDEFDVDHHAEGFSQFFRRIATHEDRHQLPVSVAMEGHNGWARPLDGQIQRRGWQLYNVNNLKLARYKEIFPAPAKTDAIDARRILELFQLSAHVPVARNALQEVAPTPAVNDKLKRLTRRRKQLVAERVRIVNRLHADLHAVSPGLAAITGDVANLWFLNFLTCRDALPKLARLQTKSLLAIRGVGRQYARQIQDWQHNASFALDVEVVSEMILQDARRVQALNADIDALDRGIKATASESDLARTIQSIPGFGDTSAAELAGEIGAIERFESEAGLAVYTGMAALDNSSGTKTASRTPRQVNSRAKAAMMVATARHYPHVNASQAYYDKKRAEGKKHNQAVRSLGRHLIRVIWALVKNGRNYENRSKTA

SEQ ID NO: 182635 - protein, 359 aa, unidentified
MSETIVAYRSFVGVDLHKDTVTLAAVDPRGESLARLKIHTKSVGKIEAWLRALPRPSALAVEAVGFVEWFIDRFRDCVDRIDIADATELANRRGKRRKNDPNDAVDIARRLARGECPLGYIADEELMQLRKLGRHWRQLGSILARAKHSMRSILLAANLRGPKLDGASARLKPVQRQAFRNFLEVIQLVELQRGPLRHVILKAMRHERFAPLAELLQTVPGIGPIWACVIVAEIGPFDRFPNADALEFWAGLTADMKESAGRTQSGSITKAGSRTLRWALCQAAVTSCHCDARQEAIRQRLIRRNGGVKAKANVAMGRRLLAILYAMVRDNKSYEPGPRRNRTSAANKARARKRRKEAA

SEQ ID NO: 182636 - protein, 340 aa, unidentified
MFTNFVGIDVSKSKFDLALIKGQDKDHVIQGVFDNTRNGIKSMSKFLEKEHAIQLSATIFCMEFTGVYCRPLTSYLVEQECNVWLEMPVNIIRSLGLQRGKNDRVDAHRIALYAYKNRDDVKLWKPQRDVILQLRDLLALRERLITSQKALTNPIEELIAMGAKSAAARVRKGCQKTLSSIEKEIEQINKELDDIIKGDPQLKELFQLSTSVPGIGKFTALFMICFTNEFSMYTNPKQLACYCGVAPFEHSSGTSVRGRTRVSHMANKVLKRMLHMGAMSVISRDPELRSYYQRKVAQGKNKMLVINAVRNKIIQRLCAVIKRGYEYQSEIIFKERLVLS

SEQ ID NO: 182637 - protein, 342 aa, unidentified
MNIKQIGIDIGKMTFHMVALNGENEIVIRRQFTRSQLITFFTKRTGQDLNVAFEACSGAHWLAHQLIALGHKVRLLTPESVKPFAKAQKNDWNDALAIAEAANRPGRHVVGVKSQEQLDMQALHRVRQRLVTSRTALINQIRGLLRERGLVFRSGRAQFEAFVRDKLVTGDVDLNPLCRTLFAALIAEYEAMNSRLDEINQELEEFAKSNAVCRALLPVPGVGVIVATALFSAIANISDFKTGRDLAAFLGLVPRQRSTGGKTVLLGISKRGNTYVRTLLIHGMRSAFYHRQKRDDRMAAFMERLSARGMHTNKIVVASANKAARIIWAILSKNTYYQSQPV

SEQ ID NO: 182638 - protein, 346 aa, unidentified
MMIIGCDFHPSWQQISWVDSETGDCGEQKLVHAAGDARLFYQRLAAPVLIGMEATGNSQWFIELVEDLGHEIWIGDAAQIRASYLRKQKTDKRDAAHILKLVVEGRFPRLWTPDREQRDLRQLVLHRHKLVIIRSRVKNELQHLSLNKGVQRKHKLWSQAGQKMLRELPLKPWAACRREDLLGLLAMLNQQVGTLDDAVQQAAEENPQAKLLMTQPGVGPNTALAYVLTIGDVGRFRRGKQVASYLGLIPREESSGGRQKLGAITKQGNRMLRALLVEAAQVAVQHDPGLRKQYLHRCHQKPKGVAKVATARKLAVRLYWMLRSNVAYPEIVGIESSSGLPLVGAS

SEQ ID NO: 182639 - protein, 354 aa, unidentified
MMIIGCDYHPSFQQIACVDTETGELKEQRLGHREGAEEFYRALAARGEQVRVGMEASGHARWFERLLGELQFELWMGDATEIGRKRGRKQKTDRQDAQHILGLLLKDDFPPIWVPSWENRDLRQLLWHRHRMVQARTRMMNQLQAVALNEGLLWKKRLWRERGRQQLEAIPLAPWASRRRHDLLELLDRLNPTITQLSQAIEQEAEKHPAAQRLLTHPGVGALTALAFVLIIGDAKRFQCGKQVASYLGLVPLEDSSGNRRRLGHITKQGSSILRFLLVEAAQATVRSLPEWRSKYLHLMMRRGRKTAKVAMARKLAVRLYWMMRQGWDYQQWSKFGSHAGQLGTGDGVQSNIE

SEQ ID NO: 182640 - protein, 438 aa, unidentified
MPTLAFVGLDISQDDASVCFLQSDGTEPVPGWTIPNTQPGADALATTLAYLAQTYQIDQLRIGMEATGLLWWHLACALKDAPVLAAFAPRIYALNPHLITTFRANYGALPKTDCADAFLIAERLRFGRQLPSPFQLDARYAPLQRLTRFRCHLAQNLAREKSYFLSFLFLTFSTYGQIAPFGDPFGATSSAVLDEFTTEELAQQALEELATYLQEKGRGRFADPDALAATLQRAARDSYRLDKVLQEPLRLVLGTTLATIRSLQTQLKTLDKTIAQELAAIPQTLASVPGLGPVWTAGLIAELGDISRFDTEAAIAQFAGLSWEAKESGGFQAEDTALIKRGNSYLRYYLIEAANSVRLHCPEYTQYYAAKSAETPKHAHQRALVLTARKLVRLIDVLLREGKRYIAPEERPLRQGITRPHHARPARQRHRKRAATIE

SEQ ID NO: 182641 - protein, 356 aa, unidentified
METIAPADVIVGVDTHKHIHAAVALNGLGARLGTTSIPVSPKGYRELEVWARTFGCVRAFGIEGTGSYGAGLSRALVAQGHTVVEVNRPNRQLRHQQGKSDPLDAEGAARSVLAGQATACPKSGTSAVEMIRQLKVVRDTAVKSRTRAMITLKTLIVNAPAALREQLDRLTGRVALVRHLAALRPGPLTSTTASTKAALKALARRWLMLDAEIKEHDTALDALTDTCAPGLKAAFGIATGTVAEMLILVGDNPERIRSEAAFAKLCGACPVPASSGKTSRHRLNRGGNRQANAALYRVVIVRLRRHPPTLAYLSKRLAEGLTKREIIRCLKRFVAREVYTHLCGRLRAASVGPAPA

SEQ ID NO: 182642 - protein, 393 aa, unidentified
MGIDIGKNNHMAGLIGEDGKPICKAFSFSNTTEGGESLLGMLEKHGIAADDLEVGLEATGHYWLSVYSFLHDHGHKLHVINPIQTDGWRKGTEIRKRKTDAIDALLIAELVRYGDFMEARLPDEALLSLKQLARFRAYLVDSVGDLKRKVVCVLDQVFPEYQRIFSSVFGVTSKEILLQFSNPADLEAVSADTLAELLAKLSRQKLGDEKAQELHRAAANSFGVPFCRDSFSFQLRMLIEQIKYIESQIKDTEAEIKRIMDNLNSPIQSIPGIGAVTGAVILGEIGDIRRFERPAQLVAFAGIDASVKQSGEFEGTQNRMSKRGSPYLRRALYQAAFAASTGPYADPILGAFYEKKRAEGKHHNACIGAVSRKMCYIIFAVLSENRLFEKRLP

SEQ ID NO: 182643 - protein, 386 aa, unidentified
MKLVGIDIAKYEHAAFIMEASTGESLCDPFFFKNNKEGFKKLYTELNKYSKNELLIGMEDTGHYNFAIESSLLAEGYKVALINPITTKSLRKASLKSVKSDKEDALLITKALLDKAYYRIISIQDEKLKEAKELTRYRTQLTLEMNRKKNVLQRHIDIVFPEFNTLFNNEYTITYLNILRKYSDAYTIAHTDIRSLRKCFKYCNSFSAEELKELASNSVGIHDVSISFIIQSVISSIDLINSQIEELDKKIEELAITQASSITSIPGISIITGTSILAELGDISKYSNAGKVIKFAGVNPYISESGKFSADKTAITKKGSKYLRTTLYRVIIPVIRHNPAFNNYYHLKRNQGKGHLCALGHCVRKLHRIIYHLLSTDQKFDPELLR

SEQ ID NO: 182644 - protein, 420 aa, unidentified
MDEITEEPAALVERVAALDIGKASLTACIRVPHGDKPGARRQEVRTYATLTPALLELRDWLVCQGVTLVVMEATSAYWKPPFYLLEDDIECWVVNARDVKNVPGRSKTDKLDAVWLARLTERGMLRPSFIPARPQRQLRDLTRYRRTLTQERTREKQRAEKLLEDAQIKLSSVISDIFGASGRAMLDALVGGQANPHELAALARGKMRAKTSVLHEALTGHFTDHHAFMLGMMLDRIDALTDQIGTLTTRIEQAIAPFAAQVAQLDEIPGIGPAAAQDLLAEIGADMSRFPTAGHLVSWAKFAPRARQSAGRSKAATTGKGNPWLGGTLGEAAAGAARTKTFLASRYKRIVKRRGKKRALVAVGNSILTIAWHLLSDPSARFTDLGPTWHDHLAPLRRKRQLIAELERLSGMKVTLHQAG

SEQ ID NO: 182645 - protein, 449 aa, unidentified
MPRFERRSIRHDVTGTGCPNLNYSEVSMNERKTGAQENQRYWVGLDWGEESHAVSVVDDDRTVLHQFKVGASFHNVQQLAQRLHALGAVAGIAIEATRNPVVAYLVSQGFTVYPVNPKLSKNWRESNSVAAVKNDERDGLVLAVELARRHESLRPLRQDAPAVAELAGLCEKLRQLIDQRTALLQRLKATLRQYYPGIMGFFSDWASPLAWRFVKRFPRPETLARARKNTLIRFLKAHRIGLKPIWLERIDKRGEVTHWPSPADSMALEIMALATIAQLQGLQPHIDQCDRLIAQRTGNLPQARLLRSLPGAGDRLVPALTAMAAAMADEEDGLEALRCVSGVAPVEVQSGKRRRVRIRRRCNKHQRNIMHLFARCSTVSCAWARAFYDLHREQGDRHASALRKLADKWLKIINRMLATGEAYDDERYVQALRKNRSPVYQRLCGKTCA

SEQ ID NO: 182646 - protein, 314 aa, unidentified
MSQFNVFAGIDVSKDHLDVHLLPEGQSWRVANDEAGCAQLSERLQGLAVLVVMEATNVFWRLAATRLASAGLSAAVVNPRQVRDFAKATGQLAKTDAIDAKVLALFAQRIEPPVRALPSEQCQVAAELLARRAQLMGMRVAEKNRLSTARAGKVRKDISATIAFLEKRIAGLDEEIDQWLKSTPIDQSRANLLKSFTGIGENTARTLLISLPELGNLSGKQIGALAGVAPFARDSGNKRGARQIRGGRAAVRAALYMPAITAIRWNAVIRALYQRLINAGKHHYVAITACMRKMLVILNAMLKSNQPWKSPQQV

SEQ ID NO: 182647 - protein, 367 aa, unidentified
MTRYTVGLDVHSKQSVFAIEDAEGRFVARGSVPTTPEGFELLQTKHDLPPGTQVGLETGTVAFYAARLLMGLGLEPVVIDAHEVRLKAYRPTQKSDRRDAEEICEGLRRGIYRSIVHVPPPPITALRDTLSRRRHFVRLKTSESNAVKRLLRSAGVGRLARSLRTLAGWEKLLAALADHTDLLGHVKRHQAVWRCADEQVEALDVQLGLQGVPFAEDVRRLQTVPGVGPIVALTTLAVFSDVNRFPTAKHAASYAGLVPSTHQSGERDAHGRITKRGSAELRAMLCEAAHHASRPTHPLNPYFMSLCARRGYKMAVVAVAHRLCRTVFAMLRRGTDFDIGKLGVEIGPFERKQVKLYRLKKLQAVQA

SEQ ID NO: 182648 - protein, 444 aa, unidentified
MSYRIAGIDVHKKMLAVVVSNVEVESEFQFERRMFGGNPEQLRLLAAWLLEQEAEEVVMESTAQYWKPVWGALERYWKPIREKREGAKRRSGTLHLAQAQSNRGRRGRKKDFVDAERLVKRLVARELTLSFVPDAEQRLWRAVTRKKYQLRRDLVRLNNQLESLLEETHIKLSSLVSDLLGVSARRMLKALADGETDPAALAALAHQRLRATPEQLCDALGACTDLKPVYRRLLKMTLEQLQLLEQQIGQLDQELATLLHPHQDAVHRLAEVPGFGVDSAQQIIAEVGPTAATFPSEKCLSSWVGACPGDEESAGVNYSHQSPKGNRHMRRLLNQAANAAVKVKGSIFEVIYRRCVPRLGHNQAIGVIAHRQCRLIWLILHNGALYEERGPAVTMQSKYKRTWRMIRQLRQLGYRIDPPNLQPSQAQAQRFSTLISRKTGQMVG

SEQ ID NO: 182649 - protein, 335 aa, unidentified
MQIYGIDLAKEKFDVSFFDLTSKKVSNQPSHKVVTNNLKGIGKFFKGLPSDAVLVAEHTGVYGDTLLKCCMDSNVKIAFVGGYVIHRYRATPDRAKTDVLDCALLRDFGERYPDKLKYKTFPEEALYELRQLARHREMLVEQRKQQITADRSEDCRPIRSLAVKRSMDRIKEMLDTEIAETEKEMLKVINGHESIHHNYELVKSVDGVGLITAVELLVKTENFTKITTARQYAAYAGTAPYEKSSGKMDKGAHISKIGNRRSKTLLYICAESARLHNKEIKLYYERRTLIDKKPRHYVLNAIANKLLRIIFTLVEKGEYYDANFIRQDPRVVKYN

SEQ ID NO: 182650 - protein, 312 aa, unidentified
MPCLVGIDVAKAQVDIALRPSGERWAVANDASGVATLVDRVQTLHPTLMVREATGGLERAVTSALAAAGLPVVVVHPRQARDVARATGQLAKTDALDARALAHFADVIRPTPRPLPDAQTQELRALLGRRQQLIVMRTAEQNRLAGTSERLTKAIAAHITWLNADIATLDDDLETLLRASPLWREHDDLWQRAKGIGPVCARTLLRELPALGTLTRQQSAALVGVAPLHCDRGTRRGRRMIWGGRAHVRTVLYMGTLVATRFNPQIKVFYERLLAAGKVKKVALTACMHKLLTILNAMLKHRTPWQPQEVQS

SEQ ID NO: 182651 - protein, 405 aa, unidentified
MTVYIGIDWSEKKHDICYVHENGEVLRNLEILHSMEGFVALDKARQELGVQAEDCVVGLETSHNSLVDYLWDQGYLRIIVLPPKAVKSSQGRYRQSGAKDDPWDARLIADMLRTDQKRYTVWKPDSPLTRQIRSAVRMLSHLNKELVRNSNRLRAVLLRYYPAALELFTHLDAPVTLAFIQTYPTPEAADKLSYEDFTSFLRKHHHTQPKTWVHSYNKLKQPVVYSQTAVVAAYSPQAVTLASILAVLVESKYCWLKELTRLYENHPDRTIYGSLPAAGTFLEPALLAKLGDDRNRFPTPKVLQAVAGTCPVTKRSGKRKVVYFRWACDHEFRHIVHQWAKLSLDVSPWAEAYYSSVLPHCRSSNDAIRRLANRWLEILWRLWQDRKPYDQAYHLRQHISRSTAR

SEQ ID NO: 182652 - protein, 411 aa, unidentified
MLKIVYPICCGLDVHKSFVVACIASTNERGVTSYNSKHFSTFTKGLKELSAWLSYYKCVDVCMESTGKYWIPVYNILERSCKIVLAHPKYVKSIPGKKTDKKDAQWISDIFKHNLVIGSFIPPFDIRQLRDLMRYRSKLTCYTTGETNRARNCLTVSNLKLDDVFSNIFGKSASAIINHILEHPNEPFDVSEFVDGRCKAPIENIQAAVDGVMCGEQSQKLQIIQAHMQDLEKAKANLDSVILTLAEKFRPQINVVSTAPAIKFLSAITIIAEIGVDMSVFISAKHLCSWAGLSPQNNSSAGKKKTTRISRAGAYIKPLLVQCANAAVKSDKYPEIRNRYLKLKKRRGHKKAIIAIARMLLVAIYNMLKNNEPYNPELYIKSDLQPKPNDFAIDHAVRMLLSQGYAVSPPG

SEQ ID NO: 182653 - protein, 397 aa, unidentified
MHPRVWAGIDAGKAHHHCVAIDSEGNKLLSRRVANDEPELLQLLADVLALGHEVVWAVDLADGGAALAITTLLAHDQQVLYISGRTVNRASEAYRGESKSDARDAAIIADQARMRRDLTPMRLPDSLSAELKLLTARRTDLVCDRTRTINRLRAQLNGIFPALERALDLSNAGPLILLTGYQTPASIRRLGRTRLEAWLRRRKVRSAGQVARTALEAAERQHTAVPGEDVAAELVHTLAQQLTALNEQIAAVDRRIAERFREHELAEVITSMPGIGPTLGAEFLAATNGDMELFGSPDRLAGFCGLAPASRDSGRISGNLRRPQRYHRGLQRVFYTSALISIQRHPESRAFYDRKRAEGKRHTQAVIALARRRVNVLWALLRDRRCYQAVPPVAMAA

SEQ ID NO: 182654 - protein, 341 aa, unidentified
MSIVGAFDVHRRQLTFEYLDAVTGELKRGRVAPADREHLREWLARLPGQDGAHFALEGCTGWRYVVEELLAAGIEPHLAEPADTAALRGRKRHAKTDKTDARHLRVHLLAGDLPECWIPPAHVLEARGTVRLYKDLLDERGAWHQRIAATLFHQGVPVTASMSAVEGRAAVSGMDLSPAGRQAVETGLRQVDRLTGELEPLRRQLDMISRRQPGCAALRATQFGVGAVTAVAIWAELGDVRRFASSSDVVRHTGLDITVYSSDGKRSAGHLSRQGPQLLRWALYESAKCAARPAAPDYGYYTATRDRRTGGLATLSVARKLARRCYHTLRELGEEALAPAA

SEQ ID NO: 182655 - protein, 340 aa, unidentified
MSEAVLHGGLDLHGNNVFCSLLNEARQIVFERRLPNDMATIGEVLEPYRKRIRSLAVESTYNWYWLVDGLKRLNYPIKLANPGKMQENIGLKHANDKTDARFIARQLVNGTLPEGYIYPEETRGVRDMLRRRTRLVHARTGEIISVGSLVARHTGQDLSYKELDLGELKKILAGQPHALIMGEANFRHIEFLDKEIAFLEDAVMKELPDRKDYLRLMTAPGIGPVLARAILLETGPIARFKDAGNYASYCRTVKAEHTSNDKKKGACNSKNGNKYLAWAYVEAANHAARCSPEIRAWFQRKLAKSGKRVIAIKALANKMSKACFFMLRDEKDFDVKRLVG

SEQ ID NO: 182656 - protein, 411 aa, unidentified
MKVVYPCSCGLDVHKRILVACLMILAADGRLTKEIRTFGTMMEDLLALSEWLLAAGCTHVAMESTGSYWKPVWNVLEGNFELVLANAQHIKTVPGRKTDVRDCEWIAELLRHGLLRGSFVPDREQRELRELTRYRTTLTEEHTAEVNRLQKVLEGGNIKLASVATDLMGKSGREMLAALVAGSTDAQAMADLARGKLRDKLPELRKALSGQVGHHQRFMLAEQLAHIDELDERVARLDAEIEERMRPFVELIDRLDAIPGVGRRIAHVIIAEVGTDLSRFATAGHLASWAGMCPGNNQSAGKRKSGKTRKGDSALRAALIEAGHAAGKKKDSYLRAQYHRLTARRGRNKAAVAVGHTILGIAYHLITNEHSFYSDLGVHYFDERDRDRVQKRLVHRLEALGYTVSLEPAAA

SEQ ID NO: 182657 - protein, 315 aa, unidentified
MTKHLLPVNVGVDVGKNQLDLYLLERDRALTVPNEEQAILVLVRSLSRYRVERIVVEATGRLEQPFVRAALAAGLPVIGVSPLKIRRFADVIGQLAKTDQIDTRLIAQFAATVKPLPRPASDANAQAIKDLVVRRRQLTSLRTMEKNRRQVMPNDLKPSFDRILKALDRELKSLEQLINHAIDQHASSRHKRELLTSMPGIGNCVAATLIGDLPELGSLDRRQIASLTGVAPFNRDSGTLRGKRRIRGGRTHSRTALFLSAMVATRFNPDIKRFYQRLLTAGKHKKVALTACIRKIVTALNAMLRDNLPWRSAIA

SEQ ID NO: 182658 - protein, 347 aa, unidentified
MLYLGLDVHSKWFTLAGFIEETGECVKMPRIDNNIEAISAAFDELPTPRAGAMESGTNSVAMYRLLLPYFDNLIVVAPNKVWNRQRDAAAKTDGRDAHTLAEELAFGRLKPIYIPDDMLRSYRTLCRGRVQLTQDTTRLVNTLYALLRSWGYQVEKKLLTKGGRNWLDTVDIPDSAKPVLDLQIERLKDLIRQECELDNRIAEIAQTDPVCRLLQTIPYVGPLTAVVLRAEIGDIKRFSSADKLVSYVGLDPRVYQSGEHCRYGRLSKHGNSYLRFIAVLFAQNAIRGRKDTTFRRRFYRLCHTHHPNEIKIMVARDFLAVVHSMWRTNTTWHGPPQMTKPVKSSVA

SEQ ID NO: 182659 - protein, 360 aa, unidentified
MKKHNTERREQKSKGRKTIGLDLGDRTSRYCVVDEQGEVILEGSVATTESALRSWVGEMGPCVVAMEVGTHSPWVSRLLKECGQQVIVANARRVRLIIESSRKNDRLDARTLARLARMDAALLAPIRHRSAQAQQHLIMIRARAALVETRTKLVNTVRGMVKATGKRLRKCSARSMGPAAARQIDDALAQVIKPLLASIESISGQIQQYDRQIVEVAKQYPEVARLDQVWGVGTLIALTYVLTIEDPGRFERSRDVGCYLGLRPRQRQSGARSPELGISKEGDRYLRTLLVQAAHYILGPFGPDTDLRRWGLRLAGHGGKNAKKRAVVAVARKLAILLHRLWVSGERYQPLRDAEIATAA

SEQ ID NO: 182660 - protein, 421 aa, unidentified
MTRRIAGIDIHKNVLMVVVATVLEKEIDGGMEQQIEYEGRRFGSGTQERGHLVAWLRERQAQEVVMESTAQYWKPVWMDLELHFPKLHLAQAHSNKAPKGRKNDFADARRLTRRMAAGELILSFVPDAEQRTWRTMTRGKQQLVRDRVRLQNQTEALLEEMRIKLSGVVSDLFGVSGRRILEALAGGETHPEKLADLGDDRLKCGREALVDALTGHSEPMHLQILKLSIERLKLLDRQIEALDRMAAGALKKHADAVTRLAGVPGFGVDSAQQVIAEVGSDAKSFSGAGELASWVGTIPGSDVSAEQNHSSRSPKGNKFLRRIFTQAAQAAVKTKGCHFQNVFRRLVPKLGYKGAIWAIAHRLCRLAWKILHDGVSYIEQAAETTPQAKKRRAQRLTQALRRLGFQVAITPIAPKAEVAKG

SEQ ID NO: 182661 - protein, 358 aa, unidentified
MVQRKELNFEGQNIYIGIDVHLKTWHVSILTESGCLKKHSQQSSAQALFEHLKKHYPNGNYLSAYEAGFSGFSTYYSLLDFGIECLPVHAADIPTGQYESVMKTDAIDSTKIARALKSGLLRGIYIPKKEVLDDRNVMRLRITLKRQLSGYKSRVKHLLYNNGVIYPECFQNSKSHWSKRYLKWVHEDVQLLSESRNSLDLLLRQVELFRKSLLEITRLVRTLSRNGRYGEAYENIVSIPGIGMITGMCLLTEIGDIHRFRNERQFASYLGLVPTSRSSGEKTSHGEMTFRGNKRLGPLLVESALVAIRQDRALAAAYGEYCKRMLPQEAIIRITRKLSNRILIILKSGKKYEHDRCY

SEQ ID NO: 182662 - protein, 406 aa, unidentified
MKLTCGVDWAEAHYDVALVDGDGVVVARARIDTGATGFNKLLALIVEHEGSAQDTPVSIETDKNLLVVALVEAGFTVYPINPRAVARYRERYGQAGGKSDPGDAAVLAHILRTDRHLHRQMPAVSEQGRAVKALARQHQEAIWALHQTVSRLRSVLLEFYPQALQAFPNLTHKAALTVLAAAPTPASSRQLTRRRVVTLLQRSGRGNHPTLVEQILTDLHTAALRQPPQVEQALGHTVVGLVGIVVAMQRAVDDLELELAREFDQHPQTAILRSAPGLGPILAARILAEIGDDPQRFANPNSLRAFAGTAPVTIASGRSHYVKARKVRNKRLADACHWWAFTALTKSAGAREHYDKRRAAGDHHNAALRNLANKLLGRLWWCLANNQTWDDTAAWPHRLKPDSVAA

SEQ ID NO: 182663 - protein, 378 aa, unidentified
MKQDNKAKQNKGKVSVEAPQDTCDLGHRRWKVQREGLTVGLDVGDKISHYCVLNEEAEVVERGKLKTTPAALQPWIEALPAGTRVVLETGTHSSWISRLMEQARQEVLVAQPRKIPQIYACKRKNDRRDAEKLARTGRLDPNSMGPIRHRSAEQQADLAVIQARDALVQVRTQLINTVRGLVKGTGERLMGCSARSFAQQVEIPHRWRAALLPLVSQIRSLSEQIERYDVEVEKLAQKKYPETELLRQVSGVGPVTSLAFVLTVADRWRFRHSRDVGPFLGLVPAQDDSGESSPQLRISKAGNTYLRRLLVGSANYILGPFGPDCELRRWGKKLSERGDKNARKRAKVAVARRLAVLLHKLWVSGEVYEPLPEKRAAA

SEQ ID NO: 182664 - protein, 347 aa, unidentified
MNYIGVDCHISSLDFAVVNERGTTTKRQRVNTGVKELIGFVKSVPKPRKVIIEEGSLANWLLETCTGYGEKLIVTDPKKNRWIGRAGTKNDAVDAEKLAQLARGGYIKEIHHPIGGRRRFRELVLSYHDTVKSQTRIKNKVKAKFRENGIRCMGETVYSARYRKEWKERLPKDKVVHIIIDGLWRQLDQVGEVREEILGQIRKQSRGYSEIKRFKKIPGIGTVHAATVSAIVEDPHRFANKKKLWMYAGLGLAKRESGGKVYSNKLTRNYNRLLKNAIKQATEAAIIAKDNQFRRQYLRLTIENGIASHRAKLSVARSMLATLYGIWKSGEAYDPDIDKGRPEADKS

SEQ ID NO: 182665 - protein, 383 aa, unidentified
MDAGKGFHWAVMLDSDGEVLLSRRVENEEADLSALVEEALGFGLALTWSTDQPGGTVAMLLALLWKRDQPVLYVPGIAVDRARDASHGESKTDARDAHLIAQQARMRRDLSSLVPGDELLAELALLVARRRDLVTDRTRTITRLRDALLALFPGLERALDLGDKGPLLLVERYQTPHTIRKAGRNRVEAYLKKCSVRGAAKLAEKAVVATKGQSVSLPAEGVAAGIVAALAREALLLKERIVEVDRELELRFLAHPLAEILVSLPGMRTLLAAELLVAVGDPRNAFADAGRLAAYVGLVPADRDSGKRTGNNRRMRGGNKMLKRVFYQSAFASLRTPASRAFYDRKRAEGKRHTQALIALARRRVDVLWAMIRDEQRFRPAAA

SEQ ID NO: 182666 - protein, 335 aa, unidentified
MEKKVIIGIDISKSWLDAHVLLMGSQEGHALRIHNTVAGFTKLIKFIKKQTEVPGDDWLFCMEHTGVYSYGLNSFLQERSIAQTMVNALAIKRSMGIIRGKNDKADARVIAQYAVRFQDSLPEFHLPTESLQKLKIQLAQRERMVDMKRQTDLAMESMEALPQDLTKEARLQNRKLLRQLQANIEQMDVIIRNTIKSDIELKEQARLIESVPGVGPQTSAHILVTTQGMKLFRDSRKYACYCGVAPFEYTSGSRYRGKTKVHYLANHKMKSLLHMAALNASVYNPEIKLYYERKKAEGKNPMSILNAIRFKLIDRVFAVVKRNEPYDQNFLKKAA

SEQ ID NO: 182667 - protein, 348 aa, unidentified
MLIIGCDYHPGFQQIAFVDTDTGEAAERRLTHREEAEQFYRTLQLRRVRIGMEASGHGRWFERLLNELQFELWIGDAAEIRTKRVRKQKTDRQDAQLLLKLLMEDRFPRIWVPDAENRDLRQLLWHRHRLVQMRTRLMNQLHVVALNEGVRRKKALWRPAGRSELESLVLAPWALRRRRDLLDLFDQLTPKIHDLTRALEEEVEKRPIARRLMTHPGVGVLTALAFELVIGTPERFHCGKQIASYVGLVPSEESSGDRRRLGHISKQGNALLRFLLVEAAQVTVRSQPQWRSKFFHLAMRRGRKIAKVAMARKLAVHLYWMWRKGWDYGQFEKLGSHAGEPGNRHGVQ

SEQ ID NO: 182668 - protein, 342 aa, unidentified
MQVTTIGLDIAKNVFQVHGIDASEKVFVRKQLRRSQVLAFFKALPPCLVGMEACGTAHYWARELKKLGHQVRLMPAKDVKAYVKRNKNDAADAEAICEAVRRPTMRFVQVKSAEQQGRLMQHRTRDLLMRQRTQVINALRAHMAELGIVATQGREGIEELLTIIASEEDARLPVDAHASLVVLAAGLQAVQTMIGSIEKRIIVQHRSNEASKRLETIPGIGVIGATAIAATVPDPKAFRSGRDLAAWIGLVPRQDSTGGKQKLGPISKQGDQYLRRILVVGAHAVLRRARQQPEKYPWLTQLLARKPFKVVAVALANKMARIAWALLAKGGTYRAPALAAGA

SEQ ID NO: 182669 - protein, 414 aa, unidentified
MLKIVYPICCGMDVHKSFVVACIASTNDHGVTTYKSKRFSTFTGDLRRCAAWLAENNCKDVCMESTGKYWIPIYNILESTCNIVLAHPKYVKAIRGKKTDKRDAKWIADIFKHDLVAGSFIPPADIRQLRDLFRYRWKLTSFTTGEKNRAQNCLTVSNFKLDDVFSDVFGKAASAITAHILENPTEKITDVSGFRTKGMKATNEQVLAAVDGEMCEEQAEKLRIIRSHMDSLELCKLNLESLILATAEKYLPQLDLVMTVPGIQSFAAIGIISEIGVDMSVFPTSKHLCSWAGLTPQNNESAGKKKTTRISRAGAYIKPLLVQCALNAIRAKKFPEVRNRYLALKKRRGHKKAIIAIARMLLTVIYNMLKKNEPYNPELYRKDDRPPAHREVSMEEAIFILQRQGYLVTAPPTT

SEQ ID NO: 182670 - protein, 343 aa, unidentified
MQTITTIGLDIAKSVFQVHGVDAPGQVVIRRQLKRRQVLSFFEKLPPCLVGIEACASSHYWSRELQALGHTVRLMPPAYVKPYVKRQKNDMADAEAICEAVTRANMRFVPTKTPEQQSCLMLHRTRHLFIRQQTAVINSIRAHLAEFGIVAPVGRKGVTELLHVVADPNDGRVPEVARACLAALGTQLLRLKEQILEFDRMIIAWHRSNQTSKRLHCIPGVGPMLATALVASVADPKTFRSGRNFSAWIGLVPKQHSSGGKDRLGSISKQGDRYLRSLFVAGALAVIRYAKIHGTGHRPWLTALLGRRPTKVAAIALANKIARMAWAMMAKGERYKQPVALAR

SEQ ID NO: 182671 - protein, 386 aa, unidentified
MQKAITYVGLDVHKDSIVVSLAEAGLRGRLREVREYGKVLNTPAALKAMATKLAASGNELRFCYEAGPCGYGVQRQLSAMGHHCAVVAPSLVPRKPGERIKTDRRDAAKLAKLHRASELTPVWVPDPAHEAMRDLVRARLAAVRNVREARQQLSGFLLRNGHHYHRHPWTLMHRRWMADLKFDQPLHYIVLQDCIAAVEASEQRRDRLEAGIIAALPEWSLAPLVEPLQALRGIALVSATTLVAELGDIARFSNPRQLMAYLGLVPSEHSSGRSRRQGGITKAGNAAARRMLIEAAWSYRFPARISRYQLSQQKRLPKLIRDIAWKAQERLCRRHRKLMRAGKPKTVVCAAIARELTGFVWAIATETSPAIGKKGTGKPATMVAVS

SEQ ID NO: 182672 - protein, 341 aa, unidentified
MSIITVGIDLAKNVFAVHGVDNNGKSVLVKPKVSREHLLPLVAQLPPCVIGMEACSGAHHWARLFRGYGHNVKLMAPKFVTPYRMGGKRGKNDAADAAAICEAVTRPNMRFVPIKEAHQQIILCLHRTRQGFVEERTATYNRLRGLIAEFGIVLPQKVANLHRHIGARLEDLPGYANRCIVDLLSHADQLDVRIAEYDRLIAKAAREDARSKRLMQHPGIGPVTASALLASIGGGHDFKNGRQVAAWIGLTPGQHSSGGKDRLGRITKAGDHYLRTLLVLGARTILNTLGDKQDHFSRWARNLVVRRGYGRAAVAIAAKNARLAWAVLRYGEDFRLSPSAA

SEQ ID NO: 182673 - protein, 415 aa, unidentified
MENDAAVGACVGLDWGDTRHAVQLQLVDGPIEQLALEQKPDVLHAWVAQLRQRVHGRRVAIAVEQRKGAVMHALMAYDFLVLYPINPKALARYREAFRTSGAKDDPCDAALLLDLLRKHRDQLRAWQPDTVEARTLQLLCEQRRKLVNQRVALSNRITSLLKQYFPQAVDWVGDVASVQGCDFLQQWPTLAAVQRARPRTLRAFYQRHNCRNSAVIDCRLAPIAAACPLTSDAAIVGPLSLAVHTYATQLRALILAVQTFDTRIAEVFAQHPDHDVFASFPGAGAVCAPRLATAFGTDRARWDSATDIQTHSGIAPVTERSGKALWVHHRLACPKFVKQTFHEFADQSIRFSTWARAYYDQQRGRGNDHHAALRALAYKWIRILFRCWKDRKPYEEATYMDALRRHGSSLVKNNA

SEQ ID NO: 182674 - protein, 307 aa, unidentified
MSNNSIICAGIDIGKRRLDVAVCGAKASLEVDNTSAGHEKLVTWLQRHKVERVGVEATGGYEQEVVRALRREGFPVVVFQPIQVRAYARFRLKLAKNDKIDASLIAACVASVDNVRTAPDPRFEAFAAAQTLIDQLTDDIVLYKTRLETARDEFSRKAQLRGVLKTLRTDMRAHTDIAAKLDLITSVEGIAEKTAIAVLIRMPEIGTLSREQVAALAGLAPYDDDSGRRAGSRHIQGGRTRLRSSLYAAALPAAFFWNPQLITFYKRLRANGKTHKMALVACARKLLIFINTVVARATPWQPKPAAI

SEQ ID NO: 182675 - protein, 343 aa, unidentified
MKLSRVGVDLAKNVYQLHGVDRTGKTMLKRRLKRHQWFKVLLDKTEPDCVIGMEACAGAHHWGRQLQARGYTVKLIPPQFVKPYVKSNKSDAKDAEAICEAMSRPNMRFVTVKRVEQQDIQATHRIRAELMTQRTAKANQIRGLVAEYGLVAPKQLSSLRAAIPCWLEDAENGLTADFRALLQGVWNDLLGLDDRVCEMDKLIKRLAENNEDCVRLQQLRGIGPMTSTAMIASVGDARQYHKGRQMAAAIGITPRQHSSGDRDRMLGISKRGDVYLRTLMIHGARSAVAVAKHKDDRLSRWVTEIAKRRHPNVAAVALANKTARMAWAMLRNETDYDPDFAIR

SEQ ID NO: 182676 - protein, 348 aa, unidentified
MSITMIGLDTAKSVLQIHAVDAAGKPQLKRKLRREEVISFFEQQERCTVVLEACGAGHHWARMLMQLGHEAKLLAPEVARPFVKRGKKNDAADAAALCSAASQPEVKFVPVKSPEQQGVLALHSVRTLLVKQQTMLANAMRGLATEFGLVVAKGIHKLEELDAQVQAEAGMPATAKQAFAVLHGHSQATATRIAALEAQIVAHARQDATARRLATIPGIGPITASLITATVGEALGSFKSARHFAAWLGLVPRQHSTGGKTRLGRITKAGNREIRRLLVLGATSMAFRAGSWNSAAGAWLRGVLERRPLRLATVALANKMACIAWAVMTRDETFQAKARGQVAVAAEA

SEQ ID NO: 182677 - protein, 377 aa, unidentified
MKRIKFVGLDVHAETIAVALAEQDGELRSLGVIPNREEAVRKLVRKLGPLEELRFCYEAGPTGYALYWQLTKLGAQCVVVAPTLVPVKAGDRVKTDRRDALKLARNHRAGELTAVWVPDAEHEALRDLVRAREAAKKDQLRARHRLSKFLLRHGRRPPLEIKPWTIKYLDWVKRDVHFQPQAQEVTLLDYLHEVEHAAARIARLDAAIGEAVKLAPPKMRAVIAALQALRGIAEISAVTVVAELGEVTRFRKARQLMAYGGIVASENSSGERTRRGGITKTGNAHLRRVVVEAAWAYRHRPSVGFTLRKRQGPLSEKIKEIAWKAQHRLHARYTRLLARGKNKGVVVTAVGRELLGFLWAIAVQAEAEHQEQLPRVA

SEQ ID NO: 182678 - protein, 354 aa, unidentified
MSDDKYIAFDVHQATTVTSVLNAAEREVNTSIIATKAQPILSFVEGLRGKLHLTFEEGMYSAWLYDLLAGRVAELVVCDPRHNALLKEGNKTDAGDARKLAELLRAGMLRAVYHGSRSLRSLQELACSYEALVQDTTRVMNRIKAFYRSRGIDCAGRGVYTRKQRASWLERLPAGASRLRGELLHDQLDHLRSLRRKARRALLEESRKHTVAARLGEIPGLGPLRVALLIARVQTPHRFRSRRNFWTYVGLGLVRRGSAEYGLVGGRVVRRARAVNPRGLNPNHRPELKEIFKPAALTAIRRLGPFKDYYDPRAQQGVDPAILRVTVARKLAALTLSLWKKGGHYRAEGLKPQA

SEQ ID NO: 182679 - protein, 419 aa, unidentified
MSEQSEQPTLFIGIDWADQKHDCYVIDGDGKEFHQEIVHSPESINDWVNEMLKLAKGKPIAIMLEQSRGPLVYTLMFRENVLLYPVNPKQLARYRESYPGGGKDDPTDAMYLARMLRERITTLTASQPDDKNTRLLAHLSEQRRKLVGSQVKLRQQLTDQLKQYFPIVLELFGKEWQLPLLLGILSRWTDPRQLRRADRRLIRRVLSDHSIRDEERQAKIIARIRSARLLTNDEALILPSAMSVKLLVSQIRQSREMIKQFETKTAETMKQHPDAHLFTSLRGAGAVLAPRLLCAFGSQRDRWKDADSLAAFSGIAPVTKRSGKQCLVHRRFACPKYLRQTFHEFADSARMYCPWSKARYRMLRDRGMKHHAALRKLARSWIRILFRVWQTRTPFDCDRYIEQLQQRCPEIKPYLEMQK

SEQ ID NO: 182680 - protein, 316 aa, unidentified
MLLHKEIKARPEPLLALLEPFRDDLVVGVECMHCWYWISDLCEEHGINFILGHALYMKAIHGGKTKNDRIDSFKIAMLMRGGNFPLAYVYPKEMRATRDLLRRRTRIVQHGAMLKAHAVNTLGQYNLPPSKANLNNPGGRSQLTAAFSDPDVQRNIDLDLAIVDCYQHELKKLEWHLEQQAKQHDPASLNVLKTIPGVGRILALTILYEVGDVQRFESVQKFASYARLVKCKAESAGKVYGTQGNKIGNAHLKWAFSEAAVLFIRNNDKAKRYVEKLQKRMNKPKALSALAHKLGRAVYFMLKDKRVFDEQRFLRG

SEQ ID NO: 182681 - protein, 361 aa, unidentified
MEYYIGLDVSQRQTAICIVDGKGSLVKEGKATTAPSNIYAWITKHVDPKLIVKVGLEASAMSAWLYTELSKLGLPMLCMESFQAAEFLKAQRNKTDKNDAYGLAQLVRMGGEFIKPVLIRSQSNQEARALLTMRHFLVCQKVDLENNITGALKPFGLIALRGSTSAKTFRERVLAILDRADERDILVRESVMPSLDIYAALCKQLAVLTTKVEIMAKADPICRLLMTAPGVGPIVALSFVTAIENPKRFKYPEDIGAYFGLTPKQYQSGETDKKTGISKRGDIMTRTHLVQAATVLLTCTKKWSVLKAWGMKITKKHGFFKARIAVARKLAIILCKMWLKGQEFCWTKAPANMVSAGTMPA

SEQ ID NO: 182682 - protein, 354 aa, unidentified
MHQPEQATEVIIGVDTHKDTHTAVALDTLGTRLGTTTILVSREGYRQIEAWARSFGSVRAFGIECTGSYGAGLSRALQASGHRVLDVNRADRRARRRHGKNDPLDAEAAARAVLSGQATALAKSGTSSVEMVRHLKLARDSAVKARAQAMQMLKALIVSAPAELREQLEGIRGKVTLVRHLAALRPGPMTSTTASAKVGLRAISRRWLSLSEEIEAHDRDLDVLAATHTPELITAPGIATGTAAEMLIVVGDNPERIRSEAAFAKMCGACPLPASSGKTSRHRLNRGGNRQANAALHRVIITRMRCHQPTIDYVRRRTAEGKTKAEIMRCLKRYVAREVFTHLCKPRQPASETA

SEQ ID NO: 182683 - protein, 428 aa, unidentified
MNTNETPVGTADQYAAFIAIDWADQQHVFSLQVAGQTKKETGTLEQKPEVIGPWIAQLRARFGGRAIAIGVEQSRGALLHALLGYDFLVLYPIHSTTVAKFREAFKSSGAKSDPLDTDQILLILTKHLALLKPLRPDTVETRLLARLTQDRRKVVDLRTTHIQALLAGLKEYFPQAIELFNGNVTSRLAADFLKKWPDLTAFQQAKPATLKKFYYGHNVRTPEVIEKMLQLAATAQPLTTDPAIVESGRQLSRLHSQVIQTLNASIAEYDERIAAVFASHPEAKIFTGLPGAGAALAPRLLAFFGTDRTRFATASNVQCFSGIAPVTKSSGRSKVVHFRLACPKFARQTFHEFARLSVAQCQWAANFVEYHTGRGKKYQAVIRALAFKWIRILTQCWKNRTPYDEQKYLADLKKRGSIFATLHLEKKS

SEQ ID NO: 182684 - protein, 355 aa, unidentified
MSEEKYIGMDVHQATISVAVMDAQGKLIMECLLETKASTIVEFIQGLQGTLSLTFEEGTSAAWLHDLLKPHVSRLVVCDPRKAALLKDGNKSDRIDARKLAELLRTNQLKPVYHGEHGVRTLKELGRSYLTLTQDVTRVMNRIKAVYRSWAIPCSGTTVYAPRHRAEWLAKIGEPGVRVRAQRLYQQLDGLQPVRLEARRELLRESHKHPAVKLLRQIPSIGPIRAALLVALLQTPHRFRTKRQLWAYSGFAVETHDSGEYRYVRGKLQRNRERITVRGLSANYNKDLKNLFKGAAISASTRPGPLRDFYVALIAKGMRPTMARLTLARKMVTITLTIWKKGVDFDAKQLDQQAA

SEQ ID NO: 182685 - protein, 351 aa, unidentified
MNAITVAVDLAKTVFELAITDVQGRLAERKRLSREAFARFFANHVPCRIVMEACGTAHFWARTFEAQGHEVKLLPPQHVKPYVRRNKTDRADAAALLEADRCSEILPVPVKSEEQQGLQGLHRVRSAWMATRTDRINTLRGLLREFGIVLPQGPAAVLTRVPALLDEADSPIPPSLRPALTEIVSELRELDTRIAGVEQALRDQAQQRPDIQRLMAVPGIGLLIATALIAAVGGMEAFHDGRHLAAWLGLTPRESSSGSRRCLGGISKRGDRYLRKLFIQGARSALLAAQKQQAAEKKPLTRLQRWALELAARVGHNKAVCALANKLARIAFAVVRQRRAFDGDFVPVRAA

SEQ ID NO: 182686 - protein, 356 aa, unidentified
MSQKSSSAIAVIGIDIGKNVFHLVGQDRRGAIVLRQKWTRSQVEARLANLSPCLIGMEACVGAHHLSRKLQVLGHNARLMPAKYVRPYSKGQKNDFRDAEAIAEAVQRPTMKFVATKTADQLDLQALHRVRERLVSQRTGIINQIRAFLLERGVAVRQGLHFLRAELPGILATRTDVLSPRMVRIIEDLSADWRHLDARIEDLSAEIETFARQDQHCERLMTVPGIGPIISSAMVAAIGTGDVFCKGRDFGAWLGLVPKQISTGDRTILGSISRRGNRYLRALFVQAAWVVLVKLGPKQWERYGLKSWIEAAKKRLHHNVLAIALANKLARIAWAVLNKGRVFACDKTDAVASHPA

SEQ ID NO: 182687 - protein, 351 aa, unidentified
MWIIGCDYHPSMQDIAVADTETGEYLERTLNHSTGEAEKFYRDLKQKAVTVRVGMEATGHGRWFERLMAELGFELWIGDAAAIKAARVRKQKTDREDARLLLRLLSENRFPRIWVPDPGNRDLRQLLWHRHRLVQMRTRVMNQLQAIAMNEGVRLRKKLWSESGRAKLESLQLASWAARRRKGLLELLDCLTPKIEELNVAVEQEAQKRPAVRRLMTHPGVGPVTGLAFVLVIGTPQRFRCGKQIGSYLGLIPCEDSSAGRQRLGHISKQGNSLLRFLLVEAAQAAVRCDADWKRRYLHLAMRREKRIAKVAMARRLGVQLYWMWRKGWDYQQVLQFGSHAGELVTGHGVK

SEQ ID NO: 182688 - protein, 375 aa, unidentified
MEHTRFVGLDVHKRTVVAAVADAGRTGEVRLYGTVANSRKAIAELLAKVSRGGREKVLFAYEAGPCGYQIQRQLAGAGHECQVVAPSLIPRKAGDRVKTDRRDALMLARLLRAGELTPVVVPEGEQEGFRDLCRAREDAKNAQRVARQRLLSFLLRHSMNYDGQNWAQPHMRWLSDLKLPSPAQQIVFQEYVRAVEETTERVDRLTEQVEEYGRSSGFAKPIAAYQALRGVSTVVAATVAAEIGDLTRFDHPKKLMAFTGLVPSEFSSGESERRGGITKAGNQHVRRVLIEAAWAYRHPARVSRLIRERQAGLSAEVRDISWRAQLRLSKKFRKMAGQNKPHQVAVTAIARELVGYLWEIAHAAQEKSKPTRKAA

SEQ ID NO: 182689 - protein, 313 aa, unidentified
MMATHRIGVDVGKAELWISIDGETAQPCPNELPAIRRWVRGLEGPADFALEATNDYHLALALEAHHQGHRVYLINGYRLNRYRESIGGRAKTDAGDARLLVRYLQREQDELRPWTPPPEGYRTLQKLLRRRATLVRARVMLEQSLRGVPELQSNLKDLLREIGRLDAVLQRVLRETVGRAGWSDHARRCQQIEGVGPLTATGLTMAFHRGAFRSGDAFVAFLGLDVRIRDSGTKRGQRKLTKQGDPELRRLLYLAAMQAKSKAAWSDYYQRCLDRGLATTQALNALARKLARVAFALMKNQTDYQPKIPCGET

SEQ ID NO: 182690 - protein, 349 aa, unidentified
MSRYIGLDAHATSCTLAVVGKSGRRLGSQVVETNGSALVEAIKAIPRPRHLCIEEGTQSAWLYEVLSPVVDEMVVTQQNRKSTGNKSDKLDSFGLATGLCKGTLPRRIYKAPQRFAELRALAHTYTKIAWDVARTRNRLKSLYMSRGVHATGKSVYGTAKRDEWLSLLPTTYRSSASLLYAELDQMVELKAEAREQLVKESHRHDISHVLETCPGLGEVRVAQVISTVITPHRFRTARQYWSYCGFAIVMRSSSDWVQGSRGFERKAVLSTRGLNRQFNRVLKEVYKSAVISVLKDTTHPLTLHYERLLAAGTKPPNARLTIARKIAALSLAMWKNEERYDPERHTTHR

SEQ ID NO: 182691 - protein, 351 aa, unidentified
MLIIGCDFHTRYQQIAMAEETTGELLLEQRLDHESGAARAFYRSLQGPVRVGIEATGPIHWFERLLRELGHELWIGDSAKIRASEVRKQKTDERDAALILDLLLAKRFPRIGVPTPAERDLRQLLWHRHKLVRLRTMLGNQLHFLAMSQGLCRKKKLFTKKGRAELGNLTLGPWASRRREELLKLLGQLDPPIAELDRAVLEEAQRRDDAVLLMTHPGIGPVNALAFVLTIGPVTRFPCSRKIASYLGLNPTEESSGGRRRLGGISKQGNTMVRWLLIEAVHHAVRQDPALRQDYQRLKFRRGHAVAKVAIARKLAVRMYWMLRSGADYARLVRRQGSPGATLMNAGSSLG

SEQ ID NO: 182692 - protein, 402 aa, unidentified
MNPVFGLDISKEESHGQAFIEHGKPYRGTFKFEHTQEGLKKLLQVIQDLEHSSRQRPILILEATGHYQSPVVQFLEEHHYLYIVINPLISNRLRKSNLRKVKTDAADAYLLAEPYYKEEFEPFKKRGVQLLNLRYLTRQYEALSKMCVQTKLQFQAVLEQFSPAYKGVFGAMYSNISLQFLNEFPASNSVLQTDEDTLKTKMKELLSSKRGRSEEWIQLRVQRLLDAAKENPFQRTMYASHLVNLKVLISLILQYQEHLAGLEQNIDALAGEIEEYDLIQSIPGIGHKIAATILSEIGEVDRFDHPKKLVAFAGIDPSVFASGKFTATRNRITKRGSRQLRYALVLAVQCGLIRSRNTRIKEFYDRKRAEGKPHKVALVACANKLVHWLYAILKNKKTFRPA

SEQ ID NO: 182693 - protein, 404 aa, unidentified
MDEAFAGIDWASEEHALCVVDEDGLKLEGEFFVHDEAGIEELIARMRALGVVRVAIERPDGLSVDRLLEAGFTVLPIHPNKLKATRPRYEAAGGKSDGFDAFVLAELARTDSHRHRALCPDSDETKALRALTRTREDLVGARVRLANELRAQLDAFWPGAARIFGDIDSPIALAFLERYPAPGDARGLGEKRMAGFLARHGYCGRRSPAELLERLRIAPAGRAGALEAEARRGAVLGLVAALTPIVSQIRELTSQIAGAVRAHPDGKVFLPLFKDPKSVITAARLVAEIGDDRSRYPTRESLAADAGMAPVARESGKRKVAAFRWACDKRLRDAVACLANATRHTHPWARSVYLDARARGLEHAHAIRVLGRAWLRVLWRCWQDEVPYDPAKHGNLRRLQPVGG

SEQ ID NO: 182694 - protein, 353 aa, unidentified
MTDTTSIAWLGLDALSRNCVLAQLDDHGNELNCWRFPTQPQQLLKHVQAIPATVKRLMLEESNLARWIGQLLKPQVQQLIVCDARRNRLISQDSHKHDRRDAFALARLLRLNEFKPVWQPADDQRVLFKRAAQAYENAVLRQTRLKLQIKSLFQHWGLFPAGASVFAKAGRATWLKQLPYDPLRSQALLLYELLDQALAGQAQARRLMCQAGRLFPEIQRLRTAPGVGLVGAHLFAAYVQDPHRFAKFSRLSKYCRLAIRDRTSDNKPLGFKQLDRQGNGVLKAISYRAFLQAAKRRSGPLWDFYQASLRLTGSTTHARLNTQRKILLVLWTLWLKGEEFDPNQFSRSQPMNV

SEQ ID NO: 182695 - protein, 415 aa, unidentified
MALKIVYKICCGMDVHKTFVVACIASTDKQGVTSYESHRFSTYTKGLKDLLQWLLTRNCKDVCMESTGKYWIPIYNILEKDCSIVLAHPKYVKAIRGKKTDKKDAKWIADLFKHDLVAGSFMPPADIRQLRDLMRYRFKLTCFKSSEKNRLQNCLTVSNIQLGNVVSDTFGKSAQAILDKILENPEDASFDLEPLVFKSLKKKLPELRDAIDGYITPEQAGKLKVIKAHYESLESRKAELEELILALAAPYQQELAILQTAPGISSAFTAIGIISEIGTNMEAFPSAKHLCSWAGLTPTSNESAGKKKTVRVSKAGCYIKPLLVQCANAVVKSSKHPEMRNRYLRLKKRRGHKKAIIAIARMLLTALYHMLKNGENYNAELYRKSDLPPVDREITVEQAILIARNQGYKIKSATA

SEQ ID NO: 182696 - protein, 340 aa, unidentified
MEAERMMAKQYDHSIAVDWSQRNMAIAVLRKDAEKPRVMDVPTSVSELKVFLRSLKGSKILTLEESSTSQWLYTELRESVDQLIICDPYRNRLLQDGPKNDKIDAEKLVVLLRSGLLKEVFHSGSEYFHLRKLVSSYNDIVRSMVRFKNQRAAVCIAQGKSRKCGSEEIRSESFSLEALDALINVHEDRLEKFAAEFKRLRRTNKLIQALVTIPGIKEKSAVKLLATVIDPGRFPDKGHWLSYCGLVRLEKKSGGKSYGTRKSRYSRSAKSIFKTAAMVCIGLGREDNVFRKYYNRLKDRGLPEHNARHAVARRIAVVALGILKTGLAFENRWEKKEAEK

SEQ ID NO: 182697 - protein, 415 aa, unidentified
MKVVFPTCCGVDVHKTFVVATIITTPADSLQPHYQKKRFSTFNSDLNRFADWLLEHNCLDVCMESTGKYWVPVFNILEKRGIRVVIANPKWVKAVKGNKDDTKDSKWIGDLFRIGLVKSSFIPGLNIRILREFSRYRYKLVSMKSSEKNRFQNAFTVCNVALDSVVSDMFGKSATAITDYLTSDESFDPDHCVSLLQRSLKKKAEKVLESIEGYSISDEQKARIKVIREHYDFVEKLIAKVDTCVNEMVEKYEGEINLLCTIPGIDRNSAITIISEIGADMSQFGSSKRLCCWAGLTPGNNESAGKKKSVRISRAGVYLKPALVQVAHAAVKDKANPYYALKYERIAKRRGKKRAIIAIARMILTAIYTMLCTGEVWNPVDLFKIDMPEHLKEQQLAKAIKQATRFLEKQGLTVA

SEQ ID NO: 182698 - protein, 415 aa, unidentified
MSYKIAGIDVHKKVLMVVVMDAHAPADEPERRRFATMPSDLRRFSSWLREQEVKEAVMESTAQYWRSVWLELEPYMRLQLAQAFSNRAPRGRKHDFKDAERLVRRLIADELILSFVPQGEQRTWRNMTRMKTQLTRDRVRLQSQMECLLEEMRIKLSSVVSDLLGVSGLRILWALARGESDPKKLAALGEERLRCSEEQLIDALTGSPQPSHRELLSLQLERLQLIDEQIAKLNGMIAQAMKPHQETVMRLAEVPGFGVDSAQQVIAEVGVKASTFPSAAEFASWVGTCPGKDESAEENQSSRSAKGNKYLRRLLSQVAHAAVKKNGSHFQTVFRRLLPRLGYQSAIWAIAHRLCRVLWKILHEGVRFIEQGKEPDPQAKKQRARILARALRKLGYNVAISPMNSPTAESATPTQ

SEQ ID NO: 182699 - protein, 411 aa, unidentified
MDVLFERCCGLDVHKKLVVACVTITPPNGEPERTVHSFGTMTDDLLKLGDWLEACGVSHVAMESTGVYWQPIWNLLEDRFQLVLVNAQHVHQVPGHKTDVRDCEWLAELLRHGLLRGSFVPARPQRELRELVRYRTGLVRQRAQVTNRIQKTLESANVKLASVATNVIGVSGRAMLAGLARGETDPAALAQLARGRMQRKRLELEGALSGRMGPHQRFLLQEQLALVDSMDASIQRVNEEIARRLQPHTDVFERLDDIPGIGPRIIQIVLAEIGPDVRRFPTAAHLASWVGLCPGNHESAGHQRTGRTRKGNPWLRTALVEAAQAASRAKGSYLAAQFRRLAARRGVKRALVAVAHSLLVIIYSLLTRASTYADLGAGYFDERDRQHTTKRLVDRLQRLGYQVNLELSATT

SEQ ID NO: 182700 - protein, 575 aa, unidentified
MGWLYMQSLGGHAGPRDYLDAQFTFENAEGRSKVLRSTLLGDTYYAAVEQQRRDGGESAVFALVCLTYYNPRDAEGFVFGYKDMTERMGPCESDCPEDILDLLTPTDWPYAIAWRARCRANAAARRSQATQKSASSPDGWRRRHRADRRRDGAGREEILWGGAVQAIGVQAGSHPQEDSIMLAEKEIAAQVSSMDTDPIFIAIEMSRSKWLVGTHLPASAKVGIHGMDWGDTAALFALIDRLRLRAAKALGVAEVPILCGYEAGYEGFWLYRRLSEAGLRVRVIDPASLLVNRRAKRAKTDRIDVKAMIRALMAYTRGEDQVLSAIQIPSVEQDDERRLMRERQRLVKERTAHTNRIKGLLLTQGIVGFDARADGADGQLDELVTGDGRRLGPRLKDEIRREIARLRLVMKQLAHVDDERDAVALPKRPSACDSAQNQDGADAAMIKALARLKGVGPNDASVLVREAFWRKFVNRREVAAWSGFAPTPWASGAISREQGITKAGPASFRAYVIQLTWRWLQWQPQSRLAQWFGERTNGASGRVRRIMIVALARKLLVALWRYAMTGLVPTGAVVA

SEQ ID NO: 182701 - protein, 331 aa, unidentified
MKNREFVGIDVSKNVLDVFVLSAKFHFTIANSPEGFAQLLEIVSSKLKDSFSRVFFCFENTGRYSRLLSVFMQDSGFGFAALDALDLKRSMGLTRGKSDKKDARTIAVYAWRRRDELVTTKLAGPVLDQIRQLLTLRDKLIRHRTAFKNTSRDLHDGYFDGEFDFIKERQQSMISHLQLEIDLVDKEIYRIINLQDDILINYKLLRSIPGIGNVLAVYLIALTHNFTRFDTPRKFACYAGIAPFEYSSGTSVRGKTKVHPCANKHIKSLLNMAAMSSIQINGEYKMYYQRRLAEGRNKLSTLNIVRNKLVFRAFAIVKRGSPYIDLHKFAA

SEQ ID NO: 182702 - protein, 410 aa, unidentified
MTYFVGLDWAAREHAVCAVDERGVAVAHFMVAHSATGMEDLIARLGKLAAPSELRIAIERPSGLVVDTLVDRGFAVVPIHPNAVKASRPRYSAVQGKTDLGDAYLLADLLRTDGHRFRTLAPLSDEIKALRGLVRLRDDLVGQRVALGNQLRSLLEEFWPGAAAIFADVDSPIALDFLDRYPTAQSAAALGEKRMASFMARHAYCGRRSAAELLERLRGAPVSAAGELETEAKGECVRALVAVLRPLVAQIATLTAAAEHAVEAHPDAQVVTPMFRSGRICAAQLLAELGDDRARFISADHLAAEGGVVPVTRESGKHRAVSFRWACNMRLRTALTTLADSTRHTSPWARAIYQRARDRGCEHAHALRILGRAWCRVIWHCWQNHVAYDPAKHRAARQLTVRLVDEQEAA

SEQ ID NO: 182703 - protein, 372 aa, unidentified
MPDVISTAPADVRLWVALDVHKFSIVAAVLPQSGGRPEVTRIETTEKAIRRFIKSLGGPEGLAVSYEAGPGGFALWRLLGSIGVACDVIAPSLVPVRAGDRVKTDRRDAKKLVSLFRGGLLRFVQPPTPETEGLRDLLRCRDDIRCARTAARHRVAKQLLRHGRIYRDGKKAWTLRHRAWVLRQRLDDPLAHEALSQMLTHLDSLDRQLAALDAQLEQIAECEPWGWQVDKLRTFRGISTLTALGLIAEIGDFARFGHPGELASWLGITPSEYSSGDQQHRGHITKSGNRHARRLLTEAAWHYRHPPRRPTTGPEPSRRAWQAQIRLHARQRHLTQQGKRSTVVTVAVARELTAFLWAERTQQPAREELQAA

SEQ ID NO: 182704 - protein, 349 aa, unidentified
MIARSDAACFVGIDLHKDTLTACVVVGKDREVSFERIACKSRERIREFFSSLPRPSAVAIETVGFYRWLWTELDPVVDQLVLCDARGARALAGRRIKTDREDALNVALLLADGRLPFAWAPPENVQLLRNWTRHRNGLSRQHAKVLHHVKSIMHRVNRPGPTRLDASGLQRYLLAGVERFSADDLTMLWQHQRRLVEIEQDRAHSERRIAELMRAPEFARLRTILESLPGVGLVVSATAIAEIGDFSRFPDSKAIGRYAGLAPTVYASGNSSRLGRISKTGSPDLRWALQQAAWTAIRCDAGFKKTWLRIAKTAGKKAAAVAIARKILVLMGTLVRKDELYKAREPIAA

SEQ ID NO: 182705 - protein, 358 aa, unidentified
MTSITPDSTPLTEVAGGVDTHQDTHTAAVIDGVGRVLGTEQFPATPAGYTALLAWMRAFGQLSRIGVEGTGAYGAGLTRLLQAEHINVIEIDRPDRKSRRFHGKSDPIDAIAAAKAALAGDRTGTPKRRDGRIEALRALRIARRSAIDQRADTQRRIKALIVTAPDALRQSLRGLSSTKLIATCAALTSDREAAADPTTATQLALRSLARRHQQLSAEIADLDELLDVLVMAINPRLIAAHGVGTEIAGQLLVTAGENHDRIGSEAAFAMLCGVAPIPASSGKTTRHRLNRGGDRQANAALYRVVLCRLRWDARTRAYMDRRTQDGLSKKEIIRCLKRYVARELYGLITTTNDQERSD

SEQ ID NO: 182706 - protein, 407 aa, unidentified
MPIYLGIDWSHTHHDACFLNEGGQVLSRLTVPHSPEGLAQLEAARQKLGLTGDDGWVGLETAHTLLIDFLWEQGYRQVFVIPPGAIKGARRRYRQSNADTDQFDAWVIADVVRTDPQTLQPWRPDGLLVRQLRAQVSLLQFLTQEIRRLGNRLGAVLARYYPAALPVFHEPTAPIALHFLQAFPPPQSAATLTLEVFTRFARGHLYRQPARVLTACFARLQASYPVASPETVAAYQAEATGLARHLLSTLAQKKTELRALQSLFTQHPDYAIFDSLPGVGDFLAPALLAKFGDDRARFPDAASVQCLAGTCPVTEQSGNSRRVFFRQACDHEFRQIAQQWAKASLGQSTWAATYWQSVQARSRSKSHAYRCLANRWLAIAWKCWQTHQPYDEAYHLQHRAQRLAKSA

SEQ ID NO: 182707 - protein, 353 aa, unidentified
MSVYVGIDVHRKRSQVAVVTEDGTVQLNKNVVNGSEPMLRLIGGLPPGTPVAFEAAFGWGWLAELLEDYGFEAHLVHPLRCKAIASARLKNDKVDAAILAQLLRADLLPEAWIAPPAVRQLRALLRHRAGLVRLRTQQQNRIHAVVADFGYDRSGSYLSGPGRGWLAGLELPAVSREIVTDALAVIDGLAPLTDRIDGELRQHAKADPRVKTLTTLPGVGQFTALVMLAEIGDISRFPSARKLASWAGLTPTVRGSDLTVRHGHISKQGSAWLRWVMNQAAQTAKRSPEFSATYAAIAQRRGKKIATIAISRKLLTRAWHLLATTAQAPGPAAPDASTATAAHPRPGGSPSPG

SEQ ID NO: 182708 - protein, 340 aa, unidentified
MNNGLKLLGIDIGKNSFHLIGHDAGGHQVLRKCFNRNRLLQFAAQIEPCTIAMESCGGSHWLARKLASLGHRVKLIAPQHVKPYVTGNKNDFIDAEAICEAASRPRTHYVAAKTVEQQVLSVQHRLRESLVCHRTEAINRVHGFLLEFGIALPATKAAIAKVPELIDNSRSDLPLQLKRIMEHLLEDIRRLDAEIKACDVQIKQQLAQDDAGTRLMTIPGIGPITASALVADLGDASSFKTSRDLSAFLGLVPRQFSTGGRPVLLGISKRGDRRMRTLLVQGSRALMIRIDRREDALGQWVRNLLARKHPNKVACALANKLARIVWAVLRRGGTYNASMI

SEQ ID NO: 182709 - protein, 429 aa, unidentified
MQESASTAPVEGVAAYVGIDWADQKHDVALRSASEPGKVEHRLIAHEPEALMDWLGELQQRFGEKGKILVCLEQSRGALIYHLMGYEFLELYPVNPSQLASFRETFSPGGAKDDQPDAELLCELLYCHRDRLKAWKPDDELTRKLAFLNEGRRKAVDQRTQLANEIKSRLKVYFPLALQVLDNDTSTALAADLLLQWPTLDGLQKQSAHKLRKFFYAHNCRNEQKLLERLELIKVAKPLTRDPAVIEPAALRMQLLAQQLKSLLPYIARYEKWIAELFDAHPDSFLFRDLPGAGPALGPRLLTAFGTDRGRFEHSINFSSLSGIGPIRRASGKKTGKNASVHFRHACPKFLRQSLHEFGLHSIRSCPWAKALYQSLRARGKGHHAAVRAVTFKWIRILFCCWKNRVPYNPERYLQALQTRGSLYAEAAG

SEQ ID NO: 182710 - protein, 311 aa, unidentified
MEHAGFVGIDVSKAHLDVHVRPTGDSFRVSHDDAGFATLLERVRPLTPTVVVLEATGGYEIPLAGTLAGAGLPVAIVNPRQIRHFARATGQLAKTDLLDARVIALFAEAIRPTPRLIPDEQAQALGEVIARRRQLVEMLGAELNRRRLLRDRRLQHHLDAHIAWLEEALRRLDHDLTTLIRSTPMWREADDLLRSVPGIGPVTACTLIADLPELGRLDRRRIAALVGLAPVARDSGTFRGRRMIFGGRGHIRRVLYMATLTAITHNPAIRAFHQRLVAAGRPGKVALTAAMRKLLTILNAMLRDHRPWQPA

SEQ ID NO: 182711 - protein, 368 aa, unidentified
MIVGITTLPKGAPYEPREVYRHGRSPATISVAVLDGNGKIIMECILETKAATILQFIQGLHGTLSVTFEEGTSAAWLHDLLKPHVSHLVVCDPRRNALLKDGSKSDRIDARKLAELLRGNQLKPVYHGEHGIRTLKELGRSYLAITQDVTRVMSRIKALYRSWAIPCSGTTVYAPRHRAEWLAKIQEPGVRLRAERFYQQLDLLQPVRQQARCDLLVESRKHSAVKLLRQIPSIGPIRAALLVALLQTPHRFRTKRQLWAYSGFAVETHDSGEYRYVRGKPQRNRERMTVRGLSHNHNHDLKNLFKGAAISASMRPGPLHDFYVALLERGMRPTMARLTLARKMAAITLTIWKKGADFDPRQLHRQAV

SEQ ID NO: 182712 - protein, 445 aa, unidentified
MTFRTIGIDLAIRGDHLAQIYDDGRPNGRAIRFRHDQPSLAAFVQTAVMGLRADDHIQAIMEPTGMSWFPVAHHLADAGVTVARVKGKRVKALRRYLSEHAKTDMADAQILAAMPSFGGPRLDPVHIPDPRSHALQRLTKQRSRFQNEIADARRRLLDLIRWASPRLEAVLPDLGTRLSLALLQKWFHPSDVLKARRTTLAKYVAAHAGGNHPRSGPFVETLITGLREAAQYAQDLHGTHIDFSELQFEIAMEIKNVLAKIQTVGDLERHIADLYKHLDPQGLVLSIPGVGRHLAPTLIGILQNIERFHSEKHLRGFCGLFPRRADSGGVERAGQTLTQGGNNRIKQALYLAADTARKTDPELAELYWRLMTVKGHHHKQALCAVANRIVNRIFSVLKRGKPYEVRDREGNSITLSEAKAIILERYTVGENIRAGRRSNRIEKTP

SEQ ID NO: 182713 - protein, 345 aa, unidentified
MKTVYVGIDLGSKFCVGTALDSKGNILNSRSFGTSEKNLIDYVAGQKGKTRVLMEECELAGWAYRTLLAHAESVEVCDPKRNAWISRSERKNDRVDSRKLAEQLRIGSYSVIYHPEEDEMAAFKISVQHYDKTVKRSTKLKLQIKATLRGQGVMTATGHVYGRTGREKAIEKVKHPAIREILHQDLELLDQLMKEKQQAKSRVIRLSKNFPVIERFKKMPGIGPILAAQFVAFVQNPHRFNKRRLWAFSRLGIAKRSSDGVSLGPERLSRSGNGSMKDLSRKAYEAAMRTRDPNGIKIFYGCSLSRTGDPNHARLNTQRKILATMLAMWRDGTEYSDDLVLGKRA

SEQ ID NO: 182714 - protein, 462 aa, unidentified
MGKKRDSQSSAGSRRQLQGLPLVRTKVAGIDIGSERHWVCAPTPDGSGREIADCGATTPELIRMAEWLQARHVESVAMESTGVYWIAPHEVLEAHGLEVLLVDTRQLARVPGRDKKTDPTDCEWIQRLHSCGLLRGSFRPPEAICMLRTLVRDKATLVAESGDWVRRMQKSLDQMNVRVHRAVSDISGTTGMAILRAIAEGERDAGKLAKLRDPHCHKSEEEIAEQLSGHWREDHLFSLQQGLKMYDATQERVAAYDQEILRKLGQMEREEQRGKSAPPLNNANKARLIQNRGQEPTRQALYRMSGVDITQIDAIGVETVAVVISEYGPDLSRFPTEKAFVSHATLAPHVPKSGGKPVKKKKRNSASTRVAAALRMAALSLRHSNTALGAYYRSLAQRIGGDVALFATARKVATLIYRLLRWGQAYVDEGAQAYEKRYREQRIKSLASKAKQLGYQLTPVTA

SEQ ID NO: 182715 - protein, 345 aa, unidentified
MKIVGCDLHTRYQQIAMLDQETGELIERRLEHEGGEARGFYASLEGPVRVGIEATGHTRWFEGMLAELGHELWIGDAAEIRASMVRKQKTDARDAAHLLQLLLSERFPRLWRPSLAERDLRQLVWHRQKLVWMRNAIGNQLHALAMGEGVCRKKKLFTKKGRVELEGLKLDPWASRRRQELLRMLDQLDASLKEFDQAVAEQAEQSPAAVLLMTHPGVGPVTSLAFVLTLGRVERFARSKQVVSYLGLNPREYSSGGRQRLGSISKQGNPMMRSLLVEAGHTAARLDHELRQDYQRLKLRRGGGVAKIAIARKLAVRMYWMLRSQSSYAQLVRMQGSPRATLVEN

SEQ ID NO: 182716 - protein, 392 aa, unidentified
MISVGIDVSKGKSTVCILKPYGEIVSKPFNITHTQKDLSELSSMLFRLNDEVKIVMEATGIYHLPVLTYLQEKGFFVSVINPYLMKSYRNESLRKAKTDKIDSRIIANYGIDHWFKMKEFQTSGEIYEELKLLGQQYRHYMKLHLLSLAELTHLLDLTMPGIKNLLASWNETNRKDKRSDFVERFWHYDVITSMSEQEFTEEYILWAKEKKYVPSQEKAKVIYTLAQESIPTLPSETSSVKILVTEAVRVLKEVDATLGLILSRMQEIAKTLPEYSVVREMGGVGNTLAPKLIAEIGDVRRFRNGKALVAFAGIDPPPYESGQFVGCNRKISKRGSASLRKVGYETMRSLKMRSRPEDPVYRYVVKKESEGKSKKAAKIAGLNKFYAFIMLE

SEQ ID NO: 182717 - protein, 345 aa, unidentified
MTTMNYIGLDVHKKTISYCVKDVSGRIQQEGKIGSTRRELDCWMKTLPQPWTVAMEATIFSGWIYDHLLPHATQIKVAHPLMLRAIAAAKKKNDQIDASKLADCLRCDFLPECHMMPRAIRDRRRTLRYRHLLVRQMVQMKNRVSGLLMETGVEYNKQRLHKVSYFRELLSANGEVPPSIRPLLQLSRETIERCQKTEYALVSSLQRDPVLADRIKRLRTVPGVGPITALTWALEIGDVSRFGSIKKAISYCGLCGDERSSADKAMRMPLSKQRNKHIQRALVEAAKLAPRQNHEMAVIYDQERQKGNSNRATLAVARKMVAYLLAVDRQQRDFVPAEERRTTAA

SEQ ID NO: 182718 - protein, 348 aa, unidentified
MNAIHYIGFDVHKKTISYCVKTAAGEIVEEGCTPAERGALRQWAAARPQPWRGAMEATLFSGWIYDTLKPYGEQLEMAHPAKMKAISAGKKKSDTIDARTIADLVRCNLLPACYVAPPRIRELRRLLRYRSLVVSEAVRMKNKMAGLLMETGAIYVKEKLHGKKYFASLLEELEEVPESVIDLLRLSRGALEMFESTQRRLVRELLADPELAERIERLMTIPAVGEVTALTWALEVGDPQRFRSSSDAMSYCGLTAALKSSAGKQQRGPISKQRNHWLQTTLIEAAKLAPRWNPQLAALHARESERGNRNRATLAVARKLVAYLLAVDKSGQAFQVRAPSEEPTPKAS

SEQ ID NO: 182719 - protein, 450 aa, unidentified
MPAKKKCPPAPPTRVVHPNAAGIDVGGDAHVVAVPTDRDAQPIRSFGVFTEDLRKLVAWLRQCGVTTVVMESTGVYWIPLCDFLETQGFEVLIVDPRSLARNLKKKSDVQDAAWLQELHAFGMLKSCFRPEGEVRHLRTLWRHREHLITEAAKLLQMMQKVLVQMNVHLHLVVSNIAGATGMRILRAIAKGQRDPIKLAGLRDAQCKKSGAEIAKALEGIWDPAHLYELKDLLKTWDHYQDRIHACDREYEKAAGKMPDKTQGQPVPKAQKETHISRNGVTEFDGDALIFKMTGVRLTDVDGLGANTVLTVLSETGPDLAAKFATEKHFAAWTTLAPRKHQSGKRTKFPARTASRVARAFRLAAYSLINAKSVLGHFLRRLRARLGIGTAIRATANKLAKLFYRLITRGEAYRRDSGEAEEIKQRERQLKALQRKAQELGMQVIPQGVPA

SEQ ID NO: 182720 - protein, 331 aa, unidentified
MTYYIALDVGVRNLALCIIDQAGEVQLERSLPSDVDAIVECLGKFGGVIEAIGLEAGTLTQYLVYGLRAARFRAVVMEARHVKSALGAMRNKTDRNDARGIAQILRTGWYRQVHVKSLESHYIRTILSSRKVLLRKCMDLENEVRGLLKVFWIRLPASLSRRAFDKAVRKPIEQNQALAHALLPLLDARSELYKAFLELDRRVRAIADKDEVCQLLRTIPGVGYITSLTFKAAVDDPGRFKRSKTVVAHFGLTPRRYQSGERDIQGHISKSGDGDVRAAAKPSLKVWGTKLIKAKGRRRGRVAVARKLAVIMHRMWIYGTPFSHKAPEVVR

SEQ ID NO: 182721 - protein, 340 aa, unidentified
MAMQVGKLIVGADVAKAELVIHHDDRDEIIRLKNAKLEIKRWLKQQPLNTAIAVEATNVYHLDLVELAHSLGFEVYVIDGFQLSNYRKSVGGRVKTDPSDARLLSRFLKNEGEDLRPWTPPPAVYGKLQSLLRRRSALVTASTAMMQSWANEALLKVAFKTFVKSIDQLDLLIQKKIKEVLREAGLHEQVARCQAKEGIGFLTATALVMAFMRGEFKSSDSYIAFLGMDLRVSDSGQKNGRRRLTKRGCSEIRRLLHNAAMAASRSAAWKDVYEKYRKAGKATTQALAILARKLARVAFALMKNQDEYVTKGGNWLAANHRISHIWAAAATRRGSGLAPR

SEQ ID NO: 182722 - protein, 375 aa, unidentified
MYLCILDATGQVLVHRNVPSTPAAFLETVAPYRDHLVVAAECMFTWYWLADLCAAEHITFVLGHALAMKAIHGGKAKNDKIDSHKIAALLRGGMLPQAYVYPAGMRSTRDLLRRRLHLVRKRGELLAHIQNTRAQYNLPECGRRLAYPGNREGVVEHFPDPSVRKSIELDVTLIDQDDALVNDLELTIVREAKRHDGDAFHRLRSVPGIGKVLGLTILYEIHDITRFDRVQEFASYAHLIKCAKESAGKKLGPSGAKMGNVHLKWAFSEAAVLFLRHTAEGKKLLAQLEKTHGTGKALAILAYTIGRAVYDMLSRGTVFSMVRQRGRLMGHPPSPRHASFAYPLDAAPPPSLETTDALRRRRFSEKAGTRVRLSF

SEQ ID NO: 182723 - protein, 412 aa, unidentified
MRRVIGIDVHRTFGEVVIWENGILRHAGRVDMTRTALEGFGKKLLSTDEVVIEATGNSMAVSHVLTPFVARVIIANPLQVKAIAEAHVKTDKIDAGTLASLHAAGYLPQIWTPDAVTERKRRLVARRYQVVRHRTRIKNEVHSILHAHLVPKCPHADLFNARGRAWLARQTLPDDERAAVDRHVRELDRLAEDLALLDRHIAEVAIDDPAVRRLMTITGVDLTVAAGVVAAIGDISRFKSPQKLVSYFGLNPRVRQSGLGVAHHGRISKIGRSHARAMLVEAAWSAAKAPGPLHAFFVRIRARRGHQIAAVAVARKLTVLCWHLLTRGEDYLWARPALVANKTRAMELQAGHPQQKGSRPGSAYAYNVKALRDQERLIAAKAERSYEHFVAQWKPRRPKQPARGRLNSAGHE

SEQ ID NO: 182724 - protein, 401 aa, unidentified
MEGPIVSIDVSNGNSHYMCFIKNNKRFGKVKKIDHDIEGFKRLLEDIQKLEAETNEKVCAVFEATGVYTKPLERFLSKNSIKTYMINPLESARKRKEEIHNKKTDKLDPISISKVYYDKEEMMELKKKDETYNWLRKKNRLYEDQLNHLRKYKVTFQNQLSICFPGYLDLFKDGYSDIPMTILKKYPHPDLLKNKKAETVARYLEKNTCHTHKVSSEYALKIIEFAKKTYPGCEKDDVEVEIFKILLDKVIETQRECEKTLNEMITVASTLEEYRYISSIDGIGPNLAARIIAEIGDIEEFKSREALVAYAGLDPHIYQSGDQDGKHLKISKKGNKYLRCLLFLAVGCSIRGAKDNPVNRFYQKKKQQSNPLNSKAAKTACTAKLLKIIYGICKNKTTYER

SEQ ID NO: 182725 - protein, 256 aa, unidentified
MKVFYLGVDVSKKKLDLCLRSNGKDILYDVIPNDLSSIKSWLTRTFEKFFLSEDSLVVCAEHTGQYTYPLVCATKSIGVYLCLEDAAKIKYCHGIPRGKNDKIDACRIAMYAERYNDCLQPYTASELIIQKLKNLSTERSMLVADRAKYQSQLKDQVDYMEHSIYIAKCNRVEGIINTFTDYIAQIDLEIKELINQAPVIAHQMDLLMSVDGVGERVALKMIMETDAFTSFTDPRKFCCHAGVVPFVYVSGSSQRS

SEQ ID NO: 182726 - protein, 311 aa, unidentified
MQLTIGIDVSKDWLDAHRLSDRQHIQVTNDKAGHKALIGWIGKADLPLIVFEATGAYHRQLEAALGAGGIPFAKVNPRQARRFAEATGRLAKTDRVDAAMLARMGAVLELEGRTPHDKPLHDLRELLAARRALIKDRTAARTRLATATLPLVKRQLNARIKQIETQLQTIDAAMADTVAQNEAMSHKLAILVSIPGVAETTALSMLIEMPELGTLEGKQAASLAGLAPISRQSGKWQGRERIQGGRAVLRRAIYMPALVAARFNPDLKAKYDQLIRAGKPAKLAITAVMRKLIVMANALLRDHRKWSETCP

SEQ ID NO: 182727 - protein, 359 aa, unidentified
MKFVGIDYHKRYSVVSATDECGQQLKQRRISGNTAAGFAQFFSELGEENKVVMEACWNWGWLYDLLGQIDGVGEVVLAHPYKTRLIAEAQIKTDQLDAQILAKLLRGDLIAESHAPSAATRARKHLLRQRLFFVRLRTMLRNRMHAILDRQHGLGRPQLKNFFCRRGQTWIENVQLPCADDQPLLRQDLEVAKVLDDKIKELDRRIGQSQSAEEKLLESIPGIGPLFSSVIATEIDGIKRFNSSAKLAAYAGVVPTTHASGGRVFNGRLLWQCNKWLRWALIEASWSAIQFSGYFGAIYRNARARGKNKNIAITMVAHRMAKIIWLLLKEQRPYTETLPDRSADGVTVAPRRMALSCAS

SEQ ID NO: 182728 - protein, 349 aa, unidentified
MPKSNTAVVTIGIDPGKNTLHLVGLDARGAIVLRERVARARIVSRLANVPPCLIGIEVGMGTHYVTRELLALGHDVRQVPPVYAKPFRQTHKNDFRDAHAIAEAVQRPTTRCVPPKTDEQLDLQALHRVRYRLVGQRTAIINQIRCFLLEHGIAVRQRLHWLRQALPDILAQRADVLSPRMVRILEDLAQDWRRLDDRIQAVSGEIEALSKTTEPCRHLMTIPGIGPIISSAVVAAIGDGTAFTRGRDFAAWLGLVPKQISTGDRTILGRITKRGNRYLRMLFMQAARVVLLRPRNWMKHSYGPWLAAAAQRLHHNVLATALANKLARIAWSVLAQHRVYEARLSPAAV

SEQ ID NO: 182729 - protein, 344 aa, unidentified
MQITTIGLDLAKSVFQVHGVDATGQVVIRRSLRRAQMLPFFTRLPSCLVGIEACGTSHYWARELIKLGHEVRLMPPAYVKPYVKRGKTDAADAEAVCEAVTRPTMRFVPVKSPEQQAALSMHRTRDLLVKQRTQLVNMIRGLLAEFGIDIPKGLERALLMARRIVDGEAPNVPMEAAKIVGTLSQQALDIHIRLREIDRDLLVWQRGNDVARRLMTIPGIGPVGATALAASITDPRQFRSGRQFAAWLGLTPLQKSSGGKERLGRISKMGDKYLRKLLIVGMTSLVRRAKYNSKTVDLRLADLLARKPVRVATVAMANKTARIVWAVMARGETYCAGHRPALAT

SEQ ID NO: 182730 - protein, 427 aa, unidentified
MTKSQNLKFDAIENTDAIVGIDIAKNVHWAGIILPNGKEIKKSFSFNNNKKGFESLVETVKNVLTMLNFKKAIIGMEPTGHYWKSCARYLKKIDWIKVVTVNPYHVKNSKEFDDNCQTKNDKKDCMTIARLIKDARFFEPYLPEGIWAELRNLSNTRAELVGKQNAVKNRLIATMDEYFPEYTKVFKKILSRTSEEILKECPFPEDIKSKGKEELLKHIKKTVKRGYSKKQVETIYELANESIGTTEGTEGAKFQLNMYIEEAKLLEKQIKMTEQELERQLKETGFYESLTSIQGIGIVSAATFVGEVGDINRFDSYEQIRRYAGLNLVENSSGNHKGKTTISKRGRSLLRSILYRMAFTMVNKNKEIKELYKYLTTRKENQLKKKQAIVAVIGKILQIIYAVVTKNEEYKATRVFSQDRLEQLKVA

SEQ ID NO: 182731 - protein, 411 aa, unidentified
MEVMNKRCCGLDVHKETVVACLMIREGGKVHKEVRTFLTMTVDLVVLHDWLKAHQVTHVAMESTGIYWRPVFNLLEEDFTVLLVNAAHIKTVPGRKTDVKDCEWIADLLSHGLLRGSFIPPEPIRDLRDLTRYRKTLTDERVREVNRLQKFLEAANIKLSSVATDVMGASGRAMLEALVSGSTDPQVLSELAKGRLRKKLPELKKALEGRFRPHHRFMVAEILTHLDFLDESIERVSQEVSSRIVPFLPKVKLMDLIPGIDQRVAEGVLAEIGVDMSCFPTDGHVASWAGLCPGNNESAGKRKSGKTRKGDRWLRRYLVEAAWAAIRKKGSYLSALYHRLVVRRGKKKAIVAVAHRLLVIIYHMLKDQESYRELGSDHFNKLNAAYVQRHHVKRLESLGFKVILEPLDKAA

SEQ ID NO: 182732 - protein, 323 aa, unidentified
MNKDIKYFGIDISYLVFDVTDSDGNYYQFKNKFSGFKAFRKLLNSQSHCVMEATGYYHYQLAYYLFEEGLNVSVENPLSVKRFIQMRLSKVKTDKSDSKLICSYAEQVELKLWKGSSKEVQECLQITRTLSVYTKQRTMIKNKLHGESVLGEPSKAIVRSLKRSLKHLDKEMSSLEELLLVLVKEAHKDLFTRIKTIPGIGKKTSIMLIVLTGGFERFSSAAELCSYAGLTPVIRQSGSSIKGRPRISKMGNQKLRNLLFMCSFTACKYNKACRDIYERLVAKGKSKKLALIAVCNKLLKQAFAIAKSGLIFDKEYKSTLVKN

SEQ ID NO: 182733 - protein, 314 aa, unidentified
MADPCSVGIDVSKATLDVAWSTNPTTQWQTTNDDAGWTALVAHVRALEPTLVVLEATGGYEIGVASALSTAHVPVAIVNPRQVRDFAKALGLLEKTDRIDAAVLAAFAARIQPTPRPLPDDLQADLQALVTRRRQLVDMLTAERNRVPLARSAVRKNVLQHIAWLEKQLANTDRDLRTQIEASPIWRARDHLLQSVPGIGPATSARLLASLPELGTLSHRQISKLVGLAPLPDDSGRRSGYRRVQGGRGSVRSALYMATVSAITHNPTIRAAYRRWRAAGKLPKVALVAAMHKLLIHLNAMIRHQTPWHPPATA

SEQ ID NO: 182734 - protein, 404 aa, unidentified
MRVIGMDISRTFAEAVAWEDGRLKRMGRVDMRRELLGAFARTLGGEDVVVIEATGNAAAVHALLTPHVAKVVVANPKQVRLIAHAKIKTDTIDAGVLAQLYASGFLPEVWMPDPATAALRRQVTRRSQIVRQRTRLKNMIQAILHAHLVPSCPHADILSRKGRAWMAAQPLPDDERAALERHVRECDRLADDLQVLDRELTGAALASDPVWRLITIPGLDTITAQALLAAIGDGRRFAKPQQLVSYFGLNPSVRQSGPGPAHHGRISKQGRGHARGLLVEAAWSAARAAGPLRAFFLRVSARRGQHIAAVAVARKMVVLVWHLLVRGETYAWARPALHARKLRRAELKAGLPSRRGQRGSAADYAVKAVRDQDRRLAEDAERAYERLVSGWMRRAPKRSAPQPT

SEQ ID NO: 182735 - protein, 315 aa, unidentified
MSTTSHVLGIDLSKDWLDAHLLPTGQSWHVGMRHEELAAWIKQLPAGIELVVMEASGGLQNVPAALLDQAGLPVAIVNPGNVRKFAESIGQRAKTDAIDARVIAEFGQRAEPVARPLPDAQQVLLAELLTRRNQLVDALVAEGNRLKMVRSKPVQKNIKAHIVWLQKQLDRLEQQLDEQIRNSPLWQVNETLLLSVPGVGPATARTLLSALPELGRLDRRQIASLVGVAPHPRQSGRWRGKRFISGGRAPVRRGLYMAALTAARCNPVLKEFYGRLIKQGKPSKVALTAVMRRLLTMLNAIIRDQKPWREMTPRA

SEQ ID NO: 182736 - protein, 470 aa, unidentified
MSKGSGMTRGDRRRNARRERLRAMLPRDGVVIGIDLAEDKQALVAVDHDVRVLARKTVRVKAFRLGEALDWAAGQARAKGFTQVTVACEPTGPRWLQVQRLCAERGLPLVCIQPLVSHIAREQQDYTPHKTDEADCVLIARLATELHCYIPEELDETWAHLRHLGRRRAQLITTATASVQRIRDFLSVAWPTVTETCAQPLESKTWLAAMQAVTNRCGGQPGRLAAMGLEAFTALVRGAVAGWGGQKAWGTISQRIFAALTDTEGVVVSSRRGLLRRCADELGDLQRTRAQLRAVEADMVAVLSELGLSRLADIPALTAVGAAAILAETGDPRRYDSSSSLVKHAGLSPSDNASGAFNGEAHISRRGRPGLRLTVWRAVWPMLRFNPVLAAKYAAMTKAADGAAEAAAIQADTGSRQATAAAAAARARRAKARVACAASLLRWIYSLVIHGTSWDPDVASGPATCPAEAA

SEQ ID NO: 182737 - protein, 481 aa, unidentified
MKHNQRRCCGIDVHKKSVTVCVLPGGGQAHIEVKKRKFRTFTRDRKQLRAWLKHCQVTEIALESTGQYWRSLWNLLEGEFEKLILVNPQHIKGLNGYKTDPKDAQWIADLLEGGKLKGSWVPERPIRELRDLTRQRVHVLEDLNRAKNRIEQLCQAGNIKVSSVATDLFGVSGRKMLKAIIEGKRDAGWMADYARGSLRGKRRELELALEGTFSDQQRWLLEKELRQVEWLEKQVEALEEEIERRVAEYAEPIRRLETIPGIDRKTAWTIVAEVGIDMRVYGDAKHLASWAGLCPGNRESAGKRMSGRTRKANRYIKRAMCQAAWAASHTKQTYLAAFYRRMAIRKGAPKAVMALAHHMLTVVYQVLAEGAEYIEMGADYYDQRNKPRTVSRLLGRLARLGYYVSISPIGPASPGESTTAVDAPVQVTPTMPLPAADAATTGQRRRGRPCKCEERGIICKHRGTQEVNSLIQQPSSPGRFS

SEQ ID NO: 182738 - protein, 322 aa, unidentified
MAMLSFGGIDVSKDRLDIMVLPDEQCSRVSNDAAGWAELIEQLRGSSITAIGVEASGGYERGVVRALLAAGMSVRQINPFKLRQFAKASGTLAKNDRLDARMIASFVAIMPTRPAQRQAPMIEQLAAMLTVRRQLSDHKVATENASRLLEGAMLQRLSRRRIAGLTADIDLLDQRLVEIVTADPALAHRFRLLTSMPGVGAVLACTLIALLPELGQMSRKQVAALVGLAPYDFDSGKLKGRRCIWGGRARVRRVLYMAALSASNWNPGLKAFHDRLEATGKKPKVVIVAVMRKMITTLNAMLRDGTTWVDRYSGRRSASTAR

SEQ ID NO: 182739 - protein, 465 aa, unidentified
MNVVLGVDLACRAAHQASLARADGTFLWSGRKFFTTPADLEALWVRIDLQPGQVLTVVMEPTRNAWAPVASWFRRRGARIVMVPTTQSADLRAYYSKHTKNDQLDSKLLARLPLLHPEGLREQTGDGPADPLRRAVKVRSTMVKRRTAVFSRLDAHLELLGPAWYDALGSRYGKAALAVLARYADPNALLRLGSARLTRFLIRYSRGAWREEHAGRLLAAARQSLELWGADGIDFAELAADIAVEAEQAQVITEQIEDLDERIANLYELADPKAIISSAPGVGPVIAAVIAGRIGDPHRFSSLAAIRAYSGLVPKVTQSGLSSSQHGLTKAGDVLLREAVFAAADGARKTDPRLAAKYVRLMATDRHHDSALCHIATALLTRIATCWRTGTAYVITDVDGTPITAEEGRRIVQDHHQVDPKMRNSAAQRRVSQRRKGRADRERKESQSAPASRPAANTLKPTTAA

SEQ ID NO: 182740 - protein, 351 aa, unidentified
MMIIGVDYHPSFQTIAFLMEETSECGERQLNHSEGEAERFYRDLKQRGIRVRVGIEATGYSRWFERLLAELGFELWIGDPAEIKAKRIKKQKTDRNDARLLLRLMREDNFPRVWVPSPENRDLRQLLWHRHRLVQMRTRIMNQLQALAMNEGYRWKKKLFSEQGRAQLEKLALAPWASRRRQELLELLDRMNPTIEELTAAVEQEANKCADALRLMTHPGVGPLTALAYVLIIGTPERFHCGKQIGTYVGMIPSEDSSAGKQRLGHISRQGNSLLRFLLVEAAQAAARINPEWRRRYIHLAMRRHKSIAKVAMGRKLGVRLYWMWRNGCAYSPSFEFGSYVGQLGTGHGVK

SEQ ID NO: 182741 - protein, 352 aa, unidentified
MPATAQTAIAVVGIDIGKNSFHIVGLDDRGAILLRQKWSRNQVQARFANMPPCLIGMEACVGAHHLSRKLNGLGHDARLMPARYVRPYSKGQKNDFRDAEAIAEAVQRPTMKFVATKTADQLDLQALHRVRERLVSQRTGIINQIRAFLLERGVAVRQGLRFLRNELPSILAAPSDDLSPHMVRIIEDLAGDWRRLDERVESLSNEIEAIARRDAGCNRLISVPGIGPIISSAIVAAIGAGEVFSKGRDFSAWLGLVPRQISTGDRTILGKLSKRGNRYLRVLFVQAAWVVLIKPKSWERHGLKHWIEAAKKRLHHNVLAIALANKLARIAWSVLAHGRNFEAAKFGGAIVQ

SEQ ID NO: 182742 - protein, 235 aa, unidentified
MVSRGIDISKSSFVAAYPSTNGNPTKTFPNTTARMRELIGTLAVAEHHCVMEATSNYGCCCTCYIRTVLPSVLPPPKKQIKHFSRMMMRVTKTDEKDAYMIAMYGEKMNPPIYKMPSQATIRILTTEGFTYFDNAKQLSRFIGICPTYQQSRTSVNIREHINRNDDERLRSLLYIAFWTALRYNAACRECYIRLKANGKPSKVALIAVANKLVRQAFAIVTTNSIYIDGFVSTKK

SEQ ID NO: 182743 - protein, 329 aa, unidentified
MKISSILGIDVSKKTLDCYLHVQQQALPPVSNDFKGFKCIYRWLLKVLKNTDELIVVMEYTGIYTYGIEQYLEQQNIKFVKRPALDIKRSLGMVRGKSDKADAKFISKYGWLRKEDLVPMKPKTDDQLELQQLMNHRDKLVLDRASYQSKLKELGSQMGTKMSNKIAESMSFVMDVLKQEIKEIEKAIETLIKRDEVLRINYDLMCSVVGIGFATAVHILIATENFARFADVRKFICYCGVAPFEHSSGTSIKGRTRVSHLANKKIKSLLTMAAISAIQHDPELKLKYQQKVQVGKNKMSVINMIRAKLLQRVFAVVKNQKPYEIRLAA

SEQ ID NO: 182744 - protein, 382 aa, unidentified
MDIIYACCAGLDVHKRSVFACIRHVAPNGQVDEQVRCFGTMTADLLELADWLAANAVVHIAMESTGVYWKPVFHLLEARFHVLLVNAQHIKQVPGRKTDVKDCQWIAQLLQHGLLRASFVPPPPIRELRDLTRQRTQLVGERAAVANRIQKVLEDANIKLASVASDVLGVSGRAMIAALIAGESEPERLADLARRKLRGKIPQLKRALHGQVTAHHRFLIQTLMDHVRHLEELIARLDHRIDEVMDPFEPAVERLVTIPGINRRAAEVIIAEIGADMSRFPSAGHLSSWAGMCSGNHQSAGKRQSGRTTKGNRWLRQVLVQVAWAASHTKQTFLSATYHRWVKRMGKKRAVVALGHKILVLIYELLKDRTTYQERLVPDQAA

SEQ ID NO: 182745 - protein, 428 aa, unidentified
METPVANSPVVAWVGLDWADQRHEVRVQAVGSEKIEACTVEQKPEALHAWVAQLQARFPQGRIALALEQSRGAVIYALMNYDFLWLYPVPPKGLARYRQAFFTSGAKSDVSDADLLLEMVRSHRDRLRAWQPDDALTRQLRLLVEHRRETVADRTRLTNRLGARLKTYFPQALEWAGELRSLAACEFLSTWPSLEAWQAAGRSTQRQFYRRHRRLPAAELEPLLDAMAQAQPLTRDRALVEASVLMTQTLVEQLRTVIAALARLDETLEKLFDQHPDQQLFRGLPGAGDALAPRLAAAFGTDRQRYQKAEELQQFSGVAPVTEASGKQRWVHWRRACPKFLRQTFHEFADASRKQSLWARAFYAQRRQQGATHHSAIRALAYKWIRILYRCWQSHTRYDEAVYLAALRRRHSPLWLAVGSLSIQEAQA

SEQ ID NO: 182746 - protein, 387 aa, unidentified
MPFSPMSHALVCRLAAVRGNADGVNYAELNLWVFTPDLEAMALPPSALDKVEDTKEVDMAKEMKPSFVGVDVSKDTFNAHWENRDAKYENSQKGWRKLLKEAPLDARFAMEATGNYHYMLASFLHGKGRHVLVLNPLRVRRWVQSFGGLADTDKIAAMQIARYAEAKEKQDLPEWEPMPPKLARARAIVSVLAGLAHLATAAANMKHAVSFMAGKNDRDIPGVMGDVADFCGERKRAMESELGSIVDEIFPEQFRLLKTIPGIGAKTAAVMLVCCRGMENFQTHRQLAAFVGVSPTVKESGTSVRGSGKVAKVGNPYLRSLLFMCAFTASKACRPCKDLYSRLTGKGKSKMHALMAVMHRLIKIAFGVVRSGEPYRGGWGRKKAEQE

SEQ ID NO: 182747 - protein, 345 aa, unidentified
MTSMNYIGLDVHKKTISYCVKDVSGQIQQEGKVGSTRRELDNWMKTLPQPWMVAMEATIFSGWIYDHLLPHAAQIKVAHPLMLRAIAAAKKKNDQIDASKIADCLRCDFLPECHMMPAEIRDRRRTLRYRHLLVRQMVQMKNRVSGLLMETGVEYNKQRLHKVSYFRELLSTNAEVHPSLRPLLKLSRETIERCQKTEYALVSSLQRDPVLADRIKRLRTVPGVGPITALTWALEIGDVSRFRTNKQAISYCGLCGGERSSADKAMRTPLSKQRNKHIQRTLVEAAKLAPRQSHELAVIYDREKQKGNGNRATLAVARKMVAYLLAVDRRQGDFVPAEQRSTAAA

SEQ ID NO: 182748 - protein, 421 aa, unidentified
MRELRLKGVRMVREGTLIATVDIGLTSNTGYCTTLDGRDTKSFRFDNTKEGFEKFWEMTVASKSRFGCDEVLVGYESTGPYAEPLVHYLAHKPVKILQVNPMHTKRMKEVNDNSPLKTDDKDPRVIADIIRLGRTLTIVVPEGDSANLRRLNHARERHVEEQTALLNQLQQLVFVIFPEFKTVLKHMKGKTAQYILKRYTTPERIGTLSREALGEEMRKRSMGRFGMKDAELLIGLARETVGIKEGLAGIFMDIRHMLAQLEAEKRFIAEIEAEMGATLERIPWSVPLLSIKGLGTVSVAGLIGEVGDCSKFSTQSEIMKLAGLDLYEISSGRRKGQRRISKRGRSLLRKILFYAAIQMIRKNGIMYDYYTRLTSRGMERMRALIAVSRKLLRIIHAILRDNRDYVGGYQNSQRMVIRKAA

SEQ ID NO: 182749 - protein, 347 aa, unidentified
MRFYNQPHEYYCGIDLHVKTMYVCILDAGGHVLVHRNLSSTPAAFLEAVAPYRTGLVVAVECMFTWYWLADVCAAEGIAFVLGHALAMKAIHGGKAKNDKIDSHKIAVLLRGGMLPQAYAYPAAMRSTRDLLRRRLHFVRKRGELLAHIQNTRAQYNLPAFEKRLAYPGNRDGVVEHFPDPSVRKSIDVDVVLIDQYDALVTDLELTIVREAKRHDADAFHRLRSVPGIGKVLALTILYEIHDITRFDRVQEFASYARLIKCTKESAGKKLGTGGAKMGNVHLKWAFSEAAVLFLRHTTDGKRLLTRLEKKHGKGKALSILAHKIGRAGYYMLSRGTVFSMEKFLAA

SEQ ID NO: 182750 - protein, 432 aa, unidentified
MQKIRENAAGIDIGAKKVFVSIEGQEVRCFFTFTEDFEKLRDYLCEHKIKTVAMEATGVYWNILYEILEESDIDVWLVDGRQTKQVPGRKTDVKDCQWIQQLHSYGLLNRCFVAEADIKELRVYQRLREDHIRSASMHINHMQKALTEMNIRLTEVLSQIHGVSGIAIIEAILQGERNKETLLKLCDRRIIKNKKEDVLKSLNGRYTKHGLFALQQAFDSYLFYQHQIEQCDQMLSEVIGKIGKGKPDQNPQGTRKPIRHNKPDINDLGGSLLKIFDGKDATALSGITDYSWMQLLSETGTDLSRWPSEKHYTSWLGLAPGQHSSGKMKRTKRKKGHPQAGQIFRQIAQSLITSKHIALGAFGRRLRTRKGSQIAIKSVARKLAILYWRIMVKGMAFVEEGTKKYEEQLLLQKHKSLERLAKDLNVQIAYNV

SEQ ID NO: 182751 - protein, 389 aa, unidentified
MTKLFCGIDVAKFEHVASIYDPSSGEIILDSLHFDNNDKGFQSLLSHLSKLNKDNELFVGFESTSHYHQALFNYLTARKYKCYLINPYMTSKFRSISLRDVKTDDIDSKSIAQFLSFDYCNLANEEFLINELKDLAVQRHSLMTDSSRMKIKLKSYLDRVFPELESLVDIDVLAVRAILKKYPTARSISSARIDRLKNLAREASKGKYSPSKVESIKEAAKASIGIHSPSIGLSIVQCIETLELKERQIDTVDKEIKKHPTVLNSPLHQLTGINDIEIAYIMSAIISITRFSSPGKLVAFAGLDPKIRQSGTWKASTARMSKRGNKLLRYALIWTAYNMTRKSGPMKDYYDSKKSQGKSHYNALGHCASKLCRYIFWILNHPDKEFKYQ

SEQ ID NO: 182752 - protein, 419 aa, unidentified
MTTNPSSNPIISGAVLYMSIELSSSEWKLGFADSLARNPRIRTIKICGLFDLTRKEMLKEIAAAKKALGLPDDCKVVSCYEAGRQGFWVHRCLIAMSIQNFIVEPTSMLVNRKARRAKTDRLDAVGIVKHLMRYTGGDMTACRMIRIPDADQEDARQLSRELHELKGEKTSHTNRIKGLLETQGIALKDVTLNFKTNLDALLTADGRPISEELKARLRREFDRVALVVEHIRELERIQGERLKQASQKEGEPKDSKEKRAEIAYRLCQLKGIGTVTAWTMSLEIFGWRDIKNRRQLAALAGLVPVPYDSGNSEREQGISKSGRAEFRCLMIEIAWMWLYYQPNSDLSKWYRRRFDDGSKRNRKRGIVALARKLLIALGKYVRDGEIPAGCEMCSGAKRHYTTSLKPRSVKSKENEAQAA

SEQ ID NO: 182753 - protein, 372 aa, unidentified
MTIAAGGSSSPVEVVLGVDTHLDFHVAVALDQLGRKLGVITVPTTKHGYESLIRWAQQLGYVQRAGLEGTGSYGAGLARHLRAQGVEVLEVERPKRRSRRKGKSDPIDAEAAARAVLAGETASVAKSGDGRVEMIRLLKAARRSAVKAKTQAANQLRAFRLTATEELGCRLSGLSTRALAAAALRFRPGDHPENAEEATRFAMRSVARRYRSLSEEIADLDAQLGRLVAEVAPGLTALCGVGTDNAATLLAMAGDNPERLGSEASFANLCGVAPIPASSGKVLRHRLSRGGNRDANRALHLICVVRMRTDARTREYVARRTAEGKNRREIMRCLKRYIAREIYGVLIPSVARSSPEARGVSEARVAAMADTT

SEQ ID NO: 182754 - protein, 406 aa, unidentified
MNGPVITVDVSKGSCHFQPYIENGKPMCKPKVLKDTIEGFDNLAKTMNKLKERSSSSTISVVFEATGVYHRCLQKYLDDNKIPYYIISPLMSAAYRKTNINSNKTDDLDCGHIAKCFYGEQDLRVFKLQTNIYEELRHTNRYYESELNFLRQRKTSFRALLDIIYPLIDKCFKGHSSLYDEVPMTVLKLYPHPKLLLRHKEETIVNRVTSKVNHDKKFVEKIVSLMYEGASRCYSGCDEDDKEVDRLKETIMSLKEQVAKCDEILKELIEQARKVPYFKYVVSITGVGLNLASRLVAEIGDITRFENRKAITAYAGLNPKIRQSGDIDGTHLAISKKGNRHLRCLLYLGATCNYRLKKHDSLYEFNQKKRQQSTNPLKKKAANIATAHKLLVIIYALSKNNQEYNS

SEQ ID NO: 182755 - protein, 440 aa, unidentified
MQVVYARCAGLDVHKKTVVVCVRLVGADGTMTTHTRSFGTTTAELLNLVAWLLTLEITHVAMESTGEFWKPVYNLLEGSLTVLVVNAAHIKYVPGRKTDVKDAAWIAELLAHGLLRPSFVPPAPQRALRDLTRQRTHLIQERASVVNRMQKVLEWANIKLASVVTDITGVSARAMLQGLVDGQSDVTALAQLAKGRLRSKLAELEQALRGTLEPHHAFMIGQHLALLDVFDEQIAAFDTRIQTAIDGTQPDPPPPTDAVGADRPPADAPSAPNGAWTAQAILDAIPGIGLRVAETILAELGTDMSRFPDAAHASSWAGLAPSQHESAGKRKATRIRDGNKYLRSALIQAAWAAIKQPDTFLAAFYRRLAARRGKKKAIVALAHKILVLIYTLLRTGQVYQERGAAALDARQKERIVHRLERRIAQLGYKVHLEPITAAAT

SEQ ID NO: 182756 - protein, 415 aa, unidentified
MEIVYERVAAIDVGKREVAVTVRVPGQTAGIRSQQTRKFRTFYQVLRQMVGWLVDHGVTHVAMEATGVYWKPVFHALCEADTLEVVLVNARHVKNVPGRKTDVKDSEWLAQLLECGLLRGSFIPPREIAAIRELTRYRKKTIQARTRELQRLSKVLEDAGIKIDSVASSITTLSARDMIEALIAGERDPRALANLARGTMRNKIPDLAMACAGRFADHHALLARMHLDHIDHLTSMIDGLDERIEQVLAPYAQQLRLLRTIPGIGDRAAQVLISELGVDMSRFPTAAHLASWAGLCPGNNESAGRHMSGRTRKGNVEVRDILTECAWSAGKTGSYIGAQFHRLHRRFGKKGGGKAAVAVAHTLIVVVWHVLNDQSEYRELGHDYFTRRDNPEAAKRRLIHNLEALGYRVELTATA

SEQ ID NO: 182757 - protein, 344 aa, unidentified
MTYFAGLDVSLRSTHLCVIDDEGELLAEGKTDSEVDDIVAFLDELAVEIAEVGLEAGTLTQYLTYGLQSAGFEVVCMEARQVKAALSAMRNKTDKNDARGIAQLLRSGWYSRVHVKSIESHQVRALLSSRKAVLAKCIDLEQEIRGLFKVFGIKLPKRLGHGSFDPKVRPLIEADEALAHALLPMLDARLVLYHAFRELDNRTRHMANDDPVCQRLMTAPGVGFITALTFKAGVDDPARFRRSRTVAAHFGLTPRRFQSGEIDFEGHISRAGDANVRSTLYVAANAMMTRSSKWSPLKAWGMKLAKTRGHKRAVIAVARKLAVILHRMWIDDTQFRWSAEAARS

SEQ ID NO: 182758 - protein, 351 aa, unidentified
MKKVAYLAIDVHAGHCVLGHMTFNGTFIGNRRFPTSEQHIIEALEEIKAKEKYLALEESNLAYWAAQVARPYVTEVVCSDPKENALIYRSANKRDKVDTHKLCRLLRLGELKRVYHPENDERAIFKAAVQHYIDLRDQQVVLKNKIKAMYRHWGVIDVAGEAVYGIKRRHDYLQRVKHLHIRNQLHRLYCLMDETESMQKRALKAMKQLGRKYPEIKQFKKMPGIGEVLSHIFDAFIQTPHRFANKRKLWRYCRLGITDRSSDGKPLGFKRLDRSGVSELKSLSYQAWLCAMRSDNEVSRFYSESFRRTSNRVHARLNTQRKILAVMYGMWKTGEAYRPQLFLDPPQMSVV

SEQ ID NO: 182759 - protein, 348 aa, unidentified
MSKGNQYVGLDVSLKQTSICVIDDAEKIVWRGQVDTTPEAIVSAVTQHAPHAVRIGLESGQLSNWLFHGLKQAGLPVICVDARHAKAALSLKVNKTDANDALGLAQIMRVGWYREVTVKGLDCQAVRALLVARAQIVSQITTLKNCVRGILKTFGRVLPKGLRSQFPARVRAAIEGHPVLGAIIEPTLQVLEAARAQLLVYDRAVIQRARSDDTARQLMSAPGVGTVVALAYMTGVEDPARFKRSSSVAAYFGMTPRRYQSGEVDHAGRISKCGDGMVRGLLFEAAKVLLGRSSRPNALKTWGEALGKRIGLKKATMAVARKLAVILHRMWTTGATFQWNAGTTSSVA

SEQ ID NO: 182760 - protein, 346 aa, unidentified
MDMDISVLGVDLGKNVCSVVGLDASGAVVLRRRAKRETLIALAAKLPPCVVAMEACCGAHHLGRVFAGHGHDVRLMSPEYVRPYVKAQKNDDRDAEGIAEAATRPTMRFVGLKSQEQLDMQTLHRSRDRLVGERTALINQLRAILLERGIVAPQGKRKLEQFLTVLMDEQRGAGLSPRMITLVADARAQWGELDQRIAAFDTEFIRWTKENEDARRLASIPGVGPTIATALIAAIGTGETFGHGRDLAAWLGLVPRQFTTGGRPKLLGISKRGNRYLRKLLIHGARAALPHVAERDTPLGRWAKALLERAHPNVAIVAFANKLARIAWAVLRRGEGFVVRGLPLAA

SEQ ID NO: 182761 - protein, 340 aa, unidentified
MEKRYIGIDLHRNRFTCCIRLENERTYVTAWELEDLGKFVKKLRPSDEVAVEITGNTRLFHDAVAEHVARVVVVNTNQFRVIRQSVKKTDPNDARTLALYLAKNLLPEVRMKDKEHGQLASLTQTRDTLVKLRTALKNKINNILSARGLNLPKEALSSEKRLNEVLSLPFDEIVQIELRVIVEQIRSLNKSIADLEKTIGDAGSKLEGHKGLSSIKGIGKITGAILLSVIGDVNDFADEAHLASYFGIVPRVSNSNETEHSGRIHKRGTKLGRTALVQSALIAANYSPYLKRFYEQVKARRGAGKAIIALAKKFLGVIYRTLKNKWVFEDFPNFVLAEAS

SEQ ID NO: 182762 - protein, 343 aa, unidentified
MEYYAGIDVSLKESSVCVIDTAGKVAREVKVGSEPECLVGYFDQLDLPVVRIGLEAGPLSQWLHAALLAAGREVVLLETRHVKAALSAMTVKTDRKDARGIAQLLRMGWYRPVHAKSSSAQDTRALLVGRKLLQSKLLDVELSIRGILRGYGLKVGEVSRGRFEARIRELIAGHNTLSMVIGAMLTARAALWSEFTKLHREMLKIARADKICHRLMSTPGVGALVALTYRSAIDDPTRFGKSSTVGAYFGLTPKKYQSGETDRDGGVSKVGDAMVRTALFEAAHIMLTRATRFSSLKRWALEVAKRRGMKRAKVALARKLGVVLHRMWMDATDFRWGAIAMAA

SEQ ID NO: 182763 - protein, 398 aa, unidentified
MPWDGVKPDAEMVSRLLSAWSTTKTERYRGDWPRMHKSGRVATKHHEDNPMNPSTATENCWAGLDVAKDSFDAALAAPALGASPAELRFMPVRTFARTPQGVHEFLAWSAALWPGSGAAPRAVMEATGAYSTELAAWLTQEQPALRPAIANPKHTADFISSLGLRNKTDRLEARALALYGLERRPAPYEPLSPERDELRGLLRYRDALVHERIAERNRAAEPGHPGRVRKLQQRRLRQLDRDIQTLDTQARELAGQHRALARDIELLQTIYGVGWLTAAIVRAELGDLRRFQNARPLTAFAGLSPRIHQSGKTRRATHLCKQGNGRVRQALYMAAVAATRGNTQLAQDYHRLCAREKIRMVALGALMRKLLTVMRAVLVHEQPYQPFHTPSGKLSAKP

SEQ ID NO: 182764 - protein, 402 aa, unidentified
MKTQVTPQKESSFIGIDYHKRYSVYCVVDTHGNPQERGRIEHGQPEGFRQLVRRWPGCRVVFEATMNWHWLYEILESELEADDIVLANPFKTRIIAEAQIKTDKVDALILAQLLRGNLISSVHIGSRENRHRKEVLRQRAFFVRQRTMLRNRVHRLLGGQHGVKLPQCSDLFGRKGIGFLEALELPAPAGLLLKQQLEMLRTLAVRICEDEKALKGLLAETPELEILCSIPGMGPILAAVVLSEVDDIGRFVSAQKLCGYAGLCPSTMSSGGRTFHGKLLPHCNKWLRWAFVEAAWVAVGCSAYFGDFYKAKRAAGKKPNTAILATARRMARIAWQLLTQRRTYTTFPVTQRIRRQPAGGSRVPTGLAKEMLGASRARKRAAHCRSDTFPSRSGKGLVGRQA

SEQ ID NO: 182765 - protein, 377 aa, unidentified
MTTTDAAAEARETVYVAIELSKKTWVLGIAHPDRDRPSIHRVSGGNIAELVSRLRVAARNNRRILVCYEAGYDGFWLARVLAKMGIECRVLDPASIQVNRRARRVKTDRIDVLALLRALIATDRGERHVCAIVRVPSVEEEDARRSHRERQRLVRERTGHINRIKGLLFAQGIRDIKPKLRRTRIDFAALETAEGHPLPDRLRRELEREYARLSLIATQLREVEKERDTADAQDPVVEQKRQLLVALHGVGATSAAILAREVFARSFASRRQLGSYLGLTPSAYDSGSTTRCQGISKAGNSWARRILIEVAWLWQKYQPASPLSHWYIQRTAGQSSRIRCIMLIALARKLAISLWRYVETGLVPEGVAIAKAKLRPA

SEQ ID NO: 182766 - protein, 435 aa, unidentified
MLGGSVPASSSPFQNGEVFCLKVVFPTCCGVDVHKSFLVATIITTPKDSLQPSYQKKRFTTFNSSLNRFADWLHKNNCLDVCMESTGKYWVPVFNVLERRGIRVVIANPKWVKAVKGNKDDTKDSKWIGDLFRIGLVKSSFIPCKDIRILREFTRYRCKLVSMRSSEKNRFQNAFTVCNVALDSVVSDMFGKSATAITDYLTSDEPFNAQHCVSLLQRSLKKKADAVVDSIEGYSITGEQKARIAIIRKHHYFINSLIAEMDSCIDGMVVKYESAITLLCTIPGVDRDSAITIISEIGADMSQFSSSKRLCCWAGLTPGNNESAGKKKSVRISRAGVYLKPALVQVAHAAVKDKASPYYARKYEQISKRRGKKRAIIAIARMILTAIYSMLSTGEVWNPVDLYKIDMPEHLKEKQLAKAVKQAIRFLESQGLNVS

SEQ ID NO: 182767 - protein, 370 aa, unidentified
MLDTTTFVGLDVHARSIKAVSLDVMTGEVRCATFGYDAGAVAEWVRSVDPKARCVYESGVTGFDLQKRLSGLGVDCVVGAVSKMIKPSADRRRKNDRNDAEFLARMLSVGNVVEVWVPDDECEAARDLTRALEDARDDLSRSKQRLSKFLLRHGLVFDERTPTGRRKGNWTRAHWSWIESIRFAEGADNEVLAYYVDAVRRAAEEKARLEGLVGAEARKPRWRRRVDSLRCLKGVDTATAADLVFEAGEFSRFRNARSFAAWVGLTPSEHSSGESDRRGAITKAGNRHLRKTLVEAAWHYLTCSGRPKDLARGQAPDPAARRHAAKGVRRLVDRREALLARGVHSNKANVATARELACWVWAVGLMAEEA

SEQ ID NO: 182768 - protein, 398 aa, unidentified
MTESSDYESVQVFIGVDVGKDTHHAVAINRSGKRLFDKALPNDENKLRSLISDLKQHGQILLVVDQPATIGALPVAVARSEGVLVGYLPGLAMRRIADLHAGEAKTDARDAAIIAEAARTLPHALRTLKLADEQIAELSMLCGFDDDLAAQTTQASKRIRGLLPQIHPALERVLGPRLEHPAVLALLQRYPSPEKLASLGEKKLAAQLCKLAPRLGKRLAADIAQALAEQTVVVPGTNAAAVVLPRLALQLITLRKQRDEVALEVEQRVIAHPLYPVLTSMPGVGVRTAARLLTEVACRAFASAAHLAAYAGLAPVTRRSGSSIRGEHPSRRGNKALKRALFLSAFAALRDPLSRAYYTRKMSQGKRHNQALIALARRRCDVLFAMMRDGTFYTPQGS

SEQ ID NO: 182769 - protein, 357 aa, unidentified
MNKQRDYILKNEKVFVGLEDSKKTWSLCVRSGGMVVHETSMPSRYEVLHNYFNNRFPECQIEVMYEAGFRGFDLHDQLEADGWECIVTPPHTVTQEKCQRKKNDRTDCRRLAKNLENGDYHSCFVPDKELREDRQISRTYGQVQADINRVRNRIRRMLEFHGLDNGLPAGRWGQAMYVRVRRQLAETEISDSLRFSFEVMFRELEQLQQLKKELLLQLRSLAGSDRYKEGVELLKSAPGIGILTAIRLALEWGDVSRFKRKEEFASFLGLVPSDYSSGDQERQGHITKQGNRGPRSWLIECSWVAIRFDPVLLEKFRRVFRACGSKKKAIVAVARKLALRLRAVLVSREPYIVGVVE

SEQ ID NO: 182770 - protein, 368 aa, unidentified
MSTLRFVGLDVHKDTIVIAVAEEGQSEAVALATIPHDVPKLIKRLSALVKDKKELRVCYEAGPTGFGLCRRLKAAGIECVVVAPSLVPQQVGLRVKTDRRDARRLAHFLRSGDLVSVWVPDEQTEALRDLERSRDDAKNAERVARHQLDKFLLRNERVYRDGRAWTKKHLIWLNQQKFSDACKQCVMDDYWKAVSDATERVKRLSQEIERFVQGTALAPLVRALTGFRGIQTLSGVIIAAEIGDLRRFPTARQFMAFLGLVPSEHSTGKSIKRGSLTRTGNAHVRRILIEAAQHYRHCPALSAALRSRQQGLSQEVIEISWKAQKRLSKRLTYLLGKGKPRNKVIAALARELAGFIWAVGQVSQPLAA

SEQ ID NO: 182771 - protein, 391 aa, unidentified
MPQPNDLSRSLAALDQDSTLIAVIEISQSSWLVAGIVPGIDRQPLKKLADEPTALLDRWRAEATKAGRVIDRMAVAYEAGRDGFWLARWLQRQGIEAHVIHPTSVAVSREHRRAKTDRLDTELLKRAFLGWLRGEPRHCSMARIPTLEEEDTKRPNRERENLVSERTRIINRLQSALARLGIRVLSQPRAGLPRRRPGAPERLARLLTPEGAPLPPNTLAELQRDMARLRFTMEQIREIEATRAARIAQHPEQANHAMILLLARVIGVGIETADMLVHEILSRPLRDRKAVARYAGLTGSPDESGARRREKGLAKAGNARVRRGMIQLAWRFLMFQKQSALVQWYQRQTADARGGTRKTMIVALARKLLVALWRLVTTGEIPEGVVLRGAA

SEQ ID NO: 182772 - protein, 425 aa, unidentified
MSETRSEVRRWYAGVDWGSGSHCVFLSDDQGRKVGQKFFKHSGEGLAEMASWLLKASGANEPGQVLVAIEVPHGPVVENLIERGFAVHAINPKQMDRFRDRFSMAGAKDDSRDAEVMSSCLRTDAKCFRRLVCAEPIFVELREWSRIAEELGVERNRLANRLREQLWRYFPALLQLEDDCSAEWLLDLLALASTPAKAVRLREAKLTQLLKQRRIRRLDAATILKAVQAPPPKLAAGTVEAASAHVLSILPRLQLVNRQIKEADRKIGALIDSLTANEDNQESEPGQKKQHDAAILASLPGVGRTVLATLLAEAWEPLQRRDYAALRSLAGVAPVTKQSGKSRFVVRRQACHDRLANALYHWARVAVQHDPRSRAKYAELRKRGCTHGRALRTVADRNLSVACAMLKTGTLFDPALQAEKNKKTV

SEQ ID NO: 182773 - protein, 421 aa, unidentified
MEVLYPRCAGLDVHKATVVAAVRLVAGGRVAREVRTFATTTAGLLGLAAWLAENGCTHVAMEATGVYWRPVWHILAEHGFALVLANAAQVKNVPGRKTDVGDATWLAELLAHGLIRASFVPDGPTAELRSLLRTRKQLVRERAGHVLRLQKTLESLPRTRSGDANVKLDGVVADLLGKSGRAMLEALVAGETDPARLAALAHPRLSATPERLREALRGRVTAHHRFLLRLHLDQVDALDAAVGRVDREVEEHLAPFRAAAELPASIPGVGALAARVIVAEIGLDMGRFPTAGHLVSWAGLCPGNDESAGKRRSTRLRKGAPWLKTTLVQCAWAASRKKASYLQAQYHRLRGRRGAKKAVCAVAASILTAAYHMLKDGTAYRDLGPDHFDRRAKEVQARRLVRRLADLGYAVELAPLEPAPA

SEQ ID NO: 182774 - protein, 341 aa, unidentified
MKGYYYVGLDIHKKVIAYCVKRSDGRIVDEGTRRATRASLAAWAAGLGGRWVAGMEATMFTGWVYDFLKPRAAEVKVGHPYMLRAIVAGKKKSDRLDARVLADLLRCDLFPACYMASEKVRELRRVLRYRNLLVQEATRMKNKTASLLMEVGAEYTKSRLHGKRYFHSLVEGLNDVSPSVLRLLELSHTTMQIFEKNQKWLLEELGRHPDLCARVERLMSIRGVGDVTALTWVLEVGDPHRFRTVKQAVSYCGLCSGQHESAGVSKRGPLSKQRNKYLQRVLVEAAKLAPRWNPQLAAVYARERDRGANPNRATLAVARKLVAYLLYVDKTNKNFEPREVA

SEQ ID NO: 182775 - protein, 361 aa, unidentified
MKHSTPKPAAVTTNLLSLDLGDRDSRYFVIDEAGRTVGEGSVRTTRDALDALFTRFAPREVALEVGGHSPWVSRLAESRGIRATVANARKLALITRNERKNDRTDAELLARLARVDRKLLCPVRHRSEQSQQDLAILRARTALVATRTALINHVRGQVKSIGRRLKSCSAECFHKRVAEQLPVELQPALLPVVQTIEHVSATIRGIEKQIETLATERYPDSARMKQVGGVASKVALNFMLTIDDPARMKSSRQAGPFIGLTPRTRQSGDTSPQLRITKAGDHETRRLLVISANYILGRFGPDCDLRRFGLKIAARGGKNARMRAKVAVARKLAVLLHHLWKTGETYDPFHLARRRGEPVPA

SEQ ID NO: 182776 - protein, 418 aa, unidentified
MMTQYAAYVGWDWADKKHDLCLVDAATGKKEASVIKHTPQAIEEWAASLRRRFDGRKVAVCLEQSRGPLIFALLKYDFLVLYPVNPSTLAKYREAFSPSRAKDDPQDAEYAAELVMHHRERLKAWHPEDVKTRTLQYMVEHRRRVVSDRTRVSNRMTALLKLYYPQVLQWFDDIRTALVSDFLLQWPTLEDVKRVRRPTLEKFFRAHHSVSTKTNEARLSSIKEAIPLTNDRAVIDSSVVMIKVLAHQMKVSIEAIKDFDDKIAELCASHDDFHLFASLPGSGTVYSSRLLAAFGTDREKYQSADEVARFSGIAPVIERSGESCWIRWRYFCPKFLRQSFVEYAGESVKHSFWARAYYEQQRAKGKSRQAAVRALAFKWIRIIYRCWQTKTEYNEVKYLEGLRKKGSSLLGYAASNAT

SEQ ID NO: 182777 - protein, 341 aa, unidentified
MDVRILGIDLGKNSCSAVGLDAAGRVVLRRRMRRESIMALAAKLPGCVVAMEACCGAHHLGRLLAAQGHEVRLMSPEYVRPYVKAQKNDDRDAEAIAEAATRPTMRFVALKTEAQLDVQVLHRVRDRLVGQRTALTNQIRSILLERGIVVAQGRRKLLDALAALSSDGGGVGPRVRLLLDDMLDQWRALDDRIMAMDDEFADMARNDPAARRLATIPGIGVLNATALVAAIGDGRTFSRGRDLSAWLGLVPRQATTGGKPRLLGITKRGSKYLRKLIIQGARAALPSLSRTPTPLGSWLRGLLSRAHGNTVVVALASKLARIAWALLRNQTAFVAGGRRAA

SEQ ID NO: 182778 - protein, 395 aa, unidentified
MLYLAIDQHRKQLTVNLRSEEGEVMLRRQVSTQWERVRAFFEDLRERSEPEGGFAAILEVCGFNDWLLKMLKEYGGCETVLVQPEKRSKRKTDRRDANALGELLWVNRHRVLAGRKVANLRRVLPPSPEDAEARQLTALLKRVGELRTRTINKTQHIRLRHNLQQECPTKGLDTKKARKWLAEIELAEIDRLEMDLLLAQWELWERQLATVEERITARQKRHPTAPVLATMFGGGAYSSLALASRIGSIERFPRPGSLANYWGLTPSSRNSGDATDRLGSITKEGSSIARFILGQMVLHTLRRDGQMKVWYAKIKKRRGAKIARVAVMRRLATIIWHMVKHNEAYVPGGPPRRPAQGECVFENKGERQEAKGPRFPAENAALPFVRSGCSRAEPD

SEQ ID NO: 182779 - protein, 331 aa, unidentified
MKFKEALGIDVSKKKIDAVLYLNGIHDQFDNTVKGYKNLIRWAEKNSNLSIISVLVCFEHTGLYSFPLAVFFHKSDIRFSMVPALEIKRSLGIVRGKNDKIDARRIAEYAWLRRETLKPFNLPSNNILKLQKLLVLRQKMVRQKADYSSGLKEYKAMLKQKDYEPLFSVYKKMAHYLDNQIKVLEKEIIDLIKLNEEMKRLYDLIISIKGIGLIIAANFLVVTNCFTNFENSRKFACYSGIAPFAKESGISLKTRSRVSHFANKNMKSLLNLAASSAIQADPELKAYYQRRLKAGKSKMSTLNIVRNKIVFRVFAVVKRGTPYIILHKHAG

SEQ ID NO: 182780 - protein, 386 aa, unidentified
MIVIGADTHKGSHALAAVDDGTGKVRGSRQIKAEEPGHLAAVRWARELDEERVWAIEDCRSCSRRLEQALLAADERVVRVPPNRMGASRKGEREPGKSDEIDALAVARAVVKDGVERFPVAYLNEQAMEIRLLVEHRNDLVAERTRTVNRLRWHLLELSPELEASLKRKALNQPRTLDRVERQLRKLPAGARVRIAREQISHLRGLNRDIERLAAELAELVTAHRPRLLAEQGCGALTAAILIGHTAGNERFRSEAAFALQTGTAPIPCSSGKRTQHRLNRGGDRQLNHALHIIAVTRAQHDPATKEYLARKEAEGKTKKGALRSLKRHLARRFHQLLSEPPADQQPTPEPAPIIEPKLPSIPDRPKPRREVEQIAAAPSPMVCIS

SEQ ID NO: 182781 - protein, 354 aa, unidentified
MIIIGVDYHPSFQQIAFVETETGEFQERRLTHREEAEKFYRDLASSGGKVRVGMEASGQGRWFERLLGELNIELWIGDASEIRAKRVRKQKTDREDARHILRLLLEDRFPRIWVPSWDNRDVRQLLWHRHRMVQMRTRIMNQLQAVALNEGLHCKKRLWREKGRQQLESFPLAPWASRRRSDLLQLLDRLNPTIAELTQVIEQEVEKYPAAQRLMTHPGVGALTALAFVLIIGEVERFGCGKQIASYVGLVPTEESSGESRRLGHISKQGSGLLRFFLVEAAQVTVRSDPEWRSKYFHLAMRRGRKIAKVAMARRLAVRLYWMWREQWDYEQLKKFGPHAGQPGTGNVVQPNTA

SEQ ID NO: 182782 - protein, 421 aa, unidentified
MIEEIAEEPAELLQRAAALDIGKASLVCCVRVPHESRPGARRQEVRTYDTVTPALLELRDWLICQGVTRVVMEATSAYWKPPFYLLEDDIECWVVNARDVKNVPGRPKTDKLDAVWLAKLAERGMLRPSFIPGRPQRQLRDLTRYRRTLTQERSREKQRAEKLLEDAQVKLSSVISDIFGVSGRDMLAALIAGQRDPYALADLARKSMRAKMSVLRQALTGHFTDHHAFLLGMMLDRTDALTAQIDALTARIEEAIAPFAAQIAQLDEIPGVGITTAQEIIAETGTDMSRFPTPGHLVSWAKFAPKARESAGRAKAAATGKGSPWLGGTIGEAAVSAARTQTFLAARYKRIVRRRGKKRALVAVGNSILTITWHLLSDPGAHFTDLGPDWHDRLAPQRRKRQLIAELERLSGKKVTLHDAA

SEQ ID NO: 182783 - protein, 335 aa, unidentified
MNNKFCCGIDVSKKKLDVVLMKEEKFHYKVFENSNDGVILLQEWIKNKLEKDAFVHFCMEATNVYHELVAFTLLENKNFKVSVVNPRRVKSYSKSIVNTKNDKTDAKVLAQFCKERDPQQFTPQTKERRELRDLSRLMDNLVELRIMQKVRLQTFNTEAAARVVKSTIKSIENTIAETEEEIKYYYKNYPELREEYELLKSIPSFGKRVSNVFISEIYKDEYGVYNPKKLTAFFGLEVREDESGSSVWKKPRITKFGNPRVRNMLYMAALVSIRHNLKMSDFYLRLVNKGKPKKLALIAVMRKLLVIACAILNSQKPYEENHISKPTNYSLKIPA

SEQ ID NO: 182784 - protein, 419 aa, unidentified
MTEGVDWFVGIDWASQKHLVCLLAADGRKVGGREFVHGGDGLSELCDWLLGQTGTVPERIAVAIETPHGPIVEALLERGFQVYSMNPKQVDRFRDRFTVAGAKDDSRDAHVLADALRTDRHALRRLAVEDPVVIELREWSRMRDELRDERTRLANRIRDQLWRYYPKALELGGSDLSADWFLDLWEQAPTPAKAAQITEKTVANILKAHRIRRIDAAEALRMLRHAPLSVAAGVAEAATAHVRAVAARLRLINQQSKEADRKLDELCARLETASENEPGQINEQRDVAILRSFPGIGRINLATLLVEAAEPLRQRDHDALRALSGQAPVTRRSGKQCIVLRRYACNRRLQNAVYHWSRVAAQHDQASKSRYAELRRRGHGHARALRGVGDRLLYVLCATLKRQTLYDPDYKTARTAAVA

SEQ ID NO: 182785 - protein, 432 aa, unidentified
MSEVQNSILPNAAPEVNFFCGFDWARNDHYFVLKDRSHRVLDEGYFENSADGFQNFFGRLDAHRNGEPVALIIEGNRGSAMTVLSLVPWITLYPVNPSKTRKLNELDGSGRGKDDPRDSHLLCDHLIANYQKLRAENECDTDILCLRELVQSEEELIGDCTRFKCRIMAQISQFCPGLADIVGGKLDKEAYTEYLLRFDPRQPASDATIKKHLKKYHVRGSRVVEKFLEKHRALQVLPMAKELLAIHVDKLDSLVRQLQAIQKELCSSQSEISALFATLPNAEIYLSLPGLGERLAPRMAALFGKNPEKNYANKHEVNAYFGQSPVTESTGGKDKKRKEAGEREKKQVNKRRSCNRFARQTTYLWSGATARLREVNAPWQRAFLQRCKDRGDKTATRYRKLGKKMLAILYTCLVKEERYSEEVYLSNVHSKC

SEQ ID NO: 182786 - protein, 406 aa, unidentified
MAGAVCAGVDWAKDAHEVLVEDADGERLWGETITHDEAGIIRLCRTLVTLKVARVAIERPDGLLIERLLDAGLTVLAIHPNKVAAARDRFRAAGGKSDRFDAFVLCELARTDSHRFQPLVPDSDQTKALRALTRGREVLVEQRVALCNQLRAELERFWPGATEIFRDLDSPISLAFLERYPSPADARGLGAKRLAQFLARHGYCGRKDPAELLARLRNAPSGRAADLEADARRSLVLALVAALKPIVEQITLLTSEIAHAVHAHPDGHIFLSFFKHPKSVITAATLLAEIGDCRARYPTAEHLAADAGMAPVAVESGRRKVACFRRGCDHRLRHATSTLADSTRHWHPWAHRNYADARARGHDHPRAIRTVGRAWTRVLRRCWQDHVPYDPERHNTLQRQLLIVKG

SEQ ID NO: 182787 - protein, 344 aa, unidentified
MVTNYIGADVDCKMTELAVERNGKIIARDRVPTDIKSLGKFLGSINSKKVMVVEEGPMAGWLYRNLHNKVDRFVVCDPRRNKLISCDGDKDDTIDAGDLAALLRGDYLREVYHTDDENRLALKEIVALYHDRIRDSVRQINKLRGYGYCHGITIPGRVVEDNPRRNLWLKSLNKPAVAKQLSIMWVGFDAVAKQVRTVKREMSRRSKAYPIIGFWQDLPGIGPVRSVTLFAYLDCPGRFANPKKLWKYCGIGLKRFTSGTDKSGQPREGKLRLFRHTNRRLKDAIVGAALSAVTQGKNPFADHYWRMIRNGVTPSNARHTVARKMLTVMWGMWKTNCRYEESFV

SEQ ID NO: 182788 - protein, 388 aa, unidentified
MIYVGIDIAKLNHFASAISSDGEKLIKPFKFTNDNDGFQLLLSKLDPLDKDSLIIGLESTAHYGDNLVRYLVAKNYKVCVLNPIKTSTMRKNNIRKTKTDKVDTYIICKTLMMQESLRFVTFYDLDLMALKALGRFRQKTIKQRTRLKIQLTSYVDEIFPELQYFFKSGLHQKSVYALLKEAPTPDTIASMHMTHLAHLLKVNSHGRFDKEMAQQLRVLAQKSVGASDSSLSIQVTHTIQQIELLDSQLERVEAEMTEIMKFNDSVIMTIPGIGYINGGMILGEIGDIHRFSSPNKLLAYAGLDPSVYQSGNFQAKKTRMSKRGSKVLRYALVNAAHNVVKNNATFKAYYETKMAEGRTHYNALGHCAGKLVRVIWKMLTDEVEFNLD

SEQ ID NO: 182789 - protein, 410 aa, unidentified
MPSPLFVGIDVSCRNNKVQLLHSDGSEIVRFSVPNNYPGAKSISEKITGVMGKNKFDSLVIGLEATSVYGHPLVYFLKKEPSIKAFNPRIHVLNPKQVANFKKAYPELPKNDWVDAWVIADNLRFGRITKEVYMDEKFVALQKLTRERYHVAKNLTREKNRFLSNLFLKFSTLAQEDIFSDKFGATSVAIIEDFFSVDDIAYMDVDKLAEFLNNKSKGRFADPHELAETIKKAARSSYRLPKTVNDSVNQVLAVSLVAIKALKKQLETLDKAIETQLALIPNTLQSIKGVGPVYAAGIVAEISDINRFPNHAALAKYAGLAWTEHQSGQFKAENTHMIRSGNRYLKYYLLEAANKVRVHDPEFKRFYGLKYAETPKTPHKRALALTARKFVRLVYALLRSNRIYTPPKGE

SEQ ID NO: 182790 - protein, 345 aa, unidentified
MDHVGIDLHKRESQICIETELGEVVEKRIRTERERFEVVFGGRPPAKVLLEAMTESEWVARCLEDLGHEVIVADPNYAAMYATRSRRVKTDRRDAMTLADACRLGAYRPAHRASDRQRHVRAELAVRDTLVRTRVKCVALVGALLRRHGIHLPSGNVDGFVARVERQAMPEQQRAEIAPLVCLIRASSVEIEAADTRIAAIAAADPVIRRLRTVSGVGPVTATAFVATLDTWERFSGPHQVEAYLGLAPSEKSSGEKQHKGRITKAGNSRARWLLVEAAWAILRSRREDTEPLRRWAQRVALRRGLKVGIVALARKLAGILYAMWRDGSTYEKRDGRRLTEAATA

SEQ ID NO: 182791 - protein, 349 aa, unidentified
MLADELDYVIGVDTHRDEHVLAVLTAAAGAVVAGEALPANARGYRETLRFAGRYAAGRRAWAIEGTGSYGAGLARFLAGRGETVLEVSRTPKAERRLRGKDDTLDAARTARAALASDTLALPRSGERREALRLLLVARRSAVDVRREALTQLRGVIVTAPEQLREELRGLSTGKLLHRCSRLRRSSAASVDELATKLVLRSLARRIEAATLEADELERDLLGHIRALAPALLDEPGVGPIVAAQLIVAWSHRGRLRSEACFARLAGVAPVPASSGQTVRHRLSRGGDRQLNRALHTIVLHRRLHDAATKDYIARRVAEGKTRRDATRLLKRYLARHLYRVLNNQAPLMA

SEQ ID NO: 182792 - protein, 347 aa, unidentified
MRFYTTQHPFYCGIDLHARMMYVCLLDQSGEILVHRNMKTDPDTFLKAIAPYRQGIVVAVECMFTWYWLADLCADEGIPFVLGHALYMKAIHGGKAKNDKIDSHKIAALLRGGMLPQAYVYPAKMRATRDLLRRRMHLAHKRAELLAHVQNTNSQYNLPAIGKKIAYKANRDGVAERFADAAVQKSIEVDLALITYYDELLRDVELTIVKTAKHHDANTLYLLQTVPGIGKILSLVLLYEIHDVNRFPRVQDFVSYCRLVKCARESAGKRYGTSGAKIGNAHLKWAFSEAAVLFLRDPPAAQKYLARLEKKHDKGQALTILAQKLARAVYYMLKRQGAFDREKFFQR

SEQ ID NO: 182793 - protein, 339 aa, unidentified
MKYTPVGVDIAKHLIQLHFINEHTGEVVDKQVRSQDFLTFFSNREPCLIGMEACGGSQHWARELTKQGHKVRLMQARFVKAFLMGNKNDVMDARAIWMAVQQPGKAIAVKTEEQQSILVLHRSRRQLVKFRTAQINALHGTLLEFGETLHKGRAALDKELPAALERLKIRLPPYLITVLADQYNRLGELDSQINDIEKQLVSVARQNEACQRLLKIPGVGPLIATAAVATMGEAAAFKSGREFSSYLGLVPKQTGSGGKIRLLGISKRGDTYMRTLFIHGARAAALLTKEPLPWITELKKRRPTSVAIVAMANKLARTVWAIAAHQREYDKAHVSVRPS

SEQ ID NO: 182794 - protein, 393 aa, unidentified
MSLIEDCAGLAGAEPQTWGTDLMNNMVFVGMDVHKATIAVAVAEGARGGEIRELGNFLNHSDHIKKLVERLAKGGRTLSFCYEAGPCGYGLYRQLIGLGHECVVVAPSLIPMKPGDRVKTDRRDAVMLAKLHRAGELTAVWVPDDAHEAMRDLVRARSTAVRVLVKARQHLQGFLLRHGRIYAAGKKGWTLAYRRWLATVRFDHCAQQVVLQDYIHAVTDAEERVGRLTQQIADLAPNWSQAPVVAALQAMRGVAFVVAVTVVAEVGDFTRFANPRQLMAYLGLVPSEHSSGCTVRRAGITKAGNALARRALIEGAWTYRMQARVSRKLHDRIEGLPQTVRDIAWKAQVRLCARYRRLAAAGKPKVVVTTAIAREMLGFIWAIAQSVQSPRAI

SEQ ID NO: 182795 - protein, 282 aa, unidentified
MDILGGFDVHRKQITFDYIEMESGEVHRGKIRPTIRQSLREWLDEFTERFSAKQIAIAVEATTGWRYVVEEIKRAGIEPHLAEPAETKSLQGRKKRAKTDRLDAGHLRDLMVIDRLPESWIPPDHIQQIRTLMRLRHSLIEERTTHKKRIHAQLFHNGYPQQSNLDSIEGRAHLEDTELPTAARKVVDLSLAMIEHINEELAPIEKELRAYARSQAGCKALMMAHYGVGELTSVALLSELGDTRRFWSSKKAVRYAGMDVTVHSSDDKRAAGKLRAGRVRWY

SEQ ID NO: 182796 - protein, 332 aa, unidentified
MYIGMDTHDRYSQVAVMRQDGSLVDEFRLSHGTERAELEEFAREYAGSAVAIEATGHYRPIYETLDEHMDVTLVNPSKTRVIADAKVKTDRVDAKMLAHLLRANLVAESYVPPKDVRERRDLVRARKALVEDRTREKNRVQAVLKRTGNQYSRELFGPTGREFLAELTLSEVDRAVLEAHLAVIDTLNEQITKLDKRIEDTAAARHDAQLLMTIPGVSYFTSLLITSELGEIDRFSSAKKVISYAGLDPSIRQSGDKEVRGRISKEGSAPLRWALVQCANVAVRFDDYLGQFYNRLKQRKNHNIAIVATARKMLVAMFHMLSREEVYDPPTA

SEQ ID NO: 182797 - protein, 384 aa, unidentified
MQTITLYLGLDVHKDSITIAVAEPGPKGEIRLFGSIASSLQALERTLTRMREAHPEAQFEVAYEAGPCGFGIARRLKQLKVPCLVAAPSLIPKPPGSPFKTDKRDARSLARLLRAGELTAVYIPEPTDEAIRDLCRARTDAVDDLRRCRLRLKSFLLRHDYRYQGKANWTEAHMRYLRELVLPHPAMKTILEEYLQGIDAAHQRVQRIEASMLTLLETWRLKPAVQALMAFRGFQLVAAMITVSELGDIHRFAHPRQLMTYLGLVSVEHSSGPRQRLGAISRCGNGHQRWLLIECAEHYALPPKVSKELARRQEGQPPEVRALSWKAQNRLHLRFTHLLARRLQRNKAKVAIARELCGFLWALLRTLPCYAQPSAAPAASPSAK

SEQ ID NO: 182798 - protein, 331 aa, unidentified
MVGIDLHRRRSVIVRMTEAGERLDVVRIDNDPLALGREMAKAGEAPEVVLEATYGWYWAADVLAEAGATVHLAHPLGVKGFAYRRVKNDERDAADLADLLRMGRLPQAWIAPPEIRGMREAIRHRSKLVAIRSGLKAQVHAVLAKQGVRVAVSDLFGVGGQQLLDDLELDAPFAARVTSLRRLIDAFTFEIDILTKRTSADLKTHPGFQAIQAIRGVGPVLAAIFVAEIGDVTRFARPQQLCSWAGMTPKHRESDTKVHRGRITKQGNPLVRWAAVEAVQTLRDGPIGHARVSIGERRGANIGKVAAARKLLTLVYYGLRDGHIRCLDRPA

SEQ ID NO: 182799 - protein, 342 aa, unidentified
MSVMIGIDPHKGSHTAVVVDRDERVIDEIRVRSSTNQVVDLREWASAYDERCWAVESARGLGYLLSQQLVAAGERVIDVPAMMASRVRLLGSGKSQKTDPNDARSVAIAALRHSGLAMVRTDDHARVLGLLAKRHRDVARLKNMVACRLHALLMELTAGGLGSEMTVSKAISLLEQVDVTDEMTRQRMVIATELIDDIGRLDSQMRASKKRIRVAVAASGTSLCDIRGIGPIGAAIILGSVGDIARFPTAGHFASYNATAPIEASSGDKRRHRLNPRGNRKLNHVLHIAAVSQLRYPSEGRDYYQRKIAEGKTTKEAIRALKRRISDVVYRCLVADAGRIIS

SEQ ID NO: 182800 - protein, 452 aa, unidentified
MARHSNKFDEVRRYVAGVDLAGNADHYVCGPRKDDGTHDIERFGTTTNELLRMVAWMKEHKVVSAAMESTSVYWIPVYDTLEAAGIEVVLVDTRTVKMVPGRKSDVKDCQWLQRLHSCGLLRGAFRPPEAFNAVRSVIREKGNVLQMRSQSILSIQKALDQMNIRLHHAVSDIDGVTGMKILGAIVAGERNPRKLATLRDRRCKKSEAEIAEELTGNWREEHLFNLKQAYETLCFLDGRIADYDTQIRAMYAKIAEAFPPVDPPPDGTGPKKQKDKEDSKAKADIARICGGFDMTKIDGIGYDNAAAILSELGPRLDAFPAESNFVSYIGVAPALGKSAGKNVSSRKKHKNTSRVGIVLKMAASTLSRSESSLGARYRCVRSRTCSRTAIKDVAREMAKRIYRGIKYGQAYIDEGERAYMERTRERTIQSMKKKISKLGISAEELGIYAVAV

SEQ ID NO: 182801 - protein, 424 aa, unidentified
MEQNDDNRLQEFRQLKHEIRMSGEFLVVGMDIAKERHHAFFGTPTGKTLLRRLVFENTKEGFEDLCFQADTLKTRHALKKVVFGMEPTADYHKPLAEYLIRQRHMVVLVGGAAVKKNRELLDGRWDKNDTKDAANVADLITQGKCLFYDFPSSDLRALRSLLSLKRRLKKQEQGYKVRIRNHLIAQYFPEMDNYFGYGEGPAIVKWCFNPAELANLPFEEFVRMVSSRNTGENQRRRLLEVHKKAASSIGCEITSGVSFEAKALLEELQQLHRIIQETDEKIAGICSRFPEYTFLLSIPGFGPDISAKVLGAVGNPHRFDNERQVLKMAGLDLSADRSGKKSEVTPVISKKGKADLRYGLYQAAFIASTRNHRFMTYFTNKLKGRERERGILTNRRVKLAAKMLVIAWTLMKKKEVFDPGYIKE

SEQ ID NO: 182802 - protein, 390 aa, unidentified
MILVGIDVAKDKHDCCIINSDGEFPEEVFSILNNREGYETLYKRICSLAVDLAKVKVGLESTGHYSSNLLAFLLDKHLTAYVINPLRVNLFRKGQSLRRTKTDKIDSRNIAHLLMTDSSLKPYSLSSYHMEELKSLTRYRAFIVRERTKLKTSIARLVTILFPELEQLVSSIHIHSIYAMLEEFPGSAYIAAAHLTRLTALLLKASRGRFGRETAIRIRDTARRSIGAVSPAKSMELQHTIAHLRVYDQEIGEIESEIEKIMDDVNSPITSVPGIGMQMGAVILAEIGSFRRFDSPDKILAYAGMSPSTYQSGKLTGSYSRMEKRGSRYLRYALFNVTRYVCHYDPGFTAYLSKKRKEGKHYYVAISHAVKRLVRVLYAMEISGNRYKTA

SEQ ID NO: 182803 - protein, 328 aa, unidentified
MTMSPTHSAFNHVVAFEVAKQTLVVHSLPGDGQCTIANKPKAVRKLLLREMRRNDAADLGPLLVICEATGGYESHVLEICVELGLAVHKAHGSRVRHFAKYMGLLAKTDPIDARVLGLYGLRTQNLRLYVPPSPEQVALKDLKTRRDQVQRMLIAETNRLEHAHHPSVMRSLKTHVASLRKALAALDAEIAAHIRSNEALTRKARLMRSLKGVGPATAATLLAHMPELGTFRKGEVACLAGLAPINNDSGTSRAPRHIAAGRSTIRAALYMAALVAVRHNPIMRRFAASLRQNGKPIKVVITAVMRKMLVTLNAILRTEQPWAHANHA

SEQ ID NO: 182804 - protein, 337 aa, unidentified
MANAHMLSIDLAKRSFQVCATDRAGSVLYNRTISRSKLEALLREQPRCIVAMEACATSHFWGRFAGAEGHEVRLIPPIYVKPFVKRQKNDAADAAAIAEAAVRPNLHFVSVKSAEHQARAVAYRTHQCFVSQRTQTINALRGHLAEFGLIFPQGVPHLKEIRTAMADDDVDVPPSIREIAGLYLEHIDTLTAKIDELSLRLREAMAVSAELRRLCTVPGVGPVTAGAIMAFAPDLRTFDSGRNFAAWLGLVPKQRSTGGKSRLGSMSKMGQSDIRKLLVVGAMSRIRWIVRKGVLPDNWLGRMMARRPRMVVAVALANKMARTIWAMMTREEDYRLA

SEQ ID NO: 182805 - protein, 337 aa, unidentified
MKYSGIDLYSNNSVVTITGKEDRVMAEKRLPNDLTKILDFLKPWKEELVDVGVESTFNWYWLVDGLQEAKYKVHLANTVAIKKYEGLKHSGDETDAGYLAHLLRLGILPTGTILPKEQRVVRDLARKRMQLVRSRTTHILAIENIIARQFGARMNSNQVKKLTDDEIDRMPLHADVALALKANHAVITAVSTQIDLLEKRLQEIIKERSTYGLLTSVPGIGKILATTILRETGPIKRFADAGNFASYARCVDSVHTSNGKKKGEGSTKNGNKYLAWAFIEAANFALRYSADAKRFYERKKAKTNNVVAIKALAHKLARACYHILKDGKSFDVTRCFA

SEQ ID NO: 182806 - protein, 473 aa, unidentified
MAHATRRAGRGQPQQRRARRVRVAQLEQLNLNAAGIDVGATEHWVAVPADRDVQPVQRFGAFTADLYTLAEWLRQCQIETVVMESTGVYWIALFEVLEERGFDVKLVDAHYARQVPGRKTDVKDCQWLQELHTYGLLRGAFRPEDQVCVLRSYLRQRSMLVAMASRAVQHMQKALEQMNLKLTEVVSDINGKTGMEIIHAILAGERDAQRLASHRDRRCKHDQATIAKALEGHWRAEHLFALQQALEQYEFLQQQLQACEQQIEACLQTFVTHVEVEPPQPTPARKRRARQRQAPSFDVHGYLHAMTGVDLTQIDGIDALSALKVISEIGLDMTRWPTGKHFASWLGLCPGNKLSGGKRYRMRSKPTANRAASALRLAAQGLVNSHSALGAYYRRMRARLGAPKAITATAHKLARLVYSMLRYGTAYVDAGQQAYEQKYRDRVLTNLQRKARVLGYQLVHVEDTGRVQAAATL

SEQ ID NO: 182807 - protein, 402 aa, unidentified
MDIEDIEVFIGIDVGKTDHWATALSRDGRKVFDKPLPNDEARLRSLYGKLADHGNLLVVVDQPATIGALAVAVAQDMGITVGYLPGLSMRRIADLTPGSAKTDAKDAAVIAGAARTMPHTLRAINASDEDAAALSMLTGFDLDLARQVNQSANRIRGLYTQIHPALERVLGPWLEHDAVLEVIAAWPTPADLKRAGRTRIDAKLKAHGCRRHTTWAGQIVSALEHQSVTVAGTDAAAVVLPHLARQLIALHSQRADVAAQVETLVQAHPLYEVLTSMPGIGVRTAAVFLAETLGKTFNTGAQLASYAGLAPVTRRSGSSIRGEHVSHGGNKRLKRAMFLSAFASLRSDPVSRAYYQRKRDQGKRHNQAVLALAHRRILTLHAMIRDGALYDPQPATKLPAAA

SEQ ID NO: 182808 - protein, 343 aa, unidentified
MDHFGGLDVSVKETSICIVDDTGRIVKEVKVASEPEALLKVLGKPAYRFKRIGLEAGPLSQWLFSALAEAELPVVCVETRHMQAMLKAQINKTDRNDARGIAQMVRAGLYRPVHVKTLRSQKLRMLLTHRKLLQSKAIAIENDLRGTLRNFGLKVGMVGKVKFESRIKELVDNLPDLALLVEPLLIVRRALREQIIILHRRLLAIVRSDEVCRRLMTTPGVGPVVALTYRATVDVPARFRKSKSVGAVFGLTCSRYQSGEIDWSGRISRCGDEMMRVMLYEAAQSMLRSKKWSWPKAWAMQIARRRGMKKAIVALARRLAVILHRIWVDGTEFRWTREVVPAA

SEQ ID NO: 182809 - protein, 351 aa, unidentified
MRYIGIDVGKKRCQACVVDEGGDVVDEFSFSNTFDGIQSILKRMRVGECRAVLESTGNLWLRIYEALEEDGVQVKLANPHKTKAIASARVKTDKLSARILAHLLRADLIAECYVAPRDVRRVNALLRQRASLVRLRTMVKNRVHSLLDRYGYCSSLRDVFGVGGMEWLRGLEMDPVDRCVLDTHLRHLECLNGEIGFLDSKIASHAMERGDARLLMTMTGIDYYSALLIACEVGDIRRFPSPKHLVSWIGLCPSLYQSGNSCYTGRMKKDSNKRVRWILVQAARSASRTDPRMRQLYGRVVSRRGDGKAVVRVANKMATIMWHMLTKRQPYHQVKEELYRSKLKRMMRIAG

SEQ ID NO: 182810 - protein, 347 aa, unidentified
MNKKWFIGIDVSKKTLDASIFVAGEVINRFPHIQVRNEKQGFKELLRWAKKQDVNTKDTLFGLEFTGYYSDALEQFLTGKKLCYTMLPTTVVKHYQRGTRDKNDKTDSAKIADYLFRFNGTECIKLRVLPSKAMQELKALKSERKFYVQQRVACENRQKVAKSKQEQKHLQKAIDLFNEQIEQIERQMADVVISDEEIYLTYMRLLTIPGIGPVNAINTIANTQNFTAFETARQYAKYVGVAPSEHSSGTSVRWRGRPSPHADLQAKADLSMAALRAVEFNFDMSQCYERKLGNRKDDKDVQRKALNAIKFKLIRQMFSVANQHKNFVVMQQRLVQDEKHSTEKRVN

SEQ ID NO: 182811 - protein, 387 aa, unidentified
MARKRTLSTLDTSIAYEAVGLDLAKEDTAIAAFGPDHEGPYLIDRMPYDKLYELLADMAPTLVAMEPCSGAHQIAEQIQELGHEVMMISGRHVQAWVKDHCNGQKTDLNDAFAILNLAYDRWLTPIRGKTREECRLLALQASYRQLKGQRTKTMVHVKATLHAWGFPIRAGSFNQKVLHELIDANREAFGDEVAETLHLMINRVRDLDHDIATVLKLLTEATQRDPRASLLRSIPGFGVLPTSRWCAVVGDIARFDSPKQTMAFIGLVPNNRITGHHTETSSGREARGQGRMSKRGDKMLRSLCIMGAGSLCLMVRNDRLPDCPFVASIKERLASPRPWFKVLVYVAAKLVRIATALLKYGETFSFEKAGISKAVLKQWELEQAKAA

SEQ ID NO: 182812 - protein, 356 aa, unidentified
MEYGAIDLHKRESQVRIITGDGEVLDRRILTTRDRLTVIFWGRPQTRILLEASTESEWVAQHLESLGHEVIVADPNYGAMYARRSRRIKTDRRDAAALADACRHGNYRPAHRRSARQRLVQSMLNVRRELTDSRTRAILLARAITRAAGFRIRSGRTETFLDRLGALELPAAMTATLLPLRSVIEVLDDELAAADEQFGTLAEEDPVAKRLMTLPSIGPITATAFMAALDDVARFDGAAQVTSYLGLVPREYSSGEHQHRGRIVRSAHPHVQSLLVQAAWRMGRSSDAKTAGLRGWAAAITRRRGKKVAMVALARRLARILFAMWRDHTEYQAPRVRIIRRTAAAIVEGPAAAAGV

SEQ ID NO: 182813 - protein, 518 aa, unidentified
MKHRVVGIDLGIRAPSVAMVAEVDGTIIGNAVRFELGIDELERVEVAGLEGAKEGTKLHVVMEQTYPTSEYVTAFFLGRGHKVSFAKPNQVKEFRKCLSPKVKTDEVDAFIMARLPWLDPKQLARTYVPPPEIRELKIQVSQRNSMVKQLVDLKNQLIAYANAVWPGISRAFGDLDSAHARSFLREQRPKTIATLQVDELAELLKDRGRIQKSYAKRLAAKLLAIAQRTLGLHQLLPEEQIELTLAHTIELVEMVEELELRLRTKEKRLDEAYVRCDPERLLMSIPGIAEMTAPTIFSYFGEPERFASICKAQGFAGMFPETDATGLSDRKGTHITKAGPALLRRDLFLAADHFRRHDPHGAQMYHNLMVHRGKHHNSALCIIANRALIPRILAVLREQRPYELQDLEGNSITKPEARKLAEQWKVTEEVRKRLRNKKTLAQERWEAPPSVTSEPKAPRNGRPSQPADPNPATLSVTTDELKMLVFKSLEKMLNTGGNVEEIRLQLKEEAANFFQKRA

SEQ ID NO: 182814 - protein, 355 aa, unidentified
MNEAKYIGMDVHQATISVAVRDSRGNLVMEAILETKAETILQFIRGLRGSLYVAFEEGTWAAWLHDLLQPHVARVLASDPRKNALLKAGNKSDRIDARKLSELLYLNKLSPVYHGEQGIRTLKELARSYITITRDLTRVMSRLKAIYRGWGIPCAGQQVYASRYRAEWLAKILEAGVRRRAELYYQQFDVLAALRQGTRRELLAEARKHPAMRLLQQIPAIGLIRAALLIALIQTPNRFRTKRQLWAYCGLALRTYTSGEYRFVGGQLKRSKKVLAVRGLNINHNHDLKNIFKGAATRAAATTGPLQDFYQACVARGVKPHLARLTLARKIASITLLVWKKGVRFDAEHLKQQAA

SEQ ID NO: 182815 - protein, 399 aa, unidentified
MLKGYDEVAVFLGLDVGKQGHHAVAQDRSGKKLLDRALPNDEAKLRELYGRMKVHGPVLLVVDQPATIGALPVAVALDEGITVAYLPGLAMRRIADLHPGSAKTDARDAHVIANAARTMPHTLRALKVDDETIAELTVLSGFDDDLAGQITATSNRIRGLLTQIHPALERVLGPRLDHPAVLDLLETWPTPAALTAAGKTRVRTRLLKKAPRLGGRLTEEIFAALAAQTVVVTGTNAAGIVLPRLAAQLAALRQQRAEVAEKVEELVAAHPLSKVLTTMPGVGVRTCARILTEVVGKDFPTAGHLASYAGLAPVTRRSGTSIRGEHAPRGGNKVLKRALFLSAFAALSDPVSRAYYDRKRAQQKKHNAALIALARRRTDVLYAMLRDNKPYAEPPAAAA

SEQ ID NO: 182816 - protein, 417 aa, unidentified
MKDEVRWFVGFDWAMEQHRACLLDAEGKRVAERDVRHGGAGLLELCCWLLEKTGARPEEIAVAIETPRGPVVEVLLERGFAVFAINPKQLDRFRDRFTVAGAKDDSLDAYVLGHSLRTDRHAFRRLAIDDPLVIELREWSRMYDELKQEQSRLANRVRDQLWRYYPQASELGDPAADWFLDLWEKVPTPAQAARVREQTVARILKNHRIRRFDATEVLRILRQQPLVVARGTIEAATAHIRAVAARLRLVNQQIKEAERRLDELCAAIEAAAETTPGQICEQRDVAILRSMPGLGRITIATLLAEACEPLRLRDYHVLRVLSGQAPVTRRSGKSCIVLRRYACNTRLQNAIYHWGRAAVQHDPISKQRYAELRRRGHSHARALRSVGDRLLYVLCTLLQRQTLFDPNYASSQTAVAA

SEQ ID NO: 182817 - protein, 403 aa, unidentified
MNSVGIDISKGRSTIAVMRPFGEVVISPFEVRHTGSELSKLARQLKSLDGETRVVMEATGNYHASVAKLLHDAGQYVSVVNAKLVHDYGNNELRRVKTDRKDAVKLANYGLDRWLTLPRYIPEEDTRLLLKNCYRQYRQYSKVQTVLKNNLISLLDTVCPNVNRLFSSPIRGDGSEKWVDFVAEFWHCRCVSEKSERAFTSKYLRWCRKHGYNFREAKAHTIYAEASGHIGVMPKAETTKLLVEQAVAQLRATSTALASLKHEMQALASILPEYPVVMDMFGVGPTLGPQLMAEIGDVRRFYSKKALVAYAGLDAPPNDSGDVTGRHKSMSKIGASSLRRTLFLVMSVYLQTAPLDEPVYPFMDRKRAEGKLYRVYMMASANKFLRIYYATVKAYLESLEHTA

SEQ ID NO: 182818 - protein, 416 aa, unidentified
MNAAGIDVSSRKSTVAVLRPFGEVVKLPFDVRHSAEDLAALAAQLKSIDGETRVVMEHTGRYYESIAKVLHEAGLYVSAVNPLLIKEYGNNSLRKVKTDKADAMKIAKYALDNWTELRDYTPMDTIRYELKTLNRQFQLASKQKTATANNLIALQEQSFPGIRKLFDSPVRSDGTQKWVDFTHDFWHVDCVRSGSQNAFAERYRKWCKRNRYQFSMEKAAEVYALAKSAVVLAQKTSVTKTLVQEAANQLTAIFHSVETYRSEMNKLASQLPEYPVVMEMYGVGESLGPQLMAEIGDVRRFERKQSLVAFAGIDPAPSESGDYCSRSNRTTKRGSPYLRKTLFNIMKVHLQRAPADEPVFQFLDKKRAEGKPYYVYMTAAGNKFLRRYYGKVMAYFSTLEGLPPVDMDSTGLHHAE

SEQ ID NO: 182819 - protein, 429 aa, unidentified
MPYRIAGIDVHKKMLAVVVTDVEIDSEYQFERRRFGSNPEQLRSLAAWLLEQESEEVVMESTAQYWKPVWEALERYWKPLCEKREGARRKSGTLHLAQALSNQGRRGRKRDFPDAERLVKRLVARELTLSFVPDAEQRLWRTVTRKKYQLRCDRIRLQNQLESLLEEAHIKLSSLVSDLLGLSARRMLQAIAEGETNPATLAALADKRLRATPEPLSDALGACSDLNPVYRRLLKMALEELRLIDEQIGRLDQEMAGLLSAHQDAVQRLAEVPGLGVDSAQQIIAEVGATAATFPSEKCLSSWVGACPGDDESAGVNYSHRSPKGNRHMRRLLNQAANAAARTKGSIFEILYRRSVPRLGHNQAIGAIAHRQCRLIWLILHQGVRYEERGPAVTKRSKQLRTWKMIRQLRNLGYRIEPPNPQPSQVQSQ

SEQ ID NO: 182820 - protein, 456 aa, unidentified
MVVKMNMEGKEHGNYSLLRLVSVGNKNTLTGGVTAMRKKNDNRQVEKRQRITGATLVIGMDIGCEFNAMCLMNKEGTVLGRYPKIYNSRKGFDYFHGIVEGMKKKYGFTDVLIGMEPTGHYWRKIAFFAMDKNHEVRFIRTTALKHQRELDESSSAKNDMRDAYTIGNIVREGKYIDTVIEDGVFRQLRTLAHTRERIQRISTGAKHALKGVLEDYFPELKSIFWSMNAKGLLALLEQCPFPGDVLTIGPDTLTEILAKSTRRKKKAREKALMIYEAAGQSVGLKCIGEADRHRAALFLSEIRHSEGQLKEIELRMKTLLQKIPFAEYILSMPGIGVLTCGVFLGELGDPYNFRDPKQIVKYAGYDPKEHDSGQSIGRKIISKKGRWLLRKYLYFMAMRVVHRSPFFKEYYENKQKTMAKKEALCAVVIKLVKVIFALLRDKRTFTEKQCCLKQAA

SEQ ID NO: 182821 - protein, 346 aa, unidentified
MVLIGCDFHPSWQQVSWLDGETGETGDHKLVHETGAVEGFYRQFPAGSRIGMEATGNCQWFMELLNRLGHELWVGDAAKIRASDDRQQKHDKRDARLLVKLLVEQRFPRIWVPSYEEKDLRQLLIHRYKLVRIRTQVKNALQHLAMNQGVTRKRKLWSKAGEKVLRELALKPWASRRREDLFKVRAMLNEQIESLDAAVLEAAEKNEKAKLLMTQPGVGPITAMAFVLTMGDVSRFPRGKQVASYLGLIPREYSSGGQQRLGSISKQGNRFMRMLLVEAAQIAVRYDPGFRNEYLHRCHSKAKGVAKVAAARKLAIRLYWMLRTNTGYPEVVGVESSSRVALVGAS

SEQ ID NO: 182822 - protein, 344 aa, unidentified
MKIKLIGIDLAKNVFQLCALNQANKVLFNRSIRRARFHSSIAKLEPTIIAMEACSSAHYWGRAFEAMGHQVLLVPAQHVTPFVRGGKNDARDALAICEAAQRPGLHPVPIKSIEQQDIQLLHRLRQRQVQHSTALANQIRSLGREYGVIFPAGIKSLIKRLPEALEDGSNELSPVARYALADQHQCLIDVRKAMVTFHQQIVQLAEHHPAYVKLLLLPGIGPLVASAYIAAIGNGRQFKCGRQVSAWLGLVPRQYGTGGQIQLKGVTKNGDRYLRTLMIHGARAVISCGLKTRPELAHWVQPIIDRQGFNKAVVALANKLTRISWVIVTTGEPFDMKQAFKPAA

SEQ ID NO: 182823 - protein, 340 aa, unidentified
MDKITKKKWFIGIDISKVNIDAAIVNENEPKRFQNGRFSNDLKGFEAMENWLSKHDVKVKDCLFCMEHTGTYGLLLFAWLSKQNADFCVEPGLQIKRNLGMTRGKADKIDARRIATYAMEKKSKLKQYELPSENLIRIKQILTYRDQLVRLRTSLKNSLQSHQEYQQISSLNFVTKDIQKQIMQLDESIESCVKQIKEIIKSEEDLKQNFKLATSVKGIGLVIASFMLVSTNNFTGFENGRKYACYAGIAPFPNESGTSIKGKTKVSHLANKKIKTLLSNGANSAKSHDPEIKAYYERKIEEGKDHKSVINAISCKLVNRVFAVVKRQTPYVSTYQQKIA

SEQ ID NO: 182824 - protein, 461 aa, unidentified
MPKPKAQDPRGKPTSPGALPHVNAPAAGIDVGGSAHYVAVPPDRDDQPVREFAPFTGDLYRMADWLKACGVTTVAMESTGVYWIPVFQVLEERGFEVKLVDARQLKRVPGRKTDVADCQWLQQLHTFGLLAGAFRPDNQVCVLRSYMRQRAMLVSYASQHVQHMQKALVQMNLQVQYVLNDITGATGMRIIRAILAGERDPQRLATLRDRRCKNPVATIAQALHGDWREEHLFALQQAVDLIEAYQAKIAACDEHIQAQLQTFDDHSSGTPPPTGRPSRADRHDLGFDATAELYRMTGVDLTAVPGLEAHTVLKVLSETGLDMTKWPTVKHFGAWLGLAPNTRVSGGKVLSRRTLPSANRTAAALRLAAQALHHSRSALGAFLRRKAAQHGMPKAITATAYKLARIIYSMLTAGTAFVEQGQDYYERRYHERVLKQLTRRAKELGYHLVRQPEPPPQPAVP

SEQ ID NO: 182825 - protein, 384 aa, unidentified
MTNQKLQTNNTANLPPTAIVLLVAIEMSLKTWRLVMGVRGQPRKRVRTVAGGDYTALRQEVMDAQAYFQLPEDVLVIFCYEAGRDGFYPYRRLLAMGYQVWVIDSASIEVSRHRRRAKSDGIDAEKLLELMRRQAGGEQRALRIVNVPSVEEEDQRGLPREREALLHDRQRVLNRIESLLFAQGYREVPPCAAALKAWLEAHSEICPQLRERLLRECEHLALLEQQVRATEQTMRQQGLAEQKSEMARVAAALMGLCGIGLIGAWVLASELFGWRRFRNRREVGGALGLTPTPYSSGQDEREQGISKAGNRRARALLVELSWLWLRYQPESALTRWFKERFAGQGKRLRRIGIVALARRLAIALWRYVDQGVVPAGAALKTPAA

SEQ ID NO: 182826 - protein, 307 aa, unidentified
MEKHFSTYWGIDVSKNWLDISINQKTYQINQTKKDIQLFIKEHAKLPSSILATMESTGGYETLVAQLLDQSGVTVHVAHPNKIYHFAKAKRQLAKTDKQDAMIIEEYGKFIEADEICPLPNDFMRELKDLSVRLDELSAMRHQEICREKMNHSTATKASILNMIKILDKQLKLIETEILKLIKSNEAYKTRFERLQTMPGIGPKIALTIVAELPELGDANKKQIAALVGVAPIIRESGQQKGKARTQFGRAHVRRKMYMGVLSAVRHDKRFKAFYERLLDLGKPKKVAQIAVLRKMLVILNTMIMKN

SEQ ID NO: 182827 - protein, 344 aa, unidentified
MVTIGIDTHKATLAVSAIDATGRETGARTFPNDRQGHVGILRWAQARGPERRFGIEGSGSFGAALARLLVAAGERVVEVPAILTDRERRHLRRAGKSDPGDALAIARVALREQSLGPAPMPGITEDLKLLVDAREQCLAERTRVANQLHAHLVVLTPGYKREIRNLSAARYLAAAARLLKRVGGVRAGLARAELVRLRALDAESDALEGRIRALVQLSGSSLPTIRGVAALTAAKLLGETGDPRRIRSAPAFALMSGTAPIPASSGQTSRHRLNRGGNRQLNRALYTIALTQARTDPRAKTYMARRIAEGKSWLEALRCLKRHLANVIWRTMLADAQRSAEIGA

SEQ ID NO: 182828 - protein, 383 aa, unidentified
MGGECSNTPRVTNSIKRCPQDTPTLNAAMKYYTSTTEFNCGIDLHARQMYVCVMDRQGKKLVHTNVKDNDFAYFLSSSSPTSTVSPCAASACSGWYWLADACQAAGLTFVLAHALYVRAIHGGKNKNDRVDSEKLTHLLRSNLIPPAYVYPTQMRPLRALLRQRIFYVWRRSELLARIHCHQLAHNRIPVKQSRWDRDPWEEELLKAEVDPLRQLALSNDLAMIRHFDRQIYEVEKALQRQTKQVAAREYALLQTVPGIGEHLGLTILYEIGDIERFPTVKDFLSYSRLVKGTVASAGKIKGLRGAKLGNPYLRWAFGEAAVIAKRDHFRIRPLAQRLEAQMEGNKFKANTVLAIKLARCVYFMLKNQTVFDPDRLVAALARN

SEQ ID NO: 182829 - protein, 391 aa, unidentified
MVCVGIDVAKDKHDCCILDSDGMVRADCFTIPNNMDGFKQLLQTIRDCTKKSDKIKVGLEATGHYSYNILGFLLDNDLAVYVMNPLHTNLYRKSLSLRKTKTDRVDARTIATMLLSDVDLKSYTDIAYHNEDLKSLTRYRFDKVQERAKLKQSVSRLATILFPELEGLVSSIHGTSIYALLSEYPGAKQISEVHLTKLTNLLTTASKGRYGKEKAIQIREAARASIGSVMPAKSLELKHTIKLIQELASEINEIEDSIQKIIDELNPPILSIPGMGVNSAAVILAEIGDFSNFSSPDKILAYAGCSPSTYQSGKLTNCYAHMEKRGSRYLRHALYNATKYVCYWNPVFAEYLAKKRAEGKHYNVALSHAMKKLVRLIYALQKSGKTYLTAA

SEQ ID NO: 182830 - protein, 437 aa, unidentified
MRVLYEHVAGIDVHKDMIKVAIRSPGEKPWTRKTEILEFRTFYGVLQEMARLLRRRGVTHVVMEASGVYTDPVYYALCEQDFAEVAVVNPAHARALRGHKTDAADCRRLAELFECGLLRGSYIPPAELREVRDLTRYRMKTVQARTSEIQRLGKALESAGIKLGSVASDITGKSATAMIDSLIDGERRGAVLADLAIGRMRTAGKLAGLSMALTGRFTEHHALLCRLHRDRIAGLDAAVADLDDQIAGRAGRWQRELDLLKTVPGFGDVVAQTWLAEIGPAPHRHFASHEKLASWVTLCPGNNISARKRKHGRTGDAGTYIKPMLIQAAWNAIRPKGRLQARYTRLVRRFGGEKNPGAKKKAITAIAHTLLKIAYQVLKSEVPYQDLGADFYTRRESPDQQRAYLERRLRKLYPGCAITITISPPEAVLTSTVSNAP

SEQ ID NO: 182831 - protein, 324 aa, unidentified
MAKRTTICAGIDTGKRKLDVAIDGSCSSQLVENTAEGHRVLLEWLRRHKVKRIGIEASGGYELPVVTELRRKRFVVVVFQPAQVRAYAKFHLQLAKNDKIDAALIAACTAAVKKIHDAPDPRLQPFAEHLTLIDQIGEDIQLYKNRLETCRDPRIQKLWEEEISRLAKRARAELKALVAAIRQHRDLARRLDLIYSVSGAGMPTAVAILVRMPEIGKLSREQVAALAGLAPYDDDSGERSGARHIDGGRKRLRRALYTAALPASFRWNPHLIALYQRLRAAGKVHKSALIACARKLLIFVNTVVARGTPWQKEQPVRATNPAAA

SEQ ID NO: 182832 - protein, 437 aa, unidentified
MKQFLECCAGIDIGKREMTVTILTGSVEVEPIPRVGTFGTTVQELNRCLEWLLGNHCSTVVVESTGTYWVPVWNVLHERVAVIVANPEHVKARRGEKTDPEDSRRLAERLRVGDVRGSFVPSAQIVELRDLTRRRKRLLSAATSERNRIQKLLEQANVKIGNVVSDVFGVSGQRILHALLQQPQLPPAALAELAKGRLRHKRQALIETLQGHRLNDHVRWMIQHSLDHLVFLENQLTELSQRTLQKLQPFEREYELLQTIPGVAAETAAVILAETGGNMAQFPSPKHLTSWAGVCPGNNRSAGKQKSASIKRANKWLLSALVQSAWATVHQRGSIFQKRFYRQMQHRGRKRALIAAARSLLEVVWQVLQRMTPYHEPANQVLQERERGKKIRHHLQRLRQLGIDISALQLPPLSPSDATRLLTGTPHPLGVLGIHAR

SEQ ID NO: 182833 - protein, 387 aa, unidentified
MKKIYLNVACAGMDVHYKFSNVTFRDPNGRVVRRQRLDHRHREELQERLNRWPKGIPVVMEASFGWGWLSDLLEEAGQEVQLSNCYKVEQMREARGWVKTNKKDADLISLLPFEQSDWWKVWRAPPEVRNRREQMRFRGDLVGLQTMVKSRIHAIFHRHGIFHEFSDLFGGKGRKFLAEVCLHNPTDLSYQALLALRGQVKLLDHLRRQLADVERILHKQLVKTPLIMRLKTIDGIGLILAHVLAAEIGMIERFRNQKALACYSLLAPRSDDTGQDDPRHSPLGRHLGHRGNRTLKWAFIEAAHGAVRSGGRWRAIFDRVTNGGKRDRNRGYIKVARELVKVVYAVWAKGVDYHTVPPVRPGRNKNKKKSRSETGQLLHPMVHALPA

SEQ ID NO: 182834 - protein, 423 aa, unidentified
MDRVVERAGALDVHKEQVTATVRTPGERGGRREQTREFKTTVRGLLGLHDWLTGHGVTVVAMEATGVYWRPVWHVLEADFELMLCNAAHVKNVPGRKTDVADSQWLCRLLEFGLLKASFVPPKAVRELRELTRRRKTLVRERAREANRLHKTLEDTGIKLDCVASDILGVSGRLMLDALLAGQRDPDALAQLAKASLRTKIPALVEAFEGTRFSAQHALLIGGILRHIDFLDTEITALGDAIEAHFAADRACEDSERPFELAVQIACSLDGIQQRTAQMLIGEFGTDMTRFPTDAHFASWAAQCPGNDKSAGKRRSGRTRKGPKWLDGALHDAAMGAIRVKDGHFARKYRRIRARSGHKVAIGAVKHAILIALYHMLKNGEMYRLPTPNPAAELKRRERATNRLLSQLERLGHTVTLQGATAA

SEQ ID NO: 182835 - protein, 337 aa, unidentified
MLNYSSIVPYNLLIMVKNSNFFGIDISKDVFDVVKNGEKHFQFSNNVLGFEKFVRLLDNESYCIMEATGVYHYALATYLYKNHLFVSVVNPLVIKRFMQMHLRTIKTDKADAQQISFYGMQNKLEPWKPVESYITDCKDIFELISLYIKQRTMLKNRLHSFNSKSSQKMIKTELNKSICHLDKVIQKLENKLEIIIKSYHQKMYSNLKSIPGLGAKTVLYMILITEGFEKFESAKQLICYSGLSPTQRSSGSSIRGKSRISKQGNSKLRNLLFMCSFNACKVNKPCKALYERIVAKGKSKKLALIAVENKLIKQAFSIAKSGLKYDEDFVSVKPSYS

SEQ ID NO: 182836 - protein, 327 aa, unidentified
MTLPPLGLDLAKLKFTACLIREGGQLRHKLFPNNPSGFAQLSAWLKQHGVASAHACLEATGTYGDSLATYLHEQGHVVSVVNPAAIKAYAQSHLSRTKNDRVDAALIAGFCSERRPPAWHPPAPEVQELQALVRRLEALVEMRTMEENRLSSGIAVEAVRASVEELLAHLAEQIKRTEARIRSHIESHPGLKRQHELLDSIPGIGETTAAALLAEVPDLAKYRSAREVAAFAGLVPRERQSGSSVRGRVRLSKIGNARLRKALYFPAITAIRCSPFFQAWAKGLQERGKSKMSVICAVMRKLIHLAYGVLKTGQPFDPEWTQKEKTA

SEQ ID NO: 182837 - protein, 342 aa, unidentified
MSIVYVGLDLGSSNFQQVALNHDGVSRVNRDFSTSEGNLVKAFSDLKGEIHVHLEAGELAPWAASVIAPLVTRVVCSHPQSNAWIAKDADKCDRLDAYKLAELLRLNRFKEVHYAPDQPRRNFKQLVQHYDELTAQQARLKTKLKARLRMQGVIVTGERLFSATGRKEVLAKVGSRDLRTAITQLYAVLDQSIAAQEQARLLMLRAGQAFPEIKLLRTAPGIGPIGACRFSAYIHTPSRFSSTRKLWKYCRLSISHRSSNGKPLRRPRLDRFGCGRLKDVSRKAFDAAVRSQKDNGFKRAYLRALETTHDKTHARLTVQRKIVSTLRAIWINQTPYGDELMR

SEQ ID NO: 182838 - protein, 346 aa, unidentified
MLHAGLDLSRKRLDVCLLSDQGELVEELTAFPDAGGLKALAQRVEADGEPVRAVIESMTGARFIHDTLEQYGWEVEIADAQKVKGLAPLAVKTDRIDARVLAVLSHRDLVPAVWLPDPRVRREREWARFRLHLVKHRSQLKNRIHSALISFGCPCPVTDLFGVAGREHLARLDLPEPWRGNIAASLALIDQLEAQVVEVDAKLRASGADHPYVPLLLTVPGVGWVLAFTIAAEIGEIERFASPAKLTGYTGLCPRVRQSGESDRRGPLSKHGPRYLRWALLEATMHALRHPAYAERYQRNKRRLGRQRGAKVAQIDIARRLAHAIWHMLSRNQPFAPRGAASRLAA

SEQ ID NO: 182839 - protein, 413 aa, unidentified
MIVAEERTAARICAGVDWAKDDHAVCIVGDDGEALQRFMINDNRAGLKDMVRRLLDAAVQEVGIERPDGTVVQALLAAGLTVLVIPPAQVKGLRSRYGSAGNKDDRFDAYVLADVVRTDRRRLRPLQQDTAATTALRTTVRARRDLVVHRVAAANQLRAHLQIVFPAAATLFAAIDSDISLLFLAKFTTQEQADRLSVTALAAWLASVSYSGGTDPAVLYAKIVKAPRGTTEAAAAAHAVTTGVFIAVLRTLNTQIRVLADAIGAQLDAHPDKQILTSLPRSGCVRAARMLAENGDARGRFPTADSLACLAGVAPSTRQSGKVKAVTFRFGADKKLRDAICDFAGDSRMANPWAADLYAKAIGRGHDHPHAVRILGRAWIHIIWRCWQDHTAYDPANHGALQRVLNQDQETAA

SEQ ID NO: 182840 - protein, 343 aa, unidentified
MGWALEEVVENQVFVGIDVCKVRLDAALRPGNENFDLPNNQRGIAALVKRLKKLRVSRIVLEASGGYEIAATSELAAAGLPVAVVNPRQVRDFARATGRLAKTDAIDARVLAHFAEIIQPQTRPLPDAQTRELMALVARRRQVVEMLTAESNRHGRAVDSVNRAIAAHVRWLRKQLAELDAALERAIRNSPLWSEKARLLRSVPAVGSVTVITLLSHLPELGTLSRRKIAALVGVAPFNHDSGKMKGKRAIWGGRGQVRAVLYMCTLGAIRRNPQLGAFYARLIATGKKPKVALTACIRKLLIMLNAVLRQQIPWNPELAALPSPFSAARGGAVIAAGSINAA

SEQ ID NO: 182841 - protein, 386 aa, unidentified
MEHDSTLYVGLDVHKDSITVAYAFGTGEVELLGKTGTTKTDIDRLCKRLQSKARHVRVVYEAGPCGYGLYRQLVQKGFDCMVCAPSLIPRKPGERVKTDRRDAVKLVRSLRAGDLSAVYVPTVEDEAFRDLARAWMTAKDDLRHARQRLKSFLLAHDVRYAGHADWGPAHRHWVSQYAFGSEWQQFAFEELRRTIEDRLAQCQRVEAALREAVTNWRFYPAVLGLQAMRGVQFTTAVGMLAELGDLSRFEHPRQLMAWLGVVPSEHSSGDKRRQGSITKTGNSYARKLLVEAAWSYRHPARVSADIQCRHEGIPKAIIDRAWDAQVRLCRRYRRLAARGKNANTTVVAVVRELSGFIWDIGRLAMSLALPYRTEATCLRSTTSLTP

SEQ ID NO: 182842 - protein, 286 aa, unidentified
MMNEHAVGIDVSKKKLDICVVSANKTKTKVLKNTPAGHGELERWLRQLDLPKITPVVLEATGPYSERVAIMLADAGWAVSVVNPARITGFAQSELNRNKTDKADAKLIARFAQKAELQLWHPPSLAVRELRALVDRLQALIDMRRQELNRLEAIDQGSVISVEDMVREHIDWLNSEIKNVQSEIDDHIDGNPELKHDAELMESIPGIGKRASAQFLAYIGDVRRFKSAKALAAFIGVTPRQKQSGTSLNGRSSLSRAGHTAARKALFMAGRLLSITTPSSSPWPNA

SEQ ID NO: 182843 - protein, 355 aa, unidentified
MTSTKYIGLDVHKESISIAVLSSVGKVVMECVIETKASTILQFIHGLRGDVHLTFEEGTWAGWLYDLLKPHVTELVVCNPRKNALLKEGSKSDRIDARKLAGLLYMSKLSSVYHGEHGLRMLKELSRSYLTITKDLGRVMNRLKALYRSWAIPCAGTQVYAPHYRSEWLAKIHEAGVRRRAELYYQQLDALRLVRQQARKELLAEARKHRATRLLRQIPGIGPLRAAHLVAVMQTPHRFRTKRHLWTYSGLGLETHDSAQYRVVEHQLQRSKKPVTLRGLNDNHNHDLKDIFKGAAMRASTAAGPLRDFYEALLAKGRKPTMARLTLARKIAAITLIVWKKEVRFDVNYLKQQAA

SEQ ID NO: 182844 - protein, 337 aa, unidentified
MGLYCGIDLHSNNHVLTVINDADRRVYERRLPNELSRTVAALEPFRKELTAIAVESTFNWYWLVDGLMDAGYEVRLVNTAAVQHYSGLKHTDDEHDAFWLAHLMRLGILPTGYIYPKTERSLRDLARQRMRLVQHRSSHITSIQGQVWRSTGIRLRSTTLKGEGTQSWPELTDPDVALSIETGRAAIDALTLQIERLETVLLKRMKLLPEFRLLQTVTGIGPIIAMTIALEVGTIARFPGVGEFTSYCRCVDSQRLSNAKKKGEANRKNGNPYLAWAFMEAAHFAIRHLPGAKRFYDRKVRQRHKLIAVKALAHKIARACFYILRDQVPFAPERLFV

SEQ ID NO: 182845 - protein, 327 aa, unidentified
MEETHICVVDRDGVVMHEARARSIPESIKSALAKAPACRQVAFETGRMAPMLYHGLTERGVPVVCIESRQAYQALKSLATHKSDRNDARGLAHLARTGFFKPVHVKSLPAHAVRSLIIARKKLVGQRVTLENQIRGLAVVFGVRLPRSLSPAFIKRAADASDSIDGLSGAMRGLIAARNAVLGAIAAINADMKRLVRASDACRRLMTIPGVGQLTALAFTTAIDDPERFKRSRDIGAYLGLVPRRYQSGEIDYTGSISKCGDRRMRTLLYEAANVMLTRYKGPLKLKDWALAIAKRSTMRKARIALARRIAIIMHAMLRHGTEFKPA

SEQ ID NO: 182846 - protein, 356 aa, unidentified
MQLHDALTSPKIFIGLDIHKQSWSVSIQTDLFFHKTYSMPSICGDLYDYIEKHFPLHEVNLVYEAGCCGFSTARYFLNLGWTVLVVNPADVKKGDKERYQKTDAIDSKLLSNQLKAGILKGIYIPSEKEEQFMTLARHRTRVTKKLRQSKSHIKSMLLYHGIKIPLEFDNSNWSNAFLMWLDEINFSTISGNLALKGKLRMYRFIKSEYLEIANQMRAYCRKEYKKEYYLLKSIPGIGGYLASVILAECGDLRRFNTEGQFACFVGLVPGIYNSGGSEKCLGITPRSRSQLRSYLVEAAWIAIRKDAEMQQYYRKHTGKNVKSIIVKVAHTMSRRILSVVKTQTPYKVNKNVVLEK

SEQ ID NO: 182847 - protein, 457 aa, unidentified
MVLAEVVAVMRPQEIEDEEHEQALERVAAVDVAKASGMVCTRVPHPDRAGRRRTLVWTVPATTNAVVELAGRLAVEGVEKVTLESTADYWRIWYYLLEAAGLDVQLVRAYDVKQAPGRPKTDKLDAVWLAKLTERGMLRPSFVPPAEIRVLRDYTRLRTGLTREQTRYWQRLEKLLEDALIKVSAVASKLTTVSAREMVEALIAGQRGPQVLAGLARGRMKAKHAALAEALAGRFDAHHGELARMLLDQIDALTAQTGKLTARIEQLIAAIPAAQGVDPDGTTGPGAGLEPGSPVMPAVDRLDEITGIGRDAAQAVIAEVGLDMSRFPTPGRLVSWAKLSPQTIQSGTKNRSGHTGKGNPYLRGVLGAAAAAAARTDTFLGERYRRLVKRRGKLKALVAVARSILVIVWHLLTDHAARFRDLGPAWYATRIDKDRKTRSHIRQLEALGYTVTLAPAA

SEQ ID NO: 182848 - protein, 354 aa, unidentified
MDKNTPYAGVATIGIDLAKRVFQIHGIDSSGKVIVRRPVKRRDVLAFAAQLPPCVIGMEACATAHHWARELGKLGHEVKLIPPAYVKAYVRRQKNDAADAAAICEAVTRPAMRFVPVKSAEQQAVLMLHRVRELLVGQRTALINALRSHLAEFGVVAPQGARHVAELVAVVADAGDIRLPDIAHVALAPLVQQMQRLEAEIGHLDRRLLAWHRADETSRRLATIPGIGPVTATAMVASVTDPSMFNSGREFAAFLGLVPRQSSSGGKERLGRISKMGDRYIRTLLVVGATAVLRYAKKGGSPSKTWAEALLQRKPFKVAAVALANKTARIAWAVLTRGETYQAGKIGAVATEAA

SEQ ID NO: 182849 - protein, 369 aa, unidentified
MEKTIKNIGLDVHKNSISIGIADDGRDGEVRFYGKIDNDMNQLDKVIRKLISKGAVLRFVYEAGPCGYGIYRYLTNNDMDCTVVAPSKIPKQSGNRLKDDRRDCLSLARLHRAGELTPVYVPTEEDEALRDLVRAREDATGALRTAKQQLGGFLLRHDIIYSGKSKWTKAHFNWLSDIAMPHPAQQIVFQEYIDTVVDCGNRVQRLTEQIRQQSQQSRLHELIKALQSMRGISLIVAATIAAELGDLTRFENPGKLMAFLGLIPSEHSSGERVRKGAITKTGNSHVRRVVVEAAHAYRFAARKSRGIRKRQEDLPKEVLDISWKAQCRLCTRYQYLTAKGKKTNVAITAIAREIAGFSWAIAQALPKAA

SEQ ID NO: 182850 - protein, 339 aa, unidentified
MEEYDGRQYVGVDLHRRRSVIVRMTPDGQRLGTTRIDNDPFELAQQVSLWGESPQVVLEATYGWYWAADVLADAGAVVHLAHPLGVKGFAYRRVKNDERDAADLADLLRMGRLPKAWIAPPEVRGLREAIRHRSKLVALRSGLKAQVHAVLAKQGVRVTVSDLFGVGGQKLLDDLQLDAPFNARIASLRRLIDAFTFEIDVVTKRTSAQLKTHRGFQAVQSIRGVGPVLAAIFVAEIGDVRRFARPQQLCSWAGMTPKHHESDTKVRRGRITKQGNPLVRWAAVEAVQTLRDGPLGHARVCIGERRGANIGKVAAARKLLTLVFYGLRDGHIRCLAKAA

SEQ ID NO: 182851 - protein, 341 aa, unidentified
MSNANAYIGVDLHKLTCFITVMDEAGKIKKQTEISTDTDKVAKFFSRHRDARVAVESTMNWVPFYENLESLGCSVVLSNPLATKAIATARIKNDKVDSRVLADLLRTNFLPTAYIQPRAIRDLKELVRQRILFVEMRTRLKNRIHSVLFKNNLKHNFSNLYGVAGMQWLADLELREVYRQELDWCLAGLKALNRLIEEMETVIQKKAKLDYDCQLLMTIPGISYFSALTIKSEIGDIARFRSAKKLCSYAGLIPSTYASADKVRHGRITKRGSRWLRKILIDSITSGSRSQYKLSYFYRKLKMSKGTGKAKVATARKLCHIIFAMLTDKQPFREFTPVKQR

SEQ ID NO: 182852 - protein, 399 aa, unidentified
MKKNSKRDGANKQDPAIGCSDENVLNASIRRLLLVLRGKLHSRVASGYYIGIDLGDRKSNYCFMDSGKEILYEEKLGTTVEEFAAYFGAISKSRIALEVGTHSPWVSAVLESLGHEVYVANPRRMESIHKNKRKNDKVDARTLARLVRADPELLYPIHHRGIEARESLVLLRGRDSLVSARTKLINSVRGLVKSVGGRVPQCSADTFHKVALRSLPEGIRKGLLPLVKQIAMMTEQIRGYDNEVRRTAQKEYPETGLLQQVNGVGNLTSLAFVLTVEKPERFRRSRDVGAYLGLVPKQDDSGETSKQLRITKTGDGMLRRLLVSSAHYILGPFGEDCDLRRFGTKLAERGGKNAKKRAVVAVARKLGVLLHRLWVTAEEYEPLRTARMQQEDLATVANG

SEQ ID NO: 182853 - protein, 312 aa, unidentified
MKVLCGVDVSKARLDACIEPGGTFASFENDPAGVAALADFCRQHRAQLVVMEASGGCERQAFLLLWEAGIACALTNPRSVRRYAEAMGILEKTDRIDAGVIARFGIAKDIKPTPLPNPQQRRLKALVARLRQVTDDLTIQKQRRSAASTEAEMLASLDEVIALLKRQSRTLEGEIASMIDDDPLWAQIANAMRAVKGVAGRTVARIMADLPEIGIYSNKAITKLSGLAPLADDSGTRSGKRHVRGGRESVRSILFLVAEIARRFDPSLAEFHRKLSQAGKPKMVVRVALARKLLVRLNAKARDARDAYAHAT

SEQ ID NO: 182854 - protein, 341 aa, unidentified
MERYFAGLDVSKDETAICIRDHDGRSVLTTKKATDADAIADALSASGLPIVTVVMETGRMANWLYHELARRGVPIVCVDARQAHAVLSQMHNKTDANDAAMLADLARTGFYRKVIVKSQDAQERRALLRAREVAIKTRMNVENTIRGLLASFGVVFPRHLRTFEQRTADAVARAPMLTDIILPLLRIRTEALRQVAQLSKAMLRHAREDEACRRLMSIPGVGAVSAVTFVATIDNPARFRRSRSVGAYAGLTSRRFQSGEMDYGGRISRRGDQMLRTVLYEAANSLLCRAKAVSGQGLKDWATALKKRTSHKKAVVALARKLAVIMHAIWRDGTTFKLQEA

SEQ ID NO: 182855 - protein, 412 aa, unidentified
MQAIIERCCGLDVHQETVVGCLLVGEPGAHPTKEVRTFRTVTRDLEALRDWLREAGATHVGMESTGVYWRPVYAVLEGHFELIVGNAKHIRNVPGRKTDVKDSEWIADLVRHGLIAKSFVPPRPLRELRELLRYRRKLTESQTAERNRLLKLLETANIKLASVASDVFGVSGRAMLRALIAGEASPEAMADLARGQLRRKRADLILALDGRLEEHHRYLLAVQLRRLEAIEADIAGLDQRIGERLEPYSAPHALLMQIPGVDWVVAAVLIAEIGVDMSVFLSVYHLSAWAGVCPGSYESAGRQKSGRARKGNVHLRTMLVGAAISAAKTKGSYLKDKYHRLKARRGALRAALAIAHKILVSAYHMLAKNLPYRDLGEAYLDQIGQTRTVANLKRRLERLGYRVTLEPNAQPA

SEQ ID NO: 182856 - protein, 458 aa, unidentified
MCGHTPGKVAGRQETVKAEMNGLTPGLDRSPPPRWMGGQGGQKEVRKMEAAVITAVGIDVSKSKSTVAVRRPGGEIVLRPFDVRHTNSDLKKLASTLKKLGGDIRIVMEHTSTYWRPIALTLKEAGFFVSIVNAMLIHDFSDNTIRKLKTDRADALKIANYALTFLDTLPPFNNEEETRLLLKMQSRANERITATATALRNGLIALADQIFPGVNIAFDPNTKNANGHEKWVDFFLRYWHKDCVCQYSMEAFTESYRGWCKRKNYKFRTDTAHQIYLLAQEGVATLPKCESTKMLITQACKSLNAVCEAKQSTQLEMQRLAAMLPEYEVVMQMEGAGPITGPALMAEIGDVRRFKNKKALVAFAGIDAPPFQSGAFESKSRHVSKRGSPHLRRTIFIVSNIILTRSNPENAVYCFMDKKRSEGKHYYVYTVAGSAKFLRVYYARVTEFLRSQPSPGAC

SEQ ID NO: 182857 - protein, 341 aa, unidentified
MQQTKYFIGFDISADDFSASCIIGPDNLVFSTQKFLNNFDGFSGFIATLSKHNIQPSEAIICMEATGVYSESLSYFLASKGLTICIEAPHKIKNKTKDSPRKNDLVDAQAIAEYAYRFIDKLSAWEPKNELLEQIQVLLSTREHLTVQMTANINALKTLKYKYYQTPLANQIYEQTINKLKEHIKQIDQEIKNLIDKDDSFRHKISLANSVPGVGLLLAANLLVLTKGFTEHVNYKHTAAYSGICPYEQTSGTSLHKLPRSMKCGPAKLRKLLYLAALSVRTHNHNFKKYFLRKVAEGKNKRLVLNNIENKLLKIVFAVVNSGVAYTDNYKSVNPALLKTA

SEQ ID NO: 182858 - protein, 360 aa, unidentified
MDKYIGFDIDSKKAVTCVVQKGEKEMYSTIGCDIQSMRKYLKQQKADGSRVHLTFEISGQAGFIYDSLIDCVDTITVSNPSKMTWIYRTAKKNDRIDSRKQAVLLSIGEIPAVHMPTVEVRQWRNMILHRRNLVNKVTEVKNKIRAVLKSQGFTRPIHRGSLWKRVNRTWMSELCGGRVNPASLWQMNLFNFMEQLNLLDGQVKRVTEYLDVYLSKKAGGGLLMSIPGVGPRTAEAVLAYTDDIRRFGSSKEYCSYFGLTPRLDESGTSRRLGHISKLGPSVVRWVLCESSWKVVRKSKAMRAFYEKVMSNGQAGRKKIAIVAVCRKLLSIMRAMMLTGEMFNEQLVCRECGDEQFRKAS

SEQ ID NO: 182859 - protein, 433 aa, unidentified
MRHHGRGQERSTLAEEQFELFVGIDWASESHEICVLDAERRVIDRKTIEHSGAGMTQLCELLLKLSSHQPSRVAVAIETPRGAVVETLVERQFKVFAINPKQMDRFRDRHTVAGAKDDRKDAFVLADSLRTDLHLFHPIQLDEARVIRIRELSRTEEDIVQKQTRAGNQLRELLRRYYPQMLQLCPGMDEGWFLELIELAPTPEAAQKLTRSKVEQLLKEHRIRRLSAEEILTELKAPPLQLAPGAVEAASEHVLLQLPRIRLLQQQRSDGAGRIQSILDEMSQPGQNGEHRDVAIILSLPGVGRVVAATMLAEASQALAQRDYHALRSYAGAAPITRQSGKKKIVLMRQSCNLRMRNALYHWSRVSVQRDDQSREHYTQLRKVGHKHGRALRGVVDRLLPVLMAMLKSGTLYDPQRRANRRTPTIGSPTAQS

SEQ ID NO: 182860 - protein, 411 aa, unidentified
MQIVYERCAGLDVHKKSVVACLLFPEHGQQRKERQTFSTMTPDLVRLRDWLKEHECTCVAMESTGVFWKPIYNLLEGHLEVMVVNAQHIKAVAGRKTDIKDAEWIADLLQHGLLRPSFIPPTWQRRLRDLTRSRSTLIEERSRVIARLQKLLEDANIKLASVASDVMGTSAQQMLHALVKGELSPTAMAELARGRMRAKREQLAQALTGHLQPHHGFLIAEHLAHIESLEEAIHRLSAEIAQRLAPYEQILLRLETIPGIKRRLAEIILAEIGPDMSRFPSAGHLASWAGMCPGNHESAGKRLSGKTRKGSQWLRTALVEAAHAASHCKECYLSAHYHHIAVRRGKKRAAVALGHTLLIIIYHVIAEQKEYAELGGDYLDQLDRQGKEQRLVRQLEKLGFEVVLTPNAQRM

SEQ ID NO: 182861 - protein, 455 aa, unidentified
MPKQKRTRNARTLPVARVLEPNAAGIDIAATDVYVAVPTGRNPQPVRRFSTFTDDLHRLADWLQACRVQSVAMESTGVFWIPLFQILEDHGFRVCLVNARHVKNVPGRKTDVSDCQWLQYLHSVGLLRASHRPTQTICAVRSIWRHRESLVQMAAVHIQHMQKALDQMNLQLHHVISDITGTTGLAIISAVLDGERNPENLATLRDPRIVASRETIARALVGDYRVEHLFTLRQSLQAYRQYQQWIAACDSEIERQLQVLPSNLPDDPKPLSKPRDHHKPRRNEPRFDLRSQLYRVFGVDLTAVPGVSSLTAHTLLTEVGPDLRRFPNAAAFASWLGLCPDNRISGGRVLSVVTRKVKNRLTIALRMAAQSLHRSQSYLGQYFRRMRIRLGTPPAITAAAHKLARVLYHLITTRQPYEESTFAAMEERARQRQLLRLTKQAARFGFQLVPGRSVP

SEQ ID NO: 182862 - protein, 468 aa, unidentified
MALTLGIDVACRAAHQATLAADGKTVWRGRKFWTRPADLERLWDDLDLEDPAELTVVVEPTRNAWIVVAEWFRRRGATVVMVPTTQSSDLRKYYSKHTKNDRIDSELLARLPLLHPEGLRPYSGQGPADPLRRLTKQRSTMVKRRTAVFARLDALTELLGPAWYEALNARYGIAALEFLARYADPHAVIRLGQARLSRFLIARSRGAWREDRAAALIVAARETLSLWTLEDGSDGMDFAELAADIAHEAEQALFLTGQIKEIDERIANLYADADPDGIVASAPGVGPTISAVIAGRIGDPHRFTSLAAIRAYSGLVPKVSQSGVSKVESSITKAGDPLLREMLFAAADQARKVDPQIAAKYQRLMAGDRHHSSAICHLATIMLTRIATCMRNGEHYVVRDVDGTVITEAEGRAIVKDRYQLEPRRRDNVRHQRMRERRKQAAGQESQKSQSAPTSRPANNKPTSRQVA

SEQ ID NO: 182863 - protein, 350 aa, unidentified
MVVVGSDVHKRTHTFVAVDEAGRRVGELTVRADPKGHDKAIVWAHMRFGGELTWAIEDCRHLSARLELDLLDAGELVVRVPPKMMAEQRRIARTRGKSDPIDALAVARAVLREPGLPQACHEEGSRELKMLVNHRDDLVKQRTQIINRFRWHLHRIDPTIDPPARSLDIAKTRAGLAEFLRDITGIDARLARELLEDIGALTVRVNALEKELTGLVADQAPVLLELPGCGALTAAKIVGETAGINRFADDAKYAMHAGVAPIPVWSGRTKGRVRMNKSGNRQLNAALHRIALTQIQRNGLGRTYYDKRLAAGDSTTEALRCLKRRLARVVFNTLKNNLSTAAASSLAATA

SEQ ID NO: 182864 - protein, 406 aa, unidentified
MWKLSQLLNLLKVGVLHMYSYFVGIDIAKNTHWASCISSDGEIIFEPFSFSNDATGFQKLVSKFNSLDKEKILIGLESTAHYGENIISYLFNLNFKIGLINPIQTANLRRSNIRKTKNDKVDTKIIIKALTLGNYSLITSRNINNLKLKGLCRSRRNLVTMRSKAKIQLVSYLDQIFPELAQFFKGNLHLNVSYQLLKEYSSPKQISSLHLTKLSNILHDNSHGRYNKQDAIRLRELAKNSIGIDNPSLSLQIKHAILQVELYNEQIAEVEALYKQILDEMNTPILSIPGMSYNQAAVIIGCIDDINRFKHSCQLLAYAGLDPSVIQSGNFQARSTRMSKRGSGMLRYALVYSAHNVVKNNKTFRDYYELKRSQGKSHYCALGHVAHKLVRIIFKMLKDNVAFNLD

SEQ ID NO: 182865 - protein, 335 aa, unidentified
MDKMEACGIEVSAAELVVAWGGEKKEVREQRFANTAAGHKMLLRALTRGGKRVRAVMEATGLYGLDVALVLSEEAGVELMVANPRAVRHFAQAMMQRSKNDRLDAAVLWEFAARMPFHRWVRPGANTLALWAIARRLEVLTKQRTAEKNRQHAAQISLAAPAIVRKEIARSLLELQRAILRLRREALRCVAAEAQLQQRYELLCSIPGVGAVSAIQVLAELAMLPEDRDVRQWVAFAGLDPREYSSGTSVRKHTRISKVGNRHLRHALYMPALVACRHEPHLRGFYEHLLARGKKKRQALVAVARKLLHAIYGMFRSGQRYDGFRLFVLPAAINT

SEQ ID NO: 182866 - protein, 439 aa, unidentified
MAPINGECMMDKERRWFVGIDWAAQEHVVSLYDNAGNKIGQRKFSHGGTGLTDMIAWLLKASGGEPGEIHVGIETPHGPIVEALLERRFNVYSINPKQLDRFRDRCTVAGAKDDSRDADVLSDSLRTDMRAFRKLSIADPLIVELREWSRIDEELKVEHGRLTNRLKHQLWRYYPQMLELADDVGAKWFLDLFEAVPTPEKAANVREKTIARILKNHRIRRFDAAHVLAELRKPALAVAPGTIEAATAHIRSLIGRIRIINGQLADAGQQLDRLCKKLSEPVADEDGEAAPGQKPEQRDAAILDSLPGVARTVLATLLAEAPDTLQRRDYHALRALCGSAPVTRRSGKSRMVVRRYACNHRLRNATYHWAQNAIQHDHTSREKYDALRARGHGHARALRSIIDRLLSVACAMLDSGTLFDPEFAANELLGRSRSLEVTG

SEQ ID NO: 182867 - protein, 390 aa, unidentified
MEVLYQSCAGIDVHQANIVVCILHGPLTSTRPKREMATFDTTTKGLRACHDFLSQFHVEAVGMESTGVYWRPVWHALCDDFELILAQPAHMKAIPGQKTDKKDAHWIAKLTRIGLLPRSFVPDETIQELRELTRQRKHYVESRNRETNRIHKILQSGGIKLTTYIEDIMGLSGRNLLQLLVDGTPITPRIVHQSVYTSLKKKVPQLLEALDDYFSDHHRFMLKQSLEIYDFYQKQIELLEERMNVYLSQYEKHVEILDSIPGIDVITASVIISEVGVDMSQFPTFGHLASWAGLCPGNNESAGKKRSTKIRHGNSYLKKCLCQAAFAVKRQKGSPLAERYYQIQSRRGSQKATIALAHQLLKIAYILLKEQMTYPEFLAQKKTTRDELVA

SEQ ID NO: 182868 - protein, 405 aa, unidentified
MSVHHGAPVTLSTIVVAVDVGKCSGVLSATDGARRRLVGPVGFAMTRSGVSGVIDRIGAVVGPSVQVKVGVEAAGHYHRPVLDYAWPCGWQVVELNPAQVAEQRRVAGRRRVKTDAIDLEAITELLLAGKGHPVGATPTILGEIAAWAGHRSRRVAVRTATKNQLLGQLDRTFPGLTRALPDVLGTKIGRLIAVEFADPARLCALGASRFIRFAAARDVQLHRPLAERLVGAAREALPTLDAAVARRVLAADVGLLADLNTQIGAAEAELAALVPRSPFATLTTVPGWGVVRVANYAGALGDPRRWPGPRQIYRAAGLSPMQYESAGKRRDGAISREGGVALRRALIDLGIGLWHTEPAAKAYAAGLKARGKHGGIIACALAHRATRIAYALVRDHAGYERSRWS

SEQ ID NO: 182869 - protein, 385 aa, unidentified
MQVMIEGQSHFQPFGLPYWGFEDLNKGVGSMTASYEYHIGVDYHKSYSHLVVQDSSGKTLRSGRVKNDRQSLGGFLERYRENSHAVVEATRNWMVMYDWLDDICDDVVLAHPLKVKAIADAKIKTDKIDATVLAHLLRADLVPEAWAPGEKARELRVALRERMFYVRLRTMTKNRIVTVFDRYPEQTAQLKKLGDLFGKAGRVQLAQVNVSEIDRIQIDRGLDFIGDIDVRIKQSEATIRAMTRANANVRLLKTIPGIGEFFARLIDAEIDDIARFHNPKKLAAYAGLVPSTYSSGGKTFHGKIIKQGNKWLRWAFVEAVSPAIAVDPQLRAQYEHLKIRGTNKARVAIARKLLTITFQILRDQRAYQPRGTSQEEGASTISRLS

SEQ ID NO: 182870 - protein, 316 aa, unidentified
MSTDSLSVGIDVSKNTLDIAIRPTSQHWQIPHTTDAIDDLVGQLVSLQPFLVVLEATGGLQIPLTAALATAGLPVVVVNPRQVRDFAKATGKLAKTDAIDAHVLAHFAEALPPTPRPLPDAETQAISALVARRRQIVGMLTAEKNRLRTANRAVREDILRHIAWLEERLSELDSDLKDTLHQSPIWREQDQLLQSVPGVGPVLSLTLLAQLPELGTLSRRQIAALVGVAPLNRDSGTLKGKRTVWGGRASVRAALYMSALVASRWNPVLRDFYQRLCAIGKPKKVAITACMRKLLTLLNAILKHRTRWQANHPINS

SEQ ID NO: 182871 - protein, 354 aa, unidentified
MPIVADTYQHVVGVDTHAATHSYAVVQCPTGRLVDEATFPTTSGGLARAAGWVARRTGGDLDAVLVSAEGTGSYGAVLAEHLAQIGYRVVEAPTPVRARGRGKTDQLDAAAAARATLALDVDRLRDRRAGQVQTALAVLATSREQLNADRVRSINALTALVRSHDLGIDARRALTATQIHTIAAWRRRDEPLGLATARAEALRHARRVLELDANLATNRQQTTVLVVEHAPTLLSLPGVGAVTAAVILTVWSHPGRIHSEAALAQIAGTCPIPASSGNTTRHRLNRGGDRRLNRAINTIALTRMRVDPTTRAYVQRRLADGKTTREIRRCLKRYITRQIHRTLTAAPPQPLDAT

SEQ ID NO: 182872 - protein, 363 aa, unidentified
MFTERTSIGLDVHARSVAAAAIDGVTGEVSRTRLTPSYEHIMDWITQMPGPVAVAYEAGPTGFGLCRALTNAGVRCEVVAPSKLQRPAGDRVKTDSRDALHLARLLRLDEVTSVSIPSVNQEAARDLVRAREDCRGDLMRARHRLSKLLLRHGIVYHAGAAWTDAHDRWLRAQAAPQLLTPATRMAFDSDYEHVLMLQGRRRALDSAIEDMAADSEFTAVVRRVSCLRGVGTLTAFALAVELGDWNRFNGNTIGAFVGLVPAEFSSGSTRAQGPITKTGNTHVRRLLVEAAWHHRSKYQARAVLRSRWELAPAAARARGHEGNLRLHNRWVGFLARRKRSTVANVAIARELAGWCWSLAVMED

SEQ ID NO: 182873 - protein, 394 aa, unidentified
MIYAGVDIAKTDHVIGAVDERGAEMCPPMPFKNTEAGLERAVAWLEGLAGSPSDVVVGMEATGHYWMACYSFLVARGYSVAVINPMQVKAVRKLKGLDKVKNDRVDAGLIAEALRIGQYDETRLATDEMASLRSLSRYLQSLRGMVAELKTQCICLMDAHFPEYAGIFSDMFGAGSRAVLSKSPLPFELARRRADSLARDIAEASRRGGKSSGYAAKIKAAAKSSIGVRLGQEAASFQVKSLIRQIEFADSECARVEERLRSLLDEIEPLVLTIPGVSYVTGAQIVSEIGDVSRFRNAPALVSYAGLNSSVSQSGQFDSGGGPITKHGSPYLRRALWLAANRARQYDPGLRAFYDRKRAEGKPHRVAVTAVARKLCHIVFAVMRDQVPYDPGRE

SEQ ID NO: 182874 - protein, 425 aa, unidentified
MEVGQVEVAQDDQEIIARVAALDIGKAEVVCCVRVPGVGPRARRMQEVRTYSTMTRSLLAMADWLTGLGVTRVVMEATGDYWRPPFYLLENSFETWLVNAKDVKHLPGRPKTDRLDAVWLCKVAERQMLRPSFVPPPAFRELRDLTRYRVDLIEARTAEKQRVEKLLEDALIMMSVVASDIFGVSGRDMMAALVAGERDPKVLAQMARGRMRAKTARLEEAFTGRFTDHHAFLLRAMLARIDGITADIDIVQGRIDEQIAPFAATVTRLDEIPGVGVTTAQAIIAEIGLDMTRFPTPSHLASWARFAPGISESAGRKKGNSGTGKGNRYLARALGEAAVGVRRTDTFLGERYRRIAHRRGKKKAIVAVGRSMLMIVWQLLSDDEARFVDLGSDYYESRVNLNRRTRNHVRELQALGYKVTLEPAA

SEQ ID NO: 182875 - protein, 418 aa, unidentified
MKSNKTEKIKTINQKTLIVALDIGKKVHYGYFRTPKNKDIKPFPIYNTGQSFNKFWKKLYRFKEEHMLDEVVIGFESTGPYAEPITNYLRKKPVNLVQVNPMHTKRVKDLTGNSPNKTDKKDPRVIADVISLGHSLTVVMPEGAAAQLRRLTHARKRSIERRTAMNNQLQHLVFVIFPELMSIIKPSTKTGMYLIKNLPYPESIISIGIGTLCNIVRKISRGRFGIERAEKLYNAAKQSVGITEGKESVILETSHLVSNIESENRYIKNLEEQMVEQLEQIPYSHSILSVKGIGHVTVAGLIGEVGDFNKFNTISEITKLAGLDLYEISSGQFKGQRRISKRGRPMMRKLLFFAAINMVKSNGIMHEKYKQMLDRGMLKMKALIAISRKVLGLIFAIVRDNTTYIVNYTKQNHYKLAA

SEQ ID NO: 182876 - protein, 313 aa, unidentified
MAKDKLDVAISEDPAAPVDTIANDPPAIADLVKRLSALKPAVIVVESTGGLERPLLEAMLDAQLPVALVHPGRVRHFAKGVGILAKTDRIDARVLVRFARQAGPRLAERRRKSHDELRDLVACRRQLTATKTQQTNRRGATFAKPALKSIDAVIKTLDKQIASLDKQIRHIIDADDDFKYLDGLLQSVPGVGPAVSATLAADLSELGQTDRQCVAALAGVAPFPDDSGTTKGKRSIRGGRADVRCALYMATLSAVRFNPVIKLFAQRLKSAGKVNKVMITACMRKLLALINAMVRDGLTWDQLNVVKKLATTH

SEQ ID NO: 182877 - protein, 347 aa, unidentified
MDQQCHYVGLDVSLETTSICVIDDAGAIIWRGKCCSDPDTITAILRQHAPGAVRVGLETGQLSNWLTLSLRRRGVPVVCLDARHAKAALSLQINKTDANDAFGLAQVVRTGWYREVAVKSMDARTLRMLLVARSRLVSQRQATANTIRGLLKIFGLVVARGSKGLFSVRVREQIAGNPALIAIIEPLLAVWYAIRDQVTMLDQQMLARARNDQVARRLMTIPGVGVVIALAYAAVIDDPARFRRSVSVGAYLGLTPRRYQSGEVDTTGYISKCDDSLLRGYLYEAAAVLLYRDGRASVLKSWSLGLAKRIGMRRAKVAVARKLAVIMHRIWSDHSEYRRTATPPTTA

SEQ ID NO: 182878 - protein, 334 aa, unidentified
MKEITTIGLDLAKSVFQLHGVDADGAVVLRRQLRRAQMLAFFSRLPPCLIGVEACGGAHHWARELSKLGHDVRLIPPSYVKPFVRRGKTDSADAEAICTAVVQPSMRFVPVKTPEQQAVLMQHRVRDFLVRQQTQLANAIRAHLGEFGIVVAKGVHHIEKLLGEAAGADLPEQVAASLNLLARQFLDTKARIDEITGHIREAAEREEQARLLQTMPGIGPITASAIVAHVADNSAFRTSRDLSAWLGLTPKPHSSGGRHRVGSISKMGNRYLRRLLYLGAMGVISARRKAGEQSDWLGRILATKPAKVAAIALANRMARTIWAMLRTGEVWRSV

SEQ ID NO: 182879 - protein, 343 aa, unidentified
MDYFAGLDVSVKETSVCIVDDAGKIMREARVASEPEALLQVLTNTIYRFKRVGLEAGPLSQWLYSVLAEAGLPVICVETRHMRAVLKAQINKTDRNDARGMAQMMRAGLYRPVHVKTLRSQKLRVLLTHRKLLQSKAIAIENELRASLRNFGLKVGMIGTMKFEARIRELVERLPDLAVLVEPLLIVRRVVREQLGILHRRLLAIVRDDDVCRRLMTIPGVGPVVALTYRVTVDAPARFRKSKAVGAVFGLTPAKYQSGENDRTGAISRCGDEMMRIMLYEAAQSMLVRTAKWSWLKAWAMKIARHRGMKKAIVALARRLAVIMHRMWVDGTEFRWTRELPVA

SEQ ID NO: 182880 - protein, 355 aa, unidentified
MFKDTARMERAVGLDVSDRESTYVVVDAAGEVAEAGKVATTAPALEKEFRRLGQGVVALEVGPHSPWISRLLQKLGHEVVVANPRQVQLIAKGKRKNDRADAEILARLARADRMLLAPVQHRGQEAQEQLALIHARAHLVEARTATINHVRATVKAVGGRLPSCSAAAFAEKVREELPEGLRAALGPLLETVAEQTVRIRAYDRAVERLAQERYPETGALRQVPGVGTLTALTYVLTLEDRGRFAKSRQVGAYLGLVPRQRESGESKPQLHITRAGDVYLRKLLVQCAHYIMGPFGPATALRRFGERLAGSGNGARKKRALVAVARKLAVLLHRLWVTGEVYEPWHGCKEETMAA

SEQ ID NO: 182881 - protein, 338 aa, unidentified
MSKVTVHVGLDYHKDFIQVCVRDRCGQILANRRCNNQVEALVKLVATFGDDVQAAVESCSGAAALADELVARHGWSISLAHPGYVARMKQTPDKTDWTDARVIADLVRVGYLPKVWLAPEPVRDLRRVVRFRQDLVRQQTATKLKIVALLREHRVVIEGTRWTRKWLQVVTNLGELPGGTRYILKRHLQGLTHLSAEIAKVEAQLSKMTARDELVAKLMHQRGVGAVTAWTIRAEIGRFDRFHTGKQLSRFCGLSPRNASSGHRQADAGMIKAGNPGLRTTLIEVAHRLTRYDVRWAAFKAQQRHAGKPGSVIAAAVANRWVRWLFHQMQPAAWEGAA

SEQ ID NO: 182882 - protein, 321 aa, unidentified
MTKEAVCAGVDVAKNTLDVAVSSSEGIRQFANDHEDITNAVRYIAGLKTARIIIEATGGLEMPLVAALQADRLPVVVINPRQVRDFARAIGILAKTDSIDARLLALFGLRVKPEIRPLPDQKAREMRNLLTRRRQLIEMLTAEHNRLLQADDSIRPCIESHIKWLEGALSDINDDLDLQIRSSPSWREKDNLLKSVPGVGKVVSSTLLIELPELGKLNRRKIAALVGVAPFNRDSGTMRGRRTVWGGRAKLRAILYMAALVASRRNPIIAAFYQRLLDAGKAKKVALVACMRKLITILNAMMRTMTVWKSGIILRRVSVEA

SEQ ID NO: 182883 - protein, 387 aa, unidentified
MARKRTLSTLDTSIAYEAVGLDLAKTDVALAAFDSDHKEPYLIDRIPYDKLYELLANMAPTLVAMEPCSGAHQIAEQIQELGHEVMMISGRHVQAWVKDHCNGQKTDLNDAFAILNLAYDRWLTPIRGKTREECRLLALQASYRQLKGQRTKTMVHVEATLHAWGFPIRTGSFNQKALHELIDANREAFGDEVVETLHLMINRVHDLDHDIATVLKLLTEATQRDPRASLLRSIPGFGVLTTSRWCAVVGDIARFDSPKQTMAFIGLVPNNRITGHHTETSSGREARGQGKMSKRGDKMLRSLCILGAGALCLMVRNDRLPDCPFVASIKERLASPRPWFKVLVYVAAKLVRIATALLKYGETFSFEKAGISKAVLKQWELEQAKAA

SEQ ID NO: 182884 - protein, 345 aa, unidentified
METMYYIGLDVHKKTIDYCVKDGSGRIYAAGSIRATRLELDMWMKTLPRPWTAAMEATIFTAWIYDHLQPHAAAVKVAHPLMLRAIAVAKKKNDRIDAKKIADCLRCDFLPECYMASTEIRERRRTLRYRNLLVRQAVQMKNKIAVLLMEAGVSYNKQKLHKVGYFRELLATNQDIDEGLKPLLRLCRETVVRLGKTESALVRSLQRDSLLVERVERLMTIPAVGPITALTWALEVGDVQRFSSIKKAISYCGLCGAERSSANITMRTPLSKQRNKHLQTVLIEAAKMAPRNSPELAMVYEQEKQKGNANRATLAVARKMVAYLVAVDRRQNGFLVVENKNRTAA

SEQ ID NO: 182885 - protein, 338 aa, unidentified
MTVVTVCIDLAKNVFAVHGVNAAGKAVLVKPLVRRAKLLELIATLPACLIGIEACTGAHFWAREFQKMGHTVRIMAPQLVSPYRMSGRHGKNDAADAAAICEAVTRPNMRFVPIKSVEQQGQLFVHRAHQGYVSERTALINRIRGLLSELGIVLPQAFKAFLSGVAQVLEDLPGYCNQVIGDLLNELYHMEEKIKNSEKLIQQLAKDNSAAQLLMQFRGIGSMTATAIVASIGNCHDFKNGRQFSAWLGLTPRQQSSGGKARLGRITKAGDSYLRTLLVLGARSVLLGAAKNDDPVSRWALQLKERRGYGRALVAIAAKNARMCWAMLHLRDEFRFPA

SEQ ID NO: 182886 - protein, 340 aa, unidentified
MNYYTGIDVSLEYSSVCVLDSNGKIVREAKVLSEPEALIAWFGSLGFAVERIGLEAGPLSQWLYAAMKEAGLAVELLETRHVRDAFKAMPVKSDRNDARGIAQLMRLGWFRPVHCKSMEAQETRSLLTARKLVQSKLFDVKNSLRGILRGFGLKVGKTTELEFAGRIKELVAGHPHLEMIANSLLAVHEVLRNEFKAFEKKINTIVRSDTRARLLMSAPGVGPIVALTYASAIDDPDRFKSSKQVGAHFGLTPKKYQSGETDYTGRISKIGDSSVRTVLYEAAHVILTKPLKGCSALKGWATRIARRAGMSKAKVALARKLAVIMHRMLAEGKPFNAAMA

SEQ ID NO: 182887 - protein, 367 aa, unidentified
MKKVSTAARKQSRNFSQPNLTIGLDLGDRSSCYCVLDDSGRIMMEQKVSTTAKALQAALGAMPRSRIALETGMHSPWISRLLSGLGHEVIVAHARNVRLIGESRKKDDRLDAQTLARLARIDPQLLCPVKHRSAKAQADLTVIRARAGLVRARTALVNTARGLAKSYGERLRGCNVRNMNPEKAEGLSPELQAALEPLLAGLESLSEQICEYNEQIEKLAQESYPQVALLKQIKGVGTLIALTFLLTLEDPHRFRKSRDVGCYLGLQPGRRNSGQSQPQMHISKEGDPYLRTLLVQGAQHILGPFGVDCDLRRWGLKLAERGGKSGKKRAIIATARKLAVLLHHLWVSGEVYEPLHNCSRIAMPLAA

SEQ ID NO: 182888 - protein, 431 aa, unidentified
MNAIHNSQSGNLRDKTLDHDSTQYAALVGIDWGDKEHAFHLKSDDGTFESGTLRHSSETLFQWLSKLEERFGSRPVAFAIEAQSPPLLAAIRQFSWAVVFQIHPITSKRLRTAFTPSGAKDDLPDAKVLLDLLISHRDKLRPLPEPASPKTRILDGICRERRELVDQRTKWCLQTRAALKAYFPQAFELFSDELFRPVVSKFLARWPDLISLKAEKSSIIKRFYTSNGYRNVALIDQRLEIIKTSIAIEIDPSRISEYTRKVKHILERIELANRQIKELDLQMSTVFKEHENWQFFRELPGAGPSLAPRLLCAINMAPENNAQGMQKYFGTAPVKEKSGSRVWTHRRWNAPRFFHQTWGEWAGLSVQHSRWAKEFYEQAKARGKGRYTALRALAFKWMRVIARCLETKTDYNEELYIQSLKKRRSPLAQHL

SEQ ID NO: 182889 - protein, 341 aa, unidentified
MEKATIIGIDLAKRVFQVHAASKDGRPLLRKKVSRAQLLGFLAKQPPTIVAMEACATAHEWGRAISSLGHDVRLVPPIYVKPFVRRQKNDAADAEAIAEAASRPTMRFVALKTEEQQAQSMVFRTRDLLVRQRTQLVNALRGHLAEHGIVAAQGLAQVKVLATAMQDTGSLHPLVRELGQRYLDHIARLDAEIAELDKRLRQPSKDNETAKRLQSMPGMGPITAAAIEAFAPPMATFKRGRDFAAWLGLVPRQHTTGGKPRLGRTSKMGQRDIRRLLIIGAMTVVRWAVRKGAAKGSWLARMLAHKPRLVVAIALANKMARSAWAMLSKGEDYRGSALAPA

SEQ ID NO: 182890 - protein, 363 aa, unidentified
MTTIGAERPDTEVAVILGVDTHLDFHAAVAVDHLGRRLGESSVPTTVKGYERLLRWAEDFGPVRCVGVEGASSYGAGLARHLRAMGIEVLEVERPKHRRRSSRRNVEKSDPSDAERAARAVLAGEASGVPKSGDGRVEMIRALRAARRSAIKARTQAANQLQGLRVTAPEELRHRLRGLSTKELVSVAARFRLGDGPRDVPTATKFALRSVARRHEALSAEIVELDAHLGRLVAQAAPELVSLPGIGTDNAATLLIVAGDNPQRLRSEASFASLCGVAPIEASSGKVVRHRLNRGGNREANRALYMICLARMRRDRRTQEYVARRTAEGKSKREIIRCLKRYVAREAYRVLISCGARSSPAGP

SEQ ID NO: 182891 - protein, 343 aa, unidentified
MQAITTIGLDIAKSVFQVHGVDAKGNVVLRRQIKRRYVLAFFQKLPPCLVGIEACASAHHWSRQLQALGHTVRLMPPAYVTPYVKRHKNDAIDAEAICEAVTRPNMRFVATKTREQQSCLTLHRTRHLLIRQQTSVINAIRAHLAEFGIVAPVGRNGVDQLLGIVADASDKRLPELARACVAALGTQLGTLKAQILQFDRLIMAWHRSSEASRRLDDIPGVGPALATALVATVADPRAFRSGRNFSAWIGLVPKQHSSGGKDRLGSISKRGDRYLRFLFVAGALAVIRYAKIHGAKHRPWLTALLARRHTKVAAIALANKIARMAWAIMAKGEHYKEPVALAA

SEQ ID NO: 182892 - protein, 442 aa, unidentified
MSDAVQAVAPEPEFAALVGLDWGDEKHSWKLREAGSQQSQEGELPNTPEALQIWAAELAVRYQGRPIAVCLEQSRGAVVYQLSQYAHLVIYPVHPTMAARFREACYPSGAKSDPADGAVLLDLLCHHRDRLRRLDPDTPETRLLQVLVEQRRGWVDERTRYSNRLTGWLKIYFPQVLDWIDDIDSPMGCDLLERWPTLEELQRAHPGTLHKFFVAHNSRSEQRIQERIQAIYGATTAIRDSAMMEAGPTIVKEMIALIRALSANIAELEKRIAELTEMHPEKPLFAGLPGVGPALLPRLIVAFGTKRERYPSADQLEAYSGIAPVTEQSGQSCWVHFRWACPKFLRQTFHEFAAHSIAKSVWARAYYDTQIAKGKGHHAAVRALAFKWIRVLHACWRSGKPYDEEIYLRALQRHNSLLAQALTTQVEWKTVGGFQKLSLKNS

SEQ ID NO: 182893 - protein, 342 aa, unidentified
MKITTVGVDLAKTVFQVHGVDEQGKPVIRKRLNRNKVLVFFARLEPCLVGMEACAGAHYWARELMAQGHTVKLMAPQFVKPYVKANKTDAADAEAICEAVARPNMRFVPIKNADQQAVLSLHRARAGFVKARTAQANQIRGLLGEYGIALPQGISHVARCIPDIVEDGERELPEMFRRLLQRLRSYLLELDIQVEELETQINAWHRSNEDSRRLAQIPGIGPLTASALVASIGDAKSFNNGRQLAAWLGLVPRQHSSGGKALLLGISKRGDTYLRALMIHGARSVVRVAERKRSSTDKWTTEMGTRRHTNVVAVARANKNARVVWALLAHQRTYDPAYQQAA

SEQ ID NO: 182894 - protein, 315 aa, unidentified
MAEQVVVGIDVSKAKLDVALLPGGEQFTVSNDRHGIGELLRRVSPLAPSRVVLEATGKLEQPAVSELAAAGLPVVVINPAQVRHYAKARGKWAKTDPIDARLLAEFARDLEPELRPLPDAETQALAALCQRRKQLLEMERMENNRLQRAPRANQKSIKAMLSFLRRQIEQVEKQIEDSIRSSPLWQAKRELLESIPAIGNVNSSTLLARLPELGQFTRQKICALVGVAPYDDDSGQWHGRRHIAGGRGDVRQVLYMATLSAVRCNPALRAYYQRLLGRGVDPKAALIAVLRKMLTILNAMVRDNTPWRPRCPTNA

SEQ ID NO: 182895 - protein, 347 aa, unidentified
MTIVEDRPVITGGVDTHAGTHVAAALDPVGGLLGVREFPATAAGYVGLLGWLGGFGDVALVGVEGTGSYGAGLARHLAAAGVRVVEVDRADRQDRHRQGKSDPLDAVSAARAAQSGRPGGAPKGRDGAVEAIRALMVAKRSARSERTQAINQARALIVTGPDDLRARFAGHTAPALACAVAALRPRPGDVPGYATRVALRELGRRVQFLDAQLERLDELIIPLVTARAPGLLSLHGVGPDTAALLLVAAGDHPERLRSESSWAHLCGAAPIPASSGKTAGRYRLNRGGDRQANSALWRIVIVRLKSHPATRTYADRRGKEGLSKKEIIRCLKRYVAREVYRQLRAES

SEQ ID NO: 182896 - protein, 353 aa, unidentified
MTQQRPRVVAGVDAHTDTHHAAVLDLNGRLLASATFPTTGDGYVALIAWVSGHGELDRVGVESTGSFAAGLVRALVARGISVVEVNQPHPHARQRLGKSDPIDAELAARAVLSGTAVAVPKDTSGIVESIRQLTVTRQSALKARTAALHQLDDLLITAPEQLRAEVRCRRSLRRRASLCLELRPDRKRAHEPLQAAKLALRSLARRIRNLDNEIQELDRQLEQLVSTAAPRTLSLLGIGTHNAGQLLVSAGQNIERLHSEAAFAKLCAAAPIPASSGRTTRYRLDPAGDRQANRALHMIAVCRLRYCPRTRAYAARRTTEGLSKREIIRCLKRYIARQTYHTLRADLNAINST

SEQ ID NO: 182897 - protein, 414 aa, unidentified
MLDTVFIGIDVSSRTNVVHVMDHVGNKLWSGEYSNSEPGARTLVTQLLGDPRCDKAFYRFGLEATGAYGKGVAMFLREASEIHPARKAVHVLNPKQVKRFRDAYSDLPKDDFTDAFVIADSLRFGRIAQKEVVVEDKYLALQALTRWRFQCAHELTREKNRYLQNLFQKFSCLVQQDGTKDQLFGNLFGATAMDLIDDFEDVDQIAYMPLEELTAYLAEHGKNKFTDPQKLAKDIRKAARTSYRLPQTIQDSLNQVLAMQTNVIRFHEKQLKELDKLIERQMQAIPNTLTSVPGIGPVYAAGLIAEIGDINRFDNQAALAKYAGLTWTKHQSGKFESDRTRLIQGGNRFLRYYFCQAANSVRQHDPDYQLFYQKKRRETPRTPHKRALVLTARKLVRLVYVLLRDQRLYQLQTR

SEQ ID NO: 182898 - protein, 380 aa, unidentified
MQSNFNRYIGLDIHKKTATFVMMNPQREVIKQGKFAMEDLVGWAKRELGHQDQVVIETTGNGFYVKDQISTYAGDVVVADAFAMHDRTRARRKTDKTDAHCLAEALASGFIAEVWVPTMAIREKRALATHRYSLTKGLTTIKTQMRALLYQFGIEFKGDMLSPAAYEFITHNQGLSSVARDILSSKWRQGQIQQEEAIRLDKELSRQCLQDEIHLKLMTMPGIRAQAAIIILAAIGDISRFDSPRKLASYAGLVPRVSISDERKRYGSITKQGRSTLRWIMVEAAQAATKSKSPLRDFYYRLVEKGKLPQVAIIALARKMLEIIWQMLTTNKIFKFVIRDSLAFKLRAVYNRAYGPCPNKTATTIADSLLGVSKFQLNKA

SEQ ID NO: 182899 - protein, 442 aa, unidentified
MLWPSVDIEGPFISQAIWVRSLQGGNLLRVITQKKGDPTMFYLGIDVSKKSCRYFLLNPEGQKVKSFSLDNTHEAFQNLLKRLEEISIPKEDLLIGLEASGGFWENLYSHLKDHGFHVVLLNPYHTKNFREALAKKAKTDDIDALVIAQLLRTGEYVQSQVAEELIQSLRELTKLRYELMTERKNFQRQVFSLLSIIFPELEKTALKNPFSIASMAILQKFPTAIDLAQAKPKQIEKIVRSIQGNNFNIEEIGKLIQTAQTSIYSGRAKEARATSLRILLRHVQTLSSSIEELEAQIKQILSPQEPQDSFPGENLLTIPGVGEKTLAAVLSYLGTDGSSFSSSTKAVGYVGYFPKIYQSGQTQRDNTISKRGPKLLRWALYMAAVASLKHNPEMRTLYHRKLSQGKTEKQALICVGKKLLQIMLAMLKSGEPYSPAKVFVSC

SEQ ID NO: 182900 - protein, 409 aa, unidentified
MNKVDIAPFEVFCGIDVGKSLNHIVALDRYGDKPLINRKVPQEEAEIRAALEEAGDFGLALVIVDQFGAFGRLVVGVAKSMDIPVAHMSPRRFRQVAETYGEDKFDEKDAFILADASRTTPRNIEFVGNRAESMAEIKVLSSRRDDIVEERTRCYNRLHDFIHQVSPPLEELFSKRKLHNDLEIRLIARYGGPIGFRQAGRARASTWAAELKYHCVDGPKKVEQVFDVLDRQTVMLPGAAVIEEQIRSIASRIIELLAEEKRLNLMIDQRAKMIPEVDLLQSIPGVGPVYAALIAVEIGDIGRFRDSNHLASYAGVAPRKEESGTSVHKRRKRKGGNRRLKNALMQSSQRSVQCDPLARAYYERKRAEGKKHLQALRALARHRVTVIFAMLNEGTFYEPPVEVDENGRG

SEQ ID NO: 182901 - protein, 468 aa, unidentified
MKKQKIPMTIVNPHAAGIDVGSRSHYVAIGQEQKDVKSFGVYAEDLTTIRQWLLDNKITTVAMESTGAYWQNLFVELINSGIEVVLTNGKFTKNINRKKTDVLDCQWIQKLHTLGLLPSSFLPDHTTERLRTYCRHRTNMIQQRADSIHKMAKFLKYLNFRLDVVVRDIAGQTGMKIISDICNGNLDPKSLAAHRHHNCRKSEDEIAKALVSNKRQDYLFGLKQEFDRHQFYTSKIDECDKEITSFLEQSILQKEDVVDDIPDGKYFKRQNKNAIKGIDLNIASYQYFDGVDLLAIPGVSHSTVLTLMSEIGPDGFNKFPTAQHFASWLKLAPNNKISGGRVLSNRIPQGSNRLKIALRNAANAVGNLKDSDLAKFFRKIAFKKGRQTAINATARKIAVILWNMITKKQPYMPKNNYLFLDQKRRIVSRMRKQIADLGLNPDELGFSRANRDKIAAQMTSDNQALSLR

SEQ ID NO: 182902 - protein, 329 aa, unidentified
MQQYIGIDISKRDFHACFTENGQPIKFNNDHQGIDTFLKYLSNNKYTKEETVIGLESTGAYHLPLSILCSNQNYTVKVINPLITKKQNQTDLRRVKNDRKDAHLIRYCLANGEGYAFHETPNSLILKNLVRQRDYLSTIKRTFNTKQQDITYKEQYIKNKITSVNLELSQFLEEKIKQLEKELKQHNPQSQKLLQSIPGVGPITAVSFISEVGDINRFPTSKQLTAYIGIDPRTYESGTSIKGKGYITKRGNKILRTRLFNATSVAVLYPNQFQSFFQKKRSEGKPYRVALVATMHKMTHVIYAVWKRGTPYIENRLIKQEEKTQFLKR

SEQ ID NO: 182903 - protein, 429 aa, unidentified
MEEVDDAELVVERVAALDLGKAGLEACVRVPHPQRPGRRMQELRGYGTTTAQLLEMVAWLRQWRVQRVVMESTSTYWKGVYYLLEAEEFDCWLVNAREVKNVPGRAKTDRADAVWLAKVAERGMCRPSLVQPPEIRRLRDLTRYRRALVQDRTREQQRVEKLLEDAQIKISAVLSNLHGSRSPTMMNALIVGERDPRTLAQLAKGQARKKTGALEEALRGFFTDHHATILQMMLDNTDRISAQIAALDARIEEAIDPFSGQAARLAEIPGVDAVAAAELIAEIGVDMTRFPSAAHLVSWAKFCPQTHQSAGKSKAKGRGKGNPWLAGALGRIAFANSRSDTFLGTRYRRLARRRGGQKAIVATGNSILTVVYHLLSDPDASFTDLGPGYYESRINKHRRARDLAIQLQALTDQHIVIRDGKAVITDTAA

SEQ ID NO: 182904 - protein, 363 aa, unidentified
MVASYRRPRRWDVARSVRRSVMTIIGGLDIHRQQITFDYVDTITGEVKRGQIGHADRHRFGAWLRRFEGREDVEFAVEGCTGWRYVVEELVRAGITPHLAEPADTSAARGRKRHAKTDRTDSHLIRDLLLQGRLPSCYIPPSDILEIRALLECYQDLRRDHTAWIQRIHAVLFHQGAPAWAEHGDQGRARLRCLAAEHLSAAGQTQVDVALLMLDATETEMEILHRRLVTCAKHLRGARYLSENLYGVGPLTALALTCWLGGAGRFSSSRKAVRFAGLDITVYSSAGKRGPGHLSRQGPSVLRWLLFEAGKHHGRASAPDHKYYAKVKARIDGKRAALAEARKLVRQAVHLLNELGDDAFIYD

SEQ ID NO: 182905 - protein, 432 aa, unidentified
MERIRENAAGIDIGARKVFVSVEGKEVKCFFTFTEDFEKLRDYLLENAIETVAMEATGVYWNILYEILEEAGLDVWLVDGSQTKQVPGRKTDVKDCQWIQQLHSYGLLNRCFVADSDIKELRIYQRLREDHIRSASMHINHMQKALTEMNIRLTEVLNQIHGASGLAIIEAILKGERDKGKLLNLCHIKIIKNKKEEVLKSLNGRYTKSGLFALKQALDSYYFYQNQINQCDAMLEEVLKRISKGKSDQIISSHRKPIRHNKPDIDNLGSIMLKIFDGKDATTLSGITDYTWMQLLSETGTDLSRWESEKHYTSWLGLAPGQHTSGKMKKNKRKLGRPKAGQIFRQIAQSLLTSKHIALGAFGRRLSSRKGSPLAIKAVARKLATLYWRIMVKGMDFVEKGIQQYEEQLKAQKQRSLIRLAKELNMQITNNG

SEQ ID NO: 182906 - protein, 345 aa, unidentified
MKVSTIGVDIAKSVFQVHGEDAEGKASVQKRLGRQGMVGFFSKLPPCLVALEACGTSHDWGRALRAMGHEVRLIPAAYVKPFVKRNKTDARDAAAICVAARRPDMRPVAIKSEEQQASRALERSRELLIKQRTQLANSLRAMLAEFGIVAAQGGRGFAELTARLRGENPGLPETLVAALRLVAAQLDNLTPAIEAMEDRIKTIAKADPTMRRLSAIPGVGFITAHAVVAAIGEGRQFGCGRDFAAWAGMTPREASSAGKRRTKGVSRQGESRLRKLFALGAATLMRNARSRDDRATQWQRGILARRPMKVAVMAQAAKTARIAWAVLTSGRGYVPPSAAAFSAQP

SEQ ID NO: 182907 - protein, 367 aa, unidentified
MKKISTARVKQSRNFSGQKLTIGLDLGDRSSWYCVLDEAGRVLLEQRLSTTAKAMQEEFGKMPRSRMALETGMHSPWVSRTLSELGHEVIVAHARNVRLIGESRKKDDRLDAQTLARLARIDPQLLCPVKHRSAKAQADLTVIRARAGLVRARTALVNTARGLAKSYGERLRGCNVRNMNPEKAEGLSPELQRALQPLLAGLESLSERIGEYNQRIEKLAQESYPQVALLKQVKGVGTLIALTYLLTLEDAHRFGKSRDVGCYLGLQPGRRNSGQSEPQMHISKEGDPYLRTLLVQGAHHILGPFGMDCDLRRWGLKLAERGGKNGKKRAVIATARKLAVLLHRLWVSGEVYEPLQNSNRRAMPAAA

SEQ ID NO: 182908 - protein, 387 aa, unidentified
MSQSNDLSRSLVALKQDSTLIAVVELSRSTWLVAGIVPSVARHPLKKLEPDAAALLRLLERWRDEALQHGRTIARIAVAFEAGRDGFWLARWLRARGIEAHVIHPTSVAVSREHRRAKTDRLDTELLKRVFLGWLRGEPDHCTMAAVPTLEEEDARRPNREHESLVGERTRIVNRMKANLARLGIRGFKPTLRGASERLDTLRTPEGEALPPNASAELRRDMARLHLVVAQLKEIEAARLKRLVERPDQGPNAMVRLLAQVVGIGVETADMLVHEVLSRNLRDRRAVARYAGLTGAPDESGSRRRERGLAKAGNARVRRGMVQLAWRFLWFQKSSALAQWYRARTADARGGTRKTMIVALARKLLVALWRFVTTGEPPAGVVLCPAS

SEQ ID NO: 182909 - protein, 391 aa, unidentified
MIFVGIDVAKDKHDCFILNSEGTVLADVFTIANNRIGFETLLSRIQSCSQGESKIKVGLEATGHYSYNLLGFLLDSGLATYVINPLHTNLYRKSLSLRRTKTDRIDARTIAMMLMSDVDLKSYSNTAYHNEELKSLTRYRFDKVKERAKLKSSVARLVNILFPELEKLVSSLHIAVVYALLSNYPGASYIANANTEELAETLCTASKGRYTKSKTAEIQVAAGVSIGSKMPAKSMGLKHTIALIRELDKEISEVESAIDKITSQMDSPIFTIPGIGRHMGAMILAEVGDFSNFASADKLLAYAGLSPSTYQSGQLQNCYAHMEKRGSRYLRYALFNAAKYVCLWCPTFSAYLEKKRSEGKHYNVAISHAAKKLVRLIFAMQRSGKAFLADY

SEQ ID NO: 182910 - protein, 432 aa, unidentified
MYPPEATVPNPAIAAYVGIDWADQKHDVILCPQAEPAVLEHQVITHSPESLLDWVGNIQQRFGAKGKILVCLEQSRGALIYHLMGYECFELYPINPNQLASYRASFKPSGAKDDRPDAELLCELVRYHRERLVAWKPDTELTRKLATLNEGRRQAVDRRSALANEIKSTLKIYFPLALQVLENDTTTALAADLLLHWPTLEALQRQSPSKLRKFFYGHNCRGEQKMLERLKLIREALALTHDAAVIEPAALRVQMLAEQLKSLLPYIARYEKQIPQLFDSHLDSFLFRDLPGAGSVLAPRLFCAFGSDRSRFQCAQQLSSLSGIAPVRRASGKKSGKKGEKKASIHFRQACPKFLRQSFHEFAACSIRYCSWAERFYEAHRARGKTHHVAVRALAFKWIRILFVCWKERSPYQESRYLHALQNRGSAHAQSC

SEQ ID NO: 182911 - protein, 456 aa, unidentified
MSLPVINPHAAGLDVGSEKIHASIAGAPARVFGACTEDLHALRAWLQEHGVTTVAMEATGIYWLSVYEVLEAAGLAVVVVNGAHVKNLPGRKSDMADAPWISTLHMHGLLRGGFVPPAQIRRLRDYQRQRADLITMGAAHVQHMQKALDRMNVKVHDVISSLIGVSGLKMVRAILEGERDAETLAALCDAQILKKKKDRLLKALAGGWQAEHLFALRQGLEGWEFYQRQIRACDEQIAQVLQQLAHTPPGTGGEKSPAAVPVAAHKEARHNAPQEMPRLHEWLMQTFGGADLSTLPSLSDYTVLQLLSEVGRDMSRWPTVKHFTAWLGLAPASRQSGKGRRREVRHGGRAGQVFRVAARSLARARNSWLGAFYRRLAAVKGGKMANKAAARKVAELFYLALTKGMQYVEQGIQSYEERYLAQRVQGVQRQAKQLGLTVFPLSLTQALQPQNPEVHG

SEQ ID NO: 182912 - protein, 447 aa, unidentified
MSNRRGLSRGDKRRNARLTRLRQVLPREHAILALDLADDKQVFALTDHDSRVLARRTVRCRPWQLGEAIEWGRAEAVAAGFAGMTLACEPTGHRWKVVDQLAAAAGIALVCVQPLLVHRAREAEDFTRDKSDDKDALLIARLAAQLHVYLPERADPTWARLRHLGARRVQWVTALGAARQQLRDLLECAWPAALAAAAKPLDSLTWRAAMSVTGCDPARLRQLGLDELTAAVRTELPRWHGQRIRHSVLTSLIEAAADERGVPSQRPGALERAAFALTDLQHAQTQRDQVDTLLVGVLDELGLTELVTSIPGLSAVGAAAILAETGDPARFDSGRAVVKHAGLCPRENSSGSYAGQTTISGRGRPLLRVAAWRAVWAALQHNPVLAARHAHLTGRTANPLTDAQARIAVAGSLLRQLFVVVTTRTAWNPAVASGALDPRIEVTAPAA

SEQ ID NO: 182913 - protein, 355 aa, unidentified
MDSKKYIGMDVHKESISIAVMNGAGKIVMECVIETKASMILQFIDGLRGDVHVTFEEGTSAAWLYDLLKPHVTKLVVCDPRKNASMREGSQSDKIDARRLAELLRLNHLNPVYHGEHGLRSLKELVRSYITITKDLGRVMSRVKAIYRSWAIACTGKQVYAPRHRAEWLGKIGEPGVRRRAEFYYQQLDALRCLRQEVRRELLAESKKHQAWKRLCQIPSMGPIRAAVLLGILQTPHRFRSKRQLWTYSGFGIETQSSADHRRVDGQLQRAKKPSSIRGLNRNCNHDLKNLFKGAAIVASSKPGPFQEFYAALLTKGMRPEMARLTLARKIATIVLMVWKRGACFDAQHLKPQTV

SEQ ID NO: 182914 - protein, 387 aa, unidentified
MYFVGIDISKYKHDCFICTETGEVIESNFSFPNTSDGFEQLLNLLKSIDNFKEIRIGFESTGHYGMNLKLFLEKNNYSFMEFNPKLVKEFISGQTLRKTKTDKKDAYQITKYLISADYKPHPKQFYHKYSLKSLSRMREKLVKQRSYYEVALTNVLDHIFPEYKSFFNNTFSASSIFILSKYKSPDKIKNMKDYDSIRKISRGKFTSAQFFLLKDLAKNTIGTSNEIFELELETLLILRSQIEVEIKKLESNIEEIIKELNPPILSIKGIGYILGAGIVSEYGDVSRFKSADAMVAFAGIEPSICQSGTESHTGHMVKHGSGHLRYYLLNAADCIFLQEPIFTEFYYKKRNEGKSHRVALNHVAKKLIRIIYKLETENITFDSSKVK

SEQ ID NO: 182915 - protein, 365 aa, unidentified
MLTNKDIMLTVDYHDENLVIRRLDGATGEERVFKEATDVEVIRRVVDKAREELEPGGQIIWIMESTTGWARVKELFLPDRRKHRLSFHLCNPLEMPLPPKGHRKKTDKVDTARMQREALAGKLPEAHQPPRWLRRLRRLVSLRENLVARRTALRNWFTRYLAHETWEDRTHLWTVQGMGRLEALARKAHGPDKVVLSTKLAEINHLPSLLKPVEEELLRMYKYLPQAQLLDEIRGLGPISSVSIVSRIVPVTRFSNDEKLIGFAGLAPGIQQSDDTIKRGHIGGGGTDWHLRHYLIEASIWARQIPRYRPTYERVMLKRGKKIARLVVARMMLRSIYKMLKENIRFNQLPARPAKTRSTLKRKAG

SEQ ID NO: 182916 - protein, 311 aa, unidentified
MNNTIGIDISKDTLDAHRLADGQHKQFLNGKTGHAQLVKWIGKQSDPLIIFEATGAYHRQLERVLCTHIIPFVKVNPKQARRFAQASGKLAKTDRVDCEMLAKMGAALQLVPKPFTAENLYDLKELLSARRALIKDRTAAKARKATVINALIKQQLEKRLRQIKNDIAKIDALMLDVAREDQYMSERLDILFSIPGIGVITALMILVDMPEIGALNNKQVASLAGLAPMSQSSGKWMGKARIQGGRPNLRNAIFMPALVAIRHNADLKTKYDQLVTAGKEKKVAITAVMRKLLVLANALLRDNRKWAEKAA

SEQ ID NO: 182917 - protein, 377 aa, unidentified
MATTRTVLRGQLTAKPGDLYMSLELGDKHWHISIGGERRSVSHYIVEAGHTEEVADCIAKAAARLHTARVHSCYEAGRDGWWLHRWLTELGVDNIVVDPASIEVNRRARRAKTDRLDADKLLAMLVRHHRGERVWSVLREPSPSDEDARRAHRELQRLTHERIAHTNRISSLLVLHNLRPRIVIGGRDWPVWWNAHREQVPPTLRAELEREAVRLKVVKEQVRAIEAARARELAEGKQPLVAQLVRLRAVGAKGAWVLVKEVFGWRHFANRRELAGSLGLVPTPYASGDSEIEQGISKAGNRRVRALLVELAWSWSRLQPGSALTQWFNRRFAGAGKRMRRVGIVALARRLAIALWRYLQTGEIPIGARLKPAGSGI

SEQ ID NO: 182918 - protein, 384 aa, unidentified
MDVLYQSCAGIDVHQATVVVCILHGPLTSTRPKREMAQFDTTTKGLKACHDFLSQFHVEAVGMESTGVYWRPVWHELCDDFELILAQPAHMKAIPGQKTDQKDAHWIAQLTRIGLLPRSFVPDETIQELRELTRQRKHYVENRNRETNRIHKILQSGGIKLTTYIEDIMGASGRNLLQLLIDETPLTPRMIHQSVYTSLKRKVPQLLEALDGYFSAHHRFMLGQSLEIYDFYQKQIDCLEERINGYLNLYERPVEILDSIPGIDLITASVIIAEIGVDMSQFPTAGHLASWAGLCPGNNESAGKKRSTKIRHGNSYLKRCLCQAVFAAKKQKGSPLAERYYQIQSRRGPQKATIALAHQLLKIAYILLKENLTYQEFVLQKKGY

SEQ ID NO: 182919 - protein, 340 aa, unidentified
MEYGAIDLHLKTSVIRIVDADGEVVVDRTVATTRAALTGVFAGRAPLRVLVESGTESEWVAQTLEACGHAVIVADPNYALMYGHRARRIKTDKRDVAALAEACRLGIYRAAHRVSAAQREARRVVRIREQLVRIRTQTINQLRAQLRQEGIRLGPGSAETVVPHLDALAMPDALRLGLTPLRAVLASLAPVLAAATADVVARASADPVVRRFLTVPGIGPITAVTFRAALDTWERFRDASAATAFLGLVPREDSSGTRQRKGAITKAGPGPVRALLVQAAWVVWRQRQSGAALHAWVERLAARRGKRIAVVALARRLARILFALWRDETDYQAAPGVVAA

SEQ ID NO: 182920 - protein, 446 aa, unidentified
MSNGNGLSRGDRNRNARLARLRELVALNHAIVGIDLADDTQAAVVTDHDSRVIARRRVRARAWELGEVLDWAVARAAGAGFASVTVACEPTGHRWRVLDQLAAGRGLALVCVQPLLVYRAREGEDLTRDKSDPKDAVLIARLASELRCYEPERASAVWARLRHLGARRSQLTTAATAAVNQIRDLAECAWPAVLAASPSPFRSVSWCASLAVVLDRCAGDLRRVRRLGLERFTAAVRRELPRWGGIRPCLRIIRAVFAALADPAGVAAHRPGALERAHLALGDWRDTRARLADTETRMWAVLEELGLAGLVTTISGLTVTGAAAILAETGDPARFATARALVKHAGLCPRDNSSGAAQGKTSISGRGRPGLRLAAWRAVWAAMPNNPVMAARFAYLTTRQDNRLAPQQARTACAAALLRWIYVVVTRRVSWDPAIAAGNTPAQRAA

SEQ ID NO: 182921 - protein, 310 aa, unidentified
MHKQSSFIGIDVSKNSLNVHVLPEDISYSFPYEAQKIKALIRKLKQHKPMLIVMEATGGYELAAASKINEAKLPVAVVNPRQVRDYARAIGKLAKTDSIDAYVIARFAQDVRPEVRENLTLKELIMRRQQLIEMRTAEKNRLGTIYSKEVIKSIERILRTLDEQIHALDEQLDREIKGNPSWDHKVELITSVPGIGARTAHTLLFCLPELGRLNRRQIAALVGVAPLNRDSGKLRGIRCIAGGRPAVRRALYMPVLSAATRWNKKLKLFYEQMVARGKKPKVALTACMRKMLILLNAMVKNDRAYDPEYC

SEQ ID NO: 182922 - protein, 346 aa, unidentified
MKHYAGLDISVKETSVCIVDETGKICHEVKVVSHPDDLIAVLKDPTWRIERVGLEAGPLSQWLFEGMAKASLPAICIETRHTKAFLKAQPNKSDRNDARGIAQMMRVNLYRPVHVKTLTSQKRRALLTARKLLQEKAIDIENDIRGLLRNFGLKVGMVGAVKFEARILELIEDMPDLAEVIEPLLEARGKLRQNSAALHRKLLAIVRDDEICRRLMTIPGVGPVVALAYTATIDIPQRFRNSKAVGPILGLTPILNQSGESHRIGRISLCGDGMMRTLLYEAAQVLLANVKKWSWLKAWAMNVAKRRGRQKAIVALARRLAVIMHRIWVDGTRFHWTRKEIMPAAV

SEQ ID NO: 182923 - protein, 344 aa, unidentified
MLYVGLDLSRKRLDWLALDQEGQPAEIGAVPPDRDALAKLGQRLGDTPVLAVIESMSGARFVHDQLELAGWDVRIADAAKARGLAPLACKTDRIDCRVLAELARLNLVPEIWLPDPQVRAERERSRFRLHLVKHRSALKNRVHAILFQHGIANPHRDLFGAGGRALLTRLELAEPWASTVAASLALVDQLDEQIAACERELRRLGANPPSIPLLTTIPGVAWVLGYTIAAEIGDIARFPSPRKLVGFTGLTPRVDQSGERDRRGPLRKNGPNYLRWALIEAAHTAGRNPRYRPIVERMRARHGRSRGSKIAAIEIGRRLTEAIWHMLTHDQPFAPAGAPTPVAA

SEQ ID NO: 182924 - protein, 408 aa, unidentified
MATLYVGIDVGSKSNVVYFMLPNGDKHSNFSVANSFDGSCQLVKRILSALTSHSLDTVLIGLEATSVYGDNLVYFLREDATLVPFNKKIHVLNPKQVKKFHDSYNDLPKNDYVDSFVIADCLRFGRINKEVYMSDYRYKALQNLTRARYYAVQNLIKEKQRFMNVLFKKYSTMTQEKVFSNTFGATALAIYDEFESAEALANMDLHELTDFIIKKGKNRFSDPDAVAKAIQKAARSSYRLPKTVNDSVNQVLSISITSMKALESQIKAFDKAIQAQMMLLPNVLTSIPGIGPVYSAGIIAEIGDINRFESQAKLAKYAGLAWKQHQSGGFKSETTRLIPSGNRFLKYYLCEATLSLVRCDKEYNDFYHRKYMEVNRYQHKRALVLTARKFVRLVFRLLKDNRLYIAAK

SEQ ID NO: 182925 - protein, 385 aa, unidentified
MGHQTFIPRDYDVFAGLDVDKRSISVTFTDHQGLLKSLRIPNNVEHLVNHVRKHFPNQRVAFAYEAGPTGYGLYDGLVAQEFRCLIASPSMIPKAPGQRVKTNRLDSVGLSENLRGGQLKGIHVPSPLYRELRHLTQLRDTFVNEMVGMKQRIKSLLLMEGVEFPPAPAGSQWSFMVKGKLRKLPCSSTVRFKLDQLLDSLEFNEKQVLKTTREIRRFCQNDPELSQCIKYMMSVSGIGWIVASQLLARIGDWRELRNIRQLGGFLGLVPTEHSTGERTDRGSITRTGDERLRSKMIQASWSAIRKDAELREFFRLICHRHPRREGPRVAIVAVARKLSVRISVVLMQQRPYVVREKVHSAPLTQEETSPQGTTRRQAEPGDKDS

SEQ ID NO: 182926 - protein, 363 aa, unidentified
MVLPPVCASERGTRSDRSGIDPHKQTHTAVALDTATGRKVGEITVKARTRGFERLLLWARELDDVDRIAVEDGRHVSGALERHLIAHGETAVRVPPAMMFQARRADRVRGKSDPIDAEAVARAALAHPELPTATLAGIERDLDLLVAHRESLVNERTDKISKLRWLLHDIDPDLAPPLRSFDRFKVLARVQRNLDSMTPTTAVAVCMDLLARCREITVQANKLEREIIGLVDLHAAALLKIPGCGALTAAKILAETAQVKRFPSEGHFARYVGTAPVPVASGASHRHRFNRRGNRQLNAAIHRVAITQLRIHEPAQAYFSRKRAEGMSKTEALRALKRQITRTIYKTMVSMDQPTDYAAAVAA

SEQ ID NO: 182927 - protein, 411 aa, unidentified
MEVIVERPAALDVHKAQVTACVRAPAAAGGGRDAHLAEFSTTVAGLLALRDWLAAHRVSQVVMEATGVYWQPVWHILEDDFELMLVNARHVKQVPGRKTDLSDAAWLCQLAEAGLLKANFVPPKPIRELRQLTRYRRTQIAERQREANRLHKALEDTNIKLACVASDLLGVSGRAMLDALVSGTTDPHVLAELAKGRLRQKLPQLREALEGRFDTVHALLIGAILAHLDFLDEQIGRLSDAIEERLAPFVGAVELLCSIPGVQRRTAEVILAEIGPDMRVFPSARHLASWAGQCPGNDRSAGKQRSGRTRKGSKWLNDALKDAAMAATRSNHTYLQALYRRQRSRIGHAKAIGTIKHTILAAAWHMLTHGELYRDAGPDYFTHRDPARATQRLVAQLERLGHTVTLQEAAA

SEQ ID NO: 182928 - protein, 418 aa, unidentified
MIDDVQWFVGIDWATQSHRVCLLDIEGRQVNERDFAHGGAGLTELRDWLLEKTKAAPGQIAVAIETPHGPVVEMLLDHAFQVFAINPKQLDRFRDRFTVAGAKDDSRDARVLGGSLRTDRQAFRRLVVDDPLVIELREWSRIAEELQQERTRLANRVRHQLWRYYPQAIELTDDVADDWFLALWQQVPTPATAAKASENTIARILKDHRIRRLDAATVLQTLRKTPLFVAPGTTEAACAHIRSLAARLHLVNQQIKEAHRALDGLCAKLEASKESPSGQNREQRDVTILRSWPGIGRIVLATLLTEAPEPLRARDYHALRALAGTAPVTRRSGKQCFVIRRHACNKRLQNAVRHWSRTAIQHDAAARRRYDALRQRGHGYARALRGVGDRLLYALCTTLKRQTPYNPNYQTAQVTAGR

SEQ ID NO: 182929 - protein, 353 aa, unidentified
MTKYYVGMDVHQASIVIAVTNAAGKVVMESIIETKAQTVRDFIKGLRGEVHVTFEEGTQAAWLYDLIRPLVTEVVVCNPRHNKLLEVGNKADRLDARKLAQLLRAGMLKAVYHGESGTRALKEMVRTYECLVADTTRVMNRIKALFRARGIACTGHDVYRQDRREQWLAKLDERGVRARAEALYQQLTALKELRHEARQRMLTESRQHTASKLLMGVPKLGQIRVAQIIATVDTPHRFRTKRQFWAYLGLAVVMRTSAEYRVIGQAVQKSKRVPATRGLNTNHNHRLKGVFKAAATSACASEPFKQQYEALVAQGIDPALARLTVARKLAAITLAIWKRGEEFAPSKVVKQAA

SEQ ID NO: 182930 - protein, 419 aa, unidentified
MSKSNIARQLAQVQPGTLHAGVDLALENNVVVVINERAERLDHFSFPQDRGGYDYFLRRLEGLRQKYQASEVVAAMEPSNYFWKLLARELEEKKITYHLVNSYTVKKHREGDQLDRSKDDRRDAGQIAELSRNGKYTGTHLQKGAYEDLRLYATLYDQSMQAIRREKQVLWGLVGQVFPELSRVFKNLVGETGRALLITGASATTIRQLSVEDFIAQVRAAYSGKRLFVSKLRRVHQLAVTSIGLTEGLGAFQLAIQVHLAELQSFQKQLKRVRTAMTACLATLPEAPYLLSVKSMQAVSTAIFLAEVGDPKRYQSAAQWVKLAGIQPAPNTSGKKQRSQTPMSRQGRARLRTMLYFTCLRMVRFDEHFAHIYTHLQRRQNNPLTKMQAIGVLMNKLLHILWALIHNQTFYNPSFGQSI

SEQ ID NO: 182931 - protein, 397 aa, unidentified
MMRFAGIDIGAERHMVAVLDEQGEILCRSSPFGEDAPGYARLFELLGPSADCLVALEATGHYWRNLFVALIAKDYAVAVLNPLRTARFAEEELRRTKTDAIDALGIARFAQQKRPRAAHLPDSVTEELRELERLRERVVEDFADRLRQLHRAVDLGFPEFTRYVRTLESRLAATILSRYPTAASFRGVSVKKLARIVYDGSHKIGEELARNLIEAAEKSVGAHHSEPYRLRIKYLCEDLDVLRRRLKDLARDVERKLDDHEVGKLLMTIEGLGPLTAACLIAELGDPARFDSPGAIASYVGVIPRIRQSGKKRFTKGPAIPLGNARLRKSLFMVVLQLVRRNPWLRQYYERLRAAGKPGKVAIIAAMRKLLIAVWTVATHRRPFVPIMPALPATKNA

SEQ ID NO: 182932 - protein, 423 aa, unidentified
MKPLATGGFSAYVGIDWADTKHDVCLQARGNESREFDCFAHRVAAIDQWAHSLRQRFGSPIAVAVELAKGPIVYALQKYDFLVLFPINPSTLAKYREAFKPSRAKDDPTDAELALDLLMRHPERFAPLQAQSEDMRALLSLTEQRRQLVGDKTRFTNRLTHTLKQYYPQALDWFDQRDTVLFCDFLARWPTLTQVRRARPSALKAFFYAHNGRRAHLISARLDAIKAATALTQDLGVIAPCRLQALVLVEQLRTTLQAIERFDREIAELAPRLPDYRLFRDLPGAGPHLAPRLLAAFGEDRQRFAHADELQKYAGIAPVTERSGKKSWVHWRWQCPTFVRQTFVEWAAQTINKSFWAGAYYRQQRDNGSSYQAAVRSLAFKWIRILYRCWQTNTPYDESRYLNALRKRRSPLLKNLDLDAQNA

SEQ ID NO: 182933 - protein, 422 aa, unidentified
MLEETQDTEELIERVAALDIGKAELVCCVRVPGQGKRGRRLQEVRTYTTMTRSLLVLADRLGELGVTRVVMEATSDYWKGPFYLLEAQGFEVWLVNAKDVKHLPGRPKTDRLDAVWLCKVAERQMLRPSFVPPPAIRRLRDVARYRADLVGVRTAEKQRVEKLLEDAHIKLSVVASDIFGVSGRAMLAALLAGERDPKVLAELARGRMRAKRSVLEEAFTGHFSDHHGFLLARMLGRVDGLDADIAELDHKLEELIIPFTAAADRLDEITGVGRTAACAIIAEVGVDMGRFPTPGHLASWARFAPGVKQSAGKTKGKSSTGHGNPYLARVLGEAAAAAGRTDTFLGERYRRIARRRGAKRAIVAVGRSILIIIWHLLADPDARFHDLGAGFYHTRINPERAKRNHIRQLEALGYKVTLQPAA

SEQ ID NO: 182934 - protein, 451 aa, unidentified
MRDIQWEVAPLEAASASTRVMQLTGRPGPKGDRVTDTCAWYLGIDWGGETHQFCLVDAQGRLCGERAVAHTAVAVQEALQWVRLTTGAAPQEIGVGIETPHGVLVDTLLEHGFGVWALNPKQLDRFRDRFSAGGAKDDRRDAHAVADGLRTDRRAFRRVRPDDPAIIQLRELSRMLDELQVEEGRLANRLREQLYRVHAAWLTLSPAADEPWLWTLLGETPHPDAWATVPRRRITSAVRTHRIRRLTVDDVITALRQSRLSVAPGVTDAVAIRIAALIPQMVVVHEQRVTAERHIDRLLAQLATVDTTDDEPREHRDVEILRSLPGVGRMVTATMLTEAAGPLADRDYRTLRTYAGAAPITKRSGKRAFFVHMRYACKQRVRQALYHWSRTSIQRDPAARAYYDALRARGHHHARALRSVADRWLRILVAMLKTGTLYDAARFAESAPVPA

SEQ ID NO: 182935 - protein, 369 aa, unidentified
MDVHSTNFTLCAMEPVLGGEDRIFANIQVTPDYKNIILFIEDLKMKLGISDSYDILCGYEAGCLGYSLYNQLTNVGIKCVILAPTTMLSPQGVRIKTDARDALMIAQCLAYGGYRQVYVPTEEDDSVKEYLRMRDDHKLALKKLKQQINALVLRHGFQYSGTKWTNAHWKWLRLLELSPLYREVLNEYMSSFEEYTAKIERFDKRIEELASQQKYQLNVKKLECFLGVKTHTALSLVVEVGDFHRFAKGNVFAAYLGLAPGENSSGEHIHRGGITKAGNSHLRLLLIEAAGGICKGVIGHKSKELRGRQNGNTADVIAYADKANTRLRSRYYKFIRHGKKRNVAVAAIARELACFVWGMMTGNIEPRLA

SEQ ID NO: 182936 - protein, 345 aa, unidentified
MHFIGVDHHKQTSTMTVLDSQGREVRTARLLNLRADIGAFIREVAPEGFLAVVEAGRASYGMADLLRELGGQVKMANPLQVKAIAHARIKTDKRDSRTLAQLLRADLIPEVYQREAWNREAQRVLRLRAFWMSLRVQVRNKIRALLAQQPEEIRIAIEQRSEQLFSQKGQDFLGDLRLGDRDGEILRALLRGYQTFQAFQAESDQMVADLYRELPAAQLIDTAPGFATTFSVLVAVEIAEVRRFPRADALHSYAGLIPSTYSSGARTYHGHIVKGNVWLRWALIEAVYPAIRKDAGLSILYHRLARTKGPNVAKVATARRLLTILYRMLTENRPYVPYRTNPTAA

SEQ ID NO: 182937 - protein, 414 aa, unidentified
MGRGFQIDKTPGDPGFLCLEVEMVASIRVAVDVGSRFHSVAVGDPTGQLLDEFTIDHRRDGFERFFARIDGYQARDVRVAMEGYGGWARPLDQQVLARGWRLFNVNNLKLARYKEIFPAPAKTDAIDARRMLELFAFDGQRPLVRNVLAEINPVSQAQRQLKYLTRRRRHLVADRGLRLTRLRVDLQAVCPDLLGLTRAVDNRWFLRWLTCRDCLTALPRLQEKTILAIPSIGAKKAPRIRAWQKQATFGPDIDLYDRDIVADAQAILDLDTQLTDLNQRIDAVAADCSITQRLRSIPGFGVTGTAELAGEIGDLARFNHEASLALYLGMAPLDQASGLTRRGRPPKCVNSRCQNAMMTCVVRHMRCVPESRAYYDRKRAQGKRHNQAVRALGRHLTRVIWRMLTQERDYELKT

SEQ ID NO: 182938 - protein, 441 aa, unidentified
MAKTKRNSKKYVEPMQLVYPNAAGLDIGSREIMAAIPPDREGETVRAFGTYTADLKELADWLSQNGVTHVAMESTGVYWIPIFELLEERGFVVIVVNARQAKHPPGRKSDVQDCQWIQRLHSYGLLNGSFRPEADMCILRAYLRHRDNLIEDRAKHILYMQKALVQMNLQLGQALSDLTGKTGLEILRAIVAGEHNPHELAKLRHGRCEHSQEDLIKALTGHYRKEHLFVLKQALEMFDSEQLLGEIKPDLPDDFPPLPPDPKPTSNSKNAPNYDARASMYELARVDLTAIAGMNESLVQKILSEVGTDMSRFPTVKHFCSWLGLAPHNAISGGRVLYSHTLKNQNRAGQAFRLAAQAVARGKTVYSEFYRRIRARSGAKEAMVATAHKLARTFYFMLVRKTPFNQLDLETYLAAQREKDVQRLQSRAAKLGFSLQPCEAV

SEQ ID NO: 182939 - protein, 418 aa, unidentified
MSRTLAKKLAQVKSGTLFVGVDLGLDRNVAVIINEAGQRLATFGFPHSQEGYAYFRRRLEKLQSHHQAAAMLVGMEPSNYLWKLLAAELERHWLPYRLVNPFTVKRHREGDQLDRSKDDVRDAFTIADLLRTGKFTETQLLHGSYAELRQHATLCERLDCEMTRHKNRLHSAVGQLFPEIKRVFKDLTGLTAVAMLQNHAAAVVLRDLSEDDFVAAVRQDYTGRRMVVSKLRQAHRLAAASVGLQDGVQALQLMVRQQLQALALLQRQHAEVQEAMIDCFLALPESRYLLSIHGLGVVSAAVILAEIGDPSCYHSGQQWIKLAGTQPAPNISGRKTRSRTPMSRKGRPRLRTTLFFAAMRLVQVDDAFARVYLRFQQRQENPLTKMQALGALMNKLLRILWALIRQQTFYNPALVHAG

SEQ ID NO: 182940 - protein, 386 aa, unidentified
MQHTSRLLSRFTQDTIVVGVDVHKYSHAAVAMDAWGQEKGRLTFSNDDLARCTDWLRSLGRRSGIIVGVEDANCCGSHLVEALRQEGFAMRSVPAILTERERKQSTTRRKSDFIDAKRVGKVILTKYEETLPAVESIADEEELRTARELDLLLMERRDLVKQNTILKNQLHGLLHQYYGDHYADRFRKPFHRDAVSLWLNDLEEKAGIEEGLKRILASGIVRRIRRLLLVETQIAVISKEVSSVGAHSPAVAALYEELHGCGMMTACAITAELVTPRRFPSEDKLAMYAGVAPREHSSGRHDRLSTNPFGNRLLSRAIHTIALSQIAVKGDTRGKEYYRKKLTEGKTKLWALRCLKRQIVKQVFRILREQAAAAHAASGQDEARVR

SEQ ID NO: 182941 - protein, 434 aa, unidentified
MRGIVGLDVGSDAVSVCVLAEQGQELIRRHEIPNSEVGAQRLVEQLVRLAADHGISAYRIGIEASSLYWWPLALQLSTEPRLPGRAVFALNPKLVKDFRSQFGALPKTDRHDAYLIAERVRFERGLPAPFAVDWRYEPLRRLTRLRVHLADTLAREKNYFLTMLFLPFSGFVQSHAFGDPFGPTSWALLEEFTTEELARASIDDLVASLQRHGRGHFADPEATATKLQQAAKDSYRLHQTLEDPMRQVLGATRATITTLQQQLKAVDATIARELAGIPQTLRSVPGLGPVWTAGLVAEIGMIQRFADDAALAQYAGLTWTVRESGHFQADDTAMTKRGNRYLRYYLIEAANSVREHCPEYRTYYAAKYAQTLKHPHKRALVLTARKLLRLVDALLRTDTIYQPPEHRTTRKEMTTPSTRRPARHHRTRPVSATT

SEQ ID NO: 182942 - protein, 414 aa, unidentified
MFAVGVDVSNGRSTVAVLQSKSTVTLKPFEVSHTPEALGKLVEKLNSLGGETKVIMEHTGRYYEPIAMFLDSSGFFVSALNPILLNRYQENPSLHNVKTDKADAVKIAKFGLDNWEQLRQYEPMDTIRYQLKTMHRQFQLASKSETAFTNNLIALLEQTYPGIRKHLSSPARPDGSQKWVDYVGTFWHADCVRKLSPKAFSERYQRFCERHKYYFSEEKAAELYRHAQNVVTLVPKSDVTKMMVKEAVSQLNAISRTVETYRAEMNRLASQLPEYETVMGMYGAGPSTGPQLMAEIGDIRRFPKKNSIIAYAGIDPEKNDSGDVTRKSNKSSKRGSPYLRKTLFVVMDVLIQRKPVDDPIYQFIDKKRSEGKPYYVYMTAGGTKFLRHYYGKVRDCLKEKGLWDQSVNDSQDSE

SEQ ID NO: 182943 - protein, 452 aa, unidentified
MRLLNNKQGLRRSQFAKELKGADLEKVLLVPIDVSKTLQKSMILNYFGEVIESPFSFMVNRTGMKLLIGKIDNARNTLQADRVFVGIEATGHYYEDIVRILIDAGYSVHIINPASTHEERKQHLTYTKTDDIDLYLIAEALIGYKATNAKLSTDVYKQLQNLTRARRSEINKRSRIKMEIRTIHDQIWREYQGFSILENNKVKTRKIFSDFWGKASLYLLNHFPHASQILELGELGLHRLSKEHNLKIRKSTIDKLLYAASESVSKPIEQLSSELFLLKQKLKDYEWHTQTIKSYELEIERIFVETIGLLLLTVPGIGLITAAEIYCEMGDLSQFTSANQLIKKAGTNPVIKQSGPEEGYYGRISKQGNANLRRAIYNAGRTLSVHNEVLKPFYTRLKEKGKKAGQIYIAMGNKFIKIAFAMLKNRKPFECNDPSFNYKQEVSKKLTLPLSA

SEQ ID NO: 182944 - protein, 393 aa, unidentified
MRFVGIDVASEVHVVAAVDTACDVLIKPTKIGEDAGGYARLLKLLGSPEETLVAMEATGHYWRNVFAALAGAGFKIALLNPLRTRRFAEEDLQRTKTDAIDALGIARFAAQKRPPATPVPEQATEELRELVRHRDRLVQDLGDRVRQLHRLVDLGFPEFTRTVKDLSSQLAVAILREFPTAEAFRNASFKAVAKLVYDGRHKVGLARARKLVEAARESVGAHHGPAYRVQIRHTCDAITMLREQIRELDGNVAQRLEEHEVGKLLTTIDGIGPHTAARLVAELGDPSAFRSPAALASYVGVVPGLKLSGKKKGVRAPLASYGNARLRRALYMPTLTAIRLSPWLRAFYERLRARGKPGKVALVACMRKLLHAVYSVAKNRRPFELRLETNATP

SEQ ID NO: 182945 - protein, 470 aa, unidentified
MKERNAIGIDPDSQGFVCAYVKRSDTKVDTRGYMATDSDLKSFLKWVKGEKDVVVAIEGSNGLSKPLEKALREAEIVFYSFKPTDTDKFRKAVLGQNKNNKKDAESVARYAMALEAQGKLEKYRRVWFADMELQLLTRRHESLNQQLTAEVNRLWKLLRYASADLYLALGGKNPEVECGEKVVKSEGILNLLISTPDVGKWKSLSEKQMLEAMGGGNYKGRRALIQELRKVISSFQSVSKAMALLLSTSAHQIQRLKEEQLDIVRMLEELTAENTAVQELRQMKGIATKTAAKMIAEIIDIRRFAREDSLACYTGLGMREHSTGQTTNMVPTQLFNHRLKDAFMTAARNVVFYDPDSHIAGYYRNLVKAGMSPLAATRRVARAMVRVIYRKLSALTAGTTDVPTGDKQEEGESDMASGSTRSGQSHTSDISLSSPRNHRARSVRKVKREVTLTGRTRELGRRKIISKKIT

SEQ ID NO: 182946 - protein, 353 aa, unidentified
MTGTKYIGMDVHKESISIAVRNDTGKLVMECVIETKANVILEFIHGLRGELQVTFEEGTWATWLYDLLKPHVTKLVVCDPRKNSRQGNKNDRIDARELADRLYMNKLSSVYHGGAGVRTLKELARSYLTISKDLGRVMSRVKAIYRSWGIPCAGKQVYAPRHRAEWLAKITEVGVLRRAEFYYQQLDALRVLRQAVRRDLLTESKKHKATKLLRQIPSIGPIRAALLIALIQTPQRFRTKRPFWKYSGFAIEMHSSADYRSVKGELQKSKKQISVRGLNRDCNHDLKNLFKSAATIASVKPGPFQEFYAALVAKGMRPEMARLTLARKIATIVLIVWKRGVSFDAQYLKSQTA

SEQ ID NO: 182947 - protein, 414 aa, unidentified
MDVLYPRCAGLDVHKDTVVAAVRIAANGPATTEVRTFDTTTPGLLALSGWLAECGGTHVAMEATGVYWKPVWHILSEGDVTLILANAAHVKNVPGRKTDVADAAWLADLLAHGLVRASFVPEAPTQDMRALLRTRKQLVREQASHAQRIQKTLEDANLKLGSVLTQVMGKSGRAIIGALIAGERDPDALLRLVQRGVKASPEKLRAALTGRITERHRFLLRLHLRQIDALAAAIAEIDQEVDRDLDPFRQAARLLRTIPGVSDLTAQVIVSEIGIDMSRFPTAGHLVSWAGLCPRNDESAGKRRSTRLRKGAPWLKTTLVQCAWAGTRKNGSYLQAQFQRLRHRRGPKKAVCAVAASILTAAYHMLRDGTFYQDLGPDHLRRATPEAQASRLARQITKLGFTCLIAPADKLVSV

SEQ ID NO: 182948 - protein, 367 aa, unidentified
MKKVSTATMKQSRNISQQKLIIGLDLGDRNSWYCVLDESGQIQLEQRVRTTANALQEVFRAMPRSRIALEIGTHSPWISRLLSELGHEVIVANARKVRLIGESRKKDDRLDAQTLARLARIDPELLYPVKHRSAQAQADLMMIRARAGLVRARTGLVNTARGLAKSYGERLRGCNVRNMDPEKAEGLSPELQRALEPLLATIEEVSERIVEYNDRIEALAQASYPQVELLKQIKGVGTLIALTFLLTLEDPHRFRKSRDVGGYLGLQPGRRKSGESEPQLHISKEGDPYLRTLLVQGAQHILGPFGIDCDLRRWGLKLAERGGRNAKKRAITATARKLAVLLHHLWVSGEVYEPLHNSKRMTVAAAT

SEQ ID NO: 182949 - protein, 342 aa, unidentified
MQITTIGLDIAKNVFQVHGIDATEQVVVTKRLRRGQVFRFFEGLEPCLVGMEACATAHHWARELRKLGHQVRLMPAKDVKAYVKRNKNDAADAEAICEAVRRPTMRFVEVKSAEQQGRLMQHRTRDLLMRQRTQVINALRAHLAELGITTAQGHEGLKELLVIVASEAAERLPADAHASIIVLAAQLEAVQTMIRSIEKRIVAQHRASEASKRIETIPGIGVIGATAITATLTDPKAFRSGRDFAAWIGLVPREDSTGGKQRLGPISKQGDQYLRRILVVGAHAVLRRARQQPEKYPWVTQLLARKPFRVVAVALANKMARIAWALLAKGGSYRIPALLAAQ

SEQ ID NO: 182950 - protein, 428 aa, unidentified
MSYQIAGIDVHKKMLAVVVSDVEIESEYQFERRMFSSNPEQLRSLAAWLVEQKAEEIVMESTAQYWKPVWETLERYWKPLCEKREGARRRSGTLHLAQALSNRGRRGRKRDFVDAERLVKRLVAQELTLSFVPDAEQRLWRTVTRKKYQLRRDLVRLNNQLESLLEEAHIKLSSLVSDLLGVSARRMLKALADGETNPAALAALAHERLRATPEQLCDALGACTELKPVYRRLLKMTLEHLQILEQQIGQLDQELATLLHPHQDAVQRLAEVPGFAVDSAQQIIAEVGPAAATFPSEKCLSSWVGACPGEEESAGVNYSHRSPKGNRHMRRLLNQTANAAVKAKGSIFEIIYRRCVPRLGHNQAIGVIAHRQCRLIWLILHQGTRYEERGPAVTKRSRYQRTWRMIRQLRNLGYRIELPNPDASQAQA

SEQ ID NO: 182951 - protein, 417 aa, unidentified
MPTGDYDFFVGVDWGSERHQVCVLDPARQVHGERAVEHSGPGLAALADWLVAVAPGAPARIAVALEMPRGAIVDLLLARGLHVFAINPKQLDRFRDRHSVAGAKDDRRDAFVAADALRTDRWAFRRLEPDHPLILQLRECTRLDQEMQQELTRLANRLRDQLLRFYPALLRLAPAADEPWLWAVLALAPTPAAGAHVPRARLTRLLQTHRIRRLSAEDVHAALRAPALPVTPGTVEAAARHVALLLPRLHLIHAQRAQGTRHIDTLLAAYLAEAPAAGPPRAHHDVAILQSLPGVGRLVVATLLAEATPLLAARAYPALRAQAGIAPVTRQSGKHRSVLMRYGCNHRLQQAVYHWARVSTQCDAHSCAHYTALRQRGQSHPRAVRGVADRLLALLIAMLKSDTLYDAARPRRRERAA

SEQ ID NO: 182952 - protein, 405 aa, unidentified
MGKVFVGHDWAEAHHDVYVEDDQGQQLAKARVPEGVGGVARFHELIAGFIDEPADVTIATETDRGLFVGSMVAAGYRVLAVNPMSTSRYRERHSTSGAKSDSGDAFVLAELARLDGHNHQPIAGDSELVEAIKVLARAHQSLIWTRQRQLNQLRSMLREFYPGAVAAFESLGSSDALTVLSIAPTPTLGRALSRSKIAAALRRGGRQRRIDERAEEIQTALRAEQLQAPTVVADAMGSTVAALVAVAAELTTQIDRLQADLAAGFDQHPDAKIIRSLPGLGMTLSARVLAEFGDDPNSYVDAKSRKNYAGTSPITRASGKHRVVLARHARNRRLADACYLWAFATLTHSPGARAFYDQRRAAGDTHNRALRALANRLVGILHGCLRHQTPYDEHSAWAHRTQLAA

SEQ ID NO: 182953 - protein, 369 aa, unidentified
MNHTTSIGLDVHARSIAAAALDPLTGEVVTKTFAYSPGEVASWALGFDSPKAVYESGVTGFHLCRELNALGLECAVGASSKMQRPPADVKRKNDLSDAQFLARLLATHNVTEVFVPDAETEAARDLVRAHADARADLTRARQRLNLFLMRHGHVFCEKGPTGAPVGSWTKAHWAWIRQISFPDEADEEALAFYIAQVRHMEGQKRELEKFIRAHAREPRWRGRVDALRCLKGIEEITAFALVAEAGVFSRFGSARAFSTWAGLVPSEHSSGPRRRTGGITKTGNSNVRRLLVEASWHYARATAARKPAPSPDVPLRIENHAAKAVKRLVARRREMSARSKRPSVANCATARELACWCWAIGRMAEGADA

SEQ ID NO: 182954 - protein, 417 aa, unidentified
MKVVYPVCCGVDVHKTFLVATIISTTSGVSPKYSKKRFSTFNSSLLQFKQWLIQNNCFDLCMESTGKYWVPVYNLLEDSIHITIANPKWVKAIKGNKDDTKDSKWIGDLFRLGLVPGSFIPAKPIRILREYTRYRSKLVSCRSSEKNRFQNAFTVCNVALDSVVSDMFGKSASLITDYLISTEPFESQKCVSFLQRSLKKKADAVSDSINGYQMTGEQKERILLIRSHLDFINQAIADLDAKLDVMVDPFNSAISLLRTIPGIDRTSAITIISEIGTNMSQFSSSKRLCCWAGLTPGNNESAGKKKSVRITRAGVYLKPALVQVAHAAVKSNKSSYYKIKYERIGKRRGKKRAIIAIARMILTAIYHMFTTGELFNPCDLYKIDMPQEMQSKQKDKAIKQALKLLISQGIIDSSTPS

SEQ ID NO: 182955 - protein, 362 aa, unidentified
MNNRTSIGLDVHARSIRAAAFIPETGEVVERGFGYDPEAVARWAKTMPQPAMCVYESGPTGFDLQRKLAAAGVGCAVGAVSKMIRPAGDRVKTDRRDAVFLARMLAVGNIVEVAVPAPAMEAARDLTRAREDARHDLMRARHLLSKFLLRKGIVYDGGKRAWTKAHRKWLSGMSFDDPCEQLVFEEYLAGVVAMEQRRDRLDAAIAEKASSPGFAPIVARLSTIRGISTVTAFSIAAEVGDFSRFPDARSFMSYLGLVPSESSSGETVSRGGITRTGNVHVRTLLVESAWHHARRCSPTSATAYSDTAYVGPLVAAGAREANRRLHARYAHLKGRGKPANVVNTAVARELAGFVWALAVCEG

SEQ ID NO: 182956 - protein, 343 aa, unidentified
MSKISIVGLDLAKNVFQVHGVDASGGVVLRRQLRRGAVEKFFAQLPPCTVGVEACGSAHHWARVIGHYGHQVRLMPPAYVKPYVKRNKNDGRDAEAICEAVSRPTMRFVPVKSVEQQATMAVHTTRALLVRQRTMVANSLRAALSELGIVAAQGIKGLRELMAKLEAPHEEVPEIMRGALLLLAKHWQALEADERVLEQQIAKAARSDREARRLMEVPCVGPIIASTVLAKVPDATVFRSGRNFAAWIGLTGRDHGTGGKHRPGRISKQGDRMLRALLISGASAYLRHQRTRGVSDPWLRDLLARRPYKVVMVALAAKTARIIWAMLVKGEPYRDRASAPAAA

SEQ ID NO: 182957 - protein, 333 aa, unidentified
MTAETTVRVFAGIDVGAKTLVSVIRKNAASMKAQTFANTPAERLRLVKRLSTFPGITVCLEATGVYSLDIALALTDAGLRVSVLNPKASHNFAKVLLRNSKTDAVDADTLAQYAERMPYQAWARPTDAALTLRALARRINTLTCNKAAAKNQRHALTFSPQTAGAVLLDVALSITQLEERIARLTQEATIFIQAHPLLARRYALLRTVKGIGETSAIALLGELMLLPPGLTHKQWVKAAGLDPREFTSGTSVSKRARLSKAGNRYIRQALYMPALSAKSHDPYVRGFFDHLIALGKTPLQAVCAVMRKLLHAIHGMLTHDQVFDNKRFYALPA

SEQ ID NO: 182958 - protein, 331 aa, unidentified
MAQNNLVVVGIDVSKDKVDACIRSLSQRQTFPSTPEGRRMLIRWLRKHKVGKAAMEASGGYERDWAKALREADIEALIVDPKRVRNFARSAGRLAKNDPIDAEMIAWFAETFVEAKGQAYDEAREKLVKIVNARQALLDLQTSLRNRSEHSAPNVVQKMQGRLLKNIALEVAKLEAAITALIKATAHFAKLAEIIESVPGLGEITCAGLIAAMPELGQVNNKTAAALLGVAPYDQDSGKRRGDRHIQGGRRKVRNLFYMACMGAATRHNPVLKPFYDRLIAKGKEPKVALTACMRKLIVILNVMIARGEKWDATRYDVSDSARLPPSACTA

SEQ ID NO: 182959 - protein, 338 aa, unidentified
MIVIGVDVHKQSLTAVAVDEAGRMLDERTVTGANDGLVAWAWSVSDERLWALEDCRQLTRALERELLAAGEELVRVPPKLMAPERRAGRARGKSDPIDALAVARAALREPRLDHPRPGERRLRELKLLVDHRDDLIDERRRAQQRLRWHLHDLDPTLAVPLGALDRAVWLDRLGRRLARPEQTAKVRIARELVGRCRSLTRTILELDRELQAAATQAAPALLALAGCGAVSAAKLLGEIGPIERFDSDAQLARHAGVAPLDASSGKHQRHRLDRGGNRQLNCALHRIAITQGRVHAPARAYLERKQSEGKSRREAIRCLKRQLARTVYTTLKTESALT

SEQ ID NO: 182960 - protein, 361 aa, unidentified
MNYVGMDIHKKYSVLCALNEAGQELRRARVESKAGPGLKQFFQALDGPSKVVMEACWNWGLMHDLVEEVSEVDEVVLAHPYKTRLIAEAQIKTDTLDAQALATLLRGNLIGRTHIPRRETRAQKNLLRQRLYWARLRTMLRNRIHALLDRQRRLELPQCSDLFGVRGLGFLRRLELAEPDHTLLREQLALHDLIAQQMKAQEKRIVAEFKSRTNYEHLLSVPGIGPTLAAVIGCEIDVIERFQSAEKLCAYAGVVPTTYASGGKLSHGRLLPFCNKWLRWALIEASWVAIGCSPYFGALYQQHRTRGKKANVAITIVARRMCRIIFQLLREKRPFAKVPVRSQGKLYPRLLRVKTDGGVLV

SEQ ID NO: 182961 - protein, 321 aa, unidentified
MTQTTQTTQTTALYVGIDVSQKTLTIATYPTDEVWTIANDPHHHRALVQRLAQLSVQRVLLESSGGYEKPVVHALQQADIPVVVVPAQRARYFAKSMRGDLKTDRADARMLAYFAYCYPVQPTAPCSPVQAELKELWARREQLVQELEREKKRLQTVPFAAVRASLEQMIAVLQDAIAQTEARVEDLIASDADLSQKAALLQTVVGVGRVVACGSVAELPELGCVSHRAIAALVGLAPVRCESGEWVGRARVRGGRGRVRRLLYQAAVVAVTHDARWKAVYQELLAKGKPKKAALCAVARRLLVVMNAMVRDGRAYERTRE

SEQ ID NO: 182962 - protein, 441 aa, unidentified
MKGGPFMAYQPFKVCKFNAGGLDIHKNKIQACVQLTDRNTLEVTQHTKVFSTLNNDLEAMCNWLKSYGCNDVAMESTGKYWVPVANILEDNGIKYKLCHPKYVKAVAAHKTDKIDAGFIASLNACDMCGPGSVVLPKDERHRRYLARRYWKLGNSITAEKNRYQNCLSVSNIGIASVFSDPFGKSAQAVMDEVLHNDTVQDEKILSLVSKNCKNRDKVIDAVRGSKVTPDDKFLIGDIKDHINELKKHRDSVLTEILTSLKDKIDTIVRLTQIPGIEIISAILIICEIGLNMSFWKDARQFTSWAGVTPRNNESAGKKKSTRITKAGLYLKPVLVQCALAAIKEKKGYFGIKYRRIKKRRGHKKAIIAICRMMLICIYHMIRDDSDFRPHDYDELMNPKPKKSKVSIPVDDAVALLTEKGYTVICPKTPPRNPEILPSTAA

SEQ ID NO: 182963 - protein, 419 aa, unidentified
MKRERNAREAEGERYIGLDVHKHYITVGGMNAQQEIVLRPRDVEMERFKTWAESNLRKADEVVLEATTNTWDVYDTIAPLVKRVVVAHSAEVKQIANSRVKTDNQDVIRLIRLLIADIVPEVWVPPVEVRELRAIISYRWRLVKMSTAIQNRMHSLLHRHNLQAPQGKIDTGENREWWEKLKLSELETLRLKQEIKTLRLVREHIVEVERELGGLSNSERWGDQAVYLMQIPGVGIIVTMTILSAIGDIQRFESPKKLVGYAGLGAGVHDSGQKHRGKGITKFGRKELRWALVEASWQAIRSNPRWRAEYDELCKRKHQNQAIVVIAHKLLVTLWYLLNRQEAHKQSSEEDLAYKMLTWAWHMDKTALNGMSNQQFAKYGLIRLGKGEELTRIVRGGLPRRIAPKEEVLAMKPELCLRP

SEQ ID NO: 182964 - protein, 463 aa, unidentified
MARKARRASQSQEVAPPFQEVHPHAAGIDVGATSHFVAVPKDCDKQPVREFPAYTGDLHRLADWLKACGVDTVAMESTGVYWIPLYEVLENRGFKMFLVSPKHLKGVPGRKSDVADCQWLQELHTFGLLSGAFRPEDQEVVLRSYMRQRAMLVGYASKHIQHMQKALTQMNVLVHHAVSDITGATGMRIIRAILEGERDPRKLAGLRDAGCKKDEATMAKALEGNWREEHLFALRQAVELYETYREKIAACDARILAQVQTLEDRSEGSDSTSPAPQDRTPRKNELAFDAAKEVYRMTGVDLTKITAIGAHTALEVVSEMGTDVAHWPTEKHFTSWLGLAPHNRISGGKLLRSRRTVPNANRIAQALRVAAHTLHHSHSYLGAYYRRLAARIGKTKAIQATARKLAVMIYRALKYGTDHVERGEAYYERTYQDRLLKSLKHRAGDLGYRLVREERTPIQPKAA

SEQ ID NO: 182965 - protein, 413 aa, unidentified
MEWIACVGIDWGDREHVYVLQTRAGERREGKVGSAPEELHGWVRSLREQFPEGNIVMAVEQGRGSLIDALIAYDFITLIPINPRASKAYRDSRRLSGASTDPADAELICEFALKHLDELRVWRADDAITRKLRTLTETRRRLVDQRTALAQQLTAVLKGYFPQALQWFSDVSARVLWSVLHLWPTLSDLQGAEPEQLTGMMKAHRLRRVPRRVEQLMAKLREAVSLTTDSAIIEPASMHAQALAKMLEVLDEQIDRYERTIEQAWAAHPDRHIFDSLPGAGPALAPRLAVAFGSDRSRYERAFELQCYSGIAPVTEQSGQSTWIRARWQYPKFLHQSFHEFAASSLPHCEWANASYHQQRKRGASHHTAIRTVAFQWIRIIFRLWKDHSSYDDAVYLQALRSKNSPLCSSLAA

SEQ ID NO: 182966 - protein, 422 aa, unidentified
MLGVGLDWAEDHHDVALGLPGKGVIEQFRIEHGPDGVARLVARCLALETDPAEIRVVLETRHGLLVEALVDAGFTVLPVNPDLVARRRGPAKKKDDAEDARICCLLALDQFVELRKLIPHGQVGAELRAIARDDDRAARDERRLGNRLRADLLAVFPAAVGIADGDLGAAVFLRLIERWPSQTDLAAAGRDAVEALARAHRHGWPDRFADRVMAALATPSLPVRPELARAKAGSIRLAAAQLLLLREQRRTWHRRMGELLLGGPRHGRSQQPKDPKPGNAFPGGEIYLSMPGLGDRLAARVAGEIGEHVEQFSTPNALQCYAGTAPVTRRSGRSEFVIARRLAYNRYLGNAVQQWAFCSLQQSGWARAFYDSRIAKGKNHHAALRALGNRWLEILWHCLRLGVRYDETIHTAHRAHALKQAA

SEQ ID NO: 182967 - protein, 316 aa, unidentified
MQMTLNLGADVDSRFVVITCAARSFAPQRIANERAALRAWLRGMPRGSRLGLESTGGYHELLADLAHAAGLVVFVLNPRDLRRYAQAIGQRGKTDRIDAEMIARYVARERAELHAYVPPSKAQRALTRLVKRRAKLVTKKQMLTQSLRGVPGLTQDVKRVQRDLERLIRQVEALMQRALQQLPAAQQAAQQIATVPGFGPLGSTCLGHALTRLPYANSDAVVAATGFDPQPDDSGRRRGRRRLSKHGPSELRHLLFACAMAATRTAFWQPYYLAQRAKGLSSTAAIVILARKMLRVAFALTKHNQPFDPTLVGSTA

SEQ ID NO: 182968 - protein, 353 aa, unidentified
MNNIKYVGMDVHKSITVIVVLNELGQFESRSQIKTKGENICDFFRGISGKVEVVFEEGTHSAWLYKLLKPLVASVTVCDPRHNKLIEDGNKSDDEDAETLAQLLRLGAVKAIYKGDDQHQQLKEICRAYDNLIEDSTRVQNRLKAIYRGRGISCSGHDLYRADQRSDWLAKLSEDAARFRAESLLEQLESLSQLRKQAKQRLLAQARTHADYRILIKLPGFGPVRVAQLIAEVGTPHRFRTKRQFWPYCGYAVVTRSSADYQIVEGKIVKQRKKVSTRGLNHNHNPQLKQVFKGAALTALRHEAIRTYYQRLIDHGTRPELARVSIARKLASIALTVWQRREEFDVKKAFAQD

SEQ ID NO: 182969 - protein, 338 aa, unidentified
MIVIGVDVHKQSLTAVAVDEAGRMLDERTVAGANDALVAWASSVSGERLWALEDCRQLTRALERELLAAGEQLVRVPPKLMAPERRAGRARGKSDPIDALAVARAALREPRLDRPRPGEPLFRELKLLVDHRDDLVDERRRGQQRLRWHLHQLDPSLLVPAGALDRTVQLDRIGRWLSRRQPEAQVRVARELVARCRSLTRTILELDRELEQRIKQTAPALLELPGCGAITAAKLLAEIGPIERFETDAQLARHSGVAPLEASSGRVRRHRLDRGGNRQLNCALHRIAITQARVHPPGRAYLERKQAEGKSRREALRCLKRQLARVVFNTLKASPVLT

SEQ ID NO: 182970 - protein, 402 aa, unidentified
MAYDFVIGVDVGKYFHHACVLDPQGRQVLSKRINQHESSLRKLFGQFIADNASVLVIVDQPNNIGRLTVTVAQDMGADVRYLPGLAMRQLSRIHVGNSKTDVRDAYVIAHAGLNLPDALRSVDRVEEVFIQLKVLNGIDEDLARAYTRLINQMRSALVGTYPAFEHVLRGQMIHRKWILHLLAKYGGPTKIRRIGRTRLAAFARSHKARNPEPVIDAMLAAIHAQTVSIAGAEYAELGVAMSAKDALAKLENRKEIEAQVLKLIQDIPQTEILLSMPGIGPRSAAQILMTAGDMSDFPDAAHLASYAGLSPRTNQSGTSIMSNSPNRAGNKKLKNALWQSSFASIRFHERSRQFYERKRKEGKRHNAAVVALARRRLNVLFAMMRSGELYRDISTVREAAAA

SEQ ID NO: 182971 - protein, 391 aa, unidentified
MFLLGIDIAKLNHVASCIDSSTNEVVFSNFKFKNDFKGFSALLNKIKSFDAKNLIIGLESTSHYGENLINFLFIHDFKVALINPLQTSYLRKANIRDAKNDNLDSLNIAKSLVFTKLNFVSKKNIECFSLKKLTRFRSNLIKQRSKAKIQLTSLLDLLFPELQYLFKSKIHSKAIYSLLKKYPSAEEIAALKDDEISNLLYASSKGHFKKEKSIELKSLAKTTVGIKDTSISLHLIQLIELIELYTKQIKDIEIKITDIVNNLDTTLLSVPGISVIACAIILGETNNFENFSSSKKLLAFAGLDPKIRQSGNFNASSCRMSKKGSPYLRYALIFTAWNIVRHSEKFNKYYSLKRSQGKSHYNALGHVAHKLVRILFTLIKKNISYQEEKLE

SEQ ID NO: 182972 - protein, 457 aa, unidentified
MARKGQRTKGMEKAHPFKGMSRVNPQAAGMDIGAVEIVVCVSGDSETQMVRAFGNYTVDLDNIGDWLESYEVKTVAMESTGVYWIPIFEALESRGFECLLISSRSMRRVAGRKSDITDAQWIQTLHSYGLLESSFRPQADLIGLRTLLRHRSQLIEHRSPHIQHMQKALLQMNVQLSQAVSDITGITGLKIISAILNGERSPEKLADLREPGCKKSAEEIGKALTGTWREEHLFVLKQSMEMYAFYTEQIFVCDEEIERTYGQLRADRETDEVQPLSKRKRNSHSKNKPANSENIRQHLKRISGVDLSVVDGFGVSLAQTVIMECGTDMSKFPSEKHFCSWLGLAPKHEISGGKVLKNKTLKTKNRAGQAFRMAAHSVKQADCVFGVMYRRMKARLGPAQATVATAHALARVVYRMLKYQVEYETISVEEYEQKYKEQQLKYMKKKAAKLGYHLVPA

SEQ ID NO: 182973 - protein, 315 aa, unidentified
MTQKHKILSIGIDVAKAHLDVYCMNDQSAMRFNNDGGGIARLIKWALARGKQPLIVLEPSGGYERDLEREIQSRNDILLAKVNAKYIRDFARAKGRLAKTDAIDAQVIAEYGMLMSPRTSIPITADQNALKDLVIRRRQVTKMHAEENNRLEKAKSSMAVDSIQAMILILKQEIKALDNAIRALIKSNKTFHDAYKMLQEMCGIGPITAASLLADLPELGRIGNKAISSLVGVAPHNVDSGTMRGQRCIQGGRGAVRQALYLATLTATRYDGVIRDFYLSMIARGKKPKVALIACIRKMIIILNARMRDFYQIAS

SEQ ID NO: 182974 - protein, 533 aa, unidentified
MSVLRFMGSPLFLLDLLTVHEPGRVWPRFDAGSSVAVIVLWCLVPGGKTGSGGGLLRILVRPEWVFPLGRFVFSRTPPGFRRWGQTMTTPSLPVLDPLAAFVDVGSEQMYVSIAGGPPEVFGTVTDQLHRLRDWLQERKVKSVAMEATGVYWLPLYGVLEAAGFKVVMVNGKQTRNLPGRKTDMKDCQWGATLHAHGLLQAGFVPPAQIRRLQDYLRLRADHLVSAAANVQHQQKALERMNVKLHDVISSLVGTSGSKVIAAILAGERNPDRLLALCDVQIQKKKAERVKESLRGTWAEEHLFALRQAVENWEHYQRQIAACDQRIEAVLREINGPDQPANPPPPIASSKRAGANAPEIDDLHSLLVKLCGGKDLTVLPAHTDYSLLQLIGEVGTDLTQWATEKHFTAWAGLAPGSHQSGKRKGSVRRKRNRAGRLFCVMARSLARSKHIALGGFYRRMAARRGGLVANIALARKLALLFWRVMVKGLSFAEAGLKAYEEQVLETKRRALCRLAKQLGRVVLPSLAEMQTKPA

SEQ ID NO: 182975 - protein, 335 aa, unidentified
MDRQYVGIDFHRRRSVIVRKDSAGKKLSSVRVPNDAAAIAAVVAEAGPGPEVVIEATYGWYWIVDWLQEQGATVHLANPSGLNWGTRRVKNDERDAIDLIDMLRLGRLPEAWIAPPATRELRELVRYRAKLVALRSGLKAQVHAVMAKEGVLPSVTDMFCKAGNVQLDEMALGDAYTIRVESLRDLIEVYDREVTMLEGRIRQRLRGHRGYRAIQAINGIGPTMAAILVAEIGDVTRFRSAPALCSWAGLTPKHKESDTTVHRGQLTKQGSRLVRWAVIEGTVRYHGGGKLAADFHRIAERRGKNKATVAIARKVLTLVYYGLRDGEIRCLAKTA

SEQ ID NO: 182976 - protein, 387 aa, unidentified
MVENDQSNTCEGKNLREDGFKPILYIGMDVHKDTITMSAFAENSNELIFQQKIKNDPKKLRKIFKKLSKEYTLMICYEAGGCGFVLARMITEWGYQCIVIAPSLVPKKPGDKIKTDRRDSIKLARMLRSGDLEKVEIPSEERESHRAVLRARYDVSNAVAKVKDKIVKFLLVRGYTFRDGSNFTQKYNKWLKGLELSTWDQYTLNTYLNRLIFLQAQQKDLDEKIEELSKLDPYASLLPLETMKGLGLYSTMLLLTEIGDFVRFSKPTQMMKFVGLVPSENTSGPNRKQGPITKAGNTRCRKILIEAAWHYARGGGLSKTMAQQLTQVPAEIAQIIIKANKRLSKKYRRLIKVRKSPQVAVVAVARELVGFIWAIVTELQMNKALAM

SEQ ID NO: 182977 - protein, 339 aa, unidentified
MNHYAGLDVSLEKTAICILNEDGIVIRELVAASDPAAIAQALYQVAPCFRRVGLEAGPLAPWLYAGLADLGLPAICIEVRQMRAFAKASPVKTDKRDARLIAQAMRTGLFKATHVKTDASQRLRLLLRHRQSMMRRNRDLLNTIRGTLKAFGYRIGAGKSSLFARRVREELDDAELLGMTEPLLKAYEQGLVMMADLDAQLLSAARADDICRLLMSVPGVGAMTALAFRTGVDIASRFEKSQTVGAIFGLTPRIYASGEVEQRGRITKCGDGMVRWLLYEAANSVLTRCKSQNWLRDWALNVARRRGMRKARVALARRLAVVMHRMWINRTPFSALRPV

SEQ ID NO: 182978 - protein, 401 aa, unidentified
MPFHGGLDWGGTSHAVCIIDGAGQVVVRVEARHDAAGLADLVARLERVAKPAELPIAIERPSGLIVDALVEAGHPVIPIHPNVVKACRPRYRAAGGKSDPGDAYMLADILRTDGHRFRPLMPASDDIRALRALVRGRDDLVVQRVALANQLRSLLEGFWPGAAAIFAAIDSPIALAFVGRYPTPDSAGRLGEKRMASFMAQHAYCGRRSPAELLARLRAAPIGLASDTEAEAKGEVARVLVAVLDRLVPEIAKLSSRIEHAVAELPDGRIVMSFPRAGRICAAQILAELGDVRERFPTEDQLAAEAGVCPVTHASGKSRGVVFRWACNKNLRLAVTCFADNSRHASAWAAAIYRKARNRGCKHPHAVRILARAWVRILWRAWQDGTTYNPEQHRGAMKIAP

SEQ ID NO: 182979 - protein, 483 aa, unidentified
MQQVELGQGRFDIASKKKKKKVQEKERIMSIRIIGIDLGVSAKHKAMILDPASNEFIGKKVIFRARPGELERLLQRARAGAPEDVELVAIMEATGMAWYPVGVYLHRQGVTVYRVNGQKTKDLRQVLWKHAASDRIDSRVLAHLYQLAPDRLTAWWPVTGEQLALQRACRAYAYWREQDVALQNRLQAYDQWAWDGLGKVVPTVAQRWMRQHWYNPWRVQAAGAAHLVAVWQAASPQQPADTDWIARWLARAQEMTTLYGCEAMVGYEDLQAIMSHSLHLLDQYKQEQERLTREKIEPLYRRLYPDCPLTTIYGIGLQSAAIYRAFIQDIDRFAMVEKFRLWCGIVPGSKQSGEAEAKGLHITQAGPNLVKATLYLNAEVARQWDVQLAAIYHKQMVDYGKHHIQAVCACASHLANRIYALLKQNRPYQLRDLAGKPITVEQSRELCKQFRVPDEVRQRHNKRFRRARAEQKAEAQAQRQQRR

SEQ ID NO: 182980 - protein, 353 aa, unidentified
MEYIAFDAHKHYTLASVARPDGGLVREQRIPHASGALQQFLQRCERGSPVAVETVGNWYWIIDEIEAAGCVPQLVHARKAKLMMGMINKTDKLDARGLNRLQRAGTLPTVWIPPGELRDQRDLPRTRMVLVRQRTQLKNRIHATLAKYALHDREVSDLFGARGRALLRQRLALLPPHTAYATQHLLEQVEALDRHVRDFEHRIQAVFKLTPAIQLLMTLPGVGLVLAVVIALEVGDVARFATAEKLAAYAGSTPRVHASGGKTRFGRLRPDVNRYLKWAFVEAANAICLNRGRAPRRHVSRLYERVARRKGHPKAIGAVARHLAEATYWILSKQEPYREPKASAVSPTGDQRG

SEQ ID NO: 182981 - protein, 456 aa, unidentified
MKIPQSTIRLLTGRLVKILLNREVSTMKSNTQNAKIEAITEKTLILGIDVGSETHYARAFDYRGIEYSKKPFKFSNTEAGFVTFKEWILDLKERHEKDKVVPGMEPTGHYWFNLGKFLQDNEMKPVLVNPHHVKKSKELDDNNPTKNDRKDPKVIAGLVREGRYMIPYLPDGVYADLRTASNIRFQLQAELTRIQNRISRWFNIYFPEYKTVYGKPDAKSGMLILKEAPLPEDILTLGIDGVDQIWRDAKMRAVGKARAKTLIEAAEHSVGSKEGAVSARMEIRMLLEDYESRNMRLQEVMVLIEELVKQIPMAEKLLEIKGVGIKTVSGFLAEVGDISRFNSPKELQKLAGLALVENSSGKHKGETTISRRGRKRLRYLLFEVAMSLVAKNPEFRELHNYYTTRRLNPLKKMQSLMAIAAKLIRVFFAMLTKGVDYDPKKMVSDIKRPAVYLQAA

SEQ ID NO: 182982 - protein, 370 aa, unidentified
MKKNNTRTQSPKRAAARNTGPITIGLDLGDKTSRYSVVGDHGELVSEGSVATTRKAMAQRFGGLKRCRIAMEVGTHSPWLSRMLTGLGFEVIVANARQVQLISASSRKNDRMDAHLLARLARVDPELLRPIRHRSERAQANLMTIRVRAELVEARTRLVNAARGFTKAMGERLPACDTDSLGMEKLEALPPALREGLQPLLEQIEALTAQIKKLEGKIEQIARIEYPETQLLTQVHGVGTLIALTFVLTLEDRERFQKSRDVGCYVGLRPKQSESGQSQPQLRITKEGDRYLRTLLVQGAHLILNRRGPDTDLKRWGLKLAGRGGKNAKKRAIVAVARKLAVLLHRLWVCGEVYEPLRNSRPAPASQHAA

SEQ ID NO: 182983 - protein, 399 aa, unidentified
MLAVGIDISKSKSVAAILNQDGSMHTSPFEFHHTQPELDAFIKYILNSKQSATILMENTGHYHYPVLKAFQEAGLPVCMVNAYQIKKFGDMDLRKAKTDKKDAVRIARYALEKSYSLVPYTSMEQKYEDLRFLARQYNQRMLTLKTNKVFLLNLLDETMPGITNILPLTTRTPETSLSVLFINRFKSYDRIKKMGKSRFLDAFEKIARKSRNRQTKTYGLAIYEAALRNITTRGENEYTLAAQDQCLELVCESQKAADSIILKMKTLAETLPEYAVLRSMAGVGNRLGPLILAEIGDIRRFHSGKALNAYAGNDAPPYQSGTFESHNRHISKRGNAALRKYCFEVMQALKLTRPQDDPVYLFLLKKEQEGNPYNVAKMAGVNKFLRIYYARAMETLKQQ

SEQ ID NO: 182984 - protein, 351 aa, unidentified
MQIIGVDLHTRQQAVAMLNVETGEIVEKTLPHEGDSVREFYSTLAGPTRVGIEATGSMQWFLALMEELGIDCEVGHPAKIRAAEPRKQKHDRRDAALVLQLLVENRFPSIWMPSSEQRDVRSLILYRHQWVRIRTRVQNALQAIALSHGLRRGSSLWSKAGQQTIASLSLTRYTAERRTALQSLYQQLEQQIADLNQKVEELAWQRPQARRLMTHPGVGPITALATETFLGEPKRFVDGKAVASYVGLIPSEHSSGGRQRLGGLSKQGNPLLRFLWCEAVGHAVRKDAELQRFYQHKLVQKGLGKAKVAAARKLGIRLWILLRDQIDYQEFCRRGQLRQKHGGAHAGMPAR

SEQ ID NO: 182985 - protein, 422 aa, unidentified
MAYRIAGVDVHKKMLAVAMADVEVEGEWRFGTSPTQLRAVAEWFIERDVEEVVMESTAQYWRPVWDALEREWQPVRQARAEAGPTSGALHLAQAQSNKGPRGRKRDFPDAERLVRRLVAHELTLSFVPDVTQRLWRTVTRRKYQVTRNRVQLQNRLECLLEEMHIKLSSLVADLLGPSARRMLRAVADGATDPAAVAALGSLRLRATPDQLRDALGAATELHPVYRRLLAMILDELTGIEAQIHQLDAELAQLLRAHQEVVERLAAVPGLGVDSAQQIIAEVGPSAATFATAKRLASWVGTCPGHDESAGINHSHRAPNGNRQMRRLLNQAANAAVKAKGSIFELVYRRLVVRLGHAQAIGAIAHRLCRLVWKILHDAVVYEERGPAVTRHRAQRRAAKMIRELRSLGYRVEPGPVPASTLA

SEQ ID NO: 182986 - protein, 338 aa, unidentified
MKLYGGIDLHSNNVVIVVLDEQGVIKARKRINNELHQILLFLSSFKSNLVGLVVESTFNWYWLVDGLMEANHQVHLANTTAIQQYSGLKHVDDNSDAQWLAEMLRLGILPEGYIYPKGQRAARDLMRKRMQLVQQSTSNLLSIQGLYQRHLSYKLSNNKIKQLSHEQVARDFSVPNVVLAVNSNLAVMHCLKGHIKGIEKTLLAQVKLAPEFQRLTSMDGIGDILALTIMLETGDMKRFKKVGDYASYCRCIKGAKYSNGKKKGNTNAKNGNRYLAWATVEAANFAIRYNQIVKRYYQRKAAKTNQIVAIKTVAHKLARACFYVLRDQVPFEVEKAFC

SEQ ID NO: 182987 - protein, 347 aa, unidentified
MVAVMIGIDPHKGSHTAVAISPAEEGLGELRVRASASQAERLLAWAAGWPRRTWAIEGAAGLGHLLAQQLLAAGERVVDVQPKLGARVRLLATGAVNKNDPNDARSVAVAALRSPSPRQIQPDDHAAVLKVWAKRHRDLGRTRTQVVCRLHAVLCELVPGGVSKAITANHAARLLGSITPAGAVEAARCELAAALLDDLRRIDAQLGDAKAKLTTAVRASGTSLTEVFGVGPVVAATVIGAVRNVSRFPDRDHFAAYNGTAPIEVSSGPRKIYRLSRRGNRRLNHAIHMAAVTQIRYHHSPGRAYYDRKLAEGKTGKEALRSLKRQISDAIFARLQADARRAAAQPR

SEQ ID NO: 182988 - protein, 331 aa, unidentified
MNYSHFVGLDVGKKTFDASLMSADEKELSHKSFDNTSEGIQSLLDWIAGYHLSLSKLLFCAENMGSYVTELSVSSASMGFSLALVCPLTIKKSIGLQRGKNDRIDAKRIANYAVLHYRKLELYKLPDKDLVRLRGWIIIRDNLVKQKVSSIKLLETFSWMAKLADVTESISFLEEQLKSIKERILEVEEDMEQLIAASTSLYTNYLLLRSIKGIGIINAIVLLCVTDNFQRFDNPRKFACYCGVAPFEHTSGISIRGKTQTSSLANKEVKVYLTRAAITAISWDPQMKAYYKRKIAEGKHKASVINAVRAKIIARSFAVIRRQTPFVTLAV

SEQ ID NO: 182989 - protein, 343 aa, unidentified
MKHTTFAVDIAKNVFEIAVSHEPGIVREYHRVTRAKFVEFFAKQESETVVMEACSSGHFWARELEKLGHRALLLPPHAVRPYVQRNKTDRADSKGLLEASRNKDIRPVPVKTIPQHTVTALHRMRSTWLETRTSRINTLRGLLRELGIFIPLGASLVVPRVSELVEDPGSGIPGALRASLHEMCLEIRELEARMRQVERQLEALARQMPVVVRLRQIPGIGLLTATALVAFVGDVRRFRSGRQFASYLGLTPREHSTGSLRRLGRISKRGDSYIRMLLTHGARSLLWGAKRMAPPDRLRAWGLEVQRRRGHNKAAIAVANKLARIAWVVWRRDVNFVSQPQAA

SEQ ID NO: 182990 - protein, 349 aa, unidentified
MMVTIGIDPHKQTHTGVAVNPLGVQIAQRQVAARRDGFGQLLEWGRKLDAERTWVIEDVRHVSGSLERFLIDRGETVVRLPPRLMAKAREGVRERGKSDPIDALAIARAALREGVDTLPTAKLAGVELEIRLLALHRERLVDSRTRLINELRWQLHDLWPEWDIPKRVLIQPGWQTKIAQRLRRTGITVQVQIARDMITRVRELTRTITQLYEQLADLVKQVAPQLLAEKGLGVLIAAKLIGEIAGIDRFTSDAQLARISGCAPIPVSSGRTDRHRLDPGGNRQLNHAIHMLAMTKILHDPRTAVYLAKQRSNGKTSKEAIRSLKRHLVRRVFHLLRDPNSVPTTICLT

SEQ ID NO: 182991 - protein, 474 aa, unidentified
MAARRLLTRGPNPLEPPEAQPQTVPVGKRTALKVQEKVAPRRAGIRATCRSCSAAARARSEGGELVRYYLGVDWADQTHAVWVVDERGTKLTARAVPHTAEGLSEWGRELDEWRAQGIELWAAIERPEGRVVDFLLDHGVVVYPVNPKALDRARDRFRQSGAKDDPFDARVLADFLRTDHAHLHALQPSSEAAQELKLLTEDYHRQVRQQTRLVNQLTITLKAYYPRALEVAESTTALAREFLKAYPTPEAVTALTKRQWQRWARAHHLSETRTRALWEVLQQPQLPVPAHVVRPKARLMRTLVAELAAVVAAVGEYREAIEDFFASMPTAQWVRTLPIGDHGITAPTLWARLGDAPERWESFRHLQAQAGAVPLTKRSGKQRVVQFRFACDKALRYVVDHVAFLSLRSCEWARAYYDQQRARGHSHRQALRALGAKWLKIIFVMWQRQASYDDQYHLASMARQQLRQPQKKIA

SEQ ID NO: 182992 - protein, 335 aa, unidentified
MKSYKRVIGIDISNERLDIADSNAKIAHEVDYAIDAIKSKILKFIKKPSETLVVCEATGGLEYTLVDVLHDAKIDVVVANPARIRDFAKGHGFLEKSDKIDARVLQLYGQQVTVSLAKPRTLQERNFIALTRRRTQLLQLISQESNRLRQSNDPQVKAFVEEMLKSLKTQMKTVDSSIEKALEEQAKTNPSIDIIRSVPGVGPVMTATLVAELPELGTISRTKIAKLVGVAPMIKQSGKSDERRRARGGRGGVRRVLYMATLAATQKNEVIKKRYVKLVASRKSKKVALVACMRTLLTILNDMVRHQTKWGEKKKSVAGKVASNLPAPAHVLDKS

SEQ ID NO: 182993 - protein, 405 aa, unidentified
MDARPSAGPRHAGVDWSWDRQAVCVIDDDGAIVERFEVEHRARALIAMGDRLLRWDVRRVAIERPDGPVVRSLLEAGLEVVVISPRQVRAYRLRHGTAGNKDDRFDSYVLADALRTDGHRMGSLVPDREDTRALRALVRARKDLIGHRIAFANQLLANLQHGFPGAIGLFAQLDSPISLTFLERFPTVDKVSWLSERRLEAWLRSVGYAGRRSSTELMGHLREAPEGLRGEVGRGHGIVTVQLVGSLREIRARIEELDHRIAEALALHPDGEIFRSLPRAGVNRAALLLAEMGDCRGRYPDESALAAAAGVAPSTRASGKRRSVSFRRGCDKQLRAALVDFAQDSVQASAWARDIYDRARARGCRHPHAVRVVARAWVRVIWRCWTDGVPYDPSVHGGVIRLAAA

SEQ ID NO: 182994 - protein, 298 aa, unidentified
MREVSIIGVDLAKNAFQAHGAAADGSVVFRKKLSRPQFARFMADHPSCLVAMEACASAHHWAREMSRHGHEVRLIAPHYVKPFIKRQKNDAADAEAIVEAALRPTMRFMEPKSADQQGRAVAFRTREQLVKQRTEAVNALRSHLYEFGHVAPVGIGYVPRLERVIADPDFDILDLARDICRMLLEQIAHLTDRINVLKAMIAAMSNEAEMPRQLQTMPGVGPIIALAVETFAPPMDQFRRGRDFSAWLGLVPRQHSTGRKQKLGKTSKMGQRDIRRLLIIGATAVIRWASRRGAPKGS

SEQ ID NO: 182995 - protein, 364 aa, unidentified
MDAPRRHLCAKVTGVELPPKEASVKQATTIGLDIAKHVFQVHGADGAGHVLFRKRITRVKLLGFLAAQTRCVVAMEACAGAHYWAREIAKLGHHVRLIAPVYVKPFIKRQKNDAADAEAICEAAQRPNMRFVPVKTEEQQANGIVFRARDLLVRQRTQCVNALRGHLLEYGYVFPKGITHVETLVALVEDLQSSLPNSVRIILKLLVDTFTALEAQIAVLDAEINRRSKSDPAARRLMTIPGVGPIASTAITALVPAAEGVPAGRDFAAWLGLTPLQKSTGGKQKLGAVSKRGERTIRRLLIIGASAVVQQASRRGAPKGSWLAQMLARKPKMLVTVALANKMARVIWALLVKGGTYSAPVAAA

SEQ ID NO: 182996 - protein, 334 aa, unidentified
MNYQFIIGMDISKHSFDVAMFSANNAENVYHKSFTNDESGFNELLKFANEAVTGFNVAESLFCMEATGLYCNALLDFFKNQQANVWVENPVQIKRSTGIKRGKTDKVDSISIAKYALKNAELARLWKPSSVVLEKIKNLATLRERMVITQKRLLVPIEELRSAGQVKMADLLYKAIKKSINAIESDLKNIEVKIMECLKEDSSLSHLFLLITSVVGIGFVTAINLLIHTQGFNTMCDSRKLACYCGVAPFPHQSGISIKGKTRVSNMANKKLKTNLHLAALTAIKCDPELKAYYERKVLEGKSKMSVINAVRFKLLARVVAVVNKNEEYVKKVA

SEQ ID NO: 182997 - protein, 401 aa, unidentified
MRQIIGIDVAKHSHVAASRFEDGQVHGRPFSFANDESGFRSLLTRFRELGAAPDNSLVALESTGHYWLALWEFLDAHGFEVAVINPVLTDAFRKADTLRKTKTDQIDALVIAEYARFKRLGPSRISPEAAEGLKQLTRYRHHLVTERTALKNRLTAVADRIFPELASLFSDKHSATARAIMAKYGSAAKVAETDIRTLAKTVREASRGHHGREKAEQVKAAARKSVGATFAADALAFEASRIAALLGHLDEEVGALDKEIARLIDPEVSELLQSIPGIGPVCAATIAAEVGDPDRFESPRKLVAYSGMDAAKYQSGKFDGDGQHMSKRGSAPLRDALMTAADRARMHDPYFGDYYDSLRARGKHHYVAVSACGRKLCGVILAVLRERRPYESRPSVQSGTE

SEQ ID NO: 182998 - protein, 479 aa, unidentified
MNGPFPVPPVPRLSWTSPARVRRRSPTLAVADAPKAERTPPREGSCISSPGSRRPAPVRAARTMNTDWTQHTYFAALDWASDHHDVIVLDRHGAVQAEFRFAHTADGWAEFTQKMQPFTGAPITLETSSGPAVDQLLQRGWAVYPVAPTAAARYRERKVPSGTKTDRHDTWALADALRTDGHAWRPLRPQDEATATLRALCRDEIALIEQRTALVNQLQAALREYYPAALAVFDDWTAPHAWALVLQFPTPAQLQTAGKRKWEKFLHTQHLWRPQTVEERLKLFATAQALPASAAVTTAKSLLALSLVKVLLTLQAQLDEYRRRITEAFHQHPDHDVFGSLPGAKATLGPRLLGEIGSVRQEYPDADALMCQAGVSPVSYQSGQVAKCRLRRACNKVLRATVHLWANSSRLTCTWAEAYYQHKRAEGHSHASALRCLGKRWLKILWRLWQSGHAYDEAKYLAQLQHRHSLTWSKLQPTL

SEQ ID NO: 182999 - protein, 397 aa, unidentified
MYIVGIDIAKRKHEAAVIDGEGSVIIKPFSFTNNCSGYNRLLAMLAKAKLPLDEVSFAMEATGHYWLALFTRLQKEGFRVQVINPVQTNSIRSFYIRQAKTDPRDALLIAEVIRFGHFSESTLHPENIYELRELCRGRHAIVSMQADVKRKVVALLDQVFPEYETAFTNLFGDTSMAILQTCPTPKELSEMPLEELCHLIEVSSHKRFRMAKAQELQELARNSFGFAMAGDVFSTMIRLYAKHLDFLKQQVREMDRKIAEIMETLDTPITTITGIGPTLGAYILSEIGDISRFPSAAKLAAYAGIDPTMRQSGEYNGVRNRMSKRGSPYLRHAIWLAASSAVLHDPALKLYFQKKRDEGKPYMASVGHACRKMVSIIYAVMRDNKAYTPYIPNEISA

SEQ ID NO: 183000 - protein, 407 aa, unidentified
MIFAGVDWAEAHHDVHVQDENGKRLGGGRLPGGVEGIARFHELAARHAPEPADVVIGIGTGRGLFAAALMAAGYQVFAVNPMSVSRYRDRHAVSGAKSGPGDAKVLADLVRTDRHNHRPAAGDSDLAEAAGVLARAHQSMIWSRRRQANMLRSALREFYPAALAAFDDLTSGDAVEVLRAAPAPVLGAALSRPKIAAALRRGGRQRGIDARAGQIQAALRAPQPQPPGVIAAAMGAPVSASVAVIAGMTTQIAALERQLAADFEAHPDAVVVRSLPGPGTVPGARVPGEFGDAPDRYAGVKSRRNYAGTSPITRASGTRRVVLARHARNKRLADAIYLWAFAALSASPGARAFYDTRRAAGDTHHQALRALGNRLVGILHGCLASHASYSETTAWAHRPDAAKLAAA

SEQ ID NO: 183001 - protein, 391 aa, unidentified
MTATIRPNESTGNSARLYMALELSQKRWHLAFTIGVARRPRLRAVAARDLGALTQEVVAANRRFGLAPDAPVVSCYEAGRDGFWLHRWLVGHGIENHVVDSSSIEVPRRQRRAKTDRIDAEKLVALLVRAMSGERHVWRLVQVPSVAAEDARHWTRELDAWKGEQKRLTNRLRGLLATQGIAGRIPRTFGDDLALLRRADTGDPLGEQLRERLRREWEHLQFVRGQIRGLERARRAYVDQARAEGSVAVIHHLTRLAGLAETSATTLSLEMFGWRAFANRRQVGGFLGITGTPYDSGERRRDQGISKAGNARLRQLLIQLAWVWLRCQPESTLSRWYQQRFAGSPRQRRLGIVALARRLAIALWRYVTWGEVPEGAVLKPAVPGAPALRAS

SEQ ID NO: 183002 - protein, 412 aa, unidentified
MELLHRRCCGLDVHKETVVACLRLVSDGKVTTEVRTFQTTTADLLRLSEWLAANECTHVAMEATGVYWKPVWRILDDGEFALVLANAAHVKNVPGRKTDVNDAMWLAELLAHGLIRASFVPDAQTQEMRNLLRTRKQLVREQSSHVLRVQKTLEDANIKLDSVLTDLMGKSGRAIIEALIAGETNPVKLAGLADRRVKASSEEFREALRGHVTKHHRFLLRLHLNQIDALDAAMATLDAQVEANLGPFRTAVELIGSIPGIKNLGAHVIVSEIGIDMSRFPSAAHLISWACICPRNDESAGKRRSNRVRKGGTWLKTTLVQCAWAAVKKKDSYLQAQFHRIKARRGPKKAIMAVVASILTAIYHMLKDGTMYKDLRRNHFDRCSSDQQKNRLVKRLVDLGYAVEIKPLAATA

SEQ ID NO: 183003 - protein, 356 aa, unidentified
MAVYVGIDVHKKYCQAALMSEQGQIMHELRFDNNTQGASNLVNLAKSVDPHIKAVLEPSANFWIRIYDRLEDEGVDVKLSNPLRTKAIAEARIKTDRIDAKTLAYLLRGDLVAESYVPTRKNCERRALTRHRASLIQMRVDIKNRIHALLDKYELTHNYTDLFGKQGMEWLRSLQLPTPDHEILQSSLKVVETLNEQIQSMDIQIAKDATSEEKAKLLMTMPGVDYYAAMVLLSEIGDIHRFSSDEKLVSWVGLAPQVHQSGDSNWTGHITRKGSKRARWILGQCAQSARQHDPRMREFYERIEKKHGSQKAIVAVARKMLAIMYVMLIRNEPYRGENPELTERKHKRLDTLANSA

SEQ ID NO: 183004 - protein, 342 aa, unidentified
MVSAIGIDTHKATLVACAIDELGTAVDEAQFRNDPAGHHELAAWVGRLAPGATIGIEGSSTFGAALARMLVAAGLAVRDVPPHLTRHGRSATRRPGKSDPGDALAIARVTARETGLPPVRLDDRSRDIGLLLEAREALVHDATRSRNRLHAHLLVLAPGYGERIDRLVSGVALDRASRRLRGRPGLEAELARDLIAELRRLDGRVARLTRRLTMLVGPDPLLGLPGIGILTAARLIAETGDVRRFRSPDAFAALAGLAPIPASSGQIQRVRLSRGGNRQLNRAFYSIALTQVWHHPPAKAYVARKRAEGKTWREAMRCLKRQLVRTVFRLLQEGQLGLAEAA

SEQ ID NO: 183005 - protein, 581 aa, unidentified
MSKGTPLDHIGVGIDTARYGHRVSFLRPDRQPAAKPLTVLENQAGYQALQQRLQQLEQQHPHAHFDVRIDAAGQYAANLERFLRTLDLPMTLSIGEPKRNKDYQKAHFPKRTTDDTESQAMARFAVVEQPAATPPLPPPMVLLREVAGRLQAQVKQTTQAINRLHNLLARVFPELATIADDLAAHWVLQLLEQYPTAERIGQARLSSIEKIPYLPSDKAPVVHQAARQSVGSLRGHVAETLVRDLVAQVRHCVHAQQKMRQLLSAAFADLPASPHLQVVTIPGIGDATAAILVAMIIDIDRFPTPDHLVGYFGVFPEENSSGVDRYGNPLPLGTMRMSQKGNDLVRSYLWNAARAAICHNPAIRALYRRLKAKGKRGDVAIGHCMRKLLHLVFAVWKTNRPFDEHHFAWEQTAQTSMPTPTAPAASAATAASANDTAAGHKREIPAKQVVTTATSSVAPTAKPVNPPPPPTRSARPGVDYAFLRQQITLEQVLRHLGLFDQLHGRGQQRRGPCPVHARATDRKRTFSAHLGKNVFQCFHADRAAHGNVLDLWAAIHRLPLYDAALHLAQTFHLQRNREENP

SEQ ID NO: 183006 - protein, 451 aa, unidentified
MSDLPVLDPRAAFVDVGSEQMHVSVAGGPPQVFGAVTAQLHALRDWLEAQGVRSVAMEATGVYWLPLYGVLEAAGLEVRMVNGRQTRNLPGRKTDMQDCQWGATLHSHGLLRAGFVPPAHIRRMQDYMRLRADHISMAATHVQHMQQALERMNVKLHDVIAKLTGVSGLAVVRAILGGERDPQRLLALCDTQIQRAKAERVKESLRGTWTEEHLFALGQALQSWEHYQAQIAECDRRVEAVLHDIDPGQPPNARALAARPSRPGVNAPDIPDLRAILAQICGGQDLTQLPAHTEYGVLQVIAEVGTDLTKWRTEKHFTSWMGLAPGSHQSGKRKRSAKRSRNRAGRLFCVIARSLARSKDIALGGFYRRMAARRGGLVANIALARKLAALFWRVMVKGMDYVELGLQQYEAKVLETKQRSLRRLARQLGQQLVPMTIPVQTKGPSTNNATS

SEQ ID NO: 183007 - protein, 318 aa, unidentified
MPEPIHVGIDVAKDSLEVAFGAEATTRSFANEDDGHEALIIALNAHSVELIVMEATGGYETPCACALQAGGFAVAVVNPRQARDFAKAMGYLAKTDRIDAQVLAAFAAVLAKRPDREKVARALPSEEQQRLHAMVLRRRQLVQMLVAERNHLASSHRAARRSIEALIKAIRKQIVEIEGDLASHVARHHAEVAKLLQSAKGVGPNTCMVLIADLPELGKLSSREITALVGLAPFNRDSGTMRGKRTIFGGRAQVRCALYMATIVAMRHNRVIRTFYERLLVAGKPKKVAIVACMRKLLTILNAMVRTGKKWNETYHFA

SEQ ID NO: 183008 - protein, 346 aa, unidentified
MKVLIGVDPHKASLAVAAVDEAEGELLERASFPQNRAGLRALERWARRFPERRWAVENAGGLGRFLAGMLATSGESVVDVPPKLSARVRVLSSGNARKNDGLDALATALAASRNERLAAVDPQDSSEVLRLLSERREDLVAERTRALNRLHGLLRDLLPGGVTGTLSADRAARILRGIRPQSSSSRVRRRLASEVLGDVRTLDRKIADLNRRIEAELEASGTTLTEIFGVGPILAAKIIGTVGSVARFPSRGHFASYSGTAPVEASSGEVVRHRLSLAGNRHLNYALHMVAVCQARSDARGGTYYRKKLAEGKSRKEALRCLKRRISDAVFASLVADSQAHSRSAA

SEQ ID NO: 183009 - protein, 405 aa, unidentified
MPYILALDVSMGHSYSVLYKDDTCLFEDEIEHTQRGFHALLEEIQHLPERPLIVFEATGIYSRPVEKFFQDHHFSYCLLNPLEAKKQMEENTLRSWKTDKSDAHRLAQTHLKNQRQPKEVQSNFYLEMRDLARFYQEIEKKITRLRMDLHNCLQLTFPELEQFFSNRMTPYALTLIRLFPHPDFVLASTRTKIKNKLINETRKKISANRAEQKADQIIHYAHCAYPAVEKDSIHCQKTIYYAELLQDLLEQKKALATQMIKKAEASPCFLLYQTFPGIGALTAALLLGELGDITRFKTHKQLNAFVGIDIRRYHSGKYTGQDRINKRGNPKARKIIFFTIRNMIRQQRAAPNHIVDYYYKLKKQPIPKKDKVATVACMNKLLKCMHAMVRAHTEYDYAYAVSVDH

SEQ ID NO: 183010 - protein, 341 aa, unidentified
MEQATTIGLDIAKHVFQLHGADAAGHLLFRKRITRVKLLGFLAAQTRCVVAMEACAGAHYWAREIAKLGHHVRLIAPAYVKPFIKRQKNDAADAEAICEAAQRPSMRFVPVKTEEQQANGIVFRARDLLVRQRTQCVNALRGHLMEYGYVFPKGITHVETLIALVEDLQSSLPDSVRVILKLLIDTFTALEAQIAVLDAEINQRSKSDPTARRLMTIPGVGPIASTAITALVPAAEGFPAGRDFAAWLGLTPLQKSTGGKQKLGAVSKRGERTIRRLLIIGASAVVQQASRRGAPKGSWLAQMLARKPKMLVTVALANKTARIIWALLVKGGTYRTPAAAA

SEQ ID NO: 183011 - protein, 313 aa, unidentified
MECFVGIDTSQERLDVYVEPTREQFSHTNDSAGIAELVKRLKALSPTLVVIEATGKLEIPFMNEALEACLPVVVTNPQRIRDFARSVGQSAKTDTLDARIIAQFAEKVRPELKSLPDHDQQKLVELVVRRDQIVAMLAAETHRLHRVSPFMRTEIQQDVTYLMSRLNEITEQVQQLVRNHPVWKERRKLLESVPGVGPATSACILACLPELGRCSNRQIAALVGVAPFNADSGTRKGQRFIRGGRSRVRKALYMATLVALRYNPVLSAFYTRLITAGKRKKVALVACMRKLVVILNTMIRHQQPWRTQTATQT

SEQ ID NO: 183012 - protein, 424 aa, unidentified
MKVTYQTCCGVDVHKSFLVATIVKTTGGIEPSYQKKRFSTFNNSILAFKQWLLDNDCRDVCMESTGKYWVPVFNLLEDEINVVIANPKWVKAVKGNKDDTKDSKWIGDLFRLGLVKGSYIPCKAIRVLREYTRYRYKLVSCRSSEKNRYQNALTVCNVALDSVVSDIFGKSSTSIIDYLLEQSGTSINHEEIASKLLRSLKSKEDAVIESVEGYQMTDAQKYRMRLVRAHMDYITAEINDVDKMIENMISSNPDFENAVQFLCTIPGVKRDSAITIISEIGTDMSQFGRAKRLCCWAGLTPGSNESAGKKKSVRITRAGVYLKPALVQCAHAAVKSDKSPYYKKKYESLVKRRGKKRAIIAIARMILTAIYQMLSTGEQWNPSDLYKIDMPVALVEKQKAKAIKQAKKLLQQEGILPPNEPLAS

SEQ ID NO: 183013 - protein, 340 aa, unidentified
MNHYVGIDVSLEASSLCVVDANGKIAREGKVASEPDALIAWLRRLKLELTRIGLEAGPLSQWLYAAMRQAGLAVELLETRHVHTALETMPVKSDRNDARGIAQLMRLGWFRPVHCKSMAAQETRALLTARKLLQTKLHDLELSLRGILRGFGLKVGPTTPARFAERIRELVAGHPSLEVIADGLLAARGALRREFDRFEKQVRDAARCDTRARLLMSIPGVGAIVSLTFTAAIDDPARFKSSKQVGAYFGLTPTKYQSGETDIDGRISKIGDAWVRAALYEGAHIILTKPLKGCTALKSWAMKIARRSGMKKAKVALTRKLAVIMHRMLADGTSFRNAAA

SEQ ID NO: 183014 - protein, 343 aa, unidentified
MQTITTIGLDIAKSVFQVHGVDAAGQVVIRRQLKRRYVLAFFQKLPPCLIGIEACASSHYWSRELQALGHTVRLMPPAYVKPYVKRQKNDATDAEAICEAVARANMRFVPTKTPAQQSCLMLHRTRHLFIRQQTAVINSIRAHLAEFGIVAPVGRKGVTELLHIVADPSDKRVPEVARACLAALGNQLLSLKEQIVEFDRMIMVWHRSNETSKRLHYIPGVGPMLATALVASVADPRTFRSGRNFSAWIGLVPKQHSSGGKDRLGSISKQGDRYLRSLFVAGALAVIRYAKMHGTKHRPWLTALLTRRPTKVAAIALANKLARMAWAMMARGERYRQPVALAA

SEQ ID NO: 183015 - protein, 427 aa, unidentified
MTRISVGVSKNRSTVCIMDQDGKVIMRPFLVWHSTEELDFLADTLKRLNGEVRVIMESTSIYQYPIALQLKERGLFISIVNAYEMKQFANIDFRGGKTDKKDSRTIASYGISYWYKLVEWQIPKDTYFNLDLLNRTYMNAKKHRQIILQELQHYIDCAMPGMDKELHSLNLNTKKDFMLDFVEKFWHRDEIVNMTEAEFTEVFTAWAKKKGYRPVEGKAAKIYAIAKSCIPYYPANPTVKTILQCIVDKLSGVNRTLVTIVTQMIEEAKKLPEYQIVREMPGVGDPLAARFFGSAGDIRRFKNSKALVAYAGIDSPPDESGDFSSTHRHITKKGSKVFRDTGYEIMMALRAQKRTWEKVRKNPEVYDYMLKKEAEGKPRKVAKIAALNKFLRIVYARIKELYDNMALAERAKAKTRSKTKAKTKATA

SEQ ID NO: 183016 - protein, 349 aa, unidentified
MRKCSTVSFEGQVIFVGIDVHKESWVVNLRHCRRELDKFSMNPSPEMLAKYLKKNYPGAEYRSVYEAGFSGFWAHRQLCGLGIKNIVINPADVPTSGKERDRKNDAVDSRKLARELENRTLEGIYIPPEDNLELRNLVRRETKLTGNITRVKNRIKGHLNFMGLKFGSWSGSSLKMMYADAAKRYDYALQSMLRELRFLREEKLHVIRDERRCLKRLKRDKVQEHLQSIPGVGFHTAVMLQAELWDLLRFEDKDALSSYVGFAPRLVGSGEHEAVKSAGNRKKKQLHAILIQAAWRSVSYNLETRARYGALLHKGASPQRAISIIAKKLLYALRAVWLQERDYVVPASE

SEQ ID NO: 183017 - protein, 404 aa, unidentified
MELTAVYRCVAALDVHQAKLTVCVLYENDRGEVVTEVREFGGFKRDRREMAAWVASFHPEWVVMESTGIYWKSPYAALEWYGLNLAVVNARHVKQVPGRKTDINDAQWLAILARSGLLRGGFVPPQHFRDYRLIARQLQKLTGIAAGEKTRLHKLLTDAGIRLSVVISDLSGKSAKAMIQGLLDGETPEQLVAHADPRLKATPDELREALAGELSNSHRFVIRELMAHLDELEARIARFRQTLLSHLSDYQGILQNLQTIPGIDELSAAMLLVEIGDDMSAFGSADKLASWAGVCPGQNESAGKRKSARTRKGNPYLRRILCEAANAASRTRCRLQDKFKALLIRRGRKRAIFAIAHKLLKIVFLLIQRGDYYRDADTDYEALTVQRNAPRWIKKLIQYGYITP

SEQ ID NO: 183018 - protein, 314 aa, unidentified
MRLAYSEGLGFFCERIDIRKISLESSAVEKIGNSEFQQKAPNYYNFDVIISISLSDEMTIKATTKAVIKYLEAIKKKHREEILFACGYEAGPTGYGLCRGLQKAGYGCVVMAPTTMSNPDGKRRVKTDRIDARAIARILAYKSYSQVHLPSEEMEALKEYTRARDAKKRMFKKAKQELLSFLLRNGKSYPESGNYWTEKFFKWVKTVQFSEKWMQEAFNEYLAEVYSLKAKIELMDMKIREIAELEIIKDKVDKLVCFSGIDVTTAVETAVEIQDFTRFATAAQFVSYLGLCPGEDSSGRLRICFRSRKRGTSA

SEQ ID NO: 183019 - protein, 409 aa, unidentified
MVLVGVDWAEAQHAACLMEPDGTVVRRLTIPHSAAGLARLREAIATVEPEPAEVLIAVERPDGLLVEALLDAGYGVYALNPKAVDRYRERTRVAGGKTDPADAELLARILVTDRDRHQPLRPSSPMVEEIRVLARQDERASRDQRRLLNRLRHDLLAVFPAALDAFPELTAISALAFLERWPTAAAARDQDRAAIEAFLRQQFHSQARAAAGRIHAALQAEALTAPPHLAAARAGAIQLAARQLLLLHRQRAAWEKRLRELLDGDGAHPDGEVLLSLPGLDARLAARVLGEIGDRRERFPTPAALQCYAGTAPTTKASGRSRVVVARGACNRFLRQALLRWAFCSLPRSAWARTFYDAQRAAGKGHFKAIRALANRWLEILHHLLATGQRYDEAVHQRNRARATRPAAA

SEQ ID NO: 183020 - protein, 385 aa, unidentified
MQQLNDLSRSLTPLKPDGTLIAVIEMSLSSWLVAGIVPGVERQRLKKLEVDEGALLKLLNRWREEARKAGHRIERIAVAFEAGRDGFWLARWLRARDIEAHVIHASSVAVSREHRRAKTDRLDTELLKRAFLGWLRGESDHCKMVAIPTIKDEDAKRPNRERESLVGEQSRIVNRMKAALIRLGIRGFNPKLKKAAERLDGLRTPEGEPIPPNTLAELRRDMMRRRLVSDQIRQIEDARLERLKQAPSDGPHAMVRLLARVVGVGVETADMLVQEVLSRNMRDRRAIARYAGLTGSPDESGRKRREKGLTRSGNARVRRGMIELAWRFLRFQRDSVLAQWFRTRTENARSTRKTMIVALARKLLIALWRLVREGVVPDGVVLRPA

SEQ ID NO: 183021 - protein, 344 aa, unidentified
MQITTIGLDLAKHVFQVHGVDAQGQIVVRKRLRRAEVLAFFAKLPPCLIGMEACATAHHWARELIKLGHTVKLMPPSYVKPYVRRGKNDATDAAAICEAVTRPSMRFVPVKSADQQSVLMLHRVRALLIRQRTMLINALRAHLAEFGIAVAQGVRPLAALIETVVGSDREMTEIPPLAHTALEPLVAQLRDLQPRIKALEAELLAWHRQSEESRRLETIPGVGVITATAIAATVTDPAHFRSGREFAAWLGLTPRQNASGGTARLGRISKMGDGYLRTLLVVGATAVMRYARQKTAASTNWIHSLLATKPARLVAVALANKTARIAWALLARKEVYRLARPAAA

SEQ ID NO: 183022 - protein, 450 aa, unidentified
MSPLALDVVTKTDKTPVLGRMLSKYVGRKTSSIENGITKARNHLRQRGKIMRVVFGIDVSKASSEVAILVNGEKVHGYTIPNDAIGFNRLLGDLKTVHQPEIVFEATGVYSRRLQAFFEDNSYTYTRLNPLESKKQLDSLRVRKTDKIDAEKLAMSQFILNRKPSYVQEALYQELRDLSRFYQNLTEDIVCAKNRLHKVLQITFPELENILSAPTGEQYWNLVITFPCNSFVLESDDATLTATIRQSTAKRISEKRVTYLVDKLTKLANQSYCAVKKTSPVIEEVKYYAGELLRLSEHRQGVVEEMVTLAQSLPEYEILLSIPGIAETTATSIIGELGDIRRFHSANQINAFIGIDLRHYESGNFLAKEHITKRGNPYARKILFKCIHNIASASHTNPCHIADFYEKRKRQSQVTSTKPHTIASIHRLIRTMYYLITHNKLYDYTSTQNR

SEQ ID NO: 183023 - protein, 349 aa, unidentified
MTDRHLSYIGRIVYVGVDVHKETYTVTCVCNKQIVKTATVQADPAGLAASLLRWFPGATLYSAYEAGFSAFVLHRALTTAGITNIVVNPASVAVAANDKVKTDRRDAKKLAIDLADGRLRGIYVPTEEEELARLLPRTRAQIVEHRATIARQIKAKLHQFGLIAPASRRMISNRYLREIAAWSLPPELRVSLTLLAEQWRFATRQLIEIRRLLREQAAAQADLETVYRSVPGIGAVVARTLATELGDMTRFANERALFSYTGLTPSEYSSGPSVRRGHMSRQGSGRVRHVLIETAWRALPRDQVLQEIFDRIAATRGKKRAIVAIARRLTGRIRACFRHGTTYAVGTYA

SEQ ID NO: 183024 - protein, 316 aa, unidentified
MVPSPLFVGIDVAKATLDIAVRPTAETWSVSNDATGIDALVLRLGALAPTLIVLEATGGYQGPLVAALVAAALPVVVVNPRHIRAFAQAVGILAKTDRIDARVIAHFAEAVKPAPRPLPDAETQELRALLVRRRQLVEMVSAERARLDTVPPSIQDAIQAHIAWLTTQIAGLDDALTRASQTHPVWQAKDDVLQSIPGVGPVLARTMLGQVPELGTLGPKPLAALIGVAPFNRDSGTLRGRRTVYGGRAEVRAVLYMGALVATRHNPVIKTFYERLLAAGKAKKVALTACMHKLLTIMNAMVRDLKPWQPQEVPSA

SEQ ID NO: 183025 - protein, 444 aa, unidentified
MARKITRRLMIVHPECAGIDIGGSRHYVAVDPQRSEEPVRSFGSFTDELQAMGQWLHECGVKVVAMESTGVYWIPVYEVLERMGLEVQLVNPRATKQVSGRKSDVLDCQWLWQLMSYGLLRGAFRPAEAVCELRSYVRQRARLVREQATSVQHIQKALTQMNVQLANVLSDVTGKTGLKILRAIVAGERDGAKLAALRDGRVKADEQTIARSLVGTWRAEHVFALSQALARHDFYAQQIAQCETCILDTSAALSLDTHIAPEASARPARSAWDKRMRATLHATLGVDLTAIPTIGIETALTVASEVGADLSRFPSCAHFCSWLHLAPGTRISGGKPLPGRGPSSVNRLGQALRVAAATARTSHSFIGASHRARLARLDKPRAIKATAHQLARLIYALLTRGEAYVEKGIAHYEAVRRDKHLRALQRNARRLGFTLVEQPIQSVT

SEQ ID NO: 183026 - protein, 379 aa, unidentified
MKKDYYVGLDVHKETIAIAVTFSGSRAEPAYHGECGGTNLALERALRKLAAKLGVSHKTFQVCYEAGPTGFVLARRLLHLGIRCTVISPTQTERKPNDRVKTDRRDAIRLAKLLRNGDYTEVRVPPARDESVRDVCRARTDASDDLSRAKQRLGSFLLRNGFRYSGRARWTPAHLRYLRELVLPDPAQNIVLEEYLLAIDSGYERVERLAAKLKDLLTDWEWEPVVRALMACRGFQEVAAMTVVSELGDLRRFEHPRKLMAYLGLVPGEHSSGSKRSQGSITKCGNAHARWMIVECSQHYRKAPKVGAPLTRRQEGQPSQVKALSWRMQQRLHKRYVKLKMRGKRESKAIIAIARELCGFLWELQNKLSLPMPDAPSVR

SEQ ID NO: 183027 - protein, 416 aa, unidentified
MSGKREIACGVDVHNKFIVATILSSDGLKLQNRFETCLEDLLKFKNWLKEKGCHKVALESTGNYWLPIYHVLEGSVNFILANAYQIKHIPGRKTDSLDSEWIAELCLKNLISPSRIFTKDHRELRSLTRARESLIKIRTKIKNRVTHELEAACIKLSSVIADVFGKSGRHIVDGLINGMDLEKILESIPSGRVRKNKEEIRGIIQANLSPSQIFLLRSHLNMIDAVTEQIGEIDAKILDQISPRNEDMKIALSMPGMGFISASTILAEIGDFRDFSSANKLAAYCGLVPSVYQSAGKLINGHITKHGSPHIRRIIIEVAHAIILTKKLSKLKKFFLRIKARRGAKIGIVALARKVLCILYHLLVRRELYQDDLLSKPRCIKNPRLHPKTAMDLDEMIRTIIKAGYEVRKNECLESG

SEQ ID NO: 183028 - protein, 356 aa, unidentified
MTIVAHSRPYVVGVDTHARTHTFAILAAGTGELVATEQFPASTSGMARAIAWAARRTDGDLATLWVIEGVATYGARLAAAASQAGYEIVEAARMDARAHRGAGKSDPLDARRIAAAVLSLEPVALRRPRSDDGVRSALRTLVTAREHMTTERTATINALIALVRVVDLGIDARKPLTAHQVSQIVRWRARTEDLATGIARAEAVRLAKRVSDLDQDLRANQNQLTDLIRSSKAATLLDKTGIGPVTAAIVLAAWSHSGRVRSEAAFAALAGVNPIPASSGNTVRHRLNRGGDRRLNRALHIAVITRMTHDLNTRAYVERRRAEGRTIKEIRRCLKRYLARHLYRTLNALHTQPETT

SEQ ID NO: 183029 - protein, 434 aa, unidentified
MSLDKINPHCAGIDIGSDSIFIGIEEKEVASFGTFTDDYLKAIAYLKEHNITSVAMEATGVYWITLFDMLEGAGITVTLVNGKQVKYLPGRKSDVADCQWLQQLHSFGLLRPCFIPDEITRQLRSYTRLRADHLSMASSHIQHMHKALTLMNIKVQNVISQVHGVSGMRIITAIVLGERNVERLADLCERSILKTKRARVVASLKGNFKQEHIFALKQALSAYDFYQKQITECDKQIESLLTQHTDRLPTPPKITPPKNTRHNAPKIDELHTKLMKMTGGNDPSQITGLTDKTLLELLAETGTNLEAHWKTEKHFSSWAALSPTMHQSGKTNKRRKIKKNSRAGQIFRQAALSIANSKHSAFSAFYKRLKAKKGFRHALKATARKLAVIYYRIMTKGLTFVEQGIVLYQQRFKEQQLRLLQKKAKSLGFQLVQA

SEQ ID NO: 183030 - protein, 347 aa, unidentified
MQQVSRIGMDTSKQIFQLHGVDAAEAPVLRKKLRRKEMIKFFEGLPPTQVGVEACASSHHWARLLQSFGHEVKLIPPQFVKPYVKRNKNDAADAEAICEAMSRPTMRFVPVKTAEQQAALMLVGVRERLVRNRTQLSNVIRGYAAEFGITASKGLIRIEQLLERVATDDTLPTLTRELFALHGKEYTQLDAQLEQIEGRLMAWHRADACSQRLAQIPGIGPIGASMLVMKTPAPETFRSGRHFAAWLGLTPKDHSTAGKSRLGGITRAGDEALRSVLVMGSTSVLRRVRQRGTGSPWLIDLLKRKPPKLVAVALANKNARIAWKLMVSGERYRPAKPITGLNSPQAV

SEQ ID NO: 183031 - protein, 361 aa, unidentified
MDPSEQQPMTTAGLDLGDKYSYLCLIDSQSGEVIEEGRLRTSPEAFRRRFSSEQPPMRIAIEAGTHSPWASRVLEECGHEVLVANARKLRLIYVNKRKTDEVDAENLARLARVDPKLLYPLKHRGEESQAHLAIVRARQALVGARTQLVNHVRGAVKSFGARLPKCPARSFHNKAPEHIPEALLPALGPVLEQIGSLTERIKDYDRKLETISEDHYPETKLLRQVEGIGPLTALTFVLTVEDPHRFKKSRAVGAYLGLVPATDRSGDSDPQKRISKEGDEMLRKLLVGSAHYVLGPFGKDSDLRRHGEKVASRGAKNAKKRAVVAVARKLCVLLHRLWVTGEVYEPLYNTHRRQEQQEAAA

SEQ ID NO: 183032 - protein, 341 aa, unidentified
MAHFYVGLDIHWKHTTVCVLDGNGKRVKRLTLRGSWTKIAEELKQFSGKVSVCFEASTAYGYLHELLSAVAERVVVAHPGQLRLIFRSKKKNDRADAEKLAKLLFLGEVPTVYVPSQDVRAWRQLVEYRRRLIAKRTRTKNALRAILRTVGQQPPREFGLWTRLGAAWLAQVELPQLTALQRDLLLEELAMFERQVGRAEKELERYSRDNPAVALLRTIPGVGIRTAEAVAAYLDDPSRFASSKQLGSYFGLVPAQDQSGSINRLGHITRSGPSVVRHLLSEAAWRSIQCSPTIGRFHERIQQGNPERKKVALVATAHYLVRVMYAMLRDNRPWEEQVVAA

SEQ ID NO: 183033 - protein, 410 aa, unidentified
MGYETLIRRAHVMTRKNTLKSLPTDTEFRVVGLDLAKSDVSVAAIPVDDNTPSLVDRMTYADLLDWAGKISPTLFAMEPCNGYSLLCLQLENLGHEIKVISGWTVSMWINTHLSGQKTDLNDAIALARLAVSDAELTPIRHKSITEIRIQTVQAVRQQLMSQRSKSIVSFKALAQQWGIPCAAGHRNLKKLRESIEAKVDLITRPVANAMLFLLDAVKSLDRQIGQLNQTLQELVMSDERGRLLQSVLGVGTQISARVITVVGNIERFNSPRSLVAYVGVAPRNFITEHKNLTKKKHGNCPDLSHKGQGKISRRGDKLLRSLFIQGAACLYMQFCKDQLPECQLKRWILKQLASQKPYGKLIVSLAAKLIRIVWAVLTYGEKFNIQKAGMTRSMWSEMALETPLNKEVPA

SEQ ID NO: 183034 - protein, 441 aa, unidentified
MDVPVAETSDAHACRAKETSLPPTVAEATDDTPACSKAQVARRLGAQGRLVMRSVGLDLGVRHIAYCEVVDGKVVSRATVKSLSQLESRLGPASPPARVAFEACREGWHVYDKLKAWGNEPHMLDTTRIRQLGVAQHRRKNDPIDAEVIAQALDTGRIAEAHVLSPERRKLRAQLSVRGALIETRSQYVTTIRGLARAAGILLPACKTENFPRTVDAAKLDEETKTLIAPLMTVLRSLETELAVVEELLARMAQADSILQLCATVPGVGLIVAATFVSVIDDARRFKNAHAVGAYLGLVPSETTSGGPDKRRLGSITKQGNRMARAMLIQSAWTILRLRDTSDPLKRWAEGVAKARNKRIAVVALARKLAGVLWAMWRDGTVYDPKTEAQAAAHGVRVAARQHERRADALERAARKLRREPKMLAPAKSPKRRKTSQEIAM

SEQ ID NO: 183035 - protein, 345 aa, unidentified
MEQISRIGMDTSKHFFQLHGVNAAEKVVLRKKLRRKEMVAFFKALAPTVIGIEACGASHHWARILRSFGHEVKLIAPQLVKPYVKRGKNDTADAEALCEAMSRPTMRFVPVKTAEQQAALMMVALRDRLIRNRTQLSNAIRGYAAEFGFTAARGIAHIDPLLDRIQADENVPVLARELFAAQAEEYAQLQAQIAEVDAKLMAWHKADECSRRLAKIPGVGPIGAALLMMKTPAPEMFRSGRQFAAWIGLTPKDHSTAGKVRLGVITRAGDEALRSVLVVGATAVVQQVRRGGRGSPWIVDLLKRKPPKLAAVALANKMARIAWKLMVTGNSYAAKSAPAALMGAA

SEQ ID NO: 183036 - protein, 346 aa, unidentified
MEHYAGIDVSLELSSVCVVDAQGKIVKEAKVASDAEDLIAFFASLGFAMTRIGLEAGPLSQWLQSGLKCAGLEVVLLETRHVKAALSAMTVKTDRKDARGLAQLIRMGWFRPVHAKSMGSQEVRALLVARKQLLGRLIDVELSIRGILRGFGLKIGLVTRKGFEARVRLLVTGQATLEHITRAMLSARAVLRVEYEKLHKSVLAMVREDAVCRRLMTVPGVGPLVAMTYKSAIDDPSRITKSKAAGALFGLTPKKYQSGEKDITGGITRTGDEMVRTALYEAANVLLSRITRFSKLKRWGLDVAKRRGSKRAKVALARKIAVILHRMWIDGTTYRWSEAQLMATQA

SEQ ID NO: 183037 - protein, 345 aa, unidentified
MQTITTVGLDIAKSVFQVHGVDAQGKVIVRRQLKRRYVLAFFQKLPPCLIGIEACASSHYWSRELQALGHTVRLMPPAYVKPYLKRQKNDSADAEAICEAVTRTNMRFVPTKTVEQQSCLMLHRTRHLFIRQQTAVINAIRAHFAEFGIVAPVGRTGVEELLKIASDGNDKRLPDVARVCIAALGAQLQMLKARILEFDRLIMAWHRSNQVSKRLDELPGVGPALATALVASVADPKAFRSGRDFSAWIGLVPKQNSSGGKNKLGGISKRGDRYLRSLFVAGALAVIRYAKKRGSKNRPWLAALLARKPTKVAAIALANKIARMAWAMMAKGERYKQPVALAAAW

SEQ ID NO: 183038 - protein, 402 aa, unidentified
MRNSVFVGLDWAYRSHAVCVVDAQGSVLKHLTISHDAQGLGELRHALAAFGKALPIAIERPSGLIVDALVEAGHQVFAIHPNAVKASRPRYRSTNAKSDAGDAFMLADLLRTDGHRWHALQPQSAAIRGLRALVRTRDDLVATRVRLANQLTALLDAYWPGATCIFAAVDSPIALAFIEQWPTARKLTARQIAAFCKRQGYSGRRSPGVLLDRLQAAAPSLCEPMLAQAYATAALALVALLKPLAAQIKSLDGHIARTMAALPQAISVMSLPRAGCICAAQILAELGDVPERFASAEQLCSEAGVVPVTYESGKSRAVTFRWACNHRLRRAITCLADNSRHASPWAASVYQAARKRGCDHPHAVRILARAWTRVLWRIWTDGTEYNPAIHSSACRIENTQAG

SEQ ID NO: 183039 - protein, 341 aa, unidentified
MGQASTIGLDIAKWVFQAHGADATGRVVFRKRLVRAKVLEFFAGQPPCLVALEACGGAHYWARELGKLGHTVRLIPPAYVKPFVKRQKNDVADAEAICEAAQRPGMRFVPVKDEAQQANTVVFRARDLLVRQRTQCINALRGHLAEYGHVVPQGPAHVDSLVALVEDPKSSVPESARGILQVLIRMLNALEEQLNELDGEIARRAKADPVARRLMTIPGIGPIAATAITALVPAPEGFRAGRDFAAWLGLTPLQRSTGGKHKLGAISKMGERTIRRLLILGASAVVRWASRRGAAAGSWLARMLARKPRMLVTTALANKMARIVWALLVKGGTYRAPAVAA
